United States Patent Application Publication US 2026/0193644 A1 - sequence listing, part 10

SEQ ID NO: 24053 - protein, 646 aa, Homo sapiens
MANVPWAEVCEKFQAALALSRVELHKNPEKEPYKSKYSARALLEEVKALLGPAPEDEDERPEAEDGPGAGDHALGLPAEVVEPEGPVAQRAVRLAVIEFHLGVNHIDTEELSAGEEHLVKCLRLLRRYRLSHDCISLCIQAQRQGFTMLPRPQVIRLRWPPKVLGLQNNLGILWSEREEIETAQAYLESSEALYNQYMKEVGSPPLDPTERFLPEEEKLTEQERSKRFEKVYTHNLYYLAQVYQHLEMFEKAAHYCHSTLKRQLEHNAYHPIEWAINAATLSQFYINKLCFMEARHCLSAANVIFGQTGKISATEDTPEAEGEVPELYHQRKGEIARCWIKYCLTLMQNAQLSMQDNIGELDLDKQSELRALRKKELDEEESIRKKAVQFGTGELCDAISAVEEKVSYLRPLDFEEARELFLLGQHYVFEAKEFFQIDGYVTDHIEVVQDHSALFKVLAFFETDMERRCKMHKRRIAMLEPLTVDLNPQYYLLVNRQIQFEIAHAYYDMMDLKVAIADRLRDPDSHIVKKINNLNKSALKYYQLFLDSLRDPNKVFPEHIGEDVLRPAMLAKFRVARLYGKIITADPKKELENLATSLEHYKFIVDYCEKHPEAAQEIEVELELSKEMVSLLPTKMERFRTKMALT

SEQ ID NO: 24054 - protein, 1845 aa, Homo sapiens
MSDTKVKVAVRVRPMNRRELELNTKCVVEMEGNQTVLHPPPSNTKQGERKPPKVFAFDYCFWSMDESNTTKYAGQEVVFKCLGEGILEKAFQGYNACIFAYGQTGSGKSFSMMGHAEQLGLIPRLCCALFKRISLEQNESQTFKVEVSYMEIYNEKVRDLLDPKGSRQSLKVREHKVLGPYVDGLSQLAVTSFEDIESLMSEGNKSRTVAATNMNEESSRSHAVFNIIITQTLYDLQSGNSGEKVSKVSLVDLAGSERVSKTGAAGERLKEGSNINKSLTTLGLVISSLADQAAGKGKSKFVPYRDSVLTWLLKDNLGGNSQTSMIATISPAADNYEETLSTLRYADRAKRIVNHAVVNEDPNAKVIRELREEVEKLREQLSQAEAMKAPELKEKLEESEKLIKELTVTWEEKLRKTEEIAQERQRQLESMGISLEMSGIKVGDDKCYLVNLNADPALNELLVYYLKDHTRVGADTSQDIQLFGIGIQPQHCEIDIASDGDVTLTPKENARSCVNGTLVCSTTQLWHGDRILWGNNHFFRINLPKRKRRDWLKDFEKETGPPEHDLDAASEASSEPDYNYEFAQMEVIMKTLNSNGGFPIISLSAWWSSPWWSYLKILFPLMWFQTKLLHKHWDKDPVQNVVQVLEKQYLEEKRSALEEQRLMYERELEQLRQQLSPDRQPQSSGPDRLAYSSQTAQQKVTQWAEERDELFRQSLAKLREQLVKANTLVREANFLAEEMSKLTDYQVTLQIPAANLSANRKRGAIVSEPAIQVRRKGKSTQVWTIEKLENKLIDMRDLYQEWKEKVPEAKRLYGKRGDPFYEAQENHNLIGVANVFLECLFCDVKLQYAVPIISQQGEVAGRLHVEVMRVTGAVPERVVEDDSSENSSESGSLEVVDSSGEIIHRVKKLTCRVKIKEATGLPLNLSNFVFCQYTFWDQCESTVAAPVVDPEVPSPQSKDAQYTVTFSHCKDYVVNVTEEFLEFISDGALAIEVWGHRCAGNGSSIWEVDSLHAKTRTLHDRWNEVTRRIEMWISILELNELGEYAAVELHQAKDVNTGGIFQLRQGHSRRVQVTVKPVQHSGTLPLMVEAILSVSIGCVTARSTKLQRGLDSYQRDDEDGDDMDSYQEEDLNCVRERWSDALIKRREYLDEQIKKVSNKTEKTEDDVEREAQLVEQWVGLTEERNAVLVPAPGSGIPGAPADWIPPPGMETHIPVLFLDLNADDLSANEQLVGPHASGVNSILPKEHGSQFFYLPIIKHSDDEVSATASWDSSVHDSVHLNRVTPQNERIYLIVKTTVQLSHPAAMELVLRKRIAANIYNKQSFTQSLKRRISLKNIFYSCGVTYEIVSNIPKATEEIEDRETLALLAARSENEGTSDGETYIEKYTRGVLQVENILSLERLRQAVTVKEALSTKARHIRRSLSTPNVHNVSSSRPDLSGFDEDDKGWPENQLDMSDYSSSYQDVACYGTLPRDSPRRNKEGCTSETPHALTVSPFKAFSPQPPKFFKPLMPVKEEHKKRIALEARPLLSQESMPPPQAHNPGCIVPSGSNGSSMPVEHNSKREKKIDSEEEENELEAINRKLISSQPYVPVEFADFSVYNASLENREWFSSKVDLSNSRVLEKEVSRSPTTSSITSGYFSHSASNATLSDMVVPSSDSSDQLAIQTKDADSTEHSTPSLVHDFRPSSNKELTEVEKGLVKDKIIVVPLKENSALAKGSPSSQSIPEKNSKSLCRTGSCSELDACPSKISQPARGFCPREVTVEHTTNILEDHSFTEFMGVSEGKDFDGLTDSSAGELSSRRSLPNKTGGKTVSDGLHHPSQLHSKLENDQVIIPEAAFWVLCCQ

SEQ ID NO: 24055 - protein, 450 aa, Homo sapiens
MADVLSVLRQYNIQKKEIVVKGDEVIFGEFSWPKNVKTNYVVWGTGKEGQPREYYTLDSILFLLNNVHLSHPVYVRRAATENIPVVRRPDRKDLLGYLNGEASTSASIDRSAPLEIGLQRSTQVKRAADEVLAEAKKPRIEDEECVRLDKERLAARLEGHKEGIVQTEQIRSLSEAMSVEKIAAIKAKIMAKKRSTIKTDLDDDITALKQRSFVDAEVDVTRDIVSRERVWRTRTTILQSTGKEGASARKTQTPAAQPVPRPVSQARPPPNQKKGSRTPIIIIPAATTSLITMLNAKDLLQDLKFVPSDEKKKQGCQRENETLIQRRKDQMQPGGTAISVTVPYRVVDQPLKLMPQDWDRVVAVFVQGPAWQFKGWPWLLPDGSPVDIFAKIKAFHLKYDEVRLDPNVQKWDVTVLELSYHKRHLDRPVFLRFWETLDRYMVKHKSHLRF

SEQ ID NO: 24056 - protein, 1647 aa, Homo sapiens
MMMMMMMKKMQHQRQQQADHANEANYARGTRLPLSGEGPTSQPNSSKQTVLSWQAAIDAARQAKAAQTMSTSAPPPVGSLSQRKRQQYAKSKKQGNSSNSRPARALFCLSLNNPIRRACISIVEWKPFDIFILLAIFANCVALAIYIPFPEDDSNSTNHNLEKVEYAFLIIFTVETFLKIIAYGLLLHPNAYVRNGWNLLDFVIVIVGLFSVILEQLTKETEGGNHSSGKSGGFDVKALRAFRVLRPLRLVSGVPSLQVVLNSIIKAMVPLLHIALLVLFVIIIYAIIGLELFIGKMHKTCFFADSDIVAEEDPAPCAFSGNGRQCTANGTECRSGWVGPNGGITNFDNFAFAMLTVFQCITMEGWTDVLYWVNDAIGWEWPWVYFVSLIILGSFFVLNLVLGVLSGEFSKEREKAKARGDFQKLREKQQLEEDLKGYLDWITQAEDIDPENEEEGGEEGKRNTSMPTSETESVNTENVSGEGENRGCCGSLCQAISKSKLSRRWRRWNRFNRRRCRAAVKSVTFYWLVIVLVFLNTLTISSEHYNQPDWLTQIQDIANKVLLALFTCEMLVKMYSLGLQAYFVSLFNRFDCFVVCGGITETILVELEIMSPLGISVFRCVRLLRIFKVTRHWTSLSNLVASLLNSMKSIASLLLLLFLFIIIFSLLGMQLFGGKFNFDETQTKRSTFDNFPQALLTVFQILTGEDWNAVMYDGIMAYGGPSSSGMIVCIYFIILFICGNYILLNVFLAIAVDNLADAESLNTAQKEEAEEKERKKIARKESLENKKNNKPEVNQIANSDNKVTIDDYREEDEDKDPYPPCDVPVGEEEEEEEEDEPEVPAGPRPRRISELNMKEKIAPIPEGSAFFILSKTNPIRVGCHKLINHHIFTNLILVFIMLSSAALAAEDPIRSHSFRNTILGYFDYAFTAIFTVEILLKMTTFGAFLHKGAFCRNYFNLLDMLVVGVSLVSFGIQSSAISVVKILRVLRVLRPLRAINRAKGLKHVVQCVFVAIRTIGNIMIVTTLLQFMFACIGVQLFKGKFYRCTDEAKSNPEECRGLFILYKDGDVDSPVVRERIWQNSDFNFDNVLSAMMALFTVSTFEGWPALLYKAIDSNGENIGPIYNHRVEISIFFIIYIIIVAFFMMNIFVGFVIVTFQEQGEKEYKNCELDKNQRQCVEYALKARPLRRYIPKNPYQYKFWYVVNSSPFEYMMFVLIMLNTLCLAMQHYEQSKMFNDAMDILNMVFTGVFTVEMVLKVIAFKPKGYFSDAWNTFDSLIVIGSIIDVALSEADPTESENVPVPTATPGNSEESNRISITFFRLFRVMRLVKLLSRGEGIRTLLWTFIKSFQALPYVALLIAMLFFIYAVIGMQMFGKVAMRDNNQINRNNNFQTFPQAVLLLFRCATGEAWQEIMLACLPGKLCDPESDYNPGEEYTCGSNFAIVYFISFYMLCAFLIINLFVAVIMDNFDYLTRDWSILGPHHLDEFKRIWSEYDPEAKGRIKHLDVVTLLRRIQPPLGFGKLCPHRVACKRLVAMNMPLNSDGTVMFNATLFALVRTALKIKTEGNLEQANEELRAVIKKIWKKTSMKLLDQVVPPAGDDEVTVGKFYATFLIQDYFRKFKKRKEQGLVGKYPAKNTTIALQMLERML

SEQ ID NO: 24057 - protein, 797 aa, Homo sapiens
MSVSDTPHYPPELESVSHPVQRDCLGLLVHAQRTPSWPPSPDEDPRLPSFPLEEPGSRPLVPRNLPFPALSLEEEEEEEEDEDAAEPEWLRSEEHPSQFFAEAQRLREQRLLLDEEVSVAGRVYGVHRVILAAISSLFRDRLLGGGGPRPPFSLEVSPGGWEAVLTFAYEGVLGPASQGDVLAAAEALGAPRVKAAAQQTCERAGNAREDVKKPSQAEELRENLRGIELLYREGVGCDLKLEAGGCQLSVHRAALACGSEFFGAMLLSGMRESQGTEVSLRTISTQDLRLLVSFAYSGVVRARWPGLLRAAQAALQYQSSSCLDLCQKGLARGLSPARCLALFPMAEAPGLERLWSKARHYLLTHLPAVALCPAFPSLPAACLAELLDSDELHVQEEFEAFVAARCWLAANPETQESEAKALLRCVRFGRMSTRELRRVRAAGLLPPLTPDLLHQLMVEADVPGQERRREPDRALVVIGGDGLRPDMALRQPSRAVWWARAFRCGVGLVRTVEWGQLPALPAPGRFRHGAASLAGSELYVCGGQDFYSHSNTLASTLRWEPSQEDWEEMAPLSQARSLFSLVALDGKLYALGGRHNDVALDSVETYNPELNVWRPAPALPAPCFAHAAAILEGQLYVSGGCGGTGQYLASLMHYDPKLEKPGTFLSPMGVPRAGHVMAALGGRLYVAGGLGETEDLLSFEAYELRTDSWTHLAPLPSPHVGAASAVLQGELLVLGGYSHRTYALSHLIHAYCPGLGRWLCLGTLPRPRAEMPACILTLPAVQHIALVPTPHQTKPAG

SEQ ID NO: 24058 - protein, 77 aa, Homo sapiens
AERNRPHGQMLGEEAQEALQASLPMPFATATSLWEEEGAHRTSTCALCWPAAPQPWPVSSWGSPWTDLAAGASFFSP

SEQ ID NO: 24059 - protein, 450 aa, Homo sapiens
MELAGCPWKKLRLLEELEDTWLPYLTPKDDEFYQQWQLKYPKLILREASSVSEELHKEVQEAFLTLHKHGCLFRDLVRIQGKDLLTPVSRILIGNPGCTYKYLNTRLFTVPWPVKGSNIKHTEAEIAAACETFLKLNDYLQIETIQALEELAAKEKANEDAVPLCMSADFPRVGMGSSYNGQDEVDIKSRAAYNVTLLNFMDPQKMPYLKEEPYFGMGKMAVSWHHDENLVDRSAVAVYSYSCEGPEEESEDDSHLEGRDPDIWHVGFKISWDIETPGLAIPLHQGDCYFMLDDLNATHQHCVLAGSQPRFSSTHRVAECSTGTLDYILQRCQLALQNVCDDVDNDDVSLKSFEPAVLKQGEEIHNEVEFEWLRQFWFQGNRYRKCTDWWCQPMAQLEALWKKMEGVTNAVLHEVKREGLPVEQRNEILTAILASLTARQNLRREWHASV

SEQ ID NO: 24060 - protein, 379 aa, Homo sapiens
MESEKIYMTANPYLCTECGKGYTCLASLTQHQKTHIGEKPYECKICGKSFTRNSNLVQHQRIHTGEKPYECNECGKAFSQSTNLIQHQRVHTGEKPYECNECEKTFSHRSSLRNHERIHTGEKPYPCNECGKAFSHISALTQHHRIHTGKKPYECTECGKTFSRSTHLIEHQGIHSEEKSYQCKQCRKVFCHSTSLIRHQRTHTGEKPYECNECGKAFSHTPAFIQHQRIHTGEKPYECNACGKAFNRSAHLTEHQRTHTGEKPYVCKECGKTFSRSTHLTEHLKIHSCVKPYQCNECQKLFCYRTSLIRHQRTHTGEKPYQCNECGKSFSLSSALTKHKRIHTRERPYQCTKCGDVFCHSTSLIRHQKTHFRKETLAE

SEQ ID NO: 24061 - protein, 877 aa, Homo sapiens
MPAANMMENRPLPALQVPEPQGAPEGSPVWSSSSTPTLRRRRFKMRRMKNVQEQSLEAGLARDLPAVLAPGKEFLQLPSIEITPSSDEDTPWSNCSTPSASPRRKRFLLRKWLRVRERKECSESSSQQSSQQSSHDDDSSRFLSPRAREESTASNSNRSTPACSPILRKRSRSPTPQNQDGDTMVEKGSDHSSDKSPSTPEQGVQRSCSSQSGRSGGKNSKKSQSWYNVLSPTYKQRNEDFRKLFKQLPDTERLIVDYSCALQRDILLQGRLYLSENWICFYSNIFRWETLLTVRLKDICSMTKEKTARLIPNAIQVCTDSEKHFFTSFGARDRTYMMMFRLWQNALLEKPLCPKELWHFVHQCYGNELGLTSDDEDYVPPDDDFNTMGYCEEIPVEENEVNDSSSKSSIETKPDASPQLPKKSITNSTLTSTGSSEAPVSFDGLPLEEEALEGDGSLEKELAIDNIMGEKIEMIAPVNSPSLDFNDNEDIPTELSDSSDTHDEGEVQAFYEDLSGRQYVNEVFNFSVDKLYDLLFTNSPFQRDFMEQRRFSDIIFHPWKKEENGNQSRVILYTITLTNPLAPKTATVRETQTMYKASQESECYVIDAEVLTHDVPYHDYFYTINRYTLTRVARNKSRLRVSTELRYRKQPWGLVKTFIEKNFWSGLEDYFRHLESELAKTESTYLAEMHRQSPKEKASKTTTVRRRKRPHAHLRVPHLEEVMSPVTTPTDEDVGHRIKHVAGSTQTRHIPEDTPNGFHLQSVSKLLLVISCVLVLLVILNMMLFYKLWMLEYTTQTLTAWQGLRLQERLPQSQTEWAQLLESQQKYHDTELQKWREIIKSSVMLLDQMKDSLINLQNGIRSRDYTSESEEKRNRYH

SEQ ID NO: 24062 - protein, 399 aa, Homo sapiens
MKKHVVETFFGFDEESVDSETLSETSYNTDRTDRTPATPEEDLDDATAREEADLRFCQLTREYQALQRAYALLQEQVGGTLDAEREARTREQLQADLLRCQAKIEDLEKLLVEKGQDSKWVEEKQLLIRTNQDLLEKIYRLEMEENQLKNEMQDAKDQNELLEFRVLELEERERRSPAFNLQITTFPENHSSALQLFCHQEGVKDVNVSELMKKLDILGDNGNLRNEEQVAIIQAGTVLALCEKWLKQIEGTEAALTQKMLDLEKEKDLFSRQKGYLEEELDYRKQALDQAYLKIQDLEATLYTALQQEPGRRAGEALSEGQREDLQAAVEKVRRQILRQSREFDSQILRERMELLQQAQQRIRELEDKLEFQKRHLKELEEKFLFLFLFFSLAFILWP

SEQ ID NO: 24063 - protein, 139 aa, Homo sapiens
MELDFGHFDERDKTSRNMRGSRMNGLPSPTHSAHCSFYRTRTLQALSNEKKAKKVRFYRNGDRYFKGIVYAVSSDRFRSFDALLADLTRSLSDNINLPQGVRYIYTIDGSRKIGSMDELEEGESYVCSSDNFFKKVEYT

SEQ ID NO: 24064 - protein, 443 aa, Homo sapiens
QKRRVPNKHYVYIIRVTWSSGSTEAIYRRYSKFFDLQMQMLDKFPMEGGQKDPKQRIIPFLPGKILFRRSHIRDVAVKRLIPIDEYCKALIQLPPYISQCDEVLQFFETRPEDLNPPKEEHIGKKKSGGDQTSVDPMVLEQYVVVANYQKQESSEISLSVGQVVDIIEKNESGWWFVSTAEEQGWVPATCLEGQDGVQDEFSLQPEEVSWRYWSLPRPVGRRRTLGDLYAISWRQEEKYTVIYPYTARDQDEMNLERGAVVEVIQKNLEGWWKIRYQGKEGWAPASYLKKNSGEPLPPKPGPGSPSHPGALDLDGVSRQQNAVGREKELLSSQRDGRFEGRPVPDGDAKQRSPKMRQRPPPRRDMTIPRGLNLPKPPIPPQVEEEYYTIAEFQTTIPDGISFQAGLKVEDHKNVHLESPVEVPLRRIKMRTALGKHVAASMEM

SEQ ID NO: 24065 - protein, 350 aa, Homo sapiens
MAVFVVLLALVAGVLGNEFSILKSPGSVVFRNGNWPIPGERIPDVAALSMGFSVKEDLSWPGLAVGNLFHRPRATVMVMVKGVNKLALPPGSVISYPLENAVPFSLDSVANSIHSLFSEETPVVLQLAPSEERVYMVGKANSVFEDLSVTLRQLRNRLFQENSVLSSLPLNSLSRNNEVDLLFLSELQVLHDISSLLSRHKHLAKDHSPDLYSLELAGLDEIGKRYGEDSEQFRDASKILVDALQKFADDMYSLYGGNAVVELVTVKSFDTSLIRKTRTILEAKQAKNPASPYNLAYKYNFEYSVVFNMVLWIMIALALAVIITSYNIWNMDPGYDSIIYRMTNQKIRMD

SEQ ID NO: 24066 - protein, 323 aa, Homo sapiens
ETLEKESASLADRLIQGQVTRAQEAEENYLIKRELATIKQQSDEASAKLEQAENTIRKLQHQQQWHKCSSNYNEDFVLQLEKELVQARLSEAESQCALKEMQDKVLDIEKRNNSLPDENNIARLQEELIAVKLREAEAIMGLKELRQQVKDLEEHWQRHLARTTGRWKDPPKKNAMNELQDELMTIRLREAETQAEIREIKQRMMEMETQNQINSNHLRRAEQEVISLQEKVQYLSAQNKGLLTQLSEAKRKQAEIECKNKEEVMAVRLREADSIAAVAELRQHIAELEIQKEEGKLQGQLNKSDSNQYIGELKDQIAELNHE

SEQ ID NO: 24067 - protein, 481 aa, Homo sapiens
MTTEEAMPEKAKCPTLEITKQDFFQEAKTLIAQHYEKINENKVQGTSINVFRKKHQKPKSGKYIPLEIDKKVTRDVVQEHRAALRRICFPKELSKSEHLQEPPQRISFKEPHIFSRRERCRPIDLITKGQVKLDKIMTIIEPVSKKMETAKQQHFEESRNRMLELLYPFPVHLYLQPGTSNLELLKEPDKAFYDWRGFVLTRSFRLACDSRRVSFSQSSSIFRDYYSKTFKTLIKKERQPIKPEPKSQPRIKGTPNKTDKLDSKVKRIGPHIEIFQVFRERKKFMITPKLIRMVTVMQAHVRGWLERKRLQRVMTKALDHGPDMKAVINMYGRLIHRVRYRRGLWRTRQILNLAELEEWMDRKKFYEIMFAKREDWPKIERNELPNFFSDCGHFPTQKQVDDTWDLVHQDGKEKYSELIKKSKAIEMLFTLYPPEGAHVPDSTLLKSTWLRPIVNGEEGYRYIVFHLKLSEGDLYLFVFVV

SEQ ID NO: 24068 - protein, 1416 aa, Homo sapiens
MSDTPSTGFSIIHPTSSEGQVPPPRHLSLTHPVVAKRISFYKSGDPQFGGVRVVVNPRSFKSFDALLDNLSRKVPLPFGVRNISTPRGRHSITRLEELEDGESYLCSHGRKVQPVDLDKARRRPRPWLSSRAISAHSPPHPVAVAAPGMPRPPRSLVVFRNGDPKTRRAVLLSRRVTQSFEAFLQHLTEVMQRPVVKLYATDGRRVPSLQAVILSSGAVVAAGREPFKPGNYDIQKYLLPARLPGISQRVYPKGNAKSESRKSSNWKVFIITSDLPDAGTSSQIYIILYGQHRSSAPIYLYGTDGARFQVGHEDIFTITVGDIGALFKIRIGHTNSGSSPSWHCKEIQLHNMNSGKQFYVPVQRWLARDQEDGEICREFPLLSKGQPVLPVTIYEVNVATGELWNAGTVANVYISIHGEKGDTGSRQLFRSKSSFNFLRGQTDTFFLEAVHLGDLCKIVIGHDGLGPGNGWFLDDVVIKDPTTNYEYAFFCHRWLDQGEDDCKIVRELYARDNSIFSASRYHVYTFPGKLFYDDWRKHDTSEINCPLFIFSGQKLELKRKETWTAESWKFTKGNTLQFYNKLTGGFVRLHPDGTVDAIGEKTDKYGVFDVIFNKRNICIFQSHEMRHLSLALDNGIVTGMVSGEATTELRVLYQPNRCALLESALVPGHTVVFDRHGKIADASSAGYANLSKEFVIFVKGVFLNSAVVLLATSLCQALCLQPDGSCTGVGSQSEKSYWKVHKISSGICMFESVKNAQMYLRIKDGRCDGTGTGDVDCHFKIKKNLKNASISLESTKSPGLFVGLQSDGQAKPMIYTKDENVCFYPQVIQFGRENPMGMSATPSQEEEKIHESKKQKKIPPESEARSPLPSSTAKEIRHFQSSETLLSEDEWKVLVLTGNTGTQANVTLWVYGDKGVTGPISLRKDSSEQLFLPGHEDEFQVEIRNTGNIYKIRIGHDGTSEQPEWNLQRVTMQHMKSKKILDFAANVWLSRIQADGDVVCELPVVKGGQAIFPLVRYQVDVYTGQLKHAETESEVFLCLFGERGDSGLRQLYKSNMQVKFQRGQIDKFQVAAVSLGKLQKVLLRCEASDKSQYWYCEQVIVREPGTTSESIFTCQRWLPFMSQGIIHSEIELYLQEMQINHQPKIQEEANDGDWKVTIVTGDLENAGTTATVFLYVYGETKCSGPIILGSGKHQLFNPNTADIFKINLKDIGEIYKIRIGHDNTGKNPRWYLEEVRLENIATYELFCLPVDSWIAENENDGDLWKEIPIMGPKKAPLPVVLYEIRIYTGTMTGAETESNVFINLIGTRGDSGKRRLHQSKNNEIKFQRGQVDIFSIKAVSLGKLKKVLISHDGTGPGNGWFLGSIVVKSEDEDSSEEVLFLCNRWLDEYQDDGKTQRELLAESSPSAVGETGSTIS

SEQ ID NO: 24069 - protein, 852 aa, Homo sapiens; identical to SEQ ID NO: 14752

SEQ ID NO: 24070 - protein, 1557 aa, Homo sapiens
MQRMIQQFAAEYTSKNSSTQDPSQPNSTKNQSLPKASPVTTSPTAATTQNPVLSKLLMADQDSPLDLTVRKSQSEPSEQDGVLDLSTKKSPCAGSTSLSHSPGCSSTQGNGENSTEAKAVDSNNQSKSPLEKFMVKLCTHHQKQFIRVLNDLYTESQPGTEDLQPSDSGAMDVSTCNAGCAQLSTKHKEKDALCLDMKSSASVDLFVDSSDSHSPLHLTEQTPKKPPPEINPVDGRENALTVVQKDSSELPTTKSNSINSSSVDSFTPGYLTASNCSSVNFHHIPKILEGQTTGQEQDTNVNICEDGKDHMQSSALVESLITVKMAAENSEEGNTCIIPQRNLFKALSEEAWNSGFMGNSSRTADKENTLQCPKTPLRQDLEANEQDARPKQENHLHSLGRNKVGYHLHPSDKGQFDHSKDGWLGPGPMPAVHKAANGHSRTKMISTSIKTARKSKRASGLRINDYDNQCDVVYISQPITECHFENQKSILSSRKTARKSTRGYFFNGDCCELPTVRTLARNLHSQEKASCSALASEAVFTPKQTLTIPAPRHTVDVQLPREDNPEEPSKEITSHEEGGGDVSPRKEPQEPEVCPTKIKPNLSSSPRSEETTASSLVWPLPAHLPEEDLPEGGSTVSAPTASGMSSPEHNQPPVALLDTEEMSVPQDCHLLPSTESFSGGVSEDVISRPHSPPEIVSREESPQCSENQSSPMGLEPPMSLGKAEDNQSISAEVESGDTQELNVDPLLKESSTFTDENPSETEESEAAGGIGKLEGEDGDVKCLSEKDTYDTSIDSLEENLDKKKKGKKFPEASDRCLRSQLSDSSSADRCLRNQSSDSSSACLEIKVPKNPSAKRSKKEGHPGGTTPKGLLPDSFHTETLEDTEKPSVNERPSEKDAEQEGEGGGIITRQTLKNMLDKEVKELRGEIFPSRDPITTAGQPLPGERLEIYVQSKMDEKNAHIPSESIACKRDPEQAKEEPGHIPTQHVEEAVNEVDNENTQQKDDESDAPCSSLGLSSSGSGDAARAPKSVPRPKRLTSSTYNLRHAHSLGSLDASKVTSEKEAAQVNPIMPKENGASESGDPLDEDDVDTVVDEQPKFMEWCAEEENQELIANFNAQYMKVQKGWIQLEKEGQPTPRARNKSDKLKEIWKSKKRSRKCRSSLESQKCSPVQMLFMTNFKLSNVCKWFLETTETRSLVIVKKLNTRLPGDVPPVKHPLQKYAPSSLYPSSLQAERLKKHLKKFPGATPAKNNWKMQKLWAKFRENPDQVEPEDGSDVSPGPNSEDSIEEVKEDRNSHPPANLPTPASTRILRKYSNIRGKLRAQQRLIKNEKMECPDALAVESKPSRKSVCINPLMSPKLALQVDADGFPVKPKSTEGMKGRKGKQVSEILPKAEVQSKRKRTEGSSPPDSKNKGPTVKASKEKHADGATKTPAAKRPAARDRSSQPPKKTSLKENKVKIPKKSAGKSCPPSRKEKENTNKRPSQSIASETLTKPAKQKGAGESSSRPQKATNRKQSSGKTRARPSTKTPESSAAQRKRKLKAKLDCSHSKRRRLDAK

SEQ ID NO: 24071 - protein, 2495 aa, Homo sapiens
MFSKKPHGDVKKSTQKVLDTKKDALTRLKHLRIVIENAESIDLKQFFDQHFSHIYYVFFENFVTIEASLKQKGHKSQREELDAILFIFEKILQLLPERIHQRWQFHSIGLILKKLLHTGNSLKIRREGVRLFLLWLQALQNNCSKEQLWMFSCLIPGFSAPQSEHGPRTLDNLINPPLNLQETQVTIEEITPLVPPQSGDKGQEDLTSYFLEALLKYIVIQVKSLEWKNKENQERGFSFLFSHFKKYYLPYIFPNICKENSLYHPILDIPQMRPKPHYVVIKKDAETNEAIYCTKEPFIKARVIVIRWLVSFWLEPKPHTGPHIPGMEGEVLPKNIQRAAASLVSREESKNDNADKTDRTTEPEQSHSNTSTLTEREPSSSSLCSIDEEHLTDIEIVRRVFSSKRSNVNFVTEIFRQAFLLPICEAAAMRKVVKVYQEWIQQEEKPLFMQEPEEIVITSSDLPCIENVTDHDISMEEGEKREEENGTNTADHVRNSSWAKNGSYQGALHNASEEATEQNIRAGTQAVLQVFIINSSNIFLLEPANEIKNLLDEHTDMCKRILNIYRYMVVQVSMDKKTWEQMLLVLLRVTESVLKMPSQAFLQFQGKKNMTLAGRLAGPLFQTLIVAWIKANLNVYISRELWDDLLSVLSSLTYWEELATEWSLTMETLTKVLARNLYSLDLSDLPLDKLSEQKQKKHKGKGVGHEFQKVSVDKSFSRGWSRDQPGQAPMRQRSATTTGSPGTEKARSIVRQKTVDIDDAQILPRSTRVRHFSQSEETGNEVFGALNEEQPLPRSSSTSDILEPFTVERAKGAVPVIDSSSRHAPSLQSSTEASSITRSTESHITDTHSRESSLEVGDSIYDHLCHLIGPVELADSAFEQIQYIDLEGDDDLLSTLKEYFKENQENHSKNETGKDPASQEVTIAVNRGERLSLDKLECTDQETESENITSFVGTPENLQFQKEPNSAVFMSNIAPNQSDSFFRTQTSEKSKQLNTDKQPSEPSLDSPCDKEKRKHLYRQAATELDACVDVTLVEKLKSVQINEKITVPHVMRAKKATLKAPVNRRMPHVTSTSKLSPTKRSLSETVTHRAKIMKIATKKRNSVHVTFRPSTESVQFYNPLENKEAPWKMRLRKLGGFSSGSSNSSTSNTHTSTNSATELVKPGVYRPLDTLGTASVSSKTVKESTEIPTTILQKEGIASSQLGSRSTLRSSSHEAGLQQGSLGGVYKTVVHALSKPKANVSPQRQNRMPPEAPLRDLYSHVMGYFGRKAAVNKEDMSQKLPPLNSDIGGSSANVPDLMDEFIAERLRSGNASTMTRRGSSPGSLEIPKDLPDILNKQNQMRPIDDPGVPSEWTSPASAGSSDLISSDSHSDSFSAFQYDGRKFDNFGFGTDTGVTSSADVDSGSGHHQSAEEQEVASLTTLHIDSETSSLNQQAFSAEVATITGSESASPVHSPLGSRSQTPSPSTLNIDHMEQKDLQLDEKLHHSVLQTPDDLEISEFPSECCSVMAGGTLTGWHADVATVMWRRMLGILGDVNSIMDPEIHAQVFDYLCELWQNLAKIRDNLGISTDNLTSPSPPVLIPPLRILTPWLFKATMLTDKYKQGKLHAYKLICNTMKRRQDVSPNRDFLTHFYNIMHCGLLHIDQDIVNTIIKHCSPQFFSLGLPGATMLIMDFIVAAGRVASSAFLNAPRVEAQVLLGSLVCFPNLYCELPSLHPNIPDVAVSQFTDVKELIIKTVLSSARDEPSGPARCVALCSLGIWICEELVHESHHPQIKEALNVICVSLKFTNKTVAHVACNMLHMLVHYVPRLQIYQPDSPLKIIQILIATITHLLPSTEASSYEMDKRLVVSLLLCLLDWIMALPLKTLLQPFHATGAESDKTEKSVLNCIYKVLHGCVYGAQCFSNPRYFPMSLSDLASVDYDPFMHLESLKEPEPLHSPDSERSSKLQPVTEVKTQMQHGLISIAARTVITHLVNHLGHYPMSGGPAMLTSQVCENHDNHYSESTELSPELFESPNIQFFVLNNTTLVSCIQIRSEENMPGGGLSAGLASANSNVRIIVRDLSGKYSWDSAILYGPPPVSGLSEPTSFMLSLSHQEKPEEPPTSNECLEDITVKDGLSLQFKRFRETVPTWDTIRDEEDVLDELLQYLGVTSPECLQRTGISLNIPAPQPVCISEKQENDVINAILKQHTEEKEFVEKHFNDLNMKAVEQDEPIPQKPQSAFYYCRLLLSILGMNSWDKRRSFHLLKKNEKLLRELRNLDSRQCRETHKIAVFYVAEGQEDKHSILTNTGGSQAYEDFVAGLGWEVNLTNHCGFMGGLQKNKSTGLTTPYFATSTVEVIFHVSTRMPSDSDDSLTKKLRHLGNDEVHIVWSEHTRDYRRGIIPTEFGDVLIVIYPMKNHMFSIQIMKKPEVPFFGPLFDGAIVNGKVLPIMVRATAINASRALKSLIPLYQNFYEERARYLQTIVQHHLEPTTFEDFAAQVFSPAPYHHLPSDADH

SEQ ID NO: 24072 - protein, 487 aa, Homo sapiens
MAAFRGDGREEDNYYGTPKPPAEPAPLLLNVTDQILPGATPSAEGKRKRNKSVSNMEKASIEPPEEEEEERPVVNGNGVVVTPESSEHEDKSAGASGEMPSQPYPAPVYSQPEELKEQMDDTKPTKPEDNEEPDPLPDNWEMAYTEKGEVYFIDHNTKTTSWLDPRLAKKAKPPEECKENELPYGWEKIDDPIYGTYYVDHINRRTQFENPVLEAKRKLQQHNMPHTELGTKPLQAPGFREKPLFTRDASQLKGTFLSTTLKKSNMGFGFTIIGGDEPDEFLQVKSVIPDGPAAQDGKMETGDVIVYINEVCVLGHTHADVVKLFQSVPIGQSVNLVLCRGYPLPFDPEDPANSMVPPLAIMERPPPVMVNGRHNYETYLEYISRTSQSVPDITDRPPHSLHSMPTDGQLDGTYPPPVHDDNVSMASSGATQAELMTLTIVKGAQGFGFTIADSPTGQRVKQILDIQGCPGLCEGDLIVEINQQNVQ

SEQ ID NO: 24073 - protein, 398 aa, Homo sapiens
GQELKNPQEETLQAFDSHYDYTICGDSEDMVCTPKSDEFNPCEDIMGYKFLRIVVWFVSLLALLGNVFVLLILLTSHYKLNVPRFLMCNLAFADFCMGMYLLLIASVDLYTHSEYYNHAIDWQTGPGCNTAGFFTVFASELSVYTLTVITLERWYAITFAMRLDRKIRLRHACAIMVGGWVCCFLLALLPLVGISSYAKVSICLPMDTETPLALAYIVFVLTLNIVAFVIVCCCYVKIYITVRNPQYNPGDKDTKIAKRMAVLIFTDFICMAPISFYALSAILNKPLITVSNSKILLVLFYPLNSCANPFLYAIFTKAFQRDVFILLSKFGICKRQAQAYRGQRVPPKNSTDIQVQKVTHEMRQGLHNMEDVYELIENSHLTPKKQGQISEEYMQTVL

SEQ ID NO: 24074 - protein, 1102 aa, Homo sapiens
MKEDYDTMGPEATIQTAINNGTVKNANCTSDFEEYFAKRKLEERDGHAVSIEEYLQRSDTAIIYPEAPEELSRLGTPEANGQEENDLPPGTPDAFAQLLTCPYCDRGYKRLTSLKEHIKYRHEKNEENFSCPLCSYTFAYRTQLERHMVTHKPGTDQHQMLTQGAGNRKFKCTECGKAFKYKHHLKEHLRIHSGEKPYECPNCKKRFSHSGSYSSHISSKKCIGLISVNGRMRNNIKTGSSPNSVSSSPTNSAITQLRNKLENGKPLSMSEQTGLLKIKTEPLDFNDYKVLMATHGFSGTSPFMNGGLGATSPLGVHPSAQSPMQHLGVGMEAPLLGFPTMNSNLSEVQKVLQIVDNTVSRQKMDCKAEEISKLKGYHMKDPCSQPEEQGVTSPNIPPVGLPVVSHNGATKSIIDYTLEKVNEAKACLQSLTTDSRRQISNIKKEKLRTLIDLVTDDKMIENHNISTPFSCQFCKESFPGPIPLHQHERYLCKMNEEIKAVLQPHENIVPNKAGVFVDNKALLLSSVLSEKGMTSPINPYKDHMSVLKAYYAMNMEPNSDELLKISIAVGLPQEFVKEWFEQRKVYQYSNSRSPSLERSSKPLAPNSNPPTKDSLLPRSPVKPMDSITSPSIAELHNSVTNCDPPLRLTKPSHFTNIKPVEKLDHSRSNTPSPLNLSSTSSKNSHSSSYTPNSFSSEELQAEPLDLSLPKQMKEPKSIIATKNKTKASSISLDHNSVSSSSENSDEPLNLTFIKKEFSNSNNLDNKSTNPVFSMNPFSAKPLYTALPPQSAFPPATFMPPVQTSIPGLRPYPGLDQMSFLPHMAYTYPTGAATFADMQQRRKYQRKQGFQGELLDGAQDYMSGLDDMTDSDSCLSRKKIKKTESGMYACDLCDKTFQKSSSLLRHKYEHTGKRPHQCQICKKAFKHKHHLIEHSRLHSGEKPYQCDKCGKRFSHSGSYSQHMNHRYSYCKREAEEREAAEREAREKGHLEPTELLMNRAYLQSITPQGYSDSEERESMPRDGESEKEHEKEGEDGYGKLGRQDGDEEFEEEEEESENKSMDTDPETIRDEEETGDHSMDDSSEDGKMETKSDHEEDNMEDGM

SEQ ID NO: 24075 - protein, 894 aa, Homo sapiens
MSGRPAPVSRKQRLMAAVGERAAGGAPLSCFICGGGIGRGKELKLQVKQPAAGAGTPAQPFFPFLQQQEPAPGARELSPADGCVLVCAVCRCFLGEQWAAFERARTPVDKRMYWLKRPHQCDAGAGGRRGGAGAPREWNVAYALGSATGDDDEDDGGGPRLRGAAEETRDSDLSELSDTDPLSEPDPPARDAASPHQDGAPGPGPRGGRGQEWRPAPGPAPGQGAEASAQGRAEEEGLPAKAHADGEPKSGVRRRRKGVGRHWVPEARASVLRSIQDPWQGPLVQEAPADGMKGPPSGRATKTLESRPLGETLRGFCTSEDSDINITSGEEDHKEQPFPGVCNPKEKNSGRVPRALQDSRAAPAEGLCCYICGAPLSPASHHQVHVQKQEKLAQAPFFPFLWLHSPPPGAQPISEGGSTLVCASCFSSLTQQWQSFELANVPVLQRLYVVPLDSHAPGMASKGRRLPREEGLPSGALREACYLCGEDCTPDARAVPSRILNGNARSAMHFPFLSLLPCPPNAQGPNKRCEVRSCPKCFSVLEDVWALYRACQNEELITSVQGFLGRYHQAFSASDPALSELPASAQGGPVSICYICGAELGPGKEFQLNVNPASRLGEKEPFFPFLTVYPPAPRARPVDSTGLVATCVLCYHDLLAQWLQHEARSSHHAVSAWSRQYQVETFVCFFCQQEKKRCLGLKSVRVARLPLFLYTLRASHSLLVDDGQQLIIGACVECGTLVCAGQGLTRQGPMSWSSPVAAATKPVCGSLEASAASHPPTRESETRPRAPTETLPRGPRMAQELRPAQCLQSSREEDGPDLTGAGMSHEPKSPSLGMLSTATRTTATVNPLTPSPLNGALVPSGSPATSSALSAQAAPSSSFAAALRKLAKQAEEPR

SEQ ID NO: 24076 - protein, 1792 aa, Homo sapiens
MARCGEGSAAPMVLLGSAGVCSKGLQRKGPCERRRLKATVSEQLSQDLLRLLREEFHTDVTFSVGCTLFKAHKAVLLARVPDFYFHTIGQTSNSLTNQEPIAVENVEALEFRTFLQIIYSSNRNIKNYEEEILRKKIMEIGISQKQLDISFPKCENSSDCSLQKHEIPEDISDRDDDFISNDNYDLEPASELGEDLLKLYVKPCCPDIDIFVDGKRFKAHRAILSARSSYFAAMLSGCWAESSQEYVTLQGISHVELNVMMHFIYGGTLDIPDKTNVGQILNMADMYGLEGLKEVAIYILRRDYCNFFQKPVPRTLTSILECLIIAHSVGVESLFADCMKWIVKHFARFWSERSFANIPPEIQKSCLNMLIQSLNDKNAAFLLMESDRLIISLPRVKWTEAALTMASQLQEKCIAFIVDNFSKIIQSENFALLLQSQAMSSTADLLDTILKAIEENITTENSCSLLMALDTLLNSDSTKEMGFTCKIQALRDKLWIFLVQSFYAVRHTESWKLMSTDDQQKIQAAAFDKGDDRRLGKKPIFSSSQQRKQVSDSGDIKIKSWRGNNKKECWSYLSTNKKMKSDGLGASGHSSSTNRNSINKTLKQDDVKEKDGTKIASKITKELKTGGKNVSGKPKTVTKSKTENGDKARLENMSPRQVVERSATAAAAATGQKNLLNGKGVRNQEGQISGARPKVLTGNLNVQAKAKPLKKATGKDSPCLSIAGPSSRSTDSSMEFSISTECLDEPKENGSTEEEKPSGHKLSFCDSPGQMMKNSVDSVKNSTVAIKSRPVSRVTNGTSNKKSIHEQDTNVNNSVLKKVSGKGCSEPVPQAILKKRGTSNGCTAAQQRTKSTPSNLTKTQGSQGESPNSVKSSVSSRQSDENVAKLDHNTTTEKQAPKRKMVKQVHTALPKVNAKIVAMPKNLNQSKKGETLNNKDSKQKMPPGQVISKTQPSSQRPLKHETSTVQKSMFHDVRDNNNKDSVSEQKPHKPLINLASEISDAEALQSSCRPDPQKPLNDQEKEKLALECQNISKLDKSLKHELESKQICLDKSETKFPNHKETDDCDAANICCHSVGSDNVNSKFYSTTALKYMVSNPNENSLNSNPVCDLDSTSAGQIHLISDRENQVGRKDTNKQSSIKCVEDVSLCNPERTNGTLNSAQEDKKSKVPVEGLTIPSKLSDESAMDEDKHATADSDVSSKCFSGQLSEKNSPKNMETSESPESHETPETPFVGHWNLSTGVLHQRESPESDTGSATTSSDDIKPRSEDYDAGGSQDDDGSNDRGISKCGTMLCHDFLGRSSSDTSTPEELKIYDSNLRIEVKMKKQSNNDLFQVNSTSDDEIPRKRPEIWSRSAIVHSRERENIPRGSVQFAQEIDQVSSSADETEDERSEAENVAENFSISNPAPQQFQGIINLAFEDATENECREFSATKKFKRSVLLSVDECEELGSDEGEVHTPFQASVDSFSPSDVFDGISHEHHGRTCYSRFSRESEDNILECKQNKGNSVCKNESTVLDLSSIDSSRKNKQSVSATEKKNTIDVLSSRSRQLLREDKKVNNGSNVENDIQQRSKFLDSDVKSQERPCHLDLHQREPNSDIPKNSSTKSLDSFRSQVLPQEGPVKESHSTTTEKANIALSAGDIDDCDTLAQTRMYDHRPSKTLSPIYEMDVIEAFEQKVESETHVTDMDFEDDQHFAKQDWTLLKQLLSEQDSNLDVTNSVPEDLSLAQYLINQTLLLARDSSKPQGITHIDTLNRWSELTSPLDSSASITMASFSSEDCSPQGEWTILELETQH

SEQ ID NO: 24077 - protein, 518 aa, Homo sapiens
LENDVEQLKQTLQEQHRRAFFFQEKSQIQKDLWRIEDVTAGLSANKENFRILVESVKNPERKTVPLFPHPPVPSLSTSESKPPPQPSPPTSPVRTPLEVRLFPQLQTYVPYRPHPPQLRKVTSPLQSPTKAKPKVQEDEAPPRPPLPELYSPEDQPPAVPPLPREATIIRHTSVRGLKRQSDERKRDRELGQCVNGDSRVELRSYVSEPELATLSGDMAQPSLGLVGPESRYQTLPGRGLSGSTSRLQQSSTIAPYVTLRRGLNAESSKATFPRPKSALERLYSGDHQRGKMSAEEQLERMKRHQKALVRERKRTLGQGERTGLPSSRYLSRPLPGDLGSWKREQDFDLQLLERVVQGEKKDKEENGWLKVQAMPVTELDLEPQDYDLDISRELSKPEKVSIPERYVELDPEEPPSLEELQARYRKAEKIRNILARSSMCNLQPTSGQDQNSVADLDLQLQEQERIINISYALASEASQRSKQVAAQQLALLPPKGPLSSRTVPPYPPFTNGLHYTFV

SEQ ID NO: 24078 - protein, 127 aa, Homo sapiens
MARLEAPQCPGFLARLLGGTWCLLCIAGQVCGDQSQGAVFLREFTLIRRESLHEDFLSDLLNSHKTEDSSSRTARSEEDRDGLWDAWGPWSECSRTCGGGASYSLRRCLSSKSCEGRNIRYRTCSNV

SEQ ID NO: 24079 - protein, 881 aa, Homo sapiens
MKIPNIGNVMNKFEILGVVGEGAYGVVLKCRHKETHEIVAIKKFKDSEENEEVKETTLRELKMLRTLKQENIVELKEAFRRRGKLYLVFEYVEKNMLELLEEMPNGVPPEKVKSYIYQLIKAIHWCHKNDIVHRDIKPENLLISHNDVLKLCDFGFARNLSEGNNANYTEYVATRWYRSPELLLGAPYGKSVDMWSVGCILGELSDGQPLFPGESEIDQLFTIQKVLGPLPSEQMKLFYSNPRFHGLRFPAVNHPQSLERRYLGILNSVLLDLMKNLLKLDPADRYLTEQCLNHPTFQTQRLLDRSPSRSAKRKPYHVESSTLSNRNQAGKSTALQSHHRSNSKDIQNLSVGLPRADEGLPANESFLNGNLAGASLSPLHTKTYQASSQPGSTSKDLTNNNIPHLLSPKEAKSKTEFDFNIDPKPSEGPGTKYLKSNSRSQQNRHSFMESSQSKAGTLQPNEKQSRHSYIDTIPQSSRSPSYRTKAKSHGALSDSKSVSNLSEARAQIAEPSTSRYFPSSCLDLNSPTSPTPTRHSDTRTLLSPSGRNNRNEGTLDSRRTTTRHSKTMEELKLPEHMDSSHSHSLSAPHESFSYGLGYTSPFSSQQRPHRHSMYVTRDKVRAKGLDGSLSIGQGMAARANSLQLLSPQPGEQLPPEMTVARSSVKETSREGTSSFHTRQKSEGGVYHDPHSDDGTAPKENRHLYNDPVPRRVGSFYRVPSPRPDNSFHENNVSTRVSSLPSESSSGTNHSKRQPAFDPWKSPENISHSEQLKEKEKQGFFRSMKKKKKKSQTVPNSDSPDLLTLQKSIHSASTPSSRPKEWRPEKISDLQTQGLTQSLRLECSGKIMAHCSLDLLGSSHSPISASRVTGTTGTRHHTWPVF

SEQ ID NO: 24080 - protein, 698 aa, Homo sapiens
MAEPQAESEPLLGGARGGGGDWPAGLTTYRSIQVGPGAAARWDLCIDQAVVFIEDAIQYRSINHRVDASSMWLYRRYYSNVCQRTLSFTIFLILFLAFIETPSSLTSTADVRYRAAPWEPPCGLTESVEVLCLLVFAADLSVKGYLFGWAHFQKNLWLLGYLVVLVVSLVDWTVSLSLVCHEPLRIRRLLRPFFLLQNSSMMKKTLKCIRWSLPEMASVGLLLAIHLCLFTMFGMLLFAGGKQDDGQDRERLTYFQNLPESLTSLLVLLTTANNPDVMIPAYSKNRAYAIFFIVFTVIGSLFLMNLLTAIIYSQFRGYLMKSLQTSLFRRRLGTRAAFEVLSSMVGEGGAFPQAVGVKPQNLLQVLQKVQLDSSHKQAMMEKVRSYGSVLLSAEEFQKLFNELDRSVVKEHPPRPEYQSPFLQSAQFLFGHYYFDYLGNLIALANLVSICVFLVLDADVLPAERDDFILGILNCVFIVYYLLEMLLKVFALGLRGYLSYPSNVFDGLLTVVLLVLEISTLAVYRLPHPGWRPEMVGLLSLWDMTRMLNMLIVFRFLRIIPSMKLMAVVASTVLGLVQNMRAFGGILVVVYYVFAIIGINLFRGVIVALPGNSSLAPANGSAPCGSFEQLEYWANNFDDFAAALVTLWNLMVVNNWQVFLDAYRRYSGPDPGGSHVESPEQHQLLTMLLTVVDRLSMPR

SEQ ID NO: 24081 - protein, 527 aa, Homo sapiens
NSSHVDRRSMPSMGYMTHTVSAPSLHGKSADDTYLQLKKDLEYLDLKIKNNEPLINVLYKVLKKSARGCRPRRSMTGRDLLKDRSLKPVKIAESDTDVKLSIFCEQDRVLQDLEDKIRALKENKDQLESVLEVLHRQMEQYRDQPQHLEKIAYQQKLLQEDLVHIRAELSRESTEMENAWNEYLKLENDVEQLKQTLQEQHRRAFFFQEKSQIQKDLWRIEDVTAGLSANKENFRILVESVKNPERKTVPLFPHPPVPSLSTSESKPPPQPSPPTSPVRTPLEVRLFPQLQTYVPYRPHPPQLRKVTSPLQSPTKAKPKVQEDEAPPRPPLPELYSPEDQPPAVPPLPREATIIRHTSVRGLKRQSDERKRDRELGQCVNGDSRVELRSYVSEPELATLSGDMAQPSLGLVGPESRYQTLPGRGLSGSTSRLQQSSTIAPYVTLRRGLNAESSKATFPRPKSALERLYSGDHQRGKMSAEEQLERMKRHQKALVRERKRTLGQGERTGLPSSRYLSRPLPGDLGSVC

SEQ ID NO: 24082 - protein, 1172 aa, Homo sapiens
MSNKTGGKRPATTNSDIPNHNMVSEVPPERPSVRATRTARKAVAFGKRSHSMKRNPNAPVTKAGWLFKQASSGVKQWNKRWFVLVDRCLFYYKDEKEESILGSIPLLSFRVAAVQPSDNISRKHTFKAEHAGVRTYFFSAESPEEQEAWIQAMGEAARVQIPPAQKSVPQAVRHSHEKPDSENVPPSKHHQQPPHNSLPKPEPEAKTRGEGDGRGCEKAERRPERPEVKKEPPVKANGLPAGPEPASEPGSPYPEGPRVPGGGEQPAQPNGWQYHSPSRPGSTAFPSQDGETGGHRRSFPPRTNPDKIAQRKSSMNQLQQWVNLRRGVPPPEDLRSPSRFYPVSRRVPEYYGPYSSQYPDDYQYYPPGVRPESICSMPAYDRISPPWALEDKRHAFRNGGGPAYQLREWKEPASYGRQDATVWIPSPSRQPVYYDELDAASSSLRRLSLQPRSHSVPRSPSQGSYSRARIYSPVRSPSARFERLPPRSEDIYADPAAYVMRRSISSPKYDYLGDRRPVPAGLFPYNYPPSPTVHDKMDELLDLQLQRNLEYLDQQMSESETLISMVNRMVENSSPRSQLFMQVPPYPEVFRDSLHTYKLNEQDTDKLLGKLCEQNKVVREQDRLVQQLRAEKESLESALMGTHQELEMFGSQPAYPEKLRHKKDSLQNQLINIRVELSQATTALTNSTIEYEHLESEVSALHDDLWEQLNLDTQNEVLNRQIQKEIWRIQDVMEGLRKNNPSRGTDTAKHRGGLGPSATYSSNSPASPLSSASLTSPLSPFSLVSGSQGSPTKPGSNEEPGPPRPPLPKAYVPLESPPAVPPLPSESRFWPYPSSPSWHRSGETARGQPKANYEQSKKDPHQTLPLDTPRDISLVPTRQEVEAEKQAALNKVGVVPPRTKSPTDDEVTPSAVVRRNASGLTNGLSSQERPKSAVFPGEGKVKMSVEEQIDRMRRHQSGSMREKRRSLQLPASPAPDPSPRPAYKVVRRHRSIHEVDISNLEAALRAEEPGGHAYETPREEIARLRKMELEPQHYDVDINKELSTPDKVLIPERYIDLEPDTPLSPEELKEKQKKVERIKTLIAKSSMQNVVPIGEGDSVDVPQDSESQLQEQEKRIEISCALATEASRRGRMLSVQCATPSPPTSPASPAPPANPLSSESPRGADSSYTMRV

SEQ ID NO: 24083 - protein, 2146 aa, Homo sapiens
MMMMMMMKKMQHQRQQQADHANEANYARGTRLPLSGEGPTSQPNSSKQTVLSWQAAIDAARQAKAAQTMSTSAPPPVGSLSQRKRQQYAKSKKQGNSSNSRPARALFCLSLNNPIRRACISIVEWKPFDIFILLAIFANCVALAIYIPFPEDDSNSTNHNLEKVEYAFLIIFTVETFLKIIAYGLLLHPNAYVRNGWNLLDFVIVIVGLFSVILEQLTKETEGGNHSSGKSGGFDVKALRAFRVLRPLRLVSGVPSLQVVLNSIIKAMVPLLHIALLVLFVIIIYAIIGLELFIGKMHKTCFFADSDIVAEEDPAPCAFSGNGRQCTANGTECRSGWVGPNGGITNFDNFAFAMLTVFQCITMEGWTDVLYWVNDAIGWEWPWVYFVSLIILGSFFVLNLVLGVLSGEFSKEREKAKARGDFQKLREKQQLEEDLKGYLDWITQAEDIDPENEEEGGEEGKRNTSMPTSETESVNTENVSGEGENRGCCGSLCQAISKSKLSRRWRRWNRFNRRRCRAAVKSVTFYWLVIVLVFLNTLTISSEHYNQPDWLTQIQDIANKVLLALFTCEMLVKMYSLGLQAYFVSLFNRFDCFVVCGGITETILVELEIMSPLGISVFRCVRLLRIFKVTRHWTSLSNLVASLLNSMKSIASLLLLLFLFIIIFSLLGMQLFGGKFNFDETQTKRSTFDNFPQALLTVFQILTGEDWNAVMYDGIMAYGGPSSSGMIVCIYFIILFICGNYILLNVFLAIAVDNLADAESLNTAQKEEAEEKERKKIARKESLENKKNNKPEVNQIANSDNKVTIDDYREEDEDKDPYPPCDVPVGEEEEEEEEDEPEVPAGPRPRRISELNMKEKIAPIPEGSAFFILSKTNPIRVGCHKLINHHIFTNLILVFIMLSSAALAAEDPIRSHSFRNTILGYFDYAFTAIFTVEILLKMTTFGAFLHKGAFCRNYFNLLDMLVVGVSLVSFGIQSSAISVVKILRVLRVLRPLRAINRAKGLKHVVQCVFVAIRTIGNIMIVTTLLQFMFACIGVQLFKGKFYRCTDEAKSNPEECRGLFILYKDGDVDSPVVRERIWQNSDFNFDNVLSAMMALFTVSTFEGWPALLYKAIDSNGENIGPIYNHRVEISIFFIIYIIIVAFFMMNIFVGFVIVTFQEQGEKEYKNCELDKNQRQCVEYALKARPLRRYIPKNPYQYKFWYVVNSSPFEYMMFVLIMLNTLCLAMQHYEQSKMFNDAMDILNMVFTGVFTVEMVLKVIAFKPKGYFSDAWNTFDSLIVIGSIIDVALSEADNSEESNRISITFFRLFRVMRLVKLLSRGEGIRTLLWTFIKSFQALPYVALLIAMLFFIYAVIGMQMFGKVAMRDNNQINRNNNFQTFPQAVLLLFRCATGEAWQEIMLACLPGKLCDPESDYNPGEEYTCGSNFAIVYFISFYMLCAFLIINLFVAVIMDNFDYLTRDWSILGPHHLDEFKRIWSEYDPEAKGRIKHLDVVTLLRRIQPPLGFGKLCPHRVACKRLVAMNMPLNSDGTVMFNATLFALVRTALKIKTEGNLEQANEELRAVIKKIWKKTSMKLLDQVVPPAGDDEVTVGKFYATFLIQDYFRKFKKRKEQGLVGKYPAKNTTIALQAGLRTLHDIGPEIRRAISCDLQDDEPEETKREEEDDVFKRNGALLGNHVNHVNSDRRDSLQQTNTTHRPLHVQRPSIPPASDTEKPLFPPAGNSVCHNHHNHNSIGKQVPTSTNANLNNANMSKAAHGKRPSIGNLEHVSENGHHSSHKHDREPQRRSSVKRTRYYETYIRSDSGDEQLPTICREDPEIHGYFRDPHCLGEQEYFSSEECYEDDSSPTWSRQNYGYYSRYPGRNIDSERPRGYHHPQGFLEDDDSPVCYDSRRSPRRRLLPPTPASHRRSSFNFECLRRQSSQEEVPSSPIFPHRTALPLHLMQQQIMAVAGLDSSKAQKYSPSHSTRSWATPPATPPYRDWTPCYTPLIQVEQSEALDQVNGSLPSLHRSSWYTDEPDISYRTFTPASLTVPSSFRNKNSDKQRSADSLVEAVLISEGLGRYARDPKFVSATKHEIADACDLTIDEMESAASTLLNGNVRPRANGDVGPLSHRQDYELQDFGPGYSDEEPDPGRDEEDLADEMICITTL

SEQ ID NO: 24084 - protein, 1362 aa, Homo sapiens
MALEQALQAARQGELDVLRSLHAAGLLGPSLRDPLDALPVHHAARAGKLHCLRFLVEEAALPAAARARNGATPAHDASATGHLACLQWLLSQGGCRVQDKDNSGATVLHLAARFGHPEVVNWLLHHGGGDPTAATDMGALPIHYAAAKGDFPSLRLLVEHYPEGVNAQTKNGATPLYLACQEGHLEVTQYLVQECGADPHARAHDGMTPLHAAAQMGHSPVIVWLVSCTDVSLSEQDKDGATAMHFAASRGHTKVLSWLLLHGGEISADLWGGTPLHDAAENGELECCQILVVNGAELDVRDRDGYTAADLSDFNGHSHCTRYLRTVENLSVEHRVLSRDPSAELEAKQPDSGMSSPNTTVSVQPLNFDLSSPTSTLSNYDSCSSSHSSIKGQHPPCGLSSARAADIQSYMDMLNPELGLPRGTIGKPTPPPPPPSFPPPPPPPGTQLPPPPPGYPAPKPPVGPQAADIYMQTKNKLRHVETEALKKELSSCDGHDGLRRQDSSRKPRAFSKQPSTGDYYRQLGRCPGETLAARPGMAHSEEVRARQPARAGCPRLGPAARGSLEGPSAPPQAALLPGNHVPNGCAADPKASRELPPPPPPPPPPLPEAASSPPPAPPLPLESAGPGCGQRRSSSSTGSTKSFNMMSPTGDNSELLAEIKAGKSLKPTPQSKGLTTVFSGIGQPAFQPDSPLPSVSPALSPVRSPTPPAAGFQPLLNGSLVPVPPTTPAPGVQLDVEALIPTHDEQGRPIPEWKRQVMVRKMQLKMQEEEEQRRKLTAASSCCYPREGWRYSREHNAILGPFGELMTEADILRIEQQIENLQVLHKAQKLEARLEQLELELEQLLPISAALSAPRFTVDPRRMHGRAASLPAWCSKISTLLKNMATLLAALGGRPAHLAELLTADTGQPLAPLPDAPWLPGPLCLGRSHSLSWCREAVAREILECGVSVQHLRATYELRARGAAPARCPRRKPPQSAGAPGREPILEEDYVAARSGQPSAAAAHGPLVDWEPLGTLGPPEVQDRQAALPEPEQLARRPPLCTKLRGVQDYLDLRKERIVYLFLEHWRRWACRGPGRRAQARLRGLLPRVAAAGAGPGLEATDAPRLPASNSEAHSPDERLRQLLRQRQAVGKLLGHWRSLLRRVPASPGLAHGLYWPQHFLPPLDGGAPPHYDSLTLDLFMLGYFQLLEMGLSREERKFRHLLCYEMFDRLGSHPWERIRLFHRVVLEEVEAGRRGWSDGFEDLRHRFFGNGLEAEPAPEEQAKEKEEEGKEQERTEEAAPFQTGDPPEGQPEALAPAPQPPPPPPPAAPPPTSDSPGSEAPAEDPLELVSEMGEFSNEDICRYIDRSFSFWKEKEAELFDI

SEQ ID NO: 24085 - protein, 198 aa, Homo sapiens
MLPLLIICLLPAIEGKNCLRCWPELSALIDYDLQILWVTPGPPTELSQSIHSLFLEDNNFLKPWYLDRDHLEEETAKFFTQVHQAIKTLRDDKTVLLEEIYTHKNLFTERLNKISDGLKEKDIQSTLKVTSCADCRTHFLSCNDPTFCPARNRRTSLWAVSLSSALLLAIAGGGCFFYWQRKKEAVKQEQGSPHVFQK

SEQ ID NO: 24086 - protein, 517 aa, Homo sapiens
EQYRIRQVNIYYYLEDDSMSVIEPVVENSGILQGKLIKRQRLAKNDRGDHYHWKDLNRGINITIYGKTFRVVDCDQFTQVFLESQGIELNPPEKMALDPYTELRKQPLRKYVTPSDFDQLKQFLTFDKQVLRFYAIWDDTDSMYGECRTYIIHYYLMDDTVEIREVHERNDGRDPFPLLMNRQRVPKVLVENAKNFPQCVLEISDQEVLEWYTAKDFIVGKSLTILGRTFFIYDCDPFTRRYYKEKFGITDLPRIDVSKREPPPVKQELPPYNGFGLVEDSAQNCFALIPKAPKKDVIKMLVNDNKVLRYLAVLESPIPEDKDRRFVFSYFLATDMISIFEPPVRNSGIIGGKYLGRTKVVKPYSTVDNPVYYGPSDFFIGAVIEVFGHRFIILDTDEYVLKYMESNAAQYSPEALASIQNHVRKREAPAPEAESKQTEKDPGVQELEALIDTIQKQLKDHSCKDNIREAFQIYDKEASGYVDRDMFFKICESLNVPVDDSLVKEKKKKSKGSFAVI

SEQ ID NO: 24087 - protein, 161 aa, Homo sapiens
MFLPHMNHLTLEQTFFSQVLPKTVKLFDDMMYELTSQARGLSSQNLEIQTTLRNILQTMVQLLGALTGCVQHICATQESIILENIQSLPSSVLHIIKSTFVHCKNSESVYSGCLHLVSDLLQALFKEAYSLQKQLMELLDMVCMDPLVDDNDDILNMVIGE

SEQ ID NO: 24088 - protein, 123 aa, Homo sapiens
TLSGLLGVAWGASSLGAHHIHHFHGSSKHHSVPIAIYRSPASLRGGHAGTTYIFSKGGGQITYKWPPNDRPSTRADRLAIGFSTVQKEAVLVRVDSSSGLGDYLELHIAFESFTASRSSASRC

SEQ ID NO: 24089 - protein, 453 aa, Homo sapiens
TGGRIVEGLKFPNEFDELEIQGKLPDPVKEYGCAPWPMVEKLIKQCLKENPQERPTSAQVFDILNSAELVCLTRRILLPKNVIVECMVATHHNSRNASIWLGCGHTDRGQLSFLDLNTEGYTSEEVADSRILCLALVHLPVEKESWIVSGTQSGTLLVINTEDGKKRHTLEKMTDSVTCLYCNSFSKQSKQKNFLLVGTADGKLAIFEDKTVKLKGAAPLKILNIGNVSTPLMCLSESTNSTERNVMWGGCGTKIFSFSNDFTIQKLIETRTSQLFSYAAFSDSNIITVVVDTALYIAKQNSPVVEVWDKKTEKLCGLIDCVHFLREVMVKENKESKHKMSYSGRVKTLCLQKNTALWIGTGGGHILLLDLSTRRLIRVIYNFCNSVRVMMTAQLGSLKNVMLVLGYNRKNTEEIQSCLTVWDINLPHEVQNLEKHIEVRKELAEKMRRTSVE

SEQ ID NO: 24090 - protein, 1397 aa, Homo sapiens
MQPLTKDAGMSLSSVTLASALQVRGEALSEEEIWSLLFLAAEQLLEDLRNDSSDYVVCPWSALLSAAGSLSFQGRVSHIEAAPFKAPELLQGQSEDEQPDASQMHVYSLGMTLYWSAGFHVPPHQPLQLCEPLHSILLTMCEDQPHRRCTLQSVLEACRVHEKEVSVYPAPAGLHIRRLVGLVLGTISEVEKRVVEESSSVQQNRSYLLRKRLRGTSSESPAAQAPECLHPCRVSERSTETQSSPEPHWSTLTHSHCSLLVNRALPGADPQDQQAGRRLSSGSVHSAADSSWPTTPSQRGFLQRRSKFSRPEFILLAGEAPMTLHLPGSVVTKKGKSYLALRDLCVVLLNGQHLEVKCDVESTVGAVFNAVTSFANLEELTYFGLAYMKSKEFFFLDSETRLCKIAPEGWREQPQKTSMNTFTLFLRIKFFVSHYGLLQHSLTRHQFYLQLRKDILEERLYCNEEILLQLGVLALQAEFGNYPKEQVESKPYFHVEDYIPASLIERMTALRVQVEVSEMHRLSSALWGEDAELKFLRVTQQLPEYGVLVHQVFSEKRRPEEEMALGICAKGVIVYEVKNNSRIAMLRFQWRETGKISTYQKKFTITSSVTGKKHTFVTDSAKTSKYLLDLCSAQHGFNAQMGSGQPSHVLFDHDKFVQMANLSPAHQARSKPLIWIQRLSCSENELFVSRLQGAAGGLLSTSMDNFNVDGSKEAGAEGIGRSPCTGREQLKSACVIQKPMTWDSLSGPPVQSMHAGSKNNRRKSFIAEPGREIVRVTLKRDPHRGFGFVINEGEYSGQADPGIFISSIIPGGPAEKAKTIKPGGQILALNHISLEGFTFNMAVRMIQNSPDNIELIISQSKGVGGNNPDEEKNSTANSGVSSTDILSFGYQGSLLSHTQDQDRNTEELDMAGVQSLVPRLRHQLSFLPLKGAGSSCPPSPPEISAGEIYFVELVKEDGTLGFSVTGGINTSVPYGGIYVKSIVPGGPAAKEGQILQGDRLLQVDGVILCGLTHKQAVQCLTGPGQVARLVLERRVPRSTQQCPSANDSMGDERTAVSLVTALPGRPSSCVSVTDGPKFEVKLKKNANGLGFSFVQMEKESCSHLKSDLVRIKRLFPGQPAEENGAIAAGDIILAVNGRSTEGLIFQEVLHLLRGAPQEVTLLLCRPPPGALPELEQEWQTPELSADKEFTRATCTDSCTSPILDQEDSWRDSASPDAGEGLGLRPESSQKAIREAQWGQNRERPWASSLTHSPESHPHLCKLHQERDESTLATSLEKDVRQNCYSVCDIMRLGSPELDGEDGEGDMYHPCGAPSPTSEDEEYLTINSTCQGQLPCEECLEADSGTIPLPQFCSWGTVPESLPPEESPESGSEWEDLEEPVALEYGALRSLSFGGLNV

SEQ ID NO: 24091 - protein, 2495 aa, Homo sapiens
MARFGDEMPARYGGGGSGAAAGVVVGSGGGRGAGGSRQGGQPGAQRMYKQSMAQRARTMALYNPIPVRQNCLTVNRSLFLFSEDNVVRKYAKKITEWPPFEYMILATIIANCIVLALEQHLPDDDKTPMSERLDDTEPYFIGIFCFEAGIKIIALGFAFHKGSYLRNGWNVMDFVVVLTGILATVGTEFDLRTLRAVRVLRPLKLVSGIPSLQVVLKSIMKAMIPLLQIGLLLFFAILIFAIIGLEFYMGKFHTTCFEEGTDDIQGESPAPCGTEEPARTCPNGTKCQPYWEGPNNGITQFDNILFAVLTVFQCITMEGWTDLLYNSNDASGNTWNWLYFIPLIIIGSFFMLNLVLGVLSGEFAKERERVENRRAFLKLRRQQQIERELNGYMEWISKAEEVILAEDETDGEQRHPFDGALRRTTIKKSKTDLLNPEEAEDQLADIASVGSPFARASIKSAKLENSTFFHKKERRMRFYIRRMVKTQAFYWTVLSLVALNTLCVAIVHYNQPEWLSDFLYYAEFIFLGLFMSEMFIKMYGLGTRPYFHSSFNCFDCGVIIGSIFEVIWAVIKPGTSFGISVLRALRLLRIFKVTKYWASLRNLVVSLLNSMKSIISLLFLLFLFIVVFALLGMQLFGGQFNFDEGTPPTNFDTFPAAIMTVFQILTGEDWNEVMYDGIKSQGGVQGGMVFSIYFIVLTLFGNYTLLNVFLAIAVDNLANAQELTKDEQEEEEAANQKLALQKAKEVAEVSPLSAANMSIAVKEQQKNQKPAKSVWEQRTSEMRKQNLLASREALYNEMDPDERWKAAYTRHLRPDMKTHLDRPLVVDPQENRNNNTNKSRAAEPTVDQRLGQQRAEDFLRKQARYHDRARDPSGSAGLDARRPWAGSQEAELSREGPYGRESDHHAREGSLEQPGFWEGEAERGKAGDPHRRHVHRQGGSRESRSGSPRTGADGEHRRHRAHRRPGEEGPEDKAERRARHREGSRPARGGEGEGEGPDGGERRRRHRHGAPATYEGDARREDKERRHRRRKENQGSGVPVSGPNLSTTRPIQQDLGRQDPPLAEDIDNMKNNKLATAESAAPHGSLGHAGLPQSPAKMGNSTDPGPMLAIPAMATNPQNAASRRTPNNPGNPSNPGPPKTPENSLIVTNPSGTQTNSAKTARKPDHTTVDIPPACPPPLNHTVVQVNKNANPDPLPKKEEEKKEEEEDDRGEDGPKPMPPYSSMFILSTTNPLRRLCHYILNLRYFEMCILMVIAMSSIALAAEDPVQPNAPRNNVLRYFDYVFTGVFTFEMVIKMIDLGLVLHQGAYFRDLWNILDFIVVSGALVAFAFTGNSKGKDINTIKSLRVLRVLRPLKTIKRLPKLKAVFDCVVNSLKNVFNILIVYMLFMFIFAVVAVQLFKGKFFHCTDESKEFEKDCRGKYLLYEKNEVKARDREWKKYEFHYDNVLWALLTLFTVSTGEGWPQVLKHSVDATFENQGPSPGYRMEMSIFYVVYFVVFPFFFVNIFVALIIITFQEQGDKMMEEYSLEKNERACIDFAISAKPLTRHMPQNKQSFQYRMWQFVVSPPFEYTIMAMIALNTIVLMMKFYGASVAYENALRVFNIVFTSLFSLECVLKVMAFGILNYFRDAWNIFDFVTVLGSITDILVTEFGNNFINLSFLRLFRAARLIKLLRQGYTIRILLWTFVQSFKALPYVCLLIAMLFFIYAIIGMQVFGNIGIDVEDEDSDEDEFQITEHNNFRTFFQALMLLFRSATGEAWHNIMLSCLSGKPCDKNSGILTRECGNEFAYFYFVSFIFLCSFLMLNLFVAVIMDNFEYLTRDSSILGPHHLDEYVRVWAEYDPAAWGRMPYLDMYQMLRHMSPPLGLGKKCPARVAYKRLLRMDLPVADDNTVHFNSTLMALIRTALDIKIAKGGADKQQMDAELRKEMMAIWPNLSQKTLDLLVTPHKSTDLTVGKIYAAMMIMEYYRQSKAKKLQAMREEQDRTPLMFQRMEPPSPTQEGGPGQNALPSTQLDPGGALMAHESGLKESPSWVTQRAQEMFQKTGTWSPEQGPPTDMPNSQPNSQSVEMREMGRDGYSDSEHYLPMEGQGRAASMPRLPAENQTISDTSPMKRSASVLGPKARRLDDYSLERVPPEENQRHHQRRRDRSHRASERSLGRYTDVDTGLGTDLSMTTQSGDLPSKERDQERGRPKDRKHRQHHHHHHHHHHPPPPDKDRYAQERPDHGRARARDQRWSRSPSEGREHMAHRQGSSSVSGSPAPSTSGTSTPRRGRRQLPQTPSTPRPHVSYSPVIRKAGGSGPPQQQQQQQQQQQQQAVARPGRAATSGPRRYPGPTAEPLAGDRPPTGGHSSGRSPRMERRVPGPARSESPRACRHGGARWPASGPHVSEGPPGPRHHGYYRGSDYDEADGPGSGGGEEAMAGAYDAPPPVRHASSGATGRSPRTPRASGPACASPSRHGRRLPNGYYPAHGLARPRGPGSRKGLHEPYSESDDDWC

SEQ ID NO: 24092 - protein, 369 aa, Homo sapiens
MGFNRPSKIQEMALPMMLAHPPQNLIAQSQSGTGKTAAFVLAMLSRVNALELFPQCLCLAPTYELALQTGRVVEQMGKFCVDVQVMYAIRGNRIPRGTDITKQIIIGTPGTVLDWCFKLKLIDLTKIRVFVLDEADVMIDTQGFSDHSIRIQRALPSECQMLLFSATFEDSVWHFAERIIPDPNVIKLRKEELTLNNIRQYYVLCEHRKDKYQALCNIYGSITIGQAIIFCQTRRNAKWLTVEMIQDGHQVSLLSGELTVEQRASIIQRFRDGKEKVLITTNVCARGIDVKQVTIVVNFDLPVKQGEEPDYETYLHRIGRTGRFGKKGLAFNMIEVDELPSLMKIQDHFNSSIKQLNAEDMDEIEKIDY

SEQ ID NO: 24093 - protein, 4340 aa, Homo sapiens
MSLLCVRVKRAKFQGSPDKFNTYVTLKVQNVKSTTVAVRGDQPSWEQDFMFEISRLDLGLSVEVWNKGLIWDTMVGTVWIALKTIRQSDEEGPGEWSTLEAETLMKDDEICGTRNPTPHKILLDTRFELPFDIPEEEARYWTYKWEQINALGADNEYSSQEESQRKPLPTAAAQCSFEDPDSAVDDRDSDYRSETSNSFPPPYHTASQPNASVHQFPVPVRSPQQLLLQGSSRDSCNDSMQSYDLDYPERRAIRYAQKYDTLDRRRKKKSLYNHFEDSERRQYGERSETKTNYKSTYSNTENCTLCHTEKKQNMGYPVLYPYKNGFVVKSGMQRIKLESHDYDLSSCLRHCEKSSGSNQHVTNFTSLDILEDSTSSTSDELLGSPISDKQENLQSPTWHSSNVHHIGDFPEEYYVANSALPLQRMNCDAKTLGDLSECSIEEITPSSIEEPKEDRIDTMDELQCLVETVSEYLAEKEEEINRFGSLSKTKKSHKQNSTLDAEQRTPGDQIPPLTIVKNDKDTAISFPELTGVQCAVGSLFSSLTEKVGSGTKHLTNSVEKLVSLVPEKTETLNQIEAINLGSKPRAMAVLGKDLSMQSPLSSQKDDNVNIDRHRKTSENEHMGNKTGSLYFQNTTESIAKDLAPQSQSSVIKSVFSRLNPLKIFSEKEETKKDDDQSKPPRKESFVECGLELNKREGTLDNYSSSIIALNGSDEETTGWFQMPTSENLLSSQVTSEPSNLVSSASKNDESLLEEKLCIDLSLLPDQQKICAKDTPGHPCIAGSRTANKEVFSKPLEEDKVTGNDDFLEPLRKSFSQFLLTSPETCSKESLSEPVKIRQVEEDGLERGSKKDGHSFSFSGKLNLPFFRSLGHSEKQQELKEKGSIFPLFKFSFTDSKVTVNDQSLRGSAVTTDEESKKNCHEDTKHSSIKSSSVPNIHSDLGKFDSTEEFKKNDQINCPEDAKLNSIKSSSVPNIHDDLEKFDSIKEFNKNDQVNCPEDAKLSSIKSGSAPNTQDNLGKFDSTEEFNQNDQINSPEDAKFNIIKSDSVTNINNDLGKFGNIEELNPSDHTAGQNFERDGLAIPGVVPKEHITSDPLGEDKNLIQAASSVASDSSLECISTTSKSTLVNEINEDEVIDKTSKKNTQGSFLSGLFNRFSSAENLSSQELNLKNDDSHHKNNTPGLISGIFNLLSNSGMIDHKPEEAKFMSLGNMKSLNGDNHLSLDEVPATSCVTSENPKNHVEKHETSSFIEASLLPKENIPLSDAGDDNHYCSPTEKNQQSEKHHPSSENIVLHCAPSAQLGFLEKSMAKRQMPNHVLEAKLHENSNKLNSPVLNTNILNKSNNYQAFEEMNSPFCFEWDSDIKDLSKNSRKLQPVYYMLNQNRFLSADACLWLDSENSVINFCQKDQNANILEWRTNPNSVIWCDLPYESFNQLAFNEDYLLRGDVWAANSLYGNSGPLPINEANNSLEELPIDLSSSSDHEKTTCPVVDQESLRMDENFVFSSFGYEYQEWLSCLEHGVWWPSEDGDYGYYMFHDGQYIYSLLTDSTGQYAYLFIPDSYQEYLDCDLQTNGLSSITLDDSIISACSFKVLDKEDEIFWYVEEEPIDDPLDLSLALPRSEEPLYLNLETFSQVLKESSCDQSDQPLDFSGYNRQKFKGDFRSFKERPCGSEDAECTLDLRNQPQTISNHVSSRDQIIERDKNQPLAEDSSVHLSSFHWLQSSVEEVTTLVHPENMTKGSQQAEETSLVNKVASVFSVLGASVGSTLKFDKSESLEALAMQKVNQQSDLAELTNDGFQSLIMSKQLEGNSPNVEKSLLKDSERQIVSNVQHPELIKNIRQEFSLNKNNHVKKQSLLKSGFQVSQTTPQAKSGVKDDEIITTDSISVSPAPQHSGDERENYELPQGQSSKESDKTLFKSSLKLFSQEESSVSMTANEKQSSGFLNLFKTQVNKEGSPNLEKIGDTNVKIPPQEKKESSGVSNFWGTLGDFFKANVSPIQTTENTSVSSMTIKDEVRSSPTPMELASQGAGNFPAAPISSKGKARVRRLNKQTTIDDSRLEESTRGIQGNDLTEKEVPFRDHLIQQSPNSSFSTSSLKESSRESSVETSGVTTVTEVSKSNEISFDTLSKRNSNEQDHFSDKDWSFSMAATSSSQPELSTKKSIFSFLTGSEKSENRASATLPRAKSQAEGLFTLPSFFSTASSSIKKDASHSSSTFSFFSLSFLDQKKETSGEKQSISTVVPVTSQPCKKTNVFVESGSTMTRESSSGHRDSIAQEVVHEQQMAPCISINNTIEVTSLADELSVDKDCQEKLSSNIVPGTSVDFQMNELQKDIIPPSPEFQAQAETFLTGPENLGIAPHEEEAFNHKAFPSDSLSNSFSHAKQLIEKFNDLDTCTNCHQNEKFTTDPVNLPLEKAPDEVLPQILEPASSSPEPGCAGNLQNQDADKEEDKFALGSSVDMLSGFVTKVKSFSGSLIEPPKTLSGLFSSPKSPKKNSFFSLASDVSSQPLKGELFGIFKSPKPEPYKQESSLPATSWLQNGCSRDAVGSVPPERREAAFTALSSESTLSDCRMTVVSAKPESDILTDDPKLTTKMEDNNTPENILEPQRSETINTSSFSGDDTGQGVLSLSDEGDMGILQATDTEASLEAENFALPAQLHPDPTCIAEELPPPIQPPLPLEPEPAIQTASTNQDLLELHPASSLETDTMLFNDASVSQSTTLETEGHFSHPLLEDPVLAARESCEIIHAQKDPPVVPQETEQSRPRFEIPNVTTWPKLRLPSSATNHGKPLSSFFSSPLPSGNRAAETGLMSSFKKLSTLFEGSSEGKGSVLASDSKLGFGKVDLSFPWPKENKGVPEQMPTESSPPVLVTSSDQDLNSSEANKALKSSQISGASAQPGKVYTQPSGTSEQLVASPEVCAQGLSGSGEGGNQQEISASGEHWDTKANLSSPACPSGKHEEEPSTVSEIFHQLEKQEEEAVPASTDSDLNVQQPVTLNDIKEPMTNKSPTSSSRYGSSCNVSQGSSQLSELDQYHEQDDDHRETDSIHSCHSSHSLSRDGQAGFGEQEKPLEVTGQAEKEAACEPKEMKEDATTHPPPDLVLQKDHFLGPQESFPEENASSPFTQARAHWIRAVTKVRLQLQEIPDDGDPSLPQWLPEGPAGGLYGIDSMPDLRRKKPLPLVSDLSLVQSRKAGITSAMATRTSLKDEELKSHVYKKTLQALIYPISCTTPHNFEVWTATTPTYCYECEGLLWGIARQGMRCSECGVKCHEKCQDLLNADCLQRAAEKSCKHGAEDRTQNIIMAMKDRMKIRERNKPEIFEVIRDVFTVNKAAHVQQMKTVKQSVLDGTSKWSAKITITVVCAQGLQAKDKTGSSDPYVTVQVSKTKKRTKTIFGNLNPVWEEKFHFECHNSSDRIKVRVWDEDDDIKSRVKQRLKRESDDFLGQTIIEVRTLSGEMDVWYNLEKRTDKSAVSGAIRLQISVEIKGEEKVAPYHVQYTCLHENLFHYLTDIQGSGGVRIPEARGDDAWKVYFDETAQEIVDEFAMRYGIESIYQAMTHFACLSSKYMCPGVPAVMSTLLANINAYYAHTTASTNVSASDRFAASNFGKERFVKLLDQLHNSLRIDLSTYRNNFPAGSPERLQDLKSTVDLLTSITFFRMKVQELQSPPRASQVVKDCVKACLNSTYEYIFNNCHDLYSRQYQLKQELPPEEQGPSIRNLDFWPKLITLIVSIIEEDKNSYTPVLNQFPQELNVGKVSAEVMWHLFAQDMKYALEEHEKDHLCKSADYMNLHFKVKWLHNEYVRDLPVLQGQVPEYPAWFEQFVLQWLDENEDVSLEFLRGALERDKKDGFQQTSEHALFSCSVVDVFTQLNQSFEIIRKLECPDPSILAHYMRRFAKTIGKVLMQYADILSKDFPAYCTKEKLPCILMNNVQQLRVQLEKMFEAMGGKELDLEAADSLKELQVKLNTVLDELSMVFGNSFQVRIDECVRQMADILGQVRGTGNASPDARASAAQDADSVLRPLMDFLDGNLTLFATVCEKTVLKRVLKELWRVVMNTMERMIVLPPLTDQTGTQLIFTAAKELSHLSKLKDHMVREETRNLTPKQCAVLDLALDTIKQYFHAGGNGLKKTFLEKSPDLQSLRYALSLYTQTTDTLIKTFVRSQTTQGSGVDDPVGEVSIQVDLFTHPGTGEHKVTVKVVAANDLKWQTAGMFRPFVEVTMVGPHQSDKKRKFTTKSKSNNWAPKYNETFHFLLGNEEGPESYELQICVKDYCFAREDRVLGLAVMPLRDVTAKGSCACWCPLGRKIHMDETGLTILRILSQRSNDEVAREFVKLKSESRSTEEGS

SEQ ID NO: 24094 - protein, 432 aa, Homo sapiens
RGTFGTRWEAMKAKATELRVCCARRKREAREFKPPQMRGSTRLNISDDLKIGFFSTDHATQTDSSEILSVKELSSSTQKLAQMMKSLQVDFGFLKQLLQLKFEDRLKEESLSLFTILHDRILEIEKHYQQNEDKMRKSFNQQLADAIAVIKGMYQQFFEVEEENVSLQDASTVKTNILLRKLKEKEEVIKELKEELDQYKDFGFHKMESFAKETSSPKSNLEKENLEYKVENERLLQIISELEEEIQINLKENSGLEDELISMKEMAEKDHKTIQKLMDSRDRLREELHYEKSLVQDVINKQKEDKEMRKKYGSLSVKVARSAKGREASLSPWPKSPPSTTALRPHSATMSVSSAGAQKAKMPKKALKEDQAVVEDKHGLESQIEALKANLENEKKKVERFRKEADRLNKSWEKRFFILRNRYESKTLISAV

SEQ ID NO: 24095 - protein, 331 aa, Homo sapiens
MAVFVVLLALVAGVLGNEFSILKSPGSVVFRNGNWPIPGERIPDVAALSMGFSVKEDLSWPGLAVGNLFHRPRATVMVMVKGVNKLALPPGSVISYPLENAVPFSLDSVANSIHSLFSEETPVVLQLAPSEERVYMVGKANSVFEDLSVTLRQLRNRLFQENSVLSSLPLNSLSRNNEVDLLFLSELQVLHDISSLLAGLDEIGKRYGEDSEQFRDASKILVDALQKFADDMYSLYGGNAVVELVTVKSFDTSLIRKTRTILEAKQAKNPASPYNLAYKYNFEYSVVFNMVLWIMIALALAVIITSYNIWNMDPGYDSIIYRMTNQKIRMD

SEQ ID NO: 24096 - protein, 675 aa, Homo sapiens
MVPPGKKPAGEASNSNKKCKRYFNEHWKEEFTWLDFDYERKLMFCLECRQALVRNKHGKAENAFTVGTDNFQRHALLRHVTSGAHRQALAVNQGQPPFEGQAEGGGACPGLATTPASRGVKVELDPAKVAVLTTVYCMAKEDVPNDRCSALLELQRFNLCQALLGTEHGDYYSPRRVRDMQVAIASVLHTEACQRLKASPYVGLVLDETRDWPESHSLALFATSVSPCDGQPATTFLGSVELQEGEATAGQLLDILQAFGVSAPKLAWLSSSLPSERLGSVGPQLRATCPLLAELHCLPGRTDPEPPAYLGQYESILDALFRLHGGPSSHLVPELRAALDLAAIDLAGPRPVPWASLLPVVEAVAEAWPGLVPTLEAAALASPVAGSLALALRQFTFVAFTHLLLDALPSVQKLSLVLQAEEPDLALLQPLVMAAAASLQAQRGSGGARLQGFLQELASMDPDASSGRCTYRGVELLGYSEAAVRGLEWLRGSFLDSMRKGLQDSYPGPSLDAVAAFAAIFDPRRYPQAPEELGTHGEGALRVLLRGFAPAVVRQRALGDFALFKRVVFGLGRLGPRALCTQLACAHSELHELFPDFAALAALALALPAGAGLLDKVGRSRELRWWGQSGAGEGRGGHMVKIAVDGPPLHEFDFGLAVEFLESGWGEGFLGSQLT

SEQ ID NO: 24097 - protein, 474 aa, Homo sapiens
GSASAPTLFPLVSCENSPSDTSSVAVGCLAQDFLPDSITFSWKYKNNSDISSTRGFPSVLRGGKYAATSQVLLPSKDVMQGTDEHVVCKVQHPNGNKEKNVPLPVIAELPPKVSVFVPPRDGFFGNPRKSKLICQATGFSPRQIQVSWLREGKQVGSGVTTDQVQAEAKESGPTTYKVTSTLTIKESDWLGQSMFTCRVDHRGLTFQQNASSMCVPDQDTAIRVFAIPPSFASIFLTKSTKLTCLVTDLTTYDSVTISWTRQNGEAVKTHTNISESHPNATFSAVGEASICEDDWNSGERFTCTVTHTDLPSPLKQTISRPKGVALHRPDVYLLPPAREQLNLRESATITCLVTGFSPADVFVQWMQRGQPLSPEKYVTSAPMPEPQAPGRYFAHSILTVSEEEWNTGETYTCVVAHEALPNRVTERTVDKSTEGEVSADEEGFENLWATASTFIVLFLLSLFYSTTVTLFKVK

SEQ ID NO: 24098 - protein, 632 aa, Homo sapiens
MVSNPVHGLPFLPGTSFKDSTKTAFHRSQTLSYRNGYAIVRRPTVGIGGDRLQFNQLSQAELDELASKAPVLTYGQPKQAPPADFIPAHVAFDKKVLKFDAYFQEDVPMSTEEQYRIRQVNIYYYLEDDSMSVIEPVVENSGILQGKLIKRQRLAKNDRGDHYHWKDLNRGINITIYGKTFRVVDCDQFTQVFLESQGIELNPPEKMALDPYTELRKQPLRKYVTPSDFDQLKQFLTFDKQVLRFYAIWDDTDSMYGECRTYIIHYYLMDDTVEIREVHERNDGRDPFPLLMNRQRVPKVLVENAKNFPQCVLEISDQEVLEWYTAKDFIVGKSLTILGRTFFIYDCDPFTRRYYKEKFGITDLPRIDVSKREPPPVKQELPPYNGFGLVEDSAQNCFALIPKAPKKDVIKMLVNDNKVLRYLAVLESPIPEDKDRRFVFSYFLATDMISIFEPPVRNSGIIGGKYLGRTKVVKPYSTVDNPVYYGPSDFFIGAVIEVFGHRFIILDTDEYVLKYMESNAAQYSPEALASIQNHVRKREAPAPEAESKQTEKDPGVQELEALIDTIQKQLKDHSCKDNIREAFQIYDKEASGYVDRDMFFKICESLNVPVDDSLVKEVSMNYSSEFIAEARH

SEQ ID NO: 24099 - protein, 872 aa, Homo sapiens
MATACKRSGEPQSDDIEASRMKRAAAKHLIERYYHQLTEGCGNEACTNEFCASCPTFLRMDNNAAAIKALELYKINAKLCDPHPSKKGASSAYLENSKGAPNNSCSEIKMNKKGARIDFKDVTYLTEEKVYEILELCREREDYSPLIRVIGRVFSSAEALVQSFRKVKQHTKEELKSLQAKDEDKDEDEKEKAACSAAAMEEDSEASSSRIGDSSQGDNNLQKLGPDDVSVDIDAIRRVYTRLLSNEKIETAFLNALVYLSPNVECDLTYHNVYSRDPNYLNLFIIVMENRNLHSPEYLEMALPLFCKAMSKLPLAAQGKLIRLWSKYNADQIRRMMETFQQLITYKVISNEFNSRNLVNDDDAIVAASKCLKMVYYANVVGGEVDTNHNEEDDEEPIPESSELTLQELLGEERRNKKGPRVDPLETELGVKTLDCRKPLIPFEEFINEPLNEVLEMDKDYTFFKVETENKFSFMTCPFILNAVTKNLGLYYDNRIRMYSERRITVLYSLVQGQQLNPYLRLKVRRDHIIDDALVRLEMIAMENPADLKKQLYVEFEGEQGVDEGGVSKEFFQLVVEEIFNPDIGMFTYDESTKLFWFNPSSFETEGQFTLIGIVLGLAIYNNCILDVHFPMVVYRKLMGKKGTFRDLGDSHPVLYQSLKDLLEYEGNVEDDMMITFQISQTDLFGNPMMYDLKENGDKIPITNENRKEFVNLYSDYILNKSVEKQFKAFRRGFHMVTNESPLKYLFRPEEIELLICGSRNLDFQALEETTEYDGGYTRDSVLIREFWEIVHSFTDEQKRLFLQFTTGTDRAPVGGLGKLKMIIAKNGPDTERLPTSHTCFNVLLLPEYSSKEKLKERLLKAITYAKGFGML

SEQ ID NO: 24100 - protein, 408 aa, Homo sapiens
MCLFRVISFLFSHNTKTTSWLDPRLAKKAKPPEECKENELPYGWEKIDDPIYGTYYVDHINRRTQFENPVLEAKRKLQQHNMPHTELGTKPLQAPGFREKPLFTRDASQLKGTFLSTTLKKSNMGFGFTIIGGDEPDEFLQVKSVIPDGPAAQDGKMETGDVIVYINEVCVLGHTHADVVKLFQSVPIGQSVNLVLCRGYPLPFDPEDPANSMVPPLAIMERPPPVMVNGRHNYETYLEYISRTSQSVPDITDRPPHSLHSMPTDGQLDGTYPPPVHDDNVSMASSGATQAELMTLTIVKGAQGFGFTIADSPTGQRVKQILDIQGCPGLCEGDLIVEINQQNVQNLSHTEVVDILKDCPIGSETSLIIHRGGKTNTGSAIKYVGKIVGSFNNIVKMQISLELNEIIL

SEQ ID NO: 24101 - protein, 116 aa, Homo sapiens
IKKPLNAFMLYMKEMRAKVVAECTLKESAAINQILGRRWHALSREEQAKYYELARKERQLHMQLYPGWSARDNYGKKKKRKRDKQPGETNGEKKSAFATYKVKAAASAHPLQMEAY

SEQ ID NO: 24102 - protein, 563 aa, Homo sapiens
MEMDVEGVSPRPEPIPRSQGAGGACQAPPQPPQPQPPPQQLAQDELPGESAGAEDSDDPETRPNGEKGESKRTSANKSSGAPSYSRWSSSQPHQSSSTVRAYQTSKSRVTMSPGFSSQWNSSQPAWNTYSFPRASLHYQSHASYTYCTGHPASYAPAPHPMAPPSPSTNSSSNNSSNNSSGEQLSKTNLYIRGLPPGTTDQDLIKLCQPYGKIVSTKAILDKNTNQCKGYGFVDFDSPAAAQKAVASLKANGVQAQMAKQQEQDPTNLYISNLPISMDEQELENMLKPFGHVISTRILRDANGVSRGVGFARMESTEKCEVVIQHFNGKYLKTPPGIPAPSEPLLCKFADGGQKKRQNQSKYTQNGRPWPREGEAGMALTYDPTAAIQNGFYSSPYSIATNRMIPQTSITPFIAASPVSTYQVQSTSWMPHPPYVMQPTGAVITPTMDHPMSMQPANMMGPLTQQMNHLSLGTTGTIQSQDRIMILHQLLCQYMTAAAPMQGTYIPQYTPVPPTAVSIEGVVADTSPQTVAPSSQDTSGQQQQIAVDTSNEHAPAYSYQQSKP

SEQ ID NO: 24103 - protein, 1196 aa, Homo sapiens
MGERAYHGAQVCSGTNPRKCQDLGDSILLLLGSFILLNVWINVVTLLWKHLKSSLRILFRHFFPKDKQPSGSHPICICSSVDPKNLCSKVSSRVHPRPGFLLRRVNHLDSWIPDTNDEKVSACCCVPPKCGHAGVPRESARGLYKAGMMGGGEAPQVTASKAQASLLSRPETSSQFPKMSKLDTGPCHLPQESKTKTPDCAPAEAPAQAQVHSPTHTPVCTPTHPWTRSTDHTAVHTPAHSWTHSKARTPEGTHSQAQDTSAQAQAHTSAPTPAQTPAHIQAHTPAPTPAKASAHTKAHTSAQAQTHSPPHTPEYTHSQAHSPEHTSAHSPAQAPMPVPAHPQAHAPEYTSAHAPAYIPDHSHLVRSSVPVPTSAPAPPGTLAPATTPVLAPTPAPVPASAPSPAPALVMALTTTPVPDPVPATTPAPIITPIPSTPPAFSHDLSTGHVVYDARREKQNFFHMSSPQNPEYSRKDLATLFRPQEGQDLVSSGISEQTKQCSGDSAKLPAGSILGYLELRNMEWKNSDDAKDKFPQTKTSPYCSFHPCSSEKNTDSQAPFYPKFLAYSRDTACAKTCFHSATTAQSSVCTLPPPFTLSLPLVPPRSFVPPQPTNHQRPSTLIQTPTVLPTSKSPQSILTSQFPIPSLFATISQPLIQPQCPECHESLGLTQDSGLQRTPGPSKDSRVPRNLDLAQNPDLYKNPGLTQDPGLHENPGLAPNQGLHEFPGLPQDSYLCQNPSPSQDFGLHKNSGITQDSHPQKNTGLTQEAGILRSPCLTQSPGLHKKTPFTQTSDLQRSSGFTQDSGIYRNLEPNQETVIYKNQDLSQATDHQKNLGSSKDSGGHKNTGNVQDPGVCSTAGLTEDSGSQKGPYVPQDSEVNKSSGVIQESFLHKSPGLVQTSGLPKCSGLTQNSGDYKNPGLIQDCGGHKVKGLTQDSNLPSLTQATKVERRFSLPQDVGVYRSSEHSQDSNLHKCPGINQDPGPHKDPALVQDSGLPKISGLTQESGPYKSSCLIPDPSLYKNPSPALGSDFVQLLSLLQTPKSTLSLMKSSVPEKAAQKEDAQRHVLWARVQLNENSCPSKAQVVSNDLQTFSEVPVLIELQSSSWRAGSQHGAYRPVDTVPSGYQNYRQMSMPTHINWKSHCPGPGTQAGHVVFDARQRRLAVGKDKCEALSPRRLHQEAPSNSGKPSRSGDIRM

SEQ ID NO: 24104 - protein, 170 aa, Homo sapiens
MTSVAKVYYSQTTQTESRPLMGPGIRRRRVLTKDGRSNVRMEHIADKRFLYLKDLWTTFIDMQWRYKLLLFSATFAGTWFLFGVVWYLVAVAHGDLLELDPPANHTPCVVQVHTLTGAFLFSLESQTTIGYGFRYISEECPLAIVLLIAQLVLTTILEIFITGHGKRRWD

SEQ ID NO: 24105 - protein, 320 aa, Homo sapiens
MGNRGMEDLIPLVNRLQDAFSAIGQNADLDLPQIAVVGGQSAGKSSVLENFVGRDFLPRGSGIVTRRPLVLQLVNATTEYAEFLHCKGKKFTDFEEVRLEIEAETDRVTGTNKGISPVPINLRVYSPHVLNLTLVDLPGMTKVPVGDQPPDIEFQIRDMLMQFVTKENCLILAVSPANSDLANSDALKVAKEVDPQGQRTIGVITKLDLMDEGTDARDVLENKLLPLRRGYIGVVNRSQKDIDGKKDITAALAAERKFFLSHPSYRHLADRMGTPYLQKVLNQMEFCSCHPGWSAMVRSQLTATSASWIQGILLPQPPSN

SEQ ID NO: 24106 - protein, 829 aa, Homo sapiens
MEQTVLVPPGPDSFNFFTRESLAAIERRIAEEKAKNPKPDKKDDDENGPKPNSDLEAGKNLPFIYGDIPPEMVSEPLEDLDPYYINKKTFIVLNKGKAIFRFSATSALYILTPFNPLRKIAIKILVHSLFSMLIMCTILTNCVFMTMSNPPDWTKNVEYTFTGIYTFESLIKIIARGFCLEDFTFLRDPWNWLDFTVITFAYVTEFVDLGNVSALRTFRVLRALKTISVIPGLKTIVGALIQSVKKLSDVMILTVFCLSVFALIGLQLFMGNLRNKCIQWPPTNASLEEHSIEKNITVNYNGTLINETVFEFDWKSYIQDSRYHYFLEGFLDALLCGNSSDAGQCPEGYMCVKAGRNPNYGYTSFDTFSWAFLSLFRLMTQDFWENLYQLTLRAAGKTYMIFFVLVIFLGSFYLINLILAVVAMAYEEQNQATLEEAEQKEAEFQQMIEQLKKQQEAAQQAATATASEHSREPSAAGRLSDSSSEASKLSSKSAKERRNRRKKRKQKEQSGGEEKDEDEFQKSESEDSIRRKGFRFSIEGNRLTYEKRYSSPHQSLLSIRGSLFSPRRNSRTSLFSFRGRAKDVGSENDFADDEHSTFEDNESRRDSLFVPRRHGERRNSNLSQTSRSSRMLAVFPANGKMHSTVDCNGVVSLVGGPSVPTSPVGQLLPEGTTTETEMRKRRSSSFHVSMDFLEDPSQRQRAMSIASILTNTVEELEESRQKCPPCWYKFSNIFLIWDCSPYWLKVKHVVNLVVMDPFVDLAITICIVLNTLFMAMEHYPMTDHFNNVLTVGNLVSILEGFHWDLYSRNVSENYCHGSLLLFPRRLEYL

SEQ ID NO: 24107 - protein, 285 aa, Homo sapiens
MRAFIFFLFMLLAMFSASSTQISNTSVFKLEENPKPALILEEKNEANHLGGQRDSNKQGGSYTQGNPGTFRLQGQPGYFNKLEKPRHFKQGRAGVLNQPGILKNSGKSNQKGNPESSNKQENSGSSSQLGRPGISTQQGNPGSSDQQEKPGSFSQKVMVGSSSQQGKPGSSSQHGNLGSSTQKGNLGSSSLQGHLGLSSHQGKPESSGQQGKPGSSSQQGNLGTSGQQEKPGSSSQQGKPGLSSHQGKPGSSSQQGNLHLSSQQGNQGPSSKQRKPGSSSRQGNL

SEQ ID NO: 24108 - protein, 612 aa, Homo sapiens
MKQPIMADGPRCKRRKQANPRRKNVVNYDNVVDTGSETDEEDKLHIAEDDGIANPLDQETSPASVPNHESSPHVSQALLPREEEEDEIREGGVEHPWHNNEILQASVDGPEEMKEDYDTMGPEATIQTAINNGTVKNANCTSDFEEYFAKRKLEERDGHAVSIEEYLQRSDTAIIYPEAPEELSRLGTPEANGQEENDLPPGTPDAFAQLLTCPYCDRGYKRLTSLKEHIKYRHEKNEENFSCPLCSYTFAYRTQLERHMVTHKPGTDQHQMLTQGAGNRKFKCTECGKAFKYKHHLKEHLRIHSGEKPYECPNCKKRFSHSGSYSSHISSKKCIGLISVNGRMRNNIKTGSSPNSVSSSPTNSAITQLRNKLENGKPLSMSEQTGLLKIKTEPLDFNDYKVLMATHGFSGTSPFMNGGLGATSPLGVHPSAQSPMQHLGVGMEAPLLGFPTMNSNLSEVQKVLQIVDNTVSRQKMDCKAEEISKLKGYHMKDPCSQPEEQGVTSPNIPPVGLPVVSHNGATKSIIDYTLEKVNEAKACLQSLTTDSRRQISNIKKEKLRTLIDLVTDDKMIENHNISTPFSCQFCKESFPGPIPLHQHERYLCKMNEEIKA

SEQ ID NO: 24109 - protein, 205 aa, Homo sapiens
MAASTASHRPIKGILKNKTSTTSSMVASAEQPRRSVDEELSKKSQKWDEINILATYHPADKGYGLMKIDEPSPPYHSMMGDDEDACRDTETTEAMAPDILAKKLAAAEGLEPKYRIQEQESSGEEDSDLSPEEREKKRQFEMRRKLHYNEGLNIKLARQLISKDLHDDDEDEEMLETADGESMNTEESNQGSTPSDQQQNKLRSS

SEQ ID NO: 24110 - protein, 484 aa, Homo sapiens
MNQVVQPLMSRHSACRGSQAHLSWVDKGDLVALSLPAGHGDTDGPISLDVPDGAPDPQRTKAAIDHLHQKILKITEQIKIEQEARDDNVAEYLKLANNADKQQVSRIKQVFEKKNQKSAQTIAQLHKKLEHYRRRLKEIEQNGPSRQPKDVLRDMQQGLKDVGANVRAGISGFGGGVVEGVKGSLSGLSQATHTAVVSKPREFASLIRNKFGSADNIAHLKDPLEDGPPEEAARALSGSATLVSSPKYGSDDECSSASASSAGAGSNSGAGPGGALGSPKSNALYGAPGNLDALLEELREIKEGQSHLEDSMEDLKTQLQRDYTYMTQCLQEERYRYERLEEQLNDLTELHQNEMTNLKQELASMEEKVAYQSYERARDIQEAVESCLTRVTKLELQQQQQQVVQLEGVENANARALLGKFINVILALMAVLLVFVSTIANFITPLMKTRLRITSTTLLVLVLFLLWKHWDSLTYLLEHVLLPS

SEQ ID NO: 24111 - protein, 848 aa, Homo sapiens
MKDYVQVPAAELEKPYEFTSTRESPTFLYLRVCCCCSALRPRYKRLVDNIFPEDPKDGLVKTDMEKLTFYAVSAPEKLDRIGSYLAERLSRDVVRHRSGYVLIAMEALDQLLMACHSQSIKPFVESFLHMVAKLLESGEPKLQVLGTNSFVKFANIEEDTPSYHRRYDFFVSRFSAMCHSCHSDPEIRTEIRIAGIRGIQGVVRKTVNDELRATIWEPQHMDKIVPSLLFNMQKIEEVDSRIGPPSSPSATDKEENPAVLAENCFRELLGRATFGNMNNAVRPVFAHLDHHKLWDPNEFAVHCFKIIMYSIQAQYSHHVIQEILGHLDARKKDAPRVRAGIIQVLLEAVAIAAKGSIGPTVLEVFNTLLKHLRLSVEFEANDLQGGSVGSVNLNTSSKDNDEKIVQNAIIQTIGFFGSNLPDYQRSEIMMFIMGKVPVFGTSTHTLDISQLGDLGTRRIQIMLLRSLLMVTSGYKAKTIVTALPGSFLDPLLSPSLMEDYELRQLVLEVMHNLMDRHDNRAKLRGIRIIPDVADLKIKREKICRQDTSFMKKNGQQLYRHIYLGCKEEDNVQKNYELLYTSLALITIELANEEVVIDLIRLAIALQDSAIINEDNLPMFHRCGIMALVAAYLNFVSQMIAVPAFCQHVSKVIEIRTMEAPYFLPEHIFRDKCMLPKSLEKHEKDLYFLTNKIAESLGGSGYSVERLSVPYVPQVTDEDRLSRRKSIVDTVSIQVDILSNNVPSDDVVSNTEEITFEALKKAIDTSGMEEQEKEKRRLVIEKFQKAPFEEIAAQCESKANLLHDRLAQILELTIRPPPSPSGTLTITSGHAQYQSVPVYEMKFPDLCVY

SEQ ID NO: 24112 - protein, 465 aa, Homo sapiens
LGAFAKEEAARIRLGGPEPWKGPPSSRAAPELLEYGRSRCARCRVSRVGEDWIFLVLLGLLMALVSWVMDYAIAACLQAQQWMSRGLNTSILLQYLAWVTYPVVLITFSAGFTQILAPQAVGSGIPEMKTILRGVVLKEYLTLKTFIAKVIGLTCALGSGMPLGKEGPFVHIASMCAALLSKFLSLFGGIYENESRNTEMLAAACAVGVGCCFAAPIGGVLFSIEVTSTFFAVRNYWRGFFAATFSAFIFRVLAVWNRDEETITALFKTRFRLDFPFDLQELPAFAVIGIASGFGGALFVYLNRKIVQVMRKQKTINRFLMRKRLLFPALVTLLISTLTFPPGFGQFMAGQLSQKETLVTLFDNRTWVRQGLVEELEPPSTSQAWNPPRANVFLTLVIFILMKFWMSALATTIPVPCGAFMPVFVIGAAFGRLVGESMAAWFPDGIHTDSSTYRIVPGGYAVVGA

SEQ ID NO: 24113 - protein, 1239 aa, Homo sapiens
MKQPIMADGPRCKRRKQANPRRKNVVNYDNVVDTGSETDEEDKLHIAEDDGIANPLDQETSPASVPNHESSPHVSQALLPREEEEDEIREGGVEHPWHNNEILQASVDGPEEMKEDYDTMGPEATIQTAINNGTVKNANCTSDFEEYFAKRKLEERDGHAVSIEEYLQRSDTAIIYPEAPEELSRLGTPEANGQEENDLPPGTPDAFAQLLTCPYCDRGYKRLTSLKEHIKYRHEKNEENFSCPLCSYTFAYRTQLERHMVTHKPGTDQHQMLTQGAGNRKFKCTECGKAFKYKHHLKEHLRIHSDSSLGRQLQLLSNQGNVTVILIIILGEKPYECPNCKKRFSHSGSYSSHISSKKCIGLISVNGRMRNNIKTGSSPNSVSSSPTNSAITQLRNKLENGKPLSMSEQTGLLKIKTEPLDFNDYKVLMATHGFSGTSPFMNGGLGATSPLGVHPSAQSPMQHLGVGMEAPLLGFPTMNSNLSEVQKVLQIVDNTVSRQKMDCKAEEISKLKGYHMKDPCSQPEEQGVTSPNIPPVGLPVVSHNGATKSIIDYTLEKVNEAKACLQSLTTDSRRQISNIKKEKLRTLIDLVTDDKMIENHNISTPFSCQFCKESFPGPIPLHQHERYLCKMNEEIKAVLQPHENIVPNKAGVFVDNKALLLSSVLSEKGMTSPINPYKDHMSVLKAYYAMNMEPNSDELLKISIAVGLPQEFVKEWFEQRKVYQYSNSRSPSLERSSKPLAPNSNPPTKDSLLPRSPVKPMDSITSPSIAELHNSVTNCDPPLRLTKPSHFTNIKPVEKLDHSRSNTPSPLNLSSTSSKNSHSSSYTPNSFSSEELQAEPLDLSLPKQMKEPKSIIATKNKTKASSISLDHNSVSSSSENSDEPLNLTFIKKEFSNSNNLDNKSTNPVFSMNPFSAKPLYTALPPQSAFPPATFMPPVQTSIPGLRPYPGLDQMSFLPHMAYTYPTGAATFADMQQRRKYQRKQGFQGELLDGAQDYMSGLDDMTDSDSCLSRKKIKKTESGMYACDLCDKTFQKSSSLLRHKYEHTGKRPHQCQICKKAFKHKHHLIEHSRLHSGEKPYQCDKCGKRFSHSGSYSQHMNHRYSYCKREAEEREAAEREAREKGHLEPTELLMNRAYLQSITPQGYSDSEERESMPRDGESEKEHEKEGEDGYGKLGRQDGDEEFEEEEEESENKSMDTDPETIRDEEETGDHSMDDSSEDGKMETKSDHEEDNMEDGM

SEQ ID NO: 24114 - protein, 622 aa, Homo sapiens
MMSEKTQQRKLAGTKKKFTDYHQWNSAGVGTGATDTKKKKINHGANPETTTSGGCHSPEDKQQNRAQLKEENKASHQHQQALRRQLEAQDHTIRILMCQKTELETALHDSQDAARKFEEDSKDLAARLHHSWHFAGELQRALSAMSAEHERADKYIKELTKEREAMSLELFRNIITNKELKEKNAELQEKLRLVETEKSEIQLHIKELKRKLETDKIPLPQVQTNTLQEKMWRQEEELRDQEELRDQEKLRKHEEKMWRQEQRLRDQEKELREQEQQMQEQEEQMRKQEEQMRKQEEQMRKQEEQMRKQEEQMRKQEEQMRKQEEQMGKQEEQMGEQEEQMRKQEKQMLKQKEQMRKQEEQMWKQEEQIGEQEEQMRKQEEQMWKQEEQIGEQEEQMRKQEEQMWKQEEQMGEQMRKQEEQMGEQEEQIRKQEEQMGEQEEQMRKQEEQMGEQEEQMRKQEEQMGEQEEQMRKQEEQMGEQEEQMGEQEEQMRKQVERLQFKEERLWDEYEKMQEEEEKIRRQVEKRREKKERMGEQEKTQEERCSEPCLPPSKYPSDMSHPGSLEPAREAGKGYSHDNRTAQIMQLPPGMKNAQERPGLGSTSCIPFFYGGDKKKIKIISI

SEQ ID NO: 24115 - protein, 771 aa, Homo sapiens
MAGRRAPGEKRWQLVRWYVQEGRFRIEERTLTAFQWLYSPQQHRILSRADLESPSRIDKTMLASLKVKKQELANSSDATLPDRPLSPPLTAPPTMKSSEFFEMLEKMQGIKLEEQKPGPQKNKDDYIPYPSIDEVVEKGGPYPQVILPQFGGYWIEDPENVGTPTSLGSSICEEEEEDNLSPNTFGYKLECKGEARAYRRHFLGKDHLNFYCTGSSLGNLILSVKCEEAEGIEYLRVILRSKLKTVHERIPLAGLSKLPSVPQIAKAFCDDAVGLRFNPVLYPKASQMIVSYDEHEVNNTFKFGVIYQKARQTLEEELFGNNEESPAFKEFLDLLGDTITLQDFKGFRGGLDVTHGQTGVESVYTTFRDREIMFHVSTKLPFTDGDAQQLQRKRHIGNDIVAIIFQEENTPFVPDMIASNFLHAYIVVQVETPGTETPSYKVSVTAREDVPTFGPPLPSPPVFQKGPEFREFLLTKLTNAENACCKSDKFAKLEDRTRAALLDNLHDELHAHTQAMLGLGPEEDKFENGGHGGFLESFKRAIRVRSHSMETMVGGQKKSHSGGIPGSLSGGISHNSMEVTKTTFSPPVVAATVKNQSRSPIKRRSGLFPRLHTGSEGQGDSRARCDSTSSTPKTPDGGHSSQEIKSETSSNPSSPEICPNKEKPFMKLKENGRAISRSSSSTSSVSSTAGEGEAMEEGDSGGSQPSTTSPFKQEVFVYSPSPSSESPSLGAAATPIIMSRSPTDAKSRNSPRSNLKFRFDKLSHASSGAGH

SEQ ID NO: 24116 - protein, 2261 aa, Homo sapiens
MARFGDEMPARYGGGGSGAAAGVVVGSGGGRGAGGSRQGGQPGAQRMYKQSMAQRARTMALYNPIPVRQNCLTVNRSLFLFSEDNVVRKYAKKITEWPPFEYMILATIIANCIVLALEQHLPDDDKTPMSERLDDTEPYFIGIFCFEAGIKIIALGFAFHKGSYLRNGWNVMDFVVVLTGILATVGTEFDLRTLRAVRVLRPLKLVSGIPSLQVVLKSIMKAMIPLLQIGLLLFFAILIFAIIGLEFYMGKFHTTCFEEGTDDIQGESPAPCGTEEPARTCPNGTKCQPYWEGPNNGITQFDNILFAVLTVFQCITMEGWTDLLYNSNDASGNTWNWLYFIPLIIIGSFFMLNLVLGVLSGEFAKERERVENRRAFLKLRRQQQIERELNGYMEWISKAEEVILAEDETDGEQRHPFDGALRRTTIKKSKTDLLNPEEAEDQLADIASVGSPFARASIKSAKLENSTFFHKKERRMRFYIRRMVKTQAFYWTVLSLVALNTLCVAIVHYNQPEWLSDFLYYAEFIFLGLFMSEMFIKMYGLGTRPYFHSSFNCFDCGVIIGSIFEVIWAVIKPGTSFGISVLRALRLLRIFKVTKYWASLRNLVVSLLNSMKSIISLLFLLFLFIVVFALLGMQLFGGQFNFDEGTPPTNFDTFPAAIMTVFQILTGEDWNEVMYDGIKSQGGVQGGMVFSIYFIVLTLFGNYTLLNVFLAIAVDNLANAQELTKDEQEEEEAANQKLALQKAKEVAEVSPLSAANMSIAVKEQQKNQKPAKSVWEQRTSEMRKQNLLASREALYNEMDPDERWKAAYTRHLRPDMKTHLDRPLVVDPQENRNNNTNKSRAAEPTVDQRLGQQRAEDFLRKQARYHDRARDPSGSAGLDARRPWAGSQEAELSREGPYGRESDHHAREGSLEQPGFWEGEAERGKAGDPHRRHVHRQGGSRESRSGSPRTGADGEHRRHRAHRRPGEEGPEDKAERRARHREGSRPARGGEGEGEGPDGGERRRRHRHGAPATYEGDARREDKERRHRRRKENQGSGVPVSGPNLSTTRPIQQDLGRQDPPLAEDIDNMKNNKLATAESAAPHGSLGHAGLPQSPAKMGNSTDPGPMLAIPAMATNPQNAASRRTPNNPGNPSNPGPPKTPENSLIVTNPSGTQTNSAKTARKPDHTTVDIPPACPPPLNHTVVQVNKNANPDPLPKKEEEKKEEEEDDRGEDGPKPMPPYSSMFILSTTNPLRRLCHYILNLRYFEMCILMVIAMSSIALAAEDPVQPNAPRNNVLRYFDYVFTGVFTFEMVIKMIDLGLVLHQGAYFRDLWNILDFIVVSGALVAFAFTGNSKGKDINTIKSLRVLRVLRPLKTIKRLPKLKAVFDCVVNSLKNVFNILIVYMLFMFIFAVVAVQLFKGKFFHCTDESKEFEKDCRGKYLLYEKNEVKARDREWKKYEFHYDNVLWALLTLFTVSTGEGWPQVLKHSVDATFENQGPSPGYRMEMSIFYVVYFVVFPFFFVNIFVALIIITFQEQGDKMMEEYSLEKNERACIDFAISAKPLTRHMPQNKQSFQYRMWQFVVSPPFEYTIMAMIALNTIVLMMKFYGASVAYENALRVFNIVFTSLFSLECVLKVMAFGILNYFRDAWNIFDFVTVLGSITDILVTEFGNNFINLSFLRLFRAARLIKLLRQGYTIRILLWTFVQSFKALPYVCLLIAMLFFIYAIIGMQVFGNIGIDVEDEDSDEDEFQITEHNNFRTFFQALMLLFRSATGEAWHNIMLSCLSGKPCDKNSGILTRECGNEFAYFYFVSFIFLCSFLMLNLFVAVIMDNFEYLTRDSSILGPHHLDEYVRVWAEYDPAAWGRMPYLDMYQMLRHMSPPLGLGKKCPARVAYKRLLRMDLPVADDNTVHFNSTLMALIRTALDIKIAKGGADKQQMDAELRKEMMAIWPNLSQKTLDLLVTPHKSTDLTVGKIYAAMMIMEYYRQSKAKKLQAMREEQDRTPLMFQRMEPPSPTQEGGPGQNALPSTQLDPGGALMAHESGLKESPSWVTQRAQEMFQKTGTWSPEQGPPTDMPNSQPNSQSVEMREMGRDGYSDSEHYLPMEGQGRAASMPRLPAENQRRRGRPRGNNLSTISDTSPMKRSASVLGPKARRLDDYSLERVPPEENQRHHQRRRDRSHRASERSLGRYTDVDTGLGTDLSMTTQSGDLPSKERDQERGRPKDRKHRQHHHHHHHHHHPPPPDKDRYAQERPDHGRARARDQRWSRSPSEGREHMAHRQ

SEQ ID NO: 24117 - protein, 1267 aa, Homo sapiens
MAADEGSAEKQAGEAHMAADGETNGSCENSDASSHANAAKHTQDSARVNPQDGTNTLTRIAENGVSERDSEAAKQNHVTADDFVQTSVIGSNGYILNKPALQAQPLRTTSTLASSLPGHAAKTLPGGAGKGRTPSAFPQTPAAPPATLGEGSADTEDRKLPAPGADVKVHRARKTMPKSVVGLHAASKDPREVREARDHKEPKEEINKNISDFGRQQLLPPFPSLHQSLPQNQCYMATTKSQTACLPFVLAAAVSRKKKRRMGTYSLVPKKKTKVLKQRTVIEMFKSITHSTVGSKGEKDLGASSLHVNGESLEMDSDEDDSEELEEDDGHGAEQAAAFPTEDSRTSKESMSEADRAQKMDGESEEEQESVDTGEEEEGGDESDLSSESSIKKKFLKRKGKTDSPWIKPARKRRRRSRKKPSGALGSESYKSSAGSAEQTAPGDSTGYMEVSLDSLDLRVKGILSSQAEGLANGPDVLETDGLQEVPLCSCRMETPKSREITTLANNQCMATESVDHELGRCTNSVVKYELMRPSNKAPLLVLCEDHRGRMVKHQCCPGCGYFCTAGNFMECQPESSISHRFHKDCASRVNNASYCPHCGEESSKAKEVTIAKADTTSTVTPVPGQEKGSALEGRADTTTGSAAGPPLSEDDKLQGAASHVPEGFDPTGPAGLGRPTPGLSQGPGKETLESALIALDSEKPKKLRFHPKQLYFSARQGELQKVLLMLVDGIDPNFKMEHQNKRSPLHAAAEAGHVDICHMLVQAGANIDTCSEDQRTPLMEAAENNHLEAVKYLIKAGALVDPKDAEGSTCLHLAAKKGHYEVVQYLLSNGQMDVNCQDDGGWTPMIWATEYKHVDLVKLLLSKGSDINIRDNEENICLHWAAFSGCVDIAEILLAAKCDLHAVNIHGDSPLHIAARENRYDCVVLFLSRDSDVTLKNKEGETPLQCASLNSQVWSALQMSKALQDSAPDRPSPVERIVSRDIARGYERIPIPCVNAVDSEPCPSNYKYVSQNCVTSPMNIDRNITHLQYCVCIDDCSSSNCMCGQLSMRCWYDKDGRLLPEFNMAEPPLIFECNHACSCWRNCRNRVVQNGLRARLQLYRTRDMGWGVRSLQDIPPGTFVCEYVGELISDSEADVREEDSYLFDLDNKDGEVYCIDARFYGNVSRFINHHCEPNLVPVRVFMAHQDLRFPRIAFFSTRLIEAGEQLGFDYGERFWDIKGKLFSCRCGSPKCRHSSAALAQRQASAAQEAQEDGLPDTSSAAAADPL

SEQ ID NO: 24118 - protein, 617 aa, Homo sapiens
MDEEIVSEKQAEESHRQDSANLLIFILLLTLTILTIWLFKHRRARFLHETGLAMIYGLLVGLVLRYGIHVPSDVNNVTLSCEVQSSPTTLLVTFDPEVFFNILLPPIIFYAGYSLKRRHFFRNLGSILAYAFLGTAISCFVIGSIMYGCVTLMKVTGQLAGDFYFTDCLLFGAIVSATDPVTVLAIFHELQVDVELYALLFGESVLNDAVAIVLSSSIVAYQPAGDNSHTFDVTAMFKSIGIFLGIFSGSFAMGAATGVVTALVTKFTKLREFQLLETGLFFLMSWSTFLLAEAWGFTGVVAVLFCGITQAHYTYNNLSTESQHRTKQLFELLNFLAENFIFSYMGLTLFTFQNHVFNPTFVVGAFVAIFLGRAANIYPLSLLLNLGRRSKIGSNFQHMMMFAGLRGAMAFALAIRDTATYARQMMFSTTLLIVFFTVWVFGGGTTAMLSCLHIRVGVDSDQEHLGVPENERRTTKAESAWLFRMWYNFDHNYLKPLLTHSGPPLTTTLPACCGPIARCLTSPQAYENQEQLKDDDSDLILNDGDISLTYGDSTVNTEPATSSAPRRFMGNSSEDALDRELAFGDHELVIRGTRLVLPMDDSEPPLNLLDNTRHGPA

SEQ ID NO: 24119 - protein, 307 aa, Homo sapiens
MYDNLYLHGIEDSEAGSADSYTSRPSDSDVSLEEDREAIRQEREQQAAIQLERAKSKPVAFAVKTNVSYCGALDEDVPVPSTAISFDAKDFLHIKEKYNNDWWIGRLVKEGCEIGFIPSPLRLENIRIQQEQKRGRFHGGKSSGNSSSSLGEMVSGTFRATPTSTAKQKQKVTEHIPPYDVVPSMRPVVLVGPSLKGYEVQISSVTLQFLIEHPGDSHVDACSSRVCFHVGPDGSQCSAWEGRGYRVGLMRPSALSFLSCTLLIFYVLHCLEIPPSKYSQWEDLVKDLLYIKCKEKDFICLDHSHYY

SEQ ID NO: 24120 - protein, 426 aa, Homo sapiens
MEESKQLQIHLDDIVIPSAAVISRAETINATVPKTIIYWDSQTTIEKVSCEMRYKATTNQTWNVKEFDTNFTYVQQSEFYLEPNIKYVFQVRCQETGKRYWQPWSSLFFHKTPETVPQVTSKAFQHDTWNSGLTVASISTGHLTSDNRGDIGLLLGMIVFAVMLSILSLIGIFNRSFRTGIKRRILLLIPKWLYEDIPNMKNSNVVKMLQENSELMNNNSSEQVLYVDPMITEIKEIFIPEHKPTDYKKENTGPLETRDYPQNSLFDNTTVVYIPDLNTGYKPQISNFLPEGSHLSNNNEITSLTLKPPVDSLDSGNNPRLQKHPNFAFSVSSVNSLSNTIFLGELSLILNQGECSSPDIQNSVEEETTMLLENDSPSETIPEQTLLPDEFVSCLGIVNEELPSINTYFPQNILESHFNRISLLEK

SEQ ID NO: 24121 - protein, 143 aa, Homo sapiens
MAVFVVLLALVAGVLGNEFSILKSPGSVVFRNGNWPIPGERIPDVAALSMGFSVKEDLSWPGLAVGNLFHRPRATVMVMVKGVNKLALPPGSVISYPLENAVPFSLDSVANSIHSLFSEETPVVLQLAPSEESVYGREGKLSV

SEQ ID NO: 24122 - protein, 193 aa, Homo sapiens
MVKEPVEDTDPSTLSFNMSDKYPIQDTELPKAEECDTITLNCPRNSDMKNQGEENGFPDSTGDPLPEISKDNSCKENCTCSSCLLRAPTISDLLNDQDLLDVIRIKLDPCHPTVKNWRNFASKWGMSYDELCFLEQRPQSPTLEFLLRNSQRTVGQLMELCRLYHRADVEKVLRRWVDEEWPKRERGDPSRHF

SEQ ID NO: 24123 - protein, 471 aa, Homo sapiens
MVQVSIASNELLQPAMRKSPGLSDCLWAWILLLSTLTGRSYGQPSLQDELKDNTTVFTRILDRLLDGYDNRLRPGLGERVTEVKTDIFVTSFGPVSDHDMEYTIDVFFRQSWKDERLKFKGPMTVLRLNNLMASKIWTPDTFFHNGKKSVAHNMTMPNKLLRITEDGTLLYTMRLTVRAECPMHLEDFPMDAHACPLKFGSYAYTRAEVVYEWTREPARSVVVAEDGSRLNQYDLLGQTVDSGIVQSSTGEYVVMTTHFHLKRKIGYFVIQTYLPCIMTVILSQVSFWLNRESVPARTVFGVTTVLTMTTLSISARNSLPKVAYATAMDWFIAVCYAFVFSALIEFATVNYFTKRGYAWDGKSVVPEKPKKVKDPLIKKNNTYAPTATSYTPNLARGDPGLATIAKSATIEPKEVKPETKPPEPKKTFNSVSKIDRLSRIAFPLLFGIFNLVYWATYLNREPQLKAPTPHQ

SEQ ID NO: 24124 - protein, 269 aa, Homo sapiens
MGGCAGSRRRFSDSEGEETVPEPRLPLLDHQGAHWKNAVGFCPRVLVSGICAAGSFVLVAFSHSVGTSLCGVVFASISSGLGEVTFLSLTAFYPRAVISWWSSGTGGAGLLGALSYLGLTQAGLSPQQTLLSMLGIPALLLASYFLLLTSPEAQDPGGEEEAESAARQPLIRTEAPESKPGSSSSLSLRERWTVFKGLLWYIVPLVVVYFAEYFINQGLFELLFFWNTSLSHAQQYRWYQMLYQAGVFASRSSLRCCRIRFTWALALLQ

SEQ ID NO: 24125 - protein, 1460 aa, Homo sapiens
MDTVLVLLLGLQALAGPSPKPQKDSVSDWAIVLITLTLVAAIVSLMYGIKKACQFRREMSLGCGCGSVTPYSSHHEGEAASQRYSCQMKASWGAGATTFQEYQKTGELSTSDHIFPLTPGLVYSIPFDHIVLHSGQRPPELPKSTEIHEQKRHCNTTRHSKPTDKPTGNSKTIDHKSSTDNHEAPPTSEENSSNQGKDPMIRNQRSVDPADSTTTHKESAGKKHITPAPKSKINCRKSTTGKSTVTRKSDKTGRPLEKSMSTLDKTSTSSHKTTTSFHNSGNSQTKQKSTSFPEKITAASKTTYKTTGTPEESEKTEDSRTTVASDKLLTKTTKNIQETISANELTQSLAEPTEHGGRTANENNTPSPAEPTENRERTANENTTLSPAEPIENRERTANENTAPFPAGPTENREMTANENTTLFPAEPTEHGERTANENTTPSPAEPTEHGERTANENTTPSPAEPTEHGERTPFANDKTTSSSAESTEHGERTPLANENTTPSPAEPTENRERTANENTTPSPAGPTENRETTANEKTTLSPVEPTENRETTANEKTTPSPAEPTENGQRTPFANEKTTSSSAEPTEHGERTPLANENTTPSPAEPTENRERTANEKTTPSPAEPTENGDRTPLANEKTTPSLAEPTENGQRTPFANEKTTSSSAEPTEHEERTPLANENTTPSPAEPTENRERTANENTTPSPAGPTENREMTANEKTTLFPAEPTENRERTANEKTTSSPAEPTENGQRTPFANEKTTSSSAEPTEHGERTPLANENTTLSPAEPTENRERTANEKTTPFPAEPTENRERTANENTTPSPAQPTENGDRTPLANEKTTPSLAEPTENGKRTPFANEKTTSSSAEPTEHAERTPLANENTTSSPAEPTENRERTANEKTTQFPAEPTENRESTANEKTTPFPAEPTENREWTANENTTLSPAEPTEHEEMTPLANEKTTLSPAEPTENGERTPFTNEKTTPSSAEPTEHGERTPLANEITTPSRAEPTEHGERIANEKATPSPAKPTEHGETTVNEDTTPSSAEPTENGERTPLANENTTTSPTESTEHGERTANEKTTPSPAEPTEHGERTPSANEKTIPSPAKPTEHEEMTPSANENTTPSPVKPTEHGEKTTLANEKITLSPEGPTEHGAKTTSANEKITPSLAKPTEHGERTTSPNDKITSSAAESTEHRDRATSANVITPAPAEPIKHAKRTTLAHEKMTQVTEKSTEHPEKTTSTTEKTTRTPEKPTLYSEKTICTKGKNTPVPEKPTENLGNTTLTTETIKAPVKSTENPEKTAAVTKTIKPSVKVTGDKSLTTTSSHLNKTEVTHQVPTGSFTLITSRTKLSSITSEATGNESHPYLNKDGSQKGIHAGQMGENDSFPAWAIVIVVLVAVILLLVFLGLIFLVSYMMRTRRTLTQNTQYNDAEDEGGPNSYPVYLMEQQNLGMGQIPSPR

SEQ ID NO: 24126 - protein, 1653 aa, Homo sapiens
VRVAVRIRPQLAKEKIEGCHICTSVTPGEPQVFLGKDKAFTFDYVFDIDSQQEQIYIQCIEKLIEGCFEGYNATVFAYGQTGAGKTYTMGTGFDVNIVEEELGIISRAVKHLFKSIEEKKHIAIKNGLPAPDFKVNAQFLELYNEEVLDLFDTTRDIDAKSKKSNIRIHEDSTGGIYTVGVTTRTVNTESEMMQCLKLGALSRTTASTQMNVQSSRSHAIFTIHVCQTRVCPQIDADNATDNKIISESAQMNEFETLTAKFHFVDLAGSERLKRTGATGERAKEGISINCGLLALGNVISALGDKSKRATHVPYRDSKLTRLLQDSLGGNSQTIMIACVSPSDRDFMETLNTLKYANRARNIKNKVMVNQDRASQQINALRSEITRLQMELMEYKTGKRIIDEEGVESINDMFHENAMLQTENNNLRVRIKAMQETVDALRSRITQLVSDQANHVLARAGEGNEEISNMIHSYIKEIEDLRAKLLESEAVNENLRKNLTRATARAPYFSGSSTFSPTILSSDKETIEIIDLAKKDLEKLKRKEKRKKKSVAGKEDNTDTDQEKKEEKGVSERENNELEVEESQEVSDHEDEEEEEEEEEDDIDGGESSDESDSESDEKANYQADLANITCEIAIKQKLIDELENSQKRLQTLKKQYEEKLMMLQHKIRDTQLERDQVLQNLGSVESYSEEKAKKVRSEYEKKLQAMNKELQRLQAAQKEHARLLKNQSQYEKQLKKLQQDVMEMKKTKVRLMKQMKEEQEKARLTESRRNREIAQLKKDQRKRDHQLRLLEAQKRNQEVVLRRKTEEVTALRRQVRPMSDKVAGKVTRKLSSSDAPAQDTGSSAAAVETDASRTGAQQKMRIPVARVQALPTPATNGNRKKYQRKGLTGRVFISKTARMKWQLLERRVTDIIMQKMTISNMEADMNRLLKQREELTKRREKLSKRREKIVKENGEGDKNVANINEEMESLTANIDYINDSISDCQANIMQMEEAKEEGETLDVTAVINACTLTEARYLLDHFLSMGINKGLQAAQKEAQIKVLEGRLKQTEITSATQNQLLFHMLKEKAELNPELDALLGHALQDLDSVPLENVEDSTDEDAPLNSPGSEGSTLSSDLMKLCGEVKPKNKARRRTTTQMELLYADSSELASDTSTGDASLPGPLTPVAEGQEIGMNTETSGTSAREKELSPPPGLPSKIGSISRQSSLSEKKIPEPSPVTRRKAYEKAEKSKAKEQKHSDSGTSEASLSPPSSPPSRPRNELNVFNRLTVSQGNTSVQQDKSDESDSSLSEVHSRSSRRGIINPFPASKGIRAFPLQCIHIAEGHTKAVLCVDSTDDLLFTGSKDRTCKVWNLVTGQEIMSLGGHPNNVVSVKYCNYTSLVFTVSTSYIKVWDIRDSAKCIRTLTSSGQVTLGDACSASTSRTVAIPSGENQINQIALNPTGTFLYAASGNAVRMWDLKRFQSTGKLTGHLGPVMCLTVDQISSGQDLIITGSKDHYIKMFDVTEGALGTVSPTHNFEPPHYDGIEALTIQGDNLFSGSRDNGIKKWDLTQKDLLQQVPNAHKDWVCALGVVPDHPVLLSGCRGGILKVWNMDTFMPVGEMKGHDSPINAICVNSTHIFTAADDRTVRIWKARNLQDGQISDTGDLGEDIASN

SEQ ID NO: 24127 - protein, 725 aa, Homo sapiens
MTVMSLSRDLKDDFHSDTVLSILNEQRIRGILCDVTIIVEDTKFKAHSNVLAASSLYFKNIFWSHTICISSHVLELDDLKAEVFTEILNYIYSSTVVVKRQETVTDLAAAGKKLGISFLEDLTDRNFSNSPGPYVFCITEKGVVKEEKNEKRHEEPAITNGPRITNAFSIIETENSNNMFSPLDLRASFKKVSDSMRTASLCLERTDVCHEAEPVRTLAEHSYAVSSVAEAYRSQPVREHDGSSPGNTGKENCEALAAKPKTCRKPKTFSIPQDSDSATENIPPPPVSNLEVNQERSPQPAAVLTRSKSPNNEGDVHFSREDENQSSDVPGPPAAEVPPLVYNCSCCSKAFDSSTLLSAHMQLHKPTQEPLVCKYCNKQFTTLNRLDRHEQICMRSSHMPIPGGNQRFLENYPTIGQNGGSFTGPEPLLSENRIGEFSSTGSTLPDTDHMVKFVNGQMLYSCVVCKRSYVTLSSLRRHANVHSWRRTYPCHYCNKVFALAEYRTRHEIWHTGERRYQCIFCLETFMTYYILKNHQKSFHAIDHRLSISKKTANGGLKPSVYPYKLYRLLPMKCKRAPYKSYRNSSYENARENSQMNESAPGTYVVQNPHSSELPTLNFQDTVNTLTNSPAIPLETSACQDIPTSANVQNAEGTKWGEEALKMDLDNNFYSTEVSVSSTENAVSSDLRAGDVPVLSLSNSSENAASVISYSGSAPSVIVHSSQFSS

SEQ ID NO: 24128 - protein, 296 aa, Homo sapiens
AGGLQHRVTAKTAPDVLRTKPAFIGKTNLDGMITVQLPEVPANENIKGYYIIIVPLKKSRGKFIKPWESPDEMELDELLKEISRKRRSIRYGREVELKPYIAAHFDVLPTEFTLGDDKHYGGFTNKQLQSGQEYVFFVLAVMEHAESKMYATSPYSDPVVSMDLDPQPITDEEEGLIWVVGPVLAVVFIICIVIAILLYKSKPDRKRAESDSRKSSIPNNKEIPSHHPTDPVELRRLNFQTPALSSNSVPYASLIGSVSSLSSQTTTQSIYDNNSLPRSARKGMASHPPIPILELA

SEQ ID NO: 24129 - protein, 409 aa, Homo sapiens
MPISSPTTSQPPTIHSSGSSQSSAHSQYNIQNISTGPRKNQIEIKLEPPQRNNSSKLRSSGPRTSSTSSSVNSQTLNRNQPTVYIAASPPNTDELMSRSQPKVYISANAATGDEQVMRNQPTLFISTNSGASAASRNMSGQVSMGPAFIHHHPPKSRAIGNNSATSPRVVVTQPNTKYTFKITVSPNKPPAVSPGVVSPTFELTNLLNHPDHYVETENIQHLTDPTLAHVDRISETRKLSMGSDDAAYTQALLVHQKARMERLQRELEIQKKKLDKLKSEVNEMENNLTRRRLKRSNSISQIPSLEEMQQLRSCNRQLQIDIDCLTKEIDLFQARGPHFNPSAIHNFYDNIGFVGPVPPKPKDQRSIIKTPKTQDTEDDEGAQWNCTACTFLNHPALIRCEQCEMPRHF

SEQ ID NO: 24130 - protein, 209 aa, Homo sapiens
MAVFVVLLALVAGVLGNEFSILKSPGSVVFRNGNWPIPGERIPDVAALSMGFSVKEDLSWPGLAVGNLFHRPRATVMVMVKGVNKLALPPGSVISYPLENAVPFSLDSVANSIHSLFSEETPVVLQLAPSEERVYMVGKANSVFEDLSVTLRQLRNRLFQENSVLSSLPLNSLSRNNEVDLLFLSELQVLHDISSLGETTYLPRTQAWA

SEQ ID NO: 24131 - protein, 1349 aa, Homo sapiens
AAAVMQAAANSAQSRQGSFPGMNQSGLMASSSPYSQPMNNSSSLMNTQAPPYSMAPAMVNSSAASVGLADMMSPGESKLPLPLKADGKEEGTPQPESKSKDSYSSQGISQPPTPGNLPVPSPMSPSSASISSFHGDESDSISSPGWPKTPSSPKSSSSTTTGEKITKVYELGNEPERKLWVDRYLTFMEERGSPVSSLPAVGKKPLDLFRLYVCVKEIGGLAQVNKNKKWRELATNLNVGTSSSAASSLKKQYIQYLFAFECKIERGEEPPPEVFSTGDTKKQPKLQPPSPANSGSLQGPQTPQSTGSNSMAEVPGDLKPPTPASTPHGQMTPMQGGSSTISVHDPFSDVSDSSFPKRNSMTPNAPYQQGMSMPDVMGRMPYEPNKDPFGGMRKVPGSSEPFMTQGQMPNSSMQDMYNQSPSGAMSNLGMGQRQQFPYGASYDRRHEPYGQQYPGQGPPSGQPPYGGHQPGLYPQQPNYKRHMDGMYGPPAKRHEGDMYNMQYSSQQQEMYNQYGGSYSGPDRRPIQGQYPYPYSRERMQGPGQIQTHGIPPQMMGGPLQSSSSEGPQQNMWAARNDMPYPYQNRQGPGGPTQAPPYPGMNRTDDMMVPDQRINHESQWPSHVSQRQPYMSSSASMQPITRPPQPSYQTPPSLPNHISRAPSPASFQRSLENRMSPSKSPFLPSMKMQKVMPTVPTSQVTGPPPQPPPIRREITFPPGSVEASQPVLKQRRKITSKDIVTPEAWRVMMSLKSGLLAESTWALDTINILLYDDSTVATFNLSQLSGFLELLVEYFRKCLIDIFGILMEYEVGDPSQKALDHNAARKDDSQSLADDSGKEEEDAECIDDDEEDEEDEEEDSEKTESDEKSSIALTAPDAAADPKEKPKQASKFDKLPIKIVKKNNLFVVDRSDKLGRVQEFNSGLLHWQLGGGDTTEHIQTHFESKMEIPPRRRPPPPLSSAGRKKEQEGKGDSEEQQEKSIIATIDDVLSARPGALPEDANPGPQTESSKFPFGIQQAKSHRNIKLLEDEPRSRDETPLCTIAHWQDSLAKRCICVSNIVRSLSFVPGNDAEMSKHPGLVLILGKLILLHHEHPERKRAPQTYEKEEDEDKGVACSKDEWWWDCLEVLRDNTLVTLANISGQLDLSAYTESICLPILDGLLHWMVCPSAEAQDPFPTVGPNSVLSPQRLVLETLCKLSIQDNNVDLILATPPFSRQEKFYATLVRYVGDRKNPVCREMSMALLSNLAQGDALAARAIAVQKGSIGNLISFLEDGVTMAQYQQSQHNLMHMQPPPLEPPSVDMMCRAAKALLAMARVDENRSEFLLHEGRLLDISISAVLNSLVASVICDV

SEQ ID NO: 24132 - protein, 283 aa, Homo sapiens
MARCGEGSAAPMVLLGSAGVCSKGLQRKGPCERRRLKATVSEQLSQDLLRLLREEFHTDVTFSVGCTLFKAHKAVLLARVPDFYFHTIGQTSNSLTNQEPIAVENVEALEFRTFLQIIYSSNRNIKNYEEEILRKKIMEIGISQKQLDISFPKCENSSDCSLQKHEIPEDISDRDDDFISNDNYDLEPASELGEDLLKLYVKPCCPDIDIFVDGKRFKAHRAILSARSSYFAAMLSGCWAESSQEYVTLQGISHVELNVMMHFIYGGTLDIPDKTNVGLFPEH

SEQ ID NO: 24133 - protein, 370 aa, Homo sapiens
MGGCAGSRRRFSDSEGEETVPEPRLPLLDHQGAHWKNAVGFWLLGLCNNFSYVVMLSAAHDILSHKRTSGNQSHVDPGPTPIPHNSSSRFDCNSVSTAAVLLADILPTLVIKLLAPLGLHLLPYSPRVLVSGICAAGSFVLVAFSHSVGTSLCGVVFASISSGLGEVTFLSLTAFYPRAVISWWSSGTGGAGLLGALSYLGLTQAGLSPQQTLLSMLGIPALLLASYFLLLTSPEAQDPGGEEEAESAARQPLIRTEAPESKPGSSSSLSLRERWTVFKVRMMAGFELLFFWNTSLSHAQQYRWYQMLYQAGVFASRSSLRCCRIRFTWALALLQMESCSVTRLECSDAVSAHCSLRFWVQAILLPQPPK

SEQ ID NO: 24134 - protein, 598 aa, Homo sapiens
MVPRLLLRAWPRGPAVGPGAPSRPLSAGSGPGQYLQRSIVPTMHYQDSLPRLPIPKLEDTIRRYLSAQKPLLNDGQFRKTEQFCKSFENGIGKELHEQLVALDKQNKHTSYISGPWFDMYLSARDSVVLNFNPFMAFNPDPKSEYNDQLTRATNMTVSAIRFLKTLRAGLLEPEVFHLNPAKSDTITFKRLIRFVPSSLSWYGAYLVNAYPLDMSQYFRLFNSTRLPKPSRDELFTDDKARHLLVLRKGNFYIFDVLDQDGNIVSPSEIQAHLKYILSDSSPAPEFPLAYLTSENRDIWAELRQKLMSSGNEESLRKVDSAVFCLCLDDFPIKDLVHLSHNMLHGDGTNRWFDKSFNLIIAKDGSTAVHFEHSWGDGVAVLRFFNEVFKDSTQTPAVTPQSQPATTDSTVTVQKLNFELTDALKTGITAAKEKFDATMKTLTIDCVQFQRGGKEFLKKQKLSPDAVAQLAFQMAFLRQYGQTVATYESCSTAAFKHGRTETIRPASVYTKRCSEAFVREPSRHSAGELQQMMVECSKYHGQLTKEAAMGEAGVGSMPLGLVLSAWARALTDTCLLCGIWQQPKGSSCLSSTWTLHTGR

SEQ ID NO: 24135 - protein, 455 aa, Homo sapiens
MANRELAFKAGDVIKVLDASNKDWWWGQIDDEEGWFPASFVRLWVNQEDEVEEGPSDVQNGHLDPNSDCLCLGRPLQNRDQMRANVINEIMSTERHYIKHLKDICEGYLKQCRKRRDMFSDEQLKVIFGNIEDIYRFQMGFVRDLEKQYNNDDPHLSEIGPCFLEHQDGFWIYSEYCNNHLDACMELSKLMKDSRYQHFFEACRLLQQMIDIAIDGFLLTPVQKICKYPLQLAELLKYTAQDHSDYRYVAAALAVMRNVTQQINERKRRLENIDKIAQWQASVLDWEGEDILDRSSELIYTGEMAWIYQPYGRNQQRVFFLFDHQMVLCKKDLIRRDILYYKGRIDMDKYEVVDIEDGRDDDFNVSMKNAFKLHNKETEEIHLFFAKKLEEKIRWLRAFREERKMVQEDEKIGFEISENQKRQAAMTVRKVPKQKGPTIGHLQAEEQGSQSESQS

SEQ ID NO: 24136 - protein, 506 aa, Homo sapiens
MANRELAFKAGDVIKVLDASNKDWWWGQIDDEEGWFPASFVRLWVNQEDEVEEGPSDVQNGHLDPNSDCLCLGRPLQNRDQMRANVINEIMSTERHYIKHLKDICEGYLKQCRKRRDMFSDEQLKVIFGNIEDIYRFQMGFVRDLEKQYNNDDPHLSEIGPCFLEHQDGFWIYSEYCNNHLDACMELSKLMKDSRYQHFFEACRLLQQMIDIAIDGFLLTPVQKICKYPLQLAELLKYTAQDHSDYRYVAAALAVMRNVTQQINERKRRLENIDKIAQWQASVLDWEGEDILDRSSELIYTGEMAWIYQPYGRNQQRVFFLFDHQMVLCKKDLIRRDILYYKGRIDMDKYEVVDIEDGRDDDFNVSMKNAFKLHNKETEEIHLFFAKKLEEKIRWLRAFREERKMVQEDEKIGFEISENQKRQAAMTVRKVPKQKGVNSARSVPPSYPPPQDPLNHGQYLVPDGIAQSQVFEFTEPKRSQSPFWQNFSRCLGSIDRSMEGFKTEPT

SEQ ID NO: 24137 - protein, 526 aa, Homo sapiens
MRMQAALVGWACTTLCLASCSSAFSHGASTVACDDMQPKHIQAQPQHQDSHHITIHTHRTSYAPGDKIPVTVRSSRDFMGFLLQARRVSDHQIAGTFVLIPPHSKLMTCFQEADAVTHSDKSLKRNLSFVWKAPAQPVGDIKFLLSVVQSYFVYWARIESSVVSQQTHSSAHSDDRMEPRLLMPNLHQRLGDVEGAAPAPRTPITLPQQHTHVFAVALPGAAEEDNLDPVPASIWVTKFPGDAETLSQPSSHTATEGSINQQPSGDSNPTLEPSLEVHRLERLVALKRVSSESFASSLSTHHRTQDDPSFDSLETCLSSDGGEQDKTKASNRTVTQPPLSTVQLTYPQCLWSSETFTGNGVRASNPIPVLQTSGTSGLPAAGDQSEASRASASFLPQSKHKELRAGKGNGEGGVGYPRQTNPRPDIGLEGAQAPLGIQLRTPQLGILLCLSATLGMALAAGLRYLHTQYCHQQTEVSFSEPASDAVARSNSGETVHVRKIGENSFVLVQAEYNWITPSVGSKKTVL

SEQ ID NO: 24138 - protein, 276 aa, Homo sapiens
MESALPAAGFLYWVGAGTVAYLALRISYSLFTALRVWGVGNEAGVGPGLGEWAVVTGSTDGIGKSYAEELAKHGMKVVLISRSKDKLDQVSSEIMNNVGMSYEYPEYFLDVPDLDNVIKKMININILSVCKMTQLVLPGMVERSKGAILNISSGSGMLPVPLLTIYSATKTFVDFFSQCLHEEYRSKGVFVQSVLPYFVATKLAKIRKPTLDKPSPETFVKSAIKTVGLQSRTNGYLIHALMGSIISNLPSWIYLKIVMNMNKSTRAHYLKKTKKN

SEQ ID NO: 24139 - protein, 455 aa, Homo sapiens
MKRTPTAEEREREAKKLRLLEELEDTWLPYLTPKDDEFYQQWQLKYPKLILREASSVSEELHKEVQEAFLTLHKHGCLFRDLVRIQGKDLLTPVSRILIGNPGCTYKYLNTRLFTVPWPVKGSNIKHTEAEIAAACETFLKLNDYLQIETIQALEELAAKEKANEDAVPLCMSADFPRVGMGSSYNGQDEVDIKSRAAYNVTLLNFMDPQKMPYLKEEPYFGMGKMAVSWHHDENLVDRSAVAVYSYSCEGPEEESEDDSHLEGRDPDIWHVGFKISWDIETPGLAIPLHQGDCYFMLDDLNATHQHCVLAGSQPRFSSTHRVAECSTGTLDYILQRCQLALQNVCDDVDNDDVSLKSFEPAVLKQGEEIHNEVEFEWLRQFWFQGNRYRKCTDWWCQPMAQLEALWKKMEGVTNAVLHEVKREGLPVEQRNEILTAILASLTARQNLRREWHAS

SEQ ID NO: 24140 - protein, 1032 aa, Homo sapiens
MISKGGSEALLQTLVDTARTAPPDYDILLPLFRLLAKVGLRDKKIGRKALELEALDVTLILARKNLSHGQNLLHCLWALRVFASSVSMGAMLGINGAMELLFKVITPYTRKRTQAIRAATEVLAALLKSKSNGRRAVNRGYVTSLLGLHQDWHSHDTANAYVQIRRGLLLCLRHIAALRSGREAFLAAQGMEILFSTTQNCLDDKSMEPVISVVLQILRQCYPTSPLPLVTASSAYAFPVPGCITTEPPHDLPEEDFEDDGDDEVDKDSDTEDGKVEDDDLETDVNKLSSKPGLDRPEEELMQYEVMCLELSYSFEELQSKLGDDLNSEKTQYANHHHIPAAASSKQHCYSKDQSSCGQEREYAVQTSLLCRVKTGRSTVHLGSKKNPGVNLYQNVQSNSLRRDSSESEIPDIQASPKADAWDVDAIFCPRMSASFSNSTRTREVVKVIDKLLQTHLKRVPFHDPYLYMAKARRTSSVVDFKMMAFPDVWGHCPPPTTQPMLERKCGVQRIRIFEDIRRLIQPSDVINKVVFSLDEPWPLQDNASNCLRFFSKFESGNLRKAIQVREFEYDLLVNADVNSTQHQQWFYFKVSGMQAAIPYHFNIINCEKPNSQFNYGMQPTLYSVKEALLGKPTWIRTGHEICYYKNHYRQSTAVAGGASGKCYYTLTFAVTFPHSEDVCYLAYHYPYTYTALMTHLDILEKSVNLKEVYFRQDVLCQTLGGNPCPLVTITAMPESNSDEHLEQFRHRPYQVITARVHPGESNASWVMKGTLEFLVSSDPVARLLRENFIFKIIPMLNPDGVINGNHRCSLSGEDLNRQWLSPSAHLQPTIYHAKGLLYHLSSIGRSPVVFCDFHGHSQKKNVFLYGCSIKETLWQAACTVGTSTILEEVNYRTLPKILDKLAPAFTMSSCSFLVEKSRASTARVVVWREMGVSRSYTMESSYCGCNQGPYQCTQRLLERTKNERAHPVDGLQGLQFGTRELEEMGAMFCLGLLILELKSASCSHQLLAQAATLLSAEEDALDQHLQRDAPK

SEQ ID NO: 24141 - protein, 560 aa, Homo sapiens
MAKFLAELLGCTLPSKGASPMFESKSHSRVGLKSSTKQKTTIFSTLASEKSLSDCKKEQQWKPSMYSSITPVCFPSPLIEKPIGKESMPQTPPFSAMFDSSGYNRNLYQSAEDSCGGLYYHDNNLLSGSLEALIQHLVPNVDYYPDRTYIFTFLLSSRLFMHPYELMAKVCHLCVEHQRLSDPDSDKNQMRKIAPKILQLLTEWTETFPYDFRDERMMRNLKDLAHRIASGEEQTYRKNVQQMMQCLIRKLAALSQYEEVLAKISSTSTDRLTVLKTKPQSIQRDIITVCNDPYTLAQQLTHIELERLNYIGPEEFVQAFVQKDPLDNDKSCYSERKKTRNLEAYVEWFNRLSYLVATEICMPVKKKHRARMIEYFIDVARECFNIGNFNSLMAIISGMNMSPVSRLKKTWAKVKTAKFDILEHQMDPSSNFYNYRTALRGAAQRSLTAHSSREKIVIPFFSLLIKDIYFLNEGCANRLPNGHVNFEKFWELAKQVSEFMTWKQVECPFERDRKILQYLLTVPVFSEDALYLASYESEGPENHIEKDRWKSLRSSLLGRV

SEQ ID NO: 24142 - protein, 641 aa, Homo sapiens
MVSNPVHGLPFLPGTSFKDSTKTAFHRSQTLSYRNGYAIVRRPTVGIGGDRLQFNQLSQAELDELASKAPVLTYGQPKQAPPADFIPAHVAFDKKVLKFDAYFQEDVPMSTEEQYRIRQVNIYYYLEDDSMSVIEPVVENSGILQGKLIKRQRLAKNDRGDHYHWKDLNRGINITIYGKTFRVVDCDQFTQVFLESQGIELNPPEKMALDPYTELRKQPLRKYVTPSDFDQLKQFLTFDKQVLRFYAIWDDTDSMYGECRTYIIHYYLMDDTVEIREVHERNDGRDPFPLLMNRQRVPKVLVENAKNFPQCVLEISDQEVLEWYTAKDFIVGKSLTILGRTFFIYDCDPFTRRYYKEKFGITDLPRIDVSKREPPPVKQELPPYNGFGLVEDSAQNCFALIPKAPKKDVIKMLVNDNKVLRYLAVLESPIPEDKDRRFVFSYFLATDMISIFEPPVRNSGIIGGKYLGRTKVVKPYSTVDNPVYYGPSDFFIGAVIEVFGHRFIILDTDEYVLKYMESNAAQYSPEALASIQNHVRKREAPAPEAESKQTEKDPGVQELEALIDTIQKQLKDHSCKDNIREAFQIYDKEASGYVDRDMFFKICESLNVPVDDSLVKEVTCKRLLLPAFTFPSPVWIPLCGL

SEQ ID NO: 24143 - protein, 1058 aa, Homo sapiens
MKKSQREDIFKKMSEEMDNITAEEIIDKHLQKEENQNVAKTLRGKVREKLKISKINKGEKSSTEQLIDSEIHQRSKTEVSLDESLSFFILSGEEGSALGKSSEQRPVNRSYPKCFSLGVNLQNVAESEEEEFMKEFILTDILKVKAADYEDDQEQIKKQKANIFVPSSSPVVNQRKLPKDMMPRILEDEGFYIQRKPEIYKKTCNKMENRLLKLEEGKCWFGESGEIMSLPTPIKQSWNFRLNVRKEPLNPLLKTIYRKAVKYDLGSSFMNKMEGSREIYQLDLNIVGLQFSHHHLFNQEQVLCARLLQLYECFQDRQQQNVSQLLYEKLKALTDATKLSNENSEINQLTRKSLQDYYWQISNTKQMYDLERGKDLSLLHSILRTWKQIKSLRHGQGFTSTPIKLQVQRIKMNKCDEQEQISEMSETEKKNEGKELKNGKKLESLSYLASDETEIERIKPITLRPQLSFTAELTSLSKCSFMLRNVDARSVPGIPWLMNEQKLFEWANEVRIDPNNPEYSDLMESVTYMRLKGQDIPKYFRLEQLQDEFNFVSEEEMAKSKRFQLLQLRNAGQLDNFLLQQMPLHDTEIPDLVFQVRRLIMKRIVKISKCNLSDIVNDYEEIVSTSQLTDAVCKFVEPRRKLKPQRKERKKVTAQAISDGDIKILVRIVRAYNIPTRKTTINGSPGHDYSFSSLSKIKDNIYINIFDEMMTEKHEISGTFQVTIPPVLLGYTWSNTYVFPKEDSNEQNLKECTFLNIFATIEPQISYVTCNPTLDKFLDQTEVLQRAQIFKKNCKAMFPNRRIVTTVFNDEGIQFLVTRYIKALNPPQQLLDIFLHNSNATFDLIARFVSLIPFVPNTPDENDGSDIWMTSEHCISLAIGNKEEHAILLCNFFLYFGKKALVLLGTSVLEGHVAYVVTQETNEYLLWNPSTGQCYKQFDPFCPLKSVDCLFDDRNVWFNIQQNNTPMAVFFDYSKESFWKQLLPKNVQGTKIQSIQVTGFPIQMPYIDVQSIIDAVYQTGIHSAEFPQTEFALAVYIHPYPNNILSVWVYLASLVQHQ

SEQ ID NO: 24144 - protein, 631 aa, Homo sapiens
MHHQQRMAALGTDKELSDLLDFSAMFSPPVSSGKNGPTSLASGHFTGSNVEDRSSSGSWGNGGHPSPSRNYGDGTPYDHMTSRDLGSHDNLSPPFVNSRIQSKTERGSYSSYGRESNLQGCHQQSLLGGDMDMGNPGTLSPTKPGSQYYQYSSNNPRRRPLHSSAMEVQTKKVRKVPPGLPSSVYAPSASTADYNRDSPGYPSSKPATSTFPSSFFMQDGHHSSDPWSSSSGMNQPGYAGMLGNSSHIPQSSSYCSLHPHERLSYPSHSSADINSSLPPMSTFHRSGTNHYSTSSCTPPANGTDSIMANRGSGAAGSSQTGDALGKALASIYSPDHTNNSFSSNPSTPVGSPPSLSAGTAVWSRNGGQASSSPNYEGPLHSLQSRIEDRLERLDDAIHVLRNHAVGPSTAMPGGHGDMHGIIGPSHNGAMGGLGSGYGTGLLSANRHSLMVGTHREDGVALRGSHSLLPNQVPVPQLPVQSATSPDLNPPQDPYREALAETQESNWAQKCNNDDEDLTPEQKAEREKERRMANNARERLRVRDINEAFKELGRMVQLHLKSDKPQTKLLILHQAVAVILSLEQQVRERNLNPKAACLKRREEEKVSSEPPPLSLAGPHPGMGDASNHMGQM

SEQ ID NO: 24145 - protein, 317 aa, Homo sapiens
MAVFVVLLALVAGVLGNEFSILKSPGSVVFRNGNWPIPGERIPDVAALSMGFSVKEDLSWPGLAVGNLFHRPRATVMVMVKGVNKLALPPGSVISYPLENRVYMVGKANSVFEDLSVTLRQLRNRLFQENSVLSSLPLNSLSRNNEVDLLFLSELQVLHDISSLLSRHKHLAKDHSPDLYSLELAGLDEIGKRYGEDSEQFRDASKILVDALQKFADDMYSLYGGNAVVELVTVKSFDTSLIRKTRTILEAKQANPASPYNLAYKYNFEYSVVFNMVLWIMIALALAVIITSYNIWNMDPGYDSIIYRMTNQKIRMD

SEQ ID NO: 24146 - protein, 454 aa, Homo sapiens
MLWVNQEDEVEEGPSDVQNGHLDPNSDCLCLGRPLQNRDQMRANVINEIMSTERHYIKHLKDICEGYLKQCRKRRDMFSDEQLKVIFGNIEDIYRFQMGFVRDLEKQYNNDDPHLSEIGPCFLEHQDGFWIYSEYCNNHLDACMELSKLMKDSRYQHFFEACRLLQQMIDIAIDGFLLTPVQKICKYPLQLAELLKYTAQDHSDYRYVAAALAVMRNVTQQINERKRRLENIDKIAQWQASVLDWEGEDILDRSSELIYTGEMAWIYQPYGRNQQRVFFLFDHQMVLCKKDLIRRDILYYKGRIDMDKYEVVDIEDGRDDDFNVSMKNAFKLHNKETEEIHLFFAKKLEEKIRWLRAFREERKMVQEDEKIGFEISENQKRQAAMTVRKVPKQKGVNSARSVPPSYPPPQDPLNHGQYLVPDGIAQSQVFEFTEPKRSQSPFWQNFSRLTPFKK

SEQ ID NO: 24147 - protein, 242 aa, Homo sapiens
MVMVKGVNKLALPPGSVISYPLENRVYMVGKANSVFEDLSVTLRQLRNRLFQENSVLSSLPLNSLSRNNEVDLLFLSELQVLHDISSLLSRHKHLAKDHSPDLYSLELAGLDEIGKRYGEDSEQFRDASKILVDALQKFADDMYSLYGGNAVVELVTVKSFDTSLIRKTRTILEAKQAKNPASPYNLAYKYNFEYSVVFNMVLWIMIALALAVIITSYNIWNMDPGYDSIIYRMTNQKIRMD

SEQ ID NO: 24148 - protein, 504 aa, Homo sapiens
MARRCGPVALLLGFGLLRLCSGVWGTDTEERLVEHLLDPSRYNKLIRPATNGSELVTVQLMVSLAQLISVHEREQIMTTNVWLTQVSEWEDYRLTWKPEEFDNMKKVRLPSKHIWLPDVVLYNNADGMYEVSFYSNAVVSYDGSIFWLPPAIYKSACKIEVKHFPFDQQNCTMKFRSWTYDRTEIDLVLKSEVASLDDFTPSGEWDIVALPGRRNENPDDSTYVDITYDFIIRRKPLFYTINLIIPCVLITSLAILVFYLPSDCGEKMTLCISVLLALTVFLLLISKIVPPTSLDVPLVGKYLMFTMVLVTFSIVTSVCVLNVHHRSPTTHTMAPWVKVVFLEKLPALLFMQQPRHHCARQRLRLRRRQREREGAGALFFREAPGADSCTCFVNRASVQGLAGAFGAEPAPVAGPGRSGEPCGCGLREAVDGVRFIADHMRSEDDDQSVSEDWKYVAMVIDRLFLWIFVFVCVFGTIGMFLQPLFQNYTTTTFLHSDHSAPSSK

SEQ ID NO: 24149 - protein, 465 aa, Homo sapiens
MGSSASSLAAETESDHSFPGGPPYPGPPAAAGWCRSGPGGPVWGGALVSRQHQPPRPRARSHTHSPGSMATVGEWSCVRCTFLNPAGQRQCSICEAPRHKPDLNHILRLSVEEQKWPCARCTFRNFLGKEACEVCGFTPEPAPGAAFLPVLNGVLPKPPAILGEPKGSCQEEAGPVRTAGLVATEPARGQCEDKDEEEKEEQEEEEGAAEPRGGWACPRCTLHNTPVASSCSVCGGPRRLSLPRIPPEALVVPEVVAPAGFHVVPAAPPPGLPGEGAEANPPATSQGPAAEPEPPRVPPFSPFSSTLQNNPVPRSRREVPPQLQPPVPEAAQPSPSAGCRGAPQGSGWAGASRLAELLSGKRLSVLEEEATEGGTSRVEAGSSTSGSDIIDLAGDTVRYTPASPSSPDFTTWSCAKCTLRNPTVAPRCSACGCSKLHGFQEHGEPPTHCPDCGADKPSPCGRSCG

SEQ ID NO: 24150 - protein, 2372 aa, Homo sapiens
MAARAAAAAAAAAARARARAGSGERRAPPGPRPAPGARDLEAGARGAAAAAAAPGPMLGGGGDGGGGLNSVHHHPLLPRHELNMAHNAGAAAAAGTHSAKSGGSEAALKEGGSAAALSSSSSSSAAAAAASSSSSSGPGSAMETGLLPNHKLKTVGEAPAAPPHQQHHHHHHAHHHHHHAHHLHHHHALQQQLNQFQQQQQQQQQQQQQQQQQQHPISNNNSLGGAGGGAPQPGPDMEQPQHGGAKDSAAGGQADPPGPPLLSKPGDEDDAPPKMGEPAGGRYEHPGLGALGTQQPPVAVPGGGGGPAAVPEFNNYYGSAAPASGGPGGRAGPCFDQHGGQQSPGMGMMHSASAAAAGAPGSMDPLQNSHEGYPNSQCNHYPGYSRPGAGGGGGGGGGGGGGSGGGGGGGGAGAGGAGAGAVAAAAAAAAAAAGGGGGGGYGGSSAGYGVLSSPRQQGGGMMMGPGGGGAASLSKAAAGSAAGGFQRFAGQNQHPSGATPTLNQLLTSPSPMMRSYGGSYPEYSSPSAPPPPPSQPQSQAAAAGAAAGGQQAAAGMGLGKDMGAQYAAASPAWAAAQQRSHPAMSPGTPGPTMGRSQGSPMDPMVMKRPQLYGMGSNPHSQPQQSSPYPGGSYGPPGPQRYPIGIQGRTPGAMAGMQYPQQQMPPQYGQQGVSGYCQQGQQPYYSQQPQPPHLPPQAQYLPSQSQQRYQPQQDMSQEGYGTRSQPPLAPGKPNHEDLNLIQQERPSSLPDLSGSIDDLPTGTEATLSSAVSASGSTSSQGDQSNPAQSPFSPHASPHLSSIPGGPSPSPVGSPVGSNQSRSGPISPASIPGSQMPPQPPGSQSESSSHPALSQSPMPQERGFMAGTQRNPQMAQYGPQQTGPSMSPHPSPGGQMHAGISSFQQSNSSGTYGPQMSQYGPQGNYSRPPAYSGVPSASYSGPGPGMGISANNQMHGQGPSQPCGAVPLGRMPSAGMQNRPFPGNMSSMTPSSPGMSQQGGPGMGPPMPTVNRKAQEAAAAVMQAAANSAQSRQGSFPGMNQSGLMASSSPYSQPMNNSSSLMNTQAPPYSMAPAMVNSSAASVGLADMMSPGESKLPLPLKADGKEEGTPQPESKSKDSYSSQGISQPPTPGNLPVPSPMSPSSASISSFHGDESDSISSPGWPKTPSSPKSSSSTTTGEKITKVYELGNEPERKLWVDRYLTFMEERGSPVSSLPAVGKKPLDLFRLYVCVKEIGGLAQVNKNKKWRELATNLNVGTSSSAASSLKKQYIQYLFAFECKIERGEEPPPEVFSTGDTKKQPKLQPPSPANSGSLQGPQTPQSTGSNSMAEVPGDLKPPTPASTPHGQMTPMQGGRSSTISVHDPFSDVSDSSFPKRNSMTPNAPYQQGMSMPDVMGRMPYEPNKDPFGGMRKVPGSSEPFMTQGQMPNSSMQDMYNQSPSGAMSNLGMGQRQQFPYGASYDRRHEPYGQQYPGQGPPSGQPPYGGHQPGLYPQQPNYKRHMDGMYGPPAKRHEGDMYNMQYSSQQQEMYNQYGGSYSGPDRRPIQGQYPYPYSRERMQGPGQIQTHGIPPQMMGGPLQSSSSEGPQQNMWAARNDMPYPYQNRQGPGGPTQAPPYPGMNRTDDMMVPDQRINHESQWPSHVSQRQPYMSSSASMQPITRPPQPSYQTPPSLPNHISRAPSPASFQRSLENRMSPSKSPFLPSMKMQKVMPTVPTSQVTGPPPQPPPIRREITFPPGSVEASQPVLKQRRKITSKDIVTPEAWRVMMSLKSGLLAESTWALDTINILLYDDSTVATFNLSQLSGFLELLVEYFRKCLIDIFGILMEYEVGDPSQKALDHNAARKDDSQSLADDSGKEEEDAECIDDDEEDEEDEEEDSEKTESDEKSSIALTAPDAAADPKEKPKQASKFDKLPIKIVKKNNLFVVDRSDKLGRVQEFNSGLLHWQLGGGDTTEHIQTHFESKMEIPPRRRPPPPLSSAGRKKEQEGKGDSEEQQEKSIIATIDDVLSARPGALPEDANPGPQTESSKFPFGIQQAKSHRNIKLLEDEPRSRDETPLCTIAHWQDSLAKRCICVSNIVRSLSFVPGNDAEMSKHPGLVLILGKLILLHHEHPERKRAPQTYEKEEDEDKGVACSKDEWWWDCLEVLRDNTLVTLANISGQLDLSAYTESICLPILDGLLHWMVCPSAEAQDPFPTVGPNSVLSPQRLVLETLCKLSIQDNNVDLILATPPFSRQEKFYATLVRYVGDRKNPVCREMSMALLSNLAQGDALAARAIAVQKGSIGNLISFLEDGVTMAQYQQSQHNLMHMQPPPLEPPSVDMMCRAAKALLAMARVDENRSEFLLHEGRLLDISISAVLNSLVASVICDVLFQIGQL

SEQ ID NO: 24151 - protein, 670 aa, Homo sapiens
MVPRLLLRAWPRGPAVGPGAPSRPLSAGSGPGQYLQRSIVPTMHYQDSLPRLPIPKLEDTIRRYLSAQKPLLNDGQFRKTEQFCKSFENGIGKELHEQLVALDKQNKHTSYISGPWFDMYLSARDSVVLNFNPFMAFNPDPKSEYNDQLTRATNMTVSAIRFLKTLRAGLLEPEVFHLNPAKSDTITFKRLIRFVPSSLSWYGAYLVNAYPLDMSQYFRLFNSTRLPKPSRDELFTDDKARHLLVLRKGNFYIFDVLDQDGNIVSPSEIQAHLKYILSDSSPAPEFPLAYLTSENRDIWAELRQKLMSSGNEESLRKVDSAVFCLCLDDFPIKDLVHLSHNMLHGDGTNRWFDKSFNLIIAKDGSTAVHFEHSWGDGVAVLRFFNEVFKDSTQTPAVTPQSQPATTDSTVTVQKLNFELTDALKTGITAAKEKFDATMKTLTIDCVQFQRGGKEFLKKQKLSPDAVAQLAFQMAFLRQYGQTVATYESCSTAAFKHGRTETIRPASVYTKRCSEAFVREPSRHSAGELQQMMVECSKYHGQLTKEAAMGRKPSHWPRYTASQGFDRHLFALRHLAAAKGIILPELYLDPAYGQINHNVLSTSTLSSPAVNLGGFAPVVSDGFGVGYAVHDNWIGCNVSSYPGRNAREFLQCVEKALEDMFDALEGKSIKS

SEQ ID NO: 24152 - protein, 293 aa, Homo sapiens
MGTALLQRGGCFLLCLSLLLLGCWAELGSGLEFPGAEGQWTRFPKWNACCESEMSFQLKTRSARGLVLYFDDEGFCDFLELILTRGGRLQLSFSIFCAEPATLLADTPVNDGAWHSVRIRRQFRNTTLFIDQVEAKWVEVKSKRRDMTVFSGLFVGGLPPELRAAALKLTLASVREREPFKGWIRDVRVNSSQVLPVDSGEVKLDDEPPNSGGGSPCEAGEEGEGGVCLNGGVCSVVDDQAVCDCSRTGFRGKDCSQEDNNVEGLAHLMMGDQGKSKEMNDYLNYKKVKICYT

SEQ ID NO: 24153 - protein, 559 aa, Homo sapiens
MKRTPTAEEREREAKKLRLLEELEDTWLPYLTPKDDEFYQQWQLKYPKLILREASSVSEELHKEVQEAFLTLHKHGCLFRDLVRIQGKDLLTPVSRILIGNPGCTYKYLNTRLFTVPWPVKGSNIKHTEAEIAAACETFLKLNDYLQIETIQALEELAAKEKANEDAVPLCMSADFPRVGMGSSYNGQDEVDIKSRAAYNVTLLNFMDPQKMPYLKEEPYFGMGKMAVSWHHDENLVDRSAVAVYSYSCEGPEEESEDDSHLEGRDPDIWHVGFKISWDIETPGLAIPLHQGDCYFMLDDLNATHQHCVLAGSQPRFSSTHRVAECSTGTLDYILQRCQLALQNVCDDVDNDDVSLKSFEPAVLKQGEEIHNEVEFEWLRQFWFQGNRYRKCTDWWCQPMAQLEALWKKMEGVTNAVLHEVKREGLPVEQRNEILTAILASLTARQNLRREWHARCQSRIARTLPADQKPECRPYWEKDDASMPLPFDLTDIVSELREYQSTINTVLPGGISCFKFASQICCRVKSHYVAQAGLEFLASNSWPQAILLPQPPKALGLQV

SEQ ID NO: 24154 - protein, 325 aa, Homo sapiens
MFRKIHSIFNSSPQRKTAAESPFYEGASPAVKLIRSSSMYVVGDHGEKFSESLKKYKSTSSMDTSLYYLRQEEDRAWMYSRTQDCLQYLQELLALRKKYLSSFSDLKPHRTQGISSTSSKSSKGGKKTPVRSTPKEIKKATPKKYSQFSADVAEAIAFFDSIIAELDTERRPRAAEASLPNEDVDFDVATSSREHSLHSNWILRAPRRHSEDIAAHTVHTVDGQFRRSTEHRTVGTQRRLERHPIYLPKAVEGAFNTWKFKPKACKKDLGSSRQILFNFSGEDMEWDAELFALEPQLSPGEDYYETENPKGQWLLRERLWERTVP

SEQ ID NO: 24155 - protein, 501 aa, Homo sapiens
MTTEEAMPEKAKCPTLEITKQDFFQEAKTLIAQHYEKINENKVQGTSINVFRKKHQKPKSGKYIPLEIDKKVTRDVVQEHRAALRRICFPKELSKSEHLQEPPQRISFKEPHIFSRRERCRPIDLITKGQVKLDKIMTIIEPVSKKMETAKQQHFEESRNRMLELLYPFPVHLYLQPGTSNLELLKEPDKAFYDWRGFVLTRSFRLACDSRRVSFSQSSSIFRDYYSKTFKTLIKKERQPIKPEPKSQPRIKGTPNKTDKLDSKVKRIGPHIEIFQVFRERKKFMITPKLIRMVTVMQAHVRGWLERKRLQRVMTKALDHGPDMKAVINMYGRLIHRVRYRRGLWRTRQILNLAELEEWMDRKKFYEIMFAKREDWPKIERNELPNFFSDCGHFPTQKQVDDTWDLVHQDGKEKYSELIKKSKAIEMLFTLYPPEGAHVPDSTLLKSTWLRPIVNGEEGYRYIVNGHPALKRANIRVVGKLVARSIRERKMRQHYKSCKVE

SEQ ID NO: 24156 - protein, 550 aa, Homo sapiens
MALVRDRRAHYVMSIVIRWVHCFSSSLRGTFGTRWEAMKAKATELRVCCARRKREAREFKPPQMRGSTRLNISDDLKIGFFSTDHATQTDSSEILSVKELSSSTQKLAQMMKSLQVDFGFLKQLLQLKFEDRLKEESLSLFTILHDRILEIEKHYQQNEDKMRKSFNQQLADAIAVIKGMYQQFFEVEEENVSLQDASTVKTNILLRKLKEKEEVIKELKEELDQYKDFGFHKMESFAKETSSPKSNLEKENLEYKVENERLLQIISELEEEIQINLKENSGLEDELISMKEMAEKDHKTIQKLMDSRDRLREELHYEKSLVQDVINKQKEDKEMRKKYGSLSVKVARSAKGREASLSPWPKSPPSTTALRPHSATMSVSSAGAQKAKMPKKALKEDQAVVEDKHGLESQIEALKANLENEKKKVERFRKEADRLNKSWEKRFFILRNSFHVLKNEMFTRHTLFRQFAVLADTSFNYIKVKPLLVQSRTTMTAISSSSHCTSSIDGKHVDVVSDQAALQLSPKGKLSESPKEESLEEPSMRQSSPAETVD

SEQ ID NO: 24157 - protein, 196 aa, Homo sapiens
MVMVKGVNKLALPPGSVISYPLENVDLLFLSELQVLHDISSLLSRHKHLAKDHSPDLYSLELAGLDEIGKRYGEDSEQFRDASKILVDALQKFADDMYSLYGGNAVVELVTVKSFDTSLIRKTRTILEAKQAKNPASPYNLAYKYNFEYSVVFNMVLWIMIALALAVIITSYNIWNMDPGYDSIIYRMTNQKIRMD

SEQ ID NO: 24158 - protein, 566 aa, Homo sapiens
MLQRSPRAGPSRAQGRREAAETGGPTTQEGVACGVHQLATLLMELDSEDEASRLLAADALYRLGRLEETHKALLVALSRRPQAAPVLARLALLQLRRGFFYDANQLVKKLVQSGDTACLQPTLDVFCHEDRQLLQGHCHARALAILRARPGGADGRVHTKEAIAYLSLAIFAAGSQASESLLARARCYGFLGQKKTAMFDFNTVLRAEPGNVQALCGRALVHLALDQLQEAVDDIVSALKLGPGTVVPELRSLKPEAQALITQGLYSHCRALLSQLPDTGAPLEDKDTQGLLAVGEALIKIDSGQPHWHLLLADILMAQGSYEEAGTHLEKALHRAPTSEAARARLGLLQLKKGDVPGAARDLQSLAEVDAPDLSCLLHLLEASERQSLAQAAAQEAGTLLDAGQPRQALGYCSLSVLASGSSACHLRLRATCLAELQEFGRALRDLDHVLQEALGDGDLPRRAEDFCRQGRLLLSLGDEAAAAGAFAQALKLAPSLAQNSLCRQPGRAPTARMFLLRGQCCLEEQRHAEAWTAVESGLLVDPDHRGLKRLKARIRREASSGCWLQ

SEQ ID NO: 24159 - protein, 225 aa, Homo sapiens
MKLANWYWLSSAVLATYGFLVVANNETEEIKDERAKDVCPVRLESRGKCEEAGECPYQVSLPPLTIQLPKQFSRIEEVFKEVQNLKEIVNSLKKSCQDCKLQADDNGDPGRNGLLLPSTGAPGEVGDNRVRELESEVNKLSSELKNAKEEINVLHGRLEKLNLVNMNNIENYVDSKVANLTFVVNSLDGKCSKCPSQEQIQSRPGMYNNVFLSYVHKCYTAREYL

SEQ ID NO: 24160 - protein, 1539 aa, Homo sapiens
MPPQPPGSQSESSSHPALSQSPMPQERGFMAGTQRNPQMAQYGPQQTGPSMSPHPSPGGQMHAGISSFQQSNSSGTYGPQMSQYGPQGNYSRPPAYSGVPSASYSGPGPGMGISANNQMHGQGPSQPCGAVPLGRMPSAGMQNRPFPGNMSSMTPSSPGMSQQGGPGMGPPMPTVNRKAQEAAAAVMQAAANSAQSRQGSFPGMNQSGLMASSSPYSQPMNNSSSLMNTQAPPYSMAPAMVNSSAASVGLADMMSPGESKLPLPLKADGKEEGTPQPESKSKDSYSSQGISQPPTPGNLPVPSPMSPSSASISSFHGDESDSISSPGWPKTPSSPKSSSSTTTGEKITKVYELGNEPERKLWVDRYLTFMEERGSPVSSLPAVGKKPLDLFRLYVCVKEIGGLAQVNKNKKWRELATNLNVGTSSSAASSLKKQYIQYLFAFECKIERGEEPPPEVFSTGDTKKQPKLQPPSPANSGSLQGPQTPQSTGSNSMAEVPGDLKPPTPASTPHGQMTPMQGGRSSTISVHDPFSDVSDSSFPKRNSMTPNAPYQQGMSMPDVMGRMPYEPNKDPFGGMRKVPGSSEPFMTQGQMPNSSMQDMYNQSPSGAMSNLGMGQRQQFPYGASYDRRHEPYGQQYPGQGPPSGQPPYGGHQPGLYPQQPNYKRHMDGMYGPPAKRHEGDMYNMQYSSQQQEMYNQYGGSYSGPDRRPIQGQYPYPYSRERMQGPGQIQTHGIPPQMMGGPLQSSSSEGPQQNMWAARNDMPYPYQNRQGPGGPTQAPPYPGMNRTDDMMVPDQRINHESQWPSHVSQRQPYMSSSASMQPITRPPQPSYQTPPSLPNHISRAPSPASFQRSLENRMSPSKSPFLPSMKMQKVMPTVPTSQVTGPPPQPPPIRREITFPPGSVEASQPVLKQRRKITSKDIVTPEAWRVMMSLKSGLLAESTWALDTINILLYDDSTVATFNLSQLSGFLELLVEYFRKCLIDIFGILMEYEVGDPSQKALDHNAARKDDSQSLADDSGKEEEDAECIDDDEEDEEDEEEDSEKTESDEKSSIALTAPDAAADPKEKPKQASKFDKLPIKIVKKNNLFVVDRSDKLGRVQEFNSGLLHWQLGGGDTTEHIQTHFESKMEIPPRRRPPPPLSSAGRKKEQEGKGDSEEQQEKSIIATIDDVLSARPGALPEDANPGPQTESSKFPFGIQQAKSHRNIKLLEDEPRSRDETPLCTIAHWQDSLAKRCICVSNIVRSLSFVPGNDAEMSKHPGLVLILGKLILLHHEHPERKRAPQTYEKEEDEDKGVACSKDEWWWDCLEVLRDNTLVTLANISGQLDLSAYTESICLPILDGLLHWMVCPSAEAQDPFPTVGPNSVLSPQRLVLETLCKLSIQDNNVDLILATPPFSRQEKFYATLVRYVGDRKNPVCREMSMALLSNLAQGDALAARAIAVQKGSIGNLISFLEDGVTMAQYQQSQHNLMHMQPPPLEPPSVDMMCRAAKALLAMARVDENRSEFLLHEGRLLDISISAVLNSLVASVICDVLFQIGQL

SEQ ID NO: 24161 - protein, 274 aa, Homo sapiens
MVMVKGVNKLALPPGSVISYPLENAVPFSLDSVANSIHSLFSEETPVVLQLAPSEERVYMVGKANSVFEDLSVTLRQLRNRLFQENSVLSSLPLNSLSRNNEVDLLFLSELQVLHDISSLLSRHKHLAKDHSPDLYSLELAGLDEIGKRYGEDSEQFRDASKILVDALQKFADDMYSLYGGNAVVELVTVKSFDTSLIRKTRTILEAKQAKNPASPYNLAYKYNFEYSVVFNMVLWIMIALALAVIITSYNIWNMDPGYDSIIYRMTNQKIRMD

SEQ ID NO: 24162 - protein, 179 aa, Homo sapiens
AAVLNTALPAPVQAAAPVQASSTAQPRPPAQPQTLFQTQPLLQTTPAILPQPTAATAAAPTPKPVDTPPQITVQPAGFAFSPGIVIGTLPWVVNSASVAAPAPAQSLQVQAVTPQLLLNAQGQVIATLASSPLPPPVAVRKPSTPESPAKSEVQPIQPTPTVPQPAVVIASPAPAAKPS

SEQ ID NO: 24163 - protein, 813 aa, Homo sapiens
MKRAAAKHLIERYYHQLTEGCGNEACTNEFCASCPTFLRMDNNAAAIKALELYKINAKLCDPHPSKKGASSAYLENSKGAPNNSCSEIKMNKKGARIDFKDVTYLTEEKVYEILELCREREDYSPLIRVIGRVFSSAEALVQSFRKVKQHTKEELKSLQAKDEDKDEDEKEKAACSAAAMEEDSEASSSRIGDSSQGDNNLQKLGPDDVSVDIDAIRRVYTRLLSNEKIETAFLNALVYLSPNVECDLTYHNVYSRDPNYLNLFIIVMENRNLHSPEYLEMALPLFCKAMSKLPLAAQGKLIRLWSKYNADQIRRMMETFQQLITYKVISNEFNSRNLVNDDDAIVAASKCLKMVYYANVVGGEVDTNHNEEDDEEPIPESSELTLQELLGEERRNKKGPRVDPLETELGVKTLDCRKPLIPFEEFINEPLNEVLEMDKDYTFFKVETENKFSFMTCPFILNAVTKNLGLYYDNRIRMYSERRITVLYSLVQGQQLNPYLRLKVRRDHIIDDALVRLEMIAMENPADLKKQLYVEFEGEQGVDEGGVSKEFFQLVVEEIFNPDIGMFTYDESTKLFWFNPSSFETEGQFTLIGIVLGLAIYNNCILDVHFPMVVYRKLMGKKGTFRDLGDSHPVLYQSLKDLLEYEGNVEDDMMITFQISQTDLFGNPMMYDLKENGDKIPITNENRKEFVNLYSDYILNKSVEKQFKAFRRGFHMVTNESPLKYLFRPEEIELLICGSRNLDFQALEETTEYDGGYTRDSVLIREFWEIVHSFTDEQKRLFLQFTTGTDRAPVGGLGKLKMIIAKNGPDTER

SEQ ID NO: 24164 - protein, 1515 aa, Homo sapiens
MSPADAKRGAKRRKNKRGGGGGSGGGNGGASSGKAGPAAALRGSQAAGLAAPGSAAGLVGGAAAANGPLGAGASAGGAAPGGYFETPFSFGMNHRTPPYPAGDYCLLCRSERKDSSFLESGIKTASKLALSMAPKGNSVLHLPLWVCPDCRRTVEKEERHGGLDQPVSQDFLLHSSLGGSQPEAGSGGRLALGAQTLPSDTACSCEACSERREISAEADREPQQLQNYWSEVRYTVRCIYRQAGTPLADDQDQSLVPDKEGVKELVDRLCERDPYQLYQRLEQQAREYVLEMKVRLLRQLSAAAKVKAPSGLQGPPQAHQFISLLLEEYGALCQAARSISTFLGTLENEHLKKFQVTWELHNKHLFENLVFSEPLLQSNLPALVSQIRLGTTTHDTCSEDTYSTLLQRYQRSEEELRRVAEEWLECQKRIDAYVDEQMTMKTKQRMLTEDWELFKQRRFIEEQLTNKKAVTGENNFTDTMRHMLSSRLSMPDCPNCNYRRRCACDDCSLSHILTCGIMDPPVTDDIHIHQLPLQVDPAPDYLAERSPPSVSSASSGSGSSSPITIQQHPRLILTDSGSAPTFCSDDEDVAPLSAKFADIYPLSNYDDTEVVANMNGIHSELNGGGENMALKDESPQISSTSSSSSEADDEEADGESSGEPPGAPKEDGVLGSRSPRTEESKADSPPPSYPTQQAEQAPNTCECHVCKQEASGLTPSAMTAGALPPGHQFLSPEKPTHPALHLYPHIHGHVPLHTVPHLPRPLIHPTLYATPPFTHSKALPPAPVQNHTNKHQVFNASLQDHIYPSCFGNTPEWNSSKFISLWGSEVMNDKNWNPGTFLPDTISGSEILGPTLSETRPEALPPPSSNETPAVSDSKEKKNAAKKKCLYNFQDAFMEANKVVMATSSATSSVSCTATTVQSSNSQFRVSSKRPPSVGDVFHGISKEDHRHSAPAAPRNSPTGLAPLPALSPAALSPAALSPASTPHLANLAAPSFPKTATTTPGFVDTRKSFCPAPLPPATDGSISAPPSVCSDPDCEGHRCENGVYDPQQDDGDESADEDSCSEHSSSTSTSTNQKEGKYCDCCYCEFFGHGGPPAAPTSRNYAEMREKLRLRLTKRKEEQPKKMDQISERESVVDHRRVEDLLQFINSSETKPVSSTRAAKRARHKQRKLEEKARLEAEARAREHLHLQEEQRRREEEEDEEEEEDRFKEEFQRLQELQKLRAVKKKKKERPSKDCPKLDMLTRNFQAATESVPNSGNIHNGSLEQTEEPETSSHSPSRHMNHSEPRPGLGADGDAADPVDTRDSKFLLPKEVNGKQHEPLSFFFDIMQHHKEGNGKQKLRQTSKASSEPARRPTEPPKATEGQSKPRAQTESKAKVVDLMSITEQKREERKVNSNNNNKKQLNHIKDEKSNPTPMEPTSPGEHQQNSKLVLAESPQPKGKNKKNKKKKGDRVNNSIDDVFLPKDIDLDSVDMDETEREVEYFKRFCLDSARQTRQRLSINWSNFSLKKATFAAH

SEQ ID NO: 24165 - protein, 297 aa, Homo sapiens
ERRRVFQALARIHDICYNSTTLWDVTVRDLLPSSAMIKDLSQEFGMPLSQEELTDEKLFALPPQPAPNLEDYHSRNSTLTLEIHAHQEKYLQWRSAMLMKNKDKKHSFIQKNITEAYQVSKKPPKSVAKVIKISAPANKAVYNYSTQTMNSTELAKKELYQEIAKEPRKRFTYSQDYLSAMVEPLDLKEEEKKAQKKSRQAWLTARGFQVTGLQSDTESSFQDLKLPPIKELNEEWKENSLFANVLEPVLDRDRWSWDRHHVDFDLYKKPPPFLELLPSPAPKPVTVRKKKGNSPIS

SEQ ID NO: 24166 - protein, 79 aa, Homo sapiens
MLLGSLWGRCHPGRCALFLILALLLDAVGLVLLLLGILAPLSSWDFFIYTGALILALSLLLWIIWYSLNIEVSPEKLDL

SEQ ID NO: 24167 - protein, 151 aa, Homo sapiens
SPYTTSTPNINSVRNADSRGSLISTDSGNSLPERNSEKSNSLDKREKLLRRHSACVIRSAEEEEESCQSARKNRVTVDFSLLMIPPLPEETLNATPSLPLPEVLSSPVALIKWHQQSSTLGNSVVRCDKLDQSEIKSLLMCFLYILKSMSD

SEQ ID NO: 24168 - protein, 812 aa, Homo sapiens
MLSGASSQARGSNPTCPRQDGYSSLLEPGTEAPIKEAHRQDLRSHMPSPSQGRNPKGKASCHRWAARSSQEMARVSPAQPSSPESLNTGSRAVTGSLARLGRWREARLPFSRFLDEVTVRVLDPGTLEAFRVPRGRSPEPSAVDRGQGLAQEALTRAAAPGEKDPALSSQLSSEAATEAASRVGPGQAVGTSGPCLGSGKRGGRTASPWRSPGRASAADMEKLSALQEQKGELRKRLSYTTHKLEKLETEFDSTRHYLEIELRRAQEELEKVTEKLRRIQSNYMALQRINQELEDKLYRMGQHYEEEKRALSHEIVALNSHLLEAKVTIDKLSEDNELYRKDCNLAAQLLQCSQTYGRVHKVSELPSDFQERVSLHMEKHGCSLPSPLCHPAYADSVPTCVIAKVLEKPDPASLSSRLSDASARDLAFCDGVEKPGPRPPYKGDIYCSDTALYCPEERRRDRRPSVDAPVTDVGFLRAQNSTDSAAEEEEEAEAAAFPAGFQHEAFPSYAGSLPTSSSYSSFSATSEEKEHAQASTLTASQQAIYLNSRDELFDRKPPATTYEGSPRFAKATAAVAAPLEAEVAPGFGRTMSPYPAETFRFPASPGPQQALMPPNLWSLRAKPGTARLPGEDMRGQWRPLSVEDIGAYSYPVSAAGRASPCSFSERYYGGAGGSPGKKADGRASPLYASYKADSFSEGDDLSQGHLAEPCFLRAGGDLSLSPGRSADPLPGYAPSEGGDGDRLGVQLCGTASSPEPEQGSRDSLEPSSMEASPEMHPAARLSPQQAFPRTGGSGLSRKDSLTKAQLYGTLLN

SEQ ID NO: 24169 - protein, 2263 aa, Homo sapiens
MARFGDEMPARYGGGGSGAAAGVVVGSGGGRGAGGSRQGGQPGAQRMYKQSMAQRARTMALYNPIPVRQNCLTVNRSLFLFSEDNVVRKYAKKITEWPPFEYMILATIIANCIVLALEQHLPDDDKTPMSERLDDTEPYFIGIFCFEAGIKIIALGFAFHKGSYLRNGWNVMDFVVVLTGILATVGTEFDLRTLRAVRVLRPLKLVSGIPSLQVVLKSIMKAMIPLLQIGLLLFFAILIFAIIGLEFYMGKFHTTCFEEGTDDIQGESPAPCGTEEPARTCPNGTKCQPYWEGPNNGITQFDNILFAVLTVFQCITMEGWTDLLYNSNDASGNTWNWLYFIPLIIIGSFFMLNLVLGVLSGEFAKERERVENRRAFLKLRRQQQIERELNGYMEWISKAEEVILAEDETDGEQRHPFDGALRRTTIKKSKTDLLNPEEAEDQLADIASVGSPFARASIKSAKLENSTFFHKKERRMRFYIRRMVKTQAFYWTVLSLVALNTLCVAIVHYNQPEWLSDFLYYAEFIFLGLFMSEMFIKMYGLGTRPYFHSSFNCFDCGVIIGSIFEVIWAVIKPGTSFGISVLRALRLLRIFKVTKYWASLRNLVVSLLNSMKSIISLLFLLFLFIVVFALLGMQLFGGQFNFDEGTPPTNFDTFPAAIMTVFQILTGEDWNEVMYDGIKSQGGVQGGMVFSIYFIVLTLFGNYTLLNVFLAIAVDNLANAQELTKDEQEEEEAANQKLALQKAKEVAEVSPLSAANMSIAVKEQQKNQKPAKSVWEQRTSEMRKQNLLASREALYNEMDPDERWKAAYTRHLRPDMKTHLDRPLVVDPQENRNNNTNKSRAAEPTVDQRLGQQRAEDFLRKQARYHDRARDPSGSAGLDARRPWAGSQEAELSREGPYGRESDHHAREGSLEQPGFWEGEAERGKAGDPHRRHVHRQGGSRESRSGSPRTGADGEHRRHRAHRRPGEEGPEDKAERRARHREGSRPARGGEGEGEGPDGGERRRRHRHGAPATYEGDARREDKERRHRRRKENQGSGVPVSGPNLSTTRPIQQDLGRQDPPLAEDIDNMKNNKLATAESAAPHGSLGHAGLPQSPAKMGNSTDPGPMLAIPAMATNPQNAASRRTPNNPGNPSNPGPPKTPENSLIVTNPSGTQTNSAKTARKPDHTTVDIPPACPPPLNHTVVQVNKNANPDPLPKKEEEKKEEEEDDRGEDGPKPMPPYSSMFILSTTNPLRRLCHYILNLRYFEMCILMVIAMSSIALAAEDPVQPNAPRNNVLRYFDYVFTGVFTFEMVIKMIDLGLVLHQGAYFRDLWNILDFIVVSGALVAFAFTGNSKGKDINTIKSLRVLRVLRPLKTIKRLPKLKAVFDCVVNSLKNVFNILIVYMLFMFIFAVVAVQLFKGKFFHCTDESKEFEKDCRGKYLLYEKNEVKARDREWKKYEFHYDNVLWALLTLFTVSTGEGWPQVLKHSVDATFENQGPSPGYRMEMSIFYVVYFVVFPFFFVNIFVALIIITFQEQGDKMMEEYSLEKNERACIDFAISAKPLTRHMPQNKQSFQYRMWQFVVSPPFEYTIMAMIALNTIVLMMKFYGASVAYENALRVFNIVFTSLFSLECVLKVMAFGILNYFRDAWNIFDFVTVLGSITDILVTEFGNPNNFINLSFLRLFRAARLIKLLRQGYTIRILLWTFVQSFKALPYVCLLIAMLFFIYAIIGMQVFGNIGIDVEDEDSDEDEFQITEHNNFRTFFQALMLLFRSATGEAWHNIMLSCLSGKPCDKNSGILTRECGNEFAYFYFVSFIFLCSFLMLNLFVAVIMDNFEYLTRDSSILGPHHLDEYVRVWAEYDPAAWGRMPYLDMYQMLRHMSPPLGLGKKCPARVAYKRLLRMDLPVADDNTVHFNSTLMALIRTALDIKIAKGGADKQQMDAELRKEMMAIWPNLSQKTLDLLVTPHKSTDLTVGKIYAAMMIMEYYRQSKAKKLQAMREEQDRTPLMFQRMEPPSPTQEGGPGQNALPSTQLDPGGALMAHESGLKESPSWVTQRAQEMFQKTGTWSPEQGPPTDMPNSQPNSQSVEMREMGRDGYSDSEHYLPMEGQGRAASMPRLPAENQRRRGRPRGNNLSTISDTSPMKRSASVLGPKARRLDDYSLERVPPEENQRHHQRRRDRSHRASERSLGRYTDVDTGLGTDLSMTTQSGDLPSKERDQERGRPKDRKHRQHHHHHHHHHHPPPPDKDRYAQERPDHGRARARDQRWSRSPSEGREHMAHRQ

SEQ ID NO: 24170 - protein, 265 aa, Homo sapiens
MSRAMALFFVLCWIQDEIVLQVFSKVPYDPSFDETRTAVRSITKRDTQKSYSQQKSLNNAAFASGSNEREEHLAKIFDEILLQVFPKFPYDPSFNEATAVRSITKTDMRKGTSIAWNSPKPEYFLGSVDKIPDKDHLSEEKNFKESCLFDRDLREQLTTIDKETLQGAAKPDAHFRTMPCGQLLHFLQRNTIIAAVSGVAILMAIVLLLLGLASYIRKKQPSSPLANTTYNIFIMDGKTWWHNSEEKNFTKLAKKQKQLKSSSCV

SEQ ID NO: 24171 - protein, 424 aa, Homo sapiens
MQYSAMDEFHPFIEALLPHVRAIAYTWFNLQARKRKYFKKHEKRMSKDEERAVKDELLSEKPEIKQKWASRLLAKLRKDIRQEYREDFVLTVTGKKHPCCVLSNPDQKDSGQSGSPSHNDPAKNPPGYLEDSFVKSGVFNVSELVRVSRTPITQGTGVNFPIGEIPSQPYYHDMNSGVNLQRSLSSPPSSKRPKTISIDENMEPSPTGDFYPSPSSPAAGSRTWHERDQDMSSPTTMKKPEKPLFSSASPQDSSPRLSTFPQHHHPGIPGVAHSVISTRTPPPPSPLPFPTQAILPPAPSSYFSHPTIRYPPHLNPQDTLKNYVPSYDPSSPQTSQPNGSGQVVGKVPGHFTPVLAPSPHPSAVRPVTLSMTDTKPITTSTEGEAASPTATTYTASGTSQANRYVGLSPRDPSFLHQQQSWYLG

SEQ ID NO: 24172 - protein, 1871 aa, Homo sapiens
MDKGRERMAAAAAAAAAAAAAAQCRSPRCAAERRGFRRELDSWRHRLMHCVGFESILEGLYGPRLRRDLSLFEDCEPEELTDWSMDEKCSFCNLQREAVSDCIPSLDSSQSTPTEELSSQGQSNTDKIECQAENYLNALFRKKDLPQNCDPNIPLVAQELMKKMIRQFAIEYISKSGKTQENRNGSIGPSIVCKSIQMNQAENSLQEEQEGPLDLTVNRMQEQNTQQGDGVLDLSTKKTSIKSEESSICDPSSENSVAGSTVDAKSEEATKMEKRKSALNKVLESLCIHHQQQVLAMLKFLVQEQNAASLCCCNTSCVVSSESQKPLIEDDLCGLFCSCEYRLAERGCLQNEKQSPGLEPLPVCIKDLHCLSCQTVTVEHVKPVVNRGIADSYNSHRCCSGLLPNIHSTKSAFRSPLLSKEVCDLSVTLKDACRSRSPSPPPLSPIETEGFEKLKDVISEISALENNKLEANINQPPSLTPAEISSNKSDHQDKILKTKKSSNSYSLLSNDSNNSTTNHEKGETAVIFQDLMDRINEKLKSIETTDMTSLVKLSSSDYNTYNDLKLGDFITSLLHNAKASDYSFMELLSQHDKKVENKIIQTRFRKRQETLFAMRNSSDSPMFRRQSLQIKRELASLDENFTRKKYTEKSSRKLTQNNEISSSDKGEFYHDQGPSLQNSKRLQGKNHAETSFSPNYALQSLQLPLHSSETNLSFNEFSESFKTTSPEKMSIRKPQEKSADGKQFLQNDRKNPKLGNTQTLLRNDVSGLLSRTKRNIVPPGWYSVYVTNNYVFKKSPKAKKVSESTTKNDPVKNIHIESSHNIDLNKIAMNSNLQVVVKRLEDTISIAKKSWNNQPLSEGYKASKKLIEIDGKDQHADRNMTLTLNRMTCKEQSLSKSVVASGNIINSHCMPTVDLNNKRLENLKKSSILDMGRLISSVENVPAKYEGTESSSVSNYSSPIKLMFLSEVKSSEGVKYTLTSVGTSHSNVVLPSEKPTTHHVTEEKTETNEDISNANSENYHSSHYDTDTFQRELNKFSHAKETAGSSTMFIGDINSDKPQEEPKDNSSSATDPSFKRKPGRPKKIGPQVVKQIKRPIGRPPKPKIDQTNITVCQNEPFSAGRKSPECLISEVKEGIYKKSITVTVIYGRSRRTKRHVSEGRVNISNLMSLNNNAGDFPTEYNSPRNISEDKIDLGERISAVASLTTESEILGSGFEYVRPIKNKSVIPQPSKNIIRPNQKPLAISRKPGRPAKVKISGISVTINRTSPQEREVSISSCLPPLEQDNTSGKNLPEEKYDQQCTQMDKIRHTEADIFKNGSKRMIATVPLRHSIRDRKPSLHFLHSLASSSSLIYRNALLHKSYKLHLQKNKSQKEKHRHSKMKIAYKDTPRNRLSRNAKKCLEDNKLVPISEVSLDPIISSNPLLRWWATSASNDSLLEELNNRFEQITNAWVQVSGDEAENCIHKKREHIENDHFKVASPLETCLLELEVSPVKMLFQKKYDLNELCTWFMQTTETQSLSLVRKANARNPLEVINTRGIKLGTKYSDFNASPFRKHFKKFALSSPSKSAEKLHILHKVANSPLLNVKSNLAIARLKRTEFKRLHHERWKREGKLHNHGTVDWNSKRRNLRFFCQNQFLNKTEGETNADIPLQGKSIVDNQCVLPPEIRGDLQQRVVMPDFKIHASFENKFKSEAKENGTNCSQKDFQKGPRLENVCPNSWRSKTLKDCRIFLRKLNCLEHRNTFKLNTIIYSPESTDSGNTHQTHMEESKRFTLRSHSARQNSFKKQSKEIENANTNNPSADEFADHLGNSKLSKCVNFDKNPDSFEVLSNLNKRKRPPWKITEMSTKRHKRQSCNSGQMANYFSKSLACYK

SEQ ID NO: 24173 - protein, 282 aa, Homo sapiens
ESNSDEHLEQFRHRPYQVITARVHPGESNASWVMKGTLEFLVSSDPVARLLRENFIFKIIPMLNPDGVINGNHRCSLSGEDLNRQWLSPSAHLQPTIYHAKGLLYHLSSIGRSPVVFCDFHGHSQKKNVFLYGCSIKETLWQAACTVGTSTILEEVNYRGLQFGTRELEEMGAMFCLGLLILELKSASCSHQLLAQAATLLSAEEDALDQHLQRCSSSSGSVPSELEDEPACLEEIDYSTDNSSDQEGSLSELDRRIQECAFNKFEGEEEEEAPGQGGEAIP

SEQ ID NO: 24174 - protein, 371 aa, Homo sapiens
KVRSYGSVLLSAEEFQKLFNELDRSVVKEHPPRPEYQSPFLQSAQFLFGHYYFDYLGNLIALANLVSICVFLVLDADVLPAERDDFILGILNCVFIVYYLLEMLLKVFALGLRGYLSYPSNVFDGLLTVVLLVLEISTLAVYRLPHPGWRPEMVGLLSLWDMTRMLNMLIVFRFLRIIPSMKLMAVVASTVLGLVQNMRAFGGILVVVYYVFAIIGINLFRGVIVALPGNSSLAPANGSAPCGSFEQLEYWANNFDDFAAALVTLWNLMVVNNWQVFLDAYRRYSGPWSKIYFVLWWLVSSVIWVNLFLALILENFLHKWDPRSHLQPLAGTPEATYQMTVELLFRDILEEPGEDELTERLSQHPHLWLCR

SEQ ID NO: 24175 - protein, 2266 aa, Homo sapiens
MARFGDEMPARYGGGGSGAAAGVVVGSGGGRGAGGSRQGGQPGAQRMYKQSMAQRARTMALYNPIPVRQNCLTVNRSLFLFSEDNVVRKYAKKITEWPPFEYMILATIIANCIVLALEQHLPDDDKTPMSERLDDTEPYFIGIFCFEAGIKIIALGFAFHKGSYLRNGWNVMDFVVVLTGILATVGTEFDLRTLRAVRVLRPLKLVSGIPSLQVVLKSIMKAMIPLLQIGLLLFFAILIFAIIGLEFYMGKFHTTCFEEGTDDIQGESPAPCGTEEPARTCPNGTKCQPYWEGPNNGITQFDNILFAVLTVFQCITMEGWTDLLYNSNDASGNTWNWLYFIPLIIIGSFFMLNLVLGVLSGEFAKERERVENRRAFLKLRRQQQIERELNGYMEWISKAEEVILAEDETDGEQRHPFDGALRRTTIKKSKTDLLNPEEAEDQLADIASVGSPFARASIKSAKLENSTFFHKKERRMRFYIRRMVKTQAFYWTVLSLVALNTLCVAIVHYNQPEWLSDFLYYAEFIFLGLFMSEMFIKMYGLGTRPYFHSSFNCFDCGVIIGSIFEVIWAVIKPGTSFGISVLRALRLLRIFKVTKYWASLRNLVVSLLNSMKSIISLLFLLFLFIVVFALLGMQLFGGQFNFDEGTPPTNFDTFPAAIMTVFQILTGEDWNEVMYDGIKSQGGVQGGMVFSIYFIVLTLFGNYTLLNVFLAIAVDNLANAQELTKVEADEQEEEEAANQKLALQKAKEVAEVSPLSAANMSIAVKEQQKNQKPAKSVWEQRTSEMRKQNLLASREALYNEMDPDERWKAAYTRHLRPDMKTHLDRPLVVDPQENRNNNTNKSRAAEPTVDQRLGQQRAEDFLRKQARYHDRARDPSGSAGLDARRPWAGSQEAELSREGPYGRESDHHAREGSLEQPGFWEGEAERGKAGDPHRRHVHRQGGSRESRSGSPRTGADGEHRRHRAHRRPGEEGPEDKAERRARHREGSRPARGGEGEGEGPDGGERRRRHRHGAPATYEGDARREDKERRHRRRKENQGSGVPVSGPNLSTTRPIQQDLGRQDPPLAEDIDNMKNNKLATAESAAPHGSLGHAGLPQSPAKMGNSTDPGPMLAIPAMATNPQNAASRRTPNNPGNPSNPGPPKTPENSLIVTNPSGTQTNSAKTARKPDHTTVDIPPACPPPLNHTVVQVNKNANPDPLPKKEEEKKEEEEDDRGEDGPKPMPPYSSMFILSTTNPLRRLCHYILNLRYFEMCILMVIAMSSIALAAEDPVQPNAPRNNVLRYFDYVFTGVFTFEMVIKMIDLGLVLHQGAYFRDLWNILDFIVVSGALVAFAFTGNSKGKDINTIKSLRVLRVLRPLKTIKRLPKLKAVFDCVVNSLKNVFNILIVYMLFMFIFAVVAVQLFKGKFFHCTDESKEFEKDCRGKYLLYEKNEVKARDREWKKYEFHYDNVLWALLTLFTVSTGEGWPQVLKHSVDATFENQGPSPGYRMEMSIFYVVYFVVFPFFFVNIFVALIIITFQEQGDKMMEEYSLEKNERACIDFAISAKPLTRHMPQNKQSFQYRMWQFVVSPPFEYTIMAMIALNTIVLMMKFYGASVAYENALRVFNIVFTSLFSLECVLKVMAFGILNYFRDAWNIFDFVTVLGSITDILVTEFGNPNNFINLSFLRLFRAARLIKLLRQGYTIRILLWTFVQSFKALPYVCLLIAMLFFIYAIIGMQVFGNIGIDVEDEDSDEDEFQITEHNNFRTFFQALMLLFRSATGEAWHNIMLSCLSGKPCDKNSGILTRECGNEFAYFYFVSFIFLCSFLMLNLFVAVIMDNFEYLTRDSSILGPHHLDEYVRVWAEYDPAAWGRMPYLDMYQMLRHMSPPLGLGKKCPARVAYKRLLRMDLPVADDNTVHFNSTLMALIRTALDIKIAKGGADKQQMDAELRKEMMAIWPNLSQKTLDLLVTPHKSTDLTVGKIYAAMMIMEYYRQSKAKKLQAMREEQDRTPLMFQRMEPPSPTQEGGPGQNALPSTQLDPGGALMAHESGLKESPSWVTQRAQEMFQKTGTWSPEQGPPTDMPNSQPNSQSVEMREMGRDGYSDSEHYLPMEGQGRAASMPRLPAENQRRRGRPRGNNLSTISDTSPMKRSASVLGPKARRLDDYSLERVPPEENQRHHQRRRDRSHRASERSLGRYTDVDTGLGTDLSMTTQSGDLPSKERDQERGRPKDRKHRQHHHHHHHHHHPPPPDKDRYAQERPDHGRARARDQRWSRSPSEGREHMAHRQ

SEQ ID NO: 24176 - protein, 544 aa, Homo sapiens
MVSNPVHGLPFLPGTSFKDSTKTAFHRSQTLSYRNGYAIVRRPTVGIGGDRLQFNQLSQAELDELASKAPVLTYGQPKQAPPADFIPAHVAFDKKVFLESQGIELNPPEKMALDPYTELRKQPLRKYVTPSDFDQLKQFLTFDKQVLRFYAIWDDTDSMYGECRTYIIHYYLMDDTVEIREVHERNDGRDPFPLLMNRQRVPKVLVENAKNFPQCVLEISDQEVLEWYTAKDFIVGKSLTILGRTFFIYDCDPFTRRYYKEKFGITDLPRIDVSKREPPPVKQELPPYNGFGLVEDSAQNCFALIPKAPKKDVIKMLVNDNKVLRYLAVLESPIPEDKDRRFVFSYFLATDMISIFEPPVRNSGIIGGKYLGRTKVVKPYSTVDNPVYYGPSDFFIGAVIEVFGHRFIILDTDEYVLKYMESNAAQYSPEALASIQNHVRKREAPAPEAESKQTEKDPGVQELEALIDTIQKQLKDHSCKDNIREAFQIYDKEASGYVDRDMFFKICESLNVPVDDSLVKELIRMCSHGEGKINYYNFVRAFSN

SEQ ID NO: 24177 - protein, 680 aa, Homo sapiens
MFLGLCDFAKMHHQQRMAALGTDKELSDLLDFSAMFSPPVSSGKNGPTSLASGHFTGSNVEDRSSSGSWGNGGHPSPSRNYGDGTPYDHMTSRDLGSHDNLSPPFVNSRIQSKTERGSYSSYGRESNLQGCHQQSLLGGDMDMGNPGTLSPTKPGSQYYQYSSNNPRRRPLHSSAMEVQTKKVRKVPPGLPSSVYAPSASTADYNRDSPGYPSSKPATSTFPSSFFMQDGHHSSDPWSSSSGMNQPGYAGMLGNSSHIPQSSSYCSLHPHERLSYPSHSSADINSSLPPMSTFHRSGTNHYSTSSCTPPANGTDSIMANRGSGAAGSSQTGDALGKALASIYSPDHTNNSFSSNPSTPVGSPPSLSGTAVWSRNGGQASSSPNYEGPLHSLQSRIEDRLERLDDAIHVLRNHAVGPSTAMPGGHGDMHGIIGPSHNGAMGGLGSGYGTGLLSANRHSLMVGTHREDGVALRGSHSLLPNQVPVPQLPVQSATSPDLNPPQDPYRGMPPGLQGQSVSSGSSEIKSDDEGDENLQDTKSSEDKKLDDDKKDIKSITRSRSSNNDDEDLTPEQKAEREKERRMANNARERLRVRDINEAFKELGRMVQLHLKSDKPQTKLLILHQAVAVILSLEQQVRERNLNPKAACLKRREEEKVSSEPPPLSLAGPHPGMGDASNHMGQM

SEQ ID NO: 24178 - protein, 467 aa, Homo sapiens
EKPEAFTANFFKGLEIYQTKLLRVCILSQVTEEPLEEETEDVANLWNSFNDEEEEEAMVFFVLQESTGYMAPTLRALAIIHTIISLVCVVGYYCLKVPLVVFKREKEIARKLEFDGLYITEQPSEDDIKGQWDRLVINTPSFPNNYWDKFVKRKVINKYGDLYGAERIAELLGLDKNALDFSPVEETKAEAASLVSWLSSIDMKYHIWKLGVVFTDNSFLYLAWYTTMSVLGHYNNFFFAAHLLDIAMGFKTLRTILSSVTHNGKQLVLTVGLLAVVVYLYTVVAFNFFRKFYNKSEDDDEPDMKCDDMMTCYLFHMYVGVRAGGGIGDEIEDPAGDPYEMYRIVFDITFFFFVIVILLAIIQGLIIDAFGELRDQQEQVREDMETKCFICGIGNDYFDTTPHGFETHTLQEHNLANYLFFLMYLINKDETEHTGQESYVWKMYQERCWDFFPAGDCFRKQYEDQLG

SEQ ID NO: 24179 - protein, 841 aa, Homo sapiens
MPHTELGTKPLQAPGFREKPLFTRDASQLKGTFLSTTLKKSNMGFGFTIIGGDEPDEFLQVKSVIPDGPAAQDGKMETGDVIVYINEVCVLGHTHADVVKLFQSVPIGQSVNLVLCRGYPLPFDPEDPANSMVPPLAIMERPPPVMVNGRHNYETYLEYISRTSQSVPDITDRPPHSLHSMPTDGQLDGTYPPPVHDDNVSMASSGATQAELMTLTIVKGAQGFGFTIADSPTGQRVKQILDIQGCPGLCEGDLIVEINQQNVQNLSHTEVVDILKDCPIGSETSLIIHRGGFFSPWKTPKPIMDRWENQGSPQTSLSAPAIPQNLPFPPALHRSSFPDSTEAFDPRKPDPYELYEKSRAIYESPDYKELDVHLRRMESGFGFRILGGDEPGQPILIGAVIAMGSADRDGRLHPGDELVYVDGIPVAGKTHRYVIDLMHHAARNGQVNLTVRRKVLCGGEPCPENGRSPGSVSTHHSSPRSDYATYTNSNHAAPSSNASPPEGFASHSLQTSDVVIHRKENEGFGFVIISSLNRPESGSTITVPHKIGRIIDGSPADRCAKLKVGDRILAVNGQSIINMPHADIVKLIKDAGLSVTLRIIPQEELNSPTSAPSSEKQSPMAQQSPLAQQSPLAQPSPATPNSPIAQPAPPQPLQLQGHENSYRSEVKARQDVKPDIRQPPFTDYRQPPLDYRQPPGGDYQQPPPLDYRQPPLLDYRQHSPDTRQYPLSDYRQPQDFDYFTVDMEKGAKGFGFSIRGGREYKMDLYVLRLAEDGPAIRNGRMRVGDQIIEINGESTRDMTHARAIELIKSGGRRVRLLLKRGTGQVPEYEHILPARRGGSHL

SEQ ID NO: 24180 - protein, 723 aa, Homo sapiens
DNEKLHNGTIQRKLKYEKRQFCPAWYLDPLLPRDATDTSSLIKEERREVDQNDHWDHPMLWSVSGPKTTSSASQERTHQQRDQSSVPEVFQDSENKYGHPEHAGHFEPKCFNLPKISFLNESNTDDAEDFQSQSENFSELMTHKDKHGLRVKSSWTLLQHTSQEVSINSGGKQARQGKVLCLVLSEGISHEERASCSAPQSVLASEFYSEQQGEEELDAKKMSSSESLVNIRTEGNNGLGYFYHKFSDLYKDTSSHLLQAGTKVISQARLVGNLCAPRGLPSQVTTFVRSLPFLKHLAPHMPLKTDMQSTESHSPEARVGSSESEAAGSLRPAEGAAPYRASVFAATGLPGSSPSSVFRLEYEDARKSSAFKQSLVQFPDQMLKLQECPLKDLLRHVTCSLPEPLGNMKEVKGIYWLAVAACTAPDPQPACLLLLQSTLYALVLSDNLGSMSIFHALPLSGLQEIQIGFGGQSVRFLSSAEGLLLTVFSYNKYLSQQLCRDLLCVLMPEPDAAACANHPLLQQDLVQLSLDWKTEIPDLVLPNGVQVSSKFQTTLVDMIYFLHGNMEVNVPSLAEVQLLLYTTVKVMGDSGHDQCQSLVLLNTHIALVKEDCVFYPRIRSRNIPPPGAQFDVIKCHALSEFRCVVVPEKKNVSTVELVFLQKLKPSVGSRNSPPEHLQEAPNVQLFTTPLYLQGSQNVAPEVWKLTFNSQDEALWLISHLTRL

SEQ ID NO: 24181 - protein, 270 aa, Homo sapiens
HKAPKKKGIKSSIGRLFGKKEKGRPGQTGKEALGQAGVSETDNSSQDALGLSKLGGQAEKNRKLQKKHELLEEARRQGLPFAQWDGPTVVVWLELWVGMPAWYVAACRANVKSGAIMSALSDTEIQREIGISNPLHRLKLRLAIQEIMSLTSPSAPPTSRTTTGNVWLTHEEMETLAATPQTEDEEGSWAQTLAYGDMNHEWIGNEWLPSLGLPQYRSYFMECLVDARMLDHLTKKDLRGQLKMVDSFHRNSFQCGIMCLRRLNYDRKEL

SEQ ID NO: 24182 - protein, 255 aa, Homo sapiens
LQQAAEVSQLRGARVITPEDLLFLMRKDKKKLRRLLKYMFIRDYKSKIVKGIDEDDLLEDKLSGSNNANKRQKIAQDFLNSIDQTGELLAMFEDDEIDEVKQERMERAERQTRIMDSAQYAEFCESRQLSFSKKASKFRDWLDCSSMEIKPNVVAMEILAYLAYETVAQLVDLALLVRQDMVTKAGDPFSHAISATFIQYHNSAESTAACGVEAHSDAIQPCHIREAIRRYSHRIGPLSPFTNAFFPSFIFFSCC

SEQ ID NO: 24183 - protein, 995 aa, Homo sapiens
MSRLLWRKVAGATVGPGPVPAPGRWVSSSVPASDPSDGQRRRQQQQQQQQQQQQQPQQPQVLSSEGGQLRHNPLDIQMLSRGLHEQIFGQGGEMPGEAAVRRSVEHLQKHGLWGQPAVPLPDVELRLPPLYGDNLDQHFRLLAQKQSLPYLEAANLLLQAQLPPKPPAWAWAEGWTRYGPEGEAVPVAIPEERALVFDVEVCLAEGTCPTLAVAISPSAWYSWCSQRLVEERYSWTSQLSPADLIPLEVPTGASSPTQRDWQEQLVVGHNVSFDRAHIREQYLIQGSRMRFLDTMSMHMAISGLSSFQRSLWIAAKQGKHKVQPPTKQGQKSQRKARRGPAISSWDWLDISSVNSLAEVHRLYVGGPPLEKEPRELFVKGTMKDIRENFQDLMQYCAQDVWATHEVFQQQLPLFLERCPHPVTLAGMLEMGVSYLPVNQNWERYLAEAQGTYEELQREMKKSLMDLANDACQLLSGERYKEDPWLWDLEWDLQEFKQKKAKKVKKEPATASKLPIEGAGAPGDPMDQEDLGPCSEEEEFQQDVMARACLQKLKGTTELLPKRPQHLPGHPGWYRKLCPRLDDPAWTPGPSLLSLQMRVTPKLMALTWDGFPLHYSERHGWGYLVPGRRDNLAKLPTGTTLESAGVVCPYRAIESLYRKHCLEQGKQQLMPQEAGLAEEFLLTDNSAIWQTVEELDYLEVEAEAKMENLRAAVPGQPLALTARGGPKDTQPSYHHGNGPYNDVDIPGCWFFKLPHKDGNSCNVGSPFAKDFLPKMEDGTLQAGPGGASGPRALEINKMISFWRNAHKRISSQMVVWLPRSALPRAVIRHPDYDEEGLYGAILPQVVTAGTITRRAVEPTWLTASNARPDRVGSELKAMVQAPPGYTLVGADVDSQELWIAAVLGDAHFAGMHGCTAFGWMTLQGRKSRGTDLHSKTATTVGISREHAKIFNYGRIYGAGQPFAERLLMQFNHRLTQQEAAEKAQQMYAATKGLRWH

SEQ ID NO: 24184 - protein, 674 aa, Homo sapiens
MTIRYQGRQYRLRMAFLQKIEALVKDMQNPETGVRMQNQRVLVTSVPHAMTGSDVLQWIVQRLWISSLEAQNLGNFIVRYGYIYPLQDPKNLILKPDGSLYRFQTPYFWPTQQWPAEDTDYAIYLAKRNIKKKGILEEYEKENYNFLNQKMNYKWDFVIMQAKEQYRAGKERNKADRYALDCQEKAYWLVHRCPPGMDNVLDYGLDRVTNPNEVKVNQKQTVVAVKKEIMYYQQALMRSTVKSSVSLGGIVKYSEQFSSNDAIMSGCLPSNPWITDDTQFWDLNAKLVEIPTKMRVERWAFNFSELIRDPKGRQSFQYFLKKEFSGENLGFWEACEDLKYGDQSKVKEKAEEIYKLFLAPGARRWINIDGKTMDITVKGLKHPHRYVLDAAQTHIYMLMKKDSYARYLKSPIYKDMLAKAIEPQETTKKSSTLPFMRRHLRSSPSPVILRQLEEEAKAREAANTVDITQPGQHMAPSPHLTVYTGTCMPPSPSSPFSSSCRSPRKPFASPSRFIRRPSTTICPSPIRVALESSSGLEQKGECSGSMAPRGPSVTESSEASLDTSWPRSRPRAPPKARMALSFSRFLRRGCLASPVFARLSPKCPAVSHGRVQPLGDVGQQLPRLKSKRVANFFQIKMDVPTGSGTCLMDSEDAGTGESGDRATEKEVICPWESL

SEQ ID NO: 24185 - protein, 1567 aa, Homo sapiens
ILGAAGGFSHALGYLQGNTLLIETENLRKSAKAAVPTVSDQAAAMQLSQCAKNLATSLAELRTASQKAHEACGPMEIDSALNTVQTLKNELQDAKMAAVESQLKPLPGETLEKCAQDLGSTSKAVGSSMAQLLTCAAQGNEHYTGVAARETAQALKTLAQAARGVAASTTDPAAAHAMLDSARDVMEGSAMLIQEAKQALIAPGDAERQQRLAQVAKAVSHSLNNCVNCLPGQKDVDVALKSIGESSKKLLVDSLPPSTKPFQEAQSELNQAAADLNQSAGEVVHATRGQSGELAAASGKFSDDFDEFLDAGIEMAGQAQTKEDQIQVIGNLKNISMASSKLLLAAKSLSVDPGAPNAKNLLAAAARAVTESINQLITLCTQQAPGQKECDNALRELETVKGMLDNPNEPVSDLSYFDCIESVMENSKVLGESMAGISQNAKTGDLPAFGECVGIASKALCGLTEAAAQAAYLVGISDPNSQAGHQGLVDPIQFARANQAIQMACQNLVDPGSSPSQVLSAATIVAKHTSALCNACRIASSKTANPVAKRHFVQSAKEVANSTANLVKTIKALDGDFSEDNRNKCRIATAPLIEAVENLTAFASNPEFVSIPAQISSEGSQAQEPILVSAKTMLESSSYLIRTARSLAINPKDPPTWSVLAGHSHTVSDSIKSLITSIRDKAPGQRECDYSIDGINRCIRDIEQASLAAVSQSLATRDDISVEALQEQLTSVVQEIGHLIDPIATAARGEAAQLGHKVTQLASYFEPLILAAVGVASKILDHQQQMTVLDQTKTLAESALQMLYAAKEGGGNPKAQHTHDAITEAAQLMKEAVDDIMVTLNEAASEVGLVGGMVDAIAEAMSKLDEGTPPEPKGTFVDYQTTVVKYSKAIAVTAQEMMTKSVTNPEELGGLASQMTSDYGHLAFQGQMAAATAEPEEIGFQIRTRVQDLGHGCIFLVQKAGALQVCPTDSYTKRELIECARAVTEKVSLVLSALQAGNKGTQACITAATAVSGIIADLDTTIMFATAGTLNAENSETFADHRENILKTAKALVEDTKLLVSGAASTPDKLAQAAQSSAATITQLAEVVKLGAASLGSDDPETQVVLINAIKDVAKALSDLISATKGAASKPVDDPSMYQLKGAAKVMVTNVTSLLKTVKAVEDEATRGTRALEATIECIKQELTVFQSKDVPEKTSSPEESIRMTKGITMATAKAVAAGNSCRQEDVIATANLSRKAVSDMLTACKQASFHPDVSDEVRTRALRFGTECTLGYLDLLEHVLVILQKPTPEFKQQLAAFSKRVAGAVTELIQAAEAMKGTEWVDPEDPTVIAETELLGAAASIEAAAKKLEQLKPRAKPKQADETLDFEEQILEAAKSIAAATSALVKSASAAQRELVAQGKVGSIPANAADDGQWSQGLISAARMVAAATSSLCEAANASVQGHASEEKLISSAKQVAASTAQLLVACKVKADQDSEAMRRLQAAGNAVKRASDNLVRAAQKAAFGKADDDDVVVKTKFVGGIAQIIAAQEEMLKKERELEEARKKLAQIRQQQYKFLPTELREDEG

SEQ ID NO: 24186 - protein, 458 aa, Homo sapiens
MTLLITGDSIVSAEAVWDHVTMANRELAFKAGDVIKVLDASNKDWWWGQIDDEEGWFPASFVRLWVNQEDEVEEGPSDVQNGHLDPNSDCLCLGRPLQNRDQMRANVINEIMSTERHYIKHLKDICEGYLKQCRKRRDMFSDEQLKVIFGNIEDIYRFQMGFVRDLEKQYNNDDPHLSEIGPCFLEHQDGFWIYSEYCNNHLDACMELSKLMKDSRYQHFFEACRLLQQMIDIAIDGFLLTPVQKICKYPLQLAELLKYTAQDHSDYRYVAAALAVMRNVTQQINERKRRLENIDKIAQWQASVLDWEGEDILDRSSELIYTGEMAWIYQPYGRNQQRVFFLFDHQMVLCKKDLIRRDILYYKGRIDMDKYEVVDIEDGRDDDFNVSMKNAFKLHNKETEEIHLFFAKKLEEKIRWLRAFREERKMVQEDEKIGFEISENQKRQAAMTVRKVPKQKGS

SEQ ID NO: 24187 - protein, 345 aa, Homo sapiens
MAVFVVLLALVAGVLGNEFSILKSPGSVVFRNGNWPIPGERIPDVAALSMGFSVKEDLSWPGLAVGNLFHRPRATVMVMVKGVNKLALPPGSVISYPLENAVPFSLDSVANSIHSLFSEETPVVLQLAPSEERVYMVGKANSVFEDLSVTLRQLRNRLFQENSVLSSLPLNSLSRNNEVDLLFLSELQVLHDISSLHLAKDHSPDLYSLELAGLDEIGKRYGEDSEQFRDASKILVDALQKFADDMYSLYGGNAVVELVTVKSFDTSLIRKTRTILEAKQAKNPASPYNLAYKYNFEYSVVFNMVLWIMIALALAVIITSYNIWNMDPGYDSIIYRMTNQKIRMD

SEQ ID NO: 24188 - protein, 440 aa, Homo sapiens
MSFVKETVDKLLKGYDIRLRPDFGGPPVCVGMNIDIASIDMVSEVNMDYTLTMYFQQYWRDKRLAYSGIPLNLTLDNRVADQLWVPDTYFLNDKKSFVHGVTVKNRMIRLHPDGTVLYGLRITTTAACMMDLRRYPLDEQNCTLEIESYGYTTDDIEFYWRGGDKAVTGVERIELPQFSIVEHRLVSRNVVFATGAYPRLSLSFRLKRNIGYFILQTYMPSILITILSWVSFWINYDASAARVALGITTVLTMTTINTHLRETLPKIPYVKAIDMYLMGCFVFVFLALLEYAFVNYIFFGRGPQRQKKLAEKTAKAKNDRSKSESNRVDAHGNILLTSLEVHNEMNEVSGGIGDTRNSAISFDNSGIQYRKQSMPREGHGRFLGDRSLPHKKTHLRRRSSQLKIKIPDLTDVNAIDRWSRIVFPFTFSLFNLVYWLYYVN

SEQ ID NO: 24189 - protein, 1990 aa, Homo sapiens
MKRLLQESEEEIMVTLGPSSRLSPDKAKAETMCGTKSKSSGPAGSLPEDNSLPPCCGSAALAIGGDRDGDLAQLCSFGQQNNSQLPLGSTAYVSGSGSQDPSSVSITTSCQEPSERNQTKTLLSRGHGQGCSREQREPLGDVVEYIIRELQGISRLQTEIAELQQHLSQVQGSVDEVSSCVDSVLSEIEGLQVSTCSLAKVCEGEKAQEPHVDRPSEEAILYLYGLPEQDGENTMELVESFLAKHLCVNGMQCNRYIKKAYRAGTSPSPRPTVVKLAHLEHRDFILQKSILLQNVGVRIATREEPSCPQGNKNPQKESISFFQQQHQDYSQTSLNQDEPVLQMETGDRGPITGTYQMKAQDQQREHQAPEQQGPCFLLKNNLSKESDVPKLGDEIKGASRTSQVISGSCDELSEKKASLSTPHQFEEPALVLISKEEASGKSQFFKQYSQKHEACKVGKPENDCHDKSEASSCLSLSGLLKTERINAEDKLLGCEAGLDILSSKELEDLLADKSRRLAALSCDSMMEEIIIGPETFSDMVHIDLNEEEECAAHVLKDVFDKSSCVLGGSQEDEDVEIKFYTSKLGRAIHHFRSALQGVFQKLENSGSISPEDLESNESGSQSENSDRLLGTVSSGGAQDCSLESPGSQGSESLLSVVSGGVGVSTQGEQTPQDPSTFSLASNNSLPSVALAPCLGSETCSRPGSPKQGRLSLEQVCTETVYLNKCINNFKNVLREKRLRQKKLLHELVQKANRLSVEDIHSEEKRGALQIPDDGDPSLPQWLPEGPAGGLYGIDSMPDLRRKKPLPLVSDLSLVQSRKAGITSAMATRTSLKDEELKSHVYKKTLQALIYPISCTTPHNFEVWTATTPTYCYECEGLLWGIARQGMRCSECGVKCHEKCQDLLNADCLQRAAEKSCKHGAEDRTQNIIMAMKDRMKIRERNKPEIFEVIRDVFTVNKAAHVQQMKTVKQSVLDGTSKWSAKITITVVCAQGLQAKDKTGSSDPYVTVQVSKTKKRTKTIFGNLNPVWEEKFHFECHNSSDRIKVRVWDEDDDIKSRVKQRLKRESDDFLGQTIIEVRTLSGEMDVWYNLEKRTDKSAVSGAIRLQISVEIKGEEKVAPYHVQYTCLHENLFHYLTDIQGSGGVRIPEARGDDAWKVYFDETAQEIVDEFAMRYGIESIYQAMTHFACLSSKYMCPGVPAVMSTLLANINAYYAHTTASTNVSASDRFAASNFGKERFVKLLDQLHNSLRIDLSTYRNNFPAGSPERLQDLKSTVDLLTSITFFRMKVQELQSPPRASQVVKDCVKACLNSTYEYIFNNCHDLYSRQYQLKQELPPEEQGPSIRNLDFWPKLITLIVSIIEEDKNSYTPVLNQFPQELNVGKVSAEVMWHLFAQDMKYALEEHEKDHLCKSADYMNLHFKVKWLHNEYVRDLPVLQGQVPEYPAWFEQFVLQWLDENEDVSLEFLRGALERDKKDGFQQTSEHALFSCSVVDVFTQLNQSFEIIRKLECPDPSILAHYMRRFAKTIGKVLMQYADILSKDFPAYCTKEKLPCILMNNVQQLRVQLEKMFEAMGGKELDLEAADSLKELQVKLNTVLDELSMVFGNSFQVRIDECVRQMADILGQVRGTGNASPDARASAAQDADSVLRPLMDFLDGNLTLFATVCEKTVLKRVLKELWRVVMNTMERMIVLPPLTDQTGTQLIFTAAKELSHLSKLKDHMVREETRNLTPKQCAVLDLALDTIKQYFHAGGNGLKKTFLEKSPDLQSLRYALSLYTQTTDTLIKTFVRSQTTQVHDGKGIRFTANEDIRPEKGSGVDDPVGEVSIQVDLFTHPGTGEHKVTVKVVAANDLKWQTAGMFRPFVEVTMVGPHQSDKKRKFTTKSKSNNWAPKYNETFHFLLGNEEGPESYELQICVKDYCFAREDRVLGLAVMPLRDVTAKGSCACWCPLGRKIHMDETGLTILRILSQRSNDEVAREFVKLKSESRSTEEGS

SEQ ID NO: 24190 - protein, 1618 aa, Homo sapiens
MEQTVLVPPGPDSFNFFTRESLAAIERRIAEEKAKNPKPDKKDDDENGPKPNSDLEAGKNLPFIYGDIPPEMVSEPLEDLDPYYINKKTFIVLNKGKAIFRFSATSALYILTPFNPLRKIAIKILVHSLFSMLIMCTILTNCVFMTMSNPPDWTKNVEYTFTGIYTFESLIKIIARGFCLEDFTFLRDPWNWLDFTVITFAYVTEFVDLGNVSALRTFRVLRALKTISVIPGLKTIVGALIQSVKKLSDVMILTVFCLSVFALIGLQLFMGNLRNKCIQWPPTNASLEEHSIEKNITVNYNGTLINETVFEFDWKSYIQDSRYHYFLEGFLDALLCGNSSDAGQCPEGYMCVKAGRNPNYGYTSFDTFSWAFLSLFRLMTQDFWENLYQLTLRAAGKTYMIFFVLVIFLGSFYLINLILAVVAMAYEEQNQATLEEAEQKEAEFQQMIEQLKKQQEAAQQAATATASEHSREPSAAGRLSDSSSEASKLSSKSAKERRNRRKKRKQKEQSGGEEKDEDEFQKSESEDSIRRKGFRFSIEGNRLTYEKRYSSPHQSLLSIRGSLFSPRRNSRTSLFSFRGRAKDVGSENDFADDEHSTFEDNESRRDSLFVPRRHGERRNSNLSQTSRSSRMLAVFPANGKMHSTVDCNGVVSLVGGPSVPTSPVGQLLPEGTTTETEMRKRRSSSFHVSMDFLEDPSQRQRAMSIASILTNTVEELEESRQKCPPCWYKFSNIFLIWDCSPYWLKVKHVVNLVVMDPFVDLAITICIVLNTLFMAMEHYPMTDHFNNVLTVGNLVFTGIFTAEMFLKIIAMDPYYYFQEGWNIFDGFIVTLSLVELGLANVEGLSVLRSFRLLRVFKLAKSWPTLNMLIKIIGNSVGALGNLTLVLAIIVFIFAVVGMQLFGKSYKDCVCKIASDCQLPRWHMNDFFHSFLIVFRVLCGEWIETMWDCMEVAGQAMCLTVFMMVMVIGNLVVLNLFLALLLSSFSADNLAATDDDNEMNNLQIAVDRMHKGVAYVKRKIYEFIQQSFIRKQKILDEIKPLDDLNNKKDSCMSNHTAEIGKDLDYLKDVNGTTSGIGTGSSVEKYIIDESDYMSFINNPSLTVTVPIAVGESDFENLNTEDFSSESDLEESKEKLNESSSSSEGSTVDIGAPVEEQPVVEPEETLEPEACFTEGCVQRFKCCQINVEEGRGKQWWNLRRTCFRIVEHNWFETFIVFMILLSSGALAFEDIYIDQRKTIKTMLEYADKVFTYIFILEMLLKWVAYGYQTYFTNAWCWLDFLIVDVSLVSLTANALGYSELGAIKSLRTLRALRPLRALSRFEGMRVVVNALLGAIPSIMNVLLVCLIFWLIFSIMGVNLFAGKFYHCINTTTGDRFDIEDVNNHTDCLKLIERNETARWKNVKVNFDNVGFGYLSLLQVATFKGWMDIMYAAVDSRNVELQPKYEESLYMYLYFVIFIIFGSFFTLNLFIGVIIDNFNQQKKKFGGQDIFMTEEQKKYYNAMKKLGSKKPQKPIPRPGNKFQGMVFDFVTRQVFDISIMILICLNMVTMMVETDDQSEYVTTILSRINLVFIVLFTGECVLKLISLRHYYFTIGWNIFDFVVVILSIVGKKYLKFLNSVK

SEQ ID NO: 24191 - protein, 1254 aa, Homo sapiens
MAHRLRFHFGSGRSNTAPESDILDQEREDDFFMAFHTLPRRSSPHPFAQNGGEDGGGGLQGGVGALKRSSSMFIPQLLTSIDARPTCSSSVQISLQRKATDGATDGCGPPEGADDGPPCATPDPRDQASATATTRASPQSGSREPSPRDTPGSSPPRAARDPGLQVNGTCGRRVRCSGPVDCAEEAAPGLRIQHRASSADVRQVRLLPLGPDGQGGPAAAEPRRWSLQHVPDASGSSGKRCFVFQLQQPQQGASGPGSDLNFGFTGTKGDRLVRYPRIRLERSTSYPTQPRSERGSPTEDRGALEASPRAGRMAPEIRRTNSAERTPQGQGCTFKIRQDQNAGQQHFRILVTRGPEEAPQNPEEKSAKSPVSTGADTTTRDDFLGQVDVPLSHLPTEDPTMERPYTFKDFLLRPRSHKSRVKGFLRLKMAYMPKNGGQDEENSDQRDDMEHGWEVVDSNDSASQHQEELPPPPLPPGWEEKVDNLGRTYYVNHNNRTTQWHRPSLMDVSSESDNNIRQINQEAAHRRFRSRRHISEDLEPEPSEGGDVPEPWETISEEVNIAGDSLGLALPPPPASPGSRTSPQELSEELSRRLQITPDSNGEQFSSLIQREPSSRLRSCSVTDAVAEQGHLPPPSAPAGRARSSTVTGGEEPTPSVAYVHTTPGLPSGWEERKDAKGRTYYVNHNNRTTTWTRPIMQLAEDGASGSATNSNNHLIEPQIRRPRSLSSPTVTLSAPLEGAKDSPVRRAVKDTLSNPQSPQPSPYNSPKPQHKVTQSFLPPGWEMRIAPNGRPFFIDHNTKTTTWEDPRLKFPVHMRSKTSLNPNDLGPLPPGWEERIHLDGRTFYIDHNSKITQWEDPRLQNPAITGPAVPYSREFKQKYDYFRKKLKKPADIPNRFEMKLHRNNIFEESYRRIMSVKRPDVLKARLWIEFESEKGLDYGGVAREWFFLLSKEMFNPYYGLFEYSATDNYTLQINPNSGLCNEDHLSYFTFIGRVAGLAVFHGKLLDGFFIRPFYKMMLGKQITLNDMESVDSEYYNSLKWILENDPTELDLMFCIDEENFGQTYQVDLKPNGSEIMVTNENKREYIDLVIQWRFVNRVQKQMNAFLEGFTELLPIDLIKIFDENELELLMCGLGDVDVNDWRQHSIYKNGYCPNHPVIQWFWKAVLLMDAEKRIRLLQFVTGTSRVPMNGFAELYGSNGPQLFTIEQWGSPEKLPRAHTCFNRLDLPPYETFEDLREKLLMAVENAQGFEGVD

SEQ ID NO: 24192 - protein, 363 aa, Homo sapiens
MAPNGTASSFCLDSTACKITITVVLAVLILITVAGNVVVCLAVGLNRRLRNLTNCFIVSLAITDLLLGLLVLPFSAIYQLSCKWSFGKVFCNIYTSLDVMLCTASILNLFMISLDRYCAVMDPLRYPVLVTPVRVAISLVLIWVISITLSFLSIHLGWNSRNETSKGNHTTSKCKVQVNEVYGLVDGLVTFYLPLLIMCITYYRIFKVARDQAKRINHISSWKAATIREHKATVTLAAVMGAFIICWFPYFTAFVYRGLRGDDAINEVLEAIVLWLGYANSALNPILYAALNRDFRTGYQQLFCCRLANRNSHKTSLRSNASQLSRTQSREPRQQEEKPLKLQVWSGTEVTAPQGATDREFGE

SEQ ID NO: 24193 - protein, 748 aa, Homo sapiens
MVLQARNKHREAAPKPPQPPRASQSPLRGASDVGAGEPGPERAPLSPGRKGAAGRKGPRAEPGAPPAGGGLGGRLAARLRWALGLRRAGRGRTWTTLLLAVFAAVLHWSHITHLFENDRHFSHLSTLEREMAFRTEMGLYYSYFKTIVEAPSFLNGVWMIMNDKLTEYPLVINTLKRFNLYPEVILASWYRIYTKIMDLIGIQTKICWTVTRGEGLSPIESCEGLGDPACFYVAVIFILNGLMMALFFIYGTYLSGSRLGGLVTVLCFFFNHGECTRVMWTPPLRESFSYPFLVLQMLLVTHILRATKLYRGSLIALCISNVFFMLPWQFAQFVLLTQIASLFAVYVVGYIDICKLRKIIYIHMISLALCFVLMFGNSMLLTSYYASSLVIIWGILAMKPHFLKINVSELSLWVIQGCFWLFGTVILKYLTSKIFGIADDAHIGNLLTSKFFSYKDFDTLLYTCAAEFDFMEKETPLRYTKTLLLPVVLVVFVAIVRKIISDMWGVLAKQQTHVRKHQFDHGELVYHALQLLAYTALGILIMRLKLFLTPHMCVMASLICSRQLFGWLFCKVHPGAIVFAILAAMSIQGSANLQTQWNIVGEFSNLPQEELIEWIKYSTKPDAVFAGAMPTMASVKLSALRPIVNHPHYEDAGLRARTKIVYSMYSRKAAEEVKRELIKLKVNYYILEESWCVRRSKPGCSMPEIWDVEDPANAGKTPLCNLLVKDSKPHFTTVFQNSVYKVLEVVKE

SEQ ID NO: 24194 - protein, 1148 aa, Homo sapiens
MAPKTKKGCKGSIDDFLGDLLGDDMTLPEKPVKLASHTRDTTGVSQMFPSSKARTKSLLGDDVFSTMAGLEEADAEVSGISEADPQALLQAMKDLDGMDADILGLKKSNSAPSKKAAKDPGKGELPNHPKPAGGAIPTKKSLPSPSSSGHQNRRFSSEDLEDPLRGLLSYDEGGITKQPPVTQSKTASDKSPSTVRDQGPSIPLTPGDTPIRKKEELLFDDGDDIMATLGFGDSPKAEKRQIGDQEGPRPARSTLDELLGRGMATKLLARPGTGEHREFKLDKKYQRPQDSEDMWGDEDFTFGAYQPTVVSSEGRQSRRQSVSRFFADSGADPKGEPGSKQSPPMASSPIQPRKGGADWLGLKDEDLDLFPASPTREAHRESSVPVTPSVPPPASQHSTPAGLPPSRAKPPTEGAGSPAKASQASKLRASKEEKEDWLSHALSRKKSQGLAREQHAGTSEGLHLAGTAGHPPSGSQPLTSTQGLEHAAAGGSSGTTARERPCVRPGVSGSPVTQNHAASALPTGSPKRGTAPGDLSATEPATCFPSTQKPTEPSVPVQPLLPESLARSLLPSTEYQKQLLAAQVQLQCSPAELQAELLHSQARLAELEAQVRKLELERAQHELLLGSLQQQHQADLELIESAHRSRIKVLETSYQQREERLRRENEELSARYLSQCQEAEQARAELTAQHQRRLAAIAQEKDQEMERLRELQRASILDMRRDHEEQLQRLKLLKDREVDAATSATSHTRSLNSIIHQMEKFSSSLHELSSRVEASHLTTSQERELGIRQRDEQLRALQERLGQQQRDMEEERSRQQEVIGKMEARLNEQSRLLEQERWRVTAEQSKAESMQRALEEQRKVTAQQMAMERAELERAKSALLEEQKSVMLKCGEERRRLAAEWAEFSAQQKLSKERAEREAERALQVDTQREGTLISLAKEQAELKIRASELRAEEKQLAAERAALEQERQELRLEKERINATALRVKLRAEEVESMSKVASEKYEEGERALREAQQVQAEQQARLQAVQQQQERLRKQEQHMHQEHLSLAQQRLQLDRARQDLPSSLVGLFPRAQGPAASSQSALMPPAPTTRWCSQPPTGLDPSPLHLHARLALLRHMAEQDRDFLENEQFFLETLKKGSYNLTSHSA

SEQ ID NO: 24195 - protein, 1507 aa, Homo sapiens
MNGGKECDGGDKEGGLPAIQVPVGWQRRVDQNGVLYVSPSGSLLSCLEQVKTYLLTDGTCKCGLECPLILPKVFNFDPGAAVKQRTAEDVKADEDVTKLCIHKRKIIAVATLHKSMEAPHPSLVLTSPGGGTNATPVVPSRAATPRSVRNKSHEGITNSVMPECKNPFKLMIGSSNAMGRLYVQELPGSQQQELHPVYPRQRLGSSEHGQKSPFRGSHGGLPSPASSGSQIYGDGSISPRTDPLGSPDVFTRSNPGFHGAPNSSPIHLNRTPLSPPSVMLHGSPVQSSCAMAGRTNIPLSPTLTTKSPVMKKPMCNFSTNMEIPRAMFHHKPPQGPPPPPPPSCALQKKPLTSEKDPLGILDPIPSKPVNQNPVIINPTSFHSNVHSQVPMMNVSMPPAVVPLPSNLPLPTVKPGHMNHGSHVQRVQHSASTSLSPSPVTSPVHMMGTGIGRIEASPQRSRSSSTSSDHGNFMMPPVGPQATSSGIKVPPRSPRSTIGSPRPSMPSSPSTKSDGHHQYKDIPNPLIAGISNVLNTPSSAAFPTASAGSSSVKSQPGLLGMPLNQILNQHNAASFPASSLLSAAAKAQLANQNKLAGNNSSSSSNSGAVAGSGNTEGHSTLNTMFPPTANMLLPTGEGQSGRAALRDKLMSQQKDALRKRKQPPTTVLSLLRQSQMDSSAVPKPGPDLLRKQGQGSFPISSMSQLLQSMSCQSSHLSSNSTPGCGASNTALPCSANQLHFTDPSMNSSVLQNIPLRGEAVHCHNANTNFVHSNSPVPNHHLAGLINQIQASGNCGMLSQSGMALGNSLHPNPPQSRISTSSTPVIPNSIVSSYNQTSSEAGGSGPSSSIAIAGTNHPAITKTTSVLQDGVIVTTAAGNPLQSQLPIGSDFPFVGQEHALHFPSNSTSNNHLPHPLNPSLLSSLPISLPVNQQHLLNQNLLNILQPSAGEGDMSSINNTLSNHQLTHLQSLLNNNQMFPPNQQQQQLLQGYQNLQAFQGQSTIPCPANNNPMACLFQNFQVRMQEDAALLNKRISTQPGLTALPENPNTTLPPFQDTPCELQPRIDPSLGQQVKDGLVVGGPGDASVDAIYKAVVDAASKGMQVVITTAVNSTTQISPIPALSAMSAFTASIGDPLNLSSAVSAVIHGRNMGGVDHDGRLRNSRGARLPKNLDHGKNVNEGDGFEYFKSASCHTSKKQWDGEQSPRGERNRWKYEEFLDHPGHIHSSPCHERPNNVSTLPFLPGEQHPILLPPRNCPGDKILEENFRYNNYKRTMMSFKERLENTVERCAHINGNRPRQSRGFGELLSTAKQDLVLEEQSPSSSNSLENSLVKDYIHYNGDFNAKSVNGCVPSPSDAKSISSEDDLRNPDSPSSNELIHYRPRTFNVGDLVWGQIKGLTSWPGKLVREDDVHNSCQQSPEEGKVWVMWFGLHTFTQVEPEKLKTLTEGLEAYSRVRKRNRKSGKLNNHLEAAIHEAMSELDKMSGTVHQIPQGDRQMRPPKPKRRKISR

SEQ ID NO: 24196 - protein, 186 aa, Homo sapiens
MAVFVVLLALVAGVLGNEFSILKSPGSVVFRNGNWPIPGERIPDVAALSMGFSVKEDLSWPGLAVGNLFHRPRATVMVMVKGVNKLALPPGSVISYPLENAVPFSLDSVANSIHSLFSEETPVVLQLAPSEERVYMVGKANSVFEDLSVTLRQLRNRLFQENSVLSSLPLNSLSRNNENALFFWAL

SEQ ID NO: 24197 - protein, 671 aa, Homo sapiens
MVLIASIAVLAAGSQGNVFATSALRSLRFLQILRMIRMDRRGGTWKLLGSVVYAHSKELVTAWYIGFLCLILASFLVYLAEKGENDHFDTYADALWWGLITLTTIGYGDKYPQTWNGRLLAATFTLIGVSFFALPAGILGSGFALKVQEQHRQKHFEKRRNPAAGLIQSAWRFYATNLSRTDLHSTWQYYERTVTVPMYRLIPPLNQLELLRNLKSKSGLAFRKDPPPEPSPSQKVSLKDRVFSSPRGVAAKGKGSPQAQTVRRSPSADQSLEDSPSKVPKSWSFGDRSRARQAFRIKGAASRQNSEEASLPGEDIVDDKSCPCEFVTEDLTPGLKVSIRAVCVMRFLVSKRKFKESLRPYDVMDVIEQYSAGHLDMLSRIKSLQSRVDQIVGRGPAITDKDRTKGPAEAELPEDPSMMGRLGKVEKQVLSMEKKLDFLVNIYMQRMGIPPTETEAYFGAKEPEPAPPYHSPEDSREHVDRHGCIVKIVRSSSSTGQKNFSAPPAAPPVQCPPSTSWQPQSHPRQGHGTSPVGDHGSLVRIPPPPAHERSLSAYGGGNRASMEFLRQEDTPGCRPPEGNLRDSDTSISIPSVDHEELERSFSGFSISQSKENLDALNSCYAAVAPCAKVRPYIAEGESDTDSDLCTPCGPPPRSATGEGPFGDVGWAGPRK

SEQ ID NO: 24198 - protein, 204 aa, Homo sapiens
MAQPQGPAEGSLPTGDPSPSEGTPGTSQAPGSPAATRRRELLRELEAQVQAAYGQDRELRPEEIEELQVAFQEFDRDRDGYIGCRELGACMRTLGYMPTEMELIEISQQISGGKVDFEDFVELMGPKLLAETADMIGVRELRDAFREFDTNGDGRISVGELRAALKALLGERLSQREVDEILQDVDLNGDGLVDFEEFVRMMSR

SEQ ID NO: 24199 - protein, 1829 aa, Homo sapiens
MPPATTVSLRELADLSIGTPEVGAVNFTALHTLIVAMLKNLDLQNTRIDFQPSSPEPSRSLQSVRSSFSIPHLPAPKEVPKGAPREKRRGVGQAPSSALESQVKDLGGQVEDLSKQLKRVDGQVQGIATHVQHFSQASGLDLAALEWPEEQEVGVRAFDRVRTGSIMKDAAEELSFARVLLQRVDELEKLFKDREQFLELVSRKLSLVPGAEEVTMVTWEELEQAITDGWRASQAGSETLMGFSKHGGFTSLTSPEGTLSGDSTKQPSIEQALDSASGLGPDRTASGSGGTAHPSDGVSSREQSKVPSGTGRQQQPRARDEAGVPRLHQSSTFQFKSDSDRHRSREKLTSTQPRRNARPGPVQQDLPLARDQPSSVPASQSQVHLRPDRRGLEPTGMNQPGLVPASTYPHGVVPLSMGQLGVPPPEMDDRELIPFVVDEQRMLPPSVPGRDQQGLELPSTDQHGLVSVSAYQHGMTFPGTDQRSMEPLGMDQRGCVISGMGQQGLVPPGIDQQGLTLPVVDQHGLVLPFTDQHGLVSPGLMPISADQQGFVQPSLEATGFIQPGTEQHDLIQSGRFQRALVQRGAYQPGLVQPGADQRGLVRPGMDQSGLAQPGADQRGLVWPGMDQSGLAQPGRDQHGLIQPGTGQHDLVQSGTGQGVLVQPGVDQPGMVQPGRFQRALVQPGAYQPGLVQPGADQIDVVQPGADQHGLVQSGADQSDLAQPGAVQHGLVQPGVDQRGLAQPRADHQRGLVPPGADQRGLVQPGADQHGLVQPGVDQHGLAQPGEVQRSLVQPGIVQRGLVQPGAVQRGLVQPGAVQRGLVQPGVDQRGLVQPGAVQRGLVQPGAVQHGLVQPGADQRGLVQPGVDQRGLVQPGVDQRGLVQPGMDQRGLIQPGADQPGLVQPGAGQLGMVQPGIGQQGMVQPQADPHGLVQPGAYPLGLVQPGAYLHDLSQSGTYPRGLVQPGMDQYGLRQPGAYQPGLIAPGTKLRGSSTFQADSTGFISVRPYQHGMVPPGREQYGQVSPLLASQGLASPGIDRRSLVPPETYQQGLMHPGTDQHSPIPLSTGLGSTHPDQQHVASPGPGEHDQVYPDAAQHGHAFSLFDSHDSMYPGYRGPGYLSADQHGQEGLDPNRTRASDRHGIPAQKAPGQDVTLFRSPDSVDRVLSEGSEVSSEVLSERRNSLRRMSSSFPTAVETFHLMGELSSLYVGLKESMKDLDEEQAGQTDLEKIQFLLAQMVKRTIPPELQEQLKTVKTLAKEVWQEKAKVERLQRILEGEGNQEAGKELKAGELRLQLGVLRVTVADIEKELAELRESQDRGKAAMENSVSEASLYLQDQLDKLRMIIESMLTSSSTLLSMSMAPHKAHTLAPGQIDPEATCPACSLDVSHQVSTLVRRYEQLQDMVNSLAVSRPSKKAKLQRQDEELLGRVQSAILQVQGDCEKLNITTSNLIEDHRQKQKDIAMLYQGLEKLEKEKANREHLEMEIDVKADKSALATKVSRVQFDATTEQLNHMMQELVAKMSGQEQDWQKMLDRLLTEMDNKLDRLELDPVKQLLEDRWKSLRQQLRERPPLYQADEAAAMRRQLLAHFHCLSCDRPLETPVTGHAIPVTPAGPGLPGHHSIRPYTVFELEQVRQHSRNLKLGSAFPRGDLAQMEQSVGRLRSMHSKMLMNIEKVQIHFGGSTKASSQIIRELLHAQCLGSPCYKRVTDMADYTYSTVPRRCGGSHTLTYPYHRSRPQHLPRGLYPTEEIQIAMKHDEVDILGLDGHIYKGRMDTRLPGILRKDSSGTSKRKSQQPRPHVHRPPSLSSNGQLPSRPQSAQISAGNTSER

SEQ ID NO: 24200 - protein, 411 aa, Homo sapiens
MDEFHPFIEALLPHVRAIAYTWFNLQARKRKYFKKHEKRMSKDEERAVKDELLSEKPEIKQKWASRLLAKLRKDIRQEYREDFVLTVTGKKHPCCVLSNPDQKGKIRRIDCLRQADKVWRLDLVMVILFKGIPLESTDGERLMKSPHCTNPALCVQPHHITVSVKELDLFLAYYVQEQDSGQSGSPSHNDPAKNPPGYLEDSFVKSGVFNVSELVRVSRTPITQGTGVNFPIGEIPSQPYYHDMNSGVNLQRSLSSPPSSKRPKTISIDENMEPSPTGDFYPSPSSPAAGSRTWHERDQDMSSPTTMKKPEKPLFSSASPQDSSPRLSTFPQHHHPGIPGVAHSVISTRTPPPPSPLPFPTQAILPPAPSSYFSHPTIRYPPHLNPQDTLKNYVPSYDPSSPQTSQSWYLG

SEQ ID NO: 24201 - protein, 869 aa, Homo sapiens
GNVKKSSGAGGGSGSGGSGSGGLIGLMKDAFQPHHHHHHHLSPHPPGTVDKKMVEKCWKLMDKVVRLCQNPKLALKNSPPYILDLLPDTYQHLRTILSRYEGKMETLGENEYFRVFMENLMKKTKQTISLFKEGKERMYEENSQPRRNLTKLSLIFSHMLAELKGIFPSGLFQGDTFRITKADAAEFWRKAFGEKTIVPWKSFRQALHEVHPISSGLEAMALKSTIDLTCNDYISVFEFDIFTRLFQPWSSLLRNWNSLAVTHPGYMAFLTYDEVKARLQKFIHKPGSYIFRLSCTRLGQWAIGYVTADGNILQTIPHNKPLFQALIDGFREGFYLFPDGRNQNPDLTGLCEPTPQDHIKVTQEQYELYCEMGSTFQLCKICAENDKDVKIEPCGHLMCTSCLTSWQESEGQGCPFCRCEIKGTEPIVVDPFDPRGSGSLLRQGAEGAPSPNYDDDDDERADDTLFMMKELAGAKVERPPSPFSMAPQASLPPVPPRLDLLPQRVCVPSSASALGTASKAASGSLHKDKPLPVPPTLRDLPPPPPPDRPYSVGAESRPQRRPLPCTPGDCPSRDKLPPVPSSRLGDSWLPRPIPKVPVSAPSSSDPWTGRELTNRHSLPFSLPSQMEPRPDVPRLGSTFSLDTSMSMNSSPLVGPECDHPKIKPSSSANAIYSLAARPLPVPKLPPGEQCEGEEDTEYMTPSSRPLRPLDTSQSSRACDCDQQIDSCTYEAMYNIQSQAPSITESSTFGEGNLAAAHANTGPEESENEDDGYDVPKPPVPAVLARRTLSDISNASSSFGWLSLDGDPTTNVTEGSQVPERPPKPFPRRINSERKAGSCQQDRVSLLLPRLECSGTISAHRNLHLPPGFK

SEQ ID NO: 24202 - protein, 731 aa, Homo sapiens
MAQSVLVPPGPDSFRFFTRESLAAIEQRIAEEKAKRPKQERKDEDDENGPKPNSDLEAGKSLPFIYGDIPPEMVSVPLEDLDPYYINKKTFIVLNKGKAISRFSATPALYILTPFNPIRKLAIKILVHSLFNMLIMCTILTNCVFMTMSNPPDWTKNVEYTFTGIYTFESLIKILARGFCLEDFTFLRDPWNWLDFTVITFAYVTEFVDLGNVSALRTFRVLRALKTISVIPGLKTIVGALIQSVKKLSDVMILTVFCLSVFALIGLQLFMGNLRNKCLQWPPDNSSFEINITSFFNNSLDGNGTTFNRTVSIFNWDEYIEDKSHFYFLEGQNDALLCGNSSDAGQCPEGYICVKAGRNPNYGYTSFDTFSWAFLSLFRLMTQDFWENLYQLTLRAAGKTYMIFFVLVIFLGSFYLINLILAVVAMAYEEQNQATLEEAEQKEAEFQQMLEQLKKQQEEAQAAAAAASAESRDFSGAGGIGVFSESSSVASKLSSKSEKELKNRRKKKKQKEQSGEEEKNDRVRKSESEDSIRRKGFRFSLEGSRLTYEKRFSSPHQSLLSIRGSLFSPRRNSRASLFSFRGRAKDIGSENDFADDEHSTFEDNDSRRDSLFVPHRHGERRHSNVSQASRASRVLPILPMNGKMHSAVDCNGVVSLVGGPSTLTSAGQLLPEGTTTETEIRKRRSSSYHVSMDLLEDPTSRQRAMSIASILTNTMEDFFFLYLASRKLLQM

SEQ ID NO: 24203 - protein, 1202 aa, Homo sapiens
MKQPIMADGPRCKRRKQANPRRKNVVNYDNVVDTGSETDEEDKLHIAEDDGIANPLDQETSPASVPNHESSPHVSQALLPREEEEDEIREGGVEHPWHNNEILQASVDGPEEMKEDYDTMGPEATIQTAINNGTVKNANCTSDFEEYFAKRKLEERDGHAVSIEEYLQRSDTAIIYPEAPEELSRLGTPEANGQEENDLPPGTPDAFAQLLTCPYCDRGYKRLTSLKEHIKYRHEKNEENFSCPLCSYTFAYRTQLERHMVTHKPGTDQHQMLTQGAGNRKFKCTECGKAFKYKHHLKEHLRIHSGEKPYECPNCKKRFSHSGSYSSHISSKKCIGLISVNGRMRNNIKTGSSPNSVSSSPTNSAITQLRNKLENGKPLSMSEQTGLLKIKTEPLDFNDYKVLMATHGFSGTSPFMNGGLGATSPLGVHPSAQSPMQHLGVGMEAPLLGFPTMNSNLSEVQKVLQIVDNTVSRQKMDCKAEEISKLKGYHMKDPCSQPEEQGVTSPNIPPVGLPVVSHNGATKSIIDYTLEKVNEAKACLQSLTTDSRRQISNIKKEKLRTLIDLVTDDKMIENHNISTPFSCQFCKESFPGPIPLHQHERYLCKMNEEIKAVLQPHENIVPNKAGVFVDNKALLLSSVLSEKGMTSPINPYKDHMSVLKAYYAMNMEPNSDELLKISIAVGLPQEFVKEWFEQRKVYQYSNSRSPSLERSSKPLAPNSNPPTKDSLLPRSPVKPMDSITSPSIAELHNSVTNCDPPLRLTKPSHFTNIKPVEKLDHSRSNTPSPLNLSSTSSKNSHSSSYTPNSFSSEELQAEPLDLSLPKQMKEPKSIIATKNKTKASSISLDHNSVSSSSENSDEPLNLTFIKKEFSNSNNLDNKSTNPVFSMNPFSAKPLYTALPPQSAFPPATFMPPVQTSIPGLRPYPGLDQMSFLPHMAYTYPTGAATFADMQQRRKYQRKQGFQGELLDGAQDYMSGLDDMTDSDSCLSRKKIKKTESGMYACDLCDKTFQKSSSLLRHKYEHTGKRPHQCQICKKAFKHKHHLIEHSRLHSGEKPYQCDKCGKRFSHSGSYSQHMNHRALPLRGTLTRRRGRVCRGMARARRSTRKKARMATGSWADRMATRSSRRKRKKVKIKVWIRIPKRYEMKKRLEITPWTIVRRMGKWKPNQTTRKTIWKMACNKLLHFKLPIFFSSSIVTCLKTLLC

SEQ ID NO: 24204 - protein, 624 aa, Homo sapiens
MMSALWKIKRKPRIENNDKSGDSMYRTLHLSTEQVAAFCRSLHEMNPSDQSPSPQDSTGPQLATMRQLSDADKLRKVICELLETERTYVKDLNCLMERYLKPLQKETFLTQDELDVLFGNLTEMVEFQVEFLKTLEDGVRLVPDLEKLEKVDQFKKVLFSLGGSFLYYADRFKLYSAFCASHTKVPKVLVKAKTDTAFKAFLDAQNPKQQHSSTLESYLIKPIQRILKYPLLLRELFALTDAESEEHYHLDVAIKTMNKVASHINEMQKIHEEFGAVFDQLIAEQTGEKKEVADLSMGDLLLHTTVIWLNPPASLGKWKKEPELAAFVFKTAVVLVYKDGSKQKKKLVGSHRLSIYEDWDPFRFRHMIPTEALQVRALASADAEANAVCEIVHVKSESEGRPERVFHLCCSSPESRKDFLKAVHSILRDKHRRQLLKTESLPSSQQYVPFGGKRLCALKGARPAMSRAVSAPSKSLGRRRRRLARNRFTIDSDAVSASSPEKESQQPPGGGDTDRWVEEQFDLAQYEEQDDIKETDILSDDDEFCESVKGASVDRDLQERLQATSISQRERGRKTLDSHASRMAQLKKQAALSGINGGLESASEEVIWVRREDFAPSRKLNTEI

SEQ ID NO: 24205 - protein, 77 aa, Homo sapiens
MVFGGVCPSVTSIIAESLQGWNLVQLSFAATTPVLADKKKYPYFFRTVPSDNAVNPAILKLLKHYQWKRVGTLTQDV

SEQ ID NO: 24206 - protein, 730 aa, Homo sapiens
MAQSVLVPPGPDSFRFFTRESLAAIEQRIAEEKAKRPKQERKDEDDENGPKPNSDLEAGKSLPFIYGDIPPEMVSVPLEDLDPYYINKKTFIVLNKGKAISRFSATPALYILTPFNPIRKLAIKILVHSLFNMLIMCTILTNCVFMTMSNPPDWTKNVEYTFTGIYTFESLIKILARGFCLEDFTFLRDPWNWLDFTVITFAYVTEFVDLGNVSALRTFRVLRALKTISVIPGLKTIVGALIQSVKKLSDVMILTVFCLSVFALIGLQLFMGNLRNKCLQWPPDNSSFEINITSFFNNSLDGNGTTFNRTVSIFNWDEYIEDKSHFYFLEGQNDALLCGNSSDAGQCPEGYICVKAGRNPNYGYTSFDTFSWAFLSLFRLMTQDFWENLYQLTLRAAGKTYMIFFVLVIFLGSFYLINLILAVVAMAYEEQNQATLEEAEQKEAEFQQMLEQLKKQQEEAQAAAAAASAESRDFSGAGGIGVFSESSSVASKLSSKSEKELKNRRKKKKQKEQSGEEEKNDRVRKSESEDSIRRKGFRFSLEGSRLTYEKRFSSPHQSLLSIRGSLFSPRRNSRASLFSFRGRAKDIGSENDFADDEHSTFEDNDSRRDSLFVPHRHGERRHSNVSQASRASRVLPILPMNGKMHSAVDCNGVVSLVGGPSTLTSAGQLLPEGTTTETEIRKRRSSSYHVSMDLLEDPTSRQRAMSIASILTNTMEGKSFEDCLAFRSLP

SEQ ID NO: 24207 - protein, 1627 aa, Homo sapiens
MGFSTADGGGGPGARDLESLDACIQRTLSALYPPFEATAATVLWQLFSVAERCHGGDGLHCLTSFLLPAKRALQHLQQEACARYRGLVFLHPGWPLCAHEKVVVQLASLHGVRLQPGDFYLQVTSAGKQSARLVLKCLSRLGRGTEEVTVPEAMYGCVFTGAFLEWVNRERRHVPLQTCLLTSGLAVHRAPWSDVTDPVFVPSPGAILQSYSSCTGPERLPSSPSEAPVPTQATAGPHFQGSASCPDTLTSPCRRGHTGSDQLRHLPYPERAELGSPRTLSGSSDRDFEKVSPSEQGPRMPPENCGGSGERPDPMDQEDRPKALTFHTDLGIPSSRRRPPGDPTCVQPRRWFRESYMEALRNPMPLGSSEEALGDLACSSLTGASRDLGTGAVASGTQEETSGPRGDPQQTPSLEKERHTPSRTGPGAAGRTLPRRSRSWERAPRSSRGAQAAACHTSHHSAGSRPGGHLGGQAVGTPNCVPVEGPGCTKEEDVLASSACVSTDGGSLHCHNPSGPSDVPARQPHPEQEGWPPGTGDFPSQVPKQVLDVSQELLQSGVVTLPGTRDRHGRAVVQVRTRSLLWTREHSSCAELTRLLLYFHSIPRKEVRDLGLVVLVDARRSPAAPAVSQALSGLQNNTSPIIHSILLLVDKESAFRPDKDAIIQCEVVSSLKAVHKFVDSCQLTADLDGSFPYSHGDWICFRQRLEHFAANCEEAIIFLQNSFCSLNTHRTPRTAQEVAELIDQHETMMKLVLEDPLLVSLRLEGGTVLARLRREELGTEDSRDTLEAATSLYDRVDEEVHRLVLTSNNRLQQLEHLRELASLLEGNDQQSCQKGLQLAKENPQRTEEMVQDFRRGLSAVVSQAECREGELARWTRSSELCETVSSWMGPLDPEACPSSPVAECLRSCHQEATSVAAEAFPGAGVAVLKPHALGKPWASQQDLWLQYPQTRLRLEEALSEAAPDPSLPPLAQSPPKHERAQEAMRRHQKPPSFPSTDSGGGAWEPAQPLSGLPGRALLCGQDGETLRPGLCALWDPLSLLRGLPGAGATTAHLEDSSACSSEPTQTLASRPRKHPQKKMIKKTQSFEIPQPDSGPRDSCQPDHTSVFSKGLEVTSTVATEKKLPLWQHARSPPVTQSRSLSSPSGLHPAEEDGRQQVGSSRLRHIMAEMIATEREYIRCLGYVIDNYFPEMERMDLPQGLRGKHHVIFGNLEKLHDFHQQHFLRELERCQHCPLAVGRSFLRHEEQFGMYVIYSKNKPQSDALLSSHGNAFFKDKQRELGDKMDLASYLLRPVQRVAKYALLLQDLLKEASCGLAQGQELGELRAAEVVVCFQLRHGNDLLAMDAIRGCDVNLKEQGQLRCRDEFIVCCGRKKYLRHVFLFEDLILFSKTQKVEGSHDVYLYKQSFKTAEIGMTENVGDSGLRFEIWFRRRRKSQDTYILQASSAEVKSAWTDVIGRILWRQALKSRELRIQEMASMGIGNQPFMDVKPRDRTPDCAVISDRAPKCAVMSDRVPDSIVKGTESQMRGSTAVSSSDHAAPFKRPHSTISDSSTSSSSSQSSSILGSLGLLVSSSPAHPGLWSPAHSPWSSDIRACVEEDEPEPELETGTQAAVCEGAPAVLLSRTRQA

SEQ ID NO: 24208 - protein, 699 aa, Homo sapiens
MSLPSSCEYLTLGKVARFRSAYVHGSPYAINMPIDIKPQRRRFDVDNGTSAGRSPLDPMTSPGSGLILQANFVHSQRRESFLYRSDSDYDLSPKSMSRNSSIASDIHGDDLIVTPFAQVLASLRTVRNNFAALTNLQDRAPSKRSPMCNQPSINKATITEEAYQKLASETLEELDWCLDQLETLQTRHSVSEMASNKFKRMLNRELTHLSEMSRSGNQVSEFISNTFLDKQHEVEIPSPTQKEKEKKKRPMSQISGVKKLMHSSSLTNSSIPRFGVKTEQEDVLAKELEDVNKWGLHVFRIAELSGNRPLTVIMHTIFQERDLLKTFKIPVDTLITYLMTLEDHYHADVAYHNNIHAADVVQSTHVLLSTPALEAVFTDLEILAAIFASAIHDVDHPGVSNQFLINTNSELALMYNDSSVLENHHLAVGFKLLQEENCDIFQNLTKKQRQSLRKMVIDIVLATDMSKHMNLLADLKTMVETKKVTSSGVLLLDNYSDRIQVLQNMVHCADLSNPTKPLQLYRQWTDRIMEEFFRQGDRERERGMEISPMCDKHNASVEKSQVGFIDYIVHPLWETWADLVHPDAQDILDTLEDNREWYQSTIPQSPSPAPDDPEEGRQGQTEKFQFELTLEEDGESDTEKDSGSQVEEDTSCSDSKTLCTQDSESTEIPLDEQVEEEAVGEEEESQPEACVIDDRSPDT

SEQ ID NO: 24209 - protein, 231 aa, Homo sapiens
MSRAMALFFVLCWIQGYSQQKSLNNAAFASGSNEREEHLAKIFDEILLQVFPKFPYDPSFNEATAVRSITKTDMRKGTSIAWNSPKPEYFLGSVDKIPDKDHLSEEKNFKESCLFDRDLREQLTTIDKETLQGAAKPDAHFRTMPCGQLLHFLQRNTIIAAVSGVAILMAIVLLLLGLASYIRKKQPSSPLANTTYNIFIMDGKTWWHNSEEKNFTKLAKKQKQLKSSSCV

SEQ ID NO: 24210 - protein, 455 aa, Homo sapiens
MQDGHHSSDPWSSSSGMNQPGYAGMLGNSSHIPQSSSYCSLHPHERLSYPSHSSADINSSLPPMSTFHRSGTNHYSTSSCTPPANGTDSIMANRGSGAAGSSQTGDALGKALASIYSPDHTNNSFSSNPSTPVGSPPSLSAGTAVWSRNGGQASSSPNYEGPLHSLQSRIEDRLERLDDAIHVLRNHAVGPSTAMPGGHGDMHGIIGPSHNGAMGGLGSGYGTGLLSANRHSLMVGTHREDGVALRGSHSLLPNQVPVPQLPVQSATSPDLNPPQDPYRGMPPGLQGQSVSSGSSEIKSDDEGDENLQDTKSSEDKKLDDDKKDIKSITRSRSSNNDDEDLTPEQKAEREKERRMANNARERLRVRDINEAFKELGRMVQLHLKSDKPQTKLLILHQAVAVILSLEQQVRERNLNPKAACLKRREEEKVSSEPPPLSLAGPHPGMGDASNHMGQM

SEQ ID NO: 24211 - protein, 452 aa, Homo sapiens
VFTGVFTVEMVLKVIAFKPKHYFTDAWNTFDALIVVGSVVDIAITEVNPTESENVPVPTATPGNSEESNRISITFFRLFRVMRLVKLLSRGEGIRTLLWTFIKSFQALPYVALLIAMLFFIYAVIGMQMFGKVAMRDNNQINRNNNFQTFPQAVLLLFRCATGEAWQEIMLACLPGKLCDPESDYNPGEEYTCGSNFAIVYFISFYMLCAFLIINLFVAVIMDNFDYLTRDWSILGPHHLDEFKRIWSEYDPEAKGRIKHLDVVTLLRRIQPPLGFGKLCPHRVACKRLVAMNMPLNSDGTVMFNATLFALVRTALKIKTEGNLEQANEELRAVIKKIWKKTSMKLLDQVVPPAGDDEVTVGKFYATFLIQDYFRKFKKRKEQGLVGKYPAKNTTIALQAGLRTLHDIGPEIRRAISCDLQDDEPEETKREEEDDVFKQEIRCVITIITIIP

SEQ ID NO: 24212 - protein, 1128 aa, Homo sapiens
MAEEESDQEAERLGEELVAIVESPLGPVGLRAAGDGRGGAGSGNCGGGVGISSRDYCRRFCQVVEDYAGRWQVPLPQLQVLQTALCCFTTASASFPDECEHVQYVLSSLAVSFFELLLFFGRDEFYEEPLKDILGSFQECQNHLRRYGNVNLELVTRIIRDGGPWEDPVLQAVLKAQPASQEIVNKYLSSENPLFFELRARYLIACERIPEAMALIKSCINHPEISKDLYFHQALFTCLFMSPVEDQLFREHLLKTDCKSGIDIICNAEKEGKTMLALQLCESFLIPQLQNGDMYCIWELIFIWSKLQLKSNPSKQVFVDQCYQLLRTATNVRVIFPFMKIIKDEVEEEGLQICVEICGCALQLDLHDDPKTKCLIYKTIAHFLPNDLEILRICALSIFFLERSLEAYRTVEELYKRPDEEYNEGTSSVQNRVRFELLPILKKGLFFDPEFWNFVMIKKNCVALLSDKSAVRFLNESTLENNAGNLKRTEEQQGLDEGFDSLTDQSTGETDPDDVSGVQPKGHINTKKNLTALSTSKVDHNVPRHRCMLCNKEFLGGHIVRHAQAHQKKGSFACVICGRKFRNRGLMQKHLKNHVKKIQRQQIAAAQQDDQEVTALEEINCSSSSISFENGNSDSKDLEVETLTASSEGNKEVIPEHVAEFIEIPISVPEDVIENVIENGSPNNSLNNVFKPLTECGDDYEEEEDEEGDYEEDDYDLNQETSVIHKINGTVCHPKDIYATDQEGNFKCPALGCVRIFKRIGFLNKHAMTVHPTDLNVRQTVMKWSKGKCKFCQRQFEDSQHFIDHLNRHSYPNVYFCLHFNCNESFKLPFQLAQHTKSHRIFQAQCSFPECHELFEDLPLLYEHEAQHYLSKTPESSAQPSETILWDVQTDSNPNQEKDSSSNEKQTISLPVSTSKSRKESTEPKTCIESMEKKTDSLVQNGNERSDDTVSNISLIDQKMPDIEPNSENNCSSSDIVNGHSEIEQTPLVSSDPALKIDTNRIRTENGSILPSVVPQEHNTLPVSQAPSKPNLTSEHTSYGLILTKPYVRPLPPSYLDERYLSMPKRRKFLTDRVDACSDQDNVYKKSVKRLRCGKCLTTYCNAEALEAHLAQKKCQTLFGFDSDDESA

SEQ ID NO: 24213 - protein, 1873 aa, Homo sapiens
MLIMCTILTNCVFMTMSNPPDWTKNVEYTFTGIYTFESLIKILARGFCLEDFTFLRDPWNWLDFTVITFAYVTEFVDLGNVSALRTFRVLRALKTISVIPGLKTIVGALIQSVKKLSDVMILTVFCLSVFALIGLQLFMGNLRNKCLQWPPDNSSFEINITSFFNNSLDGNGTTFNRTVSIFNWDEYIEDKSHFYFLEGQNDALLCGNSSDAGQCPEGYICVKAGRNPNYGYTSFDTFSWAFLSLFRLMTQDFWENLYQLTLRAAGKTYMIFFVLVIFLGSFYLINLILAVVAMAYEEQNQATLEEAEQKEAEFQQMLEQLKKQQEEAQAAAAAASAESRDFSGAGGIGVFSESSSVASKLSSKSEKELKNRRKKKKQKEQSGEEEKNDRVRKSESEDSIRRKGFRFSLEGSRLTYEKRFSSPHQSLLSIRGSLFSPRRNSRASLFSFRGRAKDIGSENDFADDEHSTFEDNDSRRDSLFVPHRHGERRHSNVSQASRASRVLPILPMNGKMHSAVDCNGVVSLVGGPSTLTSAGQLLPEGTTTETEIRKRRSSSYHVSMDLLEDPTSRQRAMSIASILTNTMEELEESRQKCPPCWYKFANMCLIWDCCKPWLKVKHLVNLVVMDPFVDLAITICIVLNTLFMAMEHYPMTEQFSSVLSVGNLVFTGIFTAEMFLKIIAMDPYYYFQEGWNIFDGFIVSLSLMELGLANVEGLSVLRSFRLLRVFKLAKSWPTLNMLIKIIGNSVGALGNLTLVLAIIVFIFAVVGMQLFGKSYKECVCKISNDCELPRWHMHDFFHSFLIVFRVLCGEWIETMWDCMEVAGQTMCLTVFMMVMVIGNLVVLNLFLALLLSSFSSDNLAATDDDNEMNNLQIAVGRMQKGIDFVKRKIREFIQKAFVRKQKALDEIKPLEDLNNKKDSCISNHTTIEIGKDLNYLKDGNGTTSGIGSSVEKYVVDESDYMSFINNPSLTVTVPIAVGESDFENLNTEEFSSESDMEESKEKLNATSSSEGSTVDIGAPAEGEQPEVEPEESLEPEACFTEDCVRKFKCCQISIEEGKGKLWWNLRKTCYKIVEHNWFETFIVFMILLSSGALAFEDIYIEQRKTIKTMLEYADKVFTYIFILEMLLKWVAYGFQVYFTNAWCWLDFLIVDVSLVSLTANALGYSELGAIKSLRTLRALRPLRALSRFEGMRVVVNALLGAIPSIMNVLLVCLIFWLIFSIMGVNLFAGKFYHCINYTTGEMFDVSVVNNYSECKALIESNQTARWKNVKVNFDNVGLGYLSLLQVATFKGWMDIMYAAVDSRNVELQPKYEDNLYMYLYFVIFIIFGSFFTLNLFIGVIIDNFNQQKKKFGGQDIFMTEEQKKYYNAMKKLGSKKPQKPIPRPANKFQGMVFDFVTKQVFDISIMILICLNMVTMMVETDDQSQEMTNILYWINLVFIVLFTGECVLKLISLRYYYFTIGWNIFDFVVVILSIVGMFLAELIEKYFVSPTLFRVIRLARIGRILRLIKGAKGIRTLLFALMMSLPALFNIGLLLFLVMFIYAIFGMSNFAYVKREVGIDDMFNFETFGNSMICLFQITTSAGWDGLLAPILNSGPPDCDPDKDHPGSSVKGDCGNPSVGIFFFVSYIIISFLVVVNMYIAVILENFSVATEESAEPLSEDDFEMFYEVWEKFDPDATQFIEFAKLSDFADALDPPLLIAKPNKVQLIAMDLPMVSGDRIHCLDILFAFTKRVLGESGEMDALRIQMEERFMASNPSKVSYEPITTTLKRKQEEVSAIIIQRAYRRYLLKQKVKKVSSIYKKDKGKECDGTPIKEDTLIDKLNENSTPEKTDMTPSTTSPPSYDSVTKPEKEKFEKDKSEKEDKGKDIRESKK

SEQ ID NO: 24214 - protein, 236 aa, Homo sapiens
MESERSKRMGNACIPLKRIAYFLCLLSALLLTEGKKPAKPKCPAVCTCTKDNALCENARSIPRTVPPDVISLSFVRSGFTEISEGSFLFTPSLQLLLFTSNSFDVISDDAFIGLPHLEYLFIENNNIKSISRHTFRGLKSLIHLFRETQTQAENLHCRGAGAPQMAVGDAFLAAEPGGTETNAVFEPVWSALERRLSSGFHSHNRRFSWVNDENTKGQEMVIISVKKEWPSAFENT

SEQ ID NO: 24215 - protein, 1072 aa, Homo sapiens
MITVVYGPDLVNISHLNLVAFQEEVAKEWTNEVFSLATNLLAQNMSRDAFLEKAYTKLKLQVTPEGRIPLKNIYRLFSADRKRVETALEACSLPSSRNDSIPQEDFTPEVYRVFLNNLCPRPEIDNIFSEFGAKSKPYLTVDQMMDFINLKQRDPRLNEILYPPLKQEQVQVLIEKYEPNNSLARKGQISVDGFMRYLSGEENGVVSPEKLDLNEDMSQPLSHYFINSSHNTYLTAGQLAGNSSVEMYRQVLLSGCRCVELDCWKGRTAEEEPVITHGFTMTTEISFKEVIEAIAECAFKTSPFPILLSFENHVDSPKQQAKMAEYCRLIFGDALLMEPLEKYPLESGVPLPSPMDLMYKILVKNKKKSHKSSEGSGKKKLSEQASNTYSDSSSMFEPSSPGAGEADTESDDDDDDDDCKKSSMDEGTAGSEAMATEEMSNLVNYIQPVKFESFEISKKRNKSFEMSSFVETKGLEQLTKSPVEFVEYNKMQLSRIYPKGTRVDSSNYMPQLFWNAGCQMVALNFQTMDLAMQINMGMYEYNGKSGYRLKPEFMRRPDKHFDPFTEGIVDGIVANTLSVKIISGQFLSDKKVGTYVEVDMFGLPVDTRRKAFKTKTSQGNAVNPVWEEEPIVFKKVVLPTLACLRIAVYEEGGKFIGHRILPVQAIRPGYHYICLRNERNQPLTLPAVFVYIEVKDYVPDTYADVIEALSNPIRYVNLMEQRAKQLAALTLEDEEEVKKEADPGETPSEAPSEARTTPAENGVNHTTTLTPKPPSQALHSQPAPGSVKAPAKTEDLIQSVLTEVEAQTIEELKQQKSFVKLQKKHYKEMKDLVKRHHKKTTDLIKEHTTKYNEIQNDYLRRRAALEKSAKKDSKKKSEPSSPDHGSSTIEQDLAALDAEMTQKLIDLKDKQQQQLLNLRQEQYYSEKYQKREHIKLLIQKLTDVAEECQNNQLKKLKEICEKEKKELKKKMDKKRQEKITEAKSKDKSQMEEEKTEMIRSYIQEVVQYIKRLEEAQSKRQEKLVEKHKEIRQQILDEKPKGEGSSSFLSETCHEDPSVSPNFTPPNPQALKW

SEQ ID NO: 24216 - protein, 647 aa, Homo sapiens
MVPRLLLRAWPRGPAVGPGAPSRPLSAGSGPGQYLQRSIVPTMHYQDSLPRLPIPKLEDTIRRYLSAQKPLLNDGQFRKTEQFCKSFENGIGKELHEQLVALDKQNKHTSYISGPWFDMYLSARDSVVLNFNPFMAFNPDPKSEYNDQLTRATNMTVSAIRFLKTLRAGLLEPEVFHLNPAKSDTITFKRLIRFVPSSLSWYGAYLVNAYPLDMSQYFRLFNSTRLPKPSRDELFTDDKARHLLVLRKGNFYIFDVLDQDGNIVSPSEIQAHLKYILSDSSPAPEFPLAYLTSENRDIWAELRQKLMSSGNEESLRKVDSAVFCLCLDDFPIKDLVHLSHNMLHGDGTNRWFDKSFNLIIAKDGSTAVHFEHSWGDGVAVLRFFNEVFKDSTQTPAVTPQSQPATTDSTVTVQKLNFELTDALKTGITAAKEKFDATMKTLTIDCVQFQRGGKEFLKKQKLSPDAVAQLAFQMAFLRQYGQTVATYESCSTAAFKHGRTETIRPASVYTKRCSEAFVREPSRHSAGRKPSHWPRYTASQGFDRHLFALRHLAAAKGIILPELYLDPAYGQINHNVLSTSTLSSPAVNLGGFAPVVSDGFGVGYAVHDNWIGCNVSSYPGRNAREFLQCVEKALEDMFDALEGKSIKS

SEQ ID NO: 24217 - protein, 173 aa, Homo sapiens
EDKKPKGKSPPMAEATPVIVTTEEIAEIKRKNELRVKIKEEHLAALQFEEIATQFRLELIKTKALALLEDLVTKVVDVYKLMEKWLGERYLNEMASTEKLTDVARYHIETSTKIQNELYLSQEDFFINGNIKVFPDPPPSIRPPPVEKEEDGTLTIEQLDSLRDQFLDMAPKE

SEQ ID NO: 24218 - protein, 345 aa, Homo sapiens
RSPTGVCSGESHPSWRTCRGTWQGSTGCILELENIPPASTPQQWESGPQLTQHWYQAGLGCGQASVTGHKLSGALPSLDIVVWSELPPGAGLGSSAAYSVCLAAALLTVCEEIPNPLKDGDCVNRWTKEDLELINKWAFQGERMIHGNPSGVDNAVSTWGGALRYHQGKISSLKRSPALQILLTNTKVPRNTRALVAGVRNRLLKFPEIVAPLLTSIDAISLECERVLGEMGEAPAPEQYLVLEELIDMNQHHLNALGVGHASLDQLCQVTRARGLHSKLTGAGGGGCGITLLKPGLEQPEVEATKQALTSCGFDCLETSIGAPGVSIHSATSLDSRVQQALDGL

SEQ ID NO: 24219 - protein, 257 aa, Homo sapiens
MQRAVSVVARLGFRLQAFPPALCRPLSCAQEVLRRTPLYDFHLAHGGKMVAFAGWSLPVQYRDSHTDSHLHTRQHCSLFDVSHMLQISVPVAGAVHLATAILKNPEVKLAGLAARDSLRLEAGLCLYGNDIDEHTTPVEGSLSWTLGKRRRAAMDFPGAKVIVPQLKGRVQRRRVGLMCEGAPMRAHSPILNMEGTKIGTVTSGCPSPSLKKNVAMGYVPCEYSRPGTMLLVEVRRKQQMAVVSKMPFVPTNYYTLK

SEQ ID NO: 24220 - protein, 361 aa, Homo sapiens
MELDFGHFDERDKTSRNMRGSRMNGLPSPTHSAHCSFYRTRTLQALSNEKKAKKVRFYRNGDRYFKGIVYAVSSDRFRSFDALLADLTRSLSDNINLPQGVRYIYTIDGSRKIGSMDELEEGESYVCSSDNFFKKVEYTKNVNPNWSVNVKTSANMKAPQSLASSNSAQARENKDFVRPKLVTIIRSGVKPRKAVRVLLNKKTAHSFEQVLTDITEAIKLETGVVKKLYTLDGKQVTCLHDFFGDDDVFIACGPEKFRYAQDDFSLDENECRVMKGNPSATAGPKASPTPQKTSAKSPGPMRRSKSPADSANGTSSSQLSTPKSKQSPISTPTSPGSLRKHKVDLYLPLSLDDSDSLGDSM

SEQ ID NO: 24221 - protein, 399 aa, Homo sapiens
MGGCAGSRRRFSDSEGEETVPEPRLPLLDHQGAHWKNAVGFWLLGLCNNFSYVVMLSAAHDILSHKRTSGNQSHVDPGPTPIPHNSSSRFDCNSVSTAAVLLADILPTLVIKLLAPLGLHLLPYSPRVLVSGICAAGSFVLVAFSHSVGTSLCGVVFASISSGLGEVTFLSLTAFYPRAVISWWSSGTGGAGLLGALSYLGLTQAGLSPQQTLLSMLGIPALLLASYFLLLTSPEAQDPGGEEEAESAARQPLIRTEAPESKPGSSSSLSLRERWTVFKGLLWYIVPLVVVYFAEYFINQGLFELLFFWNTSLSHAQQYRWYQMLYQAGVFASRSSLRCCRIRFTWALALLQCLNLVFLLADVWFGFLPSIYLVFLIILYEGLLGGAAYVNTFHNIALE

SEQ ID NO: 24222 - protein, 459 aa, Homo sapiens
MIPSKILVYRHPSSRTGTELYRPGRRRKKSLGDLFHNGYRVKSGPAAPEKEEPPNFRQSLVSCCGVCASWGLRFLRALRLIQFSEILQFLNILKTSNSIKLVNLLSIFISTWLTAAGFIHLVENSGDPWENFQNNQALTYWECVYLLMVTMSTVGYGDVYAKTTLGRLFMVFFILGGLAMFASYVPEIIELIGNRKKYGGSYSAVSGRKHIVVCGHITLESVSNFLKDFLHKDRDDVNVEIVFLHNISPNLELEALFKRHFTQVEFYQGSVLNPHDLARVKIESADACLILANKYCADPDAEDASNIMRVISIKNYHPKIRIITQMLQYHNKIEEDTWQKYYLEGVSNEMYTEYLSSAFVGLSFPTVCELCFVKLKLLMIAIEYKSANRESRILINPGNHLKIQEGTLGFFIASDAKEVKRAFFYCKACHDDITDPKRIKKCGCKRLIYFEDEQPSTLS

SEQ ID NO: 24223 - protein, 541 aa, Homo sapiens
MDMGNPGTLSPTKPGSQYYQYSSNNPRRRPLHSSAMEVQTKKVRKVPPGLPSSVYAPSASTADYNRDSPGYPSSKPATSTFPSSFFMQDGHHSSDPWSSSSGMNQPGYAGMLGNSSHIPQSSSYCSLHPHERLSYPSHSSADINSSLPPMSTFHRSGTNHYSTSSCTPPANGTDSIMANRGSGAAGSSQTGDALGKALASIYSPDHTNNSFSSNPSTPVGSPPSLSAGTAVWSRNGGQASSSPNYEGPLHSLQSRIEDRLERLDDAIHVLRNHAVGPSTAMPGGHGDMHGIIGPSHNGAMGGLGSGYGTGLLSANRHSLMVGTHREDGVALRGSHSLLPNQVPVPQLPVQSATSPDLNPPQDPYRGMPPGLQGQSVSSGSSEIKSDDEGDENLQDTKSSEDKKLDDDKKDIKSITRSRSSNNDDEDLTPEQKAEREKERRMANNARERLRVRDINEAFKELGRMVQLHLKSDKPQTKLLILHQAVAVILSLEQQVRERNLNPKAACLKRREEEKVSSEPPPLSLAGPHPGMGDASNHMGQM

SEQ ID NO: 24224 - protein, 186 aa, Homo sapiens
FHRPRATVMVMVKGVNKLALPPGSVISYPLENLSRHKHLAKDHSPDLYSLELAGLDEIGKRYGEDSEQFRDASKILVDALQKFADDMYSLYGGNAVVELVTVKSFDTSLIRKTRTILEAKQAKNPASPYNLAYKYNFEYSVVFNMVLWIMIALALAVIITSYNIWNMDPGYDSIIYRMTNQKIRMD

SEQ ID NO: 24225 - protein, 2169 aa, Homo sapiens
MSEILCQWLNKELKVSRTVSPKSFAKAFSSGYLLGEVLHKFELQDDFSEFLDSRVSSAKLNNFSRLEPTLNLLGVQFDQNVAHGIITEKPGVATKLLYQLYIALQKKKKSGLTGVEMQTMQRLTNLRLQNMKSDTFQERLRHMIPRQTDFNLMRITYRFQEKYKHVKEDLAHLHFEKLERFQKLKEEQRCFDIEKQYLNRRRQNEIMAKIQAAIIQIPKPASNRTLKALEAQKMMKKKKEAEDVADEIKKFEALIKKDLQAKESASKTSLDTAGQTTTDLLNTYSDDEYIKKIQKRLEEDAFAREQREKRRRKLLMDQLIAHEAQEEAYREEQLINRLMRQSQQERRIAVQLMHVRHEKEVLWQNRIFREKQHEERRLKDFQDALDREAALAKQAKIDFEEQFLKEKRFHDQIAVERAQARYEKHYSVCAEILDQIVDLSTKVADYRMLTNNLIPYKLMHDWKELFFNAKPIYEQASVKTLPANPSREQLTELEKRDLLDTNDYEEYKNMVGEWALPEEMVDNLPPSNNCILGHILHRLAEKSLPPRAESTTPELPSFAVKGCLLGKTLSGKTTILRSLQKDFPIQILSIDTLVQEAIQAFHDNEKVSEVLPIQKNDEEDALPVLQEEIKESQDPQHVFSAGPVSDEVLPETEGETMLSANADKTPKAEEVKSSDSFLKLTTRAQLGAKSEQLLKKGKSIPDVLLVDIIVNAINEIPVNQDCILDGFPMTLNQAQLLEEALTGCNRNLTEVERKKAQKSTLAIDPATSKEIPLPSPAFDFVILLDVSDTSSMSRMNDIIAEELSYKTAHEDISQRVAAENQDKDGDQNLRDQIQHRIIGFLDNWPLLEQWFSEPENILIKINAEIDKESLCEKVKEILTTEIAKKKNKVEKKLEEKEAEKKAAASLAELPLPTPPPAPPPEPEKEKEIHQSHVASKTPTAKGKPQSEAPHGKQESLQEGKGKKGETALKRKGSPKGKSSGGKVPVKKSPADSTDTSPVAIVPQPPKPGSEEWVYVNEPVPEEMPLFLVPYWELIENSYINTIKTVLRHLREDQHTVLAYLYEIRTSFQEFLKRPDHKQDFVAQWQADFNSLPDDLWDDEETKAELHQRVNDLRDRLWDICDARKEEAEQERLDIINESWLQDTLGMTMNHFFSLMQAELNRFQDTKRLLQDYYWGMESKIPVEDNKRFTRIPLVQLDSKDNSESQLRIPLVPRISISLETVTPKPKTKSVLKGKMDNSLENVESNFEADEKLVMDTWQQASLAVSHMVAAEIHQRLMEEEKENQPADPKEKSPQMGANKKVKKEPPKKKQEDKKPKGKSPPMAEATPVIVTTEEIAEIKRKNELRVKIKEEHLAALQFEEIATQFRLELIKTKALALLEDLVTKVVDVYKLMEKWLGERYLNEMASTEKLTDVARYHIETSTKIQNELYLSQEDFFINGNIKVFPDPPPSIRPPPVEKEEDGTLTIEQLDSLRDQFLDMAPKGRNPSDGVNRVTEKQKRPQKLDHYLPKRSHQFLKIWLKKYPWLIYDELLNLMFCALCRKHGVKSGGSQVNFFYGTDNFRTEFLNAHHLSEAHAKASLMEATSSSPVNRATTKLMMRTMSKVTLGRVENLFRSCHAIAKTGRPLKDFIWMCKLDDMKGVDIGPVFRTKKSARMFTYFIAEVERKNLREKLEKSKFFSVISDGIIDSLIKEAELVYVQFAHAGKVHCQIVGVQIVERNDPLAIKNAIEKTLEINLQLRLSSQDWAKKLVGFGSDGTHSIEGENNEVALLLREIQPCVQTVYCFAHHLELSYKAVFQNIPLYNDVKDLLHSIYHFYHNSPLHKSALRTAFKGLHLRPVMPSQIGDRKWLHGLQAALQNFLKGYPAIVRQLHSAGRGKSDTSQKKPKELLESLLQADIVKFAHFLLDVMNVLSILSCVNKNRNSSIADIFATLESMLEMLQMYQTRLGPKERMVDSATHFHGNCLRGKENISAVRNIVLTHLIKRLQGCFRDASQNVVRATVIGSFKLWPTKINQEFGEKEVSILTAHYEPVLEAANVKLSEVDTEWSMLKLEIYARFQNIRKLTWDFVNSIYLHKYPNILTLVDLVLTLPASSAEAEHGFSQMKWTKSHMHAKIKAESMTDVLIIQLNSPDINNFDPRKAIHLWNARTPSSTGDTRSNSDCSSNSENESD

SEQ ID NO: 24226 - protein, 1229 aa, Homo sapiens
DEVRSIIGSKGLDRSNSWVNTGGPKAAPWGSNPSPSAESTQAMDRSCNRMSSHTETSSFLQTLTGRLPTKKGKEDELEKLSLLLFHEELALQWVVCSGSVRESALQQAWFFFELMVKSMVHHLYFNDKLEAPRKSRFPERFMDDIAALVSTIASDIVSRFQKDTEMVERLNTSLAFFLNDLLSVMDRGFVFSLIKSCYKQVSSKLYSLPNPSVLVSLRLDFLRIICSHEHYVTLNLPCSLLTPPASPSPSVSSATSQSSGFSTNVQDQKIANMFELSVPFRQQHYLAGLVLTELAVILDPDAEGLFGLHKKVINMVHNLLSSHDSDPRYSDPQIKARVAMLYLPLIGIIMETVPQLYDFTETHNQRGRPICIATDDYESESGSMISQTVAMAIAGTSVPQLTRPGSFLLTSTSGRQHTTFSAESSRSLLICLLWVLKNADETVLQKWFTDLSVLQLNRLLDLLYLCVSCFEYKGKKVFERMNSLTFKKSKDMRAKLEEAILGSIGARQEMVRRSRGQLERSPSGSAFGSQENLRWRKDMTHWRQNTEKLDKSRAEIEHEALIDGNLATEANLIILDTLEIVVQTVSVTESKESILGGVLKVLLHSMACNQSAVYLQHCFATQRALVSKFPELLFEEETEQCADLCLRLLRHCSSSIGTIRSHASASLYLLMRQNFEIGNNFARVKMQVTMSLSSLVGTSQNFNEEFLRRSLKTILTYAEEDLELRETTFPDQVQDLVFNLHMILSDTVKMKEHQEDPEMLIDLMYRIAKGYQTSPDLRLTWLQNMAGKHSERSNHAEAAQCLVHSAALVAEYLSMLEDRKYLPVGCVTFQNISSNVLEESAVSDDVVSPDEEGICSGKYFTESGLVGLLEQAAASFSMAGMYEAVNEVYKVLIPIHEANRDAKKLSTIHGKLQEAFSKIVHQDGKRMFGTYFRVGFYGTKFGDLDEQEFVYKEPAITKLAEISHRLEGFYGERFGEDVVEVIKDSNPVDKCKLDPNKAYIQITYVEPYFDTYEMKDRITYFDKNYNLRRFMYCTPFTLDGRAHGELHEQFKRKTILTTSHAFPYIKTRVNVTHKEEIILTPIEVAIEDMQKKTQELAFATHQDPADPKMLQMVLQGSVGTTVNQGPLEVAQVFLSEIPSDPKLFRHHNKLRLCFKDFTKRCEDALRKNKSLIGPDQKEYQRELERNYHRLKEALQPLINRKIPQLYKAVLPVTCHRDSFSRMSLRKMDL

SEQ ID NO: 24227 - protein, 1371 aa, Homo sapiens
PSLQVVLNSIIKAMVPLLHIALLVLFVIIIYAIIGLELFIGKMHKTCFFADSDIVAEEDPAPCAFSGNGRQCTANGTECRSGWVGPNGGITNFDNFAFAMLTVFQCITMEGWTDVLYWVNDAIGWEWPWVYFVSLIILGSFFVLNLVLGVLSGEFSKEREKAKARGDFQKLREKQQLEEDLKGYLDWITQAEDIDPENEEEGGEEGKRNTSMPTSETESVNTENVSGEGENRGCCGSLWCWWRRRGAAKAGPSGCRRWGQAISKSKLSRRWRRWNRFNRRRCRAAVKSVTFYWLVIVLVFLNTLTISSEHYNQPDWLTQIQDIANKVLLALFTCEMLVKMYSLGLQAYFVSLFNRFDCFVVCGGITETILVELEIMSPLGISVFRCVRLLRIFKVTRHWTSLSNLVASLLNSMKSIASLLLLLFLFIIIFSLLGMQLFGGKFNFDETQTKRSTFDNFPQALLTVFQILTGEDWNAVMYDGIMAYGGPSSSGMIVCIYFIILFICGNYILLNVFLAIAVDNLADAESLNTAQKEEAEEKERKKIARKESLENKKNNKPEVNQIANSDNKVTIDDYREEDEDKDPYPPCDVPVGEEEEEEEEDEPEVPAGPRPRRISELNMKEKIAPIPEGSAFFILSKTNPIRVGCHKLINHHIFTNLILVFIMLSSAALAAEDPIRSHSFRNTILGYFDYAFTAIFTVEILLKMTTFGAFLHKGAFCRNYFNLLDMLVVGVSLVSFGIQSSAISVVKILRVLRVLRPLRAINRAKGLKHVVQCVFVAIRTIGNIMIVTTLLQFMFACIGVQLFKGKFYRCTDEAKSNPEECRGLFILYKDGDVDSPVVRERIWQNSDFNFDNVLSAMMALFTVSTFEGWPALLYKAIDSNGENIGPIYNHRVEISIFFIIYIIIVAFFMMNIFVGFVIVTFQEQGEKEYKNCELDKNQRQCVEYALKARPLRRYIPKNPYQYKFWYVVNSSPFEYMMFVLIMLNTLCLAMQHYEQSKMFNDAMDILNMVFTGVFTVEMVLKVIAFKPKHYFTDAWNTFDALIVVGSVVDIAITEVNPTESENVPVPTATPGNSEESNRISITFFRLFRVMRLVKLLSRGEGIRTLLWTFIKSFQALPYVALLIAMLFFIYAVIGMQMFGKVAMRDNNQINRNNNFQTFPQAVLLLFRCATGEAWQEIMLACLPGKLCDPESDYNPGEEYTCGSNFAIVYFISFYMLCAFLIINLFVAVIMDNFDYLTRDWSILGPHHLDEFKRIWSEYDPEAKGRIKHLDVVTLLRRIQPPLGFGKLCPHRVACKRLVAMNMPLNSDGTVMFNATLFALVRTALKIKTEGNLEQANEELRAVIKKIWKKTSMKLLDQVVPPAGGQCSLFPK

SEQ ID NO: 24228 - protein, 132 aa, Homo sapiens
RDHLEEETAKFFTQVHQAIKTLRDDKTVLLEEIYTHKNLFTERLNKISDGLKEKACNESCARNRRTSLWAVSLSSALLLAIAGAGTGQPACLPEVNRGRSYHRHKVHSSLGPGDPIPPYPPSWVLGPQSSEA

SEQ ID NO: 24229 - protein, 145 aa, Homo sapiens
MEQTVLVPPGPDSFNFFTRESLAAIERRIAEEKAKNPKPDKKDDDENGPKPNSDLEAGKNLPFIYGDIPPEMVSEPLEDLDPYYINKKMEFCSHHPGWSAVARSWLTATSASWVQAILLFSCLSLPSNWDYRDPPPGPANFFVCF

SEQ ID NO: 24230 - protein, 370 aa, Homo sapiens
GLGRPTPGLSQGPGKETLESALIALDSEKPKKLRFHPKQLYFSARQGELQKVLLMLVDGIDPNFKMEHQNKRSPLHAAAEAGHVDICHMLVQAGANIDTCSEDQRTPLMEAAENNHLEAVKYLIKAGALVDPKDAEGSTCLHLAAKKGHYEVVQYLLSNGQMDVNCQDDGGWTPMIWATEYKHVDLVKLLLSKGSDINIRDNEENICLHWAAFSGCVDIAEILLAAKCDLHAVNIHGDSPLHIAARENRYDCVVLFLSRDSDVTLKNKEGETPLQCASLNSQVWSALQMSKALQDSAPDRPSPVERIVSRDIARGYERIPIPCVNAVDSEPCPSNYKYVSQNCVTSPMNIDRNITHLQALDMFLPAQPSP

SEQ ID NO: 24231 - protein, 283 aa, Homo sapiens
FYRCTDEAKSNPEECRGLFILYKDGDVDSPVVRERIWQNSDFNFDNVLSAMMALFTVSTFEGWPALLYKAIDSNGENIGPIYNHRVEISIFFIIYIIIVAFFMMNIFVGFVIVTFQEQGEKEYKNCELDKNQRQCVEYALKARPLRRYIPKNPYQYKFWYVVNSSPFEYMMFVLIMLNTLCLAMQHYEQSKMFNDAMDILNMVFTGVFTVEMVLKVIAFKPKNSEESNRISITFFRLFRVMRLVKLLSRGEGIRTLLWTFIKSFQALPYVALLIAMLFFIYAV

SEQ ID NO: 24232 - protein, 403 aa, Homo sapiens
MAAGGDHGSPDSYRSPLASRYASPEMCFVFSDRYKFRTWRQLWLWLAEAEQTLGLPITDEQIQEMKSNLENIDFKMAAEEEKRLRHDVMAHVHTFGHCCPKAAGIIHLGATSCYVGDNTDLIILRNALDLLLPKLARVISRLADFAKERASLPTLGFTHFQPAQLTTVGKRCCLWIQDLCMDLQNLKRVRDDLRFRGVKGTTGTQASFLQLFEGDDHKVEQLDKMVTEKAGFKRAFIITGQTYTRKVDIEVLSVLASLGASVHKICTDIRLLANLKEMEEPFEKQQIGSSAMPYKRNPMRSERCCSLARHLMTLVMDPLQTASVQWFERTLDDSANRRICLAEAFLTADTILNTLQNISEGLVVYPKVRSLNSKVIERRIRQELPFMATENIIMAMVKAGGSR

SEQ ID NO: 24233 - protein, 1279 aa, Homo sapiens
MSTDDQQKIQAAAFDKGDDRRLGKKPIFSSSQQRKQVSDSGDIKIKSWRGNNKKECWSYLSTNKKMKSDGLGASGHSSSTNRNSINKTLKQDDVKEKDGTKIASKITKELKTGGKNVSGKPKTVTKSKTENGDKARLENMSPRQVVERSATAAAAATGQKNLLNGKGVRNQEGQISGARPKVLTGNLNVQAKAKPLKKATGKDSPCLSIAGPSSRSTDSSMEFSISTECLDEPKENGSTEEEKPSGHKLSFCDSPGQMMKNSVDSVKNSTVAIKSRPVSRVTNGTSNKKSIHEQDTNVNNSVLKKVSGKGCSEPVPQAILKKRGTSNGCTAAQQRTKSTPSNLTKTQGSQGESPNSVKSSVSSRQSDENVAKLDHNTTTEKQAPKRKMVKQVHTALPKVNAKIVAMPKNLNQSKKGETLNNKDSKQKMPPGQVISKTQPSSQRPLKHETSTVQKSMFHDVRDNNNKDSVSEQKPHKPLINLASEISDAEALQSSCRPDPQKPLNDQEKEKLALECQNISKLDKSLKHELESKQICLDKSETKFPNHKETDDCDAANICCHSVGSDNVNSKFYSTTALKYMVSNPNENSLNSNPVCDLDSTSAGQIHLISDRENQVGRKDTNKQSSIKCVEDVSLCNPERTNGTLNSAQEDKKSKVPVEGLTIPSKLSDESAMDEDKHATADSDVSSKCFSGQLSEKNSPKNMETSESPESHETPETPFVGHWNLSTGVLHQRESPESDTGSATTSSDDIKPRSEDYDAGGSQDDDGSNDRGISKCGTMLCHDFLGRSSSDTSTPEELKIYDSNLRIEVKMKKQSNNDLFQVNSTSDDEIPRKRPEIWSRSAIVHSRERENIPRGSVQFAQEIDQVSSSADETEDERSEAENVAENFSISNPAPQQFQGIINLAFEDATENECREFSATKKFKRSVLLSVDECEELGSDEGEVHTPFQASVDSFSPSDVFDGISHEHHGRTCYSRFSRESEDNILECKQNKGNSVCKNESTVLDLSSIDSSRKNKQSVSATEKKNTIDVLSSRSRQLLREDKKVNNGSNVENDIQQRSKFLDSDVKSQERPCHLDLHQREPNSDIPKNSSTKSLDSFRSQVLPQEGPVKESHSTTTEKANIALSAGDIDDCDTLAQTRMYDHRPSKTLSPIYEMDVIEAFEQKVESETHVTDMDFEDDQHFAKQDWTLLKQLLSEQDSNLDVTNSVPEDLSLAQYLINQTLLLARDSSKPQGITHIDTLNRWSELTSPLDSSASITMASFSSEDCSPQGEWTILELETQH

SEQ ID NO: 24234 - protein, 767 aa, Homo sapiens
MVQNLQPETVSCSTAVKQACHYHVSSLRKKLAFLRANTASNSNRSTPACSPILRKRSRSPTPQNQDGDTMVEKGSDHSSDKSPSTPEQGVQRSCSSQSGRSGGKNSKKSQSWYNVLSPTYKQRNEDFRKLFKQLPDTERLIVDYSCALQRDILLQGRLYLSENWICFYSNIFRWETLLTVRLKDICSMTKEKTARLIPNAIQVCTDSEKHFFTSFGARDRTYMMMFRLWQNALLEKPLCPKELWHFVHQCYGNELGLTSDDEDYVPPDDDFNTMGYCEEIPVEENEVNDSSSKSSIETKPDASPQLPKKSITNSTLTSTGSSEAPVSFDGLPLEEEALEGDGSLEKELAIDNIMGEKIEMIAPVNSPSLDFNDNEDIPTELSDSSDTHDEGEVQAFYEDLSGRQYVNEVFNFSVDKLYDLLFTNSPFQRDFMEQRRFSDIIFHPWKKEENGNQSRVILYTITLTNPLAPKTATVRETQTMYKASQESECYVIDAEVLTHDVPYHDYFYTINRYTLTRVARNKSRLRVSTELRYRKQPWGLVKTFIEKNFWSGLEDYFRHLESELAKTESTYLAEMHRQSPKEKASKTTTVRRRKRPHAHLRVPHLEEVMSPVTTPTDEDVGHRIKHVAGSTQTRHIPEDTPNGFHLQSVSKLLLVISCVICFSLVLLVILNMMLFYKLWMLEYTTQTLTAWQGLRLQERLPQSQTEWAQLLESQQKYHDTELQKWREIIKSSVMLLDQMKDSLINLQNGIRSRDYTSESEEKRNRYH

SEQ ID NO: 24235 - protein, 204 aa, Homo sapiens
MDSQPSCVVVTGFGPFRQHLVNSSWEAVKELSKLGLGNETVVQLRTLELPVDYREAKRRVTGIWEDHQPQLVVHVGMDTAAKAIILEQSGKNQGYRDADIRSFWPEGGVCLPGSPDVLESGVCMKAVCKRVAVEGVDVIFSRDAGRYVCDYTYYLSLHHGKGCAALIHVPPLSRGLPASLLGRALRVIIQEMLEEVGKPKHRAQ

SEQ ID NO: 24236 - protein, 955 aa, Homo sapiens
MVTHKPGTDQHQMLTQGAGNRKFKCTECGKAFKYKHHLKEHLRIHSGEKPYECPNCKKRFSHSGSYSSHISSKKCIGLISVNGRMRNNIKTGSSPNSVSSSPTNSAITQLRNKLENGKPLSMSEQTGLLKIKTEPLDFNDYKVLMATHGFSGTSPFMNGGLGATSPLGVHPSAQSPMQHLGVGMEAPLLGFPTMNSNLSEVQKVLQIVDNTVSRQKMDCKAEEISKLKGYHMKDPCSQPEEQGVTSPNIPPVGLPVVSHNGATKSIIDYTLEKVNEAKACLQSLTTDSRRQISNIKKEKLRTLIDLVTDDKMIENHNISTPFSCQFCKESFPGPIPLHQHERYLCKMNEEIKAVLQPHENIVPNKAGVFVDNKALLLSSVLSEKGMTSPINPYKDHMSVLKAYYAMNMEPNSDELLKISIAVGLPQEFVKEWFEQRKVYQYSNSRSPSLERSSKPLAPNSNPPTKDSLLPRSPVKPMDSITSPSIAELHNSVTNCDPPLRLTKPSHFTNIKPVEKLDHSRSNTPSPLNLSSTSSKNSHSSSYTPNSFSSEELQAEPLDLSLPKQMKEPKSIIATKNKTKASSISLDHNSVSSSSENSDEPLNLTFIKKEFSNSNNLDNKSTNPVFSMNPFSAKPLYTALPPQSAFPPATFMPPVQTSIPGLRPYPGLDQMSFLPHMAYTYPTGAATFADMQQRRKYQRKQGFQGELLDGAQDYMSGLDDMTDSDSCLSRKKIKKTESGMYACDLCDKTFQKSSSLLRHKYEHTGKRPHQCQICKKAFKHKHHLIEHSRLHSGEKPYQCDKCGKRFSHSGSYSQHMNHRYSYCKREAEEREAAEREAREKGHLEPTELLMNRAYLQSITPQGYSDSEERESMPRDGESEKEHEKEGEDGYGKLGRQDGDEEFEEEEEESENKSMDTDPETIRDEEETGDHSMDDSSEDGKMETKSDHEEDNMEDGM

SEQ ID NO: 24237 - protein, 529 aa, Homo sapiens
MSVALAAPHASARSRSLITGDSIVSAEAVWDHVTMANRELAFKAGDVIKVLDASNKDWWWGQIDDEEGWFPASFVRLWVNQEDEVEEGPSDVQNGHLDPNSDCLCLGRPLQNRDQMRANVINEIMSTERHYIKHLKDICEGYLKQCRKRRDMFSDEQLKVIFGNIEDIYRFQMGFVRDLEKQYNNDDPHLSEIGPCFLEHQDGFWIYSEYCNNHLDACMELSKLMKDSRYQHFFEACRLLQQMIDIAIDGFLLTPVQKICKYPLQLAELLKYTAQDHSDYRYVAAALAVMRNVTQQINERKRRLENIDKIAQWQASVLDWEGEDILDRSSELIYTGEMAWIYQPYGRNQQRVFFLFDHQMVLCKKDLIRRDILYYKGRIDMDKYEVVDIEDGRDDDFNVSMKNAFKLHNKETEEIHLFFAKKLEEKIRWLRAFREERKMVQEDEKIGFEISENQKRQAAMTVRKVPKQKGVNSARSVPPSYPPPQDPLNHGQYLVPDGIAQSQVFEFTEPKRSQSPFWQNFSRLTPFKK

SEQ ID NO: 24238 - protein, 479 aa, Homo sapiens
AMDEFHPFIEALLPHVRAIAYTWFNLQARKRKYFKKHEKRMSKDEERAVKDELLSEKPEIKQKWASRLLAKLRKDIRQEYREDFVLTVTGKKHPCCVLSNPDQKGKIRRIDCLRQADKVWRLDLVMVILFKGIPLESTDGERLMKSPHCTNPALCVQPHHITVSVKELDLFLAYYVQEQDSGQSGSPSHNDPAKNPPGYLEDSFVKSGVFNVSELVRVSRTPITQGTGVNFPIGEIPSQPYYHDMNSGVNLQRSLSSPPSSKRPKTISIDENMEPSPTGDFYPSPSSPAAGSRTWHERDQDMSSPTTMKKPEKPLFSSASPQDSSPRLSTFPQHHHPGIPGVAHSVISTRTPPPPSPLPFPTQAILPPAPSSYFSHPTIRYPPHLNPQDTLKNYVPSYDPSSPQTSQLRICDWTMNQNGRHLYPSTSEDTLGITWQSPGTWASLVPFQVSNRTPILPANVQNYGLNIIGEPFLQAETSN

SEQ ID NO: 24239 - protein, 480 aa, Homo sapiens
MAAGGDHGSPDSYRSPLASRYASPEMCFVFSDRYKFRTWRQLWLWLAEAEQTLGLPITDEQIQEMKSNLENIDFKMAAEEEKRLRHDVMAHVHTFGHCCPKAAGIIHLGATSCYVGDNTDLIILRNALDLLLPKLARVISRLADFAKERASLPTLGFTHFQPAQLTTVGKRCCLWIQDLCMDLQNLKRVRDDLRFRGVKGTTGTQASFLQLFEGDDHKVEQLDKMVTEKAGFKRAFIITGQTYTRKVDIEVLSVLASLGASVHKICTDIRLLANLKEMEEPFEKQQIGSSAMPYKRNPMRSERCCSLARHLMTLVMDPLQTASVQWFERTLDDSANRRICLAEAFLTADTILNTLQNISEGLVVYPKVIERRIRQELPFMATENIIMAMVKAGGSRQDCHEKIRVLSQQAASVVKQEGGDNDLIERIQVDAYFSPIHSQLDHLLDPSSFTGRASQQVQRFLEEEVYPLLKPYESVMKVSF

SEQ ID NO: 24240 - protein, 1479 aa, Homo sapiens
MPPQPPGSQSESSSHPALSQSPMPQERGNYSRPPAYSGVPSASYSGPGPGMGISANNQMHGQGPSQPCGAVPLGRMPSAGMQNRPFPGNMSSMTPSSPGMSQQGGPGMGPPMPTVNRKAQEAAAAVMQAAANSAQSRQGSFPGMNQSGLMASSSPYSQPMNNSSSLMNTQAPPYSMAPAMVNSSAASVGLADMMSPGESKLPLPLKADGKEEGTPQPESKSKDSYSSQGISQPPTPGNLPVPSPMSPSSASISSFHGDESDSISSPGWPKTPSSPKSSSSTTTGEKITKVYELGNEPERKLWVDRYLTFMEERGSPVSSLPAVGKKPLDLFRLYVCVKEIGGLAQVNKNKKWRELATNLNVGTSSSAASSLKKQYIQYLFAFECKIERGEEPPPEVFSTGDTKKQPKLQPPSPANSGSLQGPQTPQSTGSNSMAEVPGDLKPPTPASTPHGQMTPMQGGRSSTISVHDPFSDVSDSSFPKRNSMTPNAPYQQGMSMPDVMGRMPYEPNKDPFGGMRKVPGSSEPFMTQGQMPNSSMQDMYNQSPSGAMSNLGMGQRQQFPYGASYDRRHEPYGQQYPGQGPPSGQPPYGGHQPGLYPQQPNYKRHMDGMYGPPAKRHEGDMYNMQYSSQQQEMYNQYGGSYSGPDRRPIQGQYPYPYSRERMQGPGQIQTHGIPPQMMGGPLQSSSSEGPQQNMWAARNDMPYPYQNRQGPGGPTQAPPYPGMNRTDDMMVPDQRINHESQWPSHVSQRQPYMSSSASMQPITRPPQPSYQTPPSLPNHISRAPSPASFQRSLENRMSPSKSPFLPSMKMQKVMPTVPTSQVTGPPPQPPPIRREITFPPGSVEASQPVLKQRRKITSKDIVTPEAWRVMMSLKSGLLAESTWALDTINILLYDDSTVATFNLSQLSGFLELLVEYFRKCLIDIFGILMEYEVGDPSQKALDHNAARKDDSQSLADDSGKEEEDAECIDDDEEDEEDEEEDSEKTESDEKSSIALTAPDAAADPKEKPKQASKFDKLPIKIVKKNNLFVVDRSDKLGRVQEFNSGLLHWQLGGGDTTEHIQTHFESKMEIPPRRRPPPPLSSAGRKKEQEGKGDSEEQQEKSIIATIDDVLSARPGALPEDANPGPQTESSKFPFGIQQAKSHRNIKLLEDEPRSRDETPLCTIAHWQDSLAKRCICVSNIVRSLSFVPGNDAEMSKHPGLVLILGKLILLHHEHPERKRAPQTYEKEEDEDKGVACSKDEWWWDCLEVLRDNTLVTLANISGQLDLSAYTESICLPILDGLLHWMVCPSAEAQDPFPTVGPNSVLSPQRLVLETLCKLSIQDNNVDLILATPPFSRQEKFYATLVRYVGDRKNPVCREMSMALLSNLAQGDALAARAIAVQKGSIGNLISFLEDGVTMAQYQQSQHNLMHMQPPPLEPPSVDMMCRAAKALLAMARVDENRSEFLLHEGRLLDISISAVLNSLVASVICDVLFQIGQL

SEQ ID NO: 24241 - protein, 1048 aa, Homo sapiens
MLAVSLKWRLGVVRRRLKDDGPYSKGGKDAGGADVSLACRRQSIPEEFRGITVVELIKKEGSTLGLTISGGTDKDGKPRVSNLRPGGLAARSDLLNIGDYIRSVNGIHLTRLRHDEIITLLKNVGERVVLEVEYELPPPAPENNPRIISKTVDVSLYKEGNSFGFVLRGGAHEDGHKSRPLVLTYVRPGGPADREGSLKVGDRLLSVDGIPLHGASHATALATLRQCSHEALFQVEYDVATPDTVANASGPLMVEIVKTPGSALGISLTTTSLRNKSVITIDRIKPASVVDRSGALHPGDHILSIDGTSMEHCSLLEATKLLASISEKVRLEILPVPQSQRPLRPSEAVKVQRSEQLHRWDPCVPSCHSPRPGHCRMPTWATPAGQDQSRSLSSTPFSSPTLNHAFSCNNPSTLPRGSQPMSPRTTMGRRRQRRREHKSSLSLASSTVGPGGQIVHTETTEVVLCGDPLSGFGLQLQGGIFATETLSSPPLVCFIEPDSPAERCGLLQVGDRVLSINGIATEDGTMEEANQLLRDAALAHKVVLEVEFDVAESVIPSSGTFHVKLPKKRSVELGITISSASRKRGEPLIISDIKKGSVAHRTGTLEPGDKLLAIDNIRLDNCPMEDAVQILRQCEDLVKLKIRKDEDNSDELETTGAVSYTVELKRYGGPLGITISGTEEPFDPIVISGLTKRGLAERTGAIHVGDRILAINNVSLKGRPLSEAIHLLQVAGETVTLKIKKQLDRPLLPRKSGSLSETSDADEDPADALKGGLPAARFSPAVPSVDSAVESWDSSATEGGFGGPGSYTPQAAARGTTPQERRPGWLRGSPPPTEPRRTSYTPTPADESFPEEEEEDDWEPPTSPAPGPAREEGFWRMFGEALEDLESCGQSELLRELEASIMTGTVQRVALEGRPGHRPWQRGREVRASPAEMEELLLPTPLEMHKVTLHKDPMRHDFGFSVSDGLLEKGVYVHTVRPDGPAHRGGLQPFDRVLQVNHVRTRDFDCCLAVPLLAEAGDVLELIISRKPHTAHSSRAPRSPGPSSPRML

SEQ ID NO: 24242 - protein, 445 aa, Homo sapiens
MMYSPICLTQDEFHPFIEALLPHVRAIAYTWFNLQARKRKYFKKHEKRMSKDEERAVKDELLSEKPEIKQKWASRLLAKLRKDIRQEYREDFVLTVTGKKHPCCVLSNPDQKGKIRRIDCLRQADKVWRLDLVMVILFKGIPLESTDGERLMKSPHCTNPALCVQPHHITVSVKELDLFLAYYVQEQDSGQSGSPSHNDPAKNPPGYLEDSFVKSGVFNVSELVRVSRTPITQGTGVNFPIGEIPSQPYYHDMNSGVNLQRSLSSPPSSKRPKTISIDENMEPSPTGDFYPSPSSPAAGSRTWHERDQDMSSPTTMKKPEKPLFSSASPQDSSPRLSTFPQHHHPGIPGVAHSVISTRTPPPPSPLPFPTQAILPPAPSSYFSHPTIRYPPHLNPQDTLKNYVPSYDPSSPQTSQLRICDWTMNQNGRHLYPSTSEDTLGITWQS

SEQ ID NO: 24243 - protein, 258 aa, Homo sapiens
MAVFVVLLALVAGVLGNEFSILKSPGSVVFRNGNWPIPGERIPDVAALSMGFSVKEDLSWPGLAVGNLFHRPRATVMVMVKGVNKLALPPGSVISYPLENAVPFSLDSVANSIHSLFSEETPVVLQLAPSEERVYMVGKANSVFEDLSVTLRQLRNRLFQENSVLSSLPLNSLSRNNEVDLLFLSELQVLHDISSLLSRHKHLAKDHSPDLYSLELAGLDEIGKRYGEDSEQFRDASKILVDALQKMTCTVFMVGMQW

SEQ ID NO: 24244 - protein, 863 aa, Homo sapiens
MESTLATSNSATGPVTFSHVFGQQCQLMQAAVQSLHTLNDQISHFIVTKSKALEEDKDPFLPTEKETLKSSMILMRHLLMDAQAKILSMMEDNKQLALRIDGAVQSASQEVTNLRAELTATNRRLAELSGGGGPGPGPGAAASASAAGDSAATNMENPQLGAQVLLREEVSRLQEEVHLLRQMKEMLAKDLEESQGGKSSEVLSATELRVQLAQKEQELARAKEALQAMKADRKRLKGEKTDLVSQMQQLYATLESREEQLRDFIRNYEQHRKESEDAVKALAKEKDLLEREKWELRRQAKEATDHATALRSQLDLKDNRMKELEAELAMAKQSLATLTKDVPKRHSLAMPGETVLNGNQEWVVQADLPLTAAIRQSQQTLYHSHPPHPADRQAVRVSPCHSRQPSVISDASAAEGDRSSTPSDINSPRHRTHSLCNGDSPGPVQKNLHNPIVQSLEDLEDQKRKKKKEKMGFGSISRVFARGKQRKSLDPGLFDDSDSQCSPTRQSLSLSEGEEQMDRLQQVELVRTTPMSHWKAGTVQAWLEVVMAMPMYVKACTENVKSGKVLLSLSDEDLQLGLGVCSSLHRRKLRLAIEDYRDAEAGRSLSKAAELDHHWVAKAWLNDIGLSQYSQAFQNHLVDGRMLNSLMKRDLEKHLNVSKKFHQVSILLGIELLYQVNFSREALQERRARCETQNIDPVVWTNQRVLKWVRDIDLKEYADNLTNSGVHGAVLVLEPTFNAEAMATALGIPSGKHILRRHLAEEMSAVFHPANSTGIREAERFGTPPGRASSVTRAGKEENSSGLKYKAGRLPLGKIGRGFSSKDPDFHDDYGSLQNEDCGDDDPQSRLEQCRLEGYNSLEVTNV

SEQ ID NO: 24245 - protein, 287 aa, Homo sapiens
MFANLKYVSLGILVFQTTSLVLTMRYSRTLKEEGPRYLSSTAVVVAELLKIMACILLVYKDSKCSLRALNRVLHDEILNKPMETLKLAIPSGIYTLQNNLLYVALSNLDAATYQWPSDSQLDSKELSAGSQFVGLMAVLTACFSSGFAGVYFEKILKETKQSVWIRNIQLGFFGSIFGLMGVYIYDGELVSKNGFFQGYNRLTWIVVVLQALGGLVIAAVIKYADNILKGFATSLSIILSTLISYFWLQDFVPTRVSLCRQAGVLWRDLGLLQPPTPWFKGFSCLSL

SEQ ID NO: 24246 - protein, 970 aa, Homo sapiens
MLLFFTLGLLIHFVFFASIFDIYFTSPLVHGMTPQFTPLPPPARRLVLFVADGLRADALYELDENGNSRAPFIRNIIMHEGSWGISHTRVPTESRPGHVALIAGFYEDVSAVAKGWKENPVEFDSLFNESKYTWSWGSPDILPMFAKGASGDHVYTYSYDAKREDFGAQDATKLDTWVFDNVKDFFHHARNNQSLFSKINEEKIVFFLHLLGIDTNGHAHRPSSRDYKHNIKKVDDGVKEIVSMFNHFYGNDGKTTFIFTSDHGMTDWGSHGAGHPSETLTPLVTWGAGIKYPQRVSAQQFDDAFLKEWRLENWKRLDVNQADIAPLMTSLIGVPFPLNSVGILPVDYLNNTDLFKAESMFTNAVQILEQFKVKMTQKKEVTLPFLFTPFKLLSDSKQFNILRKARSYIKHRKFDEVVSLCKELIHLALKGLSYYHTYDRFFLGVNVVIGFVGWISYASLLIIKSHSNLIKGVSKEVKKPSHLLPCSFVAIGILVAFFLLIQACPWTYYVYGLLPLPIWYAVLREFQVIQDLVVSVLTYPLSHFVGYLLAFTLGIEVLVLSFFYRYMLTAGLTAFAAWPFLTRLWTRAKMTSLSWTFFSLLLAVFPLMPVVGRKPDISLVMGAGLLVLLLSLCVVTSLMKRKDSFIKEELLVHLLQVLSTVLSMYVVYSTQSSLLRKQGLPLMNQIISWATLASSLVVPLLSSPVLFQRLFSILLSLMSTYLLLSTGYEALFPLVLSCLMFVWINIEQETLQQSGVCCKQKLTSIQFSYNTDITQFRQLYLDDIRRAFFLVFFLVTAFFGTGNIASINSFDLASVYCFLTVFSPFMMGALMMWKILIPFVLVMCAFEAVQLTTQLSSKSLFLIVLVISDIMALHFFFLVKDYGSWLDIGTRQLLACTAWLFMYISASPNRLWMLSDPGLDLNLLHAIRACISHYVIVMSMTIFLVFLNGLAQLLTTKKLRLCGKPKSHFM

SEQ ID NO: 24247 - protein, 243 aa, Homo sapiens
SNCQMRTLDSGIGTFPLPDSGNRSTGRYLCQPDSPEDAEPLLPLQSALSAVSSMRAQTLEREVPSSTDGQRPADSAIVHSTSDPIMTARGMRPLQSRLPKPASSGKVSSQKQNEAEPRPQTCSSFGYAEDPMASQPLPDWGSEVAATGTQKLRQLEETKDDPENRLSKISLESFNKFNSNTVILLEKEKNSLNKVEGQKEEKEKNEETSLSSSDRPGVDNLESLSDSLYDSFSSCASQGSNDV

SEQ ID NO: 24248 - protein, 911 aa, Homo sapiens
MLLFFTLGLLIHFVFFASIFDIYFTSPLVHGMTPQFTPLPPPARRLVLFVADGLRADALYELDENGNSRAPFIRNIIMHEGSWGISHTRVPTESRPGHVALIAGFYEDVSAVAKGWKENPVEFDSLFNESKYTWSWGSPDILPMFAKGASGDHVYTYSYDAKREDFGAQDATKLDTWVFDNVKDFFHHARNNQSLFSKINEEKIVFFLHLLGIDTNGHAHRPSSRDYKHNIKKVDDGVKEIVSMFNHFYGNDGKTTFIFTSDHGMTDWGSHGAGHPSETLTPLVTWGAGIKYPQRVSAQQFDDAFLKEWRLENWKRLDVNQGILPVDYLNNTDLFKAESMFTNAVQILEQFKVKMTQKKEVTLPFLFTPFKLLSDSKQFNILRKARSYIKHRKFDEVVSLCKELIHLALKGLSYYHTYDRFFLGVNVVIGFVGWISYASLLIIKSHSNLIKGVSKEVKKPSHLLPCSFVAIGILVAFFLLIQACPWTYYVYGLLPLPIWYAVLREFQVIQDLVVSVLTYPLSHFVGYLLAFTLGIEVLVLSFFYRYMLTAGLTAFAAWPFLTRLWTRAKMTSLSWTFFSLLLAVFPLMPVVGRKPDISLVMGAGLLVLLLSLCVVTSLMKRKDSFIKEELLVHLLQVLSTVLSMYVVYSTQSSLLRKQGLPLMNQIISWATLASSLVVPLLSSPVLFQRLFSILLSLMSTYLLLSTGYEALFPLVLSCLMFVWINIEQETLQQSGVCCKQKLTSIQFSYNTDITQFRQLYLDDIRRAFFLVFFLVTAFFGTGNIASINSFDLASVYCFLTVFSPFMMGALMMWKILIPFVLVMCAFEAVQLTTQLSSKSLFLIVLVISDIMALHFFFLVKDYGSWLDIGTSISHYVIVMSMTIFLVFLNGLAQLLTTKKLRLCGKPKSHFM

SEQ ID NO: 24249 - protein, 286 aa, Homo sapiens
MGADGMYDKLRMLNGQTGSWGTRPGWYPGTSVPGQPTQDGCQQQEGGGENTNSISSNGEDSDEAQMRLQLKRKLQRNRTSFTQEQIEALEKEFERTHYPDVFARERLAAKIDLPEARIQVWFSNRRAKWRREEKLRNQRRQASNTPSHIPISSSFSTSVYQPIPQPTTPVSSFTSGSMLGRTDTALTNTYSALPPMPSFTMANNLPMQPPVPSQTSSYSCMLPTSPSVNGRSYDTYTPPHMQTHMNSQPMGTSGTTSTGLISPGVSVPVQVPGSEPDMSQYWPRLQ

SEQ ID NO: 24250 - protein, 1181 aa, Homo sapiens
MANGGGGGGGSSGGGGGGGGSSLRMSSNIHANHLSLDASSSSSSSSSSSSSSSSSSSSSSVHEPKMDALIIPVTMEVPCDSRGQRMWWAFLASSMVTFFGGLFIILLWRTLKYLWTVCCHCGGKTKEAQKINNGSSQADGTLKPVDEKEEAVAAEVGWMTSVKDWAGVMISAQTLTGRVLVVLVFALSIGALVIYFIDSSNPIESCQNFYKDFTLQIDMAFNVFFLLYFGLRFIAANDKLWFWLEVNSVVDFFTVPPVFVSVYLNRSWLGLRFLRALRLIQFSEILQFLNILKTSNSIKLVNLLSIFISTWLTAAGFIHLVENSGDPWENFQNNQALTYWECVYLLMVTMSTVGYGDVYAKTTLGRLFMVFFILGGLAMFASYVPEIIELIGNRKKYGGSYSAVSGRKHIVVCGHITLESVSNFLKDFLHKDRDDVNVEIVFLHNISPNLELEALFKRHFTQVEFYQGSVLNPHDLARVKIESADACLILANKYCADPDAEDASNIMRVISIKNYHPKIRIITQMLQYHNKAHLLNIPSWNWKEGDDAICLAELKLGFIAQSCLAQGLSTMLANLFSMRSFIKIEEDTWQKYYLEGVSNEMYTEYLSSAFVGLSFPTVCELCFVKLKLLMIAIEYKSANRESRILINPGNHLKIQEGTLGFFIASDAKEVKRAFFYCKACHDDITDPKRIKKCGCKRLIYFEDEQPSTLSPKKKQRNGGMRNSPNTSPKLMRHDPLLIPGNDQIDNMDSNVKKYDSTGMFHWCAPKEIEKVILTRSEAAMTVLSGHVVVCIFGDVSSALIGLRNLVMPLRASNFHYHELKHIVFVGSIEYLKREWETLHNFPKVSILPGTPLSRADLRAVNINLCDMCVILSANQNNIDDTSLQDKECILASLNIKSMQFDDSIGVLQANSQGFTPPGMDRSSPDNSPVHGMLRQPSITTGVNIPIITELVNDTNVQFLDQDDDDDPDTELYLTQPFACGTAFAVSVLDSLMSATYFNDNILTLIRTLVTGGATPELEALIAEENALRGGYSTPQTLANRDRCRVAQLALLDGPFADLGDGGCYGDLFCKALKTYNMLCFGIYRLRDAHLSTPSQCTKRYVITNPPYEFELVPTDLIFCLMQFDHNAGQSRASLSHSSHSSQSSSKKSSSVHSIPSTANRQNRPKSRESRDKQNRKEMVYR

SEQ ID NO: 24251 - protein, 1146 aa, Homo sapiens
MDALIIPVTMEVPCDSRGQRMWWAFLASSMVTFFGGLFIILLWRTLKYLWTVCCHCGGKTKEAQKINNGSSQADGTLKPVDEKEEAVAAEVGWMTSVKDWAGVMISAQTLTGRVLVVLVFALSIGALVIYFIDSSNPIESCQNFYKDFTLQIDMAFNVFFLLYFGLRFIAANDKLWFWLEVNSVVDFFTVPPVFVSVYLNRSWLGLRFLRALRLIQFSEILQFLNILKTSNSIKLVNLLSIFISTWLTAAGFIHLVENSGDPWENFQNNQALTYWECVYLLMVTMSTVGYGDVYAKTTLGRLFMVFFILGGLAMFASYVPEIIELIGNRKKYGGSYSAVSGRKHIVVCGHITLESVSNFLKDFLHKDRDDVNVEIVFLHNISPNLELEALFKRHFTQVEFYQGSVLNPHDLARVKIESADACLILANKYCADPDAEDASNIMRVISIKNYHPKIRIITQMLQYHNKAHLLNIPSWNWKEGDDAICLAELKLGFIAQSCLAQGLSTMLANLFSMRSFIKIEEDTWQKYYLEGVSNEMYTEYLSSAFVGLSFPTVCELCFVKLKLLMIAIEYKSANRESRSRKRILINPGNHLKIQEGTLGFFIASDAKEVKRAFFYCKACHDDITDPKRIKKCGCKRLKVAARSRYSKDPFEFKKETPNSRLVTEPVEDEQPSTLSPKKKQRNGGMRNSPNTSPKLMRHDPLLIPGNDQIDNMDSNVKKYDSTGMFHWCAPKEIEKVILTRSEAAMTVLSGHVVVCIFGDVSSALIGLRNLVMPLRASNFHYHELKHIVFVGSIEYLKREWETLHNFPKVSILPGTPLSRADLRAVNINLCDMCVILSANQNNIDDTSLQDKECILASLNIKSMQFDDSIGVLQANSQGFTPPGMDRSSPDNSPVHGMLRQPSITTGVNIPIITELVNDTNVQFLDQDDDDDPDTELYLTQPFACGTAFAVSVLDSLMSATYFNDNILTLIRTLVTGGATPELEALIAEENALRGGYSTPQTLANRDRCRVAQLALLDGPFADLGDGGCYGDLFCKALKTYNMLCFGIYRLRDAHLSTPSQCTKRYVITNPPYEFELVPTDLIFCLMQFDHNAGQSRASLSHSSHSSQSSSKKSSSVHSIPSTANRQNRPKSRESRDKQKYVQEERL

SEQ ID NO: 24252 - protein, 940 aa, Homo sapiens
MTMAGGRRGLVAPQNTFLENIVRRSNDTNFVLGNAQIVDWPIVYSNDGFCKLSGYHRAEVMQKSSTCSFMYGELTDKDTIEKVRQTFENYEMNSFEILMYKKNRTPVWFFVKIAPIRNEQDKVVLFLCTFSDITAFKQPIEDDSCKGWGKFARLTRALTSSRGVLQQLAPSVQKGENVHKHSRLAEVLQLGSDILPQYKQEAPKTPPHIILHYCVFKTTWDWIILILTFYTAILVPYNVSFKTRQNNVAWLVVDSIVDVIFLVDIVLNFHTTFVGPAGEVISDPKLIRMNYLKTWFVIDLLSCLPYDVINAFENVDEVSAFMGDPGKIGFADQIPPPLEGRESQGISSLFSSLKVVRLLRLGRVARKLDHYIEYGAAVLVLLVCVFGLAAHWMACIWYSIGDYEIFDEDTKTIRNNSWLYQLAMDIGTPYQFNGSGSGKWEGGPSKNSVYISSLYFTMTSLTSVGFGNIAPSTDIEKIFAVAIMMIGSLLYATIFGNVTTIFQQMYANTNRYHEMLNSVRDFLKLYQVPKGLSERVMDYIVSTWSMSRGIDTEKVLQICPKDMRADICVHLNRKVFKEHPAFRLASDGCLRALAMEFQTVHCAPGDLIYHAGESVDSLCFVVSGSLEVIQDDEVVAILGKGDVFGDVFWKEATLAQSCANVRALTYCDLHVIKRDALQKVLEFYTAFSHSFSRNLILTYNLRKRIVFRKISDVKREEEERMKRKNEAPLILPPDHPVRRLFQRFRQQKEARLAAERGGRDLDDLDVEKGNVLTEHASANHSLVKASVVTVRESPATPVSFQAASTSGVPDHAKLQAPGSECLGPKGGGGDCAKRKSWARFKDACGKSEDWNKVSKAESMETLPERTKASGEATLKKTDSCDSGITKSDLRLDNVGEARSPQDRSPILAEVKHSFYPIPEQTLQATVLEGLTLLPRLVSNS

SEQ ID NO: 24253 - protein, 143 aa, Homo sapiens
MEPSTCRTMESEEDYVEEKESEKCVKEGVTNPSNSSQQALLKADYKALKNGVPSPIMATKIPKKVIAPVDTGDLEAGRRKRRRKRRSLAINLTNCKYESVRRAAQMCGLKEVGEDEEWTLYWTDCAVSLERVMDMKRTMSACT

SEQ ID NO: 24254 - protein, 359 aa, Homo sapiens
MQASPIRIPTVSNDIDWDFCFHMSQQTEIPAHQQTDELYPTGGCGESEEETKAKEKEKAIDCMSHPKEKLAQSQKKVAQLIKEKMNTQANKELIRCVILSRIIFGDHHWKCARALANLAYGYLTLRGLPVQAKKHATSAKNTLLTWKANTTSNKEKEEILEALVKLYYTLGVAWLLQNRGREAYFNLQKAERNMKELKELYKGGVCELQVSENDLTLALGRASLAIHRLNLALAYFEKAIGDVIAAKGDRTSDLISLYEEAAQIEQLRRNHNQAIQYLQQAHSVCVSLFTEVSPKTAEMSALLAKAYAMSGEAQHRDAVEIYFIRSINAYRATLGSEDFETLSTTEEFCKWLVQNGEKQ

SEQ ID NO: 24255 - protein, 543 aa, Homo sapiens
MKGLSGSRSHHHGVTCDSACDSLSHHSDRKPYLLSPVEHHPADHPYYTQRNSFQAECVGPFSDPLASSTFPRRHYTSQQELKDECALVPRTLATKANRIPANLLDQFERQLPLSRDGYHTLQYKRTAVEHRSDSPGRIRHLVHSVQKLFTKSHSLEGPSKGSVNGGKASPDEAQAARYGKRSKSKERRAEPKARPSTSPGWWSSDDNLDGDMCIYHAPSGVMTMGRCPDRSASQYFLEAYNTISEQAVKASRSNNDVKCSTCANLPVSLDTPLLKKSAWSSTLTVSRAREVYQKASVNMDQAMVKSESCQQERSCQYLQVPQDEWTGYTPRGKDDEIPCRRMRSGSYIKAMGDEDSGDSDTSPKPSPKVAARRESYLKATQPSLTELTTLKISNEHSPKLQIRSHSYLRAVSEVSINRSLDSLDPAGLLTSPKFRSRNESYMRAMSTISQVSEMEVNGQFESVCESVFSELESQAVEALDLPMPGCFRMRSHSYVRAIEKGCSQDDECVSLRSSSPPRTTTTVRTIQSSTGSLDKKLESWALG

SEQ ID NO: 24256 - protein, 1177 aa, Homo sapiens
MANGGGGGGGSSGGGGGGGGSSLRMSSNIHANHLSLDASSSSSSSSSSSSSSSSSSSSSSVHEPKMDALIIPVTMEVPCDSRGQRMWWAFLASSMVTFFGGLFIILLWRTLKYLWTVCCHCGGKTKEAQKINNGSSQADGTLKPVDEKEEAVAAEVGWMTSVKDWAGVMISAQTLTGRVLVVLVFALSIGALVIYFIDSSNPIESCQNFYKDFTLQIDMAFNVFFLLYFGLRFIAANDKLWFWLEVNSVVDFFTVPPVFVSVYLNRSWLGLRFLRALRLIQFSEILQFLNILKTSNSIKLVNLLSIFISTWLTAAGFIHLVENSGDPWENFQNNQALTYWECVYLLMVTMSTVGYGDVYAKTTLGRLFMVFFILGGLAMFARYVPEIAALILSRNKFGGTFNKHGGRKHIVVCGHITLESVSNFLKDFLHKDRDDVNVEIVFLHNISPNLELEALFKRHFTQVEFYQGSVLNPHDLARVKIESADACLILANKYCADPDAEDASNIMRVISIKNYHPKIRIITQMLQYHNKAHLLNIPSWNWKEGDDAICLAELKLGFIAQSCLAQGLSTMLANLFSMRSFIKIEEDTWQKYYLEGVSNEMYTEYLSSAFVGLSFPTVCELCFVKLKLLMIAIEYKSANRESRILINPGNHLKIQEGTLGFFIASDAKEVKRAFFYCKACHDDITDPKRIKKCGCKRLEDEQPSTLSPKKKQRNGGMRNSPNTSPKLMRHDPLLIPGNDQIDNMDSNVKKYDSTGMFHWCAPKEIEKVILTRSEAAMTVLSGHVVVCIFGDVSSALIGLRNLVMPLRASNFHYHELKHIVFVGSIEYLKREWETLHNFPKVSILPGTPLSRADLRAVNINLCDMCVILSANQNNIDDTSLQDKECILASLNIKSMQFDDSIGVLQANSQGFTPPGMDRSSPDNSPVHGMLRQPSITTGVNIPIITELVNDTNVQFLDQDDDDDPDTELYLTQPFACGTAFAVSVLDSLMSATYFNDNILTLIRTLVTGGATPELEALIAEENALRGGYSTPQTLANRDRCRVAQLALLDGPFADLGDGGCYGDLFCKALKTYNMLCFGIYRLRDAHLSTPSQCTKRYVITNPPYEFELVPTDLIFCLMQFDHNAGQSRASLSHSSHSSQSSSKKSSSVHSIPSTANRQNRPKSRESRDKQKKEMVYR

SEQ ID NO: 24257 - protein, 897 aa, Homo sapiens
MLLFFTLGLLIHFVFFASIFDIYFTSPLVHGMTPQFTPLPPPARRLVLFVADGLRADALYELDENGNSRAPFIRNIIMHEGSWGISHTRVPTESRPGHVALIAGFYEDVSAVAKGWKENPVEFDSLFNESKYTWSWGSPDILPMFAKGASGDHVYTYSYDAKREDFGAQDATKLDTWVFDNVKDFFHHARNNQSLFSKINEEKIVFFLHLLGIDTNGHAHRPSSRDYKHNIKKVDDGVKEIVSMFNHFYGNDGKTTFIFTSDHGMTDWGSHGAGHPSETLTPLVTWGAGIKYPQRVSAQQFDDAFLKEWRLENWKRLDVNQADIAPLMTSLIGVPFPLNSVGILPVDYLNNTDLFKAESMFTNAVQILEQFKVKMTQKKEVTLPFLFTPFKLLSDSKQFNILRKARSYIKHRKFDEVVSLCKELIHLALKGLSYYHTYDRFFLGVNVVIGFVGWISYASLLIIKSHSNLIKGVSKEVKKPSHLLPCSFVAIGILVAFFLLIQACPWTYYVYGLLPLPIWYAVLREFQVIQDLVVSVLTYPLSHFVGYLLAFTLGIEVLVLSFFYRYMLTAGLTAFAAWPFLTRLWTRAKMTSLSWTFFSLLLAVFPLMPVVGRKPDISLVMGAGLLVLLLSLCVVTSLMKRKDSFIKEELLVHLLQVLSTVLSMYVVYSTQSSLLRKQGLPLMNQIISWATLASSLVVPLLSSPVLFQRLFSILLSLMSTYLLLSTGYEALFPLVLSCLMFVWINIEQETLQQSGVCCKQKLTSIQFSYNTDITQFRQLYLDDIRRAFFLVFFLVTAFFGTGNIASINSFDLASVYCFLTVFSPFMMGALMMWKILIPFVLVMCAFEAVQLTTQLSSKSLFLIVLVISDIMALHFFFLVKDYGSWLDIGTRKLPSEK

SEQ ID NO: 24258 - protein, 1412 aa, Homo sapiens
MAKFGVHRILLLAISLTKCLESTKLLADLKKCGDLECEALINRVSAMRDYRGPDCRYLNFTKGEEISVYVKLAGEREDLWAGSKGKEFGYFPRDAVQIEEVFISEEIQMSTKESDFLCLLGVSYTFDNEDSELNGDYGENIYPYEEDKDEKSSIYESDFQIEPGFYATYESTLFEDQVPALEAPEDIGSTSESKDWEEVVVESMEQDRIPEVHVPPSSAVSGVKEWFGLGGEQAEEKAFESVIEPVQESSFRSRKIAVEDENDLEELNNGEPQTEHQQESESEIDSVPKTQSELASESEHIPKPQSTGWFGGGFTSYLGFGDEDTGLELIAEESNPPLQDFPNSISSDKEATVPCTEILTEKKDTITNDSLSLKPSWFDFGFAILGFAYAKEDKIMLDDRKNEEDGGADEHEHPLTSELDPEKEQEIETIKIIETEDQIDKKPVSEKTDESDTIPYLKKFLYNFDNPWNFQNIPKETELPFPKQILDQNNVIENEETGEFSIDNYPTDNTKVMIFKSSYSLSDMVSNIELPTRIHEEVYFEPSSSKDSDENSKPSVDTEGPALVEIDRSVENTLLNSQMVSTDNSLSSQNYISQKEDASEFQILKYLFQIDVYDFMNSAFSPIVILTERVVAALPEGMRPDSNLYGFPWELVICAAVVGFFAVLFFLWRSFRSVRSRLYVGREKKLALMLSGLIEEKSKLLEKFSLVQKEYEGYEVESSLKDASFEKEATEAQSLEATCEKLNRSNSELEDEILCLEKELKEEKSKHSEQDELMADISKRIQSLEDESKSLKSQVAEAKMTFKIFQMNEERLKIAIKDALNENSQLQESQKQLLQEAEVWKEQVSELNKQKVTFEDSKVHAEQVLNDKESHIKTLTERLLKMKDWAAMLGEDITDDDNLELEMNSESENGAYLDNPPKGALKKLIHAAKLNASLKTLEGERNQIYIQLSEVDKTKEELTEHIKNLQTEQASLQSENTHFENENQKLQQKLKVMTELYQENEMKLHRKLTVEENYRLEKEEKLSKVDEKISHATEELETYRKRAKDLEEELERTIHSYQGQIISHEKKAHDNWLAARNAERNLNDLRKENAHNRQKLTETELKFELLEKDPYALDVPNTAFGREHSPYGPSPLGWPSSETRAFLSPPTLLEGPLRLSPLLPGGGGRGSRGPGNPLDHQITNERGESSCDRLTDPHRAPSDTGSLSPPWDQDRRMMFPPPGQSYPDSALPPQRQDRFCSNSGRLSGPAELRSFNMPSLDKMDGSMPSEMESSRNDTKDDLGNLNVPDSSLPAENEATGPGFVPPPLAPIRGPLFPVDARGPFLRRGPPFPPPPPGAMFGASRDYFPPGDFPGPPPAPFAMRNVYPPRGFPPYLPPRPGFFPPPPHSEGRSEFPSGLIPPSNEPATEHPEPQQET

SEQ ID NO: 24259 - protein, 354 aa, Homo sapiens
MTMAGGRRGLVAPQNTFLENIVRRSNDTNFVLGNAQIVDWPIVYSNDGFCKLSGYHRAEVMQKSSTCSFMYGELTDKDTIEKVRQTFENYEMNSFEILMYKKNRTPVWFFVKIAPIRNEQDKVVLFLCTFSDITAFKQPIEDDSCKGWGKFARLTRALTSSRGVLQQLAPSVQKGENVHKHSRLAEVLQLGSDILPQYKQEAPKTPPHIILHYCVFKTTWDWIILILTFYTAILVPYNVSFKTRQNNVAWLVVDSIVDVIFLVDIVLNFHTTFVGPAGEVISDPKLIRMNYLKTWFVIDLLSCLPYDVINAFENVDEVSAFMGDPGKIGFADQIPPPLEGRESQHFSMPPSSGM

SEQ ID NO: 24260 - protein, 847 aa, Homo sapiens
MLLFFTLGLLIHFVFFASIFDIYFTSPLVHGMTPQFTPLPPPARRLVLFVADGLRADALYELDENGNSRAPFIRNIIMHEGSWGISHTRVPTESRPGHVALIAGFYEDVSAVAKGWKENPVEFDSLFNESKYTWSWGSPDILPMFAKGIDTNGHAHRPSSRDYKHNIKKVDDGVKEIVSMFNHFYGNDGKTTFIFTSDHGMTDWGSHGAGHPSETLTPLVTWGAGIKYPQRVSAQQFDDAFLKEWRLENWKRLDVNQGILPVDYLNNTDLFKAESMFTNAVQILEQFKVKMTQKKEVTLPFLFTPFKLLSDSKQFNILRKARSYIKHRKFDEVVSLCKELIHLALKGLSYYHTYDRFFLGVNVVIGFVGWISYASLLIIKSHSNLIKGVSKEVKKPSHLLPCSFVAIGILVAFFLLIQACPWTYYVYGLLPLPIWYAVLREFQVIQDLVVSVLTYPLSHFVGYLLAFTLGIEVLVLSFFYRYMLTAGLTAFAAWPFLTRLWTRAKMTSLSWTFFSLLLAVFPLMPVVGRKPDISLVMGAGLLVLLLSLCVVTSLMKRKDSFIKEELLVHLLQVLSTVLSMYVVYSTQSSLLRKQGLPLMNQIISWATLASSLVVPLLSSPVLFQRLFSILLSLMSTYLLLSTGYEALFPLVLSCLMFVWINIEQETLQQSGVCCKQKLTSIQFSYNTDITQFRQLYLDDIRRAFFLVFFLVTAFFGTGNIASINSFDLASVYCFLTVFSPFMMGALMMWKILIPFVLVMCAFEAVQLTTQLSSKSLFLIVLVISDIMALHFFFLVKDYGSWLDIGTSISHYVIVMSMTIFLVFLNGLAQLLTTKKLRLCGKPKSHFM

SEQ ID NO: 24261 - protein, 487 aa, Homo sapiens
MERSGQRVTTWDCDQGKHSDSDYREDGMDLGSDAGSSSSSSRASSQSNSTKVTPCSECKSSSSPGGSLDLVSALEDYEEPFPVYQKKVIDEWAPEEDGEEEEEEDERDQRGYRDDRSPAREPGDVSARTRSGGGGGRSATTAMPPPVPNGNLHQHDPQDLRHNGNVVVAGRPSCSRGPRRAIQKPQPAGGRRSGRGPAAGGLCLQPPDGGTCVPEEPPVPPMDWEALEKHLAGLQFREQEVRNQGQARTNSTSAQKNERESIRQKLALGSFFDDGPGIYTSCSKSGKPSLSSRLQSGMNLQICFVNDSGSDKDSDADDSKTETSLDTPLSPMSKQSSSYSDRDTTEEESESLDDMDFLTRQKKLQAEAKMALAMAKPMAKMQVEVEKQNRKKSPVADLLPHMPHISECLMKRSLKPTDLRDMTIGQLQVIVNDLHSQIESLNEELVQLLLIRDELHTEQDAMLVDIEDLTRHAESQQKHMAEKMPAK

SEQ ID NO: 24262 - protein, 505 aa, Homo sapiens [sequence omitted]

SEQ ID NO: 24263 - protein, 815 aa, Homo sapiens
MEPSTCRTMESEEDYVEEKESEKCVKEGVTNPSNSSQQALLKADYKALKNGVPSPIMATKIPKKVIAPVDTGDLEAGRRKRRRKRRSLAINLTNCKYESVRRAAQMCGLKEVGEDEEWTLYWTDCAVSLERVMDMKRFQKINHFPGMTEICRKDLLARNLNRMYKLYPSEYNIFPRTWCLPADYGDFQSYGRQRKARTYICKPDSGCQGRGIFITRNPREIKPGEHMICQQYISKPLLIDGFKFDMRVYVLITSCDPLRIFTYEEGLARFATTPYMEPSHNNLDNVCMHLTNYAINKHNENFVRDGAVGSKRKLSTLNIWLQEHSYNPGELWGDIEDIIIKTIISAHSVLRHNYRTCFPQYLNGGTCACFEILGFDILLDHKLKPWLLEVNHSPSFTTDSCLDQEVKDALLCDAMTLVNLRGCDKRKVMEEDKRRVKERLFQCYRQPRESRKEKTESSHVAMLDQERYEDSHLGKYRRIYPGPDTEKYARFFKHNGSLFQETAASKAREECARQQLEEIRLKQEQQETSGTKRQKARDQNQGESAGEKSRPRAGLQSLSTHLAYRNRNWEKELLPGQLDTMRPQEIVEEEELERMKALLQRETLIRSLGIVEQLTRLQHPGPQGQKKLHESRDRLGSQELKSMSLVLLVLLRGAATEQGAPHFLHPVLPHESIPRILGALPSMNAAIPHVPRYHLQPKNFNWTGEPAAINSCSLSMKKAGRCYFSSARIRLTSQGQASRRLEAINRVLAGSVPPTLTPKQGYFLQPERVASDSWTECTLPSMVNSEHRAAKVPLCPASAPMLQRSRALLNINQFR

SEQ ID NO: 24264 - protein, 684 aa, Homo sapiens
MSLHQFLLEPITCHAWNRDRTQIALSPNNHEVHIYKKNGSQWVKAHELKEHNGHITGIDWAPKSDRIVTCGADRNAYVWSQKDGVWKPTLVILRINRAATFVKWSPLENKFAVGSGARLISVCYFESENDWWVSKHIKKPIRSTVLSLDWHPNNVLLAAGSCDFKCRVFSAYIKEVDEKPASTPWGSKMPFGQLMSEFGGSGTGGWVHGVSFSASGSRLAWVSHDSTVSVADASKSVQVSTLKTEFLPLLSVSFVSENSVVAAGHDCCPMLFNYDDRGCLTFVSKLDIPKQSIQRNMSAMERFRNMDKRATTEDRNTALETLHQNSITSQAAMAYHSFLVEPISCHAWNKDRTQIAICPNNHEVHIYEKSGAKWTKVHELKEHNGQVTGIDWAPESNRIVTCGTDRNAYVWTLKGRTWKPTLVILRINRAARCVRWAPNENKFAVGSGSRVISICYFEQENDWWVCKHIKKPIRSTVLSLDWHPNNVLLAAGSCDFKCRIFSAYIKEVEERPAPTPWGSKMPFGELMFESSSSCGWVHGVCFSASGSRVAWVSHDSTVCLADADKKMAVATLASETLPLLALTFITDNSLVAAGHDCFPVLFTYDAAAGMLSFGGRLDVPKQSSQRGLTARERFQNLDKKASSEGGTAAGAGLDSLHKNSVRSRCSAAARPSARSSAPLAWMAA

SEQ ID NO: 24265 - protein, 438 aa, Homo sapiens
MERRRITSAARRSYVSSGEMMVGGLAPGRRLGPGTRLSLARMPPPLPTRVDFSLAGALNAGFKETRASERAEMMELNDRFASYIEKVRFLEQQNKALAAELNQLRAKEPTKLADVYQAELRELRLRLDQLTANSARLEVERDNLAQDLATVRQKLQDETNLRLEAENNLAAYRQEADEATLARLDLERKIESLEEEIRFLRKIHEEEVRELQEQLARQQVHVELDVAKPDLTAALKEIRTQYEAMASSNMHEAEEWYRSKFADLTDAAARNAELLRQAKHEANDYRRQLQSLTCDLESLRGTNESLERQMREQEERHVREAASYQEALARLEEEGQSLKDEMARHLQEYQDLLNVKLALDIEIATYRKLLEGEENRITIPVQTFSNLQIRGQYSRASWEGHWSPAPSSRACRLLQTGTEDQGKGIQLSLGAFVTLQRS

SEQ ID NO: 24266 - protein, 665 aa, Homo sapiens
MVSYWDTGVLLCALLSCLLLTGSSSGSKLKDPELSLKGTQHIMQAGQTLHLQCRGEAAHKWSLPEMVSKESERLSITKSACGRNGKQFCSTLTLNTAQANHTGFYSCKYLAVPTSKKKETESAIYIFISDTGRPFVEMYSEIPEIIHMTEGRELVIPCRVTSPNITVTLKKFPLDTLIPDGKRIIWDSRKGFIISNATYKEIGLLTCEATVNGHLYKTNYLTHRQTNTIIDVQISTPRPVKLLRGHTLVLNCTATTPLNTRVQMTWSYPDEKNKRASVRRRIDQSNSHANIFYSVLTIDKMQNKDKGLYTCRVRSGPSFKSVNTSVHIYDKAFITVKHRKQQVLETVAGKRSYRLSMKVKAFPSPEVVWLKDGLPATEKSARYLTRGYSLIIKDVTEEDAGNYTILLSIKQSNVFKNLTATLIVNVKPQIYEKAVSSFPDPALYPLGSRQILTCTAYGIPQPTIKWFWHPCNHNHSEARCDFCSNNEESFILDADSNMGNRIESITQRMAIIEGKNKMASTLVVADSRISGIYICIASNKVGTVGRNISFYITDVPNGFHVNLEKMPTEGEDLKLSCTVNKFLYRDVTWILLRTVNNRTMHYSISKQKMAITKEHSITLNLTIMNVSLQDSGTYACRARNVYTGEEILQKKEITIRGSEEMLLPK

SEQ ID NO: 24267 - protein, 621 aa, Homo sapiens
MLLFFTLGLLIHFVFFASIFDIYFTSPLVHGMTPQFTPLPPPARRLVLFVADGLRADALYELDENGNSRAPFIRNIIMHEGSWGISHTRVPTESRPGHVALIAGFYEDVSAVAKGWKENPVEFDSLFNESKYTWSWGSPDILPMFAKGASGDHVYTYSYDAKREDFGAQDATKLDTWVFDNVKDFFHHARNNQSLFSKINEEKIVFFLHLLGIDTNGHAHRPSSRDYKHNIKKVDDGVKEIVSMFNHFYGNDGKTTFIFTSDHGMTDWGSHGAGHPSETLTPLVTWGAGIKYPQRVSAQQFDDAFLKEWRLENWKRLDVNQADIAPLMTSLIGVPFPLNSVGILPVDYLNNTDLFKAESMFTNAVQILEQFKVKMTQKKEVTLPFLFTPFKLLSDSKQFNILRKARSYIKHRKFDEVVSLCKELIHLALKGLSYYHTYDRFFLGVNVVIGFVGWISYASLLIIKSHSNLIKGVSKEVKKPSHLLPCSFVAIGILVAFFLLIQACPWTYYVYGLLPLPIWYAVLREFQVIQDLVVSVLTYPLSHFVGYLLAFTLGIEVLVLSFFYRYMLTAGLTAFAAWPFLTRLWTRAKMTSLSWTFFSLLLAVFPLMPVVGRKPDISLVC

SEQ ID NO: 24268 - protein, 797 aa, Homo sapiens
MSLWGLVSKMPPEKVQRLYVDFPQHLRHLLGDWLESQPWEFLVGSDAFCCNLASALLSDTVQHLQASVGEQGEGSTILQHISTLESIYQRDPLKLVATFRQILQGEKKAVMEQFRHLPMPFHWKQEELKFKTGLRRLQHRVGEIHLLREALQKGAEAGQVSLHSLIETPANGTGPSEALAMLLQETTGELEAAKALVLKRIQIWKRQQQLAGNGAPFEESLAPLQERCESLVDIYSQLQQEVGAAGGELEPKTRASLTGRLDEVLRTLVTSCFLVEKQPPQVLKTQTKFQAGVRFLLGLRFLGAPAKPPLVRADMVTEKQARELSVPQGPGAGAESTGEIINNTVPLENSIPGNCCSALFKNLLLKKIKRCERKGTESVTEEKCAVLFSASFTLGPGKLPIQLQALSLPLVVIVHGNQDNNAKATILWDNAFSEMDRVPFVVAERVPWEKMCETLNLKFMAEVGTNRGLLPEHFLFLAQKIFNDNSLSMEAFQHRSVSWSQFNKEILLGRGFTFWQWFDGVLDLTKRCLRSYWSDRLIIGFISKQYVTSLLLNEPDGTFLLRFSDSEIGGITIAHVIRGQDGSPQIENIQPFSAKDLSIRSLGDRIRDLAQLKNLYPKKPKDEAFRSHYKPEQMGKDGRGYVPATIKMTVERDQPLPTPELQMPTMVPSYDLGMAPDSSMSMQLGPDMVPQVYPPHSHSIPPYQGLSPEESVNVLSAFQEPHLQMPPSLGQMSLPFDQPHPQGLLPCQPQEHAVSSPDPLLCSDVTMVEDSCLSQPVTAFPQGTWIGEDIFPPLLPP

SEQ ID NO: 24269 - protein, 1230 aa, Homo sapiens
MANGGGGGGGSSGGGGGGGGSSLRMSSNIHANHLSLDASSSSSSSSSSSSSSSSSSSSSSVHEPKMDALIIPVTMEVPCDSRGQRMWWAFLASSMVTFFGGLFIILLWRTLKYLWTVCCHCGGKTKEAQKINNGSSQADGTLKPVDEKEEAVAAEVGWMTSVKDWAGVMISAQTLTGRVLVVLVFALSIGALVIYFIDSSNPIESCQNFYKDFTLQIDMAFNVFFLLYFGLRFIAANDKLWFWLEVNSVVDFFTVPPVFVSVYLNRSWLGLRFLRALRLIQFSEILQFLNILKTSNSIKLVNLLSIFISTWLTAAGFIHLVENSGDPWENFQNNQALTYWECVYLLMVTMSTVGYGDVYAKTTLGRLFMVFFILGGLAMFARYVPEIAALILSRNKFGGTFNKHGGRKHIVVCGHITLESVSNFLKDFLHKDRDDVNVEIVFLHNISPNLELEALFKRHFTQVEFYQGSVLNPHDLARVKIESADACLILANKYCADPDAEDASNIMRVISIKNYHPKIRIITQMLQYHNKAHLLNIPSWNWKEGDDAICLAELKLGFIAQSCLAQGLSTMLANLFSMRSFIKIEEDTWQKYYLEGVSNEMYTEYLSSAFVGLSFPTVCELCFVKLKLLMIAIEYKSANRESRILINPGNHLKIQEGTLGFFIASDAKEVKRAFFYCKACHDDITDPKRIKKCGCKRLEDEQPSTLSPKKKQRNGGMRNSPNTSPKLMRHDPLLIPGNDQIDNMDSNVKKYDSTGMFHWCAPKEIEKVILTRSEAAMTVLSGHVVVCIFGDVSSALIGLRNLVMPLRASNFHYHELKHIVFVGSIEYLKREWETLHNFPKVSILPGTPLSRADLRAVNINLCDMCVILSANQNNIDDTSLQDKECILASLNIKSMQFDDSIGVLQANSQGFTPPGMDRSSPDNSPVHGMLRQPSITTGVNIPIITELVNDTNVQFLDQDDDDDPDTELYLTQPFACGTAFAVSVLDSLMSATYFNDNILTLIRTLVTGGATPELEALIAEENALRGGYSTPQTLANRDRCRVAQLALLDGPFADLGDGGCYGDLFCKALKTYNMLCFGIYRLRDAHLSTPSQCTKRYVITNPPYEFELVPTDLIFCLMQFDHNAGQSRASLSHSSHSSQSSSKKSSSVHSIPSTANRQNRPKSRESRDKQNATRMNRMGQEKKWFTDEPDNAYPRNIQIKPMSTHMANQINQYKSTSSLIPPIREVEDEC

SEQ ID NO: 24270 - protein, 357 aa, Homo sapiens
MLKLVIIENMAEIMLFSLDLLLFSTDILCFNFPSKMIKLPGFITIUIFFYPQASFGISANTILLLFHIFTFVFSHRSKSIDMIISHLSLIHILLLFTQAILVSLDFFGSQNTQDDLRYKVIVFLNKVMRGLSICTPCLLSVLQAIISPSIFSLAKLKHPSASHILGFFLFSWVLNMFIGVIFCCTLRLPPVKRGQSSVCHTALFLFAHELHPQETVFHTNDFEGCHLYRVHGPLKRLHGDYFIQTIRGYLSAFTQPACPRVSPVKRASQAILLLVSFVFTYWVDFTFSFSGGVTWINDSLLVWLQVIVANSYAAISPLMLIYADNQIFKTLQMLWFKYLSPPKLMLKFNRQCGSTKK

SEQ ID NO: 24271 - protein, 575 aa, Homo sapiens
TVCELCFVKLKLLMIAIEYKSANRESRILINPGNHLKIQEGTLGFFIASDAKEVKRPPQLCLPLAAQKRAFFYCKACHDDITDPKRIKKCGCKRLEDEQPSTLSPKKKQRNGGMRNSPNTSPKLMRHDPLLIPGNDQIDNMDSNVKKYDSTGMFHWCAPKEIEKVILTRSEAAMTVLSGHVVVCIFGDVSSALIGLRNLVMPLRASNFHYHELKHIVFVGSIEYLKREWETLHNFPKVSILPGTPLSRADLRAVNINLCDMCVILSANQNNIDDTSLQDKECILASLNIKSMQFDDSIGVLQANSQGFTPPGMDRSSPDNSPVHGMLRQPSITTGVNIPIITELVNDTNVQFLDQDDDDDPDTELYLTQPFACGTAFAVSVLDSLMSATYFNDNILTLIRTLVTGGATPELEALIAEENALRGGYSTPQTLANRDRCRVAQLALLDGPFADLGDGGCYGDLFCKALKTYNMLCFGIYRLRDAHLSTPSQCTKRYVITNPPYEFELVPTDLIFCLMQFDHNAGQSRASLSHSSHSSQSSSKKSSSVHSIPSTANRQNRPKSRESRDKQKYVQEERL

SEQ ID NO: 24272 - protein, 318 aa, Homo sapiens
MFANLKYVSLGILVFQTTSLVLTMRYSRTLKEEGPRYLSSTAVVVAELLKIMACILLVYKDSKCSLRALNRVLHDEILNKPMETLKLAIPSGIYTLQNNLLYVALSNLDAATYQVTYQLKILTTALFSVSMLSKKLGVYQWLSLVILMTGVAFVQWPSDSQLDSKELSAGSQFVGLMAVLTACFSSGFAGVYFEKILKETKQSVWIRNIQLGFFGSIFGLMGVYIYDGELVSKNGFFQGYNRLTWIVVVLQALGGLVIAAVIKYADNILKGFATSLSIILSTLISYFWLQDFVPTSPYSSMKYWVGQVQWLIPVIPTL

SEQ ID NO: 24273 - protein, 340 aa, Homo sapiens
KKIHTGEKPYICEECGKAFKYSSALNTHKRIHTGEKPYKCDKCDKAFIASSTLSKHEIIHTGKKPYKCEECGKAFNQSSTLTKHKKIHTGEKPYKCEECGKAFNQSSTLTKHKKIHTGEKPYVCEECGKAFKYSRILTTHKRIHTGEKPYKCNKCGKAFIASSTLILTRHKRVHTGEKPYKCEECGKAFKYSSTLSSHKRSHTGEKPYKCEECGKAFVASSTLSKHEIIHTGKKPYKCEECGKAFNQSSSLTKHKKIHTGEKPYKCEECGKAFNQSSSLTKHKKIHTGEKPYKCEECGKAFNQSSTLIKHKKIHTREKPYKCEECGKAFHLSTHLTTHKI

SEQ ID NO: 24274 - protein, 1084 aa, Homo sapiens
MGIQRRSGPLLTGLSVGLLLLFSWVTLVQPTSLSALVHHPHLCQTTRDVHGRHYPGFFCPRLSDSPEEAYCCHLQAAGGSCCTRAEFEALYQVNLSALPPPPILRGPGPLLVLGLYNLLVVTLMTVDLVHFCCGRGRSLGWSHRRPPSGSSAASSLQASSVEQLRKEGNELFKCGDYGGALAAYTQALGLDATPQDQAVLHRNRAACHLKLEDYDKAETEASKAIEKDGGDVKALYRRSQALEKLGRLDQAVLDLQRCVSLEPKNKVFQEALRNIGGQIQEKVRYMSSTDAKVEQMFQILLDPEEKGTEKKQKASQNLVVLAREDAGAEKIFRSNGVQLLQRLLDMGETDLMLAALRTLVGICSEHQSRTVATLSILGTRRVVSILGVESQAVSLAACHLLQVMFDALKEGVKKGFRGKEGAIIVDPARELKVLISNLLDLLTEVGVSGQGRDNALTLLIKAVPRKSLKDPNNSLTLWVIDQGLKKILEVGGSLQDPPGELAVTANSRMSASILLSKLFDDLKCDAERENFHRLCENYIKSWFEGQGLAGKLRAIQTVSCLLQGPCDAGNRALELSGVMESVIALCASEQEEEQLVAVEALIHAAGKAKRASFITANGVSLLKDLYKCSEKDSIRIRALVGLCKLGSAGGTDFSMKQFAEGSTLKLAKQCRKWLCNDQIDAGTRRWAVEGLAYLTFDADVKEEFVEDAAALKALFQLSRLEERSVLFAVASALVNCTNSYDYEEPDPKMVELAKYAKQHVPEQHPKDKPSFVRARVKKLLAAGVVSAMVCMVKTESPVLTSSCRELLSRVFLALVEEVEDRGTVVAQGGGRALIPLALEGTDVGQTKAAQALAKLTITSNPEMTFPGERIYEVVRPLVSLLHLNCSGLQNFEALMALTNLAGISERLRQKILKEKAVPMIEGYMFEEHEMIRRAATECMCNLAMSKEVQDLFEAQGNDRLKLLVLYSGEDDELLQRAAAGGLAMLTSMRPTLCSRIPQVTTHWLEILQALLLSSNQELQHRGAVVVLNMVEASREIASTLMESEMMEILSVLAKGDHSPVTRAAAACLDKAVEYGLIQPNQDGE

SEQ ID NO: 24275 - protein, 546 aa, Homo sapiens
MLSRLRVVSTTCTLACRHLHIKEKGKPLMLNPRTNKGMAFTLQERQMLGLQGLLPPKIETQDIQALRFHRNLKKMTSPLEKYIYIMGIQERNEKLFYRILQDDIESLMPIVYTPTVGLACSQYGHIFRRPKGLFISISDRGHVRSIVDNWPENHVKAVVVTDGERILGLGDLGVYGMGIPVGKLCLYTACAGIRPDRCLPVCIDVGTDNIALLKDPFYMGLYQKRDRTQQYDDLIDEFMKAITDRYGRNTLIQFEDFGNHNAFRFLRKYREKYCTFNDDIQGTAAVALAGLLAAQKVISKPISEHKILFLGAGEGRKAKIDSYQEPFTHSAPESIPDTFEDAVNILKPSTIIGVAGAGRLFTPDVIRAMASINERPVIFALSNPTAQAECTAEEAYTLTEGRCLFASGSPFGPVKLTDGRVFTPGQGNNVYIFPGVALAVILCNTRHISDSVFLEAAKALTSQLTDEELAQGRLYPPLANIQEVSINIAIKVTEYLYANKMAFRYPEPEDKAKYVKERTWRSEYDSLLPDVYEWPESASSPPVITE

SEQ ID NO: 24276 - protein, 358 aa, Homo sapiens
SNVTSFQRRGPRASVTNDSGPRLVSIAGTRPSVRNGQLLVSTGLPALDQLLGGGLAVGTVLLIEEDKYNIYSPLLFKYFLAEGIVNGHTLLVASAKEDPANILQQIGPVSSSRFGHYYDASKRMPQELIEASNWHGFFLPEKISSTLKVEPCSLTPGYTKLLQFIQNIIYEEGFDGSNPQKKQRNILRIGIQNLGSPLWGDDICCAENGGNSHSLTKFLYVLRGLLRTSLSACIITMPTHLIQNKAIIARVTTLSDVVVGLESFIGSERETNPLYKDYHGLIHIRQIPRLNNLICDESDVKDLAFKLKRKLFTIERLHLPPDLSDTVSRSSKMDLAESAKRLGPGCGMMAGGKKHLDF

SEQ ID NO: 24277 - protein, 1233 aa, Homo sapiens
MANGGGGGGGSSGGGGGGGGSSLRMSSNIHANHLSLDASSSSSSSSSSSSSSSSSSSSSSVHEPKMDALIIPVTMEVPCDSRGQRMWWAFLASSMVTFFGGLFIILLWRTLKYLWTVCCHCGGKTKEAQKINNGSSQADGTLKPVDEKEEAVAAEVGWMTSVKDWAGVMISAQTLTGRVLVVLVFALSIGALVIYFIDSSNPIESCQNFYKDFTLQIDMAFNVFFLLYFGLRFIAANDKLWFWLEVNSVVDFFTVPPVFVSVYLNRSWLGLRFLRALRLIQFSEILQFLNILKTSNSIKLVNLLSIFISTWLTAAGFIHLVENSGDPWENFQNNQALTYWECVYLLMVTMSTVGYGDVYAKTTLGRLFMVFFILGGLAMFARYVPEIAALILSRNKFGGTFNKHGGRKHIVVCGHITLESVSNFLKDFLHKDRDDVNVEIVFLHNISPNLELEALFKRHFTQVEFYQGSVLNPHDLARVKIESADACLILANKYCADPDAEDASNIMRVISIKNYHPKIRIITQMLQYHNKAHLLNIPSWNWKEGDDAICLAELKLGFIAQSCLAQGLSTMLANLFSMRSFIKIEEDTWQKYYLEGVSNEMYTEYLSSAFVGLSFPTVCELCFVKLKLLMIAIEYKSANRESRILINPGNHLKIQEGTLGFFIASDAKEVKRAFFYCKACHDDITDPKRIKKCGCKRLIYFEDEQPSTLSPKKKQRNGGMRNSPNTSPKLMRHDPLLIPGNDQIDNMDSNVKKYDSTGMFHWCAPKEIEKVILTRSEAAMTVLSGHVVVCIFGDVSSALIGLRNLVMPLRASNFHYHELKHIVFVGSIEYLKREWETLHNFPKVSILPGTPLSRADLRAVNINLCDMCVILSANQNNIDDTSLQDKECILASLNIKSMQFDDSIGVLQANSQGFTPPGMDRSSPDNSPVHGMLRQPSITTGVNIPIITELVNDTNVQFLDQDDDDDPDTELYLTQPFACGTAFAVSVLDSLMSATYFNDNILTLIRTLVTGGATPELEALIAEENALRGGYSTPQTLANRDRCRVAQLALLDGPFADLGDGGCYGDLFCKALKTYNMLCFGIYRLRDAHLSTPSQCTKRYVITNPPYEFELVPTDLIFCLMQFDHNAGQSRASLSHSSHSSQSSSKKSSSVHSIPSTANRQNRPKSRESRDKQNATRMNRMGQEKKWFTDEPDNAYPRNIQIKPMSTHMANQINQYKSTSSLIPPIREVEDEC

SEQ ID NO: 24278 - protein, 386 aa, Homo sapiens
MAAVATCGSVAASTGSAVATASKSNVTSFQRRGPRASVTNDSGPRLVSIAGTRPSVRNGQLLVSTGLPALDQLLGGGLAVGTVLLIEEDKYNIYSPLLFKYFLAEGIVNGHTLLVASAKEDPANILQELPAPLLDDKCKKEFDEDVYNHKTPESNIKMKIAWRYQLLPKMEIGPVSSSRFGHYYDASKRMPQELIEASNWHGFFLPEKISSTLKVEPCSLTPGYTKLLQFIQNIIYEEGFDGSNPQKKQRNILRIGIQNLGSPLWGDDICCAENGGNSHSLTKFLYVLRGLLRTSLSACIITMPTHLIQNKAIIARVTTLSDVVVGLESFIGSERETNPLYKDYHGLIHIRQIPRLNNLICDESDVKDLAFKLKRKLFTIEVDFIS

SEQ ID NO: 24279 - protein, 1213 aa, Homo sapiens
MVCTQKSKKTEFKTLEGVITRTKHGEKVSLSSKCAEIDREMISSLGVSKAVLNNVIFCHQEDSNWPLSEGKALKQKFDEIFSATRYIKALETLRQVRQTQGQKVKEYQMELKYLKQYKEKACEIRDQITSKEAQLTSSKEIVKSYENELDPLKNRLKEIEHNLSKIMKLDNEIKALDSRKKQMEKDNSELEEKMEKVFQGTDEQLNDLYHNHQRTVREKERKLVDCHRELEKLNKESRLLNQEKSELLVEQGRLQLQADRHQEHIRARDSLIQSLATQLELDGFERGPFSERQIKNFHKLVRERQEGEAKTANQLMNDFAEKETLKQKQIDEIRDKKTGLGRIIELKSEILSKKQNELKNVKYELQQLEGSSDRILELDQELIKAERELSKAEKNSNVETLKMEVISLQNEKADLDRTLRKLDQEMEQLNHHTTTRTQMEMLTKDKADKDEQIRKIKSRHSDELTSLLGYFPNKKQLEDWLHSKSKEINQTRDRLAKLNKELASSEQNKNHINNELKRKEEQLSSYEDKLFDVCGSQDFESDLDRLKEEIEKSSKQRAMLAGATAVYSQFITQLTDENQSCCPVCQRVFQTEAELQEVISDLQSKLRLAPDKLKSTESELKKKEKRRDEMLGLVPMRQSIIDLKEKEIPELRNKLQNVNRDIQRLKNDIEEQETLLGTIMPEEESAKVCLTDVTIMERFQMELKDVERKIAQQAAKLQGIDLDRTVQQVNQEKQEKQHKLDTVSSKIELNRKLIQDQQEQIQHLKSTTNELKSEKLQISTNLQRRQQLEEQTVELSTEVQSLYREIKDAKEQVSPLETTLEKFQQEKEELINKKNTSNKIAQDKLNDIKEKVKNIHGYMKDIENYIQDGKDDYKKQKETELNKVIAQLSECEKHKEKINEDMRLMRQDIDTQKIQERWLQDNLTLRKRNEELKEVEEERKQHLKEMGQMQVLQMKSEHQKLEENIDNIKRNHNLALGRQKGYEEEIIHFKKELREPQFRDAEEKYREMMIVMRTTELVNKDLDIYYKTLDQAIMKFHSMKMEEINKIIRDLWRSTYRGQDIEYIEIRSDADENVSASDKRRNYNYRVVMLKGDTALDMRGRCSAGQKVLASLIIRLALAETFCLNCGIIALDEPTTNLDRENIESLAHALVEIIKSRSQQRNFQLLVITHDEDFVELLGRSEYVEKFYRIKKNIDQCSEIVKCSVSSLGFNVH

SEQ ID NO: 24280 - protein, 319 aa, Homo sapiens
MVAQAWRTSMRKQREEACFRFLIVLGCLILAVLTTFKEYETVSGDWLLLLETFAIFIFGAEFALRIWAAGCCCRYKGWRGRLKFARKPLCMLDIFVLIASVPVVAVGNQGNVLATSLRSLRFLQILRMLRMDRRGGTWKLLGSAICAHSKELITAWYIGFLTLILSSFLVYLVEKDVPEVDAQGEEMKEEFETYADALWWGLITLATIGYGDKTPKTWEGRLIAATFSLIGVSFFALPAGILGSGLALKVQEQHRQKHFEKRRKPAAELIQAAWRYYATNPNRIDLVATWRFYESVVSFPFFRKEQLEAASRCHRRKSF

SEQ ID NO: 24281 - protein, 1020 aa, Homo sapiens
EAQKINNGSSQADGTLKPVDEKEEAVAAEVGWMTSVKDWAGVMISAQTLTGRVLVVLVFALSIGALVIYFIDSSNPIESCQNFYKDFTLQIDMAFNVFFLLYFGLRFIAANDKLWFWLEVNSVVDFFTVPPVFVSVYLNRSWLGLRFLRALRLIQFSEILQFLNILKTSNSIKLVNLLSIFISTWLTAAGFIHLVENSGDPWENFQNNQALTYWECVYLLMVTMSTVGYGDVYAKTTLGRLFMVFFILGGLAMFASYVPEIIELIGNRKKYGGSYSAVSGRKHIVVCGHITLESVSNFLKDFLHKDRDDVNVEIVFLHKVISIKNYHPKIRIITQMLQYHNKAHLLNIPSWNWKEGDDAICLAELKLGFIAQSCLAQGLSTMLANLFSMRSFIKIEEDTWQKYYLEGVSNEMYTEYLSSAFVGLSFPTVCELCFVKLKLLMIAIEYKSANRESRSRKRILINPGNHLKIQEGTLGFFIASDAKEVKRAFFYCKACHDDITDPKRIKKCGCKRLEDEQPSTLSPKKKQRNGGMRNSPNTSPKLMRHDPLLIPGNDQIDNMDSNVKKYDSTGMFHWCAPKEIEKVILTRSEAAMTVLSGHVVVCIFGDVSSALIGLRNLVMPLRASNFHYHELKHIVFVGSIEYLKREWETLHNFPKVSILPGTPLSRADLRAVNINLCDMCVILSANQNNIDDTSLQDKECILASLNIKSMQFDDSIGVLQANSQGFTPPGMDRSSPDNSPVHGMLRQPSITTGVNIPIITELAKPGKLPLVSVNQEKNSGTHILMITELVNDTNVQFLDQDDDDDPDTELYLTQPFACGTAFAVSVLDSLMSATYFNDNILTLIRTLVTGGATPELEALIAEENALRGGYSTPQTLANRDRCRVAQLALLDGPFADLGDGGCYGDLFCKALKTYNMLCFGIYRLRDAHLSTPSQCTKRYVITNPPYEFELVPTDLIFCLMQFDHNAGQSRASLSHSSHSSQSSSKKSSSVHSIPSTANRQNRPKSRESRDKQKYVQEERL

SEQ ID NO: 24282 - protein, 1160 aa, Homo sapiens
SSNIHANHLSLDASSSSSSSSSSSSSSSSSSSSSSVHEPKMDALIIPVTMEVPCDSRGQRMWWAFLASSMVTFFGGLFIILLWRTLKYLWTVCCHCGGKTKEAQKINNGSSQADGTLKPVDEKEEAVAAEVGWMTSVKDWAGVMISAQTLTGRVLVVLVFALSIGALVIYFIDSSNPIESCQNFYKDFTLQIDMAFNVFFLLYFGLRFIAANDKLWFWLEVNSVVDFFTVPPVFVSVYLNRSWLGLRFLRALRLIQFSEILQFLNILKTSNSIKLVNLLSIFISTWLTAAGFIHLVENSGDPWENFQNNQALTYWECVYLLMVTMSTVGYGDVYAKTTLGRLFMVFFILGGLAMFASYVPEIIELIGNRKKYGGSYSAVSGRKHIVVCGHITLESVSNFLKDFLHKDRDDVNVEIVFLHNISPNLELEALFKRHFTQVEFYQGSVLNPHDLARVKIESADACLILANKYCADPDAEDASNIMRVISIKNYHPKIRIITQMLQYHNKAHLLNIPSWNWKEGDDAICLAELKLGFIAQSCLAQGLSTMLANLFSMRSFIKIEEDTWQKYYLEGVSNEMYTEYLSSAFVGLSFPTVCELCFVKLKLLMIAIEYKSANRESRILINPGNHLKIQEGTLGFFIASDAKEVKRAFFYCKACHDDITDPKRIKKCGCKRLIYFKVAARSRYSKDPFEFKKETPNSRLVTEPVEDEQPSTLSPKKKQRNGGMRNSPNTSPKLMRHDPLLIPGNDQIDNMDSNVKKYDSTGMFHWCAPKEIEKVILTRSEAAMTVLSGHVVVCIFGDVSSALIGLRNLVMPLRASNFHYHELKHIVFVGSIEYLKREWETLHNFPKVSILPGTPLSRADLRAVNINLCDMCVILSANQNNIDDTSLQDKECILASLNIKSMQFDDSIGVLQANSQGFTPPGMDRSSPDNSPVHGMLRQPSITTGVNIPIITELVNDTNVQFLDQDDDDDPDTELYLTQPFACGTAFAVSVLDSLMSATYFNDNILTLIRTLVTGGATPELEALIAEENALRGGYSTPQTLANRDRCRVAQLALLDGPFADLGDGGCYGDLFCKALKTYNMLCFGIYRLRDAHLSTPSQCTKRYVITNPPYEFELVPTDLIFCLMQFDHNAGQSRASLSHSSHSSQSSSKKSSSVHSIPS

SEQ ID NO: 24283 - protein, 503 aa, Homo sapiens
GGAPLDNSADDADADGPGDSGDGEDELEMTKRLALSDSPDGRPGGFWRRWQPRIWALFEDPYSSRYARYVAFASLFFILVSITTFCLETHERFNPIVNKTEIENVRNGTQVRYYREAETEAFLTYIEGVCVVWFTFEFLMRVIFCPNKVEFIKNSLNIIDFVAILPFYLEVGLSGLSSKAAKDVLGFLRVVRFVRILRIFKLTRHFVGLRVLGHTLRASTNEFLLLIIFLALGVLIFATMIYYAERIGAQPNDPSASEHTHFKNIPIGFWWAVVTMTTLGYGDMYPQTWSGMLVGALCALAGVLTIAMPVPVIVNNFGMYYSLAMAKQKLPKKKKKHIPRPPQLGSPNYCKSVVNSPHHSTQSDTCPLAQEEILEINRADSKLNGEVAKAALANEDCPHIDQALTPDEGLPFTRSGTRERYGPCFLLSTGEYACPPGGGMRKGHSAEMDNSIWFFLRETEPSHVSTYGVPIEDSTFAIASWNLESLLSNRRIVYTSWTHWTKR

SEQ ID NO: 24284 - protein, 2358 aa, Homo sapiens
LQGPYSLNGYRVRVYRQDSATQWFTGIITHHDLFTRTMIVMNDQVLEPQNVDPSMVQMTFLDDVVHSLLKGENIGITSRRRSRANQNVNAVHSHYTRAQANSPRPAMNSQAAVPKQNTHQQQQQRSIRPNKRKGSDSSIPDEEKMKEEKYDYISRGENPKGKNKHLMNKRRKPEEDEKKLNMKRLRTDNVSDFSESSDSENSNKRIIDNSSEQKPENELKNKNTSKINGEEGKPHNNEKAGEETLKNSQPPWDQIQEDKKHEEAEKRKSVDTQLQEDMIIHSSEQSTVSDHNSNDLLPQECNMDKTHTMELLPKEKFVSRPPTPKCVIDITNDTNLEKVAQENSSTFGLQTLQKMDPNVSDSKHSIANAKFLETAKKDSDQSWVSDVVKVDLTQSSVTNASSGNDHLNMEKEKYVSYISPLSAVSVMEDKLHKRSPPPETIKSKLNTSVDTHKIKSSPSPEVVKPKITHSPDSVKSKATYVNSQATGERRLANKIEHELSRCSFHPIPTRSSTLETTKSPLIIDKNEHFTVYRDPALIGSETGANHISPFLSQHPFPLHSSSHRTCLNPGTHHPALTPAPHLLAGSSSQTPLPTINTHPLTSGPHHAVHHPHLLPTVLPGVPTASLLGGHPRLESAHASSLSHLALAHQQQQQLLQHQSPHLLGQAHPSASYNQLGLYPIIWQYPNGTHAYSGLGLPSSKWVHPENAVNAEASLRRNSPSPWLHQPTPVTSADGIGLLSHIPVRPSSAEPHRPLKITAHSSPPLTKTLVDHHKEELERKAFMEPLRSVASTSAKNDLDLNRSQTGKDCHLHRHFVDPVLNQLQRPPQETGERLNKYKEEHRRILQESIDVAPFTTKIKGLEGERENYSRVASSSSSPKSHIIKQDMDVERSVSDLYKMKHSVPQSLPQSNYFTTLSNSVVNEPPRSYPSKEVSNIYGDKQSNALAAAAANPQTLTSFITSLSKPPPLIKHQPESEGLVGKIPEHLPHQIASHSVTTFRNDCRSPTHLTVSSTNTLRSMPALHRAPVFHPPIHHSLERKEGSYSSLSPPTLTPVMPVNAGGKVQESQKPPTLIPEPKDSQANFKSSSEQSLTEMWRPNNNLSKEKTEWHVEKSSGKLQAAMASVIVRPSSSTKTDSMPAMQLASKDRVSERSSAGAHKTDCLKLAEAGETGRIILPNVNSDSVHTKSEKNFQAVSQGSVPSSVMSAVNTMCNTKTDVITSAADTTSVSSWGGSEVISSLSNTILASTSSECVSSKSVSQPVAQKQECKVSTTAPVTLASSKTGSVVQPSSGFSGTTDFIHLKKHKAALAAAQYKSSNASETEPNAIKNQTLSASLPLDSTVICSTINKANSVGNGQASQTSQPNYHTKLKKAWLTRHSEEDKNTNKMENSGNSVSEIIKPCSVNLIASTSSDIQNSVDSKIIVDKYVKDDKVNRRKAKRTYESGSESGDSDESESKSEQRTKRQPKPTYKKKQNDLQKRKGEIEEDLKPNGVLSRSAKERSKLKLQSNSNTGIPRSVLKDWRKVKKLKQTGESFLQDDSCCEIGPNLQKCRECRLIRSKKGEEPAHSPVFCRFYYFRRLSFSKNGVVRIDGFSSPDQYDDEAMSLWTHENFEDDELDIETSKYILDIIGDKFCQLVTSEKTALSWVKKDAKIAWKRAVRGVREMCDACEATLFNIHWVCQKCGFVVCLDCYKAKERKSSRDKELYAWMKCVKGQPHDHKHLMPTQIIPGSVLTDLLDAMHTLREKYGIKSHCHCTNKQNLQVGNFPTMNGVSQVLQNVLNHSNKISLCMPESQQQNTPPKSEKNGGSSPESDVGTDNKLTPPESQSPLHWLADLAEQKAREEKKENKELTLENQIKEEREQDNSESPNGRTSPLVSQNNEQGSTLRDLLTTTAGKLRVGSTDAGIAFAPVYSMGAPSSKSGRTMPNILDDIIASVVENKIPPSKTSKINVKPELKEEPEESIISAVDENNKLYSDIPHSWICEKHILWLKDYKNSSNWKLFKECWKQGQPAVVSGVHKKMNISLWKAESISLDFGDHQADLLNCKDSIISNANVKEFWDGFEEVSKRQKNKSGETVVLKLKDWPSGEDFKTMMPARYEDLLKSLPLPEYCNPEGKFNLASHLPGFFVRPDLGPRLCSAYGVVAAKDHDIGTTNLHIEVSDVVNILVYVGIAKGNGILSKAGILKKFEEEDLDDILRKRLKDSSEIPGALWHIYAGKDVDKIREFLQKISKEQGLEVLPEHDPIRDQSWYVNKKLRQRLLEEYGVRTCTLIQFLGDAIVLPAGALHQVQNFHSCIQVTEDFVSPEHLVESFHLTQELRLLKEEINYDDKLQVKNILYHAVKEMVRALKIHEDEVEDMEEN

SEQ ID NO: 24285 - protein, 400 aa, Homo sapiens
MSSQAFPAEEDHHNEERQTKKKRKTKHRHKFSEELLQELKEIFGENGYPDFTTRKTLANKFDCPVNVINNWFQNNRARLPPEERQRIFLTWKKHDFPVQACPFLSLQETQAAASNYATEQSFSCAKRALMRRPGCSLLEKQRIACQQMGYNCFSLENQETPSQQVGSMCSSLEKQGIPSQQVGSQCSYLVAGTEKHPGYALEYGGDTGSEHSTAYRFLSYNSAECLHPPPSSVPYFHGERTETRESQHASPFLLDYAQGAYGVKKDHCLCSFCLSLLQEQQQNDWQYHPQQHQQPQNYSEGMMLQEQLPMDSGPWDLEKQWPSAQSQLQSQLPQNNGKPLCSQLQHVPPQIAANSPLLPLGQDMQVGASSNSGLKCSSFRLRGLHGPATGTQGCSFAKYC

SEQ ID NO: 24286 - protein, 361 aa, Homo sapiens
MKRLPLLVVFSTLLNCSYTQNCTKTPCLPNAKCEIRNGIEACYCNMGFSGNGVTICEDDNECGNLTQSCGENANCTNTEGSYYCMCVPGFRSSSNQDRFITNDGTVCIENVNANCHLDNVCIAANINKTLTKIRSIKEPVALLQEVYRNSVTDLSPTDIITYIEILAESSSLLGYKNNTISAKDTLSNSTLTEFVKTVNNFVQRDTFVVWDKLSVNHRRTHLTKLMHTVEQATLRISQSFQKTTEFDTNSTDIALKVFFFDSYNMKHIHPHMNMDGDYINIFPKRKAAYDSNGNVAVAFVYYKSIGPLLSSSDNFLLKPQNYDNSEEEERVISSVISVSMSSNPPTLYELEKITFTLSHRK

SEQ ID NO: 24287 - protein, 1222 aa, Homo sapiens
GGGGGSSLRMSSNIHANHLSLDASSSSSSSSSSSSSSSSSSSSSSVHEPKMDALIIPVTMEVPCDSRGQRMWWAFLASSMVTFFGGLFIILLWRTLKYLWTVCCHCGGKTKEAQKINNGSSQADGTLKPVDEKEEAVAAEVGWMTSVKDWAGVMISAQTLTGRVLVVLVFALSIGALVIYFIDSSNPIESCQNFYKDFTLQIDMAFNVFFLLYFGLRFIAANDKLWFWLEVNSVVDFFTVPPVFVSVYLNRSWLGLRFLRALRLIQFSEILQFLNILKTSNSIKLVNLLSIFISTWLTAAGFIHLVENSGDPWENFQNNQALTYWECVYLLMVTMSTVGYGDVYAKTTLGRLFMVFFILGGLAMFARYVPEIAALILSRNKFGGTFNKHGGRKHIVVCGHITLESVSNFLKDFLHKDRDDVNVEIVFLHNISPNLELEALFKRHFTQVEFYQGSVLNPHDLARVKIESADACLILANKYCADPDAEDASNIMRVISIKNYHPKIRIITQMLQYHNKAHLLNIPSWNWKEGDDAICLAELKLGFIAQSCLAQGLSTMLANLFSMRSFIKIEEDTWQKYYLEGVSNEMYTEYLSSAFVGLSFPTVCELCFVKLKLLMIAIEYKSANRESRSRKRILINPGNHLKIQEGTLGFFIASDAKEVKRAFFYCKACHDDITDPKRIKKCGCKRLIYFEDEQPSTLSPKKKQRNGGMRNSPNTSPKLMRHDPLLIPGNDQIDNMDSNVKKYDSTGMFHWCAPKEIEKVILTRSEAAMTVLSGHVVVCIFGDVSSALIGLRNLVMPLRASNFHYHELKHIVFVGSIEYLKREWETLHNFPKVSILPGTPLSRADLRAVNINLCDMCVILSANQNNIDDTSLQDKECILASLNIKSMQFDDSIGVLQANSQGFTPPGMDRSSPDNSPVHGMLRQPSITTGVNIPIITELVNDTNVQFLDQDDDDDPDTELYLTQPFACGTAFAVSVLDSLMSATYFNDNILTLIRTLVTGGATPELEALIAEENALRGGYSTPQTLANRDRCRVAQLALLDGPFADLGDGGCYGDLFCKALKTYNMLCFGIYRLRDAHLSTPSQCTKRYVITNPPYEFELVPTDLIFCLMQFDHNAGQSRASLSHSSHSSQSSSKKSSSVHSIPSTANRQNRPKSRESRDKQNATRMNRMGQEKKWFTDEPDNAYPRNIQIKPMSTHMANQINQYKSTSSLIPPIREVEDEC

SEQ ID NO: 24288 - protein, 435 aa, Homo sapiens [sequence omitted]

SEQ ID NO: 24289 - protein, 385 aa, Homo sapiens
MSSPNIWSTGSSVYSTPVFSQKMTVWILLLLSLYPGFTSQKSDDDYEDYASNKTWVLTPKVPEGDVTVILNNLLEGYDNKLRPDIGVKPTLIHTDMYVNSIGPVNAINMEYTIDIFFAQTWYDRRLKFNSTIKVLRLNSNMVGKIWIPDTFFRNSKKADAHWITTPNRMLRIWNDGRVLYTLRLTIDAECQLQLHNFPMDEHSCPLEFSSYGYPREEIVYQWKRSSVEVGDTRSWRLYQFSFVGLRNTTEVVKTTSGDYVVMSVYFDLSRRMGYFTIQTYIPCTLIVVLSWVSFWINKDAVPARTSLGITTVLTMTTLSTIARKSLPKVSYVTAMDLFVSVCFIFVFSALVEYGTLHYFVSNRKPSKDKDKKKKNPLLRMFSFKV

SEQ ID NO: 24290 - protein, 379 aa, Homo sapiens
MTSVAKVYYSQTTQTESRPLMGPGIRRRRVLTKDGRSNVRMEHIADKRFLYLKDLWTTFIDMQWRYKLLLFSATFAGTWFLFGVVWYLVAVAHGDLLELDPPANHTPCVVQVHTLTGAFLFSLESQTTIGYGFRYISEECPLAIVLLIAQLVLTTILEIFITGTFLAKIARPKKRAETIRFSQHAVVASHNGKPCLMIRVANMRKSLLIGCQVTGKLLQTHQTKEGENIRLNQVNVTFQVDTASDSPFLILPLTFYHVVDETSPLKDLPLRSGEGDFELVLILSGTVESTSATCQVRTSYLPEEILWGYEFTPAISLSASGKYIADFSLFDQVVKVASPSGLRDSTVRYGDPEKLKLEESLREQAEKEGSALSVRISNV

SEQ ID NO: 24291 - protein, 1197 aa, Homo sapiens
SSNIHANHLSLDASSSSSSSSSSSSSSSSSSSSSSVHEPKMDALIIPVTMEVPCDSRGQRMWWAFLASSMVTFFGGLFIILLWRTLKYLWTVCCHCGGKTKEAQKINNGSSQADGTLKPVDEKEEAVAAEVGWMTSVKDWAGVMISAQTLTGRVLVVLVFALSIGALVIYFIDSSNPIESCQNFYKDFTLQIDMAFNVFFLLYFGLRFIAANDKLWFWLEVNSVVDFFTVPPVFVSVYLNRSWLGLRFLRALRLIQFSEILQFLNILKTSNSIKLVNLLSIFISTWLTAAGFIHLVENSGDPWENFQNNQALTYWECVYLLMVTMSTVGYGDVYAKTTLGRLFMVFFILGGLAMFASYVPEIIELIGNRKKYGGSYSAVSGRKHIVVCGHITLESVSNFLKDFLHKDRDDVNVEIVFLHNISPNLELEALFKRHFTQVEFYQGSVLNPHDLARVKIESADACLILANKYCADPDAEDASNIMRVISIKNYHPKIRIITQMLQYHNKAHLLNIPSWNWKEGDDAICLAELKLGFIAQSCLAQGLSTMLANLFSMRSFIKIEEDTWQKYYLEGVSNEMYTEYLSSAFVGLSFPTVCELCFVKLKLLMIAIEYKSANRESRSRKRILINPGNHLKIQEGTLGFFIASDAKEVKRAFFYCKACHDDITDPKRIKKCGCKRLIYFEDEQPSTLSPKKKQRNGGMRNSPNTSPKLMRHDPLLIPGNDQIDNMDSNVKKYDSTGMFHWCAPKEIEKVILTRSEAAMTVLSGHVVVCIFGDVSSALIGLRNLVMPLRASNFHYHELKHIVFVGSIEYLKREWETLHNFPKVSILPGTPLSRADLRAVNINLCDMCVILSANQNNIDDTSLQDKECILASLNIKSMQFDDSIGVLQANSQGFTPPGMDRSSPDNSPVHGMLRQPSITTGVNIPIITELAKPGKLPLVSVNQEKNSGTHILMITELVNDTNVQFLDQDDDDDPDTELYLTQPFACGTAFAVSVLDSLMSATYFNDNILTLIRTLVTGGATPELEALIAEENALRGGYSTPQTLANRDRCRVAQLALLDGPFADLGDGGCYGDLFCKALKTYNMLCFGIYRLRDAHLSTPSQCTKRYVITNPPYEFELVPTDLIFCLMQFDHNAGQSRASLSHSSHSSQSSSKKSSSVHSIPSTANRQNRPKSRESRDKQNATRMNRMGQGMTINGSA

SEQ ID NO: 24292 - protein, 638 aa, Homo sapiens
MKSVHSSPQNTSHTIMTFYPTMEEFADFNTYVAYMESQGAHRAGLAKVIPPKEWKARQMYDDIEDILIATPLQQVTSGQGGVFTQYHKKKKAMRVGQYRHLANSKKYQTPPHQNFADLEQRYWKSHPGNPPIYGADISGSLFEESTKQWNLGHLGTILDLLEQECGVVIEGVNTPYLYFGMWKTTFAWHTEDMDLYSINYLHFGEPKTWYVVPPEHGQRLECLARELFPGNSRGCEGFLRHKVALISPTVLKKNGIPFNRMTQEAGEFMVTFPYGYHAGFNHGFNCAEAINFATPRWIDYGKVASQCSCGEARVTFSMDAFVRILQPESYELWKHRQDLTVVDYMEPRVAESQEPSNWREDIALRRAALGLRHLRNHITSCPTRTVAPRLCYNPKGGGTDAVPGSAIQALETSAWVLPPSTGRWGPCRGCGRGRGRGRGRGRRPRELGTEETTVQSAAKRRLSVGTGSRAPGRKPQLQFADEALTDKPAPLSGGLPHFAKASGCCCAPDLQPLGPPLDPDEPMHPGPCLLSLDSTASSLPLVVPMTPPSVTVPLITLSRDTGGDWKSPVNLAKVVAMDHSYASRVPVPTKFSRISWAPDSSAGAKARQRYATEFGDIFLQCMINPLDPWPLNMVSNVK

SEQ ID NO: 24293 - protein, 319 aa, Homo sapiens
VALALEVASIDHISEANMEYTMTVFLHQSWRDSRLSYNHTNETLGLDSRFVDKLWLPDTFIVNAKSAWFHDVTVENKLIRLQPDGVILYSIRITSTVACDMDLAKYPMDEQECMLDLESYGYSSEDIVYYWSESQEHIHGLDKLQLAQFTITSYRFTTELMNFKSAGQFPRLSLHFHLRRNRGVYIIQSYMPSVLLVAMSWVSFWISQAAVPARVSLGTGPRRCSEGAGRAALGNRTPHPSAGGSALASGPCQLSWGSGQPGQARHHHGADDDHAHGQCPLLPATGISHQGTGRLLLDLLCLRVCRPGGVRLCSFQRRL

SEQ ID NO: 24294 - protein, 363 aa, Homo sapiens
MLVMAPRTVLLLLSAALALTETWAGSHSMRYFYTSVSRPGRGEPRFISVGYVDDTQFVRFDSDAASPREEPRAPWIEQEGPEYWDRNTQIYKAQAQTDRESLRNLRGYYNQSEAGSHTLQSMYGCDVGPDGRLLRGHDQYAYDGKDYIALNEDLRSWTAADTAAQITQRKWEAAREAEQRRAYLEGECVEWLRRYLENGKDKLERADPPKTHVTHHPISDHEATLRCWALGFYPAEITLTWQRDGEDQTQDTELVETRPAGDRTFQKWAAVVVPSGEEQRYTCHVQHEGLPKPLTLRWEPSSQSTVPIVGIVAGLAVLAVVVIGAVVAAVMCRRKSSGRKGGSYSQAACSDSAQGSDVSLTAK

SEQ ID NO: 24295 - protein, 546 aa, Homo sapiens
MFTLDVKSNTVFDIITDNCDLHFKISRDRLSASSLTMESFAFLWAGGRASYGVSKGKVCFEMKVTEKIPVRHLYTKDIDIHEVRIGWSLTTSGMLLGEEEFSYGYSLKGIKTCNCETEDYGEKFDENDVITCFANFESDEVELSYAKNGQDLGVAFKISKEVLAGRPLFPHVLCHNCAVEFNFGQKEKPYFPIPEEYTFIQNVPLEDRVRGPKGPEEKKDCEVVMMIGLPGAGKTTWVTKHAAENPGKYNILGTNTIMDKMMVAGFKKQMADTGKLNTLLQRAPQCLGKFIEIAARKKRNFILDQTNVSAAAQRRKMCLFAGFQRKAVVVCPKDEDYKQRTQKKAEVEGKDLPEHAVLKMKGNFTLPEVAECFDEITYVELQKEEAQKLLEQYKEESKKALPPEKKQNTGSKKSNKNKSGKNQFNRGGGHRGRGGFNMRGGNFRGGAPGNRGGYNRRGNMPQRGGGGGGSGGIGYPYPRAPVFPGRGSYSNRGNYNRGGMPNRGNYNQNFRGRGNNRGYKNQSQGYNQWQQGVSNFLCALCTLIVF

SEQ ID NO: 24296 - protein, 73 aa, Homo sapiens
GQNLIRSIQINITRLAGTFGDVAVGLRISSDHKEQPIVTENAERQLVVKDGATYKVDVVPIKNQVVGCQSLPW

SEQ ID NO: 24297 - protein, 1122 aa, Homo sapiens
EAQKINNGSSQADGTLKPVDEKEEAVAAEVGWMTSVKDWAGVMISAQTLTGRVLVVLVFALSIGALVIYFIDSSNPIESCQNFYKDFTLQIDMAFNVFFLLYFGLRFIAANDKLWFWLEVNSVVDFFTVPPVFVSVYLNRSWLGLRFLRALRLIQFSEILQFLNILKTSNSIKLVNLLSIFISTWLTAAGFIHLVENSGDPWENFQNNQALTYWECVYLLMVTMSTVGYGDVYAKTTLGRLFMVFFILGGLAMFASYVPEIIELIGNRKKYGGSYSAVSGRKHIVVCGHITLESVSNFLKDFLHKDRDDVNVEIVFLHNISPNLELEALFKRHFTQVEFYQGSVLNPHDLARVKIESADACLILANKYCADPDAEDASNIMRVISIKNYHPKIRIITQMLQYHNKAHLLNIPSWNWKEGDDAICLAELKLGFIAQSCLAQGLSTMLANLFSMRSFIKIEEDTWQKYYLEGVSNEMYTEYLSSAFVGLSFPTVCELCFVKLKLLMIAIEYKSANRESRSRKRILINPGNHLKIQEGTLGFFIASDAKEVKRAFFYCKACHDDITDPKRIKKCGCKRLKVAARSRYSKDPFEFKKETPNSRLVTEPVEDEQPSTLSPKKKQRNGGMRNSPNTSPKLMRHDPLLIPGNDQIDNMDSNVKKYDSTGMFHWCAPKEIEKVILTRSEAAMTVLSGHVVVCIFGDVSSALIGLRNLVMPLRASNFHYHELKHIVFVGSIEYLKREWETLHNFPKVSILPGTPLSRADLRAVNINLCDMCVILSANQNNIDDTSLQDKECILASLNIKSMQFDDSIGVLQANSQGFTPPGMDRSSPDNSPVHGMLRQPSITTGVNIPIITELAKPGKLPLVSVNQEKNSGTHILMITELVNDTNVQFLDQDDDDDPDTELYLTQPFACGTAFAVSVLDSLMSATYFNDNILTLIRTLVTGGATPELEALIAEENALRGGYSTPQTLANRDRCRVAQLALLDGPFADLGDGGCYGDLFCKALKTYNMLCFGIYRLRDAHLSTPSQCTKRYVITNPPYEFELVPTDLIFCLMQFDHNAGQSRASLSHSSHSSQSSSKKSSSVHSIPSTANRQNRPKSRESRDKQNATRMNRMGQGMTINGSA

SEQ ID NO: 24298 - protein, 454 aa, Homo sapiens
MTMAGGRRGLVAPQNTFLENIVRRSNDTNFVLGNAQIVDWPIVYSNDGFCKLSGYHRAEVMQKSSTCSFMYGELTDKDTIEKVRQTFENYEMNSFEILMYKKNRKGDVFGDVFWKEATLAQSCANVRALTYCDLHVIKRDALQKVLEFYTAFSHSFSRNLILTYNLRKRIVFRKISDVKREEEERMKRKNEAPLILPPDHPVRRLFQRFRQQKEARLAAERGGRDLDDLDVEKGNVLTEHASANHSLVKASVVTVRESPATPVSFQAASTSGVPDHAKLQAPGSECLGPKGGGGDCAKRKSWARFKDACGKSEDWNKVSKAESMETLPERTKASGEATLKKTDSCDSGITKSDLRLDNVGEARSPQDRSPILAEVKHSFYPIPEQTLQATVLEVRHELKEDIKALNAKMTNIEKQLSEILRILTSRRSSQSPQELFEISRPQSPESERDIFGAS

SEQ ID NO: 24299 - protein, 366 aa, Homo sapiens
MESERGGAVSWNPVVVWCMKCEQQDPRYSPYTLVRITEAEMRAYHRLVGSCIRLEYMAKKDEIMQQEVRPLMAVEIIEQLHRQFAILSGGRGEDGAPIITFPEFSGFKHIPDEDFLNVMTYLTSIPSVEAASIGFIVVIDRRRDKWSSVKASLTRIAVAFPGNLQLIFILRPSRFIQRTFTDIGIKYYRNEFKTKVPIIMVNSVSDLHGYIDKSQLTRELGGTLEYRHGQWVNHRTAIENFALTLKTTAQMLQTFGSCLATAELPRSMLSTEDLLMSHTRQRDKLQDELKLLGKQGTTLLSCIQEPATKCPNSKLNLNQLENVTTMERLLVQLDETEKAFSHFWSEHHLKLNQCLQLQHFEHDFCK

SEQ ID NO: 24300 - protein, 738 aa, Homo sapiens
MLLFFTLGLLIHFVFFASIFDIYFTSPLVHGMTPQFTPLPPPARRLVLFVADGLRADALYELDENGNSRAPFIRNIIMHEGSWGISHTRVPTESRPGHVALIAGFYEDVSAVAKGWKENPVEFDSLFNESKYTWSWGSPDILPMFAKGASGDHVYTYSYDAKREDFGAQDATKLDTWVFDNVKDFFHHARNNQSLFSKINEEKIVFFLHLLGIDTNGHAHRPSSRDYKHNIKKVDDGVKEIVSMFNHFYGNDGKTTFIFTSDHGMTDWGSHGAGHPSETLTPLVTWGAGIKYPQRVSAQQFDDAFLKEWRLENWKRLDVNQADIAPLMTSLIGVPFPLNSVGILPVDYLNNTDLFKAESMFTNAVQILEQFKVKMTQKKEVTLPFLFTPFKLLSDSKQFNILRKARSYIKHRKFDEVVSLCKELIHLALKGLSYYHTYDRFFLGVNVVIGFVGWISYASLLIIKSHSNLIKGVSKEVKKPSHLLPCSFVAIGILVAFFLLIQACPWTYYVYGLLPLPIWYAVLREFQVIQDLVVSVLTYPLSHFVGYLLAFTLGIEVLVLSFFYRYMLTAGLTAFAAWPFLTRLWTRAKMTSLSWTFFSLLLAVFPLMPVVGRKPDISLVMGAGLLVLLLSLCVVTSLMKRKDSFIKEELLVHLLQVLSTVLSMYVVYSTQSSLLRKQGLPLMNQIISWATLASSLVVPLLSSPVLFQRLFSILLSLMSTYLLLSTGSPVSSSLIILI

SEQ ID NO: 24301 - protein, 468 aa, Homo sapiens
MAVAAALTGLQAEAKCSICLDYLSDPVTIECGHNFCRSCIQQSWLDLQELFPCPVCRHQCQEGHFRSNTQLGRMIEIAKLLQSTKSNKRKQEETTLCEKHNQPLSVFCKEDLMVLCPLCTQPPDHQGHHVRPIEKAAIHYRKRFCSYIQPLKKQLADLQKLISTQSKKPLELREMVENQRQELSSEFEHLNQFLDREQQAVLSRLAEEEKDNQQKLSANITAFSNYSATLKSQLSKVVELSELSELELLSQIKIFYESENESSPSIFSIHLKRDGCSFPPQYSALQRIIKKFKVEIILDPETAHPNLIVSEDKKRVRFTKRKQKVPGFPKRFTVKPVVLGFPYFHSGRHFWEIEVGDKSEWAIGICKDSLPTKARRPSSAQQECWRIELQDDGYHAPGAFPTPLLLEVKARAIGIFLDYEMGEISFYNMAEKSHICTFTDTFTGPLRPYFYVGPDSQPLRICTGTVCE

SEQ ID NO: 24302 - protein, 369 aa, Homo sapiens
MIERCICLVCLDAPGGVELSDTHRALQLLHGGGYSKNGANRWYDKSLQFVVGRDGTCGVVCEHSPFDGIVLVQCTEHLLKHVTQSSRKLIRADSVSELPAPRRLRWKCSPEIQGHLASSAEKLQRIVKNLDFIVYKFDNYGKTFIKKQKCSPDAFIQVALQLAFYRLHRRLVPTYESASIRRFQEGRVDNIRSATPEALAFVRAVTDHKAAVPASEKLLLLKDAIRAQTAYTVMAITGMAIDNHLLALRELARAMCKELPEMFMDETYLMSNRFVLSTSQVPTTTEMFCCYGPVVPNGYGACYNPQPETILFCISSFHSCKETSSSKFAKAVEESLIDMRDLCSLLPPTESKPLATKEKATRPSQGHQP

SEQ ID NO: 24303 - protein, 208 aa, Homo sapiens
DGAEPGRVDTFWYKFLKREPGGELSWEGNGPHHDRCCTYNENNLVDGVYCLPIGHWIEATGHTNEMKHTTDFYFNIAGHQAMHYSRILPNIWLGSCPRQVEHVTIKLKHELGITAVMNFQTEWDIVQNSSGCNRYPEPMTPDTMIKLYREEGLAYIWMPTPDMSTEDEKRTADMCCSGMWEETAGQILRGGRKWTKTNIQKGPMLWIL

SEQ ID NO: 24304 - protein, 198 aa, Homo sapiens
METGRQTGVSAEMLAMPRGLKGSKKDGIPEDLDGNLEEPRDQEGELRSEDVMDLTEGDSEASASAPPAAKRRKTHTKRKKERKPTVDAEEAQRMTTLLSAMSEEQLSRYEVCRRSAFPRARIAGLMRSITGSSVSENAAIAMAGIAKVFVGEVVEEALDMCEMWGETPPLQPKHLREAVHRLKPKGLFPNSNYKRVMF

SEQ ID NO: 24305 - protein, 245 aa, Homo sapiens
QTTQTESRPLMGPGIRRRRVLTKDGRSNVRMEHIADKRFLYLKDLWTTFIDMQWRYKLLLFSATFAGTWFLFGVVWYLVAVAHGDLLELDPPANHTPCVVQVHTLTGAFLFSLESQTTIGYGFRYISEECPLAIVLLIAQLVLTTILEIFITGTFLAKIARPKKRAETIRFSQHAVVASHNGKPCLMIRVANMRKSLLIGCQVTGKLLQTHQTKEGENIRLNQAAQRRSVSLCPVNGRTQANMFL

SEQ ID NO: 24306 - protein, 703 aa, Homo sapiens
CHPTHSVLLSFLDRCLQNYIPAQSLTLSCPVCRQTSILPEQGVSALQNNFFISSLMEAMQQAPDGAHDPEDPHPLSVVAGRPLSCPNHEGKTMEFYCEACETAMCGECRAGEHREHHKAALQRQLEAVRGRLPQLSAAIALVGGISQQLQERKAEALAQISAAFEDLEQALQQRKQALVSDLETICGAKQKVLQSQLDTLRQGQEHIGSSCSFAEQALRLGSAPEVLLVRKHMRERLAALAAQAFPERPHENAQLELVLEVDGLRRSVLNLGALLTTSATAHETVATGEGLRQALVGQPASLTVTTKDKDGRLVRTGSAELRAEITGPDGTRLPVPVVDHKNGTYELVYTARTEGELLLSVLLYGQPVRGSPFRVRALRPGDLPPSPDDVKRRVKSPGGPGSHVRQKAVRRPSSMYSTGGKRKDNPIEDELVFRVGSRGREKGEFTNLQGVSAASSGRIVVADSNNQCIQVFSNEGQFKFRFGVRGRSPGQLQRPTGVAVDTNGDIIVADYDNRWVSIFSPEGKFKTKIGAGRLMGPKGVAVDRNGHIIVVDNKSCCVFTFQPNGKLVGRFGGRGATDRHFAGPHFVAVNNKNEIVVTDFHNHSVKVYSADGEFLFKFGSHGEGNGQFNAPTGVAVDSNGNIIVADWGNSRIQVFDSSGSFLSYINTSAEPLYGPQGLALTSDGHVVVADAGNHCFKAYRYLQ

SEQ ID NO: 24307 - protein, 299 aa, Homo sapiens
MFANLKYVSLGILVFQTTSLVLTMRYSRTLKEEGPRYLSSTAVVVAELLKIMACILLVYKDSKCSLRALNRVLHDEILNKPMETLKLAIPSGIYTLQNNLLYVALSNLDAATYQVTYQLKILTTALFSVSMLSKKLGVYQWLSLVILMTGVAFVQWPSDSQLDSKELSAGSQFVGLMAVLTACFSSGFAGVYFEKILKETKQSVWIRNIQLGFFGSIFGLMGVYIYDGELVSKNGFFQGYNRLTWIVVVLQALGGLVIAAVIKYADNILKGFATSLSIILSTLISYFWLQDFVPTSLKE

SEQ ID NO: 24308 - protein, 307 aa, Homo sapiens
MFANLKYVSLGILVFQTTSLVLTMRYSRTLKEEGPRYLSSTAVVVAELLKIMACILLVYKDSKCSLRALNRVLHDEILNKPMETLKLAIPSGIYTLQNNLLYVALSNLDAATYQVTYQLKILTTALFSVSMLSKKLGVYQWLSLVILMTGVAFVQWPSDSQLDSKELSAGSQFVGLMAVLTACFSSGFAGVYFEKILKETKQSVWIRNIQLGFFGSIFGLMGVYIYDGELVSKNGFFQGYNRLTWIVVVLQALGGLVIAAVIKYADNILKGFATSLSIILSTLISYFWLQDFVPTRWLYASSSSSCS

SEQ ID NO: 24309 - protein, 591 aa, Homo sapiens [sequence omitted]

SEQ ID NO: 24310 - protein, 247 aa, Homo sapiens
QTTQTESRPLMGPGIRRRRVLTKDGRSNVRMEHIADKRFLYLKDLWTTFIDMQWRYKLLLFSATFAGTWFLFGVVWYLVAVAHGDLLELDPPANHTPCVVQVHTLTGAFLFSLESQTTIGYGFRYISEECPLAIVLLIAQLVLTTILEIFITGTFLAKIARPKKRAETIRFSQHAVVASHNGKPCLMIRVANMRKSLLIGCQVTGKLLQTHQTKEGENIRLNQGMERGGGTNRAVNHSTQNSKTGGN

SEQ ID NO: 24311 - protein, 1181 aa, Homo sapiens
MANGGGGGGGSSGGGGGGGGSSLRMSSNIHANHLSLDASSSSSSSSSSSSSSSSSSSSSSVHEPKMDALIIPVTMEVPCDSRGQRMWWAFLASSMVTFFGGLFIILLWRTLKYLWTVCCHCGGKTKEAQKINNGSSQADGTLKPVDEKEEAVAAEVGWMTSVKDWAGVMISAQTLTGRVLVVLVFALSIGALVIYFIDSSNPIESCQNFYKDFTLQIDMAFNVFFLLYFGLRFIAANDKLWFWLEVNSVVDFFTVPPVFVSVYLNRSWLGLRFLRALRLIQFSEILQFLNILKTSNSIKLVNLLSIFISTWLTAAGFIHLVENSGDPWENFQNNQALTYWECVYLLMVTMSTVGYGDVYAKTTLGRLFMVFFILGGLAMFASYVPEIIELIGNRKKYGGSYSAVSGRKHIVVCGHITLESVSNFLKDFLHKDRDDVNVEIVFLHNISPNLELEALFKRHFTQVEFYQGSVLNPHDLARVKIESADACLILANKYCADPDAEDASNIMRVISIKNYHPKIRIITQMLQYHNKAHLLNIPSWNWKEGDDAICLAELKLGFIAQSCLAQGLSTMLANLFSMRSFIKIEEDTWQKYYLEGVSNEMYTEYLSSAFVGLSFPTVCELCFVKLKLLMIAIEYKSANRESRILINPGNHLKIQEGTLGFFIASDAKEVKRAFFYCKACHDDITDPKRIKKCGCKRLIYFEDEQPSTLSPKKKQRNGGMRNSPNTSPKLMRHDPLLIPGNDQIDNMDSNVKKYDSTGMFHWCAPKEIEKVILTRSEAAMTVLSGHVVVCIFGDVSSALIGLRNLVMPLRASNFHYHELKHIVFVGSIEYLKREWETLHNFPKVSILPGTPLSRADLRAVNINLCDMCVILSANQNNIDDTSLQDKECILASLNIKSMQFDDSIGVLQANSQGFTPPGMDRSSPDNSPVHGMLRQPSITTGVNIPIITELVNDTNVQFLDQDDDDDPDTELYLTQPFACGTAFAVSVLDSLMSATYFNDNILTLIRTLVTGGATPELEALIAEENALRGGYSTPQTLANRDRCRVAQLALLDGPFADLGDGGCYGDLFCKALKTYNMLCFGIYRLRDAHLSTPSQCTKRYVITNPPYEFELVPTDLIFCLMQFDHNAGQSRASLSHSSHSSQSSSKKSSSVHSIPSTANRQNRPKSRESRDKQKYVQEERL

SEQ ID NO: 24312 - protein, 938 aa, Homo sapiens
NSTMILSLVLERTGGLLGEIQVNWETVGPNSQEALLPQNRDIADPVSGLFYFGEGEGGVRTIILTIYPHEEIEVEETFIIKLHLVKGEAKLDSRAKDVTLTIQEFGDPNGVVQFAPETLSKKTYSEPLALEGPLLITFFVRRVKGTFGEIMVYWELSSEFDITEDFLSTSGFFTIADGESEASFDVHLLPDEVPEIEEDYVIQLVSVEGGAELDLEKSITWFSVYANDDPHGVFALYSDRQSILIGQNLIRSIQINITRLAGTFGDVAVGLRISSDHKEQPIVTENAERQLVVKDGATYKVDVVPIKNQVFLSLGSNFTLQLVTVMLVGGRFYGMPTILQEAKSAVLPVSEKAANSQVGFESTAFQLMNITAGTSHVMISRRGTYGALSVAWTTGYAPGLEIPEFIVVGNMTPTLGSLSFSHGEQRKGVFLWTFPSPGWPEAFVLHLSGVQSSAPGGAQLRSGFIVAEIEPMGVFQFSTSSRNIIVSEDTQMIRLHVQRLFGFHSDLIKVSYQTTAGSAKPLEDFEPVQNGELFFQKFQTEVDFEITIINDQLSEIEEFFYINLTSVEIRGLQKFDVNWSPRLNLDFSVAVITILDNDDLAGMDISFPETTVAVAVDTTLIPVETESTTYLSTSKTTTILQPTNVVAIVTEATGVSAIPEKLVTLHGTPAVSEKPDVATVTANVSIHGTFSLGPSIVYIEEEMKNGTFNTAEVLIRRTGGFTGNVSITVKTFGERCAQMEPNALPFRGIYGISNLTWAVEEEDFEEQTLTLIFLDGERERKVSVQILDDDEPEGQEFFYVFLTNPQGGAQIVEEKDDTGFAAFAMVIITGSDLHNGIIGFSEESQSGLELREGAVMRRLHLIVTRQPNRAFEDVKVFWRVTLNKTVVVLQKDGVNLVEELQSVSGTTTCTMGQTKCFISIELKPEKRNATEPIIKSFS

SEQ ID NO: 24313 - protein, 898 aa, Homo sapiens
MPILLFLIDTSASMNQRTDLGTSYLDIAKGAVELFLKLRARDPASRGDRYMLVTYDEPPYCIKAGWKENHATFMSELKNLQASGLTTLGQALRSSFDLLNLNRLISGIDNYGQGRNPFFLEPSILITITDGNKLTSTAGVQEELHLPLNSPLPGSELTKEPFRWDQRLFALVLRLPGVASTEPEQLGSVPTDESAITQMCEVTGGRSYCVRTQRMLNQCLESLVQKVQSGVVINFEKTGPDPLPIGEDGLMDSSRPSNSFAAQPWHSCHKLIYVRPNSKTGVPVGHWPIPESFWPDQNLPSLPPRTSHPVVRFSCVDCEPMVIDKLPFDKYELEPSPLTQYILERKSPHTCWQVFVTSSGKYNELGYPFGYLKASTTLTCVNLFVMPYNYPVLLPLLDDLFKVHKLKPNLKWRQAFDSYLKTLPPYYLLPLKKALRMMGAPNLISDNLDCGLSYSVISYLKKLSQQTKLESERILASVGKKPPQEIGIKVKNHSGGGMSLTHNKNFRKLLKEITGETALRLTELNTKEFAGFQIGLLNKDLKPQTYRNAYDIPRRGLLDQLTRMRSNLLKTHKFIVGQDEDSLHSVPVAQMGNYQEYLKTLASPLREIDPDQPKRLHTFGNPFKQDKKGMMIDEADEFVAGPQNKVKRPGEPNSPMSSKRRRSMSLLLRKPQTPPTVTNHVGGKGPPSASWFPSYPNLIKPTLVHTDATIIHDGHEEKMENGQITPDGFLSKSAPSELINMTGDLMPPNQVDSLSDDFTSLSKDGLIQKPGSNAFVGGAKNCSLSVDDQKDPVASTLGAMPNTLQITPAMAQGINADIKHQLMKEVRKFGRKYERIFILLEEVQGPLEMKKQFVEFTIKEAARFKRRVLIQYLEKVLEKINSHHLHNNISHINSRSSC

SEQ ID NO: 24314 - protein, 564 aa, Homo sapiens
MQKSVRYNEGHALYLAFLARKEGTKRGFLSKKTAEASRWHEKWFALYQNVLFYFEGEQSCRPAGMYLLEGCSCERTPAPPRAGAGQGGVRDALDKQYYFTVLFGHEGQKPLELRCEEEQDGKEWMEAIHQASYADILIEREVLMQKYIHLVQIVETEKIAANQLRHQLEDQDTEIERLKSEIIALNKTKERMRPYQSNQEDEDPDIKKIKKVQSFMRGWLCRRKWKTIVQDYICSPHAESMRKRNQIVFTMVEAESEYVHQLYILVNGFLRPLRMAASSKKPPISHDDVSSIFLNSETIMFLHEIFHQGLKARIANWPTLILADLFDILLPMLNIYQEFVRNHQYSLQVLANCKQNRDFDKLLKQYEANPACEGRMLETFLTYPMFQIPRYIITLHELLAHTPHEHVERKSLEFAKSKLEELSRVMHDEVSDTENIRKNLAIERMIVEGCDILLDTSQTFIRQGTMKNSNTIIVKHEWGRQLHSDWTLLLSGPDILCSSKEDRSAWPTAVAVPSADDTQAKAQEKLALLKALSHKTGDHVRSENSCLLFPFFISTSGSAPHDII

SEQ ID NO: 24315 - protein, 605 aa, Homo sapiens
MTMAGGRRGLVAPQNTFLENIVRRSNDTNFVLGNAQIVDWPIVYSNDGFCKLSGYHRAEVMQKSSTCSFMYGELTDKDTIEKVRQTFENYEMNSFEILMYKKNTLLYATIFGNVTTIFQQMYANTNRYHEMLNSVRDFLKLYQVPKGLSERVMDYIVSTWSMSRGIDTEKVLQICPKDMRADICVHLNRKVFKEHPAFRLASDGCLRALAMEFQTVHCAPGDLIYHAGESVDSLCFVVSGSLEVIQDDEVVAILGKGDVFGDVFWKEATLAQSCANVRALTYCDLHVIKRDALQKVLEFYTAFSHSFSRNLILTYNLRKRIVFRKISDVKREEEERMKRKNEAPLILPPDHPVRRLFQRFRQQKEARLAAERGGRDLDDLDVEKGNVLTEHASANHSLVKASVVTVRESPATPVSFQAASTSGVPDHAKLQAPGSECLGPKGGGGDCAKRKSWARFKDACGKSEDWNKVSKAESMETLPERTKASGEATLKKTDSCDSGITKSDLRLDNVGEARSPQDRSPILAEVKHSFYPIPEQTLQATVLEVRHELKEDIKALNAKMTNIEKQLSEILRILTSRRSSQSPQELFEISRPQSPESERDIFGAS

SEQ ID NO: 24316 - protein, 1238 aa, Homo sapiens
MANGGGGGGGSSGGGGGGGGSSLRMSSNIHANHLSLDASSSSSSSSSSSSSSSSSSSSSSVHEPKMDALIIPVTMEVPCDSRGQRMWWAFLASSMVTFFGGLFIILLWRTLKYLWTVCCHCGGKTKEAQKINNGSSQADGTLKPVDEKEEAVAAEVGWMTSVKDWAGVMISAQTLTGRVLVVLVFALSIGALVIYFIDSSNPIESCQNFYKDFTLQIDMAFNVFFLLYFGLRFIAANDKLWFWLEVNSVVDFFTVPPVFVSVYLNRSWLGLRFLRALRLIQFSEILQFLNILKTSNSIKLVNLLSIFISTWLTAAGFIHLVENSGDPWENFQNNQALTYWECVYLLMVTMSTVGYGDVYAKTTLGRLFMVFFILGGLAMFASYVPEIIELIGNRKKYGGSYSAVSGRKHIVVCGHITLESVSNFLKDFLHKDRDDVNVEIVFLHNISPNLELEALFKRHFTQVEFYQGSVLNPHDLARVKIESADACLILANKYCADPDAEDASNIMRVISIKNYHPKIRIITQMLQYHNKAHLLNIPSWNWKEGDDAICLAELKLGFIAQSCLAQGLSTMLANLFSMRSFIKIEEDTWQKYYLEGVSNEMYTEYLSSAFVGLSFPTVCELCFVKLKLLMIAIEYKSANRESRSRKRILINPGNHLKIQEGTLGFFIASDAKEVKRAFFYCKACHDDITDPKRIKKCGCKRLIYFEDEQPSTLSPKKKQRNGGMRNSPNTSPKLMRHDPLLIPGNDQIDNMDSNVKKYDSTGMFHWCAPKEIEKVILTRSEAAMTVLSGHVVVCIFGDVSSALIGLRNLVMPLRASNFHYHELKHIVFVGSIEYLKREWETLHNFPKVSILPGTPLSRADLRAVNINLCDMCVILSANQNNIDDTSLQDKECILASLNIKSMQFDDSIGVLQANSQGFTPPGMDRSSPDNSPVHGMLRQPSITTGVNIPIITELVNDTNVQFLDQDDDDDPDTELYLTQPFACGTAFAVSVLDSLMSATYFNDNILTLIRTLVTGGATPELEALIAEENALRGGYSTPQTLANRDRCRVAQLALLDGPFADLGDGGCYGDLFCKALKTYNMLCFGIYRLRDAHLSTPSQCTKRYVITNPPYEFELVPTDLIFCLMQFDHNAGQSRASLSHSSHSSQSSSKKSSSVHSIPSTANRQNRPKSRESRDKQNATRMNRMGQAEKKWFTDEPDNAYPRNIQIKPMSTHMANQINQYKSTSSLIPPIREVEDEC

SEQ ID NO: 24317 - protein, 490 aa, Homo sapiens
MAGEGDQQDAAHNMGNHLPLLPAESEEEDEMEVEDQDSKEAKKPNIINFDTSLPTSHTYLGADMEEFHGRTLHDDDSCQVIPVLPQVMMILIPGQTLPLQLFHPQEVSMVRNLIQKDRTFAVLAYSNVQEREAQFGTTAEIYAYREEQDFGIEIVKVKAIGRQRFKVLELRTQSDGIQQAKVQILPECVLPSTMSAVQLESLNKCQIFPSKPVSREDQCSYKWWQKYQKRKFHCANLTSWPRWLYSLYDAETLMDRIKKQLREWDENLKDDSLPSNPIDFSYRVAACLPIDDVLRIQLLKIGSAIQRLRCELDIMNKCTSLCCKQCQETEITTKNEIFSLSLCGPMAAYVNPHGYVHETLTVYKACNLNLIGRPSTEHSWFPGYAWTVAQCKICASHIGWKFTATKKDMSPQKFWGLTRSALLPTIPDTEDEISPDKMESRSVAQAGVRWHDLGSLQAPPPGFPPSSCLSLPSSSDYRRTPPCLANFLYF

SEQ ID NO: 24318 - protein, 1316 aa, Homo sapiens
MSVLISQSVINYVEEENIPALKALLEKCKDVDERNECGQTPLMIAAEQGNLEIVKELIKNGANCNLEDLDNWTALISASKEGHVHIVEELLKCGVNLEHRDMGGWTALMWACYKGRTDVVELLLSHGANPSVTGLYSVYPIIWAAGRGHADIVHLLLQNGAKVNCSDKYGTTPLVWAARKGHLECVKHLLAMGADVDQEGANSMTALIVAVKGGYTQSVKEILKRNPNVNLTDKDGNTALMIASKEGHTEIVQDLLDAGTYVNIPDRSGDTVLIGAVRGGHVEIVRALLQKYADIDIRGQDNKTALYWAVEKGNATMVRDILQCNPDTEICTKDGETPLIKATKMRNIEVVELLLDKGAKVSAVDKKGDTPLHIAIRGRSRKLAELLLRNPKDGRLLYRPNKAGETPYNIDCSHQKSILTQIFGARHLSPTETDGDMLGYDLYSSALADILSEPTMQPPICVGLYAQWGSGKSFLLKKLEDEMKTFAGQQIEPLFQFSWLIVFLTLLLCGGLGLLFAFTVHPNLGIAVSLSFLALLYIFFIVIYFGGRREGESWNWAWVLSTRLARHIGYLELLLKLMFVNPPELPEQTTKALPVRFLFTDYNRLSSVGGETSLAEMIATLSDACEREFGFLATRLFRVFKTEDTQGKKKWKKTCCLPSFVIFLFIIGCIISGITLLAIFRVDPKHLTVNAVLISIASVVGLAFVLNCRTWWQVLDSLLNSQRKRLHNAASKLHKLKSEGFMKVLKCEVELMARMAKTIDSFTQNQTRLVVIIDGLDACEQDKVLQMLDTVRVLFSKGPFIAIFASDPHIIIKAINQNLNSVLRDSNINGHDYMRNIVHLPVFLNSRGLSNARKFLVTSATNGDVPCSDTTGIQEDADRRVSQNSLGEMTKLGSKTALNRRDTYRRRQMQRTITRQMSFDLTKLLVTEDWFSDISPQTMRRLLNIVSVTGRLLRANQISFNWDRLASWINLTEQWPYRTSWLILYLEETEGIPDQMTLKTIYERISKNIPTTKDVEPLLEIDGDIRNFEVFLSSRTPVLVARDVKVFLPCTVNLDPKLREIIADVRAAREQISIGGLAYPPLPLHEGPPRAPSGYSQPPSVCSSTSFNGPFAGGVVSPQPHSSYYSGMTGPQHPFYNRGSGPAPGPVVLLNSLNVDAVCEKLKQIEGLDQSMLPQYCTTIKKANINGRVLAQCNIDELKKEMNMNFGDWHLFRSTVLEMRNAESHVVPEDPRFLSESSSGPAPHGEPARRASHNELPHTELSSQTPYTLNFSFEELNTLGLDEGAPRHSNLSWQAHADTGRKGRNQWGYCSFAGAA

SEQ ID NO: 24319 - protein, 1178 aa, Homo sapiens
MDALIIPVTMEVPCDSRGQRMWWAFLASSMVTFFGGLFIILLWRTLKYLWTVCCHCGGKTKEAQKINNGSSQADGTLKPVDEKEEAVAAEVGWMTSVKDWAGVMISAQTLTGRVLVVLVFALSIGALVIYFIDSSNPIESCQNFYKDFTLQIDMAFNVFFLLYFGLRFIAANDKLWFWLEVNSVVDFFTVPPVFVSVYLNRSWLGLRFLRALRLIQFSEILQFLNILKTSNSIKLVNLLSIFISTWLTAAGFIHLVENSGDPWENFQNNQALTYWECVYLLMVTMSTVGYGDVYAKTTLGRLFMVFFILGGLAMFASYVPEIIELIGNRKKYGGSYSAVSGRKHIVVCGHITLESVSNFLKDFLHKDRDDVNVEIVFLHNISPNLELEALFKRHFTQVEFYQGSVLNPHDLARVKIESADACLILANKYCADPDAEDASNIMRVISIKNYHPKIRIITQMLQYHNKAHLLNIPSWNWKEGDDAICLAELKLGFIAQSCLAQGLSTMLANLFSMRSFIKIEEDTWQKYYLEGVSNEMYTEYLSSAFVGLSFPTVCELCFVKLKLLMIAIEYKSANRESRSRKRILINPGNHLKIQEGTLGFFIASDAKEVKRAFFYCKACHDDITDPKRIKKCGCKRLIYSKMSIYKRMRRACCFDCGRSERDCSCMSGRVRGNVDTLERAFPLSSVSVNDCSTSFRAFEDEQPSTLSPKKKQRNGGMRNSPNTSPKLMRHDPLLIPGNDQIDNMDSNVKKYDSTGMFHWCAPKEIEKVILTRSEAAMTVLSGHVVVCIFGDVSSALIGLRNLVMPLRASNFHYHELKHIVFVGSIEYLKREWETLHNFPKVSILPGTPLSRADLRAVNINLCDMCVILSANQNNIDDTSLQDKECILASLNIKSMQFDDSIGVLQANSQGFTPPGMDRSSPDNSPVHGMLRQPSITTGVNIPIITELVNDTNVQFLDQDDDDDPDTELYLTQPFACGTAFAVSVLDSLMSATYFNDNILTLIRTLVTGGATPELEALIAEENALRGGYSTPQTLANRDRCRVAQLALLDGPFADLGDGGCYGDLFCKALKTYNMLCFGIYRLRDAHLSTPSQCTKRYVITNPPYEFELVPTDLIFCLMQFDHNAGQSRASLSHSSHSSQSSSKKSSSVHSIPSTANRQNRPKSRESRDKQNRKEMVYR

SEQ ID NO: 24320 - protein, 1085 aa, Homo sapiens
MGTATRRKPHLLLVAAVALVSSSAWSSALGSQTTFGPVFEDQPLSVLFPEESTEEQVLLACRARASPPATYRWKMNGTEMKLEPGSRHQLVGGNLVIMNPTKAQDAGVYQCLASNPVGTVVSREAILRFGFLQEFSKEERDPVKAHEGWGVMLPCNPPAHYPGLSYRWLLNEFPNFIPTDGRHFVSQTTGNLYIARTNASDLGNYSCLATSHMDFSTKSVFSKFAQLNLAAEDTRLFAPSIKARFPAETYALVGQQVTLECFAFGNPVPRIKWRKVDGSLSPQWTTAEPTLQIPSVSFEDEGTYECEAENSKGRDTVQGRIIVQAQPEWLKVISDTEADIGSNLRWGCAAAGKPRPTVRWLRNGEPLASQNRVEVLAGDLRFSKLSLEDSGMYQCVAENKHGTIYASAELAVQALAPDFRLNPVRRLIPAARGGEILIPCQPRAAPKAVVLWSKGTEILVNSSRVTVTPDGTLIIRNISRSDEGKYTCFAENFMGKANSTGILSVRDATKITLAPSSADINLGDNLTLQCHASHDPTMDLTFTWTLDDFPIDFDKPGGHYRRTNVKETIGDLTILNAQLRHGGKYTCMAQTVVDSASKEATVLVRGPPGPPGGVVVRDIGDTTIQLSWSRGFDNHSPIAKYTLQARTPPAGKWKQVRTNPANIEGNAETAQVLGLTPWMDYEFRVIASNILGTGEPSGPSSKIRTREAAPSVAPSGLSGGGGAPGELIVNWTPMSREYQNGDGFGYLLSFRRQGSTHWQTARVPGADAQYFVYSNESVRPYTPFEVKIRSYNRRGDGPESLTALVYSAEEEPRVAPTKVWAKGVSSSEMNVTWEPVQQDMNGILLGYEIRYWKAGDKEAAADRVRTAGLDTSARVSGLHPNTKYHVTVRAYNRAGTGPASPSANATTMKPPPRRPPGNISWTFSSSSLSIKWDPVVPFRNESAVTGYKMLYQNDLHLTPTLHLTGKNWIEIPVPEDIGHALVQIRTTGPGGDGIPAEVHIVRNGEMALWDPIRTPPLESSPRPGRNTRHEQVEELERSAHLTILQSKEEGQALGPRALPPSPSSSSKDPDAVPDNSLGAPACPSG

SEQ ID NO: 24321 - protein, 253 aa, Homo sapiens
MRGAPGNCVGAEQALARRKRAQTVAIRGHPRPPGPPGDTRAESPPDPLQSAGDDEDDEEEDEEEEIDVVTVEKRRSSSNTKAVTTFTITVRPKNAALGPGRAQSSELILKRCLPIHQQHNYAAPSPYVESEDAPPQKKIKSEASPRPLKSVIPPKAKSLSPRNSDSEDSERRRNHNILERQRRNDLRSSFLTLRDHVPELVKNEKAAKVVILKKATEYVHSLQAEEHQLLLEKEKLQARQQQLLKKIEHARTC

SEQ ID NO: 24322 - protein, 1123 aa, Homo sapiens [sequence omitted]

SEQ ID NO: 24323 - protein, 301 aa, Homo sapiens
MPNQGEDCYFFFYSTCTKGDSCPFRHCEAAIGNETVCTLWQEGRCFRQVCRFRHMEIDKKRSEIPCYWENQPTGCQKLNCAFHHNRGRYVDGLFLPPSKTVLPTVPESPEEEVKASQLSVQQNKLSVQSNPSPQLRSVMKVESSENVPSPTHPPVVINAADDDEDDDDQFSEEGDETKTPTLQPTPEVHNGLRVTSVRKPAVNIKQGECLNFGIKTLEEIKSKKMKEKSKKQGEGSSGVSSLLLHPEPVPGPEKENVRTVVRTVTLSTKQGEEPLVRLSLTERLGKRKFSADLCYWCPCIG

SEQ ID NO: 24324 - protein, 63 aa, Homo sapiens
SLTCVTSSHWDRPYSREVAAFPLTESRSVAQAGVQWHDPGFTPFSYLSLPLGLQAPATMPGPS

SEQ ID NO: 24325 - protein, 489 aa, Homo sapiens
MTEGARAADEVRVPLGAPPPGPAALVGASPESPGAPGREAERGSELGVSPSESPAAERGAELGADEEQRVPYPALAATVFFCLGQTTRPRSWCLRLVCNPWFEHVSMLVIMLNCVTLGMFRPCEDVECGSERCNILEAFDAFIFAFFAVEMVIKMVALGLFGQKCYLGDTWNRLDFFIVVAGMMEYSLDGHNVSLSAIRTVRVLRPLRAINRVPSMRILVTLLLDTLPMLGNVLLLCFFVFFIFGIVGVQLWAGLLRNRCFLDSAFVRNNNLTFLRPYYQTEEGEENPFICSSRRDNGMQKCSHIPGRRELRMPCTLGWEAYTQPQAEGVGAARNACINWNQYYNVCRSGDSNPHNGAINFDNIGYAWIAIFQVITLEGWVDIMYYVMDAHSFYNFIYFILLIIVGSFFMINLCLVVIATQFSETKQRESQLMREQRARHLSNDSTLASFSEPGSCYEELLKTGPGPWPSVGPQCALPPAQPPSGHTDL

SEQ ID NO: 24326 - protein, 415 aa, Homo sapiens
MQNSHSGVNQLGGVFVNGRPLPDSTRQKIVELAHSGARPCDISRILQTHADAKVQVLDNQNVSNGCVSKILGRYYETGSIRPRAIGGSKPRVATPEVVSKIAQYKRECPSIFAWEIRDRLLSEGVCTNDNIPSVSSINRVLRNLASEKQQMGADGMYDKLRMLNGQTGSWGTRPGWYPGTSVPGQPTQDGCQQQEGGGENTNSISSNGEDSDEAQMRLQLKRKLQRNRTSFTQEQIEALEKEFERTHYPDVFARERLAAKIDLPEARIQVWFSNRRAKWRREEKLRNQRRQASNTPSHIPISSSFSTSVYQPIPQPTTPVSSFTSGSMLGRTDTALTNTYSALPPMPSFTMANNLPMQVSAAGGGLHNPGPREVRSGSGPADLIGCVCTLESFSHYSDWLDQSSRRQSIPSLLSD

SEQ ID NO: 24327 - protein, 2226 aa, Homo sapiens
MVLAGLIRKLGHQLAEIRERALKSILCKIEHNLICYADLIQERQLFLHLLEWFNFPSVPMKEEVLNLLSRLVKYPPAVQHLVDVGAVEFLSKLRSNVEPNLQAEIDGILDGLFLLPSEVPALSSASYQTNQTELSKNPEILTGYFPQDKSNFQQMEVPPRPVVNQTVKCLKFSTFPWLPLTTTDRHVLSSNESSLRSSNHTLIWNTCELLKDVIMQDFPAEIFLQRPKIVQSLLSLLKLAFGDGKHRLALQSVSCLQQLCMYLRNRLNFHRDPGFFSNKHDTVSQNSSLSYCHEARGTHHSQNPSPGSSSPRPSVVGRTGQRPRGDGQDWDAASSSGSSSHAHVNSRISVHSPLDMGHIDLPELETEDTLELQFQQLSLPQFCVSILESAVPLLRTGSRQVIIRVLELLTEDMTLIGEAISTDIWDDSSLFGIDMKEKLLLVLGALGETMCYHKSSISLEQPEVMLVHHRMAFISISLFAVRLLQTLLPVEKASEFLSEPMSTALFLLSLDMPISLEYPNIHEAVVAYLEQLNSENYSIYKRTAEAVYSIECTCNFLSDIGKEGEKNLLELVELADQALRSFSYHQHFPLIKEIISICSKIWKSAQASPLLQGESQKVLLHMLSHPLPRVKAETYHCCLEITKECLGVHNVTKPVSSLCNGIHFLLHPKVLYEISVFGIQEPESEVNTAAKAILLYLLQGRLMMTALTWNKFIESLCPVIPILQGYADTEDPLGNCILLLSKASSDTEEMLPCTTRLKSMLRLLLVKKPSVRSLALKLLAFHLTSEEGADTKRPLIDARVLSRVTDLFIGKKPIELRLDDRRELVIKLETVEKVYEIFTSDDVDLVLRKSAAEQLAVIMQDIKMHAVVKKLCLIDKIIEYLNECVSQDGKVVECLVQPCLTLLRKVLCGDPVMRVSLSQQSSLLTVLFRVSLIFHEDCSVVTEVGALFCLLLFDEVSRMDMWSVNPSNKPSLPSVFSLPVSVFRRYHLPVHVIGHHAVSPYSIVLPLSADCLALKPVSDMLRIAWNLSWYHGSDNLLKQMNSETKTQEILDALKLSTEDILTLKITHMASGLQDCLHSIVQAATHREVRAAVTRMSFYLLNDRLSLKGCPGPCGVTLKSLAWHTALNRFLQVLPACTEDEKLLIDIIHFLNKLIKEQRKNSSLELLNWILELLLRHSANPLLDLLVLTESQAREETDDIRTAVRQQLQKELIALFDTLLLNFMEVTDRKCSELLYVFQTQLALKLLQCLKVTDAPHFYGLPSLERTLRGMANLTAFPGWSSHSPLTKPLDICVKYLSGLLEVITSFYVERGGNAMSFMGKGVTKSTILCLLHLSHEMMAQAGSLEWMSLWFLPLGSHSEEHIPTQQGLAWLIPLWVDRDPEVRFTSLGLGSALTTLETGCVALANSCQNISGGLWGTVVNILLDQSECSMVRREAAFILQNLLVIPMPTEIIKDYTWQGPCVHDEDSGLSLIGKPALQALLYHCHFYEHLNQMVKHCYLGRCMFDLNFSAFDRNSESNDLNGLDDSFKFWRAPSRTSQDRDPSSLSTSETTVAPSLGSTEFQPLVQSTTLLPEASHDQFVAQGHQESTSPRPPHDSSLSAPLPKLCVFVTPSLLSAMCSLLDNLLTIAPRDTAKAFRQAHLIELLCSIADATLIQTCVQELRALLPSSPPAEHTQAQVSFLLEYLSSLSRLLQSCLLVEPDLVIQDELVKPLITNIIGILTICTKDVLDKELISAFYHTWTHLFNLLAMLLRKAGAITLPFVTVALAKHWTAAIDMFCTCAGLSATCPALYTASLQFLSVLLTEEAKGHLQAKSKTHLCCSPTVASLLDDSQENQKSLEQLSDVILQCYEGKSSKDILKRVAANALMSLLAVSRRAQKHALKANLIDNCMEQMKHINAQLNLDSLRPGKAALKKKEDGVIKELSIAMQLLRNCLYQNEECKEAALEAHLVPVLHSLWPWILMDDSLMQISLQLLCVYTANFPNGCSSLCWSSCGQHPVQATHRGAVSNSLMLCILKLASQMPLENTTVQQMVFMLLSNLALSHDCKGVIQKSNFLQNFLSLALPKGGNKHLSNLTILWLKLLLNISSGEDGQQMILRLDGCLDLLTEMSKYKHKSSPLLPLLIFHNVCFSPANKPKILANEKVITVLAACLESENQNAQRIGAAALWALIYNYQKAKTALKSPSVKRRVDEAYSLAKKTFPNSEANPLNAYYLKCLENLVQLLNSS

SEQ ID NO: 24328 - protein, 1027 aa, Homo sapiens
MRAALWTLGLGPLLLNLWAVPIGGPGALRLAYRHSTCDGVVLVRHHGAWGYVCNQEWTLAEASVVCRQLGCGPAVGAPKYVPLPGEMAQPWLHNVSCRGNESSLWECSLGSWCQSPCPHAWVVVALCSNGTFRELRLVKGRSPCAGLPEIRNVNGVDRLCVLHVEEAMVFCRELGCGPVLQAPRRDVGVVRKYLACRGTEPTIRSCRLDNNFRSGCDLRLDAEVVCSGHTEARLVGGEHPCAGRLEVTWGTVCDAALDLATAHVVCRELQCGAVVSTPEGARFGRGSGPVWTEAFRCAGNESLLFHCPRGRGSQCGHGHDAGLRCSEFRMVNGSSSCEGRVEFQVQGSWAPLCATHWDIADATVLCHQLNCGNAVAAPGGGHFGDGDAAIWPDAFHCEGTESYLWNCPVSTLGAPACAPGNTASAVCSGLAHALRLREGQSRCDGRVEVSLDGVWGRVLDDAWDLRGAGVVCRQLGCRGAQQAYDAPAPSRGSVQVALSRVRCLGTETRLTQCNVSATLQEPAGTSRDAGVVCSGEVGTASPMARRHGIPGALTLSLHREPQGAAGRGAGALHGGAWGTVCDDAWDLRDAHVVCRQLGCGRALSALGAAHFGAGAGRIWLDELGCQGHESALWQCPSAGWGRHDWRHKEDAGVFCSESVALRLRGGTCCCAGWLDVFYNGTWGAMCSNALKDLSLSIICKQLGCGVWGVGLAGEQALPLCGHRDRLGGQHRVPQAAQLHSVAMPFPPMAPALLRPSRAGLSEDRPQAAGEPLNCSSWLGCPEEGALRVRGGEDRCSGRVELWHAGSWGTVCDDGWDLADAEVVCRQLGCGRAVAALGAAAFGPGSGPVWLDEVGCRGSEASLWGCPAERWGRGDRAHEEDAGVRCWEPGPGPPLPAAPFRTFWVVSVVLGSLLGLLLLGLMAFLILPRVTQAMQRGLGRSEVSPGEAIYDVIGEMPPAGLYEEIMEAEAVLQDEEDGSVVKVDTEAAVSGEVSNLLEGQSIRAEGGHSRPVSQGYDEAAFPLEEMTL

SEQ ID NO: 24329 - protein, 320 aa, Homo sapiens
TAFPGWSSHSPLTKPLDICVKYLSGLLEVITSFYVERGGNAMSFMGKGVTKSTILCLLHLSHEMMAQAGSLEWMSLWFLPLGSHSEEHIPTQQGLAWLIPLWVDRDPEVRFTSLGLGSALTTLETGCVALANSCQNISGGLWGTVVNILLDQSECSMVRREAAFILQNLLVIPMPTEIIKDYTWQGPCVHDEDSGLSLIGKPALQALLYHCHFYEHLNQMVKHCYLGRCMFDLNFSAFDRNSESNDLNGLDDSFKFWRAPSRTSQDRDPSSLSTSETTVTRKVHHHGHLMIHLFLLPCPNCVFLLLHLFFQQCAASWTTS

SEQ ID NO: 24330 - protein, 443 aa, Homo sapiens
MAFTLQERQMLGLQGLLPPKIETQDIQALRFHRNLKKMTSPLEKYIYIMGIQERNEKLFYRILQDDIESLMPIVYTPTVGLACSQYGHIFRRPKGLFISISDRGHVRSIVDNWPENHVKAVVVTDGERILGLGDLGVYGMGIPVGKLCLYTACAGIRPDRCLPVCIDVGTDNIALLKDPFYMGLYQKRDRTQQYDDLIDEFMKAITDRYGRNTLIQFEDFGNHNAFRFLRKYREKYCTFNDDIQGTAAVALAGLLAAQKVISKPISEHKILFLGAGEAALGIANLIVMSMVENGLSEQEAQKKIWMFDKYGLLVKGRKAKIDSYQEPFTHSAPESIPDTFEDAVNILKPSTIIGVAGAGRLFTPDVIRAMASINERPVIFALSNPTAQAECTAEEAYTLTEGRCLFASGSPFGPVKLTDGRVFTPGQGNNVYIFPGPDKPIDR

SEQ ID NO: 24331 - protein, 703 aa, Homo sapiens
MGRSNSRSHSSRSKSRSQSSSRSRSRSHSRKKRYSSRSRSRTYSRSRSRDRMYSRDYRRDYRNNRGMRRPYGYRGRGRGYYQGGGGRYHRGGYRPVWNRRHSRSPRRGRSRSRSPKRRSVSSQRSRSRSRRSYRSSRSPRSSSSRSSSPYSKSPVSKRRGSQEKQTKKAEGEPQEESPLKSKSQEEPKDTFEHDPSESIDEFNKSSATSGDIWPGLSAYDNSPRSPHSPSPIATPPSQSSSCSDAPMLSTVHSAKNTPSQHSHSIQHSPERSGSGSVGNGSSRYSPSQNSPIHHIPSRRSPAKTIAPQNAPRDESRGRSSFYPDGGDQETAKTGKFLKRFTDEESRVFLLDRGNTRDKEASKEKGSEKGRAEGEWEDQEALDYFSDKESGKQKFNDSEGDDTEETEDYRQFRKSVLADQGKSFATASHRNTEEEGLKYKSKVSLKGNRESDGFREEKNYKLKETGYVVERPSTTKDKHKEEDKNSERITVKKETQSPEQVKSEKLKDLFDYSPPLHKNLDAREKSTFREESPLRIKMIASDSHRPEVKLKMAPVPLDDSNRPASLTKDRLLASTLVHSVKKEQEFRSIFDHIKLPQASKSTSESFIQHIVSLVHHVKEQYFKSAAMTLNERFTSYQKATEEHSTRQKSPEIHRRIDISPSTLRKHTRLAGEERVFKEENQKMPLSIFLNYIVFEKAMEQEGGR

SEQ ID NO: 24332 - protein, 315 aa, Homo sapiens
MFANLKYVSLGILVFQTTSLVLTMRYSRTLKEEGPRYLSSTAVVVAELLKIMACILLVYKDSKCSLRALNRVLHDEILNKPMETLKLAIPSGIYTLQNNLLYVALSNLDAATYQVTYQLKILTTALFSVSMLSKKLGVYQWLSLVILMTGVAFVQWPSDSQLDSKELSAGSQFVGLMAVLTACFSSGFAGVYFEKILKETKQSVWIRNIQLGFFGSIFGLMGVYIYDGELVSKNGFFQGYNRLTWIVVVLQSLTLSPGWSAVARSRLTATSHSLVQGILLPQPLSSWDCRREPLRPAYTVYIFKDCSNRYKNCKK

SEQ ID NO: 24333 - protein, 1175 aa, Homo sapiens
MDALIIPVTMEVPCDSRGQRMWWAFLASSMVTFFGGLFIILLWRTLKYLWTVCCHCGGKTKEAQKINNGSSQADGTLKPVDEKEEAVAAEVGWMTSVKDWAGVMISAQTLTGRVLVVLVFALSIGALVIYFIDSSNPIESCQNFYKDFTLQIDMAFNVFFLLYFGLRFIAANDKLWFWLEVNSVVDFFTVPPVFVSVYLNRSWLGLRFLRALRLIQFSEILQFLNILKTSNSIKLVNLLSIFISTWLTAAGFIHLVENSGDPWENFQNNQALTYWECVYLLMVTMSTVGYGDVYAKTTLGRLFMVFFILGGLAMFASYVPEIIELIGNRKKYGGSYSAVSGRKHIVVCGHITLESVSNFLKDFLHKDRDDVNVEIVFLHNISPNLELEALFKRHFTQVEFYQGSVLNPHDLARVKIESADACLILANKYCADPDAEDASNIMRVISIKNYHPKIRIITQMLQYHNKAHLLNIPSWNWKEGDDAICLAELKLGFIAQSCLAQGLSTMLANLFSMRSFIKIEEDTWQKYYLEGVSNEMYTEYLSSAFVGLSFPTVCELCFVKLKLLMIAIEYKSANRESRSRKRILINPGNHLKIQEGTLGFFIASDAKEVKRAFFYCKACHDDITDPKRIKKCGCKRPKMSIYKRMRRACCFDCGRSERDCSCMSGRVRGNVDTLERAFPLSSVSVNDCSTSFRAFEDEQPSTLSPKKKQRNGGMRNSPNTSPKLMRHDPLLIPGNDQIDNMDSNVKKYDSTGMFHWCAPKEIEKVILTRSEAAMTVLSGHVVVCIFGDVSSALIGLRNLVMPLRASNFHYHELKHIVFVGSIEYLKREWETLHNFPKVSILPGTPLSRADLRAVNINLCDMCVILSANQNNIDDTSLQDKECILASLNIKSMQFDDSIGVLQANSQGFTPPGMDRSSPDNSPVHGMLRQPSITTGVNIPIITELVNDTNVQFLDQDDDDDPDTELYLTQPFACGTAFAVSVLDSLMSATYFNDNILTLIRTLVTGGATPELEALIAEENALRGGYSTPQTLANRDRCRVAQLALLDGPFADLGDGGCYGDLFCKALKTYNMLCFGIYRLRDAHLSTPSQCTKRYVITNPPYEFELVPTDLIFCLMQFDHNAGQSRASLSHSSHSSQSSSKKSSSVHSIPSTANRQNRPKSRESRDKQNRKEMVYR

SEQ ID NO: 24334 - protein, 1115 aa, Homo sapiens
MDALIIPVTMEVPCDSRGQRMWWAFLASSMVTFFGGLFIILLWRTLKYLWTVCCHCGGKTKVVLVFALSIGALVIYFIDSSNPIESCQNFYKDFTLQIDMAFNVFFLLYFGLRFIAANDKLWFWLEVNSVVDFFTVPPVFVSVYLNRSWLGLRFLRALRLIQFSEILQFLNILKTSNSIKLVNLLSIFISTWLTAAGFIHLVENSGDPWENFQNNQALTYWECVYLLMVTMSTVGYGDVYAKTTLGRLFMVFFILGGLAMFASYVPEIIELIGNRKKYGGSYSAVSGRKHIVVCGHITLESVSNFLKDFLHKDRDDVNVEIVFLHNISPNLELEALFKRHFTQVEFYQGSVLNPHDLARVKIESADACLILANKYCADPDAEDASNIMRVISIKNYHPKIRIITQMLQYHNKAHLLNIPSWNWKEGDDAICLAELKLGFIAQSCLAQGLSTMLANLFSMRSFIKIEEDTWQKYYLEGVSNEMYTEYLSSAFVGLSFPTVCELCFVKLKLLMIAIEYKSANRESRILINPGNHLKIQEGTLGFFIASDAKEVKRAFFYCKACHDDITDPKRIKKCGCKRLIYFEDEQPSTLSPKKKQRNGGMRNSPNTSPKLMRHDPLLIPGNDQIDNMDSNVKKYDSTGMFHWCAPKEIEKVILTRSEAAMTVLSGHVVVCIFGDVSSALIGLRNLVMPLRASNFHYHELKHIVFVGSIEYLKREWETLHNFPKVSILPGTPLSRADLRAVNINLCDMCVILSANQNNIDDTSLQDKECILASLNIKSMQFDDSIGVLQANSQGFTPPGMDRSSPDNSPVHGMLRQPSITTGVNIPIITELVNDTNVQFLDQDDDDDPDTELYLTQPFACGTAFAVSVLDSLMSATYFNDNILTLIRTLVTGGATPELEALIAEENALRGGYSTPQTLANRDRCRVAQLALLDGPFADLGDGGCYGDLFCKALKTYNMLCFGIYRLRDAHLSTPSQCTKRYVITNPPYEFELVPTDLIFCLMQFDHNAGQSRASLSHSSHSSQSSSKKSSSVHSIPSTANRQNRPKSRESRDKQNATRMNRMGQAEKKWFTDEPDNAYPRNIQIKPMSTHMANQINQYKSTSSLIPPIREVEDEC

SEQ ID NO: 24335 - protein, 321 aa, Homo sapiens [sequence omitted]

SEQ ID NO: 24336 - protein, 674 aa, Homo sapiens
MAQALLVPPGPESFRLFTRESLAAIEKRAAEEKAKKPKKEQDNDDENKPKPNSDLEAGKNLPFIYGDIPPEMVSEPLEDLDPYYINKKTFIVMNKGKAIFRFSATSALYILTPLNPVRKIAIKILVHSLFSMLIMCTILTNCVFMTLSNPPDWTKNVEYTFTGIYTFESLIKILARGFCLEDFTFLRDPWNWLDFSVIVMAYVTEFVDLGNVSALRTFRVLRALKTISVIPGLKTIVGALIQSVKKLSDVMILTVFCLSVFALIGLQLFMGNLRNKCLQWPPSDSAFETNTTSYFNGTMDSNGTFVNVTMSTFNWKDYIGDDSHFYVLDGQKDPLLCGNGSDAGQCPEGYICVKAGRNPNYGYTSFDTFSWAFLSLFRLMTQDYWENLYQLTLRAAGKTYMIFFVLVIFLGSFYLVNLILAVVAMAYEEQNQATLEEAEQKEAEFQQMLEQLKKQQEEAQAVAAASAASRDFSGIGGLGELLESSSEASKLSSKSAKEWRNRRKKRRQREHLEGNNKGERDSFPKSESEDSVKRSSFLFSMDGNRLTSDKKFCSPHQSLLSIRGSLFSPRRNSKTSIFSFRGRAKDVGSENDFADDEHSTFEDSESRRDSLFVPHRHGERRNSNVSQARHHHRNGSQKEKVKLLPDFNGDAGGFLWKAKSREHSQHSDQHNGRT

SEQ ID NO: 24337 - protein, 1128 aa, Homo sapiens
MANGGGGGGGSSGGGGGGGGSSLRMSSNIHANHLSLDASSSSSSSSSSSSSSSSSSSSSSVHEPKMDALIIPVTMEVPCDSRGQRMWWAFLASSMVTFFGGLFIILLWRTLKYLWTVCCHCGGKTKVVLVFALSIGALVIYFIDSSNPIESCQNFYKDFTLQIDMAFNVFFLLYFGLRFIAANDKLWFWLEVNSVVDFFTVPPVFVSVYLNRSWLGLRFLRALRLIQFSEILQFLNILKTSNSIKLVNLLSIFISTWLTAAGFIHLVENSGDPWENFQNNQALTYWECVYLLMVTMSTVGYGDVYAKTTLGRLFMVFFILGGLAMFASYVPEIIELIGNRKKYGGSYSAVSGRKHIVVCGHITLESVSNFLKDFLHKDRDDVNVEIVFLHNISPNLELEALFKRHFTQVEFYQGSVLNPHDLARVKIESADACLILANKYCADPDAEDASNIMRVISIKNYHPKIRIITQMLQYHNKAHLLNIPSWNWKEGDDAICLAELKLGFIAQSCLAQGLSTMLANLFSMRSFIKIEEDTWQKYYLEGVSNEMYTEYLSSAFVGLSFPTVCELCFVKLKLLMIAIEYKSANRESRSRKRILINPGNHLKIQEGTLGFFIASDAKEVKRAFFYCKACHDDITDPKRIKKCGCKRLEDEQPSTLSPKKKQRNGGMRNSPNTSPKLMRHDPLLIPGNDQIDNMDSNVKKYDSTGMFHWCAPKEIEKVILTRSEAAMTVLSGHVVVCIFGDVSSALIGLRNLVMPLRASNFHYHELKHIVFVGSIEYLKREWETLHNFPKVSILPGTPLSRADLRAVNINLCDMCVILSANQNNIDDTSLQDKECILASLNIKSMQFDDSIGVLQANSQGFTPPGMDRSSPDNSPVHGMLRQPSITTGVNIPIITELVNDTNVQFLDQDDDDDPDTELYLTQPFACGTAFAVSVLDSLMSATYFNDNILTLIRTLVTGGATPELEALIAEENALRGGYSTPQTLANRDRCRVAQLALLDGPFADLGDGGCYGDLFCKALKTYNMLCFGIYRLRDAHLSTPSQCTKRYVITNPPYEFELVPTDLIFCLMQFDHNAGQSRASLSHSSHSSQSSSKKSSSVHSIPSTANRQNRPKSRESRDKQNRKEMVYR

SEQ ID NO: 24338 - protein, 385 aa, Homo sapiens
MSSPNIWSTGSSVYSTPVFSQKMTVWILLLLSLYPGFTSQKSDDDYEDYASNKTWVLTPKVPEGDVTVILNNLLEGYDNKLRPDIGVKPTLIHTDMYVNSIGPVNAINMEYTIDIFFAQTWYDRRLKFNSTIKVLRLNSNMVGKIWIPDTFFRNSKKADAHWITTPNRMLRIWNDGRVLYTLRLTIDAECQLQLHNFPMDEHSCPLEFSSYGYPREEIVYQWKRSSVEVGDTRSWRLYQFSFVGLRNTTEVVKTTSGDYVVMSVYFDLSRRMGYFTIQTYIPCTLIVVLSWVSFWINKDAVPARTSLGITTVLTMTTLSTIARKSLPKVSYVTAMDLFVSVCFIFVFSALVEYGTLHYFVSNRKPSKDKDKKKKNPVCIIFHWHH

SEQ ID NO: 24339 - protein, 740 aa, Homo sapiens
DSLALQPKLTRHKELASENINLRTRKYSSSSLSHMGAYSRSLPRLYRATENQLTPLSLPPRNSLGNSKRTKLGEKDLPHSVIDNDNYLNFSSLSSGALPYKTSASEGNPYVSSTLSVPASPRVARKMLLASTSSCASDDFDQASYVGTNPSHSLLAGESDRVFATRRNFSCGSVEFDEADLESLRQASGTPQPALRERKSSISSISGRDDLMDYHRRQREERLREQEMERLERQRLETILSLCAEYTKPDSRLSTGTTVEDVQKINKELEKLQLSDEESVFEEALMSPDTRYRCHRKDSLPDADLASCGSLSQSSASFFTPRSTRNDELLSDLTRTPPPPSSTFPKASSESSYLSILPKTPEGISEEQRSQELAAMEETRIVILNNLEELKQKIKDINDQMDESFRELDMECALLDGEQKSETTELMKEKEILDHLNRKIAELEKNIVGEKTKEKVKLDAEREKLERLQELYSEQKTQLDNCPESMREQLQQQLKRDADLLDVESKHFEDLEFQQLEHESRLDEEKENLTQQLLREVAEYQRNIVSRKEKISALKKQANHIVQQAQREQDHFVKEKNNLIMMLQREKENLCNLEKKYSSLSGGKGFPVNPNTLKEGYISVNEINEPCGNSTNLSPSTQFPADADAVATEPATAVLASQPQSKEQRSPVYSGFVFPSALSPHPITQHTSAPWPEFMATSVDPLPLNDTPPPLPAKKHRRQQQQQEQQHFRSLEERKKQHKE

SEQ ID NO: 24340 - protein, 718 aa, Homo sapiens
MALPQGLLTFRDVAIEFSQEEWKCLDPAQRTLYRDVMLENYRNLVSLDISSKCMMEFSSIGKGNTEVIHTGTLQRLASHHIGECCFQEIEKDIHDFVFQWQEDETNGHEAPMTEIKELTGSTDQYDQRHAGNKPIKYQLGSSFHSHLPELHIFQPEGKIGNQLEKSINNASSVSTSQRISCRPKTHISNNYGNNFFHSSLLTQKQDVHRKEKSFQFNESGKSFNCSSLFKKHQIIHLGEKQYKCDVCGKDFNQKRYLAHHRRCHTGEKPYMCNKCGKVFNKKAYLARHYRRHTGEKPYKCNECGKTFSDKSALLVHKTIHTGEKPYKCNECGKVFNQQSNLARHHRVHTGEKPYQCKECDKVFSRKSYLERHRRIHTGEKPYKCKVCDKAFRHDSHLAQHIVIHTREKPYKCNECGKTFGENSALLVHKTIHTGEKPYKCNECGKVFNQQSNLARHHRLHTGEKPYKCKECDKVFSRKSHLERHRRIHTGEKPYKCKVCDKAFRRDSHLAQHTVIHTGEKPYKCNECGKTFVQNSSLVMHKVIHTGEKRYKCNECGKSFNHKSSLAYHHRLHTGEKPYKCNECGKVFRTQSQLACHHRLHTGEKPYKCEECDKVFNIKSHLEIHRRVHTGEKPYKCRVCDKAFGRDSYLAQHQRVHTGEKPYKCKVCDKAFKCYSHLAQHTRIHTGEKPFKCSECGKAFRAQSTLIHHQAIHGVGKLD

SEQ ID NO: 24341 - protein, 400 aa, Homo sapiens [sequence omitted]

SEQ ID NO: 24342 - protein, 1998 aa, Homo sapiens
MEQTVLVPPGPDSFNFFTRESLAAIERRIAEEKAKNPKPDKKDDDENGPKPNSDLEAGKNLPFIYGDIPPEMVSEPLEDLDPYYINKKTFIVLNKGKAIFRFSATSALYILTPFNPLRKIAIKILVHSLFSMLIMCTILTNCVFMTMSNPPDWTKNVEYTFTGIYTFESLIKIIARGFCLEDFTFLRDPWNWLDFTVITFAFVTEFVNLGNFSALRTFRVLRALKTISVIPGLKTIVGALIQSVKKLSDVMILTVFCLSVFALIGLQLFMGNLRNKCIQWPPTNASLEEHSIEKNITVNYNGTLINETVFEFDWKSYIQDSRYHYFLEGFLDALLCGNSSDAGQCPEGYMCVKAGRNPNYGYTSFDTFSWAFLSLFRLMTQDFWENLYQLTLRAAGKTYMIFFVLVIFLGSFYLINLILAVVAMAYEEQNQATLEEAEQKEAEFQQMIEQLKKQQEAAQQAATATASEHSREPSAAGRLSDSSSEASKLSSKSAKERRNRRKKRKQKEQSGGEEKDEDEFQKSESEDSIRRKGFRFSIEGNRLTYEKRYSSPHQSLLSIRGSLFSPRRNSRTSLFSFRGRAKDVGSENDFADDEHSTFEDNESRRDSLFVPRRHGERRNSNLSQTSRSSRMLAVFPANGKMHSTVDCNGVVSLVGGPSVPTSPVGQLLPEGTTTETEMRKRRSSSFHVSMDFLEDPSQRQRAMSIASILTNTVEELEESRQKCPPCWYKFSNIFLIWDCSPYWLKVKHVVNLVVMDPFVDLAITICIVLNTLFMAMEHYPMTDHFNNVLTVGNLVFTGIFTAEMFLKIIAMDPYYYFQEGWNIFDGFIVTLSLVELGLANVEGLSVLRSFRLLRVFKLAKSWPTLNMLIKIIGNSVGALGNLTLVLAIIVFIFAVVGMQLFGKSYKDCVCKIASDCQLPRWHMNDFFHSFLIVFRVLCGEWIETMWDCMEVAGQAMCLTVFMMVMVIGNLVVLNLFLALLLSSFSADNLAATDDDNEMNNLQIAVDRMHKGVAYVKRKIYEFIQQSFIRKQKILDEIKPLDDLNNKKDSCMSNHTAEIGKDLDYLKDVNGTTSGIGTGSSVEKYIIDESDYMSFINNPSLTVTVPIAVGESDFENLNTEDFSSESDLEESKEKLNESSSSSEGSTVDIGAPVEEQPVVEPEETLEPEACFTEGCVQRFKCCQINVEEGRGKQWWNLRRTCFRIVEHNWFETFIVFMILLSSGALAFEDIYIDQRKTIKTMLEYADKVFTYIFILEMLLKWVAYGYQTYFTNAWCWLDFLIVDVSLVSLTANALGYSELGAIKSLRTLRALRPLRALSRFEGMRVVVNALLGAIPSIMNVLLVCLIFWLIFSIMGVNLFAGKFYHCINTTTGDRFDIEDVNNHTDCLKLIERNETARWKNVKVNFDNVGFGYLSLLQVATFKGWMDIMYAAVDSRNVELQPKYEESLYMYLYFVIFIIFGSFFTLNLFIGVIIDNFNQQKKKFGGQDIFMTEEQKKYYNAMKKLGSKKPQKPIPRPGNKFQGMVFDFVTRQVFDISIMILICLNMVTMMVETDDQSEYVTTILSRINLVFIVLFTGECVLKLISLRHYYFTIGWNIFDFVVVILSIVGMFLAELIEKYFVSPTLFRVIRLARIGRILRLIKGAKGIRTLLFALMMSLPALFNIGLLLFLVMFIYAIFGMSNFAYVKREVGIDDMFNFETFGNSMICLFQITTSAGWDGLLAPILNSKPPDCDPNKVNPGSSVKGDCGNPSVGIFFFVSYIIISFLVVVNMYIAVILENFSVATEESAEPLSEDDFEMFYEVWEKFDPDATQFMEFEKLSQFAAALEPPLNLPQPNKLQLIAMDLPMVSGDRIHCLDILFAFTKRVLGESGEMDALRIQMEERFMASNPSKVSYQPITTTLKRKQEEVSAVIIQRAYRRHLLKRTVKQASFTYNKNKIKGGANLLIKEDMIIDRINENSITEKTDLTMSTAACPPSYDRVTKPIVEKHEQEGKDEKAKGK

SEQ ID NO: 24343 - protein, 354 aa, Homo sapiens
MDCSCVSDLLFAPPALPALWTPGFAFPDWAYKPESSPGSRQIQLWHFILELLQKEEYQGVIAWQGDYGEFVIKDPDEVARLWGIRKCKPHMNYDKLSRALRYYYNKRILHKTKGKRFTYKFNFSKVVLVNYPLLDMAAAATGSPLLLTPSPFGGAPGPDAPPLTPETLQTLFSAPRLGEPGARTPLFTSETDKLRLDSPFPFLGSGATSYSKPPGLLGPYGRAFPEYPWNFNPYLTGPFPKLPPSLYPPHFYPNPLASSLGHLPSSGAGGGPTATPLLASTGEGLGPERPSGLAAAPRLALPGAGGPEAALGGKEDSDSELEITDVSGCSSDSEGDEGLPAPPKAKAGKGGTGS

SEQ ID NO: 24344 - protein, 1078 aa, Homo sapiens
MAFYSCCWVLLALTWHTSAYGPDQRAQKKGDIILGGLFPIHFGVAAKDQDLKSRPESVECIRYNFRGFRWLQAMIFAIEEINSSPALLPNLTLGYRIFDTCNTVSKALEATLSFVAQNKIDSLNLDEFCNCSEHIPSTIAVVGATGSGVSTAVANLLGLFYIPQVSYASSSRLLSNKNQFKSFLRTIPNDEHQATAMADIIEYFRWNWVGTIAADDDYGRPGIEKFREEAEERDICIDFSELISQYSDEEEIQHVVEVIQNSTAKVIVVFSSGPDLEPLIKEIVRRNITGKIWLASEAWASSSLIAMPQYFHVVGGTIGFALKAGQIPGFREFLKKVHPRKSVHNGFAKEFWEETFNCHLQEGAKGPLPVDTFLRGHEESGDRFSNSSTAFRPLCTGDENISSVETPYIDYTHLRISYNVYLAVYSIAHALQDIYTCLPGRGLFTNGSCADIKKVEAWQVLKHLRHLNFTNNMGEQVTFDECGDLVGNYSIINWHLSPEDGSIVFKEVGYYNVYAKKGERLFINEEKILWSGFSREVPFSNCSRDCLAGTRKGIIEGEPTCCFECVECPDGEYSDETDASACNKCPDDFWSNENHTSCIAKEIEFLSWTEPFGIALTLFAVLGIFLTAFVLGVFIKFRNTPIVKATNRELSYLLLFSLLCCFSSSLFFIGEPQDWTCRLRQPAFGISFVLCISCILVKTNRVLLVFEAKIPTSFHRKWWGLNLQFLLVFLCTFMQIVICVIWLYTAPPSSYRNQELEDEIIFITCHEGSLMALGFLIGYTCLLAAICFFFAFKSRKLPENFNEAKFITFSMLIFFIVWISFIPAYASTYGKFVSAVEVIAILAASFGLLACIFFNKIYIILFKPSRNTIEEVRCSTAAHAFKVAARATLRRSNVSRKRSSSLGGSTGSTPSSSISSKSNSEDPFPQPERQKQQQPLALTQQEQQQQPLTLPQQQRSQQQPRCKQKVIFGSGTVTFSLSFDEPQKNAMAHRNSTHQNSLEAQKSSDTLTRHEPLLPLQCGETDLDLTVQETGLQGPVGGDQRPEVEDPEELSPALVVSSSQSFVISGGGSTVTENVVNS

SEQ ID NO: 24345 - protein, 216 aa, Homo sapiens
MTSRRWFHPNITGVEAENLLLTRGVDGSFLARPSKSNPGDFTLSVRRNGAVTHIKIQNTGDYYDLYGGEKFATLAELVQYYMEHHGQLKEKNGDVIELKYPLNCADPTSERWFHGHLSGKEAEKLLTEKGKHGSFLVRESQSHPGDFVLSVRTGDDKGESNDGKSKVTHVMIRCQELKYDVGGGERFDSLTDLVEHYKKNPMVETLGTVLQLKQPL

SEQ ID NO: 24346 - protein, 405 aa, Homo sapiens
MNLDGTSGGFPAEEDHHNEERQTKNKRKTKHRHKFSEELLQELKEIFGENCYPDYTTRKTLAIKFDCPVNVIDNWFQNKRARLPPAERRRIFVLQKKHDFPVQAHSFLSCQETQAAAHNYATKQSLSGAQRALMRRAGCSHLEKQWIPSQEMGYNCFSLENQETPSQQVGPQCSYLEKPGIPSQQVGSQCSYLEKLGIPSQQVASQSSYLVTGTEKHPGCAMGYGGDTGSGHSGSGHSTAYHFLSYNSAECLHPPPSSVPYFHGERTETKESQHASPFLLDYAQGAYGVKKDHCLCSFCLSLLGQQQQNDWQYHLQQHQQPQNYLEGMMLQEQLPMDSGPWDLGKQWSSAQSQLQSQLPQNNGKPLCSQLQHMSLQIAADSPLLPLGQDMQERASEQPRTQMQQL

SEQ ID NO: 24347 - protein, 375 aa, Homo sapiens; identical to SEQ ID NO: 3976

SEQ ID NO: 24348 - protein, 245 aa, Homo sapiens
MNIIDIVAIIPYFITLGTELAEKPEDAQQGQQAMSLAILRVIRLVRVFRIFKLSRHSKGLQILGQTLKASMRELGLLIFFLFIGVILFSSAVYFAEADERESQFPSIPDAFWWAVVSMTTVGYGDMVPTTIGGKIVGSLCAIAGVLTIALPVPVIVSNFNYFYHRETEGEEQAQYLQVTSCPKIPSSPDLKKSRSASTISKSDYMEIQEGVNNSNEDFREENLKTANCTLANTNYVNITKMLTDV

SEQ ID NO: 24349 - protein, 207 aa, Homo sapiens
MTSVAKVYYSQTTQTESRPLMGPGIRRRRVLTKDGRSNVRMEHIADKRFLYLKDLWTTFIDMQWRYKLLLFSATFAGTWFLFGVVWYLVAVAHGDLLELDPPANHTPCVVQVHTLTGAFLFSLESQTTIGYGFRYISEECPLAIVLLIAQLVLTTILEIFITGSPEKICFPVSCEWKDPSQYVPLKRVQYPGPMERAWKEEVGLTEQ

SEQ ID NO: 24350 - protein, 424 aa, Homo sapiens
MAAVATCGSVAASTGSAVATASKSNVTSFQRRGPRASVTNDSGPRLVSIAGTRPSVRNGQLLVSTGLPALDQLLGGGLAVGTVLLIEEDKYNIYSPLLFKYFLAEGIVNGHTLLVASAKEDPANILQELPAPLLDDKCKKEFDEDVYNHKTPESNIKMKIAWRYQLLPKMEIGPVSSSRFGHYYDASKRMPQELIEASNWHGFFLPEKISSTLKVEPCSLTPGYTKLLQFIQNIIYEEGFDGSNPQKKQRNILRIGIQNLGSPLWGDDICCAENGGNSHSLTKFLYVLRGLLRTSLSACIITMPTHLIQNKAIIARVTTLSDVVVGLESFIGSERETNPLYKDYHGLIHIRQIPRLNNLICDESDVKDLAFKLKRKLFTIECITKLRSYDLRRQRYFLSRHLQRKFSIKKNPYFKKPHTLKKIY

SEQ ID NO: 24351 - protein, 304 aa, Homo sapiens
DFVAILPFYLEVGLSGLSSKAAKDVLGFLRVVRFVRILRIFKLTRHFVGLRVLGHTLRASTNEFLLLIIFLALGVLIFATMIYYAERIGAQPNDPSASEHTHFKNIPIGFWWAVVTMTTLGYGDMYPQTWSGMLVGALCALAGVLTIAMPVPVIVNNFGMYYSLAMAKQKLPKKKKKHIPRPPQLGSPNYCKSVVNSPHHSTQSDTCPLAQEEILEINRADSKLNGEVAKAALANEDCPHIDQALTPDEGLPFTRSGTRERYGPCFLLSTGEYACPPGGGMRKDLCKESPVIAKYMPTEAVRVT

SEQ ID NO: 24352 - protein, 377 aa, Homo sapiens
MEMFREDEGYIKEEERPLPENEFQRQVWLLFEYPESSGPARIIAIVSVMVILISIVSFCLETLPIFRDENEDMHGSGVTFHTYSNSTIGYQQSTSFTDPFFIVETLCIIWFSFEFLVRFFACPSKAGFFTNIMNIIDIVAIIPYFITLGTELAEKPEDAQQGQQAMSLAILRVIRLVRVFRIFKLSRHSKGLQILGQTLKASMRELGLLIFFLFIGVILFSSAVYFAEADERESQFPSIPDAFWWAVVSMTTVGYGDMVPTTIGGKIVGSLCAIAGVLTIALPVPVIVSNFNYFYHRETEGEEQAQYLQVTSCPKIPSSPDLKKSRSASTISKSDYMEIQEGVNNSNEDFREENLKTANCTLANTNYVNITKMLTDV

SEQ ID NO: 24353 - protein, 1102 aa, Homo sapiens
TFPWLPLTTTDRHVLSSNESSLRSSNHTLIWNTCELLKDVIMQDFPAEIFLQRPKIVQSLLSLLKLAFGDGKHRLALQSVSCLQQLCMYLRNRLNFHRDPGFFSNKHDTVSQNSSLSYCHEARGTHHSQNPSPGSSSPRPSVVGRTGQRPRGDGQDWDAASSSGSSSHAHVNSRISVHSPLDMGHIDLPELETEDTLELQFQQLSLPQFCVSILESAVPLLRTGSRQVIIRVLELLTEDMTLIGEAISTDIWDDSSLFGIDMKEKLLLVLGALGETMCYHKSSISLEQPEVMLVHHRMAFISISLFAVRLLQTLLPVEKASEFLSEPMSTALFLLSLDMPISLEYPNIHEAVVAYLEQLNSENYSIYKRTAEAVYSIECTCNFLSDIGKEGEKNLLELVELADQALRSFSYHQHFPLIKEIISICSKIWKSAQASPLLQGESQKVLLHMLSHPLPRVKAETYHCCLEITKECLGVHNVTKPVSSLCNGIHFLLHPKVLYEISVFGIQEPESEVNTAAKAILLYLLQGRLMMTALTWNKFIESLCPVIPILQGYADTEDPLGNCILLLSKASSDTEEMLPCTTRLKSMLRLLLVKKPSVRSLALKLLAFHLTSEEGADTKRPLIDARVLSRVTDLFIGKKPIELRLDDRRELVIKLETVEKVYEIFTSDDVDLVLRKSAAEQLAVIMQDIKMHAVVKKLCLIDKIIEYLNECVSQDGKVVECLVQPCLTLLRKVLCGDPVMRVSLSQQSSLLTVLFRVSLIFHEDCSVVTEVGALFCLLLFDEVSRMDMWSVNPSNKPSLPSVFSLPVSVFRRYHLPVHVIGHHAVSPYSIVLPLSADCLALKPVSDMLRIAWNLSWYHGSDNLLKQMNSETKTQEFLQVLPACTEDEKLLIDIIHFLNKLIKEQRKNSSLELLNWILELLLRHSANPLLDLLVLTESQAREETDDIRTAVRQQLQKELIALFDTLLLNFMEVTDRKCSELLYVFQTQLALKLLQCLKVTDAPHFYGLPSLERTLRGMANLTAFPGWSSHSPLTKPLDICVKYLSGLLEVITSFYVERGGNAMSFMGKGVTKSTILCLLHLSHEMMAQAGSLEWMSLWFLPLG

SEQ ID NO: 24354 - protein, 1385 aa, Homo sapiens
MKPVKHLLTTSNKSANVPALTTKKGLHNLPLSPELKEKHNAKLIHDKIEPMVLRSPPTGESILRYALPIPSSKTKNLLPEDEMIGKIIKHLKMVVSTLEETYGHCDQNGEEPFVKHEHEELSLSVGDDMNSFLTYCSQFAAQLEEALKEEQNILESLFKWFQWQVNQMEEISKDQTLLQAEPPKPDKTVILNIAEIVRLVQRFEELKNRLKQRSKSSVKVMLSKTMDKENRPEAVKSCEALAQKIEEFLEAHSTDEFKDVSATEPQTAHSMTNRFNAMLKVFENQANMLERAVNDQVLLDAEYKQMQCDFQLLSEEKLVLENELQKLKDKEKTKPTNNRTKKAVKTVKKKDKGKSEDSEKKMSPEKEFKIKEDLDQVQKVARLEIENKVLQEQLKQALQEAEKAKHQLNYFLNQEKLLKSEGKTETTMQVGNSQTKVKGEDSKNIPLEKETRKSLVSDSGGQRTSDKIQEYPQITAQSGRLIEKSSEKKRSSPAISDLSQILKSQDESAFLESSNEVSVAENQSYKSPSETHDKSLTTVSSSKEVQDSLSVGTLAQKNETVISPFILPPVLTESKKADVSEEQLQKMTEEQTYQAAEKSQADSEVPDENLMVENKDSVTKVQIEQMKQRTSSMERHEETLTTPQLPEDMVLVSRIQSETKNLKATRNESFHSHNDVPEENLMLEQDTKSKTEVEVKKQKSFQDNQLSTHNEVPNERLVVEHQESLSKTKLQIKKQETSTEQPLTTPDKEPNENLILRHQDSMSKSEMQVKEQRTLKGQRIITHDEEPGKNLVLEHQDSVSKLEMQIEKTKKLPREKRHSTHDEESGENPMLKHQDSVSKIQVQLEIQETSEGEGRSIPDKNSMFVHQDSVSKLQMQEKKKITPGRERRNTRIVVPNENVISVHQDSKSKLQMQEKKQINSGVERHKTFPLEIKKKDISLEHLLPEEKVLLSRSESQTKKLQAKVTSRKIKNEAASELPDTAENLPAMYPSISDLIIQFDLNKVVETDIESLRGALGRRLLNDEFKTQSKSFPGPDIEQLTDAFGRDILKDEFKTRSKSLPETDERLHSTTERGTINDAIKTQLKRKSYPETVLKHLKGVNGKDIIKHLINIQSKSHGETDKEHLADDTGRGIIKGSINAQLKGHQKTDKNFFAYATGRGLMKESTTTQLKSHPETDKEFLADAIGRGIIIGPITTQLKSHRETDKELLKDAIGRDIIKGPISAQLKSHQETDVEPLTNAIGSSKTIGEIKTQLRTHYDVNLFKNKDMSVQRQEGIFTRSITPSKFPTKVINLSPFENKEETYEYSSPYVTAPSKAIYRTYRAGPSFSKDIHLPLLNQLPSGHSKVVTLSQKTIEFTLPTVTNTVGKPTYKVLHAAARKSVPHPYF

SEQ ID NO: 24355 - protein, 395 aa, Homo sapiens [sequence omitted]

SEQ ID NO: 24356 - protein, 1230 aa, Homo sapiens
MANGGGGGGGSSGGGGGGGGSSLRMSSNIHANHLSLDASSSSSSSSSSSSSSSSSSSSSSVHEPKMDALIIPVTMEVPCDSRGQRMWWAFLASSMVTFFGGLFIILLWRTLKYLWTVCCHCGGKTKEAQKINNGSSQADGTLKPVDEKEEAVAAEVGWMTSVKDWAGVMISAQTLTGRVLVVLVFALSIGALVIYFIDSSNPIESCQNFYKDFTLQIDMAFNVFFLLYFGLRFIAANDKLWFWLEVNSVVDFFTVPPVFVSVYLNRSWLGLRFLRALRLIQFSEILQFLNILKTSNSIKLVNLLSIFISTWLTAAGFIHLVENSGDPWENFQNNQALTYWECVYLLMVTMSTVGYGDVYAKTTLGRLFMVFFILGGLAMFASYVPEIIELIGNRKKYGGSYSAVSGRKHIVVCGHITLESVSNFLKDFLHKDRDDVNVEIVFLHNISPNLELEALFKRHFTQVEFYQGSVLNPHDLARVKIESADACLILANKYCADPDAEDASNIMRVISIKNYHPKIRIITQMLQYHNKAHLLNIPSWNWKEGDDAICLAELKLGFIAQSCLAQGLSTMLANLFSMRSFIKIEEDTWQKYYLEGVSNEMYTEYLSSAFVGLSFPTVCELCFVKLKLLMIAIEYKSANRESRILINPGNHLKIQEGTLGFFIASDAKEVKRAFFYCKACHDDITDPKRIKKCGCKRLEDEQPSTLSPKKKQRNGGMRNSPNTSPKLMRHDPLLIPGNDQIDNMDSNVKKYDSTGMFHWCAPKEIEKVILTRSEAAMTVLSGHVVVCIFGDVSSALIGLRNLVMPLRASNFHYHELKHIVFVGSIEYLKREWETLHNFPKVSILPGTPLSRADLRAVNINLCDMCVILSANQNNIDDTSLQDKECILASLNIKSMQFDDSIGVLQANSQGFTPPGMDRSSPDNSPVHGMLRQPSITTGVNIPIITELVNDTNVQFLDQDDDDDPDTELYLTQPFACGTAFAVSVLDSLMSATYFNDNILTLIRTLVTGGATPELEALIAEENALRGGYSTPQTLANRDRCRVAQLALLDGPFADLGDGGCYGDLFCKALKTYNMLCFGIYRLRDAHLSTPSQCTKRYVITNPPYEFELVPTDLIFCLMQFDHNAGQSRASLSHSSHSSQSSSKKSSSVHSIPSTANRQNRPKSRESRDKQNATRMNRMGQEKKWFTDEPDNAYPRNIQIKPMSTHMANQINQYKSTSSLIPPIREVEDEC

SEQ ID NO: 24357 - protein, 401 aa, Homo sapiens
MQNSHSGVNQLGGVFVNGRPLPDSTRQKIVELAHSGARPCDISRILQVSNGCVSKILGRYYETGSIRPRAIGGSKPRVATPEVVSKIAQYKRECPSIFAWEIRDRLLSEGVCTNDNIPSVSSINRVLRNLASEKQQMGADGMYDKLRMLNGQTGSWGTRPGWYPGTSVPGQPTQDGCQQQEGGGENTNSISSNGEDSDEAQMRLQLKRKLQRNRTSFTQEQIEALEKEFERTHYPDVFARERLAAKIDLPEARIQVWFSNRRAKWRREEKLRNQRRQASNTPSHIPISSSFSTSVYQPIPQPTTPVSSFTSGSMLGRTDTALTNTYSALPPMPSFTMANNLPMQVSAAGGGLHNPGPREVRSGSGPADLIGCVCTLESFSHYSDWLDQSSRRQSIPSLLSD

SEQ ID NO: 24358 - protein, 422 aa, Homo sapiens
MANGGGGGGGSSGGGGGGGGSSLRMSSNIHANHLSLDASSSSSSSSSSSSSSSSSSSSSSVHEPKMDALIIPVTMEVPCDSRGQRMWWAFLASSMVTFFGGLFIILLWRTLKYLWTVCCHCGGKTKEAQKINNGSSQADGTLKPVDEKEEAVAAEVGWMTSVKDWAGVMISAQTLTGRVLVVLVFALSIGALVIYFIDSSNPIESCQNFYKDFTLQIDMAFNVFFLLYFGLRFIAANDKLWFWLEVNSVVDFFTVPPVFVSVYLNRSWLGLRFLRALRLIQFSEILQFLNILKTSNSIKLVNLLSIFISTWLTAAGFIHLVENSGDPWENFQNNQALTYWECVYLLMVTMSTVGYGDVYAKTTLGRLFMVFFILGGLAMFASYVPEIIELIGNRKKYGGSYSAVSGRKQCLPATCPKLLLSS

SEQ ID NO: 24359 - protein, 962 aa, Homo sapiens
MTMAGGRRGLVAPQNTFLENIVRRSNDTNFVLGNAQIVDWPIVYSNDGFCKLSGYHRAEVMQKSSTCSFMYGELTDKDTIEKVRQTFENYEMNSFEILMYKKNRTPVWFFVKIAPIRNEQDKVVLFLCTFSDITAFKQPIEDDSCKGWGKFARLTRALTSSRGVLQQLAPSVQKGENVHKHSRLAEVLQLGSDILPQYKQEAPKTPPHIILHYCVFKTTWDWIILILTFYTAILVPYNVSFKTRQNNVAWLVVDSIVDVIFLVDIVLNFHTTFVGPAGEVISDPKLIRMNYLKTWFVIDLLSCLPYDVINAFENVDEGISSLFSSLKVVRLLRLGRVARKLDHYIEYGAAVLVLLVCVFGLAAHWMACIWYSIGDYEIFDEDTKTIRNNSWLYQLAMDIGTPYQFNGSGSGKWEGGPSKNSVYISSLYFTMTSLTSVGFGNIAPSTDIEKIFAVAIMMIGSLLYATIFGNVTTIFQQMYANTNRYHEMLNSVRDFLKLYQVPKGLSERVMDYIVSTWSMSRGIDTEKVLQICPKDMRADICVHLNRKVFKEHPAFRLASDGCLRALAMEFQTVHCAPGDLIYHAGESVDSLCFVVSGSLEVIQDDEVVAILGKGDVFGDVFWKEATLAQSCANVRALTYCDLHVIKRDALQKVLEFYTAFSHSFSRNLILTYNLRKRIVFRKISDVKREEEERMKRKNEAPLILPPDHPVRRLFQRFRQQKEARLAAERGGRDLDDLDVEKGNVLTEHASANHSLVKASVVTVRESPATPVSFQAASTSGVPDHAKLQAPGSECLGPKGGGGDCAKRKSWARFKDACGKSEDWNKVSKAESMETLPERTKASGEATLKKTDSCDSGITKSDLRLDNVGEARSPQDRSPILAEVKHSFYPIPEQTLQATVLEVRHELKEDIKALNAKMTNIEKQLSEILRILTSRRSSQSPQELFEISRPQSPESERDIFGAS

SEQ ID NO: 24360 - protein, 1208 aa, Homo sapiens
MANGGGGGGGSSGGGGGGGGSSLRMSSNIHANHLSLDASSSSSSSSSSSSSSSSSSSSSSVHEPKMDALIIPVTMEVPCDSRGQRMWWAFLASSMVTFFGGLFIILLWRTLKYLWTVCCHCGGKTKEAQKINNGSSQADGTLKPVDEKEEAVAAEVGWMTSVKDWAGVMISAQTLTGRVLVVLVFALSIGALVIYFIDSSNPIESCQNFYKDFTLQIDMAFNVFFLLYFGLRFIAANDKLWFWLEVNSVVDFFTVPPVFVSVYLNRSWLGLRFLRALRLIQFSEILQFLNILKTSNSIKLVNLLSIFISTWLTAAGFIHLVENSGDPWENFQNNQALTYWECVYLLMVTMSTVGYGDVYAKTTLGRLFMVFFILGGLAMFASYVPEIIELIGNRKKYGGSYSAVSGRKHIVVCGHITLESVSNFLKDFLHKDRDDVNVEIVFLHNISPNLELEALFKRHFTQVEFYQGSVLNPHDLARVKIESADACLILANKYCADPDAEDASNIMRVISIKNYHPKIRIITQMLQYHNKAHLLNIPSWNWKEGDDAICLAELKLGFIAQSCLAQGLSTMLANLFSMRSFIKIEEDTWQKYYLEGVSNEMYTEYLSSAFVGLSFPTVCELCFVKLKLLMIAIEYKSANRESRILINPGNHLKIQEGTLGFFIASDAKEVKRAFFYCKACHDDITDPKRIKKCGCKRLIYFEDEQPSTLSPKKKQRNGGMRNSPNTSPKLMRHDPLLIPGNDQIDNMDSNVKKYDSTGMFHWCAPKEIEKVILTRSEAAMTVLSGHVVVCIFGDVSSALIGLRNLVMPLRASNFHYHELKHIVFVGSIEYLKREWETLHNFPKVSILPGTPLSRADLRAVNINLCDMCVILSANQNNIDDTSLQDKECILASLNIKSMQFDDSIGVLQANSQGFTPPGMDRSSPDNSPVHGMLRQPSITTGVNIPIITELAKPGKLPLVSVNQEKNSGTHILMITELVNDTNVQFLDQDDDDDPDTELYLTQPFACGTAFAVSVLDSLMSATYFNDNILTLIRTLVTGGATPELEALIAEENALRGGYSTPQTLANRDRCRVAQLALLDGPFADLGDGGCYGDLFCKALKTYNMLCFGIYRLRDAHLSTPSQCTKRYVITNPPYEFELVPTDLIFCLMQFDHNAGQSRASLSHSSHSSQSSSKKSSSVHSIPSTANRQNRPKSRESRDKQKYVQEERL

SEQ ID NO: 24361 - protein, 80 aa, Homo sapiens
AVVVPSGEEQRYTCHVQHEGLPKPLTLRWEPSSQSTVPIVGIVAGLAVLAVVVIGAVVAAVMCRRKSSGGKGGSCSQAAC

SEQ ID NO: 24362 - protein, 369 aa, Homo sapiens [sequence omitted]

SEQ ID NO: 24363 - protein, 197 aa, Homo sapiens
METGRQRGASAEMFAMPQGLKGSNKDGIPEDLDGNLEEPRDQESELRSQDVMDLTEGDNEASASAPPAAKRQKTDTKGKKERKPTVDAEEAQMTTLLYAMSEEQLSRYEVCRRSAFPKARIAALMQSITGRSVSENTAIAMAGIAKVLVGEVVEEALDVCEMWGETPPLQPKHLREAVRRLKPKGLFPNSNYKKIMF

SEQ ID NO: 24364 - protein, 372 aa, Homo sapiens
MYVNSIGPVNAINMEYTIDIFFAQTWYDRRLKFNSTIKVLRLNSNMVGKIWIPDTFFRNSKKADAHWITTPNRMLRIWNDGRVLYTLRLTIDAECQLQLHNFPMDEHSCPLEFSSYGYPREEIVYQWKRSSVEVGDTRSWRLYQFSFVGLRNTTEVVKTTSGDYVVMSVYFDLSRRMGYFTIQTYIPCTLIVVLSWVSFWINKDAVPARTSLGITTVLTMTTLSTIARKSLPKVSYVTAMDLFVSVCFIFVFSALVEYGTLHYFVSNRKPSKDKDKKKKNPAPTIDIRPRSATIQMNNATHLQERDEEYGYECLDGKDCASFFCCFEDCRTGAWRHGRIHIRIAKMDSYARIFFPTAFCLFNLVYWVSYLYL

SEQ ID NO: 24365 - protein, 897 aa, Homo sapiens
MAAMAPALTDAAAEAHHIRFKLAPPSSTLSPGSAENNGNANILIAANGTKRKAIAAEDPSLDFRNNPTKEDLGKLQPLVASYLCSDVTSVPSKESLKLQGVFSKQTVLKSHPLLSQSYELRAELLGRQPVLEFSLENLRTMNTSGQTALPQAPVNGLAKKLTKSSTHSDHDNSTSLNGGKRALTSSALHGGEMGGSESGDLKGGMTNCTLPHRSLDVEHTTLYSNNSTANKSSVNSMEQPALQGSSRLSPGTDSSSNLGGVKLEGKKSPLSSILFSALDSDTRITALLRRQADIESRARRLQKRLQVVQAKQVERHIQHQLGGFLEKTLSKLPNLESLRPRSQLMLTRKAEAALRKAASETTTSEGLSNFLKSNSISEELERFTASGIANLRCSEQAFDSDVTDSSSGGESDIEEEELTRADPEQRHVPLRRRSEWKWAADRAAIVSRWNWLQAHVSDLEYRIRQQTDIYKQIRANKGLIVLGEVPPPEHTTDLFLPLSSEVKTDHGTDKLIESVSQPLENHGAPIIGHISESLSTKSCGALRPVNGVINTLQPVLADHIPGDSSDAEEQLHKKQRLNLVSSSSDGTCVAARTRPVLSCKKRRLVRPNSIVPLSKKVHRNSTIRPGCDVNPSCALCGSGSINTMPPEIHYEAPLLERLSQLDSCVHPVLAFPDDVPTSLHFQSMLKSQWQNKPFDKIKPPKKLSLKHRAPMPGSLPDSARKDRHKLVSSFLTTAMLKHHTDMSSSSYLAATHHPPHSPLVRQLSTSSDSPAPASSSSQVTASTSQQPVRRRRGESSFDINNIVIPMSVAATTRVEKLQYKEILTPSWREVDLQSLKGSPDEENEEIEDLSDAAFAALHAKCEEMERARWLWTTSVPPQRRGSRSYRSSDGRTTPQLG

SEQ ID NO: 24366 - protein, 1724 aa, Homo sapiens
MQSFRERCGFHGKQQNYQQTSQETSRLENYRQPSQAGLSCDRQRLLAKDYYNPQPYPSYEGGAGTPSGTAAAVAADKYHRGSKALPTQQGLQGRPAFPGYGVQDSSPYPGRYAGEESLQAWGAPQPPPPQPQPLPAGVAKYDENLMKKTAVPPSRQYAEQGAQVPFRTHSLHVQQPPPPQQPLAYPKLQRQKLQNDIASPLPFPQGWWAGGHSYKSCTAPTAQPHDRPLTASSSLAPGQRVQNLHAYQSGRLSYDQQQQQQQQQQQQQQALQSRHHAQETLHYQNLAKYQHYGQQGQGYCQPDAAVRTPEQYYQTFSPSSSHSPARSVGRSPSYSSTPSPLMPNLENFPYSQQPLSTGAFPAGITDHSHFMPLLNPSPTDATSSPAELTALTSQVENISNTVQQLLLSKAAVPQKKGVKNLVSRTPEQHKSQHCSPEGSGYSAEPAGTPLSEPPSSTPQSTHAEPQEADYLSGSEDPLERSFLYCNQARGSPARVNSNSKAKPESVSTCSVTSPDDMSTKSDDSFQSLHGSLPLDSFSKFVAGERDCPRLLLSALAQEDLASEILGLQEAIGEKADKAWAEAPSLVKDSSKPPFSLENHSACLDSVAKSAWPRPGEPEALPDSLQLDKGGNAKDFSPGLFEDPSVAFATPDPKKTTGPLSFGTKPTLGVPAPDPTTAAFDCFPDTTAASSADSANPFAWPEENLGDACPRWGLHPGELTKGLEQGGKASDGISKGDTHEASACLGFQEEDPPGEKVASLPGDFKQEEVGGVKEEAGGLLQCPEVAKADRWLEDSRHCCSTADFGDLPLLPPTSRKEDLEAEEEYSSLCELLGSPEQRPGMQDPLSPKAPLICTKEEVEEVLDSKAGWGSPCHLSGESVILLGPTVGTESKVQSWFESSLSHMKPGEEGPDGERAPGDSTTSDASLAQKPNKPAVPEAPIAKKEPVPRGKSLRSRRVHRGLPEAEDSPCRAPVLPKDLLLPESCTGPPQGQMEGAGAPGRGASEGLPRMCTRSLTALSEPRTPGPPGLTTTPAPPDKLGGKQRAAFKSGKRVGKPSPKAASSPSNPAALPVASDSSPMGSKTKETDSPSTPGKDQRSMILRSRTKTQEIFHSKRRRPSEGRLPNCRATKKLLDNSHLPATFKVSSSPQKEGRVSQRARVPKPGAGSKLSDRPLHALKRKSAFMAPVPTKKRNLVLRSRSSSSSNASGNGGDGKEERPEGSPTLFKRMSSPKKAKPTKGNGEPATKLPPPETPDACLKLASRAAFQGAMKTKVLPPRKGRGLKLEAIVQKITSPSLKKFACKAPGASPGNPLSPSLSDKDRGLKGAGGSPVGVEEGLVNVGTGQKLPTSGADPLCRNPTNRSLKGKLMNRASGTQGASEDNSGGGGKKPKMEELGLASQPPEGRPCQPQTRAQKQPGHTNYSSYSKRKRLTRGRAKNTTSSPCKGRAKRRRQQQVLPLDPAEPEIRLKYISSCKRLRSDSRTPAFSPFVRVEKRDAFTTICTVVNSPGDAPKPHRKPSSSASSSSSSSSFSLDAAGASLATLPGGSILQPRPSLPLSSTMHLGPVVSKALSTSCLVCCLCQNPANFKDLGDLCGPYYPEHCLPKKKPKLKEKVRPEGTCEEASLPLERTLKGPECAAAATAGKPPRPDGPADPAKQGPLRTSARGLSRRLQSCYCCDGREDGGEEAAPADKGHWVHEACAVWTGGVYLVAGKLFGLQEAMKVAVDM

SEQ ID NO: 24367 - protein, 321 aa, Homo sapiens [sequence omitted]

SEQ ID NO: 24368 - protein, 351 aa, Homo sapiens
MHQDGISSMNQLGGLFVNGRPLPLDTRQQIVRLAVSGMRPCDISRILKVSNGCVSKILGRYYRTGVLEPKGIGGSKPRLATPPVVARIAQLKGECPALFAWEIQRQLCAEGLCTQDKTPSVSSINRVLRALQEDQGLPCTRLRSPAVLAPAVLTPHSGSETPRGTHPGTGHRNRTIFSPSQAEALEKEFQRGQYPDSVARGKLATATSLPEDTVRVWFSNRRAKWRRQEKLKWEMQLPGASQGLTVPRVAPGIISAQQSPGSVPTAALPALEPLGPSCYQLCWATAPERCLSDTPPKACLKPCWGHLPPQPNSLDSGLLCLPCPSSHCHLASLSGSQALLWPGCPLLYGLE

SEQ ID NO: 24369 - protein, 328 aa, Homo sapiens
MFANLKYVSLGILVFQTTSLVLTMRYSRTLKEEGPRYLSSTAVVVAELLKIMACILLVYKDSKCSLRALNRVLHDEILNKPMETLKLAIPSGIYTLQNNLLYVALSNLDAATYQVTYQLKILTTALFSVSMLSKKLGVYQWLSLVILMTGVAFVQWPSDSQLDSKELSAGSQFVGLMAVLTACFSSGFAGVYFEKILKETKQSVWIRNIQLGFFGSIFGLMGVYIYDGELVSKNGFFQGYNRLTWIVVVLQALGGLVIAAVIKYADNILKGFATSLSIILSTLISYFWLQDFVPTRVSLCRQAGVLWRDLGLLQPPTPWFKGFSCLSL

SEQ ID NO: 24370 - protein, 1242 aa, Homo sapiens
MANGGGGGGGSSGGGGGGGGSSLRMSSNIHANHLSLDASSSSSSSSSSSSSSSSSSSSSSVHEPKMDALIIPVTMEVPCDSRGQRMWWAFLASSMVTFFGGLFIILLWRTLKYLWTVCCHCGGKTKEAQKINNGSSQADGTLKPVDEKEEAVAAEVGWMTSVKDWAGVMISAQTLTGRVLVVLVFALSIGALVIYFIDSSNPIESCQNFYKDFTLQIDMAFNVFFLLYFGLRFIAANDKLWFWLEVNSVVDFFTVPPVFVSVYLNRSWLGLRFLRALRLIQFSEILQFLNILKTSNSIKLVNLLSIFISTWLTAAGFIHLVENSGDPWENFQNNQALTYWECVYLLMVTMSTVGYGDVYAKTTLGRLFMVFFILGGLAMFASYVPEIIELIGNRKKYGGSYSAVSGRKHIVVCGHITLESVSNFLKDFLHKDRDDVNVEIVFLHNISPNLELEALFKRHFTQVEFYQGSVLNPHDLARVKIESADACLILANKYCADPDAEDASNIMRVISIKNYHPKIRIITQMLQYHNKAHLLNIPSWNWKEGDDAICLAELKLGFIAQSCLAQGLSTMLANLFSMRSFIKIEEDTWQKYYLEGVSNEMYTEYLSSAFVGLSFPTVCELCFVKLKLLMIAIEYKSANRESRSRKRILINPGNHLKIQEGTLGFFIASDAKEVKRAFFYCKACHDDITDPKRIKKCGCKRLIYSKMSIYKRMRRACCFDCGRSERDCSCMSGRVRGNVDTLERAFPLSSVSVNDCSTSFRAFEDEQPSTLSPKKKQRNGGMRNSPNTSPKLMRHDPLLIPGNDQIDNMDSNVKKYDSTGMFHWCAPKEIEKVILTRSEAAMTVLSGHVVVCIFGDVSSALIGLRNLVMPLRASNFHYHELKHIVFVGSIEYLKREWETLHNFPKVSILPGTPLSRADLRAVNINLCDMCVILSANQNNIDDTSLQDKECILASLNIKSMQFDDSIGVLQANSQGFTPPGMDRSSPDNSPVHGMLRQPSITTGVNIPIITELVNDTNVQFLDQDDDDDPDTELYLTQPFACGTAFAVSVLDSLMSATYFNDNILTLIRTLVTGGATPELEALIAEENALRGGYSTPQTLANRDRCRVAQLALLDGPFADLGDGGCYGDLFCKALKTYNMLCFGIYRLRDAHLSTPSQCTKRYVITNPPYEFELVPTDLIFCLMQFDHNAGQSRASLSHSSHSSQSSSKKSSSVHSIPSTANRQNRPKSRESRDKQKKEMVYR

SEQ ID NO: 24371 - protein, 394 aa, Homo sapiens
MGFAAAAVSRKKKRRMGTYSLVPKKKTKVLKQRTVIEMFKSITHSTVGSKGEKDLGASSLHVNGESLEMDSDEDDSEELEEDDGHGAEQAAAFPTEDSRTSKESMSEADRAQKMDGESEEEQESVDTGEEEEGGDESDLSSESSIKKKFLKRKGKTDSPWIKPARKRRRRSRKKPSGALGSESYKSSAGSAEQTAPGDSTGYMEVSLDSLDLRVKGILSSQAEGLANGPDVLETDGLQEVPLCSCRMETPKSREITTLANNQCMATESVDHELGRCTNSVVKYELMRPSNKAPLLVLCEDHRGRMVKHQCCPGCGYFCTAGNFMECQPESSISHRFHKDCASRVNNASYCPHCGEESSKAKEVTIAKADTTSTVTPVPGQEKGSALEGRADTTT

SEQ ID NO: 24372 - protein, 1197 aa, Homo sapiens
MANGGGGGGGSSGGGGGGGGSSLRMSSNIHANHLSLDASSSSSSSSSSSSSSSSSSSSSSVHEPKMDALIIPVTMEVPCDSRGQRMWWAFLASSMVTFFGGLFIILLWRTLKYLWTVCCHCGGKTKGRKPRLQGGVIGCMFHLQPREAQKSSSALEVHKKYGDSTGTTLEEAQKINNGSSQADGTLKPVDEKEEAVAAEVGWMTSVKDWAGVMISAQTLTGRVLVVLVFALSIGALVIYFIDSSNPIESCQNFYKDFTLQIDMAFNVFFLLYFGLRFIAANDKLWFWLEVNSVVDFFTVPPVFVSVYLNRSWLGLRFLRALRLIQFSEILQFLNILKTSNSIKLVNLLSIFISTWLTAAGFIHLVENSGDPWENFQNNQALTYWECVYLLMVTMSTVGYGDVYAKTTLGRLFMVFFILGGLAMFASYVPEIIELIGNRKKYGGSYSAVSGRKHIVVCGHITLESVSNFLKDFLHKDRDDVNVEIVFLHNISPNLELEALFKRHFTQVEFYQGSVLNPHDLARVKIESADACLILANKYCADPDAEDASNIMRVISIKNYHPKIRIITQMLQYHNKAHLLNIPSWNWKEGDDAICLAELKLGFIAQSCLAQGLSTMLANLFSMRSFIKIEEDTWQKYYLEGVSNEMYTEYLSSAFVGLSFPTVCELCFVKLKLLMIAIEYKSANRESRILINPGNHLKIQEGTLGFFIASDAKEVKRAFFYCKACHDDITDPKRIKKCGCKRLEDEQPSTLSPKKKQRNGGMRNSPNTSPKLMRHDPLLIPGNDQIDNMDSNVKKYDSTGMFHWCAPKEIEKVILTRSEAAMTVLSGHVVVCIFGDVSSALIGLRNLVMPLRASNFHYHELKHIVFVGSIEYLKREWETLHNFPKVSILPGTPLSRADLRAVNINLCDMCVILSANQNNIDDTSLQDKECILASLNIKSMQFDDSIGVLQANSQGFTPPGMDRSSPDNSPVHGMLRQPSITTGVNIPIITELVNDTNVQFLDQDDDDDPDTELYLTQPFACGTAFAVSVLDSLMSATYFNDNILTLIRTLVTGGATPELEALIAEENALRGGYSTPQTLANRDRCRVAQLALLDGPFADLGDGGCYGDLFCKALKTYNMLCFGIYRLRDAHLSTPSQCTKRYVITNPPYEFELVPTDLIFCLMQFDHNAGQSRASLSHSSHSSQSSSKKSSSVHSIPS

SEQ ID NO: 24373 - protein, 480 aa, Homo sapiens
MDAPARLLAPLLLLCAQQLRGTRAMNDIGDYVGSNLEISWLPNLDGLIAGYARNFRPGIGGPPVNVALALEVASIDHISEANMEYTMTVFLHQSWRDSRLSYNHTNETLGLDSRFVDKLWLPDTFIVNAKSAWFHDVTVENKLIRLQPDGVILYSIRITSTVACDMDLAKYPMDEQECMLDLESCFLCGRSAPARAPGAGPGSAAHLCAFPPDGYSSEDIVYYWSESQEHIHGLDKLQLAQFTITSYRFTTELMNFKSAGQFPRLSLHFHLRRNRGVYIIQSYMPSVLLVAMSWVSFWISQAAVPARVSLGITTVLTMTTLMVSARSSLPRASAIKALDVYFWICYVFVFAALVEYAFAHFNADYRKKQKAKVKVSRPRAEMDVRNAIVLFSLSAAGVTQELAISRRQRRVPGNLMGSYRSVGVETGETKKEGAARSGGQGGIRARLRPIDADTIDIYARAVFPAAFAAVNVIYWAAYAM

SEQ ID NO: 24374 - protein, 198 aa, Homo sapiens
METGRQRDASAEMFPMPRGLKYSNKDGIPEDLDGNLEEPRDQESELRSQDVMDLTEGDNEASASTPPSAKRQKTDTKGKKERKPTMDAEEAQRMTTLFSAMSEEQLSRYEVCRRSAFPKARIAALMQSITGRSVSENTAIAMAGIAKVFVGEVVEEALDVCEMWGETPPLQPKHLREAVRRLKPKGILPNSNYKKIMF

SEQ ID NO: 24375 - protein, 689 aa, Homo sapiens
MFANLKYVSLGILVFQTTSLVLTMRYSRTLKEEGPRYLSSTAVVVAELLKIMACILLVYKDSKCSLRALNRVLHDEILNKPMETLKLAIPSGIYTLQNNLLYVALSNLDAATYQVTYQLKILTTALFSVSMLSKKLGVYQWLSLVILMTGVAFVQWPSDSQLDSKELSAGSQFVGLMAVLTACFSSGFAGVYFEKILKETKQSVWIRNIQLGFFGSIFGLMGVYIYDGELVSKNGFFQGYNRLTWIVVVLQPQGIGSPSVYHAVIVIFLEFFAWGLLTAPTLVVLHETFPKHTFLMNGLIQGVKGLLSFLSAPLIGALSDVWGRKSFLLLTVFFTCAPIPLMKISPWWYFAVISVSGVFAVTFSVVFAYVADITQEHERSMAYGLVSATFAASLVTSPAIGAYLGRVYGDSLVVVLATAIALLDICFILVAVPESLPEKMRPASWGAPISWEQADPFASLKKVGQDSIVLLICITVFLSYLPEAGQYSSFFLYLRQTIVLSLLMRSIGNKNTILLGLGFQILQLAWYGFGSEPWMMWAAGAVAAMSSITFPAVSALVSRTADADQQGVVQGMITGIRGLCNGLGPALYGFIFYIFHVELKELPITGTDLGTNTSPQHHFEQNSIIPGPPFLFGACSVLLALLVALFIPEHTNLSLRSSSWRKHCGSHSHPHNTQAPGEAKEPLLQDTNV

SEQ ID NO: 24376 - protein, 194 aa, Homo sapiens
MLSSTLRVAVVCVSNVNRSMEAHSILRRKGLSVRSFGTESHVRLPGPRPNRPVVYDFATTYKEMYNDLLRKDRERYTRNGILHILGRNERIKPGPERFQECTDFFDVIFTCEESVYDTVVEDLCSREQQTFQPVHVINMEIQDTLEDATLGAFLICEICQCLQQSDDMEDNLEELLLQMEEKAGKSFLHTVCFY

SEQ ID NO: 24377 - protein, 583 aa, Homo sapiens
VHEPKMDALIIPVTMEVPCDSRGQRMWWAFLASSMVTFFGGLFIILLWRTLKYLWTVCCHCGGKTKEAQKINNGSSQADGTLKPVDEKEEAVAAEVGWMTSVKDWAGVMISAQTLTGRVLVVLVFALSIGALVIYFIDSSNPIESCQNFYKDFTLQIDMAFNVFFLLYFGLRFIAANDKLWFWLEVNSVVDFFTVPPVFVSVYLNRSWLGLRFLRALRLIQFSEILQFLNILKTSNSIKLVNLLSIFISTWLTAAGFIHLVENSGDPWENFQNNQALTYWECVYLLMVTMSTVGYGDVYAKTTLGRLFMVFFILGGLAMFASYVPEIIELIGNRKKYGGSYSAVSGRKHIVVCGHITLESVSNFLKDFLHKDRDDVNVEIVFLHNISPNLELEALFKRHFTQVEFYQGSVLNPHDLARVKIESADACLILANKYCADPDAEDASNIMRVISIKNYHPKIRIITQMLQYHNKAHLLNIPSWNWKEGDDAICLAELKLGFIAQSCLAQGLSTMLANLFSMRSFIKIEEDTWQKYYLEGVSNEMYTEYLSSAFVGLSFPTVCELCFVKLKLLMIAIEYKSANRESR

SEQ ID NO: 24378 - protein, 523 aa, Homo sapiens
MLLGCLLRRRRSEWKWAADRAAIVSRWNWLQAHVSDLEYRIRQQTDIYKQIRANKGLIVLGEVPPPEHTTDLFLPLSSEVKTDHGTDKLIESVSQPLENHGAPIIGHISESLSTKSCGALRPVNGVINTLQPVLADHIPGDSSDAEEQLHKKQRLNLVSSSSDGTCVAARTRPVLSCKKRRLVRPNSIVPLSKKVHRNSTIRPGCDVNPSCALCGSGSINTMPPEIHYEAPLLERLSQLDSCVHPVLAFPDDVPTSLHFQSMLKSQWQNKPFDKIKPPKKLSLKHRAPMPGSLPDSARKDRHKLVSSFLTTAKLSHHQTRPDRTHRQHLDDVGAVPMVERVTAPKAERLLNPPPPVHDPNHSKMRLRDHSSERSEVLKHHTDMSSSSYLAATHHPPHSPLVRQLSTSSDSPAPASSSSQVTASTSQQPVRRRRGESSFDINNIVIPMSVAATTRVEKLQYKEILTPSWREVDLQSLKGSPDEENEEIEDLSDAAFAALHAKCEEMERARWLWTTSVPPQRRGS

SEQ ID NO: 24379 - protein, 467 aa, Homo sapiens
MSSPNIWSTGSSVYSTPVFSQKMTVWILLLLSLYPGFTSQKSDDDYEDYASNKTWVLTPKVPEGDVTVILNNLLEGYDNKLRPDIGVKPTLIHTDMYVNSIGPVNAINMEYTIDIFFAQTWYDRRLKFNSTIKVLRLNSNMVGKIWIPDTFFRNSKKADAHWITTPNRMLRIWNDGRVLYTLRLTIDAECQLQLHNFPMDEHSCPLEFSSYGYPREEIVYQWKRSSVEVGDTRSWRLYQFSFVGLRNTTEVVKTTSGDYVVMSVYFDLSRRMGYFTIQTYIPCTLIVVLSWVSFWINKDAVPARTSLGITTVLTMTTLSTIARKSLPKVSYVTAMDLFVSVCFIFVFSALVEYGTLHYFVSNRKPSKDKDKKKKNPAPTIDIRPRSATIQMNNATHLQERDEEYGYECLDGKDCASFFCCFEDCRTGAWRHGRIHIRIAKMDSYARIFFPTAFCLFNLVYWVSYLYL

SEQ ID NO: 24380 - protein, 1178 aa, Homo sapiens
MANGGGGGGGSSGGGGGGGGSSLRMSSNIHANHLSLDASSSSSSSSSSSSSSSSSSSSSSVHEPKMDALIIPVTMEVPCDSRGQRMWWAFLASSMVTFFGGLFIILLWRTLKYLWTVCCHCGGKTKEAQKINNGSSQADGTLKPVDEKEEAVAAEVGWMTSVKDWAGVMISAQTLTGRVLVVLVFALSIGALVIYFIDSSNPIESCQNFYKDFTLQIDMAFNVFFLLYFGLRFIAANDKLWFWLEVNSVVDFFTVPPVFVSVYLNRSWLGLRFLRALRLIQFSEILQFLNILKTSNSIKLVNLLSIFISTWLTAAGFIHLVENSGDPWENFQNNQALTYWECVYLLMVTMSTVGYGDVYAKTTLGRLFMVFFILGGLAMFARYVPEIAALILSRNKFGGTFNKHGGRKHIVVCGHITLESVSNFLKDFLHKDRDDVNVEIVFLHNISPNLELEALFKRHFTQVEFYQGSVLNPHDLARVKIESADACLILANKYCADPDAEDASNIMRVISIKNYHPKIRIITQMLQYHNKAHLLNIPSWNWKEGDDAICLAELKLGFIAQSCLAQGLSTMLANLFSMRSFIKIEEDTWQKYYLEGVSNEMYTEYLSSAFVGLSFPTVCELCFVKLKLLMIAIEYKSANRESRILINPGNHLKIQEGTLGFFIASDAKEVKRAFFYCKACHDDITDPKRIKKCGCKRLEDEQPSTLSPKKKQRNGGMRNSPNTSPKLMRHDPLLIPGNDQIDNMDSNVKKYDSTGMFHWCAPKEIEKVILTRSEAAMTVLSGHVVVCIFGDVSSALIGLRNLVMPLRASNFHYHELKHIVFVGSIEYLKREWETLHNFPKVSILPGTPLSRADLRAVNINLCDMCVILSANQNNIDDTSLQDKECILASLNIKSMQFDDSIGVLQANSQGFTPPGMDRSSPDNSPVHGMLRQPSITTGVNIPIITELVNDTNVQFLDQDDDDDPDTELYLTQPFACGTAFAVSVLDSLMSATYFNDNILTLIRTLVTGGATPELEALIAEENALRGGYSTPQTLANRDRCRVAQLALLDGPFADLGDGGCYGDLFCKALKTYNMLCFGIYRLRDAHLSTPSQCTKRYVITNPPYEFELVPTDLIFCLMQFDHNAGQSRASLSHSSHSSQSSSKKSSSVHSIPSTANRQNRPKSRESRDKQKYVQEERL

SEQ ID NO: 24381 - protein, 1643 aa, Homo sapiens
MQHQRQQQADHANEANYARGTRLPLSGEGPTSQPNSSKQTVLSWQAAIDAARQAKAAQTMSTSAPPPVGSLSQRKRQQYAKSKKQGNSSNSRPARALFCLSLNNPIRRACISIVEWKPFDIFILLAIFANCVALAIYIPFPEDDSNSTNHNLEKVEYAFLIIFTVETFLKIIAYGLLLHPNAYVRNGWNLLDFVIVIVGLFSVILEQLTKETEGGNHSSGKSGGFDVKALRAFRVLRPLRLVSGVPSLQVVLNSIIKAMVPLLHIALLVLFVIIIYAIIGLELFIGKMHKTCFFADSDIVAEEDPAPCAFSGNGRQCTANGTECRSGWVGPNGGITNFDNFAFAMLTVFQCITMEGWTDVLYWVNDAIGWEWPWVYFVSLIILGSFFVLNLVLGVLSGEFSKEREKAKARGDFQKLREKQQLEEDLKGYLDWITQAEDIDPENEEEGGEEGKRNTSMPTSETESVNTENVSGEGENRGCCGSLWCWWRRRGAAKAGPSGCRRWGQAISKSKLSRRWRRWNRFNRRRCRAAVKSVTFYWLVIVLVFLNTLTISSEHYNQPDWLTQIQDIANKVLLALFTCEMLVKMYSLGLQAYFVSLFNRFDCFVVCGGITETILVELEIMSPLGISVFRCVRLLRIFKVTRHWTSLSNLVASLLNSMKSIASLLLLLFLFIIIFSLLGMQLFGGKFNFDETQTKRSTFDNFPQALLTVFQILTGEDWNAVMYDGIMAYGGPSSSGMIVCIYFIILFICGNYILLNVFLAIAVDNLADAESLNTAQKEEAEEKERKKIARKESLENKKNNKPEVNQIANSDNKVTIDDYREEDEDKDPYPPCDVPVGEEEEEEEEDEPEVPAGPRPRRISELNMKEKIAPIPEGSAFFILSKTNPIRVGCHKLINHHIFTNLILVFIMLSSAALAAEDPIRSHSFRNTILGYFDYAFTAIFTVEILLKMTTFGAFLHKGAFCRNYFNLLDMLVVGVSLVSFGIQSSAISVVKILRVLRVLRPLRAINRAKGLKHVVQCVFVAIRTIGNIMIVTTLLQFMFACIGVQLFKGKFYRCTDEAKSNPEECRGLFILYKDGDVDSPVVRERIWQNSDFNFDNVLSAMMALFTVSTFEGWPALLYKAIDSNGENIGPIYNHRVEISIFFIIYIIIVAFFMMNIFVGFVIVTFQEQGEKEYKNCELDKNQRQCVEYALKARPLRRYIPKNPYQYKFWYVVNSSPFEYMMFVLIMLNTLCLAMQHYEQSKMFNDAMDILNMVFTGVFTVEMVLKVIAFKPKHYFTDAWNTFDALIVVGSVVDIAITEVNNSEESNRISITFFRLFRVMRLVKLLSRGEGIRTLLWTFIKSFQALPYVALLIAMLFFIYAVIGMQMFGKVAMRDNNQINRNNNFQTFPQAVLLLFRCATGEAWQEIMLACLPGKLCDPESDYNPGEEYTCGSNFAIVYFISFYMLCAFLIINLFVAVIMDNFDYLTRDWSILGPHHLDEFKRIWSEYDPEAKGRIKHLDVVTLLRRIQPPLGFGKLCPHRVACKRLVAMNMPLNSDGTVMFNATLFALVRTALKIKTEGNLEQANEELRAVIKKIWKKTSMKLLDQVVPPAGDDEVTVGKFYATFLIQDYFRKFKKRKEQGLVGKYPAKNTTIALQMLERML

SEQ ID NO: 24382 - protein, 1181 aa, Homo sapiens
MANGGGGGGGSSGGGGGGGGSSLRMSSNIHANHLSLDASSSSSSSSSSSSSSSSSSSSSSVHEPKMDALIIPVTMEVPCDSRGQRMWWAFLASSMVTFFGGLFIILLWRTLKYLWTVCCHCGGKTKEAQKINNGSSQADGTLKPVDEKEEAVAAEVGWMTSVKDWAGVMISAQTLTGRVLVVLVFALSIGALVIYFIDSSNPIESCQNFYKDFTLQIDMAFNVFFLLYFGLRFIAANDKLWFWLEVNSVVDFFTVPPVFVSVYLNRSWLGLRFLRALRLIQFSEILQFLNILKTSNSIKLVNLLSIFISTWLTAAGFIHLVENSGDPWENFQNNQALTYWECVYLLMVTMSTVGYGDVYAKTTLGRLFMVFFILGGLAMFASYVPEIIELIGNRKKYGGSYSAVSGRKHIVVCGHITLESVSNFLKDFLHKDRDDVNVEIVFLHNISPNLELEALFKRHFTQVEFYQGSVLNPHDLARVKIESADACLILANKYCADPDAEDASNIMRVISIKNYHPKIRIITQMLQYHNKAHLLNIPSWNWKEGDDAICLAELKLGFIAQSCLAQGLSTMLANLFSMRSFIKIEEDTWQKYYLEGVSNEMYTEYLSSAFVGLSFPTVCELCFVKLKLLMIAIEYKSANRESRSRKRILINPGNHLKIQEGTLGFFIASDAKEVKRAFFYCKACHDDITDPKRIKKCGCKRLEDEQPSTLSPKKKQRNGGMRNSPNTSPKLMRHDPLLIPGNDQIDNMDSNVKKYDSTGMFHWCAPKEIEKVILTRSEAAMTVLSGHVVVCIFGDVSSALIGLRNLVMPLRASNFHYHELKHIVFVGSIEYLKREWETLHNFPKVSILPGTPLSRADLRAVNINLCDMCVILSANQNNIDDTSLQDKECILASLNIKSMQFDDSIGVLQANSQGFTPPGMDRSSPDNSPVHGMLRQPSITTGVNIPIITELVNDTNVQFLDQDDDDDPDTELYLTQPFACGTAFAVSVLDSLMSATYFNDNILTLIRTLVTGGATPELEALIAEENALRGGYSTPQTLANRDRCRVAQLALLDGPFADLGDGGCYGDLFCKALKTYNMLCFGIYRLRDAHLSTPSQCTKRYVITNPPYEFELVPTDLIFCLMQFDHNAGQSRASLSHSSHSSQSSSKKSSSVHSIPSTANRQNRPKSRESRDKQKKEMVYR

SEQ ID NO: 24383 - protein, 480 aa, Homo sapiens
MKNATIVMSVRREQGSSSGEGSLSFEDVAVGFTREEWQFLDQSQKVLYKEVMLENYINLVSIGYRGTKPDSLFKLEQGEPPGIAEGAAHSQICPGFVIQSRRYAGKDSDAFGGYGRSCLHIKRDKTLTGVKYHRCVKPSSPKSQLNDLQKICAGGKPHECSVCGRAFSRKAQLIQHQRTERGEKPHGCGECGKTFMRKIQLTEHQRTHTGEKPHECSECGKAFSRKSQLMVHQRTHTGEKPYRCSKCGKAFSRKCRLNRHQRSHTGEKLYGCSVCGKAFSQKAYLTAHQRLHTGDKPYKCSDCGRTFYFKSDLTRHQRIHTGEKPYECSECEKAFRSKSKLIQHQRTHTGERPYSCRECGKAFAHMSVLIKHEKTHIRETAINSLTVEKPSSRSHTSLYMSELIQEQKTVNTVPIEMPSSGTPPLLNKSERLVGRNVVIVEQPFPRNQAFVVNQEFEQRISLTNEVNVAPSVINYILYLT

SEQ ID NO: 24384 - protein, 716 aa, Homo sapiens
MVAQAWRTSMRKQREEACFRFLIVLGCLILAVLTTFKEYETVSGDWLLLLETFAIFIFGAEFALRIWAAGCCCRYKGWRGRLKFARKPLCMLDIFVLIASVPVVAVGNQGNVLATSLRSLRFLQILRMLRMDRRGGTWKLLGSAICAHSKELITAWYIGFLTLILSSFLVYLVEKDVPEVDAQGEEMKEEFETYADALWWGLITLATIGYGDKTPKTWEGRLIAATFSLIGVSFFALPAGILGSGLALKVQEQHRQKHFEKRRKPAAELIQAAWRYYATNPNRIDLVATWRFYESVVSFPFFRKEQLEAASSQKLGLLDRVRLSNPRGSNTKGKLFTPLNVDAIEESPSKEPKPVGLNNKERFRTAFRMKAYAFWQSSEDAGTGDPMAEDRGYGNDFPIEDMIPTLKAAIRAVRILQFRLYKKKFKETLRPYDVKDVIEQYSAGHLDMLSRIKYLQTRIDMIFTPGPPSTPKHKKSQKGSAFTFPSQQSPRNEPYVARPSTSEIEDQSMMGKFVKVERQVQDMGKKLDFLVDMHMQHMERLQVQVTEYYPTKGTSSPAEAEKKEDNRYSDLKTIICNYSETGPPEPPYSFHQVTIDKVSPYGFFAHDPVNLPRGGPSSGKVQATPPSSATTYVERPTVLPILTLLDSRVSCHSQADLQGPYSDRISPRQRRSITRDSDTPLSLMSVNHEELERSPSGFSISQDRDDYVFGPNGGSS

SEQ ID NO: 24385 - protein, 520 aa, Homo sapiens
MLQITEWRFLARDEGESAVAEDPTWGEDEEPSACTTDSWAQGSVPVLHASTSEGLENFQGEVHSSGASPDSSAIAPALPFPTSHCPSAFPQDPGGVDRIPLGRSWMGRGSQEQMESWEPSPQLRVTSAPPPTSELFQEAGPGGPVEEADGQSRGLSSAGSLSASFQLSVEEAPADDADPSLDPYLVASPQASTGRGHPLGFHLSLEDLYCCMPQLDAAGDRLELRSEGVPCIASGVLVSYPSVGGATRPSASCQQQRAGHSDVRLSAHHHRMRRKAAVKRLDPARLPCHWVRPLAEVLVPDSQTRPLEAYRGRQRGEKTKARAEPQALGPGTRVSPAAFFPLRPGIPFRDLDSGPALLFPTLNLGLSSPSLESKLPLPNSRIRFLTTHPVLPDVARSRSPKLWPSVRWPSGWEGKAELLGELWAGRTRVPPQGLELADREGQDPGRWPRTTPPVLEATSQVMWKPVLLPEALKLAPGVSMWNRSTQVLLSSGVPEQEDKEGSTFPPVEQHPIQTGAPKPR

SEQ ID NO: 24386 - protein, 1618 aa, Homo sapiens
MTEGARAADEVRVPLGAPPPGPAALVGASPESPGAPGREAERGSELGVSPSESPAAERGAELGADEEQRVPYPALAATVFFCLGQTTRPRSWCLRLVCNPWFEHVSMLVIMLNCVTLGMFRPCEDVECGSERCNILEAFDAFIFAFFAVEMVIKMVALGLFGQKCYLGDTWNRLDFFIVVAGMMEYSLDGHNVSLSAIRTVRVLRPLRAINRVPSMRILVTLLLDTLPMLGNVLLLCFFVFFIFGIVGVQLWAGLLRNRCFLDSAFVRNNNLTFLRPYYQTEEGEENPFICSSRRDNGMQKCSHIPGRRELRMPCTLGWEAYTQPQAEGVGAARNACINWNQYYNVCRSGDSNPHNGAINFDNIGYAWIAIFQVITLEGWVDIMYYVMDAHSFYNFIYFILLIIVGSFFMINLCLVVIATQFSETKQRESQLMREQRARHLSNDSTLASFSEPGSCYEELLKYVGHIFRKVKRRSLRLYARWQSRWRKKVDPSAVQGQGPGHRQRRAGRHTASVHHLVYHHHHHHHHHYHFSHGSPRRPGPEPGACDTRLVRAGAPPSPPSPGRGPPDAESVHSIYHADCHIEGPQERARVAHAAATAAASLRLATGLGTMNYPTILPSGVGSGKGSTSPGPKGKWAGGPPGTGGHGPLSLNSPDPYEKIPHVVGEHGLGQAPGHLSGLSVPCPLPSPPAGTLTCELKSCPYCTRALEDPEGELSGSESGDSDGRGVYEFTQDVRHGDRWDPTRPPRATDTPGPGPGSPQRRAQQRAAPGEPGWMGRLWVTFSGKLRRIVDSKYFSRGIMMAILVNTLSMGVEYHEQPEELTNALEISNIVFTSMFALEMLLKLLACGPLGYIRNPYNIFDGIIVVISVWEIVGQADGGLSVLRTFRLLRVLKLVRFLPALRRQLVVLVKTMDNVATFCTLLMLFIFIFSILGMHLFGCKFSLKTDTGDTVPDRKNFDSLLWAIVTVFQILTQEDWNVVLYNGMASTSSWAALYFVALMTFGNYVLFNLLVAILVEGFQAEGDANRSDTDEDKTSVHFEEDFHKLRELQTTELKMCSLAVTPNGHLEGRGSLSPPLIMCTAATPMPTPKSSPFLDAAPSLPDSRRGSSSSGDPPLGDQKPPASLRSSPCAPWGPSGAWSSRRSSWSSLGRAPSLKRRGQCGERESLLSGEGKGSTDDEAEDGRAAPGPRATPLRRAESLDPRPLRPAALPPTKCRDRDGQVVALPSDFFLRIDSHREDAAELDDDSEDSCCLRLHKVLEPYKPQWCRSREAWALYLFSPQNRFRVSCQKVITHKMFDHVVLVFIFLNCVTIALERPDIDPGSTERVFLSVSNYIFTAIFVAEMMVKVVALGLLSGEHAYLQSSWNLLDGLLVLVSLVDIVVAMASAGGAKILGVLRVLRLLRTLRPLRVISRAPGLKLVVETLISSLRPIGNIVLICCAFFIIFGILGVQLFKGKFYYCEGPDTRNISTKAQCRAAHYRWVRRKYNFDNLGQALMSLFVLSSKDGWVNIMYDGLDAVGVDQQLLRAQHVRGRRGRELPQVPAAPGGGGGAAARGEAAAAPREEAQEHFPQPRGPAPALLCRLLAHAPLHSLAVHQPLSRPLHHLHHLCQRHHHVHGAL

SEQ ID NO: 24387 - protein, 547 aa, Homo sapiens
MAFTLQERQMLGLQGLLPPKIETQDIQALRFHRNLKKMTSPLEKYIYIMGIQERNEKLFYRILQDDIESLMPIVYTPTVGLACSQYGHIFRRPKGLFISISDRGHVRSIVDNWPENHVKAVVVTDGERILGLGDLGVYGMGIPVGKLCLYTACAGIRPDRCLPVCIDVGTDNIALLKDPFYMGLYQKRDRTQQYDDLIDEFMKAITDRYGRNTLIQFEDFGNHNAFRFLRKYREKYCTFNDDIQGTAAVALAGLLAAQKVISKPISEHKILFLGAGEAALGIANLIVMSMVENGLSEQEAQKKIWMFDKYGLLVKGRKAKIDSYQEPFTHSAPESIPDTFEDAVNILKPSTIIGVAGAGRLFTPDVIRAMASINERPVIFALSNPTAQAECTAEEAYTLTEGRCLFASGSPFGPVKLTDGRVFTPGQGNNVYIFPGVALAVILCNTRHISDSVFLEAAKALTSQLTDEELAQGRLYPPLANIQEVSINIAIKVTEYLYANKMAFRYPEPEDKAKYVKERTWRSEYDSLLPDVYEWPESASSPPVITE

SEQ ID NO: 24388 - protein, 726 aa, Homo sapiens
QDITGDIYYFNFANGQSMWDHPCDEHYRSLVIQERAKLSTSGAIKKKKKKKEKKDKKDRDPPKSSLETQPEEGLLPPSSFLCSLSPPSAPGLADLDLDQEMQAISEGSYNKGKSPGMLGDTPWRFMGALPRKLQPLSKGQPSQIHQVFADMEKILGRAPAQCRRELGDQQGLEKLQKATEKIYLGFSDPETEELEMRSRQQKLGTPAPQNTGLLQNMQDVVESRNQASVHSKLSEAIKGLPLKGEQHSHSLAKLSPTGPGGDKGQSPIPMSSPEEEPSLSSCSSGHMLPARKSKLLLDSSPTEDLSWQGVPGEGGSIGSGRRRREPPGLWMEQVSKLVNKDIPGSCKETEPSDPEALGASAEDLPQGLLLIPPETLASEPAQNPLLGRAPEEPPASEKRQALGSAELPYKDQKPSLSGPDLESSSSSSSNSNLASHLGSPVLDEVNNFPWNLQSSRGSEEGMAQSDSGLRDQHFSPFLDPHMSHMQSPDEEQSESEDYSEDQRFYQHILQMVKISRWPEGLGLPESMQDMPCRHSASTVCCMAAESSRMSSEGEHEAIRVMERDSRFLSWEPELLEHPQEVALAPAWQEASQQAHFQPSSSTLRQGLVQQSSSRGLTTEPGKMQHLNQALGSSLAPVHVPLGGLAPLRGLVDTPPSALRGSQSVSLGSSVESGRQLGELMLPSQGLKTSAYTKGLLGSIYEDKTALSLLGLGEETNEEDEEESDNQ

SEQ ID NO: 24389 - protein, 397 aa, Homo sapiens
VWILLLLSLYPGFTSQKSDDDYEDYASNKTWVLTPKVPEGDVTVILNNLLEGYDNKLRPDIGVKPTLIHTDMYVNSIGPVNAINMEYTIDIFFAQTWYDRRLKFNSTIKVLRLNSNMVGKIWIPDTFFRNSKKADAHWITTPNRMLRIWNDGRVLYTLRLTIDAECQLQLHNFPMDEHSCPLEFSSYGYPREEIVYQWKRSSVEVGDTRSWRLYQFSFVGLRNTTEVVKTTSGDYVVMSVYFDLSRRMGYFTIQTYIPCTLIVVLSWVSFWINKDAVPARTSLGITTVLTMTTLSTIARKSLPKVSYVTAMDLFVSVCFIFVFSALVEYGTLHYFVSNRKPSKDKDKKKKNPKVVLLRVGILPASYNKDMRTGFQTSSDESFGKSPLALSVSYAIAE

SEQ ID NO: 24390 - protein, 764 aa, Homo sapiens
MGTATRRKPHLLLVAAVALVSSSAWSSALGSQTTFGPVFEDQPLSVLFPEESTEEQVLLACRARASPPATYRWKMNGTEMKLEPGSRHQLVGGNLVIMNPTKAQDAGVYQCLASNPVGTVVSREAILRFGFLQEFSKEERDPVKAHEGWGVMLPCNPPAHYPGLSYRWLLNEFPNFIPTDGRHFVSQTTGNLYIARTNASDLGNYSCLATSHMDFSTKSVFSKFAQLNLAAEDTRLFAPSIKARFPAETYALVGQQVTLECFAFGNPVPRIKWRKVDGSLSPQWTTAEPTLQIPSVSFEDEGTYECEAENSKGRDTVQGRIIVQAQPEWLKVISDTEADIGSNLRWGCAAAGKPRPTVRWLRNGEPLASQNRVEVLAGDLRFSKLSLEDSGMYQCVAENKHGTIYASAELAVQALAPDFRLNPVRRLIPAARGGEILIPCQPRAAPKAVVLWSKGTEILVNSSRVTVTPDGTLIIRNISRSDEGKYTCFAENFMGKANSTGILSVRDATKITLAPSSADINLGDNLTLQCHASHDPTMDLTFTWTLDDFPIDFDKPGGHYRRTNVKETIGDLTILNAQLRHGGKYTCMAQTVVDSASKEATVLVRGPPGPPGGVVVRDIGDTTIQLSWSRGFDNHSPIAKYTLQARTPPAGKWKQVRTNPANIEGNAETAQVLGLTPWMDYEFRVIASNILGTGEPSGPSSKIRTREAAPSVAPSGLSGGGGAPGELIVNWTAGQHSLADRPGAWRRCPVLCLQQRERPALHAL

SEQ ID NO: 24391 - protein, 354 aa, Homo sapiens; identical to SEQ ID NO: 9152

SEQ ID NO: 24392 - protein, 798 aa, Homo sapiens
MLLFFTLGLLIHFVFFASIFDIYFTSPLVHGMTPQFTPLPPPARRLVLFVADGLRADALYELDENGNSRAPFIRNIIMHEGSWGISHTRVPTESRPGHVALIAGFYEDVSAVAKGWKENPVEFDSLFNESKYTWSWGSPDILPMFAKGASGDHVYTYSYDAKREDFGAQDATKLDTWVFDNVKDFFHHARNNQSLFSKINEEKIVFFLHLLGIDTNGHAHRPSSRDYKHNIKKVDDGVKEIVSMFNHFYGNDGKTTFIFTSDHGMTDWGSHGAGHPSETLTPLVTWGAGIKYPQRVSAQQFDDAFLKEWRLENWKRLDVNQADIAPLMTSLIGVPFPLNSVGILPVDYLNNTDLFKAESMFTNAVQILEQFKVKMTQKKEVTLPFLFTPFKLLSDSKQFNILRKARSYIKHRKFDEVVSLCKELIHLALKGLSYYHTYDRFFLGVNVVIGFVGWISYASLLIIKSHSNLIKGVSKEVKKPSHLLPCSFVAIGILVAFFLLIQACPWTYYVYGLLPLPIWYAVLREFQVIQDLVVSVLTYPLSHFVGYLLAFTLGIEVLVLSFFYRYMLTAGLTAFAAWPFLTRLWTRAKMTSLSWTFFSLLLAVFPLMPVVGRKPDISLVMGAGLLVLLLSLCVVTSLMKRKDSFIKEELLVHLLQVLSTVLSMYVVYSTQSSLLRKQGLPLMNQIISWATLASSLVVPLLSSPVLFQRLFSILLSLMSTYLLLSTGYEALFPLVLSCLMFVWINIEQETLQQSGVCCKQKLTSIQFSYNTDITQFRQLYLDDIRRAFFLVSFVETLV

SEQ ID NO: 24393 - protein, 690 aa, Homo sapiens
MVLAGLIRKLGHQLAEIRERALKSILCKIEHNLICYADLIQERQLFLHLLEWFNFPSVPMKEEVLNLLSRLVKYPPAVQHLVDVGAVEFLSKLRSNVEPNLQAEIDGILDGLFLLPSEVPALSSASYQTNQTELSKNPEILTGYFPQDKSNFQQMEVPPRPVVNQTVKCLKFSTFPWLPLTTTDRHVLSSNESSLRSSNHTLIWNTCELLKDVIMQDFPAEIFLQRPKIVQSLLSLLKLAFGDGKHRLALQSVSCLQQLCMYLRNRLNFHRDPGFFSNKHDTVSQNSSLSYCHEARGTHHSQNPSPGSSSPRPSVVGRTGQRPRGDGQDWDAASSSGSSSHAHVNSRISVHSPLDMGHIDLPELETEDTLELQFQQLSLPQFCVSILESAVPLLRTGSRQVIIRVLELLTEDMTLIGEAISTDIWDDSSLFGIDMKEKLLLVLGALGETMCYHKSSISLEQPEVMLVHHRMAFISISLFAVRLLQTLLPVEKASEFLSEPMSTALFLLSLDMPISLEYPNIHEAVVAYLEQLNSENYSIYKRTAEAVYSIECTCNFLSDIGKEGEKNLLELVELADQALRSFSYHQHFPLIKEIISICSKIWKSAQASPLLQGESQKVLLHMLSHPLPRVKAETYHCCLEITKECLGVHNVTKPVSSLCNGIHFLLHPKVLYEISVFGIQEPESEVCQVT

SEQ ID NO: 24394 - protein, 392 aa, Homo sapiens
MAAVATCGSVAASTGSAVATASKSNVTSFQRRGPRASVTNDSGPRLVSIAGTRPSVRNGQLLVSTGLPALDQLLGGGLAVGTVLLIEEDKYNIYSPLLFKYFLAEGIVNGHTLLVASAKEDPANILQELPAPLLDDKCKKEFDEDVYNHKTPESNIKMKIAWRYQLLPKMEIGPVSSSRFGHYYDASKRMPQELIEASNWHGFFLPEKISSTLKVEPCSLTPGYTKLLQFIQNIIYEEGFDGSNPQKKQRNILRIGIQNLGSPLWGDDICCAENGGNSHSLTKFLYVLRGLLRTSLSACIITMPTHLIQNKAIIARVTTLSDVVVGLESFIGSERETNPLYKDYHGLIHIRQIPRLNNLICDESDVKDLAFKLKRKLFTIEVREFLCFSLQS

SEQ ID NO: 24395 - protein, 1234 aa, Homo sapiens
MANGGGGGGGSSGGGGGGGGSSLRMSSNIHANHLSLDASSSSSSSSSSSSSSSSSSSSSSVHEPKMDALIIPVTMEVPCDSRGQRMWWAFLASSMVTFFGGLFIILLWRTLKYLWTVCCHCGGKTKEAQKINNGSSQADGTLKPVDEKEEAVAAEVGWMTSVKDWAGVMISAQTLTGRVLVVLVFALSIGALVIYFIDSSNPIESCQNFYKDFTLQIDMAFNVFFLLYFGLRFIAANDKLWFWLEVNSVVDFFTVPPVFVSVYLNRSWLGLRFLRALRLIQFSEILQFLNILKTSNSIKLVNLLSIFISTWLTAAGFIHLVENSGDPWENFQNNQALTYWECVYLLMVTMSTVGYGDVYAKTTLGRLFMVFFILGGLAMFARYVPEIAALILSRNKFGGTFNKHGGRKHIVVCGHITLESVSNFLKDFLHKDRDDVNVEIVFLHNISPNLELEALFKRHFTQVEFYQGSVLNPHDLARVKIESADACLILANKYCADPDAEDASNIMRVISIKNYHPKIRIITQMLQYHNKAHLLNIPSWNWKEGDDAICLAELKLGFIAQSCLAQGLSTMLANLFSMRSFIKIEEDTWQKYYLEGVSNEMYTEYLSSAFVGLSFPTVCELCFVKLKLLMIAIEYKSANRESRSRKRILINPGNHLKIQEGTLGFFIASDAKEVKRAFFYCKACHDDITDPKRIKKCGCKRLEDEQPSTLSPKKKQRNGGMRNSPNTSPKLMRHDPLLIPGNDQIDNMDSNVKKYDSTGMFHWCAPKEIEKVILTRSEAAMTVLSGHVVVCIFGDVSSALIGLRNLVMPLRASNFHYHELKHIVFVGSIEYLKREWETLHNFPKVSILPGTPLSRADLRAVNINLCDMCVILSANQNNIDDTSLQDKECILASLNIKSMQFDDSIGVLQANSQGFTPPGMDRSSPDNSPVHGMLRQPSITTGVNIPIITELVNDTNVQFLDQDDDDDPDTELYLTQPFACGTAFAVSVLDSLMSATYFNDNILTLIRTLVTGGATPELEALIAEENALRGGYSTPQTLANRDRCRVAQLALLDGPFADLGDGGCYGDLFCKALKTYNMLCFGIYRLRDAHLSTPSQCTKRYVITNPPYEFELVPTDLIFCLMQFDHNAGQSRASLSHSSHSSQSSSKKSSSVHSIPSTANRQNRPKSRESRDKQNATRMNRMGQEKKWFTDEPDNAYPRNIQIKPMSTHMANQINQYKSTSSLIPPIREVEDEC

SEQ ID NO: 24396 - protein, 472 aa, Homo sapiens
IKWRKVDGSLSPQWTTAEPTLQIPSVSFEDEGTYECEAENSKGRDTVQGRIIVQAQPEWLKVISDTEADIGSNLRWGCAAAGKPRPTVRWLRNGEPLASQNRVEVLAGDLRFSKLSLEDSGMYQCVAENKHGTIYASAELAVQALAPDFRLNPVRRLIPAARGGEILIPCQPRAAPKAVVLWSKGTEILVNSSRVTVTPDGTLIIRNISRSDEGKYTCFAENFMGKANSTGILSVRDATKITLAPSSADINLGDNLTLQCHASHDPTMDLTFTWTLDDFPIDFDKPGGHYRRTNVKETIGDLTILNAQLRHGGKYTCMAQTVVDSASKEATVLVRGPPGPPGGVVVRDIGDTTIQLSWSRGFDNHSPIAKYTLQARTPPAGKWKQVRTNPANIEGNAETAQVLGLTPWMDYEFRVIASNILGTGEPSGPSSKIRTREAAPSVAPSGLSGGGGAPGELIVNWTQRERPALHAL

SEQ ID NO: 24397 - protein, 265 aa, Homo sapiens
MAAVATCGSVAASTGSAVATASKSNVTSFQRRGPRASVTNDSGPRLVSIAGTRPSVRNGQLLVSTGLPALDQLLGGGLAVGTVLLIEEDKYNIYSPLLFKYFLAEGIVNGHTLLVASAKEDPANILQELPAPLLDDKCKKEFDEDVYNHKTPESNIKMKIAWRYQLLPKMEIGPVSSSRFGHYYDASKRMPQELIEASNWHGFFLPEKISSTLKVEPCSLTPGYTKLLQFIQNIIYEEGFDGSNPQCLSGEVNWSLTDTYPHLLW

SEQ ID NO: 24398 - protein, 230 aa, Homo sapiens
MRRVLRLLLGCFLTELCARVCRAQERAGHGQLAQLGGVLLLAGGNRSGAASGEASEGAEASDAPPTRAPTPDFCRGYFDVMGQWDPPFNCSSGDFIFCCGTCGFRFCCTFKKRRLNQSTCTNYDTPLWLNTGKPPARKDDPLHDPTKDKTNLIVYIICGVVAVMVLVGIFTKLGLEKAHRPQREHMSRALADVMRPQGHCNTDHMERDLNIVVHVQHYENMDTRTPINNL

SEQ ID NO: 24399 - protein, 1177 aa, Homo sapiens
MANGGGGGGGSSGGGGGGGGSSLRMSSNIHANHLSLDASSSSSSSSSSSSSSSSSSSSSSVHEPKMDALIIPVTMEVPCDSRGQRMWWAFLASSMVTFFGGLFIILLWRTLKYLWTVCCHCGGKTKEAQKINNGSSQADGTLKPVDEKEEAVAAEVGWMTSVKDWAGVMISAQTLTGRVLVVLVFALSIGALVIYFIDSSNPIESCQNFYKDFTLQIDMAFNVFFLLYFGLRFIAANDKLWFWLEVNSVVDFFTVPPVFVSVYLNRSWLGLRFLRALRLIQFSEILQFLNILKTSNSIKLVNLLSIFISTWLTAAGFIHLVENSGDPWENFQNNQALTYWECVYLLMVTMSTVGYGDVYAKTTLGRLFMVFFILGGLAMFASYVPEIIELIGNRKKYGGSYSAVSGRKHIVVCGHITLESVSNFLKDFLHKDRDDVNVEIVFLHNISPNLELEALFKRHFTQVEFYQGSVLNPHDLARVKIESADACLILANKYCADPDAEDASNIMRVISIKNYHPKIRIITQMLQYHNKAHLLNIPSWNWKEGDDAICLAELKLGFIAQSCLAQGLSTMLANLFSMRSFIKIEEDTWQKYYLEGVSNEMYTEYLSSAFVGLSFPTVCELCFVKLKLLMIAIEYKSANRESRILINPGNHLKIQEGTLGFFIASDAKEVKRAFFYCKACHDDITDPKRIKKCGCKRLEDEQPSTLSPKKKQRNGGMRNSPNTSPKLMRHDPLLIPGNDQIDNMDSNVKKYDSTGMFHWCAPKEIEKVILTRSEAAMTVLSGHVVVCIFGDVSSALIGLRNLVMPLRASNFHYHELKHIVFVGSIEYLKREWETLHNFPKVSILPGTPLSRADLRAVNINLCDMCVILSANQNNIDDTSLQDKECILASLNIKSMQFDDSIGVLQANSQGFTPPGMDRSSPDNSPVHGMLRQPSITTGVNIPIITELVNDTNVQFLDQDDDDDPDTELYLTQPFACGTAFAVSVLDSLMSATYFNDNILTLIRTLVTGGATPELEALIAEENALRGGYSTPQTLANRDRCRVAQLALLDGPFADLGDGGCYGDLFCKALKTYNMLCFGIYRLRDAHLSTPSQCTKRYVITNPPYEFELVPTDLIFCLMQFDHNAGQSRASLSHSSHSSQSSSKKSSSVHSIPSTANRQNRPKSRESRDKQKKEMVYR

SEQ ID NO: 24400 - protein, 683 aa, Homo sapiens
RGFIGTPAPPVCDSKFLLSPSSDVRMIPCRAALTFARCLIRRKIVTLDSLEDTKLCRCLSTMDLIALGVGSTLGAGVYVLAGEVAKADSGPSIVVSFLIAALASVMAGLCYAEFGARVPKTGSAYLYTYVTVGELWAFITGWNLILSYVIGTSSVARAWSGTFDELLSKQIGQFLRTYFRMNYTGLAEYPDFFAVCLILLLAGLLSFGVKESAWVNKVFTAVNILVLLFVMVAGFVKGNVANWKISEEFLKNISASAREPPSENGTSIYGAGGFMPYGFTGTLAGAATCFYAFVGFDCIATTGEEVRNPQKAIPIGIVTSLLVCFMAYFGVSAALTLMMPYYLLDEKSPLPVAFEYVGWGPAKYVVAAGSLCALSTSLLGSIFPMPRVIYAMAEDGLLFKCLAQINSKTKTPIIATLSSGAVAALMAFLFDLKALVDMMSIGTLMAYSLVAACVLILRYQPGLSYDQPKCSPEKDGLGSSPRVTSKSESQVTMLQRQGFSMRTLFCPSLLPTQQSASLVSFLVGFLAFLVLGLSVLTTYGVHAITRLEAWSLALLALFLVLFVAIVLTIWRQPQNQQKVAFMVPFLPFLPAFSILVNIYLMVQLSADTWVRFSIWMAIGFLIYFSYGIRHSLEGHLRDENNEEDAYPDNVHAAAEEKSAIQANDHHPRNLSSPFIFHEKTSEF

SEQ ID NO: 24401 - protein, 213 aa, Homo sapiens
MSAPSATPIFAPGENCSPAWGAAPAAYDAADTHLRILGGRVLEVGFGMAIAASKVQEAPIDEHWIIECNDGVFQRLRDWAPRQTHKVIPLKGLWEDVAPTLPDGHFDGILYDTYPLSEETWHTHQFNFIKNHAFRLLKPGGVLTYCNLTSWGELMKSKYSDITIMFEETQVPALLEAGFRRENIRTEVMALVPPADCRYYAFPQMITPLVTKG

SEQ ID NO: 24402 - protein, 1239 aa, Homo sapiens
MANGGGGGGGSSGGGGGGGGSSLRMSSNIHANHLSLDASSSSSSSSSSSSSSSSSSSSSSVHEPKMDALIIPVTMEVPCDSRGQRMWWAFLASSMVTFFGGLFIILLWRTLKYLWTVCCHCGGKTKEAQKINNGSSQADGTLKPVDEKEEAVAAEVGWMTSVKDWAGVMISAQTLTGRVLVVLVFALSIGALVIYFIDSSNPIESCQNFYKDFTLQIDMAFNVFFLLYFGLRFIAANDKLWFWLEVNSVVDFFTVPPVFVSVYLNRSWLGLRFLRALRLIQFSEILQFLNILKTSNSIKLVNLLSIFISTWLTAAGFIHLVENSGDPWENFQNNQALTYWECVYLLMVTMSTVGYGDVYAKTTLGRLFMVFFILGGLAMFASYVPEIIELIGNRKKYGGSYSAVSGRKHIVVCGHITLESVSNFLKDFLHKDRDDVNVEIVFLHNISPNLELEALFKRHFTQVEFYQGSVLNPHDLARVKIESADACLILANKYCADPDAEDASNIMRVISIKNYHPKIRIITQMLQYHNKAHLLNIPSWNWKEGDDAICLAELKLGFIAQSCLAQGLSTMLANLFSMRSFIKIEEDTWQKYYLEGVSNEMYTEYLSSAFVGLSFPTVCELCFVKLKLLMIAIEYKSANRESRILINPGNHLKIQEGTLGFFIASDAKEVKRAFFYCKACHDDITDPKRIKKCGCKRRWEEHCSLWRLESKGNVRRLNYCRGQQTFSVKVKVAARSRYSKDPFEFKKETPNSRLVTEPVEDEQPSTLSPKKKQRNGGMRNSPNTSPKLMRHDPLLIPGNDQIDNMDSNVKKYDSTGMFHWCAPKEIEKVILTRSEAAMTVLSGHVVVCIFGDVSSALIGLRNLVMPLRASNFHYHELKHIVFVGSIEYLKREWETLHNFPKVSILPGTPLSRADLRAVNINLCDMCVILSANQNNIDDTSLQDKECILASLNIKSMQFDDSIGVLQANSQGFTPPGMDRSSPDNSPVHGMLRQPSITTGVNIPIITELVNDTNVQFLDQDDDDDPDTELYLTQPFACGTAFAVSVLDSLMSATYFNDNILTLIRTLVTGGATPELEALIAEENALRGGYSTPQTLANRDRCRVAQLALLDGPFADLGDGGCYGDLFCKALKTYNMLCFGIYRLRDAHLSTPSQCTKRYVITNPPYEFELVPTDLIFCLMQFDHNAGQSRASLSHSSHSSQSSSKKSSSVHSIPSTANRQNRPKSRESRDKQKYVQEERL

SEQ ID NO: 24403 - protein, 283 aa, Homo sapiens
MSGPCGEKPVLEASPTMSLWEFEDSHSRQGTPRPGQELAAEEASALELQMKVDFFRKLGYSSTEIHSVLQKLGVQADTNTVLGELVKHGTATERERQTSPDPCPQLPLVPRGGGTPKAPNLEPPLPEEEKEGSDLRPVVIDGSNVAMSHGNKEVFSCRGILLAVNWFLERGHTDITVFVPSWRKEQPRPDVPITDQHILRELEKKKILVFTPSRRVGGKRVVCYDDRFIVKLAYESDGIVVSNDTYRDLQGERQEWKRFIEERLLMYSFVNDNKACHRPLLSN

SEQ ID NO: 24404 - protein, 305 aa, Homo sapiens
MGARGALLLALLLARAGLGKPESQEEELLSEACGHREIHALVAGGVESARGRWPWQASLRLRRRHRCGGSLLSRRWVLSAAHCFQKHYYPSEWTVQLGELTSRPTPWNLRAYSSRYKVQDIIVNPDALGVLRNDIALLRLASSVTYNAYIQPICIESSTFNFVHRPDCWVTGWGLISPSGTPLPPPYNLREAQVTILNNTRCNYLFEQPSSRSMIWDSMFCAGAEDGSVDTCKGDSGGPLVCDKDGLWYQVGIVSWGMDCGQPNRPGVYTNISVYFHWIRRVMSHSTPRPNPSQLLLLLALLWAP

SEQ ID NO: 24405 - protein, 480 aa, Homo sapiens
MLSRLRVVSTTCTLACRHLHIKEKGKPLMLNPRTNKGMAFTLQERQMLGLQGLLPPKIETQDIQALRFHRNLKKMTSPLEKYIYIMGIQERNEKLFYRILQDDIESLMPIVYTPTVGLACSQYGHIFRRPKGLFISISDRGHVRSIVDNWPENHVKAVVVTDGERILGLGDLGVYGMGIPVGKLCLYTACAGIRPDRCLPVCIDVGTDNIALLKDPFYMGLYQKRDRTQQYDDLIDEFMKAITDRYGRNTLIQFEDFGNHNAFRFLRKYREKYCTFNDDIQGTAAVALAGLLAAQKVISKPISEHKILFLGAGEAALGIANLIVMSMVENGLSEQEAQKKIWMFDKYGLLVKGRKAKIDSYQEPFTHSAPESIPDTFEDAVNILKPSTIIGVAGAGRLFTPDVIRAMASINERPVIFALSNPTAQAECTAEEAYTLTEGRCLFASGSPFGPVKLTDGRVFTPGQGNNVYIFPGPDKPIDR

SEQ ID NO: 24406 - protein, 1236 aa, Homo sapiens
MANGGGGGGGSSGGGGGGGGSSLRMSSNIHANHLSLDASSSSSSSSSSSSSSSSSSSSSSVHEPKMDALIIPVTMEVPCDSRGQRMWWAFLASSMVTFFGGLFIILLWRTLKYLWTVCCHCGGKTKEAQKINNGSSQADGTLKPVDEKEEAVAAEVGWMTSVKDWAGVMISAQTLTGRVLVVLVFALSIGALVIYFIDSSNPIESCQNFYKDFTLQIDMAFNVFFLLYFGLRFIAANDKLWFWLEVNSVVDFFTVPPVFVSVYLNRSWLGLRFLRALRLIQFSEILQFLNILKTSNSIKLVNLLSIFISTWLTAAGFIHLVENSGDPWENFQNNQALTYWECVYLLMVTMSTVGYGDVYAKTTLGRLFMVFFILGGLAMFASYVPEIIELIGNRKKYGGSYSAVSGRKHIVVCGHITLESVSNFLKDFLHKDRDDVNVEIVFLHNISPNLELEALFKRHFTQVEFYQGSVLNPHDLARVKIESADACLILANKYCADPDAEDASNIMRVISIKNYHPKIRIITQMLQYHNKAHLLNIPSWNWKEGDDAICLAELKLGFIAQSCLAQGLSTMLANLFSMRSFIKIEEDTWQKYYLEGVSNEMYTEYLSSAFVGLSFPTVCELCFVKLKLLMIAIEYKSANRESRILINPGNHLKIQEGTLGFFIASDAKEVKRAFFYCKACHDDITDPKRIKKCGCKRPKMSIYKRMRRACCFDCGRSERDCSCMSGRVRGNVDTLERAFPLSSVSVNDCSTSFRAFEDEQPSTLSPKKKQRNGGMRNSPNTSPKLMRHDPLLIPGNDQIDNMDSNVKKYDSTGMFHWCAPKEIEKVILTRSEAAMTVLSGHVVVCIFGDVSSALIGLRNLVMPLRASNFHYHELKHIVFVGSIEYLKREWETLHNFPKVSILPGTPLSRADLRAVNINLCDMCVILSANQNNIDDTSLQDKECILASLNIKSMQFDDSIGVLQANSQGFTPPGMDRSSPDNSPVHGMLRQPSITTGVNIPIITELVNDTNVQFLDQDDDDDPDTELYLTQPFACGTAFAVSVLDSLMSATYFNDNILTLIRTLVTGGATPELEALIAEENALRGGYSTPQTLANRDRCRVAQLALLDGPFADLGDGGCYGDLFCKALKTYNMLCFGIYRLRDAHLSTPSQCTKRYVITNPPYEFELVPTDLIFCLMQFDHNAGQSRASLSHSSHSSQSSSKKSSSVHSIPSTANRQNRPKSRESRDKQNRKEMVYR

SEQ ID NO: 24407 - protein, 1133 aa, Homo sapiens
LAAANSGRENATATAHSRSSWRQPVNVFLSSGRPPSVEELLREAQLNLQSLLQEEYEEQYSEARLVGQTFRSSDEATKPTPNPRPQSARRLEFILMPTKRQLSEDETTTQGVRAPEASLSLSTTADKQTAWNSLFPLPILEEKRWPQLCSTQSDIVPINISGQQFDKHASLRHSLFNTETAVNPKSTLRRRRTIIGFSNFSQRDQGHSNSPAGSVAHSTTSDIRPSHSVPEGVHGRVAVGQDARFPSLTSPVLRTPSSEPDEPHQARSGPNPPGMESMGMVYSVPSSCNGPTESTFSTSWKGDAFTYMTPSATSQSNQVNENGKNPSCGNSWVSLNKVPPLVPKEAATLLVARDNPAGCSGSAGYPERLIQQRHMPERPSKIGLLTSGTSRLETGPGGASRFRERSLSVPTDSGTTDVDYDEEQKANEACALPFASTSSEGSNSADNIASLSAQQEAQHRRQRSKSISLRKAKKKPSPPTRSVSLVKDEPGLLPEGGSALPKDQRPKSLCLSLEHQGHHSSHPDAQGHPAIPNHKDPESTQFSHHWYLTDWKSGDTYQSLSSSSTATGTTVIECTQVQGSSESLASPSTSRATTPSQLSIEVEAREISSPGRPPGLMSPSSGYSSQSETPTPTVSMSLTLGHLPPPSSSVRVRPVVPERKSSLPPTSPMEKFPKSRLSFDLPLTSSPNLDLSGMSISIRSKTKVSRHHSETNFGVKLAQKTNPNQPIMPMVTQSDLRSVRLRSVSKSEPEDDIESPEYAEEPRAEEVFTLPERKTKPPVAEKPPVARRPPSLVHKPPSVPEEYALTSPTLAMPPRSSIQHARPLPQDSYTVVRKPKPSSFPDGRSPGESTAPSSLVFTPFASSSDAFFSGTQQPPQGSVEDEGPKVRVLPERISLQSQEEAEKKKGKIPPPVPKKPSVLYLPLTSPTAQMEAYVAEPRLPLSPIITLEEDTKCPATGDDLQSLGQRVTSTPQADSEREASPLGSSVEPGTEEKSLISDKTAEWIAEDDDDVFVASRTTEDLFTVIHRSKRKLLGWKEPGEAFVGGRTSSHSPIKNTAESPISESTATAGSGSSANLDAGRNDDFKALLQKKGSKATPRSRPSAAELLKTTNPLARRIIAQFSKDYETTDNPST

SEQ ID NO: 24408 - protein, 530 aa, Homo sapiens
MLSRLRVVSTTCTLACRHLHIKEKGKPLMLNPRTNKGMAFTLQERQMLGLQGLLPPKIETQDIQALRFHRNLKKMTSPLEKYIYIMGIQERNEKLFYRILQDDIESLMPIVYTPTVGLACSQYGHIFRRPKGLFISISDRGHVRSIVDNWPENHVKALLKDPFYMGLYQKRDRTQQYDDLIDEFMKAITDRYGRNTLIQFEDFGNHNAFRFLRKYREKYCTFNDDIQGTAAVALAGLLAAQKVISKPISEHKILFLGAGEAALGIANLIVMSMVENGLSEQEAQKKIWMFDKYGLLVKGRKAKIDSYQEPFTHSAPESIPDTFEDAVNILKPSTIIGVAGAGRLFTPDVIRAMASINERPVIFALSNPTAQAECTAEEAYTLTEGRCLFASGSPFGPVKLTDGRVFTPGQGNNVYIFPGVALAVILCNTRHISDSVFLEAAKALTSQLTDEELAQGRLYPPLANIQEVSINIAIKVTEYLYANKMAFRYPEPEDKAKYVKERTWRSEYDSLLPDVYEWPESASSPPVITE

SEQ ID NO: 24409 - protein, 445 aa, Homo sapiens
MTVWILLLLSLYPGFTSQKSDDDYEDYASNKTWVLTPKVPEGDVTVILNNLLEGYDNKLRPDIGVKPTLIHTDMYVNSIGPVNAINMEYTIDIFFAQTWYDRRLKFNSTIKVLRLNSNMVGKIWIPDTFFRNSKKADAHWITTPNRMLRIWNDGRVLYTLRLTIDAECQLQLHNFPMDEHSCPLEFSSYGYPREEIVYQWKRSSVEVGDTRSWRLYQFSFVGLRNTTEVVKTTSGDYVVMSVYFDLSRRMGYFTIQTYIPCTLIVVLSWVSFWINKDAVPARTSLGITTVLTMTTLSTIARKSLPKVSYVTAMDLFVSVCFIFVFSALVEYGTLHYFVSNRKPSKDKDKKKKNPAPTIDIRPRSATIQMNNATHLQERDEEYGYECLDGKDCASFFCCFEDCRTGAWRHGRIHIRIAKMDSYARIFFPTAFCLFNLVYWVSYLYL

SEQ ID NO: 24410 - protein, 295 aa, Homo sapiens [sequence omitted]

SEQ ID NO: 24411 - protein, 475 aa, Homo sapiens
MSSPNIWSTGSSVYSTPVFSQKMTVWILLLLSLYPGFTSQKSDDDYEDYASNKTWVLTPKVPEGDVTVILNNLLEGYDNKLRPDIGVKPTLIHTDMYVNSIGPVNAINMEYTIDIFFAQTWYDRRLKFNSTIKVLRLNSNMVGKIWIPDTFFRNSKKADAHWITTPNRMLRIWNDGRVLYTLRLTIDAECQLQLHNFPMDEHSCPLEFSSYGYPREEIVYQWKRSSVEVGDTRSWRLYQFSFVGLRNTTEVVKTTSGDYVVMSVYFDLSRRMGYFTIQTYIPCTLIVVLSWVSFWINKDAVPARTSLGITTVLTMTTLSTIARKSLPKVSYVTAMDLFVSVCFIFVFSALVEYGTLHYFVSNRKPSKDKDKKKKNPLLRMFSFKAPTIDIRPRSATIQMNNATHLQERDEEYGYECLDGKDCASFFCCFEDCRTGAWRHGRIHIRIAKMDSYARIFFPTAFCLFNLVYWVSYLYL

SEQ ID NO: 24412 - protein, 263 aa, Homo sapiens
MGADGMYDKLRMLNGQTGSWGTRPGWYPGTSVPGQPTQDGCQQQEGGGENTNSISSNGEDSDEAQMRLQLKRKLQRNRTSFTQEQIEALEKEFERTHYPDVFARERLAAKIDLPEARIQVWFSNRRAKWRREEKLRNQRRQASNTPSHIPISSSFSTSVYQPIPQPTTPVSSFTSGSMLGRTDTALTNTYSALPPMPSFTMANNLPMQVSAAGGGLHNPGPREVRSGSGPADLIGCVCTLESFSHYSDWLDQSSRRQSIPSLL

SEQ ID NO: 24413 - protein, 296 aa, Homo sapiens
MFANLKYVSLGILVFQTTSLVLTMRYSRTLKEEGPRYLSSTAVVVAELLKIMACILLVYKDSKCSLRALNRVLHDEILNKPMETLKLAIPSGIYTLQNNLLYVALSNLDAATYQVTYQLKILTTALFSVSMLSKKLGVYQWLSLVILMTGVAFVQWPSDSQLDSKELSAGSQFVGLMAVLTACFSSGFAGVYFEKILKETKQSVWIRNIQLGFFGSIFGLMGVYIYDGELVSKNGFFQGYNRLTWIVVVLQALGGLVIAAVIKYADNILKGFATSLSIILSTLISYFWLQDFVPTR

SEQ ID NO: 24414 - protein, 424 aa, Homo sapiens
MAAVATCGSVAASTGSAVATASKSNVTSFQRRGPRASVTNDSGPRLVSIAGTRPSVRNGQLLVSTGLPALDQLLGGGLAVGTVLLIEEDKYNIYSPLLFKYFLAEGIVNGHTLLVASAKEDPANILQELPAPLLDDKCKKEFDEDVYNHKTPESNIKMKIAWRYQLLPKMEIGPVSSSRFGHYYDASKRMPQELIEASNWHGFFLPEKISSTLKVEPCSLTPGYTKLLQFIQNIIYEEGFDGSNPQKKQRNILRIGIQNLGSPLWGDDICCAENGGNSHSLTKFLYVLRGLLRTSLSACIITMPTHLIQNKAIIARVTTLSDVVVGLESFIGSERETNPLYKDYHGLIHIRQIPRLNNLICDESDVKDLAFKLKRKLFTIERLHLPPDLSDTVSRSSKMDLAESAKRLGPGCGMMAGGKKHLDF

SEQ ID NO: 24415 - protein, 963 aa, Homo sapiens
AQKINNGSSQADGTLKPVDEKEEAVAAEVGWMTSVKDWAGVMISAQTLTGRVLVVLVFALSIGALVIYFIDSSNPIESCQNFYKDFTLQIDMAFNVFFLLYFGLRFIAANDKLWFWLEVNSVVDFFTVPPVFVSVYLNRSWLGLRFLRALRLIQFSEILQFLNILKTSNSIKLVNLLSIFISTWLTAAGFIHLVENSGDPWENFQNNQALTYWECVYLLMVTMSTVGYGDVYAKTTLGRLFMVFFILGGLAMFASYVPEIIELIGNRKKYGGSYSAVSGRKHIVVCGHITLESVSNFLKDFLHKDRDDVNVEIVFLHKVISIKNYHPKIRIITQMLQYHNKAHLLNIPSWNWKEGDDAICLAELKLGFIAQSCLAQGLSTMLANLFSMRSFIKIEEDTWQKYYLEGVSNEMYTEYLSSAFVGLSFPTVCELCFVKLKLLMIAIEYKSANRESRILINPGNHLKIQEGTLGFFIASDAKEVKRAFFYCKACHDDITDPKRIKKCGCKRLEDEQPSTLSPKKKQRNGGMRNSPNTSPKLMRHDPLLIPGNDQIDNMDSNVKKYDSTGMFHWCAPKEIEKVILTRSEAAMTVLSGHVVVCIFGDVSSALIGLRNLVMPLRASNFHYHELKHIVFVGSIEYLKREWETLHNFPKVSILPGTPLSRADLRAVNINLCDMCVILSANQNNIDDTSLQDKECILASLNIKSMQFDDSIGVLQANSQGFTPPGMDRSSPDNSPVHGMLRQPSITTGVNIPIITELVNDTNVQFLDQDDDDDPDTELYLTQPFACGTAFAVSVLDSLMSATYFNDNILTLIRTLVTGGATPELEALIAEENALRGGYSTPQTLANRDRCRVAQLALLDGPFADLGDGGCYGDLFCKALKTYNMLCFGIYRLRDAHLSTPSQCTKRYVITNPPYEFELVPTDLIFCLMQFDHNAGQSRASLSHSSHSSQSSSKKSSSVHSIPS

SEQ ID NO: 24416 - protein, 759 aa, Homo sapiens
MAARLLAPPGPDSFKPFTPESLANIERRIAESKLKKPPKADGSHREDDEDSKPKPNSDLEAGKSLPFIYGDIPQGLVAVPLEDFDPYYLTQKTFVVLNRGKTLFRFSATPALYILSPFNLIRRIAIKILIHSVFSMIIMCTILTNCVFMTFSNPPDWSKNVEYTFTGIYTFESLVKIIARGFCIDGFTFLRDPWNWLDFSVIMMAYVTEFVDLGNVSALRTFRVLRALKTISVIPGLKTIVGALIQSVKKLSDVMILTVFCLSVFALIGLQLFMGNLRNKCVVWPINFNESYLENGTKGFDWEEYINNKTNFYTVPGMLEPLLCGNSSDAGQCPEGYQCMKAGRNPNYGYTSFDTFSWAFLALFRLMTQDYWENLYQLTLRAAGKTYMIFFVLVIFVGSFYLVNLILAVVAMAYEEQNQATLEEAEQKEAEFKAMLEQLKKQQEEAQAAAMATSAGTVSEDAIEEEGEEGGGSPRSSSEISKLSSKSAKERRNRRKKRKQKELSEGEEKGDPEKVFKSESEDGMRRKAFRLPDNRIGRKFSIMNQSLLSIPGSPFLSRHNSKSSIFSFRGPGRFRDPGSENEFADDEHSTVEESEGRRDSLFIPIRARERRSSYSGYSGYSQGSRSSRIFPSLRRSVKRNSTVDCNGVVSLIGGPGSHIGGRLLPEVKIDKAATDDSVRKNTNRSRLGMAVSPAPSPPLSLLCPSHLVCLDPTPVNTPAISVFFLAYFYFSLQFSPYYSPCLLLSFILCSIFPIFPPCF

SEQ ID NO: 24417 - protein, 312 aa, Homo sapiens
MASQLTQRGALFLLFFLTPAVTPTWYAGSGYYPDESYNEVYAEEVPQAPALDYRACLSSIATVPRWCYTLNIQDGEATCYSPKGGNYHSSLGTRCELSCDRGFRLIGRRSVQCLPSRRWSGTAYCRQMRCHALPFITSGTYTCTNGVLLDSRCDYSCSSGYHLEGDRSRICMEDGRWSGGEPVCVDIDPPKIRCPHSREKMAEPEKLTARVYWDPPLVKDSADGTITRVTLRGPEPGSHFPEGEHVIRYTAYDRAYNRASCKFIVKVQVRRCPTLKPPQHGYLTCTSAGDNYGATCEYHCDGGYDRQGTPSR

SEQ ID NO: 24418 - protein, 228 aa, Homo sapiens
MFANLKYVSLGILVFQTTSLVLTMRYSRTLKEEGPRYLSSTAVVVAELLKIMACILLVYKDSKCSLRALNRVLHDEILNKPMETLKLAIPSGIYTLQNNLLYVALSNLDAATYQWPSDSQLDSKELSAGSQFVGLMAVLTACFSSGFAGVYFEKILKETKQSVWIRNIQLGFFGSIFGLMGVYIYDGELVSKNGFFQGYNRLTWIVVVLQCLFPWSHPCNNSYFFVWL

SEQ ID NO: 24419 - protein, 1119 aa, Homo sapiens
MDALIIPVTMEVPCDSRGQRMWWAFLASSMVTFFGGLFIILLWRTLKYLWTVCCHCGGKTKEAQKINNGSSQADGTLKPVDEKEEAVAAEVGWMTSVKDWAGVMISAQTLTGRVLVVLVFALSIGALVIYFIDSSNPIESCQNFYKDFTLQIDMAFNVFFLLYFGLRFIAANDKLWFWLEVNSVVDFFTVPPVFVSVYLNRSWLGLRFLRALRLIQFSEILQFLNILKTSNSIKLVNLLSIFISTWLTAAGFIHLVENSGDPWENFQNNQALTYWECVYLLMVTMSTVGYGDVYAKTTLGRLFMVFFILGGLAMFASYVPEIIELIGNRKKYGGSYSAVSGRKHIVVCGHITLESVSNFLKDFLHKDRDDVNVEIVFLHNISPNLELEALFKRHFTQVEFYQGSVLNPHDLARVKIESADACLILANKYCADPDAEDASNIMRVISIKNYHPKIRIITQMLQYHNKIEEDTWQKYYLEGVSNEMYTEYLSSAFVGLSFPTVCELCFVKLKLLMIAIEYKSANRESRILINPGNHLKIQEGTLGFFIASDAKEVKRAFFYCKACHDDITDPKRIKKCGCKRPKMSIYKRMRRACCFDCGRSERDCSCMSGRVRGNVDTLERAFPLSSVSVNDCSTSFRAFEDEQPSTLSPKKKQRNGGMRNSPNTSPKLMRHDPLLIPGNDQIDNMDSNVKKYDSTGMFHWCAPKEIEKVILTRSEAAMTVLSGHVVVCIFGDVSSALIGLRNLVMPLRASNFHYHELKHIVFVGSIEYLKREWETLHNFPKVSILPGTPLSRADLRAVNINLCDMCVILSANQNNIDDTSLQDKECILASLNIKSMQFDDSIGVLQANSQGFTPPGMDRSSPDNSPVHGMLRQPSITTGVNIPIITELVNDTNVQFLDQDDDDDPDTELYLTQPFACGTAFAVSVLDSLMSATYFNDNILTLIRTLVTGGATPELEALIAEENALRGGYSTPQTLANRDRCRVAQLALLDGPFADLGDGGCYGDLFCKALKTYNMLCFGIYRLRDAHLSTPSQCTKRYVITNPPYEFELVPTDLIFCLMQFDHNAGQSRASLSHSSHSSQSSSKKSSSVHSIPSTANRQNRPKSRESRDKQNRKEMVYR

SEQ ID NO: 24420 - protein, 386 aa, Homo sapiens
MQNSHSGVNQLGGVFVNGRPLPDSTRQKIVELAHSGARPCDISRILQVSNGCVSKILGRYYETGSIRPRAIGGSKPRVATPEVVSSINRVLRNLASEKQQMGADGMYDKLRMLNGQTGSWGTRPGWYPGTSVPGQPTQDGCQQQEGGGENTNSISSNGEDSDEAQMRLQLKRKLQRNRTSFTQEQIEALEKEFERTHYPDVFARERLAAKIDLPEARIQVWFSNRRAKWRREEKLRNQRRQASNTPSHIPISSSFSTSVYQPIPQPTTPVSSFTSGSMLGRTDTALTNTYSALPPMPSFTMANNLPMQPPVPSQTSSYSCMLPTSPSVNGRSYDTYTPPHMQTHMNSQPMGTSGTTSTGLISPGVSVPVQVPGSEPDMSQYWPRLQ

SEQ ID NO: 24421 - protein, 688 aa, Homo sapiens
MVAEVSPKLAASPMKKPFGFRGKMGKWCCCCFPCCRGSGKNNMGAWRDHDDSAFTEPRYHVRREDLGKLHRAAWWGEVPRADLIVMLRGPGINKRDKKKRTALHLACANGNSEVVSLLLDRQCQLHVFDSKKRTALIKAVQCQEDECALMLLQHGTDPNLPDMYGNTALHYAVYNEDKLMAKTLLLYGADIESKNKGGLTPLLLAVHGQKQRMVKFLIKKKANLNALDRFGRTALILAVRCGSASIVSLLLQQNIDVFSQDVFGQTAEDYAVSSHHSIICQLLSDYKENQMPNNSSGNSNPEQDLKLTSEEEPQRLKGSENSQHEKVTQEPDINKDCDREVEEEMQKHGSNNVGLSENLTDGAAAGNGDGGLVPQRKSRKHENQQFPNTEIEEYHRPEKKSNEKNKVKSQIHSVDNLDDITWPSEIASEDYDLLFSNYETFTLLIEQLKMDFNDSASLSKIQDAVISEEHLLELKNSHYEQLTVEVEQMENMVHVLQKULSEAKETQLQLAPQKGECEQERYSSSEEQNDTRKQLSKEQNARILQDEILTTKQKQIEVAEKKMNFEISLSHKEEKELLHENSMMQEEIAMLRIELDTIKHQNQLREKKYLEYIKSVKEKNDNLLKAIQLNEEALTKAVVQYSGQLSILTTENKMLSFELQNVRHNNETLEMEIQSCHFRLATALHDCD

SEQ ID NO: 24422 - protein, 194 aa, Homo sapiens
MVGASRPPPKPLRPRQLQEVGRQSSSDSGIATGSHSSYSSSLSSYAGSSLDVWRATDELGSLLSLPAAGAPEPSLCTCLPGTVEYQVPTSLRAHYDTPRSLCLAPRDHSPPSQGSPGNSAARDSGGQTSAGCPSGWLGTRRRGLVMEAPQGSEATLPGPAPGEPWEAGGPHAGPPPAFFSACPVCGGLKVNPPP

SEQ ID NO: 24423 - protein, 384 aa, Homo sapiens
MAERPGSPGSREMRLLTFRDIAIEFSLEEWQCLDCAQQNLYRDVMLENYRNLVSLGIADSKPDLITCLEQNKEAWNIKRNEMVAKHPVTCSHFTQDLHPEQGIKHSLQKVIPRTYGKCGHENLQFKKCCKSVGECEVHKGGYNEVKQCLSNTQNKIFQTHKCVIVFGKFSNCNRHETRYTGKKHFKCKKYGKSFCMPSHLNQHQIIHTKEKSYKCEECGKSFKRSSNCTTHKRIHTGEKPYRCEECGKAFRWPSNLTRHKRIHTGEKPYTCEECGQAFRRSSTLTNHKRIHTGERPYKCEECGKAFSVSSTLNDHKRIHTGEKPYTCEECGRAFNCSSTLKTHKRIHTGEKPYKCEECDKAFKRHSSLAKHKIIHTGEKPYKSK

SEQ ID NO: 24424 - protein, 357 aa, Homo sapiens
MDALIIPVTMEVPCDSRGQRMWWAFLASSMVTFFGGLFIILLWRTLKYLWTVCCHCGGKTKEAQKINNGSSQADGTLKPVDEKEEAVAAEVGWMTSVKDWAGVMISAQTLTGRVLVVLVFALSIGALVIYFIDSSNPIESCQNFYKDFTLQIDMAFNVFFLLYFGLRFIAANDKLWFWLEVNSVVDFFTVPPVFVSVYLNRSWLGLRFLRALRLIQFSEILQFLNILKTSNSIKLVNLLSIFISTWLTAAGFIHLVENSGDPWENFQNNQALTYWECVYLLMVTMSTVGYGDVYAKTTLGRLFMVFFILGGLAMFASYVPEIIELIGNRKKYGGSYSAVSGRKQCLPATCPKLLLSS

SEQ ID NO: 24425 - protein, 584 aa, Homo sapiens
MANGGGGGGGSSGGGGGGGGSSLRMSSNIHANHLSLDASSSSSSSSSSSSSSSSSSSSSSVHEPKMDALIIPVTMEVPCDSRGQRMWWAFLASSMVTFFGGLFIILLWRTLKYLWTVCCHCGGKTKEAQKINNGSSQADGTLKPVDEKEEAVAAEVGWMTSVKDWAGVMISAQTLTGRVLVVLVFALSIGALVIYFIDSSNPIESCQNFYKDFTLQIDMAFNVFFLLYFGLRFIAANDKLWFWLEVNSVVDFFTVPPVFVSVYLNRSWLGLRFLRALRLIQFSEILQFLNILKTSNSIKLVNLLSIFISTWLTAAGFIHLVENSGDPWENFQNNQALTYWECVYLLMVTMSTVGYGDVYAKTTLGRLFMVFFILGGLAMFASYVPEIIELIGNRKKYGGSYSAVSGRKHIVVCGHITLESVSNFLKDFLHKDRDDVNVEIVFLHNISPNLELEALFKRHFTQVEFYQGSVLNPHDLARVKIESADACLILANKYCADPDAEDASNIMRVISIKNYHPKIRIITQMLQYHNKAHLLNIPSWNWKEGDDAICLAELKLGFIAQSCLAQGLSTMLANLFSMRSFIKL

SEQ ID NO: 24426 - protein, 1208 aa, Homo sapiens
MANGGGGGGGSSGGGGGGGGSSLRMSSNIHANHLSLDASSSSSSSSSSSSSSSSSSSSSSVHEPKMDALIIPVTMEVPCDSRGQRMWWAFLASSMVTFFGGLFIILLWRTLKYLWTVCCHCGGKTKEAQKINNGSSQADGTLKPVDEKEEAVAAEVGWMTSVKDWAGVMISAQTLTGRVLVVLVFALSIGALVIYFIDSSNPIESCQNFYKDFTLQIDMAFNVFFLLYFGLRFIAANDKLWFWLEVNSVVDFFTVPPVFVSVYLNRSWLGLRFLRALRLIQFSEILQFLNILKTSNSIKLVNLLSIFISTWLTAAGFIHLVENSGDPWENFQNNQALTYWECVYLLMVTMSTVGYGDVYAKTTLGRLFMVFFILGGLAMFASYVPEIIELIGNRKKYGGSYSAVSGRKHIVVCGHITLESVSNFLKDFLHKDRDDVNVEIVFLHNISPNLELEALFKRHFTQVEFYQGSVLNPHDLARVKIESADACLILANKYCADPDAEDASNIMRVISIKNYHPKIRIITQMLQYHNKAHLLNIPSWNWKEGDDAICLAELKLGFIAQSCLAQGLSTMLANLFSMRSFIKIEEDTWQKYYLEGVSNEMYTEYLSSAFVGLSFPTVCELCFVKLKLLMIAIEYKSANRESRILINPGNHLKIQEGTLGFFIASDAKEVKRAFFYCKACHDDITDPKRIKKCGCKRLIYFEDEQPSTLSPKKKQRNGGMRNSPNTSPKLMRHDPLLIPGNDQIDNMDSNVKKYDSTGMFHWCAPKEIEKVILTRSEAAMTVLSGHVVVCIFGDVSSALIGLRNLVMPLRASNFHYHELKHIVFVGSIEYLKREWETLHNFPKVSILPGTPLSRADLRAVNINLCDMCVILSANQNNIDDTSLQDKECILASLNIKSMQFDDSIGVLQANSQGFTPPGMDRSSPDNSPVHGMLRQPSITTGVNIPIITELAKPGKLPLVSVNQEKNSGTHILMITELVNDTNVQFLDQDDDDDPDTELYLTQPFACGTAFAVSVLDSLMSATYFNDNILTLIRTLVTGGATPELEALIAEENALRGGYSTPQTLANRDRCRVAQLALLDGPFADLGDGGCYGDLFCKALKTYNMLCFGIYRLRDAHLSTPSQCTKRYVITNPPYEFELVPTDLIFCLMQFDHNAGQSRASLSHSSHSSQSSSKKSSSVHSIPSTANRQNRPKSRESRDKQNRKEMVYR

SEQ ID NO: 24427 - protein, 1979 aa, Homo sapiens
MAQALLVPPGPESFRLFTRESLAAIEKRAAEEKAKKPKKEQDNDDENKPKPNSDLEAGKNLPFIYGDIPPEMVSEPLEDLDPYYINKKTFIVMNKGKAIFRFSATSALYILTPLNPVRKIAIKILVHSLFSMLIMCTILTNCVFMTLSNPPDWTKNVEYTFTGIYTFESLIKILARGFCLEDFTFLRDPWNWLDFSVIVMAYVTEFVDLGNVSALRTFRVLRALKTISVIPGLKTIVGALIQSVKKLSDVMILTVFCLSVFALIGLQLFMGNLRNKCLQWPPSDSAFETNTTSYFNGTMDSNGTFVNVTMSTFNWKDYIGDDSHFYVLDGQKDPLLCGNGSDAGQCPEGYICVKAGRNPNYGYTSFDTFSWAFLSLFRLMTQDYWENLYQLTLRAAGKTYMIFFVLVIFLGSFYLVNLILAVVAMAYEEQNQATLEEAEQKEAEFQQMLEQLKKQQEEAQAVAAASAASRDFSGIGGLGELLESSSEASKLSSKSAKEWRNRRKKRRQREHLEGNNKGERDSFPKSESEDSVKRSSFLFSMDGNRLTSDKKFCSPHQSLLSIRGSLFSPRRNSKTSIFSFRGRAKDVGSENDFADDEHSTFEDSESRRDSLFVPHRHGERRNSNVSQASMSSRMVPGLPANGKMHSTVDCNGVVSLGTTTETEVRKRRLSSYQISMEMLEDSSGRQRAVSIASILTNTMEELEESRQKCPPCWYRFANVFLIWDCCDAWLKVKHLVNLIVMDPFVDLAITICIVLNTLFMAMEHYPMTEQFSSVLTVGNLVFTGIFTAEMVLKIIAMDPYYYFQEGWNIFDGIIVSLSLMELGLSNVEGLSVLRSFRLLRVFKLAKSWPTLNMLIKIIGNSVGALGNLTLVLAIIVFIFAVVGMQLFGKSYKECVCKINDDCTLPRWHMNDFFHSFLIVFRVLCGEWIETMWDCMEVAGQTMCLIVFMLVMVIGNLVVLNLFLALLLSSFSSDNLAATDDDNEMNNLQIAVGRMQKGIDYVKNKMRECFQKAFFRKPKVIEIHEGNKIDSCMSNNTGIEISKELNYLRDGNGTTSGVGTGSSVEKYVIDENDYMSFINNPSLTVTVPIAVGESDFENLNTEEFSSESELEESKEKLNATSSSEGSTVDVVLPREGEQAETEPEEDLKPEACFTEGCIKKFPFCQVSTEEGKGKIWWNLRKTCYSIVEHNWFETFIVFMILLSSGALAFEDIYIEQRKTIKTMLEYADKVFTYIFILEMLLKWVAYGFQTYFTNAWCWLDFLIVDVSLVSLVANALGYSELGAIKSLRTLRALRPLRALSRFEGMRVVVNALVGAIPSIMNVLLVCLIFWLIFSIMGVNLFAGKFYHCVNMTTGNMFDISDVNNLSDCQALGKQARWKNVKVNFDNVGAGYLALLQVATFKGWMDIMYAAVDSRDPVYEENLYMYLYFVIFIIFGSFFTLNLFIGVIIDNFNQQKKKFGGQDIFMTEEQKKYYNAMKKLGSKKPQKPIPRPANKFQGMVFDFVTRQVFDISIMILICLNMVTMMVETDDQGKYMTLVLSRINLVFIVLFTGEFVLKLVSLRHYYFTIGWNIFDFVVVILSIVGMFLAEMIEKYFVSPTLFRVIRLARIGRILRLIKGAKGIRTLLFALMMSLPALFNIGLLLFLVMFIYAIFGMSNFAYVKKEAGIDDMFNFETFGNSMICLFQITTSAGWDGLLAPILNSAPPDCDPDTIHPGSSVKGDCGNPSVGIFFFVSYIIISFLVVVNMYIAVILENFSVATEESAEPLSEDDFEMFYEVWEKFDPDATQFIEFSKLSDFAAALDPPLLIAKPNKVQLIAMDLPMVSGDRIHCLDILFAFTKRVLGESGEMDALRIQMEDRFMASNPSKVSYEPITTTLKRKQEEVSAAIIQRNFRCYLLKQRLKNISSNYNKEAIKGRIDLPIKQDMIIDKLNGNSTPEKTDGSSSTTSPPSYDSVTKPDKEKFEKDKPEKESKGKEVRENQK

SEQ ID NO: 24428 - protein, 642 aa, Homo sapiens
MVAEVSPKLAASPMKKPFGFRGKMGKWCCCCFPCCRGSGKNNMGAWRDHDDSAFTEPRYHVRREDLGKLHRAAWWGEVPRADLIVMLRGPGINKRDKKKRTALHLACANGNSEVVSLLLDRQCQLHVFDSKKRTALIKAVQCQEDECALMLLQHGTDPNLPDMYGNTALHYAVYNEDKLMAKTLLLYGADIESKNKGGLTPLLLAVHGQKQRMVKFLIKKKANLNALDRFGRICQLLSDYKENQMPNNSSGNSNPEQDLKLTSEEEPQRLKGSENSQHEKVTQEPDINKDCDREVEEEMQKHGSNNVGLSENLTDGAAAGNGDGGLVPQRKSRKHENQQFPNTEIEEYHRPEKKSNEKNKVKSQIHSVDNLDDITWPSEIASEDYDLLFSNYETFTLLIEQLKMDFNDSASLSKIQDAVISEEHLLELKNSHYEQLTVEVEQMENMVHVLQKULSEAKETQLQLAPQKGECEQERYSSSEEQNDTRKQLSKEQNARILQDEILTTKQKQIEVAEKKMNFEISLSHKEEKELLHENSMMQEEIAMLRIELDTIKHQNQLREKKYLEYIKSVKEKNDNLLKAIQLNEEALTKAVVQYSGQLSILTTENKMLSFELQNVRHNNETLEMEIQSCHFRLATALHDCD

SEQ ID NO: 24429 - protein, 2340 aa, Homo sapiens
MTEGARAADEVRVPLGAPPPGPAALVGASPESPGAPGREAERGSELGVSPSESPAAERGAELGADEEQRVPYPALAATVFFCLGQTTRPRSWCLRLVCNPWFEHVSMLVIMLNCVTLGMFRPCEDVECGSERCNILEMVIKMVALGLFGQKCYLGDTWNRLDFFIVVAGMMEYSLDGHNVSLSAIRTVRVLRPLRAINRVPSMRILVTLLLDTLPMLGNVLLLCFFVFFIFGIVGVQLWAGLLRNRCFLDSAFVRNNNLTFLRPYYQTEEGEENPFICSSRRDNGMQKCSHIPGRRELRMPCTLGWEAYTQPQAEGVGAARNACINWNQYYNVCRSGDSNPHNGAINFDNIGYAWIAIFQVITLEGWVDIMYYVMDAHSFYNFIYFILLIIVGSFFMINLCLVVIATQFSETKQRESQLMREQRARHLSNDSTLASFSEPGSCYEELLKYVGHIFRKVKRRSLRLYARWQSRWRKKVDPSAVQGQGPGHRQRRAGRHTASVHHLVYHHHHHHHHHYHFSHGSPRRPGPEPGACDTRLVRAGAPPSPPSPGRGPPDAESVHSIYHADCHIEGPQERARVAHAAATAAASLRLATGLGTMNYPTILPSGVGSGKGSTSPGPKGKWAGGPPGTGGHGPLSLNSPDPYEKIPHVVGEHGLGQAPGHLSGLSVPCPLPSPPAGTLTCELKSCPYCTRALEDPEGELSGSESGDSDGRGVYEFTQDVRHGDRWDPTRPPRATDTPGPGPGSPQRRAQQRAAPGEPGWMGRLWVTFSGKLRRIVDSKYFSRGIMMAILVNTLSMGVEYHEQPEELTNALEISNIVFTSMFALEMLLKLLACGPLGYIRNPYNIFDGIIVVISVWEIVGQADGGLSVLRTFRLLRVLKLVRFLPALRRQLVVLVKTMDNVATFCTLLMLFIFIFSILGMHLFGCKFSLKTDTGDTVPDRKNFDSLLWAIVTVFQILTQEDWNVVLYNGMASTSSWAALYFVALMTFGNYVLFNLLVAILVEGFQAEGDANRSDTDEDKTSVHFEEDFHKLRELQTTELKMCSLAVTPNGHLEGRGSLSPPLIMCTAATPMPTPKSSPFLDAAPSLPDSRRGSSSSGDPPLGDQKPPASLRSSPCAPWGPSGAWSSRRSSWSSLGRAPSLKRRGQCGERESLLSGEGKGSTDDEAEDGRAAPGPRATPLRRAESLDPRPLRPAALPPTKCRDRDGQVVALPSDFFLRIDSHREDAAELDDDSEDSCCLRLHKVLEPYKPQWCRSREAWALYLFSPQNRFRVSCQKVITHKMFDHVVLVFIFLNCVTIALERPDIDPGSTERVFLSVSNYIFTAIFVAEMMVKVVALGLLSGEHAYLQSSWNLLDGLLVLVSLVDIVVAMASAGGAKILGVLRVLRLLRTLRPLRVISRAPGLKLVVETLISSLRPIGNIVLICCAFFIIFGILGVQLFKGKFYYCEGPDTRNISTKAQCRAAHYRWVRRKYNFDNLGQALMSLFVLSSKDGWVNIMYDGLDAVGVDQQPVQNHNPWMLLYFISFLLIVSFFVLNMFVGVVVENFHKCRQHQEAEEARRREEKRLRRLERRRRSTFPSPEAQRRPYYADYSPTRRSIHSLCTSHYLDLFITFIICVNVITMSMEHYNQPKSLDEALKYCNYVFTIVFVFEAALKLVAFGFRRFFKDRWNQLDLAIVLLSLMGITLEEIEMSAALPINPTIIRIMRVLRIARVLKLLKMATGMRALLDTVVQALPQVGNLGLLFMLLFFIYAALGVELFGRLECSEDNPCEGLSRHATFSNFGMAFLTLFRVSTGDNWNGIMKDTLRECSREDKHCLSYLPALSPVYFVTFVLVAQFVLVNVVVAVLMKHLEESNKEAREDAELDAEIELEMAQGPGSARRVDADRPPLPQESPGARDAPNLVARKVSVSRMLSLPNDSYMFRPVVPASAPHPRPLQEVEMETYGAGTPLGSVASVHSPPAESCASLQIPLAVSSPARSGEPLHALSPRGTARSPSLSRLLCRQEAVHTDSLEGKIDSPRDTLDPAEPGEKTPVRPVTQGGSLQSPPRSPRPASVRTRKHTFGQRCVSSRPAAPGGEEAEASDPADEEVSHITSSACPWQPTAEPHGPEASPVAGGERDLRRLYSVDAQGFLDKPGRADEQWRPSAELGSGEPGEAKAWGPEAEPALGARRKKKMSPPCISVEPPAEDEGSARPSAAEGGSTTLRRRTPSCEATPHRDSLEPTEGSGAGGDPAAKGERWGQASCRAEHLTVPSFAFEPLDLGVPSGDPFLDGSHSVTPESRASSSGAIVPLEPPESEPPMPVGDPPEKRRGLYLTVPQCPLEKPGSPSATPAPGGGADDPV

SEQ ID NO: 24430 - protein, 505 aa, Homo sapiens
LDFLLLQDPASTCVPEPASQHTLRSGPGCLQQPEQQGVRDPGGIWAKLGAAEASAERLQGRRSRGASGSEPQQMGSDVRDLNALLPAVPSLGGGGGCALPVSGAAQWAPVLDFAPPGASAYGSLGGPAPPPAPPPPPPPPPHSFIKQEPSWGGAEPHEEQCLSAFTVHFSGQFTGTAGACRYGPFGPPPPSQASSGQARMFPNAPYLPSCLESQPAIRNQGYSTVTFDGTPSYGHTPSHHAAQFPNHSFKHEDPMGQQGSLGEQQYSVPPPVYGCHTPTDSCTGSQALLLRTPYSSDNLYQMTSQLECMTWNQMNLGATLKGHSTGYESDNHTTPILCGAQYRIHTHGVFRGIQDVRRVPGVAPTLVRSASETSEKRPFMCAYPGCNKRYFKLSHLQMHSRKHTGEKPYQCDFKDCERRFSRSDQLKRHQRRHTGVKPFQCKTCQRKFSRSDHLKTHTRTHTGKTSEKPFSCRWPSCQKKFARSDELVRHHNMHQRNMTKLQLAL

SEQ ID NO: 24431 - protein, 536 aa, Homo sapiens
MLSRLRVVSTTCTLACRHLHIKEKGKPLMLNPRTNKGMAFTLQERQMLGLQGLLPPKIETQDIQALRFHRNLKKMTSPLEKYIYIMGIQERNEKLFYRILQDDIESLMPIVYTPTVGLACSQYGHIFRRPKGLFISISDRGHVRSIVDNWPENHVKAVVVTDGERILGLGDLGVYGMGIPVGKLCLYTACAGIRPDRCLPVCIDVGTDNIALLKDPFYMGLYQKRDRTQQYDDLIDEFMKAITDRYGRNTLIQFEDFGNHNAFRFLRKYREKYCTFNDDIQGTAAVALAGLLAAQKVISKPISEHKILFLGAGEAALGIANLIVMSMVENGLSEQEAQKKIWMFDKYGLLVKGRKAKIDSYQEPFTHSAPESIPDTFEDAVNILKPSTIIGVAGAGRLFTPDVIRAMASINERPVIFALSNPTAQAECTAEEAYTLTEGRCLFASGSPFGPVKLTDGRVFTPGQGNNVYIFPGVALAVILCNTRHISDSVFLEAAKALTSQLTDEELAQGRLYPPLANIQEVSINIAIKYLLIDHF

SEQ ID NO: 24432 - protein, 446 aa, Homo sapiens
MDPGENAFTSQKSDDDYEDYASNKTWVLTPKVPEGDVTVILNNLLEGYDNKLRPDIGVKPTLIHTDMYVNSIGPVNAINMEYTIDIFFAQTWYDRRLKFNSTIKVLRLNSNMVGKIWIPDTFFRNSKKADAHWITTPNRMLRIWNDGRVLYTLRLTIDAECQLQLHNFPMDEHSCPLEFSSYGYPREEIVYQWKRSSVEVGDTRSWRLYQFSFVGLRNTTEVVKTTSGDYVVMSVYFDLSRRMGYFTIQTYIPCTLIVVLSWVSFWINKDAVPARTSLGITTVLTMTTLSTIARKSLPKVSYVTAMDLFVSVCFIFVFSALVEYGTLHYFVSNRKPSKDKDKKKKNPLLRMFSFKAPTIDIRPRSATIQMNNATHLQERDEEYGYECLDGKDCASFFCCFEDCRTGAWRHGRIHIRIAKMDSYARIFFPTAFCLFNLVYWVSYLYL

SEQ ID NO: 24433 - protein, 482 aa, Homo sapiens
MTMAGGRRGLVAPQNTFLENIVRRSNDTNFVLGNAQIVDWPIVYSNDGFCKLSGYHRAEVMQKSSTCSFMYGELTDKDTIEKVRQTFENYEMNSFEILMYKKNSWGKFARLTRALTSSRGVLQQLAPSVQKGENVHKHSRLAEVLQLGSDILPQYKQEAPKTPPHIILHYCVFKTTWDWIILILTFYTAILVPYNVSFKTRQNNVAWLVVDSIVDVIFLVDIVLNFHTTFVGPAGEVISDPKLIRMNYLKTWFVIDLLSCLPYDVINAFENVDEGISSLFSSLKVVRLLRLGRVARKLDHYIEYGAAVLVLLVCVFGLAAHWMACIWYSIGDYEIFDEDTKTIRNNSWLYQLAMDIGTPYQFNGSGSGKWEGGPSKNSVYISSLYFTMTSLTSVGFGNIAPSTDIEKIFAVAIMMIGYADEELWEEDPYEYIRMKFDVSEDFISFATAAQKLLFTAHSKRKEVLQKTMGFCYQILTEPNADL

SEQ ID NO: 24434 - protein, 441 aa, Homo sapiens
MSGEKEEASLRMFGAYGEPEERRDVLESSGVSSQPEPQVQQQLGSLLGVPWQPPGPPIQHSPADQETSTVTQQQWHLQGLGRSELQAAGLPDAQPGEAAESSPSFLLGSEVGQPYSSSSPSEEVLSLLRAIPPIPDEVVVRQKRAPQGSWKVGTLFHGKRVYAVAISGSTHHVYTCGSGYIRVWDESALHAGEKAPRAQLDLQHPQDRVVTCKLFPDERSLITGGASQAVTLWDLAPTPQVRAQLTSTGPTCYSLAVSSDAHICLACFHGFVEIWDLQNQILIRKHEVPVYGSRCVDITGNIFWTGGEDTILYSWDLRSYQRLHQHNLQNEILSITHDPGEEWVLAGLRTSDIVFLHTRRNEQFKALMKKYTRHHSLKFASCGSYFVTAIDTRLSGLEAPSLQKLFQIEESSGILCCDVSSDNQYLVMGSSSSATIYQLLY

SEQ ID NO: 24435 - protein, 1476 aa, Homo sapiens
ELFGNSSQVGINLPTGECSIFGYFVDIEQCEFIPWSDLVPNDQTLIQRGTSLLTNLQRSGGNFLKITECGECINYTATRDTTCLSFLMSLLLKNSCPVLLTGESGVGKTAAINQMLEKLEGPGAFDIKHGSILGDTLLYSEIKKSSSLKQNITILIPETHKTATGSSDNPTKKPEVRTNKKLLKNNDHKGVVVSTINFSTNVTAAKTKEMILKKLIRRTKDTLGAPKNNRILIFIDDMNMPVSDMYGAQPPLELIRQLLDLGGVYDTEKNTWKNIQDLSIVAACVPVVNDISPRLLKHFSMLVLPHPSQDILCTIFQLLLGLLQADRTVVNSKEMAALLFVHEATRVFHDRLIDFTDKSLFYRLLSRELENCFQIQWTQENLMNHSTVFLDFLDINKTHRKKIYQNTSDYNKLASVLDEFQMKLGSISLELSHSMVFFKEAIEHIIRATRVLRQPGSHMLLIGIDGCGKKTCATLACYLTDNKLYRVPISHKCAYIEFKEVFKKVFIHAGLKGKPTVLMVPNLNIEQDSFLEDLNYIISSGRIPDLFENVELDSIAMKIRYLTEQSGHMDNRQSLLSFFQKRIYKNLHIFVIMSPEGPSFRQNCRVYPSMISSCTIDWYERWPEEALLIVANSFLKEKVNFENRENLKEKLAPTCVQIHKSMKDLNRKYFEETGRFYYTTPNSYLQFMETFAHILRAREEEMQTKRDRFHMGLSTILEATTLVTEMQEELLILGPQVEQKTKETETLMEKLRKDSQVVEKVQMLVKQDEEIVAEEVRIVEDYAQKTANELKSVLPAFDKAIVALNALDKADVAELRVYTRPPFLVLTVMNAVCILLQKKPNWATAKLLLSETGFLKKLINLDKDSIPDKVFVKLKKIVTLPDFNPHKISLVSVACCSLCQWVIALNNYHEVQKVVGPKQIQVAEAQNVLKIARQRLAEKQRGLQLVEEHLLFLQAAYKDTVAEKQLLANRKTMASRRFQCASVLLTVLEDEKISRWHNQGLPHGQYSVENAILIKNGQQWPLLIDPHRQAHKWIRQMEGSRLQKLSIEDSNYTKKIENAMKTGGSVLLQNLLETLAPGLKAILKKDIYQKKGHYFIRVGDAEFEYNSNFRLYLSTEIDNPHFLPSVYNFVTMINFTVTFQGLQDQLLSTVVTHEVPHLEDQRSKLLESISLDAITLEELEEKTLNLLQKALGSILDDDKIVDTLRKSKMTSNEISKRIEATKKAESEIQAIRKNYLPIATRGALLYFLVADLTQINYMYQFSLDWFHQVFVSSVVSKSKEQEHSFKREKVSPKEVHEFISISKEPNLENEKNLLDKHIKSAIDMLTKSIFKVVSSALFNEDKLCFSFRLCTVIMQNNANGNLIQDDIGFLPEEEWNIFLYSGILINIKSALSQSRLTSTFEIGESQHLQWLSDSRWRQCQYVSTHLEPFSLLCKSLLSNVSQWDTFKNSKAVYSLISTPFSSENASLEENTKPPEE

SEQ ID NO: 24436 - protein, 636 aa, Homo sapiens
MEPSTCRTMESEEDYVEEKESEKCVKEGVTNPSNSSQQALLKADYKALKNGVPSPIMATKIPKKVIAPVDTGDLEAGRRKRRRKRRSLAINLTNCKYESVRRAAQMCGLKEVGEDEEWTLYWTDCAVSLERVMDMKRFQKINHFPGMTEICRKDLLARNLNRMYKLYPSEYNIFPRTWCLPADYGDFQSYGRQRKARTYICKPDSGCQGRGIFITRNPREIKPGEHMICQQYISKPLLIDGFKFDMRVYVLITSCDPLRIFTYEEGLARFATTPYMEPSHNNLDNVCMHLTNYAINKHNENFVRDGAVGSKRKLSTLNIWLQEHSYNPGELWGDIEDIIIKTIISAHSVLRHNYRTCFPQYLNGGTCACFEILGFDILLDHKLKPWLLEVNHSPSFTTDSCLDQEVKDALLCDAMTLVNLRGCDKRKVMEEDKRRVKERLFQCYRQPRESRKEKTESSHVAMLDQERYEDSHLGKYRRIYPGPDTEKYARFFKHNGSLFQETAASKAREECARQQLEEIRLKQEQQETSGTKRQKARDQNQGESAGEKSRPRAGLQSLSTHLAYRNRNWEKELLPGQLDTMRPQEIVEEEELERMKALLQRETLIRSLGIVEQLTRLQHPGPQGQKKLHESRPRFC

SEQ ID NO: 24437 - protein, 417 aa, Homo sapiens; identical to SEQ ID NO: 556

SEQ ID NO: 24438 - protein, 2077 aa, Homo sapiens
MPTLVVGTPPTCLGDTPQPCHKNSQRQGPFSHGAPGRAADWKAVAKPRLCAPAAEDDVAALRWPGPSQQPDPPWAAPHVVGSDDLKEPGPWGKACSLPMWSTGPEARDGDSSVSSGRLSCSSGGHDVCVSWKERPPQVLGPQQRPRKSDARLEQLRDKIRAQAWQQGSCASLGTSAPSSASRLHKASTLMLRRKGQEAKNPPPAPECSGFSILSAAERRVEAKASHGQGRELSRVSQHQVPVLREKPKRVKSSSCKREKTPKLPSPRRAAKDKHKDEDSELVGVYAWRKGQALVRSLLGPPPVLRRHHSKDPSRDPALTVDLGDSEKVIAAKCSPVCAQLPDATSAYSDQQVSGNTPSLASFDQPATIQTAMAILQDLRQQIQAGLELAQARKGGQELGPSKRRLQDVAGRGCCRDPNAQSSFSKSPWAMTERKHSSLERARSVHTWEPWSSSTARESCPQRAWGAQGQDRSFQRPESPHERLGHFSQRPWSALAGQACSPQRAWGAQRQGPSSQRPGSPPEKRSPFPQQPWSAVATQPCPRRAWTACETWEDPGPRLRNPLERPSPPAQRPWSSSGVQRAGPQGKGRGIGSPVSAAKHALPRPTGSFPQNPLGKEKDTLRPCPRSRGLLGPSHSSESLREFMRQKAQARRRQALEEKASALRTRELRSRRLQEVYRQQREAVLGRAVPVVSRTTPGIVTFVPSSAQSGGLEASGSLESPVLEWSKVTSGMVLGGQEAPGSFCLCLNRAWNHAETLDPPGMGGPQDGRDAPVLLSASPSLGSLELQDLTTRYLPRGMCIYLDPKEAEHLGTSSSLHLRHKQAQLQALETTAKVLKQRVDSLTAKLQGAEALDTVRDPAVGLLRSCPHSLPAAPTLATPTLATPACPGALGPNWGRGAPGEWVSMQPQPLLPPTYFLDGETLSWGPSWEQQQSVSPRAHCESKPRGFPEEGHVDVKPDKRLQRGVAPFQALSPSAGSSYAGPATLHPIWGSLGLEETPSVGGADSVAPCTPRSCGQQEDPCVRCLPNTQQKTSSFLDSLKLDQQKQALALLRQRAELEARETQQTLDGLLFRRRLEQLMERHSTQARPEEALKLEQPPMCKDREPTTASQSTGMATPRSHPPLDTDAATSSQGPEDRPENVVAKPASAEVEGPDGALSQLPLAKFFPPDNPTHQMLERSLREEELRAQHQAALLRLREMALQEKTLAELAWLEHRRGCLDSKRDRAVLAALVEKQQQALSRLEKEQREIQYLRHTQLFRHRDRKLLLQHQRDVVSMPGPVDILPIPGPTDVVPAHELQAQAKLQQGSSPKVKAAWEGGSETSQQPEASLCPLTPCRPSSSTSHRPQSSPASSKATRPPTEQQDVTPPQTTSDADGHQQPPRPAWGEDTHDPQGPLVESGSHVSQEPGEQPRAPLLGLQHVSPPDGQRLGPAFPAEEAEGRLPTAQCRSREVKEPPPGDPQTKPGPSLAGKPRAPTDSHVGSFRERSRRSCGREGPCGPQEASQVAEDSMSEEGLESGLDFAESPVEESQETESWRSGEQRTEACQQEVPGISSTWLEAAQAAASPAAPVVPEEAAPPILHQGSPLLPTTSSCGPGSESASGTCWGPSEEATVSSHTSPAGSVSSLSCPSLWEFQKAAATLIQLSGSSSSLPSLEAEDSPDEGFSWPGELSARHSSGEAGLPLSWRSNQGEPRPGSAPGGGGWVTWQRPQGRRAGPLRGSSLDTAMAEVSAPEQSPKAGWLLPFPDIPSPRSGSELSEASSKVWEEDCEEDLPEPCTGAKPASGSSLPAGGSLGLGSGVEPQVAPPSPRSGEGREASGTSESLKGGVRSGMEPQVALPSPWPGEGLEASGTSESLMGVSDTGEALQAPPEAAGVVFPLQISSAGDSDSLLVFPSWTSLSEGADFGKGGETSGYQEGTRDADPSPSTKSKLPYLMPEPETPVTLQAPPGDPGRLAPPVAESRAPGPGGNGAPTVLEEACPLLAGDVLTEILSPVDELLSYGSADLPSSIHREAPLPPPPPTPQAQSDGEDTNPCSDAFPSPPSGPLEEDTAITTQDLSSLSEESLPEGLFPGPQGSAGTQ

SEQ ID NO: 24439 - protein, 847 aa, Homo sapiens
ENEEVAPPATFSRAHETKEPWPTDSQLLAGKVRATGRTARGKEENQVWLGNALLLQGGSLEDKGLEEEDEMPHQEASGLGCRGAPEEPDSQEHESKEMLFFAGETGLPLFPRFALSVEGAEPTDHGHPQAVSKGHNRCALTIDELAQDVEACFQQLSTLQPGSRGWQCSASACRGENWSFAQKWHSGWERAHSQQVWGNWGICSNEEAKSKESGEGDKPGKTTALGTSEVPGNPGTLPHWDEASPNPPQGPAEPWGALERVRSRFHQLISGLKKQRSQILHDNTKLHGDQERFHERVCALEREREREVTKISRLERDNHRLVGDISQLKKELDQYLQAISDLEDCNGKSYCKILELEEENETLKGNLGQLQKATSESVRKSKDTMEQVTLENWKLQTLISELGVSYKELIKDIVLGIEDMIRALSGENEHLLRRVHVLEREVTLQRSTDQGRLVRGREHLQGKAKMHALDKEVQVTPLTGQLLSRACGPPLEEEMSLAAGQTGPSTGTGNSRRGADSPPPSLVWRNTGVANALQGNVSGAEVKEAHLEKEEKRPRCSVAQGQALSSLSNGPMLRDSEAEVTEEDPRLRAQQLHHRVLTLQCQLRDQGAAHQASLDEATRLQEELQAKLEELQKKQHEAKLAVTPLKAKIASLVRKCRERNRLITHLLQELHRHGLGNLLLSELAQNMLNDVALAEYTATFLAPGVPETSHHLDVKSEMTAALRAQTYLLNPEMDSVLQSSLSSESWPIPEPEWPAQTAQLDSLKLPLSLVSTLDPGTCLAAVTVEPGLPAQRLQEKGGMPCPALQVDNVPAPSELLSPARILAFHQELRQSICSNSQVHKSPLELEM

SEQ ID NO: 24440 - protein, 1340 aa, Homo sapiens
MEEDLEGENWQTFSIPWCFSRAAEDEGEHICHHRTKSSGWPPPSGTWGLSQVPPYGWEMTANRDGRDYFINHMTQAIPFDDPRLESCQIIPPAPRKVEMRRDPVLGFGFVAGSEKPVVVRSVTPGGPSEGKLIPGDQIVMINDEPVSAAPRERVIDLVRSCKESILLTVIQPYPSPKSAFISAAKKARLKSNPVKVRFSEEVIINGQVSETVKDNSLLFMPNVLKVYLENGQTKSFRFDCSTSIKDVILTLQEKLSIKGIEHFSLMLEQRTEGAGTKLLLLHEQETLTQVTQRPSSHKMRCLFRISFVPKDPIDLLRRDPVAFEYLYVQSCNDVVQERFGPELKYDIALRLAALQMYIATVTTKQTQKISLKYIEKEWGLETFLPSAVLQSMKEKNIKKALSHLVKANQNLVPPGKKLSALQAKVHYLKFLSDLRLYGGRVFKATLVQAEKRSEVTLLVGPRYGISHVINTKTNLVALLADFSHVNRIEMFSEEESLVRVELHVLDVKPITLLMESSDAMNLACLTAGYYRLLVDSRRSIFNMANKKNTATQETGPENKGKHNLLGPDWNCIPQMTTFIGEGEQEAQITYIDSKQKTVEITDSTMCPKEHRHLYIDNAYSSDGLNQQLSQPGEAPCEADYRSLAQRSLLTLSGPETLKKAQESPRGAKVSFIFGDFALDDGISPPTLGYETLLDEGPEMLEKQRNLYIGSANDMKGLDLTPEAEGIQFVENSVYANIGDVKSFQAAEGIEEPLLHDICYAENTDDAEDEDEVSCEEDLVVGEMNQPAILNLSGSSDDIIDLTSLPPPEGDDNEDDFLLRSLNMAIAAPPPGFRDSSDEEDSQSQAASFPEDKEKGSSLQNDEIPVSLIDAVPTSAEGKCEKGLDNAVVSTLGALEALSVSEEQQTSDNSGVAILRAYSPESSSDSGNETNSSEMTESSELATAQKQSENLSRMFLATHEGYHPLAEEQTEFPASKTPAGGLPPKSSHALAARPATDLPPKVVPSKQLLHSDHMEMEPETMETKSVTDYFSKLHMGSVAYSCTSKRKSKLADGEGKAPPNGNTTGKKQQGTKTAEMEEEASGKFGTVSSRDSQHLSTFNLERTAFRKDSQRWYVATEGGMAEKSGLEAATGKTFPRASGLGAREAEGKEEGAPDGETSDGSGLGQGDRFLTDVTCASSAKDLDNPEDADSSTCDHPSKLPEADESVARLCDYHLAKRMSSLQSEGHFSLQSSQGSSVDAGCGTGSSGSACATPVESPLCPSLGKHLIPDASGKGVNYIPSEERAPGLPNHGATFKELHPQTEGMCPRMTVPALHTAINTEPLFGTLRDGCHRLPKIKETTV

SEQ ID NO: 24441 - protein, 711 aa, Homo sapiens
MAMQEKYPTEGISHVTSPNFCSSSGSPPFQPIKSHVTIPTAHVMPSTLGTSPAKPNSTPVGPSSSKLPLSGLAESVGMTRNGDLGAMKHSPGLSRDLMYFSGATGENGIEQSWFPAVGHERQEEARKFDIPSMESTLNQSAMMETLYSDPHHRVRFHNPRTSTSKELYRVLPEAKKAPGSGAVFERNGPHSNSSGVLPLGLQPAPGLSKPLPSQVWQPSPDTWHPREQSCELSTCRQQLELIRLQMEQMQLQNGAICHHPAAFGPSLPILEPAQWISILNSNEHLLKEKELLIDKQRKHISQLEQKVRESELQVHSALLGRPAPFGDVCLLRLQELQRENTFLRAQFAQKTEALSREKIDLEKKLSASEVEVQLIRESLKVALQKHSEEVKKQEERVKGRDKHINNLKKKCQKESEQNREKQQRIETLERYLADLPTLEDHQKQSQQLKDSELKSTELQEKVTELESLLEETQAICREKEIQLESLRQREAEFSSAGHSLQDKQSVEETSGEGPEVEMESWQKRYDSLQKIVEKQQQKMDQLRSQVQSLEQEVAQEEGTSQALREEAQRRDSALQQLRTAVKELSVQNQDLIEKNLTLQEHLRQAQPGSPPSPDTAQLALELHQELASCLQDLQAVCSIVTQRAQGHDPNLSLLLGIHSAQHPETQLDLQKPDVIKRKLEEVQQLRRDIEDLRTTMSDRYAQDMGENCVTQ

SEQ ID NO: 24442 - protein, 1259 aa, Homo sapiens
MIYMDDGVSSFVQIRGSVPLFWEQPGLQVGSHHLRLHRGLEANAPAFDRHMVLLKEQYGQQVVVNLLGSRGGEEVLNRAFKKLLWASCHAGDTPMINFDFHQFAKGGKLEKLETLLRPQLKLHWEDFDVFTKGENVSPRFQKGTLRMNCLDCLDRTNTVQSFIALEVLHLQLKTLGLSSKPIVDRFVESFKAMWSLNGHSLSKVFTGSRALEGKAKVGKLKDGARSMSRTIQSNFFDGVKQEAIKLLLVGDVYGEEVADKGGMLLDSTALLVTPRILKAMTERQSEFTNFKRIRIAMGTWNVNGGKQFRSNVLRTAELTDWLLDSPQLSGATDSQDDSSPADIFAVGFEEMVELSAGNIVNASTTNKKMWGEQLQKAISRSHRYILLTSAQLVGVCLYIFVRPYHVPFIRDVAIDTVKTGMGGKAGNKGAVGIRFQFHSTSFCFICSHLTAGQSQVKERNEDYKEITQKLCFPMGRNVFSHDYVFWCGDFNYRIDLTYEEVFYFVKRQDWKKLLEFDQLQLQKSSGKIFKDFHEGAINFGPTYKYDVGSAAYDTSDKCRTPAWTDRVLWWRKKHPFDKTAGELNLLDSDLDVDTKVRHTWSPGALQYYGRAELQASDHRPVLAIVEVEVQEVDVGARERVFQEVSSFQGPLDATVVVNLQSPTLEEKNEFPEDLRTELMQTLGSYGTIVLVRINQGQMLVTFADSHSALSVLDVDGMKVKGRAVKIRPKTKDWLKGLREEIIRKRDSMAPVSPTANSCLLEENFDFTSLDYESEGDILEDDEDYLVDEFNQPGVSDSELGGDDLSDVPGPTALAPPSKSPALTKKKQHPTYKDDADLVELKRELEAVGEFRHRSPSRSLSVPNRPRPPQPPQRPPPPTGLMVKKSASDASISSGTHGQYSILQTARLLPGAPQQPPKARTGISKPYNVKQIKTTNAQEAEAAIRCLLEARGGASEEALSAVAPRDLEASSEPEPTPGAAKPETPQAPPLLPRRPPPRVPAIKKPTLRRTGKPLSPEEQFEQQTVHFTIGPPETSVEAPPVVTAPRVPPVPKPRTFQPGKAAERPSHRKPASDEAPPGAGASVPPPLEAPPLVPKVPPRRKKSAPAAFHLQVLQSNSQLLQGLTYNSSDSPSGHPPAAGTVFPQGDFLSTSSATSPDSDGTKAMKPEAAPLLGDYQDPFWNLLHHPKLLNNTWLSKSSDPLDSGTRSPKRDPIDPVSAGASAAKAELPPDHEHKTLGHWVTISDQEKRTALQVFDPLAKT

SEQ ID NO: 24443 - protein, 450 aa, Homo sapiens
MAAVATCGSVAASTGSAVATASKSNVTSFQRRGPRASVTNDSGPRLVSIAGTRPSVRNGQLLVSTGLPALDQLLGGGLAVGTVLLIEEDKYNIYSPLLFKYFLAEGIVNGHTLLVASAKEDPANILQELPAPLLDDKCKKEFDEDVYNHKTPESNIKMKIAWRYQLLPKMEIGPVSSSRFGHYYDASKRMPQELIEASNWHGFFLPEKISSTLKVEPCSLTPGYTKLLQFIQNIIYEEGFDGSNPQKKQRNILRIGIQNLGSPLWGDDICCAENGGNSHSLTKFLYVLRGLLRTSLSACIITMPTHLIQNKAIIARVTTLSDVVVGLESFIGSERETNPLYKDYHGLIHIRQIPRLNNLICDESDVKDLAFKLKRKLFTIEAEVQKGVSTATFLLDGPRKKLFPCLFQLLEVACIPWLMASSSVFKASNIGFESLCYQLSGFFSASLLHF

SEQ ID NO: 24444 - protein, 340 aa, Homo sapiens
MAAAEDEFLPPPRLPELFDSSKQLLDEVEGATEPTGSRIVQEKVFKGLDLLDKVAKMLSQLDLFSRNEDLEEITSTDLKYLMVPAFQGALTMKQVNPRKRLDHLQQAREHFIKYLTQCHYYRVAEFELPQTKTNSAENHGAITSTAYPSLVAMASQRQAKIERYKQKKVLEHKLSTMKSAVESGQADNERVREYYLLHLQRWIDISLEEIESIDQEIKILGEKDSSREASTSNSCHQKRPPMKPFILTRNMAQAKVFGAGYPSLASMTVSDWYDQHQKHGVLPDQGIAKATPEEFRKATQQQEDQEKEEEDDEQTLQRAREWDDWKDTHPRGYGNRQNMG

SEQ ID NO: 24445 - protein, 565 aa, Homo sapiens
MLSRLRVVSTTCTLACRHLHIKEKGKPLMLNPRTNKGMAFTLQERQMLGLQGLLPPKIETQDIQALRFHRNLKKMTSPLEKYIYIMGIQERNEKLFYRILQDDIESLMPIVYTPTVGLACSQYGHIFRRPKGLFISISDRGHVRSIVDNWPENHVKAVVVTDGERILGLGDLGVYGMGIPVGKLCLYTACAGIRPDRCLPVCIDVGTDNIALLKDPFYMGLYQKRDRTQQYDDLIDEFMKAITDRYGRNTLIQFEDFGNHNAFRFLRKYREKYCTFNDDIQGTAAVALAGLLAAQKVISKPISEHKILFLGAGEAALGIANLIVMSMVENGLSEQEAQKKIWMFDKYGLLVKGRKAKIDSYQEPFTHSAPESIPDTFEDAVNILKPSTIIGVAGAGRLFTPDVIRAMASINERPVIFALSNPTAQAECTAEEAYTLTEGRCLFASGSPFGPVKLTDGRVFTPGQGNNVYIFPGVALAVILCNTRHISDSVFLEAAKALTSQLTDEELAQGRLYPPLANIQEVSINIAIKMESQLCRPGWSEVVQSQFNTTSASQVQVILLPQPPE

SEQ ID NO: 24446 - protein, 50 aa, Homo sapiens
QRQHRASRENVGHWAISREGQNVRPSLAPPMVQVRNPLRAGSQGHRLGQL

SEQ ID NO: 24447 - protein, 1154 aa, Homo sapiens
MEAGSGPPGGPGSESPNRAVEYLLELNNIIESQQQLLETQRRRIEELEGQLDQLTQENRDLREESQLHRGELHRDPHGARDSPGRESQYQNLRETQFHHRELRESQFHQAARDVGYPNREGAYQNREAVYRDKERDASYPLQDTTGYTARERDVAQCHLHHENPALGRERGGREAGPAHPGREKEAGYSAAVGVGPRPPRERGQLSRGASRSSSPGAGGGHSTSTSTSPATTLQRKSDGENSRTVSVEGDAPGSDLSTAVDSPGSQPPYRLSQLPPSSSHMGGPPAGVGLPWAQRARLQPASVALRKQEEEEIKRSKALSDSYELSTDLQDKKVEMLERKYGGSFLSRRAARTIQTAFRQYRMNKNFERLRSSASESRMSRRIILSNMRMQFSFEEYEKAQNPAYFEGKPASLDEGAMAGARSHRLERGLPYGGSCGGGIDGGGSSVTTSGEFSNDITELEDSFSKQVKSLAESIDEALNCHPSGPMSEEPGSAQLEKRESKEQQEDSSATSFSDLPLYLDDTVPQQSPERLPSTEPPPQGRPEFWAPAPLPPVPPPVPSGTREDGSREEGTRRGPGCLECRDFRLRAAHLPLLTIEPPSDSSVDLSDRSDRGSVHRQLVYEADGCSPHGTLKHKGPPGRAPIPHRHYPAPEGPAPAPPGPLPPAPNSGTGPSGVAGGRRLGKCEAAGENSDGGDNESLESSSNSNETINCSSGSSSRDSLREPPATGLCKQTYQRETRHSWDSPAFNNDVVQRRHYRIGLNLFNKKPEKGIQYLIERGFLSDTPVGVAHFILERKGLSRQMIGEFLGNRQKQFNRDVLDCVVDEMDFSSMDLDDALRKFQSHIRVQGEAQKVERLIEAFSQRYCVCNPALVRQFRNPDTIFILAFAIILLNTDMYSPSVKAERKMKLDDFIKNLRGVDNGEDIPRDLLVGIYQRIQGRELRTNDDHVSQVQAVERMIVGKKPVLSLPHRRLVCCCQLYEVPDPNRPQRLGLHQREVFLFNDLLVVTKIFQKKKILVTYSFRQSFPLVEMHMQLFQNSYYQFGIKLLSAVPGGERKVLIIFNAPSLQDRLRFTSDLRESIAEVQEMEKYRVESELEKQKGMMRPNASQPGGAKDSVNGTMARSSLEDTYGAGDGLKRGALSSSLRDLSDAGVCY

SEQ ID NO: 24448 - protein, 201 aa, Homo sapiens
STIRPGCDVNPSCALCGSGSINTMPPEIHYEAPLLERLSQLDSCVHPVLAFPDDVPTSLHFQSMLKSQWQNKPFDKIKPPKKLSLKHRAPMPGSLPDSARKDRHKLVSSFLTTAMLKHHTDMSSSSYLAATHHPPHSPLVRQLSTSSDSPAPASSSSQVTASTSPVRRRRGESSFDINNIVIPMSVAATTRVEKLQYKEIL

SEQ ID NO: 24449 - protein, 1239 aa, Homo sapiens
MANGGGGGGGSSGGGGGGGGSSLRMSSNIHANHLSLDASSSSSSSSSSSSSSSSSSSSSSVHEPKMDALIIPVTMEVPCDSRGQRMWWAFLASSMVTFFGGLFIILLWRTLKYLWTVCCHCGGKTKEAQKINNGSSQADGTLKPVDEKEEAVAAEVGWMTSVKDWAGVMISAQTLTGRVLVVLVFALSIGALVIYFIDSSNPIESCQNFYKDFTLQIDMAFNVFFLLYFGLRFIAANDKLWFWLEVNSVVDFFTVPPVFVSVYLNRSWLGLRFLRALRLIQFSEILQFLNILKTSNSIKLVNLLSIFISTWLTAAGFIHLVENSGDPWENFQNNQALTYWECVYLLMVTMSTVGYGDVYAKTTLGRLFMVFFILGGLAMFASYVPEIIELIGNRKKYGGSYSAVSGRKHIVVCGHITLESVSNFLKDFLHKDRDDVNVEIVFLHNISPNLELEALFKRHFTQVEFYQGSVLNPHDLARVKIESADACLILANKYCADPDAEDASNIMRVISIKNYHPKIRIITQMLQYHNKAHLLNIPSWNWKEGDDAICLAELKLGFIAQSCLAQGLSTMLANLFSMRSFIKIEEDTWQKYYLEGVSNEMYTEYLSSAFVGLSFPTVCELCFVKLKLLMIAIEYKSANRESRSRKRILINPGNHLKIQEGTLGFFIASDAKEVKRAFFYCKACHDDITDPKRIKKCGCKRPKMSIYKRMRRACCFDCGRSERDCSCMSGRVRGNVDTLERAFPLSSVSVNDCSTSFRAFEDEQPSTLSPKKKQRNGGMRNSPNTSPKLMRHDPLLIPGNDQIDNMDSNVKKYDSTGMFHWCAPKEIEKVILTRSEAAMTVLSGHVVVCIFGDVSSALIGLRNLVMPLRASNFHYHELKHIVFVGSIEYLKREWETLHNFPKVSILPGTPLSRADLRAVNINLCDMCVILSANQNNIDDTSLQDKECILASLNIKSMQFDDSIGVLQANSQGFTPPGMDRSSPDNSPVHGMLRQPSITTGVNIPIITELVNDTNVQFLDQDDDDDPDTELYLTQPFACGTAFAVSVLDSLMSATYFNDNILTLIRTLVTGGATPELEALIAEENALRGGYSTPQTLANRDRCRVAQLALLDGPFADLGDGGCYGDLFCKALKTYNMLCFGIYRLRDAHLSTPSQCTKRYVITNPPYEFELVPTDLIFCLMQFDHNAGQSRASLSHSSHSSQSSSKKSSSVHSIPSTANRQNRPKSRESRDKQKKEMVYR

SEQ ID NO: 24450 - protein, 505 aa, Homo sapiens
MERRRITSAARRSYVSSGEMMVGGLAPGRRLGPGTRLSLARMPPPLPTRVDFSLAGALNAGFKETRASERAEMMELNDRFASYIEKVRFLEQQNKALAAELNQLRAKEPTKLADVYQAELRELRLRLDQLTANSARLEVERDNLAQDLATVRQKLQDETNLRLEAENNLAAYRQEADEATLARLDLERKIESLEEEIRFLRKIHEEEVRELQEQLARQQVHVELDVAKPDLTAALKEIRTQYEAMASSNMHEAEEWYRSKFADLTDAAARNAELLRQAKHEANDYRRQLQSLTCDLESLRGTNESLERQMREQEERHVREAASYQEALARLEEEGQSLKDEMARHLQEYQDLLNVKLALDIEIATYRKLLEGEENRITIPVQTFSNLQIRETSLDTKSVSEGHLKRNIVVKTVEMRDGEGTKQLRTSTSGVWSLALVRSFLGTALEPQDTTSGTALRTLALTQEWVKGNRNEKGGPRCSGREISASVLQALPCQPGGKVFHQPGG

SEQ ID NO: 24451 - protein, 500 aa, Homo sapiens
MDAPARLLAPLLLLCAQQLRGTRAMNDIGDYVGSNLEISWLPNLDGLIAGYARNFRPGIGGPPVNVALALEVASIDHISEANMEYTMTVFLHQSWRDSRLSYNHTNETLGLDSRFVDKLWLPDTFIVNAKSAWFHDVTVENKLIRLQPDGVILYSIRITSTVACDMDLAKYPMDEQECMLDLESYGYSSEDIVYYWSESQEHIHGLDKLQLAQFTITSYRFTTELMNFKSAGQFPRLSLHFHLRRNRGVYIIQSYMPSVLLVAMSWVSFWISQAAVPARVSLGITTVLTMTTLMVSARSSLPRASAIKALDVYFWICYVFVFAALVEYAFAHFNADYRKKQKAKVKVSRPRAEVRAWGRARDSTAGGPNQDPSAAPAHCGSQLCSLSVGGWSCWSRRGPRMGTPVVQGPGSCTPVLSPVSPTGLRADGREERHCPLLPLCCRRHAGAGHLPPAAPRPGEPDGLLQVGGGGDRGDEEGGGSPLRRPGGHPCPAQAHRRRHH

SEQ ID NO: 24452 - protein, 666 aa, Homo sapiens
FRVSLIFHEDCSVVTEVGALFCLLLFDEVSRMDMWSVNPSNKPSLPSVFSLPVSVFRRYHLPVHVIGHHAVSPYSIVLPLSADCLALKPVSDMLRIAWNLSWYHGSDNLLKQMNSETKTQEILDALKLSTEDILTLKITHMASGLQDCLHSIVQAATHREVRAAVTRMSFYLLNDRLSLKGCPGPCGVTLKSLAWHTALNRFLQVLPACTEDEKLLIDIIHFLNKLIKEQRKNSSLELLNWILELLLRHSANPLLDLLVLTESQAREETDDIRTAVRQQLQKELIALFDTLLLNFMEVTDRKCSELLYVFQTQLALKLLQCLKVTDAPHFYGLPSLERTLRGMANLTAFPGWSSHSPLTKPLDICVKYLSGLLEVITSFYVERGGNAMSFMGKGVTKSTILCLLHLSHEMMAQAGSLEWMSLWFLPLGSHSEEHIPTQQGLAWLIPLWVDRDPEVRFTSLGLGSALTTLETGCVALANSCQNISGGLWGTVVNILLDQSECSMVRREAAFILQNLLVIPMPTEIIKDYTWQGPCVHDEDSGLSLIGKPALQALLYHCHFYEHLNQMVKHCYLGRCMFDLNFSAFDRNSESNDLNGLDDSFKFWRAPSRTSQDRDPSSLSTSETTVAPSLGSTEFQPLVQSTTLLPEASHDQFVAQGNRHFGTNIQF

SEQ ID NO: 24453 - protein, 464 aa, Homo sapiens
MSSLTKIICAQQCSGRCRGKSPSDCCHNQCAAGCTGPRESDCLVCRKFRDEATCKDTCPPLMLYNPTTYQMDVNPEGKYSFGATCVKKCPRNYVVTDHGSCVRACGADSYEMEEDGVRKCKKCEGPCRKVCNGIGIGEFKDSLSINATNIKHFKNCTSISGDLHILPVAFRGDSFTHTPPLDPQELDILKTVKEITGFLLIQAWPENRTDLHAFENLEIIRGRTKQHGQFSLAVVSLNITSLGLRSLKEISDGDVIISGNKNLCYANTINWKKLFGTSGQKTKIISNRGENSCKATGQVCHALCSPEGCWGPEPRDCVSCRNVSRGRECVDKCNLLEGEPREFVENSECIQCHPECLPQAMNITCTGRGPDNCIQCAHYIDGPHCVKTCPAGVMGENNTLVWKYADAGHVCHLCHPNCTYGCTGPGLEGCPTNGPKIPSIATGMVGALLLLLVVALGIGLFMRR

SEQ ID NO: 24454 - protein, 475 aa, Homo sapiens
MAAVATCGSVAASTGSAVATASKSNVTSFQRRGPRASVTNDSGPRLVSIAGTRPSVRNGQLLVSTGLPALDQLLGGGLAVGTVLLIEEDKYNIYSPLLFKYFLAEGIVNGHTLLVASAKEDPANILQELPAPLLDDKCKKEFDEDVYNHKTPESNIKMKIAWRYQLLPKMEIGPVSSSRFGHYYDASKRMPQELIEASNWHGFFLPEKISSTLKVEPCSLTPGYTKLLQFIQNIIYEEGFDGSNPQKKQRNILRIGIQNLGSPLWGDDICCAENGGNSHSLTKFLYVLRGLLRTSLSACIITMPTHLIQNKAIIARVTTLSDVVVGLESFIGSERETNPLYKDYHGLIHIRQIPRLNNLICDESDVKDLAFKLKRKLFTIEWVQDNYLRQERNIYPPGFSYLLKQKDSAWGEGSLQHSTFLMSFLAKATAFASRLVRHSEPLKQNGSGRIRQAAGPRLWHDGRRQEAPGLLGIPP

SEQ ID NO: 24455 - protein, 1212 aa, Homo sapiens
MANGGGGGGGSSGGGGGGGGSSLRMSSNIHANHLSLDASSSSSSSSSSSSSSSSSSSSSSVHEPKMDALIIPVTMEVPCDSRGQRMWWAFLASSMVTFFGGLFIILLWRTLKYLWTVCCHCGGKTKEAQKINNGSSQADGTLKPVDEKEEAVAAEVGWMTSVKDWAGVMISAQTLTGRVLVVLVFALSIGALVIYFIDSSNPIESCQNFYKDFTLQIDMAFNVFFLLYFGLRFIAANDKLWFWLEVNSVVDFFTVPPVFVSVYLNRSWLGLRFLRALRLIQFSEILQFLNILKTSNSIKLVNLLSIFISTWLTAAGFIHLVENSGDPWENFQNNQALTYWECVYLLMVTMSTVGYGDVYAKTTLGRLFMVFFILGGLAMFASYVPEIIELIGNRKKYGGSYSAVSGRKHIVVCGHITLESVSNFLKDFLHKDRDDVNVEIVFLHNISPNLELEALFKRHFTQVEFYQGSVLNPHDLARVKIESADACLILANKYCADPDAEDASNIMRVISIKNYHPKIRIITQMLQYHNKAHLLNIPSWNWKEGDDAICLAELKLGFIAQSCLAQGLSTMLANLFSMRSFIKIEEDTWQKYYLEGVSNEMYTEYLSSAFVGLSFPTVCELCFVKLKLLMIAIEYKSANRESRSRKRILINPGNHLKIQEGTLGFFIASDAKEVKRAFFYCKACHDDITDPKRIKKCGCKRLIYFEDEQPSTLSPKKKQRNGGMRNSPNTSPKLMRHDPLLIPGNDQIDNMDSNVKKYDSTGMFHWCAPKEIEKVILTRSEAAMTVLSGHVVVCIFGDVSSALIGLRNLVMPLRASNFHYHELKHIVFVGSIEYLKREWETLHNFPKVSILPGTPLSRADLRAVNINLCDMCVILSANQNNIDDTSLQDKECILASLNIKSMQFDDSIGVLQANSQGFTPPGMDRSSPDNSPVHGMLRQPSITTGVNIPIITELAKPGKLPLVSVNQEKNSGTHILMITELVNDTNVQFLDQDDDDDPDTELYLTQPFACGTAFAVSVLDSLMSATYFNDNILTLIRTLVTGGATPELEALIAEENALRGGYSTPQTLANRDRCRVAQLALLDGPFADLGDGGCYGDLFCKALKTYNMLCFGIYRLRDAHLSTPSQCTKRYVITNPPYEFELVPTDLIFCLMQFDHNAGQSRASLSHSSHSSQSSSKKSSSVHSIPSTANRQNRPKSRESRDKQNRKEMVYR

SEQ ID NO: 24456 - protein, 429 aa, Homo sapiens
MDAPARLLAPLLLLCAQQLRGTRAMNDIGDYVGSNLEISWLPNLDGLIAGYARNFRPGIGGPPVNVALALEVASIDHISEANMEYTMTVFLHQSWRDSRLSYNHTNETLGLDSRFVDKLWLPDTFIVNAKSAWFHDVTVENKLIRLQPDGVILYSIRITSTVACDMDLAKYPMDEQECMLDLESYGYSSEDIVYYWSESQEHIHGLDKLQLAQFTITSYRFTTELMNFKSAGQFPRLSLHFHLRRNRGVYIIQSYMPSVLLVAMSWVSFWISQAAVPARVSLAIKALDVYFWICYVFVFAALVEYAFAHFNADYRKKQKAKVKVSRPRAEMDVRNAIVLFSLSAAGVTQELAISRRQRRVPGNLMGSYRSVGVETGETKKEGAARSGGQGGIRARLRPIDADTIDIYARAVFPAAFAAVNVIYWAAYAM

SEQ ID NO: 24457 - protein, 441 aa, Homo sapiens
LAQFPNTLLGNPKKRMRYFDPLRNEYFFDRNRPSFDAILYYYQSGGRLRRPVNVPLDMFSEEIKFYELGEEAMEKFREDEGFIKEEERPLPEKEYQRQVWLLFEYPESSGPARVIAIVSVMVILISIVIFCLETLPELKDDKDFTGTVHRIDNTTVIYNSNIFTDPFFIVETLCIIWFSFELVVRFFACPSKTDFFKNIMNFIDIVAIIPYFITLGTEIAEQEGNQKGEQATSLAILRVIRLVRVFRIFKLSRHSKGLQILGQTLKASMRELGLLIFFLFIGVILFSSAVYFAEAEEAESHFSSIPDAFWWAVVSMTTVGYGDMYPVTIGGKIVGSLCAIAGVLTIALPVPVIVSNFNYFYHRETEGEEQAQLLHVSSPNLASDSDLSRRSSSTMSKSEYMEIEEDMNNSIAHYRQVNIRTANCTTANQNCVNKSKLLTDV

SEQ ID NO: 24458 - protein, 1234 aa, Homo sapiens
MANGGGGGGGSSGGGGGGGGSSLRMSSNIHANHLSLDASSSSSSSSSSSSSSSSSSSSSSVHEPKMDALIIPVTMEVPCDSRGQRMWWAFLASSMVTFFGGLFIILLWRTLKYLWTVCCHCGGKTKEAQKINNGSSQADGTLKPVDEKEEAVAAEVGWMTSVKDWAGVMISAQTLTGRVLVVLVFALSIGALVIYFIDSSNPIESCQNFYKDFTLQIDMAFNVFFLLYFGLRFIAANDKLWFWLEVNSVVDFFTVPPVFVSVYLNRSWLGLRFLRALRLIQFSEILQFLNILKTSNSIKLVNLLSIFISTWLTAAGFIHLVENSGDPWENFQNNQALTYWECVYLLMVTMSTVGYGDVYAKTTLGRLFMVFFILGGLAMFASYVPEIIELIGNRKKYGGSYSAVSGRKHIVVCGHITLESVSNFLKDFLHKDRDDVNVEIVFLHNISPNLELEALFKRHFTQVEFYQGSVLNPHDLARVKIESADACLILANKYCADPDAEDASNIMRVISIKNYHPKIRIITQMLQYHNKAHLLNIPSWNWKEGDDAICLAELKLGFIAQSCLAQGLSTMLANLFSMRSFIKIEEDTWQKYYLEGVSNEMYTEYLSSAFVGLSFPTVCELCFVKLKLLMIAIEYKSANRESRSRKRILINPGNHLKIQEGTLGFFIASDAKEVKRAFFYCKACHDDITDPKRIKKCGCKRLEDEQPSTLSPKKKQRNGGMRNSPNTSPKLMRHDPLLIPGNDQIDNMDSNVKKYDSTGMFHWCAPKEIEKVILTRSEAAMTVLSGHVVVCIFGDVSSALIGLRNLVMPLRASNFHYHELKHIVFVGSIEYLKREWETLHNFPKVSILPGTPLSRADLRAVNINLCDMCVILSANQNNIDDTSLQDKECILASLNIKSMQFDDSIGVLQANSQGFTPPGMDRSSPDNSPVHGMLRQPSITTGVNIPIITELVNDTNVQFLDQDDDDDPDTELYLTQPFACGTAFAVSVLDSLMSATYFNDNILTLIRTLVTGGATPELEALIAEENALRGGYSTPQTLANRDRCRVAQLALLDGPFADLGDGGCYGDLFCKALKTYNMLCFGIYRLRDAHLSTPSQCTKRYVITNPPYEFELVPTDLIFCLMQFDHNAGQSRASLSHSSHSSQSSSKKSSSVHSIPSTANRQNRPKSRESRDKQNATRMNRMGQEKKWFTDEPDNAYPRNIQIKPMSTHMANQINQYKSTSSLIPPIREVEDEC

SEQ ID NO: 24459 - protein, 976 aa, Homo sapiens
QIDMAFNVFFLLYFGLRFIAANDKLWFWLEVNSVVDFFTVPPVFVSVYLNRSWLGLRFLRALRLIQFSEILQFLNILKTSNSIKLVNLLSIFISTWLTAAGFIHLVENSGDPWENFQNNQALTYWECVYLLMVTMSTVGYGDVYAKTTLGRLFMVFFILGGLAMFASYVPEIIELIGNRKKYGGSYSAVSGRKHIVVCGHITLESVSNFLKDFLHKDRDDVNVEIVFLHNISPNLELEALFKRHFTQVEFYQGSVLNPHDLARVKIESADACLILANKYCADPDAEDASNIMRVISIKNYHPKIRIITQMLQYHNKAHLLNIPSWNWKEGDDAICLAELKLGFIAQSCLAQGLSTMLANLFSMRSFIKIEEDTWQKYYLEGVSNEMYTEYLSSAFVGLSFPTVCELCFVKLKLLMIAIEYKSANRESRILINPGNHLKIQEGTLGFFIASDAKEVKRAFFYCKACHDDITDPKRIKKCGCKRLIYFEDEQPSTLSPKKKQRNGGMRNSPNTSPKLMRHDPLLIPGNDQIDNMDSNVKKYDSTGMFHWCAPKEIEKVILTRSEAAMTVLSGHVVVCIFGDVSSALIGLRNLVMPLRASNFHYHELKHIVFVGSIEYLKREWETLHNFPKVSILPGTPLSRADLRAVNINLCDMCVILSANQNNIDDTSLQDKECILASLNIKSMQFDDSIGVLQANSQGFTPPGMDRSSPDNSPVHGMLRQPSITTGVNIPIITELVNDTNVQFLDQDDDDDPDTELYLTQPFACGTAFAVSVLDSLMSATYFNDNILTLIRTLVTGGATPELEALIAEENALRGGYSTPQTLANRDRCRVAQLALLDGPFADLGDGGCYGDLFCKALKTYNMLCFGIYRLRDAHLSTPSQCTKRYVITNPPYEFELVPTDLIFCLMQFDHNAGQSRASLSHSSHSSQSSSKKSSSVHSIPSTANRQNRPKSRESRDKQNATRMNRMGQGMTINGSA

SEQ ID NO: 24460 - protein, 888 aa, Homo sapiens [sequence omitted]

SEQ ID NO: 24461 - protein, 2038 aa, Homo sapiens
MINESKGDAIYSAVYDVVRNRGNFGDVSVSWVVSPDFTQDVFPVQGTVVFGDQEFSKNITIYSLPDEIPEEMEEFTVILLNGTGGAKVGNRTTATLRIRRNDDPIYFAEPRVVRVQEGETANFTVLRNGSVDVTCMVQYATKDGKATARERDFIPVEKGETLIFEVGSRQQSISIFVNEDGIPETDEPFYIILLNSTGDTVVYQYGVATVIIEANDDPNGIFSLEPIDKAVEEGKTNAFWILRHRGYFGSVSVSWQLFQNDSALQPGQEFYETSGTVNFMDGEEAKPIILHAFPDKIPEFNEFYFLKLVNISGPGGQLAETNLQVTVMVPFNDDPFGVFILDPECLEREVAEDVLSEDDMSYITNFTILRQQGVFGDVQLGWEILSSEFPAGLPPMIDFLLVGIFPTTVHLQQHMRRHHSGTDALYFTGLEGAFGTVNPKYHPSRNNTIANFTFSAWVMPNANTNGFIIAKDDGNGSIYYGVKIQTNESHVTLSLHYKTLGSNATYIAKTTVMKYLEESVWLHLLIILEDGIIEFYLDGNAMPRGIKSLKGEAITDGPGILRIGAGINGNDRFTGLMQDVRSYERKLTLEEIYELHAMPAKSDLHPISGYLEFRQGETNKSFIISARDDNDEEGEELFILKLVSVYGGARISEENTTARLTIQKSDNANGLFGFTGACIPEIAEEGSTISCVVERTRGALDYVHVFYTISQIETDGINYLVDDFANASGTITFLPWQRSEVLNIYVLDDDIPELNEYFRVTLVSAIPGDGKLGSTPTSGASIDPEKETTDITIKASDHPYGLLQFSTGLPPQPKDAMTLPASSVPHITVEEEDGEIRLLVIRAQGLLGRVTAEFRTVSLTAFSPEDYQNVAGTLEFQPGERYKYIFINITDNSIPELEKSFKVELLNLEGGVAELFRVDGSGSGDGDMEFFLPTIHKRASLGVASQILVTIAASDHAHGVFEFSPESLFVSGTEPEDGYSTVTLNVIRHHGTLSPVTLHWNIDSDPDGDLAFTSGNITFEIGQTSANITVEILPDEDPELDKAFSVSVLSVSSGSLGAHINATLTVLASDDPYGIFIFSEKNRPVKVEEATQNITLSIIRLKGLMGKVLVSYATLDDMEKPPYFPPNLARATQGRDYIPASGFALFGANQSEATIAISILDDDEPERSESVFIELLNSTLVAKVQSRSIPNSPRLGPKVETIAQLIIIANDDAFGTLQLSAPIVRVAENHVGPIINVTRTGGAFADVSVKFKAVPITAIAGEDYSIASSDVVLLEGETSKAVPIYVINDIYPELEESFLVQLMNETTGGARLGALTEAVIIIEASDDPYGLFGFQITKLIVEEPEFNSVKVNLPIIRNSGTLGNVTVQWVATINGQLATGDLRVVSGNVTFAPGETIQTLLLEVLADDVPEIEEVIQVQLTDASGGGTIGLDRIANIIIPANDDPYGTVAFAQMVYRVQEPLERSSCANITVRRSGGHFGRLLLFYSTSDIDVVALAMEEGQDLLSYYESPIQGVPDPLWRTWMNVSAVGEPLYTCATLCLKEQACSAFSFFSASEGPQCFWMTSWISPAVNNSDFWTYRKNMTRVASLFSGQAVAGSDYEPVTRQWAIMQEGDEFANLTVSILPDDFPEMDESFLISLLEVHLMNISASLKNQPTIGQPNISTVVIALNGDAFGVFVIYNISPNTSEDGLFVEVQEQPQTLVELMIHRTGGSLGQVAVEWRVVGGTATEGLDFIGAGEILTFAEGETKKTVILTILDDSEPEDDESIIVSLVYTEGGSRILPSSDTVRVNILANDNVAGIVSFQTASRSVIGHEGEILQFHVIRTFPGRGNVTVNWKIIGQNLELNFANFSGQLFFPEGSLNTTLFVHLLDDNIPEEKEVYQVILYDVRTQGVPPAGIALLDAQGYAAVLTVEASDEPHGVLNFALSSRFVLLQEANITIQLFINREFGSLGAINVTYTTVPGMLSLKNQTVGNLAEPEVDFVPIIGFLILEEGETAAAINITILEDDVPELEEYFLVNLTYVGLTMAASTSFPPRL

SEQ ID NO: 24462 - protein, 1288 aa, Homo sapiens
MALSKGLRLLGRLGAEGDCSVLLEARGRDDCLLFEAGTVATLAPEEKEVIKGQYGKLTDAYGCLGELRLKSGGTSLSFLVLVTGCTSVGRIPDAEIYKITATDFYPLQEEAKEEERLIALKKILSSGVFYFSWPNDGSRFDLTVRTQKQGDDSSEWGNSFFWNQLLHVPLRQHQVSCCDWLLKIICGVVTIRTVYASHKQAKACLVSRVSCERTGTRFHTRGVNDDGHVSNFVETEQMIYMDDGVSSFVQIRGSVPLFWEQPGLQVGSHHLRLHRGLEANAPAFDRHMVLLKEQYGQQVVVNLLGSRGGEEVLNRAFKKLLWASCHAGDTPMINFDFHQFAKGGKLEKLETLLRPQLKLHWEDFDVFTKGENVSPRFQKGTLRMNCLDCLDRTNTVQSFIALEVLHLQLKTLGLSSKPIVDRFVESFKAMWSLNGHSLSKVFTGSRALEGKAKVGKLKDGARSMSRTIQSNFFDGVKQEAIKLLLVGDVYGEEVADKGGMLLDSTALLVTPRILKAMTERQSEFTNFKRIRIAMGTWNVNGGKQFRSNVLRTAELTDWLLDSPQLSGATDSQDDSSPADIFAVGFEEMVELSAGNIVNASTTNKKMWGEQLQKAISRSHRYILLTSAQLVGVCLYIFVRPYHVPFIRDVAIDTVKTGMGGKAGNKGAVGIRFQFHSTSFCFICSHLTAGQSQVKERNEDYKEITQKLCFPMGRNVFSHDYVFWCGDFNYRIDLTYEEVFYFVKRQDWKKLLEFDQLQLQKSSGKIFKDFHEGAINFGPTYKYDVGSAAYDTSDKCRTPAWTDRVLWWRKKHPFDKTAGELNLLDSDLDVDTKVRHTWSPGALQYYGRAELQASDHRPVLAIVEVEVQEVDVGARERVFQEVSSFQGPLDATVVVNLQSPTLEEKNEFPEDLRTELMQTLGSYGTIVLVRINQGQMLVTFADSHSALSVLDVDGMKVKGRAVKIRPKTKDWLKGLREEIIRKRDSMAPVSPTANSCLLEENFDFTSLDYESEGDILEDDEDYLVDEFNQPGVSDSELGGDDLSDVPGPTALAPPSKSPALTKKKQHPTYKDDADLVELKRELEAVGEFRHRSPSRSLSVPNRPRPPQPPQRPPPPTGLMVKKSASDASISSGTHGQYSILQTARLLPGAPQQPPKARTGISKPYNVKQIKTTNAQEAEAAIRCLLEARGGASEEALSAVAPRDLEASSEPEPTPGAAKPETPQAPPLLPRRPPPRVPAIKKPTLRRTGKIVFCSRSQASQPCLLLQRHEFVRTVAAQRLASVDTSGSSV

SEQ ID NO: 24463 - protein, 906 aa, Homo sapiens
MDMEYMGSGKLGQILKQIWRQNQMLKQALLGDDLCEGAGGATWMATVVFLGQELSSALHQLLEHTSGTLRSTCQQLHVLLDKENQCVSRKEIITFIDCLIKITEHLGSTAALLKKEEKEICNLCGMHDECTPQQTMSSIQDTKAADIAARGELNVIETATVSPTNGEESHYTNQVQLEKNKTHMSSALVEKENNTSLNGRVLGQEESQNKMFPDNAENEDDKQIEHMTVENINGNREETHGIIQTTETEIQETSESPREEMTTSSIICDISKKYINSTLPNDSENIKHKNNIMEKEYLDVLSDVTGPQVSCYITAPSYVLQQLECRIINHMSSLIVGDNEELVSNVITIECSDKEKRVPFPIGIAIPFTARYRGNYRDIMVKVCDINLQSSYLNPNSLEGMKGGYKGTCASVKVYKLGIFSVVSCLKKESFTVTKKGLALKSSMDSRISLNYPPGVFTSPVLVQLKIQPVDPALVAHLKAQQDTFYSVQSTSPLIHIQHPSTYPFQKPVTLFLPCSPYLDKNNLGSEIDHKRRASATINRITPSYFNRTKIASIRKPRKNASECLKLLGFRSQDSGWCGLDDVVKTIQSGLVSVELYEHLERFIVLHLSSTMDNSHLVTFVKSLEEAMLSTTACIVLSHQKDNPHRIAVLVVPSKDLSQVLKDLHLEGFGGPPEPSRHFQVREGEQLLLRFTGNIFASSNGKDYGKDYTLIFHLQRKPRLELQIKEVDEFGNYSCPHYKGTIVVYKVPKGKIVPNLNQSLVINENHSQLPICKLPLKLPKHKKLINRPQSTKRVSKDPVEALWDNLLHWLAEELSEENAESLSSTLPLRRSTIQLIKLKNPDDLTEQIHEFLCFWKKSLPTFTDKLRLLARHLRKIGRSDLAEELKFKWENKVFTEPQQCFDVAPE

SEQ ID NO: 24464 - protein, 1184 aa, Homo sapiens
SSSSSSSSSSVHEPKMDALIIPVTMEVPCDSRGQRMWWAFLASSMVTFFGGLFIILLWRTLKYLWTVCCHCGGKTKEAQKINNGSSQADGTLKPVDEKEEAVAAEVGWMTSVKDWAGVMISAQTLTGRVLVVLVFALSIGALVIYFIDSSNPIESCQNFYKDFTLQIDMAFNVFFLLYFGLRFIAANDKLWFWLEVNSVVDFFTVPPVFVSVYLNRSWLGLRFLRALRLIQFSEILQFLNILKTSNSIKLVNLLSIFISTWLTAAGFIHLVENSGDPWENFQNNQALTYWECVYLLMVTMSTVGYGDVYAKTTLGRLFMVFFILGGLAMFASYVPEIIELIGNRKKYGGSYSAVSGRKHIVVCGHITLESVSNFLKDFLHKDRDDVNVEIVFLHNISPNLELEALFKRHFTQVEFYQGSVLNPHDLARVKIESADACLILANKYCADPDAEDASNIMRVISIKNYHPKIRIITQMLQYHNKAHLLNIPSWNWKEGDDAICLAELKLGFIAQSCLAQGLSTMLANLFSMRSFIKIEEDTWQKYYLEGVSNEMYTEYLSSAFVGLSFPTVCELCFVKLKLLMIAIEYKSANRESRILINPGNHLKIQEGTLGFFIASDAKEVKRAFFYCKACHDDITDPKRIKKCGCKRLIYFEDEQPSTLSPKKKQRNGGMRNSPNTSPKLMRHDPLLIPGNDQIDNMDSNVKKYDSTGMFHWCAPKEIEKVILTRSEAAMTVLSGHVVVCIFGDVSSALIGLRNLVMPLRASNFHYHELKHIVFVGSIEYLKREWETLHNFPKVSILPGTPLSRADLRAVNINLCDMCVILSANQNNIDDTSLQDKECILASLNIKSMQFDDSIGVLQANSQGFTPPGMDRSSPDNSPVHGMLRQPSITTGVNIPIITELVNDTNVQFLDQDDDDDPDTELYLTQPFACGTAFAVSVLDSLMSATYFNDNILTLIRTLVTGGATPELEALIAEENALRGGYSTPQTLANRDRCRVAQLALLDGPFADLGDGGCYGDLFCKALKTYNMLCFGIYRLRDAHLSTPSQCTKRYVITNPPYEFELVPTDLIFCLMQFDHNAGQSRASLSHSSHSSQSSSKKSSSVHSIPSTANRQNRPKSRESRDKQNATRMNRMGQAEKKWFTDEPDNAYPRNIQIKPMSTHMANQINQYKSTSSLIPPIREVEDEC

SEQ ID NO: 24465 - protein, 395 aa, Homo sapiens
MAAVATCGSVAASTGSAVATASKSNVTSFQRRGPRASVTNDSGPRLVSIAGTRPSVRNGQLLVSTGLPALDQLLGGGLAVGTVLLIEEDKYNIYSPLLFKYFLAEGIVNGHTLLVASAKEDPANILQELPAPLLDDKCKKEFDEDVYNHKTPESNIKMKIAWRYQLLPKMEIGPVSSSRFGHYYDASKRMPQELIEASNWHGFFLPEKISSTLKVEPCSLTPGYTKLLQFIQNIIYEEGFDGSNPQKKQRNILRIGIQNLGSPLWGDDICCAENGGNSHSLTKFLYVLRGLLRTSLSACIITMPTHLIQNKAIIARVTTLSDVVVGLESFIGSERETNPLYKDYHGLIHIRQIPRLNNLICDESDVKDLAFKLKRKLFTIEDWRKSLWSFPNLKI

SEQ ID NO: 24466 - protein, 453 aa, Homo sapiens
MTVWILLLLSLYPGFTSQKSDDDYEDYASNKTWVLTPKVPEGDVTVILNNLLEGYDNKLRPDIGVKPTLIHTDMYVNSIGPVNAINMEYTIDIFFAQTWYDRRLKFNSTIKVLRLNSNMVGKIWIPDTFFRNSKKADAHWITTPNRMLRIWNDGRVLYTLRLTIDAECQLQLHNFPMDEHSCPLEFSSYGYPREEIVYQWKRSSVEVGDTRSWRLYQFSFVGLRNTTEVVKTTSGDYVVMSVYFDLSRRMGYFTIQTYIPCTLIVVLSWVSFWINKDAVPARTSLGITTVLTMTTLSTIARKSLPKVSYVTAMDLFVSVCFIFVFSALVEYGTLHYFVSNRKPSKDKDKKKKNPLLRMFSFKAPTIDIRPRSATIQMNNATHLQERDEEYGYECLDGKDCASFFCCFEDCRTGAWRHGRIHIRIAKMDSYARIFFPTAFCLFNLVYWVSYLYL

SEQ ID NO: 24467 - protein, 368 aa, Homo sapiens
MQNSHSGVNQLGGVFVNGRPLPDSTRQKIVELAHSGARPCDISRILQTHADAKVQVLDNQNVSNGCVSSINRVLRNLASEKQQMGADGMYDKLRMLNGQTGSWGTRPGWYPGTSVPGQPTQDGCQQQEGGGENTNSISSNGEDSDEAQMRLQLKRKLQRNRTSFTQEQIEALEKEFERTHYPDVFARERLAAKIDLPEARIQVWFSNRRAKWRREEKLRNQRRQASNTPSHIPISSSFSTSVYQPIPQPTTPVSSFTSGSMLGRTDTALTNTYSALPPMPSFTMANNLPMQPPVPSQTSSYSCMLPTSPSVNGRSYDTYTPPHMQTHMNSQPMGTSGTTSTGLISPGVSVPVQVPGSEPDMSQYWPRL

SEQ ID NO: 24468 - protein, 577 aa, Homo sapiens
MIHAVLQWQKRNAAPPPSNTEAPPGETRTEAGAETRSPGKAEAESDALPDDTVIESEALPSDIAAEARAKTGGTVSDQALLFGDDDAGEGPSSLIREKPVPKQNENEEENLDKEQTGNLKQELDDKSATCKAYPKRPLLGLVLTPTRELAVQVKQHIDAVARFTGIKTAILVGGMSTQKQQRMLNRRPEIVVATPGRLWELIKEKHYHLRNLRQLRCLVVDEADRMVEKGHFAELSQLLEMLNDSQYNPKRQTLVFSATLTLVHQAPARILHKKHTKKMDKTAKLDLLMQKIGMRGKPKVIDLTRNEATVETLTETKIHCETDEKDFYLYYFLMQYPGRSLVFANSISCIKRLSGLLKVLDIMPLTLHACMHQKQRLRNLEQFARLEDCVLLATDVAARGLDIPKVQHVIHYQVPRTSEIYVHRSGRTARATNEGLSLMLIGPEDVINFKKIYKTLKKDEDIPLFPVQTKYMDVVKERIRLARQIEKSEYRNFQACLHNSWIEQAAAALEIELEEDMYKGGKADQQEERRRQKQMKVLKKELRHLLSQPLFTESQKTKYPTHTHSGRDLMQICIVLE

SEQ ID NO: 24469 - protein, 396 aa, Homo sapiens
MAAVATCGSVAASTGSAVATASKSNVTSFQRRGPRASVTNDSGPRLVSIAGTRPSVRNGQLLVSTGLPALDQLLGGGLAVGTVLLIEEDKYNIYSPLLFKYFLAEGIVNGHTLLVASAKEDPANILQELPAPLLDDKCKKEFDEDVYNHKTPESNIKMKIAWRYQLLPKMEQIGPVSSSRFGHYYDASKRMPQELIEASNWHGFFLPEKISSTLKVEPCSLTPGYTKLLQFIQNIIYEEGFDGSNPQKKQRNILRIGIQNLGSPLWGDDICCAENGGNSHSLTKFLYVLRGLLRTSLSACIITMPTHLIQNKAIIARVTTLSDVVVGLESFIGSERETNPLYKDYHGLIHIRQIPRLNNLICDESDVKDLAFKLKRKLFTIEDWRKSLWSFPNLKI

SEQ ID NO: 24470 - protein, 390 aa, Homo sapiens
TFQHGQNLSFINISIIDDNESEFEEPIEILLTGATGGAVLGRHLVSRIIIAKSDSPFGVIRFLNQSKISIANPNSTMILSLVLERTGGLLGEIQVNWETVGPNSQEALLPQNRDIADPVSGLFYFGEGEGGVRTIILTIYPHEEIEVEETFIIKLHLVKGEAKLDSRAKDVTLTIQEFGDPNGVVQFAPETLSKKTYSEPLALEGPLLITFFVRRVKGTFGEIMVYWELSSEFDITEDFLSTSGFFTIADGESEASFDVHLLPDEVPEIEEDYVIQLVSVEGGAELDLEKSITWFSVYANDDPHGVFALYSDRQSILIGQNLIRSIQINITRLAGTFGDVAVGLRISSDHKEQPIVTENAERQLVVKDGATYKVDVVPIKNQVCGISSVS

SEQ ID NO: 24471 - protein, 1240 aa, Homo sapiens
MANGGGGGGGSSGGGGGGGGSSLRMSSNIHANHLSLDASSSSSSSSSSSSSSSSSSSSSSVHEPKMDALIIPVTMEVPCDSRGQRMWWAFLASSMVTFFGGLFIILLWRTLKYLWTVCCHCGGKTKEAQKINNGSSQADGTLKPVDEKEEAVAAEVGWMTSVKDWAGVMISAQTLTGRVLVVLVFALSIGALVIYFIDSSNPIESCQNFYKDFTLQIDMAFNVFFLLYFGLRFIAANDKLWFWLEVNSVVDFFTVPPVFVSVYLNRSWLGLRFLRALRLIQFSEILQFLNILKTSNSIKLVNLLSIFISTWLTAAGFIHLVENSGDPWENFQNNQALTYWECVYLLMVTMSTVGYGDVYAKTTLGRLFMVFFILGGLAMFASYVPEIIELIGNRKKYGGSYSAVSGRKHIVVCGHITLESVSNFLKDFLHKDRDDVNVEIVFLHNISPNLELEALFKRHFTQVEFYQGSVLNPHDLARVKIESADACLILANKYCADPDAEDASNIMRVISIKNYHPKIRIITQMLQYHNKAHLLNIPSWNWKEGDDAICLAELKLGFIAQSCLAQGLSTMLANLFSMRSFIKIEEDTWQKYYLEGVSNEMYTEYLSSAFVGLSFPTVCELCFVKLKLLMIAIEYKSANRESRSRKRILINPGNHLKIQEGTLGFFIASDAKEVKRAFFYCKACHDDITDPKRIKKCGCKRPKMSIYKRMRRACCFDCGRSERDCSCMSGRVRGNVDTLERAFPLSSVSVNDCSTSFRAFEDEQPSTLSPKKKQRNGGMRNSPNTSPKLMRHDPLLIPGNDQIDNMDSNVKKYDSTGMFHWCAPKEIEKVILTRSEAAMTVLSGHVVVCIFGDVSSALIGLRNLVMPLRASNFHYHELKHIVFVGSIEYLKREWETLHNFPKVSILPGTPLSRADLRAVNINLCDMCVILSANQNNIDDTSLQDKECILASLNIKSMQFDDSIGVLQANSQGFTPPGMDRSSPDNSPVHGMLRQPSITTGVNIPIITELVNDTNVQFLDQDDDDDPDTELYLTQPFACGTAFAVSVLDSLMSATYFNDNILTLIRTLVTGGATPELEALIAEENALRGGYSTPQTLANRDRCRVAQLALLDGPFADLGDGGCYGDLFCKALKTYNMLCFGIYRLRDAHLSTPSQCTKRYVITNPPYEFELVPTDLIFCLMQFDHNAGQSRASLSHSSHSSQSSSKKSSSVHSIPSTANRQNRPKSRESRDKQKYVQEERL

SEQ ID NO: 24472 - protein, 333 aa, Homo sapiens
MTMAGGRRGLVAPQNTFLENIVRRSNDTNFVLGNAQIVDWPIVYSNDGFCKLSGYHRAEVMQKSSTCSFMYGELTDKDTIEKVRQTFENYEMNSFEILMYKKNRTPVWFFVKIAPIRNEQDKVVLFLCTFSDITAFKQPIEDDSCKGWGKFARLTRALTSSRGVLQQLAPSVQKGENVHKHSRLAEVLQLGSDILPQYKQEAPKTPPHIILHYCVFKTTWDWIILILTFYTAILVPYNVSFKTRQNNVAWLVVDSIVDVIFLVDIVLNFHTTFVGPAGEVISDPKLIRMNYLKTWFVIDLLSCLPYDVINAFENVDEMLMRNFGKKTLTSIYA

SEQ ID NO: 24473 - protein, 418 aa, Homo sapiens
NSTNLSPSTQFPADADAVATEPATAVLASQPQSKEHFRSLEERKKQHKEGLYLSDTLPRKKTTSSISPHFSSATMGRSITPKAHLPLGQSNSCGSVLPPSLAAMAKDSESRRMLRGRMNSSAGYNHQQMSEGHRQKSEFYNRTASESNVYLNSFHYPDHSYKDQAFDTLSLDSSDSMETSISACSPDNISSASTSNIARIEEMERLLKQAHAEKTRLLESREREMEAKKRALEEEKRRREILEKRLQEETSQRQKLIEKEVKIRERQRAQARPLTRYLPVRKEDFDLRSHVETAGHNIDTCYHVSITEKTCRGFLIKMGGKIKTWKKRWFVFDRNKRTFSYYADKHETKLKGVIYFQAIEEVYYDHLKNANKSPNPLLTFSVKTHDRIYYMVAPSPEAMRIWMDVIVTGAEGYTHFLL

SEQ ID NO: 24474 - protein, 894 aa, Homo sapiens
MNRADSPKPPVAPKPKTTSPLTPVTAPKFPSSARPESLHSPNSMFRGPKPPIAPKPRLTAPNEWRASVYLNDSLNKCSNGRLPCVDRGLDEGPRSIPKCSESETDEDYIVVPRVPLREDEPKDEGSVGNKALVSPESSAEEEEEREEGGEACGLEGTGAGEDSVAPAAPGAGALSREGEEGTDLALEDEGEGCADEPGTLEQVSRSEEEEKLVQPHRECSLEDSGPWAGEGVFQSDLLLPHIHGEDQEPPDTPGEAEEDDEEGCASTDPAGADEGSGPDRPTEDMGQDAEDTSEEPPEKEELAGVQEAETATDCPEVLEEGCEEATGVTGGEQVDLSEPPDHEKKTNQEVAAATLEDHAQDESAEESCQIVPFENDCMEDFVTSLTGSPYEFFPTESTSFCSESCSPLSESAKGLESEQAPKLGLRAEENPMVGALCGQCGSLQGGAAEGPAAPDVVVVLEEEALDDALANPYVMGVGLPGQAAPGEGGQAASDALGGYGSKEELNCEAEGGLVPADRKNTSTRVRPHSGKVAGYVPETVPEETGPEAGSSAPGIGGAAEEVGKTLLSLEGKPLEASRALPAKPRAFTLYPRSFSVEGREIPVSVYQEPEGSGLDDHRIKRKEDNLSLSCVIGSSGSFSQRNHLPSSGTSTPSSMVDIPPPFDLACITKKPITKSSPSLLIESDSPDKYKKKKSSFKRFLALTFKKKTENKLHVDVNVSSSRSSSESSYHGPSRILEVDRRSLSNSPQLKSRTGKLRASESPSSLIFYRDGKRKGVPFSRTVSRVESFEDRSRPPFLPLPLTKPRSISFPSADTSDYENIPAMNSDYENIQIPPRRPARAGAFTKLFEDQSRALSTANENDGYVDMSSFNAFESKQQSADQDAERYLTFYFLSC

SEQ ID NO: 24475 - protein, 264 aa, Homo sapiens
MDYDLHKDGYPREEIVYQWKRSSVEVGDTRSWRLYQFSFVGLRNTTEVVKTTSGDYVVMSVYFDLSRRMGYFTIQTYIPCTLIVVLSWVSFWINKDAVPARTSLGITTVLTMTTLSTIARKSLPKVSYVTAMDLFVSVCFIFVFSALVEYGTLHYFVSNRKPSKDKDKKKKNPAPTIDIRPRSATIQMNNATHLQERDEEYGYECLDGKDCASFFCCFEDCRTGAWRHGRIHIRIAKMDSYARIFFPTAFCLFNLVYWVSYLYL

SEQ ID NO: 24476 - protein, 266 aa, Homo sapiens
MFANLKYVSLGILVFQTTSLVLTMRYSRTLKEEGPRYLSSTAVVVAELLKIMACILLVYKDSKCSLRALNRVLHDEILNKPMETLKLAIPSGIYTLQNNLLYVALSNLDAATYQWPSDSQLDSKELSAGSQFVGLMAVLTACFSSGFAGVYFEKILKETKQSVWIRNIQLGFFGSIFGLMGVYIYDGELVSKNGFFQGYNRLTWIVVVLQALGGLVIAAVIKYADNILKGFATSLSIILSTLISYFWLQDFVPTRWLYASSSSSCS

SEQ ID NO: 24477 - protein, 492 aa, Homo sapiens
MGDWNLLGGILEEVHSHSTIVGKIWLTILFIFRMLVLRVAAEDVWDDEQSAFACNTRQPGCNNICYDDAFPISLIRFWVLQIIFVSSPSLVYMGHALYRLRAFEKDRQRKKSHLRAQMENPDLDLEEQQRIDRELRRLEEQKRIHKVPLKGCLLRTYVLHILTRSVLEVGFMIGQYILYGFQMHPLYKCTQPPCPNAVDCFVSRPTEKTIFMLFMHSIAAISLLLNILEIFHLGIRKIMRTLYKKSSSEGIEDETGPPFHLKKYSVAQQCMICSSLPERISPLQANNQQQVIRVNVPKSKTMWQIPQPRQLEVDPSNGKKDWSEKDQHSGQLHVHSPCPWAGSAGNQHLGQQSDHSSFGLQNTMSQSWLGTTTAPRNCPSFAVGTWEQSQDPEPSGEPLTDLHSHCRDSEGSMRESGVWIDRSRPGSRKASFLSRLLSEKRHLHSDSGSSGSRNSSCLDFPHWENSPSPLPSVTGHRTSMNMLLELSSIMKK

SEQ ID NO: 24478 - protein, 257 aa, Homo sapiens
MFANLKYVSLGILVFQTTSLVLTMRYSRTLKEEGPRYLSSTAVVVAELLKIMACILLVYKDSKCSLRALNRVLHDEILNKPMETLKLAIPSGIYTLQNNLLYVALSNLDAATYQVTYQLKILTTALFSVSMLSKKLGVYQWLSLVILMTGVAFVQWPSDSQLDSKELSAGSQFVGLMAVLTACFSSGFAGVYFEKILKETKQSVWIRNIQLGFFGSIFGLMGVYIYDGELVSKNGFFQGYNRLTWIVVVLQVKHLKS

SEQ ID NO: 24479 - protein, 1411 aa, Homo sapiens
MGAGNLPPITQEEALHILGFQPPFEDIRFGPFTGNTTLMRWFRQINDHFHVKGCSYVLYKPHGKNKTAGETASGALSKLTRGLKDESLAYIYHCQNHYFCPIGFEATPVKANKAFSRGPLSPQEVEYWILIGESSRKHPAIHCKKWADIVTDLNTQNPEYLDIRHLERGLQYRKTKKVGGNLHCIIAFQRLNWQRFGLWNFPFGTIRQESQPPTHAQGIAKSESEDNISKKQHGRLGRSFSASFHQDSAWKKMSNISIWLNQALKGVRDRHGNSIENPHLLTLFHRLCKLLFFRIRPIFVFDGDAPLLKKQTLVKRRQRKDLASSDSRKTTEKLLKTFLKRQAIKTAFRSKRDEALPSLTQVRRENDLYVLPPLQEEEKHSSEEEDEKEWQERMNQKQALQEEFFHNPQAIDIESEDFSSLPPEVKHEILTDMKEFTKRRRTLFEAMPEESDDFSQYQLKGLLKKNYLNQHIEHVQKEMNQQHSGHIRRQYEDEGGFLKEVESRRVVSEDTSHYILIKGIQAKTVAEVDSESLPSSSKMHGMSFDVKSSPCEKLKTEKEPDATPPSPRTLLAMQAALLGSSSEEELESENRRQARGRNAPAAVDEGSISPRTLSAIKRALDDDEDVKVCAGDDVQTGGPGAEEMRINSSTENSDEGLKVRDGKGIPFTATLASSSVNSAEEHVASTNEGREPTDSVPKEQMSLVHVGTEAFPISDESMIKDRKDRLPLESAVVRHSDAPGLPNGRELTPASPTCTNSVSKNETHAEVLEQQNELCPYESKFDSSLLSSDDETKCKPNSASEVIGPVSLQETSSIVSVPSEAVDNVENVVSFNAKEHENFLETIQEQQTTESAGQDLISIPKAVEPMEIDSEESESDGSFIEVQSVISDEELQAEFPETSKPPSEQGEEELVGTREGEAPAESESLLRDNSERDDVDGEPQEAEKDAEDSLHEWQDINLEELETLESNLLAQQNSLKAQKQQQERIAATVTGQMFLESQELLRLFGIPYIQAPMEAEAQCAILDLTDQTSGTITDDSDIWLFGARHVYRNFFNKNKFVEYYQYVDFHNQLGLDRNKLINLAYLLGSDYTEGIPTVGCVTAMEILNEFPGHGLEPLLKFSEWWHEAQKNPKIRPNPHDTKVKKKLRTLQLTPGFPNPAVAEAYLKPVVDDSKGSFLWGKPDLDKIREFCQRYFGWNRTKTDESLFPVLKQLDAQQTQLRIDSFFRLAQQEKEDAKRIKSQRLNRAVTCMLRKEKEAAASEIEAVSVAMEKEFELLDKAKGKTQKRGITNTLEESSSLKRKRLSDSKGKNTCGGFLGETCLSESSDGSSSEDAESSSLMNVQRRTAAKEPKTSASDSQNSVKEAPVKNGGATTSSSSDSDDDGGKEKMVLVTARSVFGKKRRKLRRARGRKRKT

SEQ ID NO: 24480 - protein, 3176 aa, Homo sapiens
MANKMEMKETAKQDTLWQMSSTSKPVLNTREVNPLKKFTIPKIRRTAEKVYLSPCYTNSREYSFIHDTLNQCRLDVNCDLQSLWQFGDTKLVHNEELEKNFTAKRSEMRESGRHCRELEEQFCFLALPQSDVAQIYQNGISTRASTLKILGNPLLGIYMFRHVDIALNYSHSQSITVESILIFKVLFGKVKKIQPSVDKNKVSLDPSPNFDCHMSRNAPSLKDTIELQAYSSAVYFYEYSVLSKPVDKPRQCLPYAVVTVKFLGSKVDNGRLMTSLRFLSTGFPKRAERTCSLNNCTVAKRFGKGKDATVTFVHFKKPVDPFVQENCLCNALNSEINPFISNISNSYGNVQNGNISIPETYSGQTEHSLAEIRDTSQVLAHDSDISLMPSDAKDSVNGDLLLNWTSLKNILSGLNASFPLHNNTGSSTVTTSKSIKDPRLMRREESMGEQSSTAGLNEVLQFEKSSDNVNSEIKSTPSNSASSSEVVPGDCAVLTNGLDTPCFKTSVNDSQSWAHNMGSEDYDCIPPNKVTMAGQCKDQGNFSFPISVSNVVSEVENQNHSEEKAQRAQQESGNAYTKEYSSHIFQDSQSSDLKTIYQTGCQTSTVFPLKKKVSIDEYLQNTGKMKNFADLEDSSKHEEKQTSWKEIDNDFTNETKISPIDNYIVLHQEYKESESHNSFGKSCDKILITQELEITKSSTSTIKDKDELDHLALEWQITPSFESLSQKHPQHSVEYEGNIHTSLAIAQKLMELKLGKINQNYASIITEAFPKPKDIPQAKEMFIDTVISSYNIETAHDSSNCSITREHICVHRKNENEPVSLENIQRDYKETAYVEDRGQDHNLFCNSQLSNDIWLNVNFKKQTDRENQNEAKENSASCVENNIENIYGDKKQDSHTNENFSNIDEKEDKNYHNIEILSSEEFSTKFNLICREDNAVSAATALLESEEDTISAVKQKDTENTGRSVEHLASTTFPKTASSSVCVASNAAIQIASATMPALSLNNDDHQIYQFKETCSSESPDFGLLVKHRVSDCEIDTDKNKSQESFHQSINENLVLQSIELESEIEIELEDCDDAFIFQQDTHSHENMLCEEFVTSYKALKSRISWEGLLALDNGEMEVLESTTGRENSDQHYSKESNYFYSSTQNNETELTSPILLPDLQIKITNIFRPGFSPTADSLALKDSFCTHVTEATKPEINKEDGEILGFDIYSQPFGENADYPCEDKVDNIRQESGPVSNSEISLSFDLSRNTDVNHTSENQNSESLFTEPSNVTTIDDGSRCFFTKSKTDYNDTKNKKEVESRISKRKLHISSRDQNIPHKDLRRHKIYGRKRRLTSQDSSECFSSLSQGRIKTFSQSEKHIKSVLNILSDEASLCKSKCLSRKLDKAVVHLKKAHRRVHTSLQLITKVGEERKGPLPKSYAIICNNFWESCDLQGYSSVSQRKYYSTKHFSSKRKYDKRRKKRAPKADISKSLTHVSKHKSYKTSGEKKCLSRKSMASSVSKSHPTTSHMGEFCNQEHPESQLPVSSTSQSTSQSVYYNSSVSNPSLSEEHQPFSGKTAYLFSPDHSDEKLIEKENQIDTAFLSSTSKYEKLEKHSANHNVKDATKENSCDANEVINESNSVSLSCIKENINSSTGNDCDATCIGHTKAKTDVLISVLDSNVKHFLNDLYQQGNLILSDCKRNLEVKWTDPIERPKQNIITGNFLMGPLNLTLIASKKYSIPQLSAAAVTDSEGESSKSYLDKQRILTVDSFAASSTVPHCEQSCREKELLKTEQCSSGNCLHTDGNETNVTENYELDVASGTEEDKSYGENIVELSSSDSSLLLKDNVKGSSSETCIVKKDTEDRITWKVKQAEKAKDSVYKRSMTEGSTVNTEYKNQKNQISEESCLNEKIITTNLIDSHLSTKNTTTESVPLKNTVSNPLNKREKKGEIKVSKDSQSDLTLHSEIAYISKPGILGVNHTPILPAHSETCKVPTLLKKPASYVSDFKEKHCSANHTALIANLSQILQRADEASSLQILQEETKVCLNILPLFVEAFERKQECSVEQILISRELLVDQNLWNNCKHTLKPCAVDTLVELQMMMETIQFIENKKRHLEGEPTLRSLLWYDETLYAELLGKPRGFQQQSNFYPGFQGRLKYNAFCELQTYHDQLVELLEETKREKNSYYVFLKYKRQVNECEAIMEHCSDCFDFSLSVPFTCGVNFGDSLEDLEILRKSTLKLINVCGDSPKVHSYPGKQDHLWIIIEMISSKVNFIKNNEAVRVKISLYGLEHIFFDAAKNLVWKERTQSFSKKYSQKKDEERLLRVNKCAFSKLQKIYDTLSKDLNNEPISPIGLEEDTIIASRKSDHPINEATISIENSKFNSNLLAHPDICCISEILDQAEFADLKKLQDLTLRCTDHLEILKKYFQMLQDNNMDNIFITEENVLDVVINHSHEAIILKPEAIEMYIEIVMVSETIHFLKNSIAKKLDKQRFRGMLWFDLSLLPELVQCQEKMASFSFLKDNSTDVCLWKVIETAVSELKKDLDIICKYNEAVNCSYAIHLLSRELQELSEIKKLLKKSKYFISTYIDFVPYIASINYGSTVTELEYNYNQFSTLLKNVMSAPRKDLGKMAHIRKVMKTIEHMKMICTKNAELTISFFLCQMLYNRRKILQLKRKEKMNIHIVKPGENNNKFSISTMLPPVSECINKNISNSSKKRPSTVDKCEDSQEQQQDTTVSSCKKLKVDMKDVTKINREKATFKHPRTTGSHPKSENKIVPSSCDSLKRNHLTPKKVEMQRSLPGSLLPLENPKDTCASKSESKIDLTVSSDHFSGQQENLNSMKKRNVNFSAAETKSDKKDCAAFAICDQKSVHGTFSPDHGTLLQKFLKNSPDPTQKSCLSDINPETDVSLVPDASVLSKPIFCFVKDVHPDLEMNDTVFELQDNDIVNSSIKNSSCMTSPEPICIQNKIPTLQINKLQPTETESEDKYMKDTLNPNTVHTFGASGHITLNVNQGAEYSLSEQQNDKNSKVLMQNAATYWNELPQSACNPTYNSSEHLFGTSYPYSAWCVYQYSNSNGNAITQTYQGITSYEVQPSPSGLLTTVASTAQGTHSNLLYSQYFTYFAGEPQANGFVPVNGYFQSQIPASNFRQPIFSQYASHQPLPQATYPYLPNRFVPPEVPWVYAPWHQESFHPGH

SEQ ID NO: 24481 - protein, 305 aa, Homo sapiens
MHGSGVTFHTYSNSTIGYQQSTSFTDPFFIVETLCIIWFSFEFLVRFFACPSKAGFFTNIMNIIDIVAIIPYFITLGTELAEKPEDAQQGQQAMSLAILRVIRLVRVFRIFKLSRHSKGLQILGQTLKASMRELGLLIFFLFIGVILFSSAVYFAEADERESQFPSIPDAFWWAVVSMTTVGYGDMVPTTIGGKIVGSLCAIAGVLTIALPVPVIVSNFNYFYHRETEGEEQAQYLQVTSCPKIPSSPDLKKSRSASTISKSDYMEIQEGVNNSNEDFREENLKTANCTLANTNYVNITKMLTDV

SEQ ID NO: 24482 - protein, 1142 aa, Homo sapiens
MDALIIPVTMEVPCDSRGQRMWWAFLASSMVTFFGGLFIILLWRTLKYLWTVCCHCGGKTKEAQKINNGSSQADGTLKPVDEKEEAVAAEVGWMTSVKDWAGVMISAQTLTGRVLVVLVFALSIGALVIYFIDSSNPIESCQNFYKDFTLQIDMAFNVFFLLYFGLRFIAANDKLWFWLEVNSVVDFFTVPPVFVSVYLNRSWLGLRFLRALRLIQFSEILQFLNILKTSNSIKLVNLLSIFISTWLTAAGFIHLVENSGDPWENFQNNQALTYWECVYLLMVTMSTVGYGDVYAKTTLGRLFMVFFILGGLAMFASYVPEIIELIGNRKKYGGSYSAVSGRKHIVVCGHITLESVSNFLKDFLHKDRDDVNVEIVFLHNISPNLELEALFKRHFTQVEFYQGSVLNPHDLARVKIESADACLILANKYCADPDAEDASNIMRVISIKNYHPKIRIITQMLQYHNKAHLLNIPSWNWKEGDDAICLAELKLGFIAQSCLAQGLSTMLANLFSMRSFIKIEEDTWQKYYLEGVSNEMYTEYLSSAFVGLSFPTVCELCFVKLKLLMIAIEYKSANRESRILINPGNHLKIQEGTLGFFIASDAKEVKRAFFYCKACHDDITDPKRIKKCGCKRLIYFEDEQPSTLSPKKKQRNGGMRNSPNTSPKLMRHDPLLIPGNDQIDNMDSNVKKYDSTGMFHWCAPKEIEKVILTRSEAAMTVLSGHVVVCIFGDVSSALIGLRNLVMPLRASNFHYHELKHIVFVGSIEYLKREWETLHNFPKVSILPGTPLSRADLRAVNINLCDMCVILSANQNNIDDTSLQDKECILASLNIKSMQFDDSIGVLQANSQGFTPPGMDRSSPDNSPVHGMLRQPSITTGVNIPIITELAKPGKLPLVSVNQEKNSGTHILMITELVNDTNVQFLDQDDDDDPDTELYLTQPFACGTAFAVSVLDSLMSATYFNDNILTLIRTLVTGGATPELEALIAEENALRGGYSTPQTLANRDRCRVAQLALLDGPFADLGDGGCYGDLFCKALKTYNMLCFGIYRLRDAHLSTPSQCTKRYVITNPPYEFELVPTDLIFCLMQFDHNAGQSRASLSHSSHSSQSSSKKSSSVHSIPSTANRQNRPKSRESRDKQKKEMVYR

SEQ ID NO: 24483 - protein, 597 aa, Homo sapiens
QLEVKLVLLWKHNMRIEYVAMAPWPLEPEGPRVTRVEVTMEGGYDILHDVSCALRQPIRSLYRTHVIRRFWNTLQSINQTDQMLAHLQSFSSVPEHFTLPDSTKSGVPLFYIPPGSTTPVLSLQPSGSDSSHAQFAAYWKPVLSMDANSWQRWLHMHRLVLILEHDTPIPKHLHTPGSNGRYSTIQCRISHSSLTSLLRDWSSFVLVEGYSYVKLLSSAPDQPPNSFYMVRIISKAPCMVLRLGFPIGTPAPARHKIVSGLREEILRLRFPHRVQSKEPTPKVKRKGLGGAGGGSSPSKSPPVLGPQQALSDRPCLVVLHKPLDKLLIRYEKLPLDYRAPFLLTLEPPGPLPLVSGRSASSSLASLSRYLYHQRWLWSVPSGLAPALPLSAIAQLLSILTEVRLSEGFHFACSGEGIINMVLELPIQNEPPGQAAAEEKHTCVVQYILFPPHSTSTKDSFSTDDDNDVEVEALEGDSELNLVTEVWVEPQYGRVGPGPGIWKHLQDLTYSEIPQALHPRDAACIGSMLSFEYLIQLCQSKEWGPLPPEPRVSDGLDQGGDTCVHEIPFHFDLMGLLPQCQQLQMFFLLLARAAWGRS

SEQ ID NO: 24484 - protein, 1160 aa, Homo sapiens
MGDMTNSDFYSKNQRNESSHGGEFGCTMEELRSLMELRGTEAVVKIKETYGDTEAICRRLKTSPVEGLPGTAPDLEKRKQIFGQNFIPPKKPKTFLQLVWEALQDVTLIILEIAAIISLGLSFYHPPGEGNEGCATAQGGAEDEGEAEAGWIEGAAILLSVICVVLVTAFNDWSKEKQFRGLQSRIEQEQKFTVVRAGQVVQIPVAEIVVGDIAQVKYGDLLPADGLFIQGNDLKIDESSLTGESDQVRKSVDKDPMLLSGTHVMEGSGRMLVTAVGVNSQTGIIFTLLGAGGEEEEKKDKKAKQQDGAAAMEMQPLKSAEGGDADDRKKASMHKKEKSVLQGKLTKLAVQIGKAGLVMSAITVIILVLYFTVDTFVVNKKPWLPECTPVYVQYFVKFFIIGVTVLVVAVPEGLPLAVTISLAYSVKKMMKDNNLVRHLDACETMGNATAICSDKTGTLTTNRMTVVQAYVGDVHYKEIPDPSSINTKTMELLINAIAINSAYTTKILPPEKEGALPRQVGNKTECGLLGFVLDLKQDYEPVRSQMPEEKLYKVYTFNSVRKSMSTVIKLPDESFRMYSKGASEIVLKKCCKILNGAGEPRVFRPRDRDEMVKKVIEPMACDGLRTICVAYRDFPSSPEPDWDNENDILNELTCICVVGIEDPVRPEVPEAIRKCQRAGITVRMVTGDNINTARAIAIKCGIIHPGEDFLCLEGKEFNRRIRNEKGEIEQERIDKIWPKLRVLARSSPTDKHTLVKGIIDSTHTEQRQVVAVTGDGTNDGPALKKADVGFAMGIAGTDVAKEASDIILTDDNFSSIVKAVMWGRNVYDSISKFLQFQLTVNVVAVIVAFTGACITQDSPLKAVQMLWVNLIMDTFASLALATEPPTETLLLRKPYGRNKPLISRTMMKNILGHAVYQLALIFTLLFVGEKMFQIDSGRNAPLHSPPSEHYTIIFNTFVMMQLFNEINARKIHGERNVFDGIFRNPIFCTIVLGTFAIQIVIVQFGGKPFSCSPLQLDQWMWCIFIGLGELVWGQVIATIPTSRLKFLKEAGRLTQKEEIPEEELNEDVEEIDHAERELRRGQILWFRGLNRIQTQIEVVNTFKSGASFQGALRRQSSVTSQSQDVANLSSPSRVSLSNALSSPTSLPPAAAGHPRREGVP

SEQ ID NO: 24485 - protein, 225 aa, Homo sapiens
DPNHSKMRLRDHSSERSEVLKHHTDMSSSSYLAATHHPPHSPLVRQLSTSSDSPAPASSSSQVTASTSPVRRRRGESSFDINNIVIPMSVAATTRVEKLQYKEILTPSWREVDLQSLKGSPDEENEEIEDLSDAAFAALHAKCEEMERARWLWTTSVPPQRRGSRSYRSSDGRTTPQLGSANPSTPQPASPDVSSSHSLSEYSHGQSPRSPISPELHSAPLTPVA

SEQ ID NO: 24486 - protein, 713 aa, Homo sapiens
MFANLKYVSLGILVFQTTSLVLTMRYSRTLKEEGPRYLSSTAVVVAELLKIMACILLVYKDSKCSLRALNRVLHDEILNKPMETLKLAIPSGIYTLQNNLLYVALSNLDAATYQVTYQLKILTTALFSVSMLSKKLGVYQWLSLVILMTGVAFVQWPSDSQLDSKELSAGSQFVGLMAVLTACFSSGFAGVYFEKILKETKQSVWIRNIQLGFFGSIFGLMGVYIYDGELVSKNGFFQGYNRLTWIVVVLQPQGIGSPSVYHAVIVIFLEFFAWGLLTAPTLVVLHETFPKHTFLMNGLIQGVKGLLSFLSAPLIGALSDVWGRKSFLLLTVFFTCAPIPLMKISPWWYFAVISVSGVFAVTFSVVFAYVADITQEHERSMAYGLVSATFAASLVTSPAIGAYLGRVYGDSLVVVLATAIALLDICFILVAVPESLPEKMRPASWGAPISWEQADPFASLKKVGQDSIVLLICITVFLSYLPEAGQYSSFFLYLRQIMKFSPESVAAFIAVLGILSIIAQTIVLSLLMRSIGNKNTILLGLGFQILQLAWYGFGSEPWMMWAAGAVAAMSSITFPAVSALVSRTADADQQGVVQGMITGIRGLCNGLGPALYGFIFYIFHVELKELPITGTDLGTNTSPQHHFEQNSIIPGPPFLFGACSVLLALLVALFIPEHTNLSLRSSSWRKHCGSHSHPHNTQAPGEAKEPLLQDTNV

SEQ ID NO: 24487 - protein, 109 aa, Homo sapiens
SNCQMRTLDSGIGTFPLPDSGNRSTGRYLCQPDSPEDAEPLLPLQSALSAVSSMRAQTLEREVPSSTDGQRPADSAIVHSTSDPIMTARGMRPLQSRLPKPASSEIETT

SEQ ID NO: 24488 - protein, 400 aa, Homo sapiens
MQNSHSGVNQLGGVFVNGRPLPDSTRQKIVELAHSGARPCDISRILQTHADAKVQVLDNQNVSNGCVSKILGRYYETGSIRPRAIGGSKPRVATPEVVSSINRVLRNLASEKQQMGADGMYDKLRMLNGQTGSWGTRPGWYPGTSVPGQPTQDGCQQQEGGGENTNSISSNGEDSDEAQMRLQLKRKLQRNRTSFTQEQIEALEKEFERTHYPDVFARERLAAKIDLPEARIQVWFSNRRAKWRREEKLRNQRRQASNTPSHIPISSSFSTSVYQPIPQPTTPVSSFTSGSMLGRTDTALTNTYSALPPMPSFTMANNLPMQPPVPSQTSSYSCMLPTSPSVNGRSYDTYTPPHMQTHMNSQPMGTSGTTSTGLISPGVSVPVQVPGSEPDMSQYWPRLQ

SEQ ID NO: 24489 - protein, 221 aa, Homo sapiens
MRLQLKRKLQRNRTSFTQEQIEALEKEFERTHYPDVFARERLAAKIDLPEARIQVWFSNRRAKWRREEKLRNQRRQASNTPSHIPISSSFSTSVYQPIPQPTTPVSSFTSGSMLGRTDTALTNTYSALPPMPSFTMANNLPMQPPVPSQTSSYSCMLPTSPSVNGRSYDTYTPPHMQTHMNSQPMGTSGTTSTGLISPGVSVPVQVPGSEPDMSQYWPRLQ

SEQ ID NO: 24490 - protein, 425 aa, Homo sapiens
MAAVATCGSVAASTGSAVATASKSNVTSFQRRGPRASVTNDSGPRLVSIAGTRPSVRNGQLLVSTGLPALDQLLGGGLAVGTVLLIEEDKYNIYSPLLFKYFLAEGIVNGHTLLVASAKEDPANILQELPAPLLDDKCKKEFDEDVYNHKTPESNIKMKIAWRYQLLPKMEQIGPVSSSRFGHYYDASKRMPQELIEASNWHGFFLPEKISSTLKVEPCSLTPGYTKLLQFIQNIIYEEGFDGSNPQKKQRNILRIGIQNLGSPLWGDDICCAENGGNSHSLTKFLYVLRGLLRTSLSACIITMPTHLIQNKAIIARVTTLSDVVVGLESFIGSERETNPLYKDYHGLIHIRQIPRLNNLICDESDVKDLAFKLKRKLFTIECITKLRSYDLRRQRYFLSRHLQRKFSIKKNPYFKKPHTLKKIY

SEQ ID NO: 24491 - protein, 284 aa, Homo sapiens
MFANLKYVSLGILVFQTTSLVLTMRYSRTLKEEGPRYLSSTAVVVAELLKIMACILLVYKDSKCSLRALNRVLHDEILNKPMETLKLAIPSGIYTLQNNLLYVALSNLDAATYQWPSDSQLDSKELSAGSQFVGLMAVLTACFSSGFAGVYFEKILKETKQSVWIRNIQLGFFGSIFGLMGVYIYDGELVSKNGFFQGYNRLTWIVVVLQALGGLVIAAVIKYADNILKGFATSLSIILSTLISYFWLQDFVPTSVFFLGAILVITATFLYGYDPKPAGNPTKA

SEQ ID NO: 24492 - protein, 642 aa, Homo sapiens
MPRLTQRVAVSPEYLLLPPRHGGCDKISWLPEGKVFSNVHREKISSKFFKESILKKVFCSQQMRWEGSDDQKGTSSYTFPGTRKKAAAEGAPSKPSATHAEALGPRGGAPGEHAGEDTWAFARILRKQSNSYNKMGRRNENCANSLRVSNISQENLSHWNLDSEVPVSENKNLPAGRDGAAGGKINKNYLEIPVEQLMLEPNLSVHSQKSTQNSKQGIFQLWNCPLNEGSTIEKREFKKSSVETGFNVINHPIRVFTLNHPLTIASVDKQVGPYPGLPMPLGLCWPYADGDFFKNRNEIHVSSCSTIENNDGETLPAPNWNLKHGNSSVEENFTDESDLSENEKTNDTLLSYFKKVDLNLKPETIKNVEEPFTEEPNEVFPYPDFLPPPFSALDLHNLALSKSDNWKVTVDPAETSVEHLITRLLELERLQHMTIQKERPRLQTTFCTPAVTERPSSSKATPKVRQPKLCDSLSLQIPCVDKSQEKSKNNSGSCKLEQNALKRNWSNAGKYRWNSRPLSLKSSSTPKQLIETYDKNPKSSILSPCQELSFKPTIGHTNQSMVKMVSTRCLPWRSPMPVSPIPLTFPENQKEEIKAPKRNFGTKKKLYRQNIVLNRPFSIQKLNCLSPSLIAKDKCCSPIEQK

SEQ ID NO: 24493 - protein, 936 aa, Homo sapiens
MLLFFTLGLLIHFVFFASIFDIYFTSPLVHGMTPQFTPLPPPARRLVLFVADGLRADALYELDENGNSRAPFIRNIIMHEGSWGISHTRVPTESRPGHVALIAGFYEDVSAVAKGWKENPVEFDSLFNESKYTWSWGSPDILPMFAKGASGDHVYTYSYDAKREDFGAQDATKLDTWVFDNVKDFFHHARNNQSLFSKINEEKIVFFLHLLGIDTNGHAHRPSSRDYKHNIKKVDDGVKEIVSMFNHFYGNDGKTTFIFTSDHGMTDWGSHGAGHPSETLTPLVTWGAGIKYPQRVSAQQFDDAFLKEWRLENWKRLDVNQADIAPLMTSLIGVPFPLNSVGILPVDYLNNTDLFKAESMFTNAVQILEQFKVKMTQKKEVTLPFLFTPFKLLSDSKQFNILRKARSYIKHRKFDEVVSLCKELIHLALKGLSYYHTYDRFFLGVNVVIGFVGWISYASLLIIKSHSNLIKGVSKEVKKPSHLLPCSFVAIGILVAFFLLIQACPWTYYVYGLLPLPIWYAVLREFQVIQDLVVSVLTYPLSHFVGYLLAFTLGIEVLVLSFFYRYMLTAGLTAFAAWPFLTRLWTRAKMTSLSWTFFSLLLAVFPLMPVVGRKPDISLVMGAGLLVLLLSLCVVTSLMKRKDSFIKEELLVHLLQVLSTVLSMYVVYSTQSSLLRKQGLPLMNQIISWATLASSLVVPLLSSPVLFQRLFSILLSLMSTYLLLSTGYEALFPLVLSCLMFVWINIEQETLQQSGVCCKQKLTSIQFSYNTDITQFRQLYLDDIRRAFFLVFFLVTAFFGTGNIASINSFDLASVYCFLTVFSPFMMGALMMWKILIPFVLVMCAFEAVQLTTQLSSKSLFLIVLVISDIMALHFFFLVKDYGSWLDIGTRQLLACTAWLFMYISASPNRLWMLSDPGLDLNLLHAIRAWYVKGTP

SEQ ID NO: 24494 - protein, 325 aa, Homo sapiens
MAVMAPRTLLLLLSGALALTQTWAGSHSMRYFFTSVSRPGRGEPRFIAVGYVDDTQFVRFDSDAASQRMEPRAPWIEQEGPEYWDQETRNVKAQSQTDRVDLGTLRGYYNQSEAGSHTIQIMYGCDVGSDGRFLRGYRQDAYDGKDYIALNEDLRSWTAADMAAQITKRKWEAAHEAEQLRAYLDGTCVEWLRRYLENGKETLQRTDPPKTHMTHHPISDHEATLRCWALGFYPAEITLTWQRDGEDQTQDTELVETRPAGDGTFQKWAAVVVPSGEEQRYTCHVQHEGLPKPLTLRWDRKGGSYTQAASSDSAQGSDVSLTACK

SEQ ID NO: 24495 - protein, 1246 aa, Homo sapiens
MANGGGGGGGSSGGGGGGGGSSLRMSSNIHANHLSLDASSSSSSSSSSSSSSSSSSSSSSVHEPKMDALIIPVTMEVPCDSRGQRMWWAFLASSMVTFFGGLFIILLWRTLKYLWTVCCHCGGKTKEAQKINNGSSQADGTLKPVDEKEEAVAAEVGWMTSVKDWAGVMISAQTLTGRVLVVLVFALSIGALVIYFIDSSNPIESCQNFYKDFTLQIDMAFNVFFLLYFGLRFIAANDKLWFWLEVNSVVDFFTVPPVFVSVYLNRSWLGLRFLRALRLIQFSEILQFLNILKTSNSIKLVNLLSIFISTWLTAAGFIHLVENSGDPWENFQNNQALTYWECVYLLMVTMSTVGYGDVYAKTTLGRLFMVFFILGGLAMFASYVPEIIELIGNRKKYGGSYSAVSGRKHIVVCGHITLESVSNFLKDFLHKDRDDVNVEIVFLHNISPNLELEALFKRHFTQVEFYQGSVLNPHDLARVKIESADACLILANKYCADPDAEDASNIMRVISIKNYHPKIRIITQMLQYHNKAHLLNIPSWNWKEGDDAICLAELKLGFIAQSCLAQGLSTMLANLFSMRSFIKIEEDTWQKYYLEGVSNEMYTEYLSSAFVGLSFPTVCELCFVKLKLLMIAIEYKSANRESRILINPGNHLKIQEGTLGFFIASDAKEVKRAFFYCKACHDDITDPKRIKKCGCKRLIYSKMSIYKRMRRACCFDCGRSERDCSCMSGRVRGNVDTLERAFPLSSVSVNDCSTSFRAFEDEQPSTLSPKKKQRNGGMRNSPNTSPKLMRHDPLLIPGNDQIDNMDSNVKKYDSTGMFHWCAPKEIEKVILTRSEAAMTVLSGHVVVCIFGDVSSALIGLRNLVMPLRASNFHYHELKHIVFVGSIEYLKREWETLHNFPKVSILPGTPLSRADLRAVNINLCDMCVILSANQNNIDDTSLQDKECILASLNIKSMQFDDSIGVLQANSQGFTPPGMDRSSPDNSPVHGMLRQPSITTGVNIPIITELVNDTNVQFLDQDDDDDPDTELYLTQPFACGTAFAVSVLDSLMSATYFNDNILTLIRTLVTGGATPELEALIAEENALRGGYSTPQTLANRDRCRVAQLALLDGPFADLGDGGCYGDLFCKALKTYNMLCFGIYRLRDAHLSTPSQCTKSKKSSSVHSIPSTANRQNRPKSRESRDKQNATRMNRMGQAEKKWFTDEPDNAYPRNIQIKPMSTHMANQINQYKSTSSLIPPIREVEDEC

SEQ ID NO: 24496 - protein, 474 aa, Homo sapiens
GSSRLSPGTDSSSNLGGVKLEGKKSPLSSILFSALDSDTRITALLRRQADIESRARRLQKRLQVVQAKQVERHIQHQLGGFLEKTLSKLPNLESLRPRSQLMLTRKAEAALRKAASETTTSEGLSNFLKSNSISEELERFTASGIANLRCSEQAFDSDVTDSSSGGESDIEEEELTRADPEQRHVPLRRRSEWKWAADRAAIVSRWNWLQAHVSDLEYRIRQQTDIYKQIRANKIESVSQPLENHGAPIIGHISESLSTKSCGALRPVNGVINTLQPVLADHIPGDSSDAEEQLHKKQRLNLVSSSSDGTCVAARTRPVLSCKKRRLVRPNSIVPLSKKVHRNSTIRPGCDVNPSCALCGSGSINTMPPEIHYEAPLLERLSQLDSCVHPVLAFPDDVPTSLHFQSMLKSQWQNKPFDKIKPPKKLSLKHRAPMPGSLPDSARKDRHKLVSSFLTTAMLKHHTDMSSSSYLAAT

SEQ ID NO: 24497 - protein, 269 aa, Homo sapiens
MFANLKYVSLGILVFQTTSLVLTMRYSRTLKEEGPRYLSSTAVVVAELLKIMACILLVYKDSKCSLRALNRVLHDEILNKPMETLKLAIPSGIYTLQNNLLYVALSNLDAATYQVTYQLKILTTALFSVSMLSKKLGVYQWLSLVILMTGVAFVQWPSDSQLDSKELSAGSQFVGLMAVLTACFSSGFAGVYFEKILKETKQSVWIRNIQLGFFGSIFGLMGVYIYDGELVSKNGFFQGYNRLTWIVVVLQCLFPWSHPCNNSYFFVWL

SEQ ID NO: 24498 - protein, 327 aa, Homo sapiens
MTMAGGRRGLVAPQNTFLENIVRRSNDTNFVLGNAQIVDWPIVYSNDGFCKLSGYHRAEVMQKSSTCSFMYGELTDKDTIEKVRQTFENYEMNSFEILMYKKNRTPVWFFVKIAPIRNEQDKVVLFLCTFSDITAFKQPIEDDSCKGWGKFARLTRALTSSRGVLQQLAPSVQKGENVHKHSRLAEVLQLGSDILPQYKQEAPKTPPHIILHYCVFKTTWDWIILILTFYTAILVPYNVSFKTRQNNVAWLVVDSIVDVIFLVDIVLNFHTTFVGPAGEVISDPKLIRMNYLKTWFVIDLLSCLPYDVINAFENVDEHFSMPPSSGM

SEQ ID NO: 24499 - protein, 1178 aa, Homo sapiens
MANGGGGGGGSSGGGGGGGGSSLRMSSNIHANHLSLDASSSSSSSSSSSSSSSSSSSSSSVHEPKMDALIIPVTMEVPCDSRGQRMWWAFLASSMVTFFGGLFIILLWRTLKYLWTVCCHCGGKTKEAQKINNGSSQADGTLKPVDEKEEAVAAEVGWMTSVKDWAGVMISAQTLTGRVLVVLVFALSIGALVIYFIDSSNPIESCQNFYKDFTLQIDMAFNVFFLLYFGLRFIAANDKLWFWLEVNSVVDFFTVPPVFVSVYLNRSWLGLRFLRALRLIQFSEILQFLNILKTSNSIKLVNLLSIFISTWLTAAGFIHLVENSGDPWENFQNNQALTYWECVYLLMVTMSTVGYGDVYAKTTLGRLFMVFFILGGLAMFASYVPEIIELIGNRKKYGGSYSAVSGRKHIVVCGHITLESVSNFLKDFLHKDRDDVNVEIVFLHNISPNLELEALFKRHFTQVEFYQGSVLNPHDLARVKIESADACLILANKYCADPDAEDASNIMRVISIKNYHPKIRIITQMLQYHNKAHLLNIPSWNWKEGDDAICLAELKLGFIAQSCLAQGLSTMLANLFSMRSFIKIEEDTWQKYYLEGVSNEMYTEYLSSAFVGLSFPTVCELCFVKLKLLMIAIEYKSANRESRILINPGNHLKIQEGTLGFFIASDAKEVKRAFFYCKACHDDITDPKRIKKCGCKRLEDEQPSTLSPKKKQRNGGMRNSPNTSPKLMRHDPLLIPGNDQIDNMDSNVKKYDSTGMFHWCAPKEIEKVILTRSEAAMTVLSGHVVVCIFGDVSSALIGLRNLVMPLRASNFHYHELKHIVFVGSIEYLKREWETLHNFPKVSILPGTPLSRADLRAVNINLCDMCVILSANQNNIDDTSLQDKECILASLNIKSMQFDDSIGVLQANSQGFTPPGMDRSSPDNSPVHGMLRQPSITTGVNIPIITELVNDTNVQFLDQDDDDDPDTELYLTQPFACGTAFAVSVLDSLMSATYFNDNILTLIRTLVTGGATPELEALIAEENALRGGYSTPQTLANRDRCRVAQLALLDGPFADLGDGGCYGDLFCKALKTYNMLCFGIYRLRDAHLSTPSQCTKRYVITNPPYEFELVPTDLIFCLMQFDHNAGQSRASLSHSSHSSQSSSKKSSSVHSIPSTANRQNRPKSRESRDKQNRKEMVYR

SEQ ID NO: 24500 - protein, 1115 aa, Homo sapiens
MAQALLVPPGPESFRLFTRESLAAIEKRAAEEKAKKPKKEQDNDDENKPKPNSDLEAGKNLPFIYGDIPPEMVSEPLEDLDPYYINKKTFIVMNKGKAIFRFSATSALYILTPLNPVRKIAIKILVHSLFSMLIMCTILTNCVFMTLSNPPDWTKNVEYTFTGIYTFESLIKILARGFCLEDFTFLRDPWNWLDFSVIVMAYVTEFVSLGNVSALRTFRVLRALKTISVIPGLKTIVGALIQSVKKLSDVMILTVFCLSVFALIGLQLFMGNLRNKCLQWPPSDSAFETNTTSYFNGTMDSNGTFVNVTMSTFNWKDYIGDDSHFYVLDGQKDPLLCGNGSDAGQCPEGYICVKAGRNPNYGYTSFDTFSWAFLSLFRLMTQDYWENLYQLTLRAAGKTYMIFFVLVIFLGSFYLVNLILAVVAMAYEEQNQATLEEAEQKEAEFQQMLEQLKKQQEEAQAVAAASAASRDFSGIGGLGELLESSSEASKLSSKSAKEWRNRRKKRRQREHLEGNNKGERDSFPKSESEDSVKRSSFLFSMDGNRLTSDKKFCSPHQSLLSIRGSLFSPRRNSKTSIFSFRGRAKDVGSENDFADDEHSTFEDSESRRDSLFVPHRHGERRNSNVSQASMSSRMVPGLPANGKMHSTVDCNGVVSLGTTTETEVRKRRLSSYQISMEMLEDSSGRQRAVSIASILTNTMEELEESRQKCPPCWYRFANVFLIWDCCDAWLKVKHLVNLIVMDPFVDLAITICIVLNTLFMAMEHYPMTEQFSSVLTVGNLVFTGIFTAEMVLKIIAMDPYYYFQEGWNIFDGIIVSLSLMELGLSNVEGLSVLRSFRLLRVFKLAKSWPTLNMLIKIIGNSVGALGNLTLVLAIIVFIFAVVGMQLFGKSYKECVCKINDDCTLPRWHMNDFFHSFLIVFRVLCGEWIETMWDCMEVAGQTMCLIVFMLVMVIGNLVVLNLFLALLLSSFSSDNLAATDDDNEMNNLQIAVGRMQKGIDYVKNKMRECFQKAFFRKPKVIEIHEGNKIDSCMSNNTGIEISKELNYLRDGNGTTSGVGTGSSVEKYVIDENDYMSFINNPSLTVTVPIAVGESDFENLNTEEFSSESELEESKEE

SEQ ID NO: 24501 - protein, 134 aa, Homo sapiens
GAEPGRVDTFWYKFLKREPGGELSWEGNGPHHDRCCTYNENNLVDGVYCLPIGHWIEATGHTNEMKHTTDFYFNIAGHQAMHYSRSRDQRPEFQLCLKMVLSLIFVAQDVHSTQESSSTAAIFGNTHILWPVYK

SEQ ID NO: 24502 - protein, 1196 aa, Homo sapiens
MDALIIPVTMEVPCDSRGQRMWWAFLASSMVTFFGGLFIILLWRTLKYLWTVCCHCGGKTKEAQKINNGSSQADGTLKPVDEKEEAVAAEVGWMTSVKDWAGVMISAQTLTGRVLVVLVFALSIGALVIYFIDSSNPIESCQNFYKDFTLQIDMAFNVFFLLYFGLRFIAANDKLWFWLEVNSVVDFFTVPPVFVSVYLNRSWLGLRFLRALRLIQFSEILQFLNILKTSNSIKLVNLLSIFISTWLTAAGFIHLVENSGDPWENFQNNQALTYWECVYLLMVTMSTVGYGDVYAKTTLGRLFMVFFILGGLAMFASYVPEIIELIGNRKKYGGSYSAVSGRKHIVVCGHITLESVSNFLKDFLHKDRDDVNVEIVFLHNISPNLELEALFKRHFTQVEFYQGSVLNPHDLARVKIESADACLILANKYCADPDAEDASNIMRVISIKNYHPKIRIITQMLQYHNKAHLLNIPSWNWKEGDDAICLAELKLGFIAQSCLAQGLSTMLANLFSMRSFIKIEEDTWQKYYLEGVSNEMYTEYLSSAFVGLSFPTVCELCFVKLKLLMIAIEYKSANRESRILINPGNHLKIQEGTLGFFIASDAKEVKRAFFYCKACHDDITDPKRIKKCGCKRLIYFEDEQPSTLSPKKKQRNGGMRNSPNTSPKLMRHDPLLIPGNDQIDNMDSNVKKYDSTGMFHWCAPKEIEKVILTRSEAAMTVLSGHVVVCIFGDVSSALIGLRNLVMPLRASNFHYHELKHIVFVGSIEYLKREWETLHNFPKVSILPGTPLSRADLRAVNINLCDMCVILSANQNNIDDTSLQDKECILASLNIKSMQFDDSIGVLQANSQGFTPPGMDRSSPDNSPVHGMLRQPSITTGVNIPIITELAKPGKLPLVSVNQEKNSGTHILMITELVNDTNVQFLDQDDDDDPDTELYLTQPFACGTAFAVSVLDSLMSATYFNDNILTLIRTLVTGGATPELEALIAEENALRGGYSTPQTLANRDRCRVAQLALLDGPFADLGDGGCYGDLFCKALKTYNMLCFGIYRLRDAHLSTPSQCTKRYVITNPPYEFELVPTDLIFCLMQFDHNAGQSRASLSHSSHSSQSSSKKSSSVHSIPSTANRQNRPKSRESRDKQNATRMNRMGQAEKKWFTDEPDNAYPRNIQIKPMSTHMANQINQYKSTSSLIPPIREVEDEC

SEQ ID NO: 24503 - protein, 382 aa, Homo sapiens
IILLWRTLKYLWTVCCHCGGKTKEAQKINNGSSQADGTLKPVDEKEEAVAAEVGWMTSVKDWAGVMISAQTLTGRVLVVLVFALSIGALVIYFIDSSNPIESCQNFYKDFTLQIDMAFNVFFLLYFGLRFIAANDKLWFWLEVNSVVDFFTVPPVFVSVYLNRSWLGLRFLRALRLIQFSEILQFLNILKTSNSIKLVNLLSIFISTWLTAAGFIHLVENSGDPWENFQNNQALTYWECVYLLMVTMSTVGYGDVYAKTTLGRLFMVFFILGGLAMFASYVPEIIELIGNRKKYGGSYSAVSGRKHIVVCGHITLESVSNFLKDFLHKDRDDVNVEIVFLHKLRKTHGRNTTWKESQMKCTQNISPVPSWVCPSLLFVSCVL

SEQ ID NO: 24504 - protein, 426 aa, Homo sapiens
QYKQEAPKTPPHIILHYCVFKTTWDWIILILTFYTAILVPYNVSFKTRQNNVAWLVVDSIVDVIFLVDIVLNFHTTFVGPAGEVISDPKLIRMNYLKTWFVIDLLSCLPYDVINAFENVDEGISSLFSSLKVVRLLRLGRVARKLDHYIEYGAAVLVLLVCVFGLAAHWMACIWYSIGDYEIFDEDTKTIRNNSWLYQLAMDIGTPYQFNGSGSGKWEGGPSKNSVYISSLYFTMTSLTSVGFGNIAPSTDIEKIFAVAIMMIGSLLYATIFGNVTTIFQQMYANTNRYHEMLNSVRDFLKLYQVPKGLSERVMDYIVSTWSMSRGIDTEKVLQICPKDMRADICVHLNRKVFKEHPAFRLASDGCLRALAMEFQTVHCAPGDLIYHAGESVDSLCFVVSGSLEVIQDDEVVAILDCVPEDQRCET

SEQ ID NO: 24505 - protein, 277 aa, Homo sapiens [sequence omitted]

SEQ ID NO: 24506 - protein, 380 aa, Homo sapiens
MYVNSIGPVNAINMEYTIDIFFAQTWYDRRLKFNSTIKVLRLNSNMVGKIWIPDTFFRNSKKADAHWITTPNRMLRIWNDGRVLYTLRLTIDAECQLQLHNFPMDEHSCPLEFSSYGYPREEIVYQWKRSSVEVGDTRSWRLYQFSFVGLRNTTEVVKTTSGDYVVMSVYFDLSRRMGYFTIQTYIPCTLIVVLSWVSFWINKDAVPARTSLGITTVLTMTTLSTIARKSLPKVSYVTAMDLFVSVCFIFVFSALVEYGTLHYFVSNRKPSKDKDKKKKNPLLRMFSFKAPTIDIRPRSATIQMNNATHLQERDEEYGYECLDGKDCASFFCCFEDCRTGAWRHGRIHIRIAKMDSYARIFFPTAFCLFNLVYWVSYLYL

SEQ ID NO: 24507 - protein, 224 aa, Homo sapiens
MRFRFGVVVPPAVAGARPELLVVGSRPELGRWEPRGAVRLRPAGTAAGDGALALQEPGLWLGEVELAAEEAAQDGAEPGRVDTFWYKFLKREPGGELSWEGNGPHHDRCCTYNENNLVDGVYCLPIGHWIEATGHTNEMKHTTDFYFNIAGHQAMHYSRPSTDAAPGGVPAACAAGEGTHRVRALQRWGGPLHRGCLRLAPVCDGLESEEGAVFPHGQEAGCLH

SEQ ID NO: 24508 - protein, 314 aa, Homo sapiens
MAPTNLTSAPVFLLLGLVDGTDAHPLLFLLCLGIYLLNALSNLSMVALVRSDGALRSPMYYFLGHLSLVDVCFTTVTVPRLLAGLLHPGQAISFQACFAEMYFFVALGITESYLLAAMSYDRPTAACRPLRYGALVTPWRCASLVRASWAVTHLHSLLHTLLLSALSYPYPTPVRPFFCDMTVMLSLATSDTSAAETAIFSEGLAVVLAPLLLVFLFLRAHPGRGARLAGGRRRAFSTCGAHLVAVAVALFFGSVLSVYFPPSSAYSARYDRLASVVYAVITPTLNPFINSLRNKEVKGALKRGLRWRAAPQEA

SEQ ID NO: 24509 - protein, 324 aa, Homo sapiens
MEARNQTAISKFLLLGLIEDPELQPVLFSLFLSMYLVTILGNLLILLAVISDSHLHTPMYFFLSNLSFLDICLSTTTIPKMLVNIQAQNRSITYSGCLTQICFVLFFAGLENCLLAAMAYDRYVAICHPLRYTVIMNPRLCGLLILLSLLTSVVNALLLSLMVLRLSFCTDLEIPLFFCELAQVIQLTCSDTLINNILIYFAACIFGGVPLSGIILSYTQITSCVLRMPSASGKHKAVSTCGSHLSIVLLFYGAGLGVYISSVVTDSPRKTAVASVMYSVFPQMVNPFIYSLRNKDMKGTLRKFIGRIPSLLWCAICFGFRFLE

SEQ ID NO: 24510 - protein, 320 aa, Homo sapiens
MLLCFRFGNQSMKRENFTLITDFVFQGFSSFHEQQITLFGVFLALYILTLAGNIIIVTIIRMDLHLHTPMYFFLSMLSTSETVYTLVILPRMLSSLVGMSQPISLAGCATQMFFFVTFGITNCFLLTAMGYDRYVAICNPLRYMVIMNKRLRIQLVLGACSIGLIVAITQVTSVFRLPFCARKVPHFFCDIRPVMKLSCIDTTVNEILTLIISVLVLVVPMGLVFISYVLIISTILKIASVEGRKKAFATCASHLTVVIVHYSCASIAYLKPKSENTREHDQLISVTYTVITPLLNPVVYTLRNKEVKDALCRAVGGKFS

SEQ ID NO: 24511 - protein, 1761 aa, Homo sapiens [sequence omitted]

SEQ ID NO: 24512 - protein, 1997 aa, Homo sapiens
MEQTVLVPPGPDSFNFFTRESLAAIERRIAEEKAKNPKPDKKDDDENGPKPNSDLEAGKNLPFIYGDIPPEMVSEPLEDLDPYYINKKTFIVLNKGKAIFRFSATSALYILTPFNPLRKIAIKILVHSLFSMLIMCTILTNCVFMTMSNPPDWTKNVEYTFTGIYTFESLIKIIARGFCLEDFTFLRDPWNWLDFTVITFAYVTEFVDLGNVSALRTFRVLRALKTISVIPGLKTIVGALIQSVKKLSDVMILTVFCLSVFALIGLQLFMGNLRNKCIQWPPTNASLEEHSIEKNITVNYNGTLINETVFEFDWKSYIQDSRYHYFLEGFLDALLCGNSSDAGQCPEGYMCVKAGRNPNYGYTSFDTFSWAFLSLFRLMTQDFWENLYQLTLRAAGKTYMIFFVLVIFLGSFYLINLILAVVAMAYEEQNQATLEEAEQKEAEFQQMIEQLKKQQEAAQAATATASEHSREPSAAGRLSDSSSEASKLSSKSAKERRNRRKKRKQKEQSGGEEKDEDEFQKSESEDSIRRKGFRFSIEGNRLTYEKRYSSPHQSLLSIRGSLFSPRRNSRTSLFSFRGRAKDVGSENDFADDEHSTFEDNESRRDSLFVPRRHGERRNSNLSQTSRSSRMLAVFPANGKMHSTVDCNGVVSLVGGPSVPTSPVGQLLPEGTTTETEMRKRRSSSFHVSMDFLEDPSQRQRAMSIASILTNTVEELEESRQKCPPCWYKFSNIFLIWDCSPYWLKVKHVVNLVVMDPFVDLAITICIVLNTLFMAMEHYPMTDHFNNVLTVGNLVFTGIFTAEMFLKIIAMDPYYYFQEGWNIFDGFIVTLSLVELGLANVEGLSVLRSFRLLRVFKLAKSWPTLNMLIKIIGNSVGALGNLTLVLAIIVFIFAVVGMQLFGKSYKDCVCKIASDCQLPRWHMNDFFHSFLIVFRVLCGEWIETMWDCMEVAGQAMCLTVFMMVMVIGNLVVLNLFLALLLSSFSADNLAATDDDNEMNNLQIAVDRMHKGVAYVKRKIYEFIQQSFIRKQKILDEIKPLDDLNNKKDSCMSNHTAEIGKDLDYLKDVNGTTSGIGTGSSVEKYIIDESDYMSFINNPSLTVTVPIAVGESDFENLNTEDFSSESDLEESKEKLNESSSSSEGSTVDIGAPVEEQPVVEPEETLEPEACFTEGCVQRFKCCQINVEEGRGKQWWNLRRTCFRIVEHNWFETFIVFMILLSSGALAFEDIYIDQRKTIKTMLEYADKVFTYIFILEMLLKWVAYGYQTYFTNAWCWLDFLIVDVSLVSLTANALGYSELGAIKSLRTLRALRPLRALSRFEGMRVVVNALLGAIPSIMNVLLVCLIFWLIFSIMGVNLFAGKFYHCINTTTGDRFDIEDVNNHTDCLKLIERNETARWKNVKVNFDNVGFGYLSLLQVATFKGWMDIMYAAVDSRNVELQPKYEESLYMYLYFVIFIIFGSFFTLNLFIGVIIDNFNQQKKKFGGQDIFMTEEQKKYYNAMKKLGSKKPQKPIPRPGNKFQGMVFDFVTRQVFDISIMILICLNMVTMMVETDDQSEYVTTILSRINLVFIVLFTGECVLKLISLRHYYFTIGWNIFDFVVVILSIVGMFLAELIEKYFVSPTLFRVIRLARIGRILRLIKGAKGIRTLLFALMMSLPALFNIGLLLFLVMFIYAIFGMSNFAYVKREVGIDDMFNFETFGNSMICLFQITTSAGWDGLLAPILNSKPPDCDPNKVNPGSSVKGDCGNPSVGIFFFVSYIIISFLVVVNMYIAVILENFSVATEESAEPLSEDDFEMFYEVWEKFDPDATQFMEFEKLSQFAAALEPPLNLPQPNKLQLIAMDLPMVSGDRIHCLDILFAFTKRVLGESGEMDALRIQMEERFMASNPSKVSYQPITTTLKRKQEEVSAVIIQRAYRRHLLKRTVKQASFTYNKNKIKGGANLLIKEDMIIDRINENSITEKTDLTMSTAACPPSYDRVTKPIVEKHEQEGKDEKAKGK

SEQ ID NO: 24513 - protein, 321 aa, Homo sapiens
MSLDILGLMKKEQDSNVTEFVLLGLSSSWELQLFLFLLFLFFYIAIVLGNLLIVVTVQAHAHLLQSPMYYFLGHLSFIDLCLSCVTVPKMLGDFLQQGKSISFSGCLAQIYFLHFLGASEMFLLTVMAYDRYVAICNPLRYLTVMNPQLCLWLVLACWCGGFIHSIMQVILVIQLPFCGPNELDNFYCDVPQVIKLACMDTYVVEVLVIANSGLLSLVCFLVLLFSYAIILITLRTHFCQGQNKVFSTCASHLTVVSLIFVPCVFIYLRPFCSFSVDKIFSLFYTVITPMLNPLIYTLRNTDMKTAMKKLRIKPCGIPLPC

SEQ ID NO: 24514 - protein, 313 aa, Homo sapiens
MASPSNDSTAPVSEFLLICFPNFQSWQHWLSLPLSLLFLLAMGANTTLLITIQLEASLHQPLYYLLSLLSLLDIVLCLTVIPKVLAIFWFDLRSISFPACFLQMFIMNSFLTMESCTFMVMAYDRYVAICHPLRYPSIITDQFVARAVVFVIARNAFVSLPVPMLSARLRYCAGNIIKNCICSNLSVSKLSCDDITFNQLYQFVAGWTLLGSDLILIVISYSFILKVVLRIKAEGAVAKALSTCGSHFILILFFSTVLLVLVITNLARKRIPPDVPILLNILHHLIPPALNPIVYGVRTKEIKQGIQNLLKRL

SEQ ID NO: 24515 - protein, 1915 aa, Homo sapiens
MEQTVLVPPGPDSFNFFTRESLAAIERRIAEEKAKNPKPDKKDDDENGPKPNSDLEAGKNLPFIYGDIPPEMVSEPLEDLDPYYINKKTFIVLNKGKAIFRFSATSALYILTPFNPLRKIAIKILVHSLFSMLIMCTILTNCVFMTMSNPPDWTKNVEYTFTGIYTFESLIKIIARGFCLEDFTFLRDPWNWLDFTVITFAYVTEFVDLGNVSALRTFRVLRALKTISVIPGLKTIVGALIQSVKKLSDVMILTVFCLSVFALIGLQLFMGNLRNKCIQWPPTNASLEEHSIEKNITVNYNGTLINETVFEFDWKSYIQDSRYHYFLEGFLDALLCGNSSDAGQCPEGYMCVKAGRNPNYGYTSFDTFSWAFLSLFRLMTQDFWENLYQLTLRAAGKTYMIFFVLVIFLGSFYLINLILAVVAMAYEEQNQATLEEAEQKEAEFQQMIEQLKKQQEAAQQAATATASEHSREPSAAGRLSDSSSEASKLSSKSAKERRNRRKKRKQKEQSGGEEKDEDEFQKSESEDSIRRKGFRFSIEGNRLTYEKRYSSPHQSLLSIRGSLFSPRRNSRTSLFSFRGRAKDVGSENDFADDEHSTFEDNESRRDSLFVPRRHGERRNSNLSQTSRSSRMLAVFPANGKMHSTVDCNGVVSLVGGPSVPTSPVGQLLPEVIIDKPATDDNGTTTETEMRKRRSSSFHVSMDFLEDPSQRQRAMSIASILTNTVEELEESRQKCPPCWYKFSNIFLIWDCSPYWLKVKHVVNLVVMDPFVDLAITICIVLNTLFMAMEHYPMTDHFNNVLTVGNLVFTGIFTAEMFLKIIAMDPYYYFQEGWNIFDGFIVTLSLVELGLANVEGLSVLRSFRLLRVFKLAKSWPTLNMLIKIIGNSVGALGNLTLVLAIIVFIFAVVGMQLFGKSYKDCVCKIASDCQLPRWHMNDFFHSFLIVFRVLCGEWIETMWDCMEVAGQAMCLTVFMMVMVIGNLVVLNLFLALLLSSFSADNLAATDDDNEMNNLQIAVDRMHKGVAYVKRKIYEFIQQSFIRKQKILDEIKPLDDLNNKKDSCMSNHTAEIGKDLDYLKDVNGTTSGIGTGSSVEKYIIDESDYMSFINNPSLTVTVPIAVGESDFENLNTEDFSSESDLEESKEKLNESSSSSEGSTVDIGAPVEEQPVVEPEETLEPEACFTEGCVQRFKCCQINVEEGRGKQWWNLRRTCFRIVEHNWFETFIVFMILLSSGALAFEDIYIDQRKTIKTMLEYADKVFTYIFILEMLLKWVAYGYQTYFTNAWCWLDFLIVDVSLVSLTANALGYSELGAIKSLRTLRALRPLRALSRFEGMRATFKGWMDIMYAAVDSRNVELQPKYEESLYMYLYFVIFIIFGSFFTLNLFIGVIIDNFNQQKKKFGGQDIFMTEEQKKYYNAMKKLGSKKPQKPIPRPGNKFQGMVFDFVTRQVFDISIMILICLNMVTMMVETDDQSEYVTTILSRINLVFIVLFTGECVLKLISLRHYYFTIGWNIFDFVVVILSIVGMFLAELIEKYFVSPTLFRVIRLARIGRILRLIKGAKGIRTLLFALMMSLPALFNIGLLLFLVMFIYAIFGMSNFAYVKREVGIDDMFNFETFGNSMICLFQITTSAGWDGLLAPILNSKPPDCDPNKVNPGSSVKGDCGNPSVGIFFFVSYIIISFLVVVNMYIAVILENFSVATEESAEPLSEDDFEMFYEVWEKFDPDATQFMEFEKLSQFAAALEPPLNLPQPNKLQLIAMDLPMVSGDRIHCLDILFAFTKRVLGESGEMDALRIQMEERFMASNPSKVSYQPITTTLKRKQEEVSAVIIQRAYRRHLLKRTVKQASFTYNKNKIKGGANLLIKEDMIIDRINENSITEKTDLTMSTAACPPSYDRVTKPIVEKHEQEGKDEKAKGK

SEQ ID NO: 24516 - protein, 315 aa, Homo sapiens
MITSVSPSTSTNSSFLLTGFSGMEQQYPWLSIPFSSIYAMVLLGNCMVLHVIWTEPSLHQPMFYFLSMLALTDLCMGLSTVYTVLGILWGIIREISLDSCIAQSYFIHGLSFMESSVLLTMAFDRYIAICNPLRYSSILTNSRIIKIGLTIIGRSFFFITPPIICLKFFNYCHFHILSHSFCLHQDLLRLACSDIRFNSYYALMLVICILLLDAILILFSYILILKSVLAVASQEERHKLFQTCISHICAVLVFYIPIISLTMVHRFGKHLSPVAHVLIGNIYILFPPLMNPIIYSVKTQQIHTRMLRLFSLKRY

SEQ ID NO: 24517 - protein, 445 aa, Homo sapiens
STKGPSVFPLAPCSRSTSGGTAALGCLVKDYFPEPVTVSWNSGALTSGVHTFPAVLQSSGLYSLSSVVTVPSSSLGTQTYTCNVNHKPSNTKVDKRVELKTPLGDTTHTCPRCPEPKSCDTPPPCPRCPEPKSCDTPPPCPRCPEPKSCDTPPPCPRCPAPELLGGPSVFLFPPKPKDTLMISRTPEVTCVVVDVSHEDPEVQFKWYVDGVEVHNAKTKPREEQYNSTFRVVSVLTVLHQDWLNGKEYKCKVSNKALPAPIEKTISKTKGQPREPQVYTLPPSREEMTKNQVSLTCLVKGFYPSDIAVEWESSGQPENNYNTTPPMLDSDGSFFLYSKLTVDKSRWQQGNIFSCSVMHEALHNRFTQKSLSLSPELQLEESCAEAQDGELDGLWTTITIFITLFLLSVCYSATVTFFKVKWIFSSVVDLKQTIIPDYRNMIGQGA

SEQ ID NO: 24518 - protein, 494 aa, Homo sapiens
ASTQSPSVFPLTRCCKNIPSNATSVTLGCLATGYFPEPVMVTWDTGSLNGTTMTLPATTLTLSGHYATISLLTVSGAWAKQMFTCRVAHTPSSTDWVDNKTFSVCSRDFTPPTVKILQSSCDGGGHFPPTIQLLCLVSGYTPGTINITWLEDGQVMDVDLSTASTTQEGELASTQSELTLSQKHWLSDRTYTCQVTYQGHTFEDSTKKCADSNPRGVSAYLSRPSPFDLFIRKSPTITCLVVDLAPSKGTVNLTWSRASGKPVNHSTRKEEKQRNGTLTVTSTLPVGTRDWIEGETYQCRVTHPHLPRALMRSTTKTSGPRAAPEVYAFATPEWPGSRDKRTLACLIQNFMPEDISVQWLHNEVQLPDARHSTTQPRKTKGSGFFVFSRLEVTRAEWEQKDEFICRAVHEAASPSQTVQRAVSVNPELDVCVEEAEGEAPWTWTGLCIFAALFLLSVSYSAAITLLMVQRFLSATRQGRPQTSLDYTNVLQPHA

SEQ ID NO: 24519 - protein, 530 aa, Homo sapiens
MEVPGPPVSSKPGETSVKWQLCYDTTAKMWWMDEFHPFIEALLPHVRAFAYTWFNLQARKRKYFKKHEKRMSKDEERAVKDELLGEKPEVKQKWASRLLAKLRKDIRPECREDFVLSITGKKAPGCVLSNPDQKGKMRRIDCLRQADKVWRLDLVMVILFKGIPLESTDGERLVKAAQCGHPVLCVQPHHIGVAVKELDLYLAYFVRERDAEQSGSPRTGMGSDQEDSKPITLDTTDFQESFVTSGVFSVTELIQVSRTPVVTGTGPNFSLGELQGHLAYDLNPASTGLRRTLPSTSSSGSKRHKSGSMEEDVDTSPGGDYYTSPSSPTSSSRNWTEDMEGGISSPVKKTEMDKSPFNSPSPQDSPRLSSFTQHHRPVIAVHSGIARSPHPSSALHFPTTSILPQTASTYFPHTAIRYPPHLNPQDPLKDLVSLACDPASQQPGPLNGSGQLKMPSHCLSAQMLAPPPPGLPRLALPPATKPATTSEGGATSPTSPSYSPPDTSPANRSFVGLGPRDPAGIYQAQSWYLG

SEQ ID NO: 24520 - protein, 526 aa, Homo sapiens
MAFANLRKVLISDSLDPCCRKILQDGGLQVVEKQNLSKEELIAELQDCEGLIVRSATKVTADVINAAEKLQVVGRAGTGVDNVDLEAATRKGILVMNTPNGNSLSAAELTCGMIMCLARQIPQATASMKDGKWERKKFMGTELNGKTLGILGLGRIGREVATRMQSFGMKTIGYDPIISPEVSASFGVQQLPLEEIWPLCDFITVHTPLLPSTTGLLNDNTFAQCKKGVRVVNCARGGIVDEGALLRALQSGQCAGAALDVFTEEPPRDRALVDHENVISCPHLGASTKEAQSRCGEEIAVQFVDMVKGKSLTGVVNAQALTSAFSPHTKPWIGLAEALGTLMRAWAGSPKGTIQVITQGTSLKNAGNCLSPAVIVGLLKEASKQADVNLVNAKLLVTTSHSPAAPGEQGFGECLLAVALAGAPYQAVGLVQGTTPVLQGLNGAVFRPEVPLRRDLPLLLFRTQTSDPAMLPTMIGLLAEAGVRLLSYQTSLVSDGETWHVMGISSLLPSLEAWKQHVTEAFQFHF

SEQ ID NO: 24521 - protein, 324 aa, Homo sapiens
MFYFFPPLQILAENLTMVTEFLLLGFSSLGEIQLALFVVFLFLYLVILSGNVTIISVIHLDKSLHTPMYFFLGILSTSETFYTFVILPKMLINLLSVARTISFNCCALQMFFFLGFAITNCLLLGVMGYDRYAAICHPLHYPTLMSWQVCGKLAAACAIGGFLASLTVVNLVFSLPFCSANKVNHYFCDISAVILLACTNTDVNEFVIFICGVLVLVVPFLFICVSYLCILRTILKIPSAEGRRKAFSTCASHLSVVIVHYGCASFIYLRPTANYVSNKDRLVTVTYTIVTPLLNPMVYSLRNKDVQLAIRKVLGKKGSLKLYN

SEQ ID NO: 24522 - protein, 582 aa, Homo sapiens
MASPSGSSEATGKPRGRDGRPRREEDDVPPEEKRLRLGLEGGSAQPEDCEDGKDAPRPGREETGTQTGGDGRGDLLCLPYSLVEGQDYKSENSTLLPGAKNSLQDSVSASQATGKAEETGQRTHASGTYSFLDRTQHSDIKADCNTCVEIEDRKVSRQQMNCEREQLRGNQEAAAAPDTMAQPYASAQFAPPQNGIPAEYTAPHPHPAPEYTGQTTVPEHTLNLYPPAQTHSEQSPADTSAQTVSGTATQTDDAAPTDGQPQTQPSENTENKSQPKRLHVSNIPFRFRDPDLRQMFGQFGKILDVEIIFNERGSKGFGFVTFENSADADRAREKLHGTVVEGRKIEVNNATARVMTNKKTVNPYTNGWKLNPVVGAVYSPEFYAGTVLLCQANQEGSSMYSAPSSLVYTSAMPGFPYPAATAAAAYRGAHLRGRGRTVYNTFRAAAPPPPIPAYGGVVYQDGFYGADIYGGYAAYRYAQPTPATAAAYSDRNQFVFVAADEISCNTSAVTDEFMLPTPTTTHLLQPPPTALVPCPKVPAPAQTSEELSCTLPGLCCQAAENLTASPPLLQFMFKVIVAQERK

SEQ ID NO: 24523 - protein, 415 aa, Homo sapiens
MLNFTDVTEFILLGLTSRREWQVLFFIIFLVVYIITMVGNIGMMVLIKMESYSLAQAGVQWHCLDSLLPLPPRFKRFSCLSLPSGWDYRHPTSCPGNTDLAYTKAMPNFTDVTEFTLLGLTCRQELQVLFFVVFLAVYMITLLGNIGMIILISISPQLQSPMYFFLSHLSFADVCFSSNVTPKMLENLLSETKTISYVGCLVQCYFFIAVVHVEVYILAVMAFDRYMAGCNPLLYGSKMSRTVCVRLISVPYVYGFSVSLICTLWTYGLYFCGNFEINHFYCADPPLIQIACGRVHIKEITMIVIAGINFTYSLSVVLISYTLIVVAVLRMRSADGRRKAFSTCGSHLTAVSMFYGTPIFMYLRRPTEESVEQGKMVAVFYTTVIPMLNPMIYSLRNKDVKEAVNKAITKTYVRQ

SEQ ID NO: 24524 - protein, 312 aa, Homo sapiens
MHQGNQTTITEFILLGFFKQDEHQNLLFVLFLGMYLVTVIGNGLIIVAISLDTYLHTPMYLFLANLSFADISSISNSVPKMLVNIQTKSQSISYESCITQMYFSIVFVVIDNLLLGTMAYDHFVAICHPLNYTILMRPRFGILLTVISWFLSNIIALTHTLLLIQLLFCNHNTLPHFFCDLAPLLKLSCSDTLINELVLFIVGLSVIIFPFTLSFFSYVCIIRAVLRVSSTQGKWKAFSTCGSHLTVVLLFYGTIVGVYFFPSSTHPEDTDKIGAVLFTVVTPMINPFIYSLRNKDMKGALRKLINRKISSL

SEQ ID NO: 24525 - protein, 314 aa, Homo sapiens
MKNKNNVTEFILLGLTQNPEGQKVLFVTFLLIYMVTIMGNLLIIVTIMASQSLGSPMYFFLASLSFIDTVYSTAFAPKMIVDLLSEKKTISFQGCMAQLFMDHLFAGAEVILLVVMAYDRYMAICKPLHELITMNRRVCVLMLLAAWIGGFLHSLVQFLFIYQLPFCGPNVIDNFLCDLYPLLKLACTNTYVTGLSMIANGGAICAVTFFTILLSYGVILHSLKTQSLEGKRKAFYTCASHVTVVILFFVPCIFLYARPNSTFPIDKSMTVVLTFITPMLNPLIYTLKNAEMKSAMRKLWSKKVSLAGKWLYHS

SEQ ID NO: 24526 - protein, 315 aa, Homo sapiens
MEPEAGTNRTAVAEFILLGLVQTEEMQPVVFVLLLFAYLVTTGGNLSILAAVLVEPKLHAPMYFFLGNLSVLDVGCITVTVPAMLGRLLSHKSTISYDACLSQLFFFHLLAGMDCFLLTAMAYDRLLAICQPLTYSTRMSQTVQRMLVAASWACAFTNALTHTVAMSTLNFCGPNEVNHFYCDLPQLFQLSCSSTQLNELLLFVAAAFMAVAPLVFISVSYAHVVAAVLQIRSAEGRKKAFSTCGSHLTVVGIFYGTGVFSYMRLGSVESSDKDKGVGVFMTVINPMLNPLIYSLRNTDVQGALCQLLVGKRSLT

SEQ ID NO: 24527 - protein, 311 aa, Homo sapiens
MAAENHSFVTKFILVGLTEKSELQLPLFLVFLGIYVVTVLGNLGMITLIGLSSHLHTPMYCFLSSLSFIDFCHSTVITPKMLVNFVTEKNIISYPECMTQLYFFLVFAIAECHMLAAMAYDGYVAICSPLLYSIIISNKACFSLILVVYVIGLICASAHIGCMFRVQFCKFDVINHYFCDLISILKLSCSSTYINELLILIFSGINILVPSLTILSSYIFIIASILRIRYTEGRSKAFSTCSSHISAVSVFFGSAAFMYLQPSSVSSMDQGKVSSVFYTIVVPMLNPLIYSLRNKDVHVALKKTLGKRTFL

SEQ ID NO: 24528 - protein, 100 aa, Homo sapiens
SSPSGSKSQRYSGAYGASVSDEELKRRVAEELALEQAKKESEDQKRLKQAKELDRERAAANEQLTRAILRERICSEEERAKAKHLIKVELLWVKPGVLTA

SEQ ID NO: 24529 - protein, 313 aa, Homo sapiens
MEEENATLLTEFVLTGFLYQPQWKIPLFLAFLVIYLITIMGNLGLIAVIWKDPHLHIPMYLLLGNLAFVDAWISSTVTPKMLNNFLAKSKMISLSECKIQFFSIAIGVTTECFLLATMAYDRYVAICKPLLYPAIMTNGLCIRLLILSYIAGILHALIHEGFLFRLTFCNSNIVHHIYCDTIPLSKISCTDSSINFLMVFIFSGSIQVFSIVTILISYTFVLFTVLEKKSDKGVRKAFSTCGAHLFSVCLYYGPLLLMYVGPASPQADGQNMVEPLFYTVIIPLLNPIIYSLRNKQVIVSFIKMLKRNVKVSY

SEQ ID NO: 24530 - protein, 793 aa, Homo sapiens
MCSQEAFQAQRSQLVELLVSGSLEGFESVLDWLLSWEVLSWEDYEGFHLLGQPLSHLARRLLDTVWNKGTWACQKLIAAAQEAQADSQSPKLHGCWDPHSLHPARDLQSHRPAIVRRLHSHVENMLDLAWERGFVSQYECDEIRLPIFTPSQRARRLLDLATVKANGLAAFLLQHVQELPVPLALPLEAATCKKYMAKLRTTVSAQSRFLSTYDGAETLCLEDIYTENVLEVWADVGMAGPPQKSPATLGLEELFSTPGHLNDDADTVLVVGEAGSGKSTLLQRLHLLWAAGQDFQEFLFVFPFSCRQLQCMAKPLSVRTLLFEHCCWPDVGQEDIFQLLLDHPDRVLLTFDGFDEFKFRFTDRERHCSPTDPTSVQTLLFNLLQGNLLKNARKVVTSRPAAVSAFLRKYIRTEFNLKGFSEQGIELYLRKRHHEPGVADRLIRLLQETSALHGLCHLPVFSWMVSKCHQELLLQEGGSPKTTTDMYLLILQHFLLHATPPDSASQGLGPSLLRGRLPTLLHLGRLALWGLGMCCYVFSAQQLQAAQVSPDDISLGFLVRAKGVVPGSTAPLEFLHITFQCFFAAFYLALSADVPPALLRHLFNCGRPGNSPMARLLPTMCIQASEGKDSSVAALLQKAEPHNLQITAAFLAGLLSREHWGLLAECQTSEKALLRRQACARWCLARSLRKHFHSIPPAAPGEAKSVHAMPGFIWLIRSLYEMQEERLARKAARGLNVGHLKLTFCSVGPTECAALAFVLQHLRRPVALQLDYNSVGDIGVEQLLPCLGVCKAL

SEQ ID NO: 24531 - protein, 330 aa, Homo sapiens
MGLTQDFFPPTSELLEGGNQTSTFEFLLWGLSDQPQQQHIFFLLFLWMYVVTVAGNLLIVLAIGTDTHLHTPMYFFLASLSCADIFSTSTTVPKALVNIQTQSRSISYAGCLAQLYFFLTFGDMDIFLPATMAYDRYVAICHLLHYMMIMSLHRCAFLVTACWTLTSLLAMTRTFLIFRLSLCSUILPGFFCDLGPLMKVSCSDAQVNELVLLFLGGAVILIPFMLILVSYIRIVSAILRAPSAQGRRKAFSTCDSHLVVVALFFGTVIRAYLCPSSSSSNSVKEDTAAAVMYTVVTPLLNPFIYSMRNKDMKAAVVRLLKGRVSFSQGQ

SEQ ID NO: 24532 - protein, 642 aa, Homo sapiens
MVNEARGNSSLNPCLEGSASSGSESSKDSSRCSTPGLDPERHERLREKMRRRLESGDKWFSLEFFPPRTAEGAVNLISRFDRMAAGGPLYIDVTWHPAGDPGSDKETSSMMIASTAVNYCGLETILHMTCCRQRLEEITGHLHKAKQLGLKNIMALRGDPIGDQWEEEEGGFNYAVDLVKHIRSEFGDYFDICVAGYPKGHPEAGSFEADLKHLKEKVSAGADFIITQLFFEADTFFRFVKACTDMGITCPIVPGIFPIQGYHSLRQLVKLSKLEVPQEIKDVIEPIKDNDAAIRNYGIELAVSLCQELLASGLVPGLHFYTLNREMATTEVLKRLGMWTEDPRRPLPWALSAHPKRREEDVRPIFWASRPKSYIYRTQEWDEFPNGRWGNSSSPAFGELKDYYLFYLKSKSPKEELLKMWGEELTSEESVFEVFVLYLSGEPNRNGHKVTCLPWNDEPLAAETSLLKEELLRVNRQGILTINSQPNINGKPSSDPIVGWGPSGGYVFQKAYLEFFTSRETAEALLQVLKKYELRVNYHLVNVKGENITNAPELQPNAVTWGIFPGREIIQPTVVDPVSFMFWKAHPECERNGGSMTLRPDALRWSHSCPAFLLHSAASLGNSTLLRVSPTPASTPPPDNGS

SEQ ID NO: 24533 - protein, 315 aa, Homo sapiens
MEEAILLNQTSLVTYFRLRGLSVNHKARIAMFSMFLIFYVLTLIGNVLIVITIIYDHRLHTPMYFFLSNLSFIDVCHSTVTVPKMLRDVWSEEKLISFDACVTQMFFLHLFACTEIFLLTVMAYDRYVAICKPLQYMIVMNWKVCVLLAVALWTGGTIHSIALTSLTIKLPYCGPDEIDNFFCDVPQVIKLACIDTHVIEILIVSNSGLISVVCFVVLVVSYAVILVSLRQQISKGKRKALSTCAAHLTVVTLFLGHCIFIYSRPSTSLPEDKVVSVFFTAVTPLLNPIIYTLRNEEMKSALNKLVGRKERKEEK

SEQ ID NO: 24534 - protein, 398 aa, Homo sapiens
ASPTSPKVFPLSLCSTQPDGNVVIACLVQGFFPQEPLSVTWSESGQGVTARNFPPSQDASGDLYTTSSQLTLPATQCLAGKSVTCHVKHYTNPSQDVTVPCPVPSTPPTPSPSTPPTPSPSCCHPRLSLHRPALEDLLLGSEANLTCTLTGLRDASGVTFTWTPSSGKSAVQGPPERDLCGCYSVSSVLPGCAEPWNHGKTFTCTAAYPESKTPLTATLSKSGNTFRPEVHLLPPPSEELALNELVTLTCLARGFSPKDVLVRWLQGSQELPREKYLTWASRQEPSQGTTTFAVTSILRVAAEDWKKGDTFSCMVGHEALPLAFTQKTIDRLADWQMPPPYVVLDLPQETLEEETPGANLWPTTITFLTLFLLSLFYSTALTVTSVRGPSGNREGPQY

SEQ ID NO: 24535 - protein, 316 aa, Homo sapiens
MQNQSFVTEFVLLGLSQNPNVQEIVFVVFLFVYIATVGGNMLIVVTILSSPALLVSPMYFFLGFLSFLDACFSSVITPKMIVDSLYVTKTISFEGCMMQLFAEHFFAGVEVIVLTAMAYDRYVAICKPLHYSSIMNRRLCGILMGVAWTGGLLHSMIQILFTFQLPFCGPNVINHFMCDLYPLLELACTDTHIFGLMVVINSGFICIINFSLLLVSYAVILLSLRTHSSEGRWKALSTCGSHIAVVILFFVPCIFVYTRPPSAFSLDKMAAIFYIILNPLLNPLIYTFRNKEVKQAMRRIWNRLMVVSDEKENIKL

SEQ ID NO: 24536 - protein, 395 aa, Homo sapiens
ASTKGPSVFPLAPCSRSTSESTAALGCLVKDYFPEPVTVSWNSGALTSGVHTFPAVLQSSGLYSLSSVVTVPSSNFGTQTYTCNVDHKPSNTKVDKTVERKCCVECPPCPAPPVAGPSVFLFPPKPKDTLMISRTPEVTCVVVDVSHEDPEVQFNWYVDGVEVHNAKTKPREEQFNSTFRVVSVLTVVHQDWLNGKEYKCKVSNKGLPAPIEKTISKTKGQPREPQVYTLPPSREEMTKNQVSLTCLVKGFYPSDISVEWESNGQPENNYKTTPPMLDSDGSFFLYSKLTVDKSRWQQGNVFSCSVMHEALHNHYTQKSLSLSPELQLEESCAEAQDGELDGLWTTITIFITLFLLSVCYSATITFFKVKWIFSSVVDLKQTIVPDYRNMIRQGA

SEQ ID NO: 24537 - protein, 1562 aa, Homo sapiens
GVTHMDNPPYYRITSSYKIPSVTSGTTSSSNTMVAPTDGNPDNKPIKENIEESYVHLDIYSGLNSHLNRQHHRLESRYSSSSGGSYEEEKSDSMPLYSNWRLKVMEHNQGEPLPFPPAGGCWSPLVDYVPETSSPGLPLHRCNIAVILLTDLIIDHSVKVEWGSYLHLLLHAIFIGFDHCHPEVYEHCKRLLLHLLIVMGPNSNIRTVASVLLRNKEFNEPRVLTVKQVAHLDYNFTAGINDFIPDYQPSPMTDSGLSSSSTSSSISLGNNSAAISHLHTTILNEVDISVEQDGKVKTLMEFITSRKRGPLWNHEDVSAKNPSIKSAEQLTTFLKHVVSVFKQSSSEGIHLEHHLSEVALQTALSCSSRHYAGRSFQIFRALKQPLTATTLSDVLSRLVETVGDPGEDAQGFVIELLLTLESAIDTLAETMKHYDLLSALSQTSYHDPIMGNKYAANRKSTGQLNLSTSPINSSSYLGYNSNARSNSLRLSLIGDRRGDRRRSNTLDIMDGRINHSSSLARTRSLSSLREKGMYDVQSTTEPTNLMATIFWIAASLLESDYEYEYLLALRLLNKLLIHLPLDKSESREKIENVQSKLKWTNFPGLQQLFLKGFTSASTQEMTVHLLSKLISVSKHTLVDPSQLSGFPLNILCLLPHLIQHFDSPTQFCKETASRIAKVCAEEKCPTLVNLAHMMSLYSTHTYSRDCSNWINVVCRYLHDSFSDTTFNLVTYLAELLEKGLSSMQQSLLQIIYSLLSHIDLSAAPAKQFNLEIIKIIGKYVQSPYWKEALNILKLVVSRSASLVVPSDIPKTYGGDTGSPEISFTKIFNNVSKELPGKTLDFHFDISETPIIGNKYGDQHSAAGRNGKPKVIAVTRSTSSTSSGSNSNALVPVSWKRPQLSQRRTREKLMNVLSLCGPESGLPKNPSVVFSSNEDLEVGDQQTSLISTTEDINQEEEVAVEDNSSEQQFGVFKDFDFLDVELEDAEELQGESMDNFNWGVRRRSLDSIDKGDTPSLQEYQCSSSTPSLNLTNQEDTDESSEEEAALTASQILSRTQMLNSDSATDETIPDHPDLLLQSEDSTGSITTEEVLQIRDETPTLEASLDNANSRLPEDTTSVLKEEHVTTFEDEGSYIIQEQQESLVCQGILDLEETEMPEPLAPESYPESVCEEDVTLALKELDERCEEEEADFSGLSSQDEEEQDGFPEVQTSPLPSPFLSAIIAAFQPVAYDDEEEAWRCHVNQMLSDTDGSSAVFTFHVFSRLFQTIQRKFGEITNEAVSFLGDSLQRIGTKFKSSLEVMMLCSECPTVFVDAETLMSCGLLETLKFGVLELQEHLDTYNVKREAAEQWLDDCKRTFGAKEDMYRINTDAQQMEILAELELCRRLYKLHFQLLLLFQAYCKLINQVNTIKNEAEVINMSEELAQLESILKEAESASENEEIDISKAAQTTIETAIHSLIETLKNKEFISAVAQVKAFRSLWPSDIFGSCEDDPVQTLLHIYFHHQTLGQTGSFAVIGSNLDMSEANYKLMELNLEIRESLRMVQSYQLLAQAKPMGNMVSTGF

SEQ ID NO: 24538 - protein, 188 aa, Homo sapiens
MRGSGRLRTPELCCSRPPPPGPGRPWLPSCLEKGRASQRLGGKKNGGRDRAEYKSRFSGLYLTRCSNSSERQRERAGGRLGWKSRASRAALRASWEGRSGANRGLRLWPSPPADPPASGPQPLPHPRNFAHSSGRALCTGTYNTRARTRLSRRGEAILPIWGHFPAAARTRFSERLSLQLLRRWIFFG

SEQ ID NO: 24539 - protein, 300 aa, Homo sapiens
LLNQTSLVTYFRLRGLSVNHKARIAMFSMFLIFYVLTLIGNVLIVITIIYDHRLHTPMYFFLSNLSFIDVCHSTVTVPKMLRDVWSEEKLISFDACVTQMFFLHLFACTEIFLLTVMAYDRYVAICKPLQYMIVMNWKVCVLLAVALWTGGTIHSIALTSLTIKLPYCGPDEIDNFFCDVPQVIKLACIDTHVIEILIVSNSGLISVVCFVVLVVSYAVILVSLRQQISKGKRKALSTCAAHLTVVTLFLGHCIFIYSRPSTSLPEDKVVSVFFTAVTPLLNPIIYTLRNEEMKSALNKL

SEQ ID NO: 24540 - protein, 324 aa, Homo sapiens
MTTVLGSEVILAENLTMVTEFLLLGFSSLGEIQLALFVVFLFLYLVILSGNVTIISVIHLDKSLHTPMYFFLGILSTSETFYTFVILPKMLINLLSVARTISFNCCALQMFFFLGFAITNCLLLGVMGYDRYAAICHPLHYPTLMSWQVCGKLAAACAIGGFLASLTVVNLVFSLPFCSANKVNHYFCDISAVILLACTNTDVNEFVIFICGVLVLVVPFLFICVSYLCILRTILKIPSAEGRRKAFSTCASHLSVVIVHYGCASFIYLRPTANYVSNKDRLVTVTYTIVTPLLNPMVYSLRNKDVQLAIRKVLGKKGSLKLYN

SEQ ID NO: 24541 - protein, 533 aa, Homo sapiens
MAFANLRKVLISDSLDPCCRKILQDGGLQVVEKQNLSKEELIAELQDCEGLIVRSATKVTADVINAAEKLQVVGRAGTGVDNVDLEAATRKGILVMNTPNGNSLSAAELTCGMIMCLARQIPQATASMKDGKWERKKFMGTELNGKTLGILGLGRIGREVATRMQSFGMKTIGYDPIISPEVSASFGVQQLPLEEIWPLCDFITVHTPLLPSTTGLLNDNTFAQCKKGVRVVNCARGGIVDEGALLRALQSGQCAGAALDVFTEEPPRDRALVDHENVISCPHLGASTKEAQSRCGEEIAVQFVDMVKGKSLTGVVNAQALTSAFSPHTKPWIGLAEALGTLMRAWAGSPKGTIQVITQGTSLKNAGNCLSPAVIVGLLKEASKQADVNLVNAKLLVKEAGLNVTTSHSPAAPGEQGFGECLLAVALAGAPYQAVGLVQGTTPVLQGLNGAVFRPEVPLRRDLPLLLFRTQTSDPAMLPTMIGLLAEAGVRLLSYQTSLVSDGETWHVMGISSLLPSLEAWKQHVTEAFQFHF

SEQ ID NO: 24542 - protein, 319 aa, Homo sapiens
MTQLTASGNQTMVTEFLFSMFPHAHRGGLLFFIPLLLIYGFILTGNLIMFIVIQVGMALHTPLYFFISVLSFLEICYTTTTIPKMLSCLISEQKSISVAGCLLQMYFFHSLGITESCVLTAMAIDRYIAICNPLRYPTIMIPKLCIQLTVGSCFCGFLLVLPEIAWISTLPFCGSNQIHQIFCDFTPVLSLACTDTFLVVIVDAIHAAEIVASFLVIALSYIRIIIVILGMHSAEGHHKAFSTCAAHLAVFLLFFGSVAVMYLRFSATYSVFWDTAIAVTFVILAPFFNPIIYSLKNKDMKEAIGRLFHYQKRAGWAGK

SEQ ID NO: 24543 - protein, 312 aa, Homo sapiens
MEVGNCTILTEFILLGFSADSQWQPILFGVFLMLYLITLSGNMTLVILIRTDSHLHTPMYFFIGNLSFLDFWYTSVYTPKILASCVSEDKRISLAGCGAQLFFSCVVAYTECYLLAAMAYDRHAAICNPLLYSGTMSTALCTGLVAGSYIGGFLNAIAHTANTFRLHFCGKNIIDHFFCDAPPLVKMSCTNTRVYEKVLLGVVGFTVLSSILAILISYVNILLAILRIHSASGRHKAFSTCASHLISVMLFYGSLLFMYSRPSSTYSLERDKVAALFYTVINPLLNPLIYSLRNKDIKEAFRKATQTIQPQT

SEQ ID NO: 24544 - protein, 314 aa, Homo sapiens
MNRSATHIVTEFILLGFPGCWKIQIFLFSLFLVIYVLTLLGNGAIIYAVRCNPLLHTPMYFLLGNFAFLEIWYVSSTIPNMLVNILSKTKAISFSGCFLQFYFFFSLGTTECLFLAVMAYDRYLAICHPLQYPAIMTVRFCGKLVSFCWLIGFLGYPIPIFYISQLPFCGPNIIDHFLCDMDPLMALSCAPAPITECIFYTQSSLVLFFTSMYILRSYILLLTAVFQVPSAAGRRKAFSTCGSHLVVVSLFYGTVMVMYVSPTYGIPTLLQKILTLVYSVTTPLFNPLIYTLRNKDMKLALRNVLFGMRIRQNS

SEQ ID NO: 24545 - protein, 3016 aa, Homo sapiens
MASQQDSGFFEISIKYLLKSWSNTSPVGNGYIKPPVPPASGTHREKGPPTMLPINVDPDSKPGEYVLKSLFVNFTTQAERKIRIIMAEPLEKPLTKSLQRGEDPQFDQVISSMSSLSEYCLPSILRTLFDWYKRQNGIEDESHEYRPRTSNKSKSDEQQRDYLMERRDLAIDFIFSLVLIEVLKQIPLHPVIDSLIHDVINLAFKHFKYKEGYLGPNTGNMHIVADLYAEVIGVLAQAKFPAVKKKFMAELKELRHKEQNPYVVQSIISLIMGMKFFRIKMYPVEDFEASLQFMQECAHYFLEVKDKDIKHALAGLFVEILVPVAAAVKNEVNVPCLRNFVESLYDTTLELSSRKKHSLALYPLVTCLLCVSQKQLFLNRWHIFLNNCLSNLKNKDPKMARVALESLYRLLWVYMIRIKCESNTATQSRLITIITTLFPKGSRGVVPRDMPLNIFVKIIQFIAQERLDFAMKEIIFDFLCVGKPAKAFSLNPERMNIGLRAFLVIADSLQQKDGEPPMPVTGAVLPSGNTLRVKKTYLSKTLTEEEAKMIGMSLYYSQVRKAVDNILRHLDKEVGRCMMLTNVQMLNKEPEDMITGERKPKIDLFRTCVAAIPRLLPDGMSKLELIDLLARLSIHMDDELRHIAQNSLQGLLVDFSDWREDVLFGFTNFLLREVNDMHHTLLDSSLKLLLQLLTQWKLVIQTQGKVYEQANKIRNSELIANGSSHRIQSERGPHCSVLHAVEGFALVLLCSFQVATRKLSVLILKEIRALFIALGQPEDDDRPMIDVMDQLSSSILESFIHVAVSDSATLPLTHNVDLQWLVEWNAVLVNSHYDVKSPSHVWIFAQSVKDPWVLCLFSFLRQENLPKHCPTALSYAWPYAFTRLQSVMPLVDPNSPINAKKTSTAGSGDNYVTLWRNYLILCFGVAKPSIMSPGHLRASTPEIMATTPDGTVSYDNKAIGTPSVGVLLKQLVPLMRLESIEITESLVLGFGRTNSLVFRELVEELHPLMKEALERRPENKKRRERRDLLRLQLLRIFELLADAGVISDSTNGALERDTLALGALFLEYVDLTRMLLEAENDKEVEILKDIRAHFSAMVANLIQCVPVHHRRFLFPQQSLRHHLFILFSQWAGPFSIMFTPLDRYSDRNHQITRYQYCALKAMSAVLCCGPVFDNVGLSPDGYLYKWLDNILACQDLRVHQLGCEVVVLLLELNPDQINLFNWAIDRCYTGSYQLASGCFKAIATVCGSRNYPFDIVTLLNLVLFKASDTNREIYEISMQLMQILEAKLFVYSKKVAEQRPGSILYGTHGPLPPLYSVSLALLSCELARMYPELTLPLFSEVSQRFPTTHPNGRQIMLTYLLPWLHNIELVDSRLLLPGSSPSSPEDEVKDREGDVTASHGLRGNGWGSPEATSLVLNNLMYMTAKYGDEVPGPEMENAWNALANNEKWSNNLRITLQFLISLCGVSSDTVLLPYIKKVAIYLCRNNTIQTMEELLFELQQTEPVNPIVQHCDNPPFYRFTASSKASAAASGTTSSSNTVVAGQENFPDAEENKILKESDERFSNVIRAHTRLESRYSNSSGGSYDEDKNDPISPYTGWLLTITETKQPQPLPMPCTGGCWAPLVDYLPETITPRGPLHRCNIAVIFMTEMVVDHSVREDWALHLPLLLHAVFLGLDHYRPEVFEHSKKLLLHLLIALSCNSNFHSIASVLLQTREMGEAKTLTVQPAYQPEYLYTGGFDFLREDQSSPVPDSGLSSSSTSSSISLGGSSGNLPQMTQEVEDVDTAAETDEKANKLIEFLTTRAFGPLWCHEDITPKNQNSKSAEQLTNFLRHVVSVFKDSKSGFHLEHQLSEVALQTALASSSRHYAGRSFQIFRALKQPLSAHALSDLLSRLVEVIGEHGDEIQGYVMEALLTLEAAVDNLSDCLKNSDLLTVLSRSSSPDLSSSSKLTASRKSTGQLNMNPGTTSGNTATAERSRHQRSFSVPKKFGVIDRSSDPPRSATLDRIQACTQQGLSSKTRSSSSLKDSLTDPSHINHPTNLLATIFWVTVALMESDFEFEYLMALRLLSRLLAHMPLDKAENREKLEKLQAQLKWADFSGLQQLLLKGFTSLTTTDLTLQLFSLLTPVSKISMVDASHAIGFPLNVLCLLPQLIQHFENPNQFCKDIAERIAQVCLEEKNPKLSNLAHVMTLYKTHSYTRDCATWVNVVCRYLHEAYADITLNMVTYLAELLEKGLPSVQQPLLQVIYSLLSYMDLSVVPVKQFNVEVLKTIEKYVQSVHWREALNILKLVVSRSASLVLPSYQHSDLSKIEIHRVWTSASKELPGKTLDFHFDISETPIIGRRYDELQNSSGRDGKPRAMAVTRSTSSTSSGSNSNVLVPVSWKRPQYSQKRTKEKLVHVLSLCGQEVGLSKNPSVIFSSCGDLDLLEHQTSLVSSEDGAREQENMDDTNSEQQFRVFRDFDFLDVELEDGEELQGESMDNFNWGVRRRSLDSLDKCDMQILEERQLSGSTPSLNKMHHEDSDESSEEEDLTASQILEHSDLIMTLSPSEETNPMELLTTACDSTPAEPHSFNTRMSSFDASLPDMNNLQISEGSKAEAVREEEDTTVHEDDLSSSINELPAAFECSDSFSLDMTEGEEKGNRALDQFTLASFGEGDRGVSPPPSPFFSAILAAFQPAACDDAEEAWRSHINQLMCDSDGSCAVYTFHVFSSLFKNIQKRFCFLTCDAASYLGDNLRGIGSKFVSSSQMLTSCSECPTLFVDAETLLSCGLLDKLKFSVLELQEYLDTYNNRKEATLSWLANCKATFAGGSRDGVITCQPGDSEEKQLELCQRLYKLHFQLLLLFQSYCKLIGQVHEVSSMPELLNMSRELSDLKKHLKEASAVIAADPLYSDGAWSEPTFTSTEAAIQSMLECLKNNELGKALRQIRECRSLWPNDIFGSSSDDEVQTLLNIYFRHQTLGQTGTYALVGSNQSLTEICTKLMELNMEIRDMIRRAQSYRVLTTFLPDSSVSGTSL

SEQ ID NO: 24546 - protein, 552 aa, Homo sapiens
MQMELQSPEYKLSKLRTSTIMTDYNPNYCFAGKTSSISDLKEVPRKNITLIRGLGHGAFGEVYEGQVSGMPNDPSPLQVAVKTLPEVCSEQDELDFLMEALIISKFNHQNIVRCIGVSLQSLPRFILLELMAGGDLKSFLRETRPRPSQPSSLAMLDLLHVARDIACGCQYLEENHFIHRDIAARNCLLTCPGPGRVAKIGDFGMARDIYRASYYRKGGCAMLPVKWMPPEAFMEGIFTSKTDTWSFGVLLWEIFSLGYMPYPSKSNQEVLEFVTSGGRMDPPKNCPGPVYRIMTQCWQHQPEDRPNFAIILERIEYCTQDPDVINTALPIEYGPLVEEEEKVPVRPKDPEGVPPLLVSQQAKREEERSPAAPPPLPTTSSGKAAKKPTAAEISVRVPRGPAVEGGHVNMAFSQSNPPSELHKVHGSRNKPTSLWNPTYGSWFTEKPTKKNNPIAKKEPHDRGNLGLEGSCTVPPNVATGRLPGASLLLEPSSLTANMKEVPLFRLRHFPCGNVNYGYQQQGLPLEAATAPGAGHYEDTILKSKNSMNQPGP

SEQ ID NO: 24547 - protein, 2093 aa, Homo sapiens
MLRLVVQSAKIDPPLAPLPRPCMSIDFRDIKKRTRVVEGNDPVWNETLIWHLWNRPLENDSFLQVTLQDMGSQKKERFIGLATVLLKPLLKQPSEVLFVKDLTLLNHSMKPTDCTVTLQVAHMSNQDIEKTGAEDHLGITAREAASQKLMVPGSTAHRALSSKPQHFQVRVKVFEARQLMGNNIKPVVKVSIAGQQHQTRIKMGNNPFFNEIFFQNFHEVPAKFFDETILIQTDIGFIYHSPGHTLLRKWLGLCQPNNPGSGVTGYLKVTIYALGVGDQALIDQKLLYGTDDTDIQIFKSAVVPINMAYLQLFIYCAEDLHLKKHQSVNPQLEVELIGEKLRTHMQTQTDNPIWNQILTFRIQLPCLSSYIKFRVLDCRKKDCPDEIGTASLSLNQISSTGEEIEGKQSLEPTSYTPRVYSGFLPCFGPSFLTLHGGKKAPFRIQEEGACIPDSVRDGLAYRGRVFLELITQIKSYQDSTIKDLSHEVTRIEKHQNRQKYGLCVIFLSCTMMPNFKELIHFEVSIGHYGNKMDLNYKPLVSSTPYSPVIYDGNIYHYVPWYNTKPVVAVTSNWEDVSFRMNCLNLLHFTRDRLKANLDTLKSTRNPKDPALLYQWEKLLRELAEDCKRPLPCMTYQPKATSLDRKRWQLRSLLLQELAQKAKQAKPKDMVATAEDWLYRLNTVLPEPQMGLPDVMIWLVAKEQRVAYAQVPAHSVLFSPAGALHSGRLCGKIQTLFLQYPEGEGQKDVLPAHLRVCMWLGNVTDSKDLQLLRQGDTAVYAEMYENQAKYKDQWGQQGLYHCPNFSDVMGNKTLPMTDFQPPLGWHWQDSWTVEPQRRLLLDIDINKSQVLEEVYENQGRDTRGAWGPAAIPNTDVNGQPMEARENVKCPQGWHFKKDWVVELNHAVDSWEYGVGIPPSGLPQVWSPVEKTYHSCRRRRWARVRFRNHGELSHEQETLSFLQLGLAKGEEEGWEYDTFGSKFHLNPQPQSRFRRRCWRRRLAPNKDKGIAPIFLLEGSLACEGGSVREEGDWAWARGNRSSTQEPQGRLSWVQAMDLKYHAGKEEDSKTWPWGLDRQFRDPQRQDTRPPNLPFIYCTFNKPHYYQLFCYIYQARNLVSNQILTFQGPFIRVVFLNHSQCTQTLRSSAGPTWAQTLIFQHLLLYENPQDTKESPPLVVLELWQRDFWGKESLWGRSVWPPMVWLDLQDRILPPMRWHPLVKELGKEEGEILASCELILQTEKLGEKQLPILSVPWKNGAYTLPKSIQPTIKRMAIEILAWGLRNMKKASSPQLLVEFGEESLRTEPIRDFQTNPNFPESESVLVLTVLMPTEEAYALPLVVKVVDNWAFGQQTVTGQANIDFLQPYFCDPWAQDYMHPKLPTLSEKKHQDFLGYLYRKFWFKSSKAEDEYEHEVDWWSKLFWATDEHKSLKYKYKDYHTLKVYECELEAVPAFQGLQDFCQTFKLYQEQPKLDSPVVGEFKGLFRIYPFPENPEAPKPPLQFLVWPEREDFPQPCLVRVYMVRAINLQPQDYNGLCDPYVILKLGKTELGNRDMYQPNTLDPIFGMMFELTCNIPLEKDLEIQLYDFDLFSPDDKIGTTVIDLENRLLSGFGAHCGLSKSYCQSGPFRWRDQMPPSYLLERYAKRKGLPPPLFSPEEDAVFYNGKKFKLQSFEPKTPTVHGLGPKKERLALYLLHTQGLVPEHVETRTLYSHSQPGIDQGKVQMWVDIFPKKLGPPGPQVNINPRKPKRKASEHSGHRYELRCIIWKTANVDLVDDNLSREKTSDIYIKGWLYGLEKDMQKTDIHYHSLTGEADFNWRFIFTMDYLAAERTCVQSQKDYIWSLDATSMKFPARLIIQVWDNDIFSPDDFLGVLELDLSDMPLPARHAKQCSIRMMDADPKWPYFIQYKHFSLFKKKTVTGWWPCQVLDGGKWRLSGKVKMSLEILSEKEALIKPAGRGQSEPNQYPTLHPPLRTNTSFTWLRSPVQNFCYIFWKRYRFKLIAFMVISIIALMLFNFIYSAPHYLAMSWIKPQLQLYPPIKIFNIINSLNTSNASSSILPTQDPNLKPTIDHEWKLHPGPTNHLSDIFPELPAPGD

SEQ ID NO: 24548 - protein, 768 aa, Homo sapiens
MLRLVVQSAKIDPPLAPLPRPCMSIDFRDIKKRTRVVEGNDPVWNETLIWHLWNRPLENDSFLQVTLQDMGSQKKERFIGLATVLLKPLLKQPSEVLFVKDLTLLNHSMKPTDCTVTLQVAHMSNQDIEKTGAEDHLGITAREAASQKLMVPGSTAHRALSSKPQHFQVRVKVFEARQLMGNNIKPVVKVSIAGQQHQTRIKMGNNPFFNEIFFQNFHEVPAKFFDETILIQTDIGFIYHSPGHTLLRKWLGLCQPNNPGSGVTGYLKVTIYALGVGDQALIDQKLLYGTDDTDIQIFKSAVVPINMAYLQLFIYCAEDLHLKKHQSVNPQLEVELIGEKLRTHMQTQTDNPIWNQILTFRIQLPCLSSYIKFRVLDCRKKDCPDEIGTASLSLNQISSTGEEIEGVYSGFLPCFGPSFLTLHGGKKAPFRIQEEGACIPDSVRDGLAYRGRVFLELITQIKSYQDSTIKDLSHEVTRIEKHQNRQKYGLCVIFLSCTMMPNFKELIHFEVSIGHYGNKMDLNYKPLVSSTPYSPVIYDGNIYHYVPWYNTKPVVAVTSNWEDVSFRMNCLNLLHFTRDRLKANLDTLKSTRNPKDPALLYQWEKLLRELAEDCKRPLPCMTYQPKATSLDRKRWQLRSLLLQELAQKAKQAKPKDMVATAEDWLYRLNTVLPEPQMGLPDVMIWLVAKEQRVAYAQVPAHSVLFSPAGALHSGRLCGKIQYPEGEGQKDVLPAHLRVCMWLGNVTDSKDLQLLRQGDTAVYAEMVSV

SEQ ID NO: 24549 - protein, 318 aa, Homo sapiens
MKNVTEVTLFVLKGFTDNLELQTIFFFLFLAIYLFTLMGNLGLILVVIRDSQLHKPMYYFLSMLSSVDACYSSVITPNMLVDFTTKNKVISFLGCVAQVFLACSFGTTECFLLAAMAYDRYVAIYNPLLYSVSMSPRVYMPLINASYVAGILHATIHTVATFSLSFCGANEIRRVFCDIPPLLAISYSDTHTNQLLLFYFVGSIELVTILIVLISYGLILLAILKMYSAEGRRKVFSTCGAHLTGVSIYYGTILFMYVRPSSSYASDHDMIVSIFYTIVIPLLNPVIYSLRNKDVKDSMKKMFGKNQVINKVYFHTKK

SEQ ID NO: 24550 - protein, 2097 aa, Homo sapiens [sequence omitted]

SEQ ID NO: 24551 - protein, 549 aa, Homo sapiens
MVNEARGNSSLNPCLEGSASSGSESSKDSSRCSTPGLDPERHERLREKMRRRLESGDKWFSLEFFPPRTAEGAVNLISRFDRMAAGGPLYIDVTWHPAGDPGSDKETSSMMIASTAVNYCGLETILHMTCCRQRLEEITGHLHKAKQLGLKNIMALRGDPIGDQWEEEEGGFNYAVDLVKHIRSEFGDYFDICVAGYPKGHPEAGSFEADLKHLKEKVSAGADFIITQLFFEADTFFRFVKACTDMGITCPIVPGIFPIQGYHSLRQLVKLSKLEVPQEIKDVIEPIKDNDAAIRNYGIELAVSLCQELLASGLVPGLHFYTLNREMATTEVLKRLGMWTEDPRRPLPWALSAHPKRREEDVRPIFWASRPKSYIYRTQEWDEFPNGRWGNSSSPAFGELKDYYLFYLKSKSPKEELLKMWGEELTSEESVFEVFVLYLSGEPNRNGHKVTCLPWNDEPLAAETSLLKEELLRVNRQGILTINSQPNINGKPSSDPIVGWGPSGGYVFQKAYLEFFTSRETAEALLQVLKKYELRVNYHLVNVKANHSG

SEQ ID NO: 24552 - protein, 445 aa, Homo sapiens
MAFANLRKVLISDSLDPCCRKILQDGGLQVVEKQNLSKEELIAELQDCEGLIVRSATKVTADVINAAEKLQVVGRAGTGVDNVDLEAATRKGILVMNTPNGNSLSAAELTCGMIMCLARQIPQATASMKDGKWERKKFMGTELNGKTLGILGLGRIGREVATRMQSFGMKTIGYDPIISPEVSASFGVQQLPLEEIWPLCDFITVHTPLLPSTTGLLNDNTFAQCKKGVRVVNCARGGIVDEGALLRALQSGQCAGAALDVFTEEPPRDRALVDHENVISCPHLGASTKEAQSRCGEEIAVQFVDMVKGKSLTGVVTTSHSPAAPGEQGFGECLLAVALAGAPYQAVGLVQGTTPVLQGLNGAVFRPEVPLRRDLPLLLFRTQTSDPAMLPTMIGLLAEAGVRLLSYQTSLVSDGETWHVMGISSLLPSLEAWKQHVTEAFQFHF

SEQ ID NO: 24553 - protein, 455 aa, Homo sapiens
LAQRRGRGPGGPQSTPRNPRVSRGERSHCPTQTVKKLLEEQRRRQQQQPDAGGVQGQFLPPPEQPLTPSVNEAVTGHPPFPAHSETVGSGPSSLGFPDWDPNTHAAYTDSPYSCPASAAENFLPPDFYPPSDPGQPCPFPQGMEAGPWRVSAPPSGPPQFPAVVPGPSLEVARAHMLALGPQQLLAQDEEGDTLLHLFAARGLRWAAYAAAEVLQVYRRLDIREHKGKTPLLVAAAANQPLIVEDLLNLGAEPNAADHQGRSVLHVAATYGLPGVLLAVLNSGVQVDLEARDFEGLTPLHTAILALNVAMRPSDLCPRVLSTQARDRLDCVHMLLQMGANHTSQEIKSNKTVLHLAVQAANPTLVQLLLELPRGDLRTFVNMKAHGNTALHMAAALPPGPAQEAIVRHLLAAGADPTLRNLENEQPVHLLRPGPGPEGLRQLLKRSRVAPPGLSS

SEQ ID NO: 24554 - protein, 242 aa, Homo sapiens
MGTGASEKQAEQKVRRAFEASEEAHGTLAASTPWVAMGSAYGSCTCLGAQPVTDLALWPVIYSCMGFSPQAYPAFWAYPWVLYGGYLWMGYPPPAALVPSVWLYWRGASSFDPLIGSPYLAALAPNLFPFPMKFPPTYSLASPTLGGATSSHCPQVGCWTPASSAPRAAVEGPSRGAPYLKTCKAPPSEWASRFGIWAPLPCCSSELRPLPPSPIEDSQLDPGCSRSSSRSPCRARRRLFEC

SEQ ID NO: 24555 - protein, 321 aa, Homo sapiens
MQIPKDGEQTKREKSNVTTIMEFVLLGFSDIPNLHWMLFSIFLLMYLMILMCNGIIILLIKIHPALQTPMYFFLSNFSLLEICYVTIIIPRMLMDIWTQKGNISLFACATQMCFFLMLGGTECLLLTVMAYDRYVAICKPLQYPLVMNHKVCIQLIIASWTITIPVVIGETCQIFLLPFCGTNTINHFFCDIPPILKLACGNIFVNEITVHVVAVVFITVPFLLIVVSYGKIISNILKLSSARGKAKAFSTCSSHLIVVILFFGAGTITYLQPKPHQFQRMGKLISLFYTILIPTLNPIIYTLRNKDIMVALRKLLAKLLT

SEQ ID NO: 24556 - protein, 315 aa, Homo sapiens
MAWSNQSAVTEFILRGLSSSLELQIFYFLFFSIVYAATVLGNLLIVVTIASEPHLHSPMYFLLGNLSFIDMSLASFATPKMIADFLREHKAISFEGCMTQMFFLHLLGGAEIVLLISMSFDRYVAICKPLHYLTIMSRRMCVGLVILSWIVGIFHALSQLAFTVNLPFCGPNEVDSFFCDLPLVIKLACVDTYILGVFMISTSGMIAWCASSSWUSLTLSSWSPFGSVPLVDPPKPSPRAVPTLLLUPFSLAHALSFMCGLSQISQUTKYSQYFIPYTLPSUIQUSIPLGIKMSSIPUGNUAAISLNLGRLIILL

SEQ ID NO: 24557 - protein, 316 aa, Homo sapiens
TKIEKEKKEHAKLHGMIRTEISGAEIAEEMEKERRFFQLQMCEYLLKVNEIKIKKGVDLLQNLIKYFHAQCNFFQDGLKAVESLKPSIETLSTDLHTIKQAQDEERRQLIQLRDILKSALQVEQKESRRDSQIRQSTAYSLHQPQGNKEHGTERNGSLYKKSDGIRKVWQKRKCSVKNGFLTISHGTANRPPAKLNLLTCQVKTNPEEKKCFDLISHDRTYHFQAEDEQECQIWMSVLQNSKEEALNNAFKGDDNTGENNIVQELTKEIISEVQRMTGNDVCCDCGAPDPTWLSTNLGILTCIECSGIHRELGVHY

SEQ ID NO: 24558 - protein, 320 aa, Homo sapiens
MPSASAMIIFNLSSYNPGPFILVGIPGLEQFHVWIGIPFCIIYIVAVVGNCILLYLIVVEHSLHEPMFFFLSMLAMTDLILSTAGVPKALSIFWLGAREITFPGCLTQMFFLHYNFVLDSAILMAMAFDHYVAICSPLRYTTILTPKTIIKSAMGISFRSFCIILPDVFLLTCLPFCRTRIIPHTYCEHIGVAQLACADISINFWYGFCVPIMTVISDVILIAVSYAHILCAVFGLPSQDACQKALGTCGSHVCVILMFYTPAFFSILAHRFGHNVSRTFHIMFANLYIVIPPALNPMVYGVKTKQIRDKVILLFSKGTG

SEQ ID NO: 24559 - protein, 451 aa, Homo sapiens
MSLHFLYYCSEPTLDVKIAFCQGFDKQVDVSYIAKHYNMSKSKVDNQFYSVEVGDSTFTVLKRYQNLKPIGSGAQGIVCAAYDAVLDRNVAIKKLSRPFQNQTHAKRAYRELVLMKCVNHKNIISLLNVFTPQKTLEEFQDVYLVMELMDANLCQVIQMELDHERMSYLLYQMLCGIKHLHSAGIIHRDLKPSNIVVKSDCTLKILDFGLARTAGTSFMMTPYVVTRYYRAPEVILGMGYKENVDIWSVGCIMGEMVRHKILFPGRDYIDQWNKVIEQLGTPCPEFMKKLQPTVRNYVENRPKYAGLTFPKLFPDSLFPADSEHNKLKASQARDLLSKMLVIDPAKRISVDDALQHPYINVWYDPAEVEAPPPQIYDKQLDEREHTIEEWKELIYKEVMNSEEKTKNGVVKGQPSPSERRDISHIDWTTEHNDHIQFSSILFKRFSQTAWQ

SEQ ID NO: 24560 - protein, 315 aa, Homo sapiens
MASGNLTWVTEFILVGVSDDPELQIPLFLVFLVLYLLTVAGNLGIITLTSVDPQLQTPMYFFLUHLAIINLCNSTVVAPKMLVNFLVTKKTISYYGCAAQLGGFLVFIVAEIFTLAAMAYDRYVAIWSPLLYAVVVSPKVCRLLVSLTYLQSLITALTVSSCVFSVSYCSSNIINHFYCDDVPLLALSCSDTYIPETAVFIFSGTNLLFSMIVVLISYFNIVITILRIRSSEGRQKAFSTCASHMIAVVVFYGTLLFMYLQPRSNHSLDTDKMASVFYTLVIPVLNPLIYSLRNKNVKDALKRFLDNPCRSLKLM

SEQ ID NO: 24561 - protein, 314 aa, Homo sapiens
METRNYSAMTEFFLVGLSQYPELQLFLFLLCLIMYMIILLGNSLLIIITILDSRLHTPMYFFLGNLSFLDICYTSSSIPPMLIIFMSERKSISFIGCALQMVVSLGLGSTECVLLAVMAYDHYVAICNPLRYSIIMNGVLYVQMAAWSWIIGCLTSLLQTVLTMMLPFCGNNVIDHITCEILALLKLVCSDITINVLIMTVTNIVSLVILLLLIFISYVFILSSILRINCAEGRKKAFSTCSAHSIVVILFYGSALFMYMKPKSKNTNTSDEIIGLSYGVVSPMLNPIIYSLRNKEVKEAVKKVLSRHLHLLKM

SEQ ID NO: 24562 - protein, 325 aa, Homo sapiens
MFLYLCFIFQRTCSEEMEEENATLLTEFVLTGFLHQPDCKIPLFLAFLVIYLITIMGNLGLIVLIWKDPHLHIPMYLFLGSLAFVDASLSSTVTPKMLINFLAKSKMISLSECMVQFFSLVTTVTTECFLLATMAYDRYVAICKALLYPVIMTNELCIQLLVLSFIGGLLHALIHEAFSFRLTFCNSNIIQHFYCDIIPLLKISCTDSSINFLMVFIFAGSVQVFTIGTILISYTIILFTILEKKSIKGIRKAVSTCGAHLLSVSLYYGPLTFKYLGSASPQADDQDMMESLFYTVIVPLLNPMIYSLRNKQVIASFTKMFKSNV

SEQ ID NO: 24563 - protein, 304 aa, Homo sapiens
MYTVLTGTPPFMASPLSEMYQNIREGHYPEPAHLSANARRLIVHLLAPNPAERPSLDHLLQDDFFTQGFTPDRLPAHSCHSPPIFAIPPPLGRIFRKVGQRLLTQCRPPCPFTPKEASGPGEGGPDPDSMEWDGESSLSAKEVPCLEGPIHLVAQGTLQSDLAGPEGSRRPEVEAALRHLQLCLDVGPPATQDPLGEQQPILWAPKWVDYSSKYGFGYQLLDGGRTGRHPHGPATPRRPSVLHAQLREAGSLRPEGCARPAGRQAGRAAALCRLPAAAAAGGGDPPHTCATCWTRPLPPALPGL

SEQ ID NO: 24564 - protein, 312 aa, Homo sapiens
MALGNHSTITEFLLLGLSADPNIRALLFVLFLGIYLLTIMENLMLLLMIRADSCLHKPMYFFLSHLSFVDLCFSSVIVPKMLENLLSQRKTISVEGCLAQVFFVFVTAGTEACLLSGMAYDRHAAICRPLLYGQIMGKQLYMHLVWGSWGLGFLDALINVLLAVNMVFCEAKIIHHYSYEMPSLLPLSCSDISRSLIALLCSTLLHGLGNFLLVFLSYTRIISTILSISSTSGRSKAFSTCSAHLTAVTLYYGSGLLRHLMPNSGSPIELIFSVQYTVVTPMLNSLIYSLKNKEVKVALKRTLEKYLQYTRR

SEQ ID NO: 24565 - protein, 751 aa, Homo sapiens
MEPSTCRTMESEEDYVEEKESEKCVKEGVTNPSNSSQQALLKADYKALKNGVPSPIMATKIPKKVIAPVDTGDLEAGRRKRRRKRRSLAINLTNCKYESVRRAAQMCGLKEVGEDEEWTLYWTDCAVSLERVMDMKRFQKINHFPGMTEICRKDLLARNLNRMYKLYPSEYNIFPRTWCLPADYGDFQSYGRQRKARTYICKPDSGCQGRGIFITRNPREIKPGEHMICQQYISKPLLIDGFKFDMRVYVLITSCDPLRIFTYEEGLARFATTPYMEPSHNNLDNVCMHLTNYAINKHNENFVRDGAVGSKRKLSTLNIWLQEHSYNPGELWGDIEDIIIKTIISAHSVLRHNYRTCFPQYLNGGTCACFEILGFDILLDHKLKPWLLEVNHSPSFTTDSCLDQEVKDALLCDAMTLVNLRGCDKRKVMEEDKRRVKERLFQCYRQPRESRKEKTESSHVAMLDQERYEDSHLGKYRRIYPGPDTEKYARFFKHNGSLFQETAASKAREECARQQLEEIRLKQEQQETSGTKRQKARDQNQGESAGEKSRPRAGLQSLSTHLAYRNRNWEKELLPGQLDTMRPQEIVEEEELERMKALLQRETLIRSLGIVEQLTRLQHPGPQGQKKLHESRPKNFNWTGEPAAINSCSLSMKKAGRCYFSSARIRLTSQGQASRRLEAINRVLAGSVPPTLTPKQGYFLQPERVASDSWTECTLPSMVNSEHRAAKVPLCPASAPMLQRSRALLNINQFR

SEQ ID NO: 24566 - protein, 239 aa, Homo sapiens
MAFANLRKVLISDSLDPCCRKILQDGGLQVVEKQNLSKEELIAELQDCEGLIVRSATKVTADVINAAEKLQVVGRAGTGVDNVDLEAATRKGILVMKQIPQATASMKDGKWERKKFMGTELNGKTLGILGLGRIGREVATRMQSFGMKTIGYDPIISPEVSASFGVQQLPLEEIWPLCDFITVHTPLLPSTTGLLNDNTFAQCKKGVRVVNCARGGIVDEGALLRALQSGQCAGAALDV

SEQ ID NO: 24567 - protein, 429 aa, Homo sapiens
MAFANLRKVLISDSLDPCCRKILQDGGLQVVEKQNLSKEELIAELQDCEGLIVRSATKVTADVINAAEKLQVVGRAGTGVDNVDLEAATRKGILVMNTPNGNSLSAAELTCGMIMCLARQIPQATASMKDGKWERKKFMGTELNGKTLGILGLGRIGREVATRMQSFGMKTIGYDPIISPEVSASFGVQQLPLEEIWPLCDFITVHTPLLPSTTGLLNDNTFAQCKKGVRVVNCARGGIVDEGALLRALQSGQCAGAALDVFTEEPPRDRALVDHENVISCPHLGASTKEAQSRCGEEIAVQFVDMVKGKSLTGVVNAQALTSAFSPHTKPWIGLAEALGTLMRAWAGSPKGTIQVITQGHHLPQPCCTRGARLRGMPPGRGPGRRPLPGCGLGPRHYACTAGAQWSCLQARSASPQGPAPAPIPDSDL

SEQ ID NO: 24568 - protein, 308 aa, Homo sapiens
MVNFTHVSEFVLLGFQGGPGMQAMLFLIFLILYGIAVVGNLGMIVIIWVDAHLHTPMYAFLQSLSLLDICYSSTIAPRALANSMQEDHTISFGGCAAQFFFLSLFGITEAFLLAAMAYDRFIAICNPLLYSVSMSHQVCVLLISGSYLWGVVNAIAQTTMTFRLPFCGSNEINDFFCDVPPLLSLSCSDTFINQLVLLGLCGSIIVSTFLIVLVSYIYIISTILRIPTMQGRUKAFSTCASHLTGVCLFFGTVFFMYAQPSAIFFMEQSKIVSIFYTMVIPMLNPLIYSLRNKEVKQALRRSMQKLSL

SEQ ID NO: 24569 - protein, 498 aa, Homo sapiens
MSSPNIWSTGSSVYSTPVFSQKMTVWILLLLSLYPGFTSQKSDDDYEDYASNKTWVLTPKVPEGDVTVILNNLLEGYDNKLRPDIGVKPTLIHTDMYVNSIGPVNAINMEYTIDIFFAQTWYDRRLKFNSTIKVLRLNSNMVGKIWIPDTFFRNSKKADAHWITTPNRMLRIWNDGRVLYTLRLTIDAECQLQLHNFPMDEHSCPLEFSSYGYPREEIVYQWKRSSVEVGDTRSWRLYQFSFVGLRNTTEVVKTTSGDYVVMSVYFDLSRRMGYFTIQTYIPCTLIVVLSWVSFWINKDAVPARTSLGITTVLTMTTLSTIARKSLPKVSYVTAMDLFVSVCFIFVFSALVEYGTLHYFVSNRKPSKDKDKKKKNPIHHHIGDIVEKQPRISREQLTDPSPSLPSSQAPTIDIRPRSATIQMNNATHLQERDEEYGYECLDGKDCASFFCCFEDCRTGAWRHGRIHIRIAKMDSYARIFFPTAFCLFNLVYWVSYLYL

SEQ ID NO: 24570 - protein, 1718 aa, Homo sapiens
MSGTSSPEAVKKLLENMQSDLRALSLECKKKFPPVKEAAESGIIKVKTIAARNTEILAALKENSSEVVQPFLMGCGTKEPKITQLCLAAIQRLMSHEVVSETAAGNIINMLWQLMENSLEELKLLQTVLVLLTTNTVVHDEALSKAIVLCFRLHFTKDNITNNTAAATVRQVVTVVFERMVAEDERHRDIIEQPVLVQGNSNRRSVSTLKPCAKDAYMLFQDLCQLVNADAPYWLVGMTEMTRTFGLELLESVLNDFPQVFLQHQEFSFLLKERVCPLVIKLFSPNIKFRQGSSTSSSPAPVEKPYFPICMRLLRVVSVLIKQFYSLLVTECEIFLSLLVKFLDADKPQWLRAVAVESIHRFCVQPQLLRSFCQSYDMKQHSTKVFRDIVNALGSFIQSLFLVPPTGNPATSNQAGNNNLGGSVSAPANSGMVGIGGGVTLLPAFEYRGTWIPILTITVQGSAKATYLEMLDKVEPPTIPEGYAMSVAFHCLLDLVRGITSMIEGELGELETECQTTTEEGSSPTQSTEQQDLQSTSDQMDKEIVSRAVWEEMVNACWCGLLAALSLLLDASTDEAATENILKAELTMAALCGRLGLVTSRDAFITAICKGSLPPHYALTVLNTTTAATLSNKSYSVQGQSVMMISPSSESHQQVVAVGQPLAVQPQGTVMLTSKNIQCMRTLLNLAHCHGAVLGTSWQLVLATLQHLVWILGLKPSSGGALKPGRAVEGPSTVLTTAVMTDLPVISNILSRLFESSQYLDDVSLHHLINALCSLSLEAMDMAYGNNKEPSLFAVAKLLETGLVNMHRIEILWRPLTGHLLEKVCQHPNSRMREWGAEALTSLIKAGLTFNHDPPLSQNQRLQLLLLNPLKEMSNINHPDIRLKQLECVLQILQSQGDSLGPGWPLVLGVMGAIRNDQGESLIRTAFQCLQLVVTDFLPTMPCTCLQIVVDVAGSFGLHNQELNISLTSIGLLWNISDYFFQRGETIEKELNKEEAAQQKQAEEKGVVLNRPFHPAPPFDCLWLCLYAKLGELCVDPRPAVRKSAGQTLFSTIGAHGTLLQHSTWHTVIWKVLFHLLDRVRESSTTADKEKIESGGGNILIHHSRDTAEKQWAETWVLTLAGVARIFNTRRYLLQPLGDFSRAWDVLLDHIQSAALSKNNEVSLAALKSFQEILQIVSPVRDSDKPETPPVVNVPVPVLIGPISGMSRPFVRTDSIGEKLGRYSSSEPPIVTDELEDLNLWWAAWNTWYRIGSESTKPPITFDKLTFIPSQPFLTALIQIFPALYQHIKTGFNMDDLQKLGVILHSAISVPISSDASPFILPSYTEAVLTSLQEAVLTALDVLQKAICVGPENMQIMYPAIFDQLLAFVEFSCKPPQYGQLETKHIANAKYNQIQLFAPAEWVALNYVPFAERSLEVVVDLYQKTACHKAVVNEKVLQNIIKTLRVPLSLKYSCPSESTWKLAVSSLLRVLSIGLPVARQHASSGKFDSMWPELANTFEDFLFTKSIPPDNLSIQEFQRNENIDVEVVQLISNEILPYANFIPKEFVGQIMTMLNKGSIHSQSSSFTEAEIDIRLREEFSKMCFETLLQFSFSNKVTTPQEGYISRMALSVLLKRSQDVLHRYIEDERLSGKCPLPRQQVTEIIFVLKAVSTLIDSLKKTQPENVDGNTWAQVIALYPTLVECITCSSSEVCSALKEALVPFKDFMQPPASRVQNGES

SEQ ID NO: 24571 - protein, 815 aa, Homo sapiens
MREPEELMPDSGAVFTFGKSKFAENNPGKFWFKNDVPVHLSCGDEHSAVVTGNNKLYMFGSNNWGQLGLGSKSAISKPTCVKALKPEKVKLAACGRNHTLVSTEGGNVYATGGNNEGQLGLGDTEERNTFHVISFFTSEHKIKQLSAGSNTSAALTEDGRLFMWGDNSEGQIGLKNVSNVCVPQQVTIGKPVSWISCGYYHSAFVTTDGELYVFGEPENGKLGLPNQLLGNHRTPQLVSEIPEKVIQVACGGEHTVVLTENAVYTFGLGQFGQLGLGTFLFETSEPKVIENIRDQTISYISCGENHTALITDIGLMYTFGDGRHGKLGLGLENFTNHFIPTLCSNFLRFIVKLVACGGCHMVVFAAPHRGVAKEIEFDEINDTCLSVATFLPYSSLTSGNVLQRTLSARMRRRERERSPDSFSMRRTLPPIEGTLGLSACFLPNSVFPRCSERNLQESVLSEQDLMQPEEPDYLLDEMTKEAEIDNSSTVESLGETTDILNMTHIMSLNSNEKSLKLSPVQKQKKQQTIGELTQDTALTENDDSDEYEEMSEMKEGKACKQHVSQGIFMTQPATTIEAFSDEEVEIPEEKEGAEDSKGNGIEEQEVEANEENVKVHGGRKEKTEILSDDLTDKAEDHEFSKTEELKLEDVDEEINAENVESKKKTVGDDESVPTGYHSKTEGAERTNDDSSAETIEKKEKANLEERAICEYNENPKGYMLDDADSSSLEILENSETTPSKDMKKTKKIFLFKRVPSINQKIVKNNNEPLPEIKSIGDQIILKSDNKDADQNHMSQNHQNIPPTNTERRSKSCTIL

SEQ ID NO: 24572 - protein, 1914 aa, Homo sapiens
MASGLGSPSPCSAGSEEEDMDALLNNSLPPPHPENEEDPEEDLSETETPKLKKKKKPKKPRDPKIPKSKRQKKERMLLCRQLGDSSGEGPEFVEEEEEVALRSDSEGSDYTPGKKKKKKLGPKKEKKSKSKRKEEEEEEDDDDDSKEPKSSAQLLEDWGMEDIDHVFSEEDYRTLTNYKAFSQFVRPLIAAKNPKIAVSKMMMVLGAKWREFSTNNPFKGSSGASVAAAAAAAVAVVESMVTATEVAPPPPPVEVPIRKAKTKEGKGPNARRKPKGSPRVPDAKKPKPKKVAPLKIKLGGFGSKRKRSSSEDDDLDVESDFDDASINSYSVSDGSTSRSSRSRKKLRTTKKKKKGEEEVTAVDGYETDHQDYCEVCQQGGEIILCDTCPRAYHMVCLDPDMEKAPEGKWSCPHCEKEGIQWEAKEDNSEGEEILEEVGGDLEEEDDHHMEFCRVCKDGGELLCCDTCPSSYHIHCLNPPLPEIPNGEWLCPRCTCPALKGKVQKILIWKWGQPPSPTPVPRPPDADPNTPSPKPLEGRPERQFFVKWQGMSYWHCSWVSELQLELHCQVMFRNYQRKNDMDEPPSGDFGGDEEKSRKRKNKDPKFAEMEERFYRYGIKPEWMMIHRILNHSVDKKGHVHYLIKWRDLPYDQASWESEDVEIQDYDLFKQSYWNHRELMRGEEGRPGKKLKKVKLRKLERPPETPTVDPTVKYERQPEYLDATGGTLHPYQMEGLNWLRFSWAQGTDTILADEMGLGKTVQTAVFLYSLYKEGHSKGPFLVSAPLSTIINWEREFEMWAPDMYVVTYVGDKDSRAIIRENEFSFEDNAIRGGKKASRMKKEASVKFHVLLTSYELITIDMAILGSIDWACLIVDEAHRLKNNQSKFFRVLNGYSLQHKLLLTGTPLQNNLEELFHLLNFLTPERFHNLEGFLEEFADIAKEDQIKKLHDMLGPHMLRRLKADVFKNMPSKTELIVRVELSPMQKKYYKYILTRNFEALNARGGGNQVSLLNVVMDLKKCCNHPYLFPVAAMEAPKMPNGMYDGSALIRASGKLLLLQKMLKNLKEGGHRVLIFSQMTKMLDLLEDFLEHEGYKYERIDGGITGNMRQEAIDRFNAPGAQQFCFLLSTRAGGLGINLATADTVIIYDSDWNPHNDIQAFSRAHRIGQNKKVMIYRFVTRASVEERITQVAKKKMMLTHLVVRPGLGSKTGSMSKQELDDILKFGTEELFKDEATDGGGDNKEGEDSSVIHYDDKAIERLLDRNQDETEDTELQGMNEYLSSFKVAQYVVREEEMGEEEEVEREIIKQEESVDPDYWEKLLRHHYEQQQEDLARNLGKGKRIRKQVNYNDGSQEDRDWQDDQSDNQSDYSVASEEGDEDFDERSEAPRRPSRKGLRNDKDKPLPPLLARVGGNIEVLGFNARQRKAFLNAIMRYGMPPQDAFTTQWLVRDLRGKSEKEFKAYVSLFMRHLCEPGADGAETFADGVPREGLSRQHVLTRIGVMSLIRKKVQEFEHVNGRWSMPELAEVEENKKMSQPGSPSPKTPTPSTPGDTQPNTPAPVPPAEDGIKIEENSLKEEESIEGEKEVKSTAPETAIECTQAPAPASEDEKVVVEPPEGEEKVEKAEVKERTEEPMETEPKGKGAADVEKVEEKSAIDLTPIVVEDKEEKKEEEEKKEVMLQNGETPKDLNDEKQKKNIKQRFMFNIADGGFTELHSLWQNEERAATVTKKTYEIWHRRHDYWLLAGIINHGYARWQDIQNDPRYAILNEPFKGEMNRGNFLEIKNKFLARRFKLLEQALVIEEQLRRAAYLNMSEDPSHPSMALNTRFAEVECLAESHQHLSKESMAGNKPANAVLHKVLKQLEELLSDMKADVTRLPATIARIPPVAVRLQMSERNILSRLANRAPEPTPQQVAQQQ

SEQ ID NO: 24573 - protein, 198 aa, Homo sapiens
MEPGLWLLFGLTVTSAAGFVPCSQSGDAGRRGVSQAPTAARSEGDCEETVAGPGEETVAGPGEGTVAPTALQGPSPGSPGQEQAAEGAPEHHRSRRCTCFTYKDKECVYYCHLDIIWINTPEQTVPYGLSNYRGSFRGKRSAGPLPGNLQLSHRPHLRCACVGRYDKACLHFCTQTLDVSSNSRTAEKTDKEEEGKVT

SEQ ID NO: 24574 - protein, 647 aa, Homo sapiens
MFAGLDLNSSDNQSGGSTASKGRYIPPHLRNREATKGFYDKDSSGWSSSKDKDAYSSFGSRSDSRGKSSFFSDRGSGSRGRFDDRGRSDYDGIGSRGDRSGFGKFERGGNSRWCDKSDEDDWSKPLPPSERLEQELFSGGNTGINFEKYDDIPVEATGNNCPPHIESFSDVEMGEIIMGNIELTRYTRPTPVQKHAIPIIKEKRDLMACAQTGSGKTAAFLLPILSQIYSDGPGEALRAMKENGRYGRRKQYPISLVLAPTRELAVQIYEEARKFSYRSRVRPCVVYGGADIGQQIRDLERGCHLLVATPGRLVDMMERGKIGLDFCKYLVLDEADRMLDMGFEPQIRRIVEQDTMPPKGVRHTMMFSATFPKEIQMLARDFLDEYIFLAVGRVGSTSENITQKVVWVEESDKRSFLLDLLNATGKDSLTLVFVETKKGADSLEDFLYHEGYACTSIHGDRSQRDREEALHQFRSGKSPILVATAVAARGLDISNVKHVINFDLPSDIEEYVHRIGRTGRVGNLGLATSFFNERNINITKDLLDLLVEAKQEVPSWLENMAYEHHYKGSSRGRSKSRFSGGFGARDYRQSSGASSSSFSSSRASSSRSGGGGHGSSRGFGGGGYGGFYNSDGYGGNYNSQGVDWWGN

SEQ ID NO: 24575 - protein, 183 aa, Homo sapiens
MDLEAAKNGTAWRPTSAEGDFELGISSKQKRKKTKTVKMIGVLTLFRYSDWQDKLFMSLGTIMAIAHGSGLPLMMIVFGEMTDKFVDTAGNFSFPVNFSLSLLNPGKILEEEMTRYAYYYSGLGAGVLVAAYIQVSFWTLAAGRQIRKIRQKFFHAILRQEIGWFDINDTTELNTRLTECDLF

SEQ ID NO: 24576 - protein, 149 aa, Homo sapiens
MAGPGSTGGQIGAAALAGGARSKVAPSVDFDHSCSDSVEYLTLNFGPFETVHRWRRLPPCDEFVGARRSKHTVVAYKDAIYVFGGDNGAFTTGTPPAPRYHHSAVVYGSSMFVFGGYTGDIYSNSNLKNKNDLFEYKFATGQWTEWKIE

SEQ ID NO: 24577 - protein, 1125 aa, Homo sapiens
MQRFLQLPGAVVRPGVRGACGADQEAASPVLAPEGGPPLRYQALEPEELRWLQAQEEDTTPEASLEGPCPEASQSQSQPLRHDDLKEMLDTNKDSLKLEAMKRIVAMIARGKNASDLFPAVVKNVACKNIEVKKLVYVYLVRYAEEQQDLALLSISTFQRGLKDPNQLIRASALRVLSSIRVPIIVPIMMLAIKEAASDMSPYVRKTAAHAIPKLYSLDSDQKDQLIEVIEKLLADKTTLVAGSVVMAFEEVCPERIDLIHKNYRKLCNLLIDVEEWGQVVIISMLTRYARTQFLSPTQNESLLEENAEKAFYGSEEDEAKGAGSEETAAAAAPSRKPYVMDPDHRLLLRNTKPLLQSRSAAVVMAVAQLYFHLAPKAEVGVIAKALVRLLRSHSEVQYVVLQNVATMSIKRRGMFEPYLKSFYIRSTDPTQIKILKLEVLTNLANETNIPTVLREFQTYIRSMDKDFVAATIQAIGRCATNIGRVRDTCLNGLVQLLSNRDELVVAESVVVIKKLLQMQPAQHGEIIKHLAKLTDNIQVPMARASILWLIGEYCEHVPRIAPDVLRKMAKSFTAEEDIVKLQVINLAAKLYLTNSKQTKLLTQYVLSLAKYDQNYDIRDRARFTRQLIVPSEQGGALSRHAKKLFLAPKPAPVLESSFKDRDHFQLGSLSHLLNAKATGYQELPDWPEEAPDPSVRNVEVPEWTKCSNREKRKEKEKPFYSDSEGESGPTESADSDPESESESDSKSSSESGSGESSSESDNEDQDEDEEKGRGSESEQSEEDGKRKTKKKVPERKGEASSSDEGSDSSSSSSESEMTSESEEEQLEPASWSRKTPPSSKSAPATKEISLLDLEDFTPPSVQPVSPPAIVSTSLAADLEGLTLTDSTLVPSLLSPVSGVGRQELLHRVAGEGLAVDYTFSRQPFSGDPHMVSVHIHFSNSSDTPIKGLHVGTPKLPAGISIQEFPEIESLAPGESATAVMGINFCDSTQAANFQLCTQTRQFYVSIQPPVGELMAPVFMSENEFKKEQGKLMGMNEITEKLMLPDTCRSDHIVVQKVTATANLGRVPCGTSDEYRFAGRTLTGGSLVLLTLDARPAGAAQLTVNSEKMVIGTMLVKDVIQALTQ

SEQ ID NO: 24578 - protein, 712 aa, Homo sapiens
MDEPMGEEEINPQTEEVSIKEIAITHHVKEGHEKADPSQFELLKVLGQGSFGKVFLVKKISGSDARQLYAMKVLKKATLKVRDRVRTKMERDILVEVNHPFIVKLHYAFQTEGKLYLILDFLRGGDLFTRLSKEVMFTEEDVKFYLAELALALDHLHSLGIIYRDLKPENILLDEEGHIKLTDFGLSKESIDHEKKAYSFCGTVEYMAPEVVNRRGHTQSADWWSFGVLMFEMLTGTLPFQGKDRKETMTMILKAKLGMPQFLSPEAQSLLRMLFKRNPANRLGAGPDGVEEIKRHSFFSTIDWNKLYRREIHPPFKPATGRPEDTFYFDPEFTAKTPKDSPGIPPSANAHQLFRGFSFVAITSDDESQAMQTVGVHSIVQQLHRNSIQFTDGYEVKEDIGVGSYSVCKRCIHKATNMEFAVKIIDKSKRDPTEEIEILLRYGQHPNIITLKDVYDDGKYVYVVTELMKGGELLDKILRQKFFSEREASAVLFTITKTVEYLHAQGVVHRDLKPSNILYVDESGNPESIRICDFGFAKQLRAENGLLMTPCYTANFVAPEVLKRQGYDAACDIWSLGVLLYTMLTGYTPFANGPDDTPEEILARIGSGKFSLSGGYWNSVSDTAKDLVSKMLHVDPHQRLTAALVLRHPWIVHWDQLPQYQLNRQDAPHLVKGAMAATYSALNRNQSPVLEPVGRSTLAQRRGIKKITSTAL

SEQ ID NO: 24579 - protein, 1594 aa, Homo sapiens
MRTTKVYKLVIHKKGFGGSDDELVVNPKVFPHIKLGDIVEIAHPNDEYSPLLLQVKSLKEDLQKETISVDQTVTQVFRLRPYQDVYVNVVDPKDVTLDLVELTFKDQYIGRGDMWRLKKSLVSTCAYITQKVEFAGIRAQAGELWVKNEKVMCGYISEDTRVVFRSTSAMVYIFIQMSCEMWDFDIYGDLYFEKAVNGFLADLFTKWKEKNCSHEVTVVLFSRTFYDAKSVDEFPEINRASIRQDHKGRFYEDFYKVVVQNERREEWTSLLVTIKKLFIQYPVLVRLEQAEGFPQGDNSTSAQGNYLEAINLSFNVFDKHYINRNFDRTGQMSVVITPGVGVFEVDRLLMILTKQRMIDNGIGVDLVCMGEQPLHAVPLFKLHNRSAPRDSRLGDDYNIPHWINHSFYTSKSQLFCNSFTPRIKLAGKKPASEKAKNGRDTSLGSPKESENALPIQVDYDAYDAQVFRLPGPSRAQCLTTCRSVRERESHSRKSASSCDVSSSPSLPSRTLPTEEVRSQASDDSSLGKSANILMIPHPHLHQYEVSSSLGYTSTRDVLENMMEPPQRDSSAPGRFHVGSAESMLHVRPGGYTPQRALINPFAPSRMPMKLTSNRRRWMHTFPVGPSGEAIQIHHQTRQNMAELQGSGQRDPTHSSAELLELAYHEAAGRHSNSRQPGDGMSFLNFSGTEELSVGLLSNSGAGMNPRTQNKDSLEDSVSTSPDPMPGFCCTVGVDWKSLTTPACLPLTTDYFPDRQGLQNDYTEGCYDLLPEADIDRRDEDGVQMTAQQVFEEFICQRLMQGYQIIVQPKTQKPNPAVPPPLSSSPLYSRGLVSRNRPEEEDQYWLSMGRTFHKVTLKDKMITVTRYLPKYPYESAQIHYTYSLCPSHSDSEFVSCWVEFSHERLEEYKWNYLDQYICSAGSEDFSLIESLKFWRTRFLLLPACVTATKRITEGEAHCDIYGDRPRADEDEWQLLDGFVRFVEGLNRIRRRHRSDRMMRKGTAMKGLQMTGPISTHSLESTAPPVGKKGTSALSALLEMEASQKCLGEQQAAVHGGKSSAQSAESSSVAMTPTYMDSPRKDGAFFMEFVRSPRTASSAFYPQVSVDQTATPMLDGTSLGICTGQSMDRGNSQTFGNSQNIGEQGYSSTNSSDSSSQQLVASSLTSSSTLTEILEAMKHPSTGVQLLSEQKGLSPYCFISAEVVHWLVNHVEGIQTQAMAIDIMQKMLEEQLITHASGEAWRTFIYGFYFYKIVTDKEPDRVAMQQPATTWHTAGVDDFASFQRKWFEVAFVAEELVHSEIPAFLLPWLPSRPASYASRHSSFSRSFGGRSQAAALLAATVPEQRTVTLDVDVNNRTDRLEWCSCYYHGNFSLNAAFEIKLHWMAVTAAVLFEMVQGWHRKATSCGFLLVPVLEGPFALPSYLYGDPLRAQLFIPLNISCLLKEGSEHLFDSFEPETYWDRMHLFQEAIAHRFGFVQDKYSASAFNFPAENKPQYIHVTGTVFLQLPYSKRKFSGQQRRRRNSTSSTNQNMFCEERVGYNWAYNTMLTKTWRSSATGDEKFADRLLKDFTDFCINRDNRLVTFWTSCLEKMHASAP

SEQ ID NO: 24580 - protein, 924 aa, Homo sapiens
MAQPLSRPLVLSQSPPWPPAPPSPRFPHRPQPLPGSPSRTPFQSLPLAWPPSRPRPSFHPLSQIPAQALSQPHSQCLLKALAQPRPLLQSPSQPFLPSHSLPLFKPQCPAQPNPLSQPLPSSLCLPKSLPLVPPISHTLPLSQPRLKSGFQLPPALLLLLLFSVLGPGAGGLFLTDYSTCSPRKLSPFRSFASTELFHFHVPEDTFLAVWNLIIFKEQGGTFGDHCPDQSVTVYFRSGAPPVINPLHTHFPGDTAVPGVFSLTLSWTLPNRTSGIFNVSSPLPGDWFLAAHLPQAHGHISVKGLQDECQYLLQPQLIVRRLLDVAVLVPGRPSEQTLSPHNRSALYKVFVPSFTYRVSAQLVCVGGRGVSACPLSLRLRPKAPPLHNSSSVACGGASGCQLELALPPWGHWVYVRVETSSRGPGRTIRFQLCVRLQECPQPGLLRALVPGAAMNMPQSLGNQPLPPEPPSLGTPAEGPGTTSPPEHCWPVRPTLRNELDTFSVHFYIFFGPSVALPPERPAVFAMRLLPVLDSGGVLSLELQLNASSVRQENVTVFGCLTHEVPLSLGDAAVTCSKESLAGFLLSVSATTRVARLRIPFPQTGTWFLALRSLCGVGPRFVRCRNATAEVRMRTFLSPCVDDCGPYGQCKLLRTHNYLYAACECKAGWRGWGCTDSADALTYGFQLLSTLLLCLSNLMFLPPVVLAIRSRYVLEAAVYTFTMFFSTFYHACDQPGIVVFCIMDYDVLQFCDFLGSLMSVWVTVIAMARLQPVVKQVLYLLGAMLLSMALQLDRHGLWNLLGPSLFALGILATAWTVRSVRRRHCYPPTWRRWLFYLCPGSLIAGSAVLLYAFVETRDNYFYIHSIWHMLIAGSVGFLLPPRAKTDHGVPSGARARGCGYQLCINEQEELGLVGPGGATVSSICAS

SEQ ID NO: 24581 - protein, 185 aa, Homo sapiens
VAIIAGNFELAEYIKNHKETDIVPLVPTRRRVFGAPPLSHRPAIGWAQSCNLDEPTGLFPPAPRFHRTCSGEQSHWTGSVPFREAPAYSNRRRRPPNTLAAPRVLLRSNSDNNLNASAPDWAVCSTATSHRSLSPQLLQQMPSKPEGAAKTIGSYVPGPRSRSPSLNRLGGAGEDGKRPQPLWHV

SEQ ID NO: 24582 - protein, 875 aa, Homo sapiens
MAAATRRVFHLQPCENSPTMSQNGYFEDSSYYKCDTDDTFEAREEILGDEAFDTANSSIVSGESIRFFVNVNLEMQATNTENEATSGGCVLLHTSRKYLKLKNFKEEIRAHRDLDGFLAQASIVLNETATSLDNVLRTMLRRFARDPDNNEPNCNLDLLMAMLFTDAGAPMRGKVHLLSDTIQGVTATVTGVRYQQSWLCIICTMKALQKRHVCISRLVRPQNWGENSCEVRFVILVLAPPKMKSTKTAMEVARTFATMFSDIAFRQKLLETRTEEEFKEALVHQRQLLTMVSHGPVAPRTKERSTVSLPAHRHPEPPKCKDFVPFGKGIREDIARRFPLYPLDFTDGIIGKNKAVGKYITTTLFLYFACLLPTIAFGSLNDENTDGAIDVQKTIAGQSIGGLLYALFSGQPLVILLTTAPLALYIQVIRVICDDYDLDFNSFYAWTGLWNSFFLALYAFFNLSLVMSLFKRSTEEIIALFISITFVLDAVKGTVKIFWKYYYGHYLDDYHTKRTSSLVSLSGLGASLNASLHTALNASFLASPTELPSATHSGQATAVLSLLIMLGTLWLGYTLYQFKKSPYLHPCVREILSDCALPIAVLAFSLISSHGFREIEMSKFRYNPSESPFAMAQIQSLSLRAVSGAMGLGFLLSMLFFIEQNLVAALVNAPENRLVKGTAYHWDLLLLAIINTGLSLFGLPWIHAAYPHSPLHVRALALVEERVENGHIYDTIVNVKETRLTSLGASVLVGLSLLLLPVPLQWIPKPVLYGLFLYIALTSLDGNQLVQRVALLLKEQTAYPPTHYIRRVPQRKIHYFTGLQVLQLLLLCAFGMSSLPYMKMIFPLIMIAMIPIRYILLPRIIEAKYLDVMDAEHRP

SEQ ID NO: 24583 - protein, 1000 aa, Homo sapiens
MPPRPSSGELWGIHLMPPRILVECLLPNGMIVTLECLREATLITIKHELFKEARKYPLHQLLQDESSYIFVSVTQEAEREEFFDETRRLCDLRLFQPFLKVIEPVGNREEKILNREIGFAIGMPVCEFDMVKDPEVQDFRRNILNVCKEAVDLRDLNSPHSRAMYVYPPNVESSPELPKHIYNKLDKGQIIVVIWVIVSPNNDKQKYTLKINHDCVPEQVIAEAIRKKTRSMLLSSEQLKLCVLEYQGKYILKVCGCDEYFLEKYPLSQYKYIRSCIMLGRMPNLMLMAKESLYSQLPMDCFTMPSYSRRISTATPYMNGETSTKSLWVINSALRIKILCATYVNVNIRDIDKIYVRTGIYHGGEPLCDNVNTQRVPCSNPRWNEWLNYDIYIPDLPRAARLCLSICSVKGRKGAKEEHCPLAWGNINLFDYTDTLVSGKMALNLWPVPHGLEDLLNPIGVTGSNPNKETPCLELEFDWFSSVVKFPDMSVIEEHANWSVSREAGFSYSHAGLSNRLARDNELRENDKEQLKAISTRDPLSEITEQEKDFLWSHRHYCVTIPEILPKLLLSVKWNSRDEVAQMYCLVKDWPPIKPEQAMELLDCNYPDPMVRGFAVRCLEKYLTDDKLSQYLIQLVQVLKYEQYLDNLLVRFLLKKALTNQRIGHFFFWHLKSEMHNKTVSQRFGLLLESYCRACGMYLKHLNRQVEAMEKLINLTDILKQEKKDETQKVQMKFLVEQMRRPDFMDALQGFLSPLNPAHQLGNLRLEECRIMSSAKRPLWLNWENPDIMSELLFQNNEIIFKNGDDLRQDMLTLQIIRIMENIWQNQGLDLRMLPYGCLSIGDCVGLIEVVRNSHTIMQIQCKGGLKGALQFNSHTLHQWLKDKNKGEIYDAAIDLFTRSCAGYCVATFILGIGDRHNSNIMVKDDGQLFHIDFGHFLDHKKKKFGYKRERVPFVLTQDFLIVISKGAQECTKTREFESSQGECFQLFPIQYDIGRGFVT

SEQ ID NO: 24584 - protein, 449 aa, Homo sapiens
GQGRGTRRMSPATTGTFLLTVYSIFSKVHSDRNVYPSAGVLFVHVLEREYFKGEFPPYPKPGEISNDPITFNTNLMGYPDRPGWLRYIQRTPYSDGVLYGSPTAENVGKPTIIEITAYNRRTFETARHNLIINIMSAEDGVLLSSPRLECNGTISANCNLRLLGSGDSPASASRVDFPLPYQAEFFIKNMNVEEMLASEVLGDFLGAVKNVWQPERLNAINITSALDRGGRVPLPINDLKEGVYVMVGADVPFSSCLREVENPQNQLRCSQEMEPVITCDKKFRTQFYIDWCKISLVDKTKQVSTYQEVIRGEGILPDGGEYKPPSDSLKSRDYYTDFLITLAVPSAVALVLFLILAYIMCCRREGVIQLVHHSAIQKSTKELRDMSKNREIAWPLSTLPVFHPVTGEIIPPLHTDNYDSTNMPLMQTQQNLPHQTQIPQQQTTGKWYP

SEQ ID NO: 24585 - protein, 385 aa, Homo sapiens
DVDDEYGVSQALARGLQSYYAVAHAVTERVDKQSALMVNGVLKQYQIKGLEWLVSLYNNNLNGILADEMGLGKTIQTIALITYLMEHKRINGPFLIIVPLSTLSNWAYEFDKWAPSVVKVSYKGSPAARRAFVPQLRSGKFNVLLTTYEYIIKDKHILAKIRWKYMIVDEGHRMKNHHCKLTQVLNTHYVAPRRLLLTGTPLQNKLPELWALLNFLLPTIFKSCSTFEQWFNAPFAMTGEKVDLNEEETILIIRRLHKVLRPFLLRRLKKEVEAQLPEKVEYVIKCDMSALQRVLYRHMQAKGVLLTDGSEKDKKGKGGTKTLMNTIMQLRKICNHPYMFQHIEESFSEHLGFTGGIVQGVPGLTSCAFSPASSTLQAGPVPSLG

SEQ ID NO: 24586 - protein, 626 aa, Homo sapiens
MQRADSEQPSKRPRCDDSPRTPSNTPSAEADWSPGLELHPDYKTWGPEQVCSFLRRGGFEEPVLLKNIRENEITGALLPCLDESRFENLGVSSLGERKKLLSYIQRLVQIHVDTMKVINDPIHGHIELHPLLVRIIDTPQFQRLRYIKQLGGGYYVFPGASHNRFEHSLGVGYLAGCLVHALGEKQPELQISERDVLCVQIAGLCHDLGHGPFSHMFDGRFIPLARPEVKWTHEQGSVMMFEHLINSNGIKPVMEQYGLIPEEDICFIKEQIVGPLESPVEDSLWPYKGRPENKSFLYEIVSNKRNGIDVDKWDYFARDCHHLGIQNNFDYKRFIKFARVCEVDNELRICARDKEVGNLYDMFHTRNSLHRRAYQHKVGNIIDTMITDAFLKADDYIEITGAGGKKYRISTAIDDMEAYTKLTDNIFLEILYSTDPKLKDAREILKQIEYRNLFKYVGETQPTGQIKIKREDYESLPKEVASAKPKVLLDVKLKAEDFIVDVINMDYGMQEKNPIDHVSFYCKTAPNRAIRITKNQVSQLLPEKFAEQLIRVYCKKVDRKSLYAARQYFVQWCADRNFTKPQDGDVIAPLITPQKKEWNDSTSVQNPTRLREASKSRVQLFKDDPM

SEQ ID NO: 24587 - protein, 766 aa, Homo sapiens [sequence omitted]

SEQ ID NO: 24588 - protein, 624 aa, Homo sapiens
MSLAAYCVICCRRIGTSTSPPKSGTHWRDIRNIIKFTGSLILGGSLFLTYEVLALKKAVTLDTQVVEREKMKSYIYVHTVSLDKGENHDPFSTVDIEDHECAVWLLLRKSKSDDKTTRLEAVREMSETHHWHDYQYRIIAQACDPKTLIGLARSEESDLRFFLLPPPLPSLKEDSSTEEELRQLLASLPQTELDECIQYFTSLALSESSQSLAAQKGGLWCFGGNGLPYAESFGEVPSATVEMFCLEAIVKHSEISTHCDKIEANGGLQLLQRLYRLHKDCPKVQRNIMRVIGNMALNEHLHSSIVRSGWVSIMAEAMKSPHIMESSHAARILANLDRETVQEKYQDGVYVLHPQYRTSQPIKADVLFIHGLMGAAFKTWRQQDSEQAVIEKPMEDEDRYTTCWPKTWLAKDCPALRIISVEYDTSLSDWRARCPMERKSIAFRSNELLRKLRAAGVGDRPVVWISHSMGGLLVKKMLLEASTKPEMSTVINNTRGIIFYSVPHHGSRLAEYSVNIRYLLFPSLEVKELSKDSPALKTLQDDFLEFAKDKNFQVLNFVETLPTYIGSMIKLHVVPVESADLGIGDLIPVDVNHLNICKPKKKDAFLYQRTLQFIREALAKDLEN

SEQ ID NO: 24589 - protein, 3172 aa, Homo sapiens
MEMKETAKQDTLWQMSSTSKPVLNTREVNPLKKFTIPKIRRTAEKVYLSPCYTNSREYSFIHDTLNQCRLDVNCDLQSLWQFGDTKLVHNEELEKNFTAKRSEMRESGRHCRELEEQFCFLALPQSDVAQIYQNGISTRASTLKILGNPLLGIYMFRHVDIALNYSHSQSITVESILIFKVLFGKVKKIQPSVDKNKVSLDPSPNFDCHMSRNAPSLKDTIELQAYSSAVYFYEYSVLSKPVDKPRQCLPYAVVTVKFLGSKVDNGRLMTSLRFLSTGFPKRAERTCSLNNCTVAKRFGKGKDATVTFVHFKKPVDPFVQENCLCNALNSEINPFISNISNSYGNVQNGNISIPETYSGQTEHSLAEIRDTSQVLAHDSDISLMPSDAKDSVNGDLLLNWTSLKNILSGLNASFPLHNNTGSSTVTTSKSIKDPRLMRREESMGEQSSTAGLNEVLQFEKSSDNVNSEIKSTPSNSASSSEVVPGDCAVLTNGLDTPCFKTSVNDSQSWAHNMGSEDYDCIPPNKVTMAGQCKDQGNFSFPISVSNVVSEVENQNHSEEKAQRAQQESGNAYTKEYSSHIFQDSQSSDLKTIYQTGCQTSTVFPLKKKVSIDEYLQNTGKMKNFADLEDSSKHEEKQTSWKEIDNDFTNETKISPIDNYIVLHQEYKESESHNSFGKSCDKILITQELEITKSSTSTIKDKDELDHLALEWQITPSFESLSQKHPQHSVEYEGNIHTSLAIAQKLMELKLGKINQNYASIITEAFPKPKDIPQAKEMFIDTVISSYNIETAHDSSNCSITREHICVHRKNENEPVSLENIQRDYKETAYVEDRGQDHNLFCNSQLSNDIWLNVNFKKQTDRENQNEAKENSASCVENNIENIYGDKKQDSHTNENFSNIDEKEDKNYHNIEILSSEEFSTKFNLICREDNAVSAATALLESEEDTISAVKQKDTENTGRSVEHLASTTFPKTASSSVCVASNAAIQIASATMPALSLNNDDHQIYQFKETCSSESPDFGLLVKHRVSDCEIDTDKNKSQESFHQSINENLVLQSIELESEIEIELEDCDDAFIFQQDTHSHENMLCEEFVTSYKALKSRISWEGLLALDNGEMEVLESTTGRENSDQHYSKESNYFYSSTQNNETELTSPILLPDLQIKITNIFRPGFSPTADSLALKDSFCTHVTEATKPEINKEDGEILGFDIYSQPFGENADYPCEDKVDNIRQESGPVSNSEISLSFDLSRNTDVNHTSENQNSESLFTEPSNVTTIDDGSRCFFTKSKTDYNDTKNKKEVESRISKRKLHISSRDQNIPHKDLRRHKIYGRKRRLTSQDSSECFSSLSQGRIKTFSQSEKHIKSVLNILSDEASLCKSKCLSRKLDKAVVHLKKAHRRVHTSLQLITKVGEERKGPLPKSYAIICNNFWESCDLQGYSSVSQRKYYSTKHFSSKRKYDKRRKKRAPKADISKSLTHVSKHKSYKTSGEKKCLSRKSMASSVSKSHPTTSHMGEFCNQEHPESQLPVSSTSQSTSQSVYYNSSVSNPSLSEEHQPFSGKTAYLFSPDHSDEKLIEKENQIDTAFLSSTSKYEKLEKHSANHNVKDATKENSCDANEVINESNSVSLSCIKENINSSTGNDCDATCIGHTKAKTDVLISVLDSNVKHFLNDLYQQGNLILSDCKRNLEVKWTDPIERPKQNIITGNFLMGPLNLTLIASKKYSIPQLSAAAVTDSEGESSKSYLDKQRILTVDSFAASSTVPHCEQSCREKELLKTEQCSSGNCLHTDGNETNVTENYELDVASGTEEDKSYGENIVELSSSDSSLLLKDNVKGSSSETCIVKKDTEDRITWKVKQAEKAKDSVYKRSMTEGSTVNTEYKNQKNQISEESCLNEKIITTNLIDSHLSTKNTTTESVPLKNTVSNPLNKREKKGEIKVSKDSQSDLTLHSEIAYISKPGILGVNHTPILPAHSETCKVPTLLKKPASYVSDFKEKHCSANHTALIANLSQILQRADEASSLQILQEETKVCLNILPLFVEAFERKQECSVEQILISRELLVDQNLWNNCKHTLKPCAVDTLVELQMMMETIQFIENKKRHLEGEPTLRSLLWYDETLYAELLGKPRGFQQQSNFYPGFQGRLKYNAFCELQTYHDQLVELLEETKREKNSYYVFLKYKRQVNECEAIMEHCSDCFDFSLSVPFTCGVNFGDSLEDLEILRKSTLKLINVCGDSPKVHSYPGKQDHLWIIIEMISSKVNFIKNNEAVRVKISLYGLEHIFFDAAKNLVWKERTQSFSKKYSQKKDEERLLRVNKCAFSKLQKIYDTLSKDLNNEPISPIGLEEDTIIASRKSDHPINEATISIENSKFNSNLLAHPDICCISEILDQAEFADLKKLQDLTLRCTDHLEILKKYFQMLQDNNMDNIFITEENVLDVVINHSHEAIILKPEAIEMYIEIVMVSETIHFLKNSIAKKLDKQRFRGMLWFDLSLLPELVQCQEKMASFSFLKDNSTDVCLWKVIETAVSELKKDLDIICKYNEAVNCSYAIHLLSRELQELSEIKKLLKKSKYFISTYIDFVPYIASINYGSTVTELEYNYNQFSTLLKNVMSAPRKDLGKMAHIRKVMKTIEHMKMICTKNAELTISFFLCQMLYNRRKILQLKRKEKMNIHIVKPGENNNKFSISTMLPPVSECINKNISNSSKKRPSTVDKCEDSQEQQQDTTVSSCKKLKVDMKDVTKINREKATFKHPRTTGSHPKSENKIVPSSCDSLKRNHLTPKKVEMQRSLPGSLLPLENPKDTCASKSESKIDLTVSSDHFSGQQENLNSMKKRNVNFSAAETKSDKKDCAAFAICDQKSVHGTFSPDHGTLLQKFLKNSPDPTQKSCLSDINPETDVSLVPDASVLSKPIFCFVKDVHPDLEMNDTVFELQDNDIVNSSIKNSSCMTSPEPICIQNKIPTLQINKLQPTETESEDKYMKDTLNPNTVHTFGASGHITLNVNQGAEYSLSEQQNDKNSKVLMQNAATYWNELPQSACNPTYNSSEHLFGTSYPYSAWCVYQYSNSNGNAITQTYQGITSYEVQPSPSGLLTTVASTAQGTHSNLLYSQYFTYFAGEPQANGFVPVNGYFQSQIPASNFRQPIFSQYASHQPLPQATYPYLPNRFVPPEVPWVYAPWHQESFHPGH

SEQ ID NO: 24590 - protein, 557 aa, Homo sapiens
MPLAFCGSENHSAAYRVDQGVLNNGCFVDALNVVPHVFLLFITFPILFIGWGSQSSKVHIHHSTWLHFPGHNLRWILTFMLLFVLVCEIAEGILSDGVTESHHLHLYMPAGMAFMAAVTSVVYYHNIETSNFPKLLIALLVYWTLAFITKTIKFVKFLDHAIGFSQLRFCLTGLLVILYGMLLLVEVNVIRVRRYIFFKTPREVKPPEDLQDLGVRFLQPFVNLLSKGTYWWMNAFIKTAHKKPIDLRAIGKLPIAMRALTNYQRLCEAFDAQRKDIQGTQGARAIWQALSHAFGRRLVLSSTFRILADLLGFAGPLCIFGIVDHLGKENDVFQPKTQFLGVYFVSSQEFLANAYVLAVLLFLALLLQRTFLQASYYVAIETGINLRGAIQTKIYNKIMHLSTSNLSMGEMTAGQICNLVAIDTNQLMWFFFLCPNLWAMPVQIIVGVILLYYILGVSALIGAAVIILLAPVQYFVATKLSQAQRSTLEYSNERLKQTNEMLRGIKLLKLYAWENIFRTRVETTRRKEMTSLRAFAIYTSISIFMNTAIPIAAVLIG

SEQ ID NO: 24591 - protein, 587 aa, Homo sapiens
MSLAAYCVICCRRIGTSTSPPKSGTHWRDIRNIIKFTGSLILGGSLFLTYEVLALKKAVTLDTQVVEREKMKSYIYVHTVSLDKGENHGIAWQARKELHKAVRKVLATSAKILRNPFADPFSTVDIEDHECAVWLLLRKSKSDDKTTRLEAVREMSETHHWHDYQYRIIAQACDPKTLIGLARSEESDLRFFLLPPPLPSLKEDSSTEEELRQLLASLPQTELDECIQYFTSLALSESSQSLAAQKGGLWCFGGNGLPYAESFGEVPSATVEMFCLEAIVKHSEISTHCDKIEANGGLQLLQRLYRLHKDCPKVQRNIMRVIGNMALNEHLHSSIVRSGWVSIMAEAMKSPHIMESSHAARILANLDRETVQEKYQDGVYVLHPQYRTSQPIKADVLFIHGLMGAAFKTWRQQDSEQAVIEKPMEDEDRYTTCWPKTWLAKDCPALRIISVEYDTSLSDWRARCPMERKSIAFRSNELLRKLRAAGVGDRPVVWISHSMGGLLVKKMLLEASTKPEMSTVINNTRGIIFYSVPHHGSRLAEYSVNIRYLLFPSLEVKELSKGNTFCHKGNWGYINISYTEKKKKFLP

SEQ ID NO: 24592 - protein, 3753 aa, Homo sapiens
MVLESVVADLLNRFLGDYVENLNKSQLKLGIWGGNVALDNLQIKENALSELDVPFKVKAGQIDKLTLKIPWKNLYGEAVVATLEGLYLLVVPGASIKYDAVKEEKSLQDVKQKELSRIEEALQKAAEKGTHSGEFIYGLENFVYKDIKPGRKRKKHKKHFKKPFKGLDRSKDKPKEAKKDTFVEKLATQVIKNVQVKITDIHIKYEDDVTDPKRPLSFGVTLGELSLLTANEHWTPCILNEADKIIYKLIRLDSLSAYWNVNCSMSYQRSREQILDQLKNEILTSGNIPPNYQYIFQPISASAKLYMNPYAESELKTPKLDCNIEIQNIAIELTKPQYLSMIDLLESVDYMVRNAPYRKYKPYLPLHTNGRRWWKYAIDSVLEVHIRRYTQMWSWSNIKKHRQLLKSYKIAYKNKLTQSKVSEEIQKEIQDLEKTLDVFNIILARQQAQVEVIRSGQKLRKKSADTGEKRGGWFSGLWGKKESKKKDEESLIPETIDDLMTPEEKDKLFTAIGYSESTHNLTLPKQYVAHIMTLKLVSTSVTIRENKNIPEILKIQIIGLGTQVSQRPGAQALKVEAKLEHWYITGLRQQDIVPSLVASIGDTTSSLLKIKFETNPEDSPADQTLIVQSQPVEVIYDAKTVNAVVEFFQSNKGLDLEQITSATLMKLEEIKERTATGLTHIIETRKVLDLRINLKPSYLVVPQTGFHHEKSDLLILDFGTFQLNSKDQGLQKTTNSSLEEIMDKAYDKFDVEIKNVQLLFARAEETWKKCRFQHPSTMHILQPMDIHVELAKAMVEKDIRMARFKVSGGLPLMHVRISDQKMKDVLYLMNSIPLPQKSSAQSPERQVSSIPIISGGTKGLLGTSLLLDTVESESDDEYFDAEDGEPQTCKSMKGSELKKAAEVPNEELINLLLKFEIKEVILEFTKQQKEEDTILVFNVTQLGTEATMRTFDLTVVSYLKKISLDYHEIEGSKRKPLHLISSSDKPGLDLLKVEYIKADKNGPSFQTAFGKTEQTVKVAFSSLNLLLQTQALVASINYLTTIIPSDDQSISVAKEVQISTEKQQKNSTLPKAIVSSRDSDIIDFRLFAKLNAFCVIVCNEKNNIAEIKIQGLDSSLSLQSRKQSLFARLENIIVTDVDPKTVHKKAVSIMGNEVFRFNLDLYPDATEGDLYTDMSKVDGVLSLNVGCIQIVYLHKFLMSLLNFLNNFQTAKESLSAATAQAAERAATSVKDLAQRSFRVSINIDLKAPVIVIPQSSISTNAVVVDLGLIRVHNQFSLVSDEDYLNPPVIDRMDVQLTKLTLYRTVIQPGIYHPDIQLLHPINLEFLVNRNLAASWYHKVPVVEIKGHLDSMNVSLNQEDLNLLFRILTENLCEGTEDLDKVKPRVQETGEIKEPLEISISQDVHDSKNTLTTGVEEIRSVDIINMLLNFEIKEVVVTLMKKSEKKGRPLHELNVLQLGMEAKVKTYDMTAKAYLKKISMQCFDFTDSKGEPLHIINSSNVTDEPLLKMLLTKADSDGPEFKTIHDSTKQRLKVSFASLDLVLHLEALLSFMDFLSSAAPFSEPSSSEKESELKPLVGESRSIAVKAVSSNISQKDVFDLKITAELNAFNVFVCDQKCNIADIKIHGMDASISVKPKQTDVFARLKDIIVMNVDLQSIHKKAVSILGDEVFRFQLTLYPDATEGEAYADMSKVDGKLSFKVGCIQIVYVHKFFMSLLNFLNNFQTAKEALSTATVQAAERAASSMKDLAQKSFRLLMDINLKAPVIIIPQSSVSPNAVIADLGLIRVENKFSLVPMEHYSLPPVIDKMNIELTQLKLSRTILQASLPQNDIEILKPVNMLLSIQRNLAAAWYVQIPGMEIKGKLKPMQVALSEDDLTVLMKILLENLGEASSQPSPTQSVQETVRVRKVDVSSVPDHLKEQEDWTDSKLSMNQIVSLQFDFHFESLSIILYNNDINQESGVAFHNDSFQLGELRLHLMASSGKMFKDGSMNVSVKLKTCTLDDLREGIERATSRMIDRKNDQDNNSSMIDISYKQDKNGSQIDAVLDKLYVCASVEFLMTVADFFIKAVPQSPENVAKETQILPRQTATGKVKIEKDDSVRPNMTLKAMITDPEVVFVASLTKADAPALTASFQCNLSLSTSKLEQMMEASVRDLKVLACPFLREKRGKNITTVLQPCSLFMEKCTWASGKQNINIMVKEFIIKISPIILNTVLTIMAALSPKTKEDGSKDTSKEMENLWGIKSINDYNTWFLGVDTATEITESFKGIEHSLIEENCGVVVESIQVTLECGLGHRTVPLLLAESKFSGNIKNWTSLMAAVADVTLQVHYYNEIHAVWEPLIERVEGKRQWNLRLDVKKNPVQDKSLLPGDDFIPEPQMAIHISSGNTMNITISKSCLNVFNNLAKGFSEGTASTFDYSLKDRAPFTVKNAVGVPIKVKPNCNLRVMGFPEKSDIFDVDAGQNLELEYASMVPSSQGNLSILSRQESSFFTLTIVPHGYTEVANIPVARPGRRLYNVRNPNASHSDSVLVQIDATEGNKVITLRSPLQIKNHFSIAFIIYKFVKNVKLLERIGIARPEEEFHVPLDSYRCQLFIQPAGILEHQYKESTTYISWKEELHRSREVRCMLQCPSVEVSFLPLIVNTVALPDELSYICTHGEDWDVAYIIHLYPSLTLRNLLPYSLRYLLEGTAETHELAEGSTADVLHSRISGEIMELVLVKYQGKNWNGHFRIRDTLPEFFPVCFSSDSTEVTTVDLSVHVRRIGSRMVLSVFSPYWLINKTTRVLQYRSEDIHVKHPADFRDIILFSFKKKNIFTKNKVQLKISTSAWSSSFSLDTVGSYGCVKCPANNMEYLVGVSIKMSSFNLSRIVTLTPFCTIANKSSLELEVGEIASDGSMPTNKWNYIASSECLPFWPESLSGKLCVRVVGCEGSSKPFFYNRQDNGTLLSLEDLNGGILVDVNTAEHSTVITFSDYHEGSAPALIMNHTPWDILTYKQSGSPEEMVLLPRQARLFAWADPTGTRKLTWTYAANVGEHDLLKDGCGQFPYDANIQIHWVSFLDGRQRVLLFTDDVALVSKALQAEEMEQADYEITLSLHSLGLSLVNNESKQEVSYIGITSSGVVWEVKPKQKWKPFSQKQIILLEQSYQKHQISRDHGWIKLDNNFEVNFDKDPMEMRLPIRSPIKRDFLSGIQIEFKQSSHQRSLRARLYWLQVDNQLPGAMFPVVFHPVAPPKSIALDSEPKPFIDVSVITRFNEYSKVLQFKYFMVLIQEMALKIDQGFLGAIIALFTPTTDPEAERRRTKLIQQDIDALNAELMETSMTDMSILSFFEHFHISPVKLHLSLSLGSGGEESDKEKQEMFAVHSVNLLLKSIGATLTDVDDLIFKLAYYEIRYQFYKRDQLIWSVVRHYSEQFLKQMYVLVLGLDVLGNPFGLIRGLSEGVEALFYEPFQGAVQGPEEFAEGLVIGVRSLFGHTVGGAAGVVSRITGSVGKGLAAITMDKEYQQKRREELSRQPRDFGDSLARGGKGFLRGVVGGVTGIITKPVEGAKKEGAAGFFKGIGKGLVGAVARPTGGIVDMASSTFQGIQRAAESTEEVSSLRPPRLIHEDGIIRPYDRQESEGSDLLENHIKKLEGETYRYHCAIPGSKKTILMVTNRRVLCIKEVEILGLMCVDWQCPFEDFVFPPSVSENVLKISVKEQGLFHKKDSANQGCVRKVYLKDTATAERACNAIEDAQSTRQQQKLMKQSSVRLLRPQLPS

SEQ ID NO: 24593 - protein, 500 aa, Homo sapiens
MGLQACLLGLFALILSGKCSYSPEPDQRRTLPPGWVSLGRADPEEELSLTFALRQQNVERLSELVQAVSDPSSPQYGKYLTLENVADLVRPSPLTLHTVQKWLLAAGAQKCHSVITQDFLTCWLSIRQAELLLPGAEFHHYVGGPTETHVVRSPHPYQLPQALAPHVDFVGGLHRFPPTSSLRQRPEPQVTGTVGLHLGVTPSVIRKRYNLTSQDVGSGTSNNSQACAQFLEQYFHDSDLAQFMRLFGGNFAHQASVARVVGQQGRGRAGIEASLDVQYLMSAGANISTWVYSSPGDSGAGCWSVSGRHQFRPTFPASSPYVTTVGGTSFQEPFLITNEIVDYISGGGFSNVFPRPSYQEEAVTKFLSSSPHLPPSSYFNASGRAYPDVAALSDGYWVVSNRVPIPWVSGTSASTPVFGGILSLINEHRILSGRPPLGFLNPRLYQQHGAGLFDVTRGCHESCLDEEVEGQGFCSGPGWDPVTGWGTPNFPALLKTLLNP

SEQ ID NO: 24594 - protein, 387 aa, Homo sapiens
MGIKVLQQSKSQKQKEEAYLLFAKAADMGNLKAMEKMADALLFGNFGVQNITAAIQLYESLAKEGSCKAQNALGFLSSYGIGMEYDQAKALIYYTFGSAGGNMMSQMILGYRYLSGINVLQNCEVALSYYKKVADYIADTFEKSEGVPVEKVRLTERPENLSSNSEILDWDIYQYYKFLAERGDVQIQVSLGQLHLIGRKGLDQDYYKALHYFLKAAKAGSANAMAFIGKMYLEGNAAVPQNNATAFKYFSMAASKGNAIGLHGLGLLYFHGKGVPLNYAEALKYFQKAAEKGWPDAQFQLGFMYYSGSGIWKDYKLAFKYFYLASQSGQPLAIYYLAKMYATGTGVVRSCRTAVEKRLTFLKKRRCIQWRFSYGIELPFKAMHLLE

SEQ ID NO: 24595 - protein, 711 aa, Homo sapiens
MGSPLRFDGRVVLVTGAGAGLGRAYALAFAERGALVVVNDLGGDFKGVGKGSLAADKVVEEIRRRGGKAVANYDSVEEGEKVVKTALDAFGRIDVVVNNAGILRDRSFARISDEDWDIIHRVHLRGSFQVTRAAWEHMKKQKYGRIIMTSSASGIYGNFGQANYSAAKLGLLGLANSLAIEGRKSNIHCNTIAPNAGSRMTQTVMPEDLVEALKPEYVAPLVLWLCHESCEENGGLFEVGAGWIGKLRWERTLGAIVRQKNHPMTPEAVKANWKKICDFENASKPQSIQESTGSIIEVLSKIDSEGGVSANHTSRATSTATSGFAGAIGQKLPPFSYAYTELEAIMYALGVGASIKDPKDLKFIYEGSSDFSCLPTFGVIIGQKSMMGGGLAEIPGLSINFAKVLHGEQYLELYKPLPRAGKLKCEAVVADVLDKGSGVVIIMDVYSYSEKELICHNQFSLFLVGSGGFGGKRTSDKVKVAVAIPNRPPDAVLTDTTSLNQAALYRLSGDWNPLHIDPNFASLAGFDKPILHGLCTFGFSARRVLQQFADNDVSRFKAIKARFAKPVYPGQTLQTEMWKEGNRIHFQTKVQETGDIVISNAYVDLAPTSGTSAKTPSEGGKLQSTFVFEEIGRRLKDIGPEVVKKVNAVFEWHITKGGNIGAKWTIDLKSGSGKVYQGPAKGAADTTIILSDEDFMEVVLGKLDPQKVYGR

SEQ ID NO: 24596 - protein, 158 aa, Homo sapiens
LPQTLQPPLQHTTPQAQAQSLSRPAQVSQPFRGLIPAGTQHSMIATTGKMSEMELKAFGSGIDIKPGTPPIAGRSTTPTSSPFRATSTSPNSQSSKMNSIVYQKQFQSAPATVRMTQPFPTQFAPQKRAVGRGLSHKTFGPRCKAESRGSSVHATVLL

SEQ ID NO: 24597 - protein, 730 aa, Homo sapiens
MLLLLLLLLLLPPLVLRVAASRCLHDETQKSVSLLRPPFSQLPSKSRSSSLTLPSSRDPQPLRIQSCYLGDHISDGAWDPEGEGMRGGSRALAAVREATQRIQAVLAVQGPLLLSRDPAQYCHAVWGDPDSPNYHRCSLLNPGYKGESCLGAKIPDTHLRGYALWPEQGPPQLVQPDGPGVQNTDFLLYVRVAHTSKCHQEPSVIAYAACCQLDSEDRPLAGTIVYCAQHLTSPSLSHSDIVMATLHELLHALGFSGQLFKKWRDCPSGFSVRENCSTRQLVTRQDEWGQLLLTTPAVSLSLAKHLGVSGASLGVPLEEEEGLLSSHWEARLLQGSLMTATFDGAQRTRLDPITLAAFKDSGWYQVNHSAAEELLWGQGSGPEFGLVTTCGTGSSDFFCTGSGLGCHYLHLDKGSCSSDPMLEGCRMYKPLANGSECWKKENGFPAGVDNPHGEIYHPQSRCFFANLTSQLLPGDKPRHPSLTPHLKEAELMGRCYLHQCTGRGAYKVQVEGSPWVPCLPGKVIQIPGYYGLLFCPRGRLCQTNEDINAVTSPPVSLSTPDPLFQLSLELAGPPGHSLGKEQQEGLAEAVLEALASKGGTGRCYFHGPSITTSLVFTVHMWKSPGCQGPSVATLHKALTLTLQKKPLEVYHGGANFTTQPSKLLVTSDHNPSMTHLRLSMGLCLMLLILVGVMGTTAYQKRATLPVRPSASYHSPELHSTRVPVRGIREV

SEQ ID NO: 24598 - protein, 779 aa, Homo sapiens
MATQADLMELDMAMEPDRKAAVSHWQQQSYLDSGIHSGATTTAPSLSGKGNPEEEDVDTSQVLYEWEQGFSQSFTQEQVADIDGQYAMTRAQRVRAAMFPETLDEGMQIPSTQFDAAHPTNVQRLAEPSQMLKHAVVNLINYQDDAELATRAIPELTKLLNDEDQVVVNKAAVMVHQLSKKEASRHAIMRSPQMVSAIVRTMQNTNDVETARCTAGTLHNLSHHREGLLAIFKSGGIPALVKMLGSPVDSVLFYAITTLHNLLLHQEGAKMAVRLAGGLQKMVALLNKTNVKFLAITTDCLQILAYGNQESKLIILASGGPQALVNIMRTYTYEKLLWTTSRVLKVLSVCSSNKPAIVEAGGMQALGLHLTDPSQRLVQNCLWTLRNLSDAATKQEGMEGLLGTLVQLLGSDDINVVTCAAGILSNLTCNNYKNKMMVCQVGGIEALVRTVLRAGDREDITEPAICALRHLTSRHQEAEMAQNAVRLHYGLPVVVKLLHPPSHWPLIKATVGLIRNLALCPANHAPLREQGAIPRLVQLLVRAHQDTQRRTSMGGTQQQFVEGVRMEEIVEGCTGALHILARDVHNRIVIRGLNTIPLFVQLLYSPIENIQRVAAGVLCELAQDKEAAEAIEAEGATAPLTELLHSRNEGVATYAAAVLFRMSEDKPQDYKKRLSVELTSSLFRTEPMAWNETADLGLDIGAQGEPLGYRQDDPSYRSFHSGGYGQDALGMDPMMEHEMGGHHPGADYPVDGLPDLGHAQDLMDGLPPGDSNQLAWFDT

SEQ ID NO: 24599 - protein, 809 aa, Homo sapiens
MAVLLLLLRALRRGPGPGPRPLWGPGPAWSPGFPARPGRGRPYMASRPPGDLAEAGGRALQSLQLRLLTPTFEGINGLLLKQHLVQNPVRLWQLLGGTFYFNTSRLKQKNKEKDKSKGKAPEEDEEERRRRERDDQMYRERLRTLLVIAVVMSLLNALSTSGGSISWNDFVHEMLAKGEVQRVQVVPESDVVEVYLHPGAVVFGRPRLALMYRMQVANIDKFEEKLRAAEDELNIEAKDRIPVSYKRTGFFGNALYSVGMTAVGLAILWYVFRLAGMTGREGGFSAFNQLKMARFTIVDGKMGKGVSFKDVAGMHEAKLEVREFVDYLKSPERFLQLGAKVPKGALLLGPPGCGKTLLAKAVATEAQVPFLAMAGPEFVEVIGGLGAARVRSLFKEARARAPCIVYIDEIDAVGKKRSTTMSGFSNTEEEQTLNQLLVEMDGMGTTDHVIVLASTNRADILDGALMRPGRLDRHVFIDLPTLQERREIFEQHLKSLKLTQSSTFYSQRLAELTPGFSGADIANICNEAALHAAREGHTSVHTLNFEYAVERVLAGTAKKSKILSKEEQKVVAFHESGHALVGWMLEHTEAVMKVSITPRTNAALGFAQMLPRDQHLFTKEQLFERMCMALGGRASEALSFNEVTSGAQDDLRKVTRIAYSMVKQFGMAPGIGPISFPEAQEGLMGIGRRPFSQGLQQMMDHEARLLVAKAYRHTEKVLQDNLDKLQARALCVTWGSCLGPLDCRPQPAAAASGQVWAVPSPAEAGLPVDPCSSRLTKQLCRARAHHSGSHNGSKAAAGKRPSGKGSDKL

SEQ ID NO: 24600 - protein, 3095 aa, Homo sapiens
MVFESVVVDVLNRFLGDYVVDLDTSQLSLGIWKGAVALKNLQIKENALSQLDVPFKVKVGHIGNLKLIIPWKNLYTQPVEAVLEEIYLLIVPSSRIKYDPLKEEKQLMEAKQQELKRIEEAKQKVVDQEQHLPEKQDTFAEKLVTQIIKNLQVKISSIHIRYEDDITNRDKPLSFGISLQNLSMQTTDQYWVPCLHDETEKLVRKLIRLDNLFAYWNVKSQMFYLSDYDNSLDDLKNGIVNENIVPEGYDFVFRPISANAKLVMNRRSDFDFSAPKINLEIELHNIAIEFNKPQYFSIMELLESVDMMAQNLPYRKFKPDVPLHHHAREWWAYAIHGVLEVNVCPRLWMWSWKHIRKHRQKVKQYKELYKKKLTSKKPPGELLVSLEELEKTLDVFNITIARQTAEVEVKKAGYKIYKEGVKDPEDNKGWFSWLWSWSEQNTNEQQPDVQPETLEEMLTPEEKALLYEAIGYSETAVDPTLLKTFEALKFFVHLKSMSIVLRENHQKPELVDIVIEEFSTLIVQRPGAQAIKFETKIDSFHITGLPDNSEKPRLLSSLDDAMSLFQITFEINPLDETVSQRCIIEAEPLEIIYDARTVNSIVEFFRPPKEVHLAQLTAATLTKLEEFRSKTATGLLYIIETQKVLDLKINLKASYIIVPQDGIFSPTSNLLLLDLGHLKVTSKSRSELPDVKQGEANLKEIMDRAYDSFDIQLTSVQLLYSRVGDNWREARKLSVSTQHILVPMHFNLELSKAMVFMDVRMPKFKIYGKLPLISLRISDKKLQGIMELIESIPKPEPVTEVSAPVKSFQIQTSTSLGTSQISQKIIPLLELPSVSEDDSEEEFFDAPCSPLEEPLQFPTGVKSIRTRKLQKQDCSVNMTTFKIRFEVPKVLIEFYHLVGDCELSVVEILVLGLGAEIEIRTYDLKANAFLKEFCLKCPEYLDENKKPVYLVTTLDNTMEDLLTLEYVKAEKNVPDLKSTYNNVLQLIKVNFSSLDIHLHTEALLNTINYLHNILPQSEEKSAPVSTTETEDKGDVIKKLALKLSTNEDIITLQILAELSCLQIFIQDQKCNISEIKIEGLDSEMIMRPSETEINAKLRNIIVLDSDITAIYKKAVYITGKEVFSFKMVSYMDATAGSAYTDMNVVDIQVNLIVGCIEVVFVTKFLYSILAFIDNFQAAKQALAEATVQAAGMAATGVKELAQRSSRMALDINIKAPVVVIPQSPVSENVFVADFGLITMTNTFHMITESQSSPPPVIDLITIKLSEMRLYRSRFINDAYQEVLDLLLPLNLEVVVERNLCWEWYQEVPCFNVNAQLKPMEFILSQEDITTIFKTLHGNIWYEKDGSASPAVTKDQYSATSGVTTNASHHSGGATVVTAAVVEVHSRALLVKTTLNISFKTDDLTMVLYSPGPKQASFTDVRDPSLKLAEFKLENIISTLKMYTDGSTFSSFSLKNCILDDKRPHVKKATPRMIGLTVGFDKKDMMDIKYRKVRDGCVTDAVFQEMYICASVEFLQTVANVFLEAYTTGTAVETSVQTWTAKEEVPTQESVKWEINVIIKNPEIVFVADMTKNDAPALVITTQCEICYKGNLENSTMTAAIKDLQVRACPFLPVKRKGKITTVLQPCDLFYQTTQKGTDPQVIDMSVKSLTLKVSPVIINTMITITSALYTTKETIPEETASSTAHLWEKKDTKTLKMWFLEESNETEKIAPTTELVPKGEMIKMNIDSIFIVLEAGIGHRTVPMLLAKSRFSGEGKNWSSLINLHCQLELEVHYYNEMFGVWEPLLEPLEIDQTEDFRPWNLGIKMKKKAKMAIVESDPEEENYKVPEYKTVISFHSKDQLNITLSKCGLVMLNNLVKAFTEAATGSSADFVKDLAPFMILNSLGLTISVSPSDSFSVLNIPMAKSYVLKNGESLSMDYIRTKDNDHFNAMTSLSSKLFFILLTPVNHSTADKIPLTKVGRRLYTVRHRESGVERSIVCQIDTVEGSKKVTIRSPVQIRNHFSVPLSVYEGDTLLGTASPENEFNIPLGSYRSFIFLKPEDENYQMCEGIDFEEIIKNDGALLKKKCRSKNPSKESFLINIVPEKDNLTSLSVYSEDGWDLPYIMHLWPPILLRNLLPYKIAYYIEGIENSVFTLSEGHSAQICTAQLGKARLHLKLLDYLNHDWKSEYHIKPNQQDISFVSFTCVTEMEKTDLDIAVHMTYNTGQTVVAFHSPYWMVNKTGRMLQYKADGIHRKHPPNYKKPVLFSFQPNHFFNNNKVQLMVTDSELSNQFSIDTVGSHGAVKCKGLKMDYQVGVTIDLSSFNITRIVTFTPFYMIKNKSKYHISVAEEGNDKWLSLDLEQCIPFWPEYASSKLLIQVERSEDPPKRIYFNKQENCILLRLDNELGGIIAEVNLAEHSTVITFLDYHDGAATFLLINHTKNELVQYNQSSLSEIEDSLPPGKAVFYTWADPVGSRRLKWRCRKSHGEVTQKDDMMMPIDLGEKTIYLVSFFEGLQRIILFTEDPRVFKVTYESEKAELAEQEIAVALQDVGISLVNNYTKQEVAYIGITSSDVVWETKPKKKARWKPMSVKHTEKLEREFKEYTESSPSEDKVIQLDTNVPVRLTPTGHNMKILQPHVIALRRNYLPALKVEYNTSAHQSSFRIQIYRIQIQNQIHGAVFPFVFYPVKPPKSVTMDSAPKPFTDVSIVMRSAGHSQISRIKYFKVLIQEMDLRLDLGFIYALTDLMTEAEVTENTEVELFHKDIEAFKEEYKTASLVDQSQVSLYEYFHISPIKLHLSVSLSSGREEAKDSKQNGGLIPVHSLNLLLKSIGATLTDVQDVVFKLAFFELNYQFHTTSDLQSEVIRHYSKQAIKQMYVLILGLDVLGNPFGLIREFSEGVEAFFYEPYQGAIQGPEEFVEGMALGLKALVGGAVGGLAGAASKITGAMAKGVAAMTMDEDYQQKRREAMNKQPAGFREGITRGGKGLVSGFVSGITGIVTKPIKGAQKGGAAGFFKGVGKGLVGAVARPTGGIIDMASSTFQGIKRATETSEVESLRPPRFFNEDGVIRPYRLRDGTGNQMLQKIQFYREWIMTHSSSSDDDDDDDDDDESDLNH

SEQ ID NO: 24601 - protein, 2036 aa, Homo sapiens
MAAVTMSVPGRKAPPRPGPVPEAAQPFLFTPRGPSAGGGPGSGTSPQVEWTARRLVWVPSELHGFEAAALRDEGEEEAEVELAESGRRLRLPRDQIQRMNPPKFSKAEDMAELTCLNEASVLHNLRERYYSGLIYTYSGLFCVVINPYKQLPIYTEAIVEMYRGKKRHEVPPHVYAVTEGAYRSMLQDREDQSILCTGESGAGKTENTKKVIQYLAHVASSPKGRKEPGVPASVSTVSYGELERQLLQANPILEAFGNAKTVKNDNSSRFGKFIRINFDVAGYIVGANIETYLLEKSRAIRQAKDECSFHIFYQLLGGAGEQLKADLLLEPCSHYRFLTNGPSSSPGQERELFQETLESLRVLGFSHEEIISMLRMVSAVLQFGNIALKRERNTDQATMPDNTAAQKLCRLLGLGVTDFSRALLTPRIKVGRDYVQKAQTKEQADFALEALAKATYERLFRWLVLRLNRALDRSPRQGASFLGILDIAGFEIFQLNSFEQLCINYTNEKLQQLFNHTMFVLEQEEYQREGIPWTFLDFGLDLQPCIDLIERPANPPGLLALLDEECWFPKATDKSFVEKVAQEQGGHPKFQRPRHLRDQADFSVLHYAGKVDYKANEWLMKNMDPLNDNVAALLHQSTDRLTAEIWKDEHGGFQQFSFLGSFPPSPPGSAERCSSAISPPGVEGIVGLEQVSSLGDGPPGGRPRRGMFRTVGQLYKESLSRLMATLSNTNPSFVRCIVPNHEKRAGKLEPRLVLDQLRCNGVLEGIRICRQGFPNRILFQEFRQRYEILTPNAIPKGFMDGKQACEKMIQALELDPNLYRVGQSKIFFRAGVLAQLEEERDLKVTDIIVSFQAAARGYLARRAFQKRQQQQSALRVMQRNCAAYLKLRHWQWWRLFTKVKPLLQVTRQDEVLQARAQELQKVQELQQQSAREVGELQGRVAQLEEERARLAEQLRAEAELCAEAEETRGRLAARKQELELVVSELEARVGEEEECSRQMQTEKKRLQQHIQELEAHLEAEEGARQKLQLEKVTTEAKMKKFEEDLLLLEDQNSKLSKERKLLEDRLAEFSSQAAEEEEKVKSLNKLRLKYEATIADMEDRLRKEEKGRQELEKLKRRLDGESSELQEQMVEQQQRAEELRAQLGRKEEELQAALARAEDEGGARAQLLKSLREAQAALAEAQEDLESERVARTKAEKQRRDLGEELEALRGELEDTLDSTNAQQELRSKREQEVTELKKTLEEETRIHEAAVQELRQRHGQALGELAEQLEQARRGKGAWEKTRLALEAEVSELRAELSSLQTARQEGEQRRRRLELQLQEVQGRAGDGERARAEAAEKLQRAQAELENVSGALNEAESKTIRLSKELSSTEAQLHDAQELLQEETRAKLALGSRVRAMEAEAAGLREQLEEEAAARERAGRELQTAQAQLSEWRRRQEEEAGALEAGEEARRRAAREAEALTQRLAEKTETVDRLERGRRRLQQELDDATMDLEQQRQLVSTLEKKQRKFDQLLAEEKAAVLRAVEERERAEAEGREREARALSLTRALEEEQEAREELERQNRALRAELEALLSSKDDVGKSVHELERACRVAEQAANDLRAQVTELEDELTAAEDAKLRLEVTVQALKTQHERDLQGRDEAGEERRRQLAKQLRDAEVERDEERKQRTLAVAARKKLEGELEELKAQMASAGQGKEEAVKQLRKMQAQMKELWREVEETRTSREEIFSQNRESEKRLKGLEAEVLRLQEELAASDRARRQAQQDRDEMADEVANGNLSKAAILEEKRQLEGRLGQLEEELEEEQSNSELLNDRYRKLLLQVESLTTELSAERSFSAKAESGRQQLERQIQELRGRLGEEDAGARARHKMTIAALESKLAQAEEQLEQETRERILSGKLVRRAEKRLKEVVLQVEEERRVADQLRDQLEKGNLRVKQLKRQLEEAEEEASRAQAGRRRLQRELEDVTESAESMNREVTTLRNRLRRGPLTFTTRTVRQVFRLEEGVASDEEAEEAQPGSGPSPEPEGSPPAHPQ

SEQ ID NO: 24602 - protein, 673 aa, Homo sapiens
MREPEELMPDSGAVFTFGKSKFAENNPGKFWFKNDVPVHLSCGDEHSAVVTGNNKLYMFGSNNWGQLGLGSKSAISKPTCVKALKPEKVKLAACGRNHTLVSTEGGNVYATGGNNEGQLGLGDTEERNTFHVISFFTSEHKIKQLSAGSNTSAALTEDGRLFMWGDNSEGQIGLKNVSNVCVPQQVTIGKPVSWISCGYYHSAFVTTDGELYVFGEPENGKLGLPNQLLGNHRTPQLVSEIPEKVIQVACGGEHTVVLTENAVYTFGLGQFGQLGLGTFLFETSEPKVIENIRDQTISYISCGENHTALITDIGLMYTFGDGRHGKLGLGLENFTNHFIPTLCSNFLRFIVKLVACGGCHMVVFAAPHRGVAKEIEFDEINDTCLSVATFLPYSSLTSGNVLQRTLSARMRRRERERSPDSFSMRRTLPPIEGTLGLSACFLPNSVFPRCSERNLQESVLSEQDLMQPEEPDYLLDEMTKEAEIDNSSTVESLGETTDILNMTHIMSLNSNEKSLKLSPVQKQKDHEFSKTEELKLEDVDEEINAENVESKKKTVGDDESVPTGYHSKTEGAERTNDDSSAETIEKKEKANLEERAICEYNENPKGYMLDDADSSSLEILENSETTPSKDMKKTKKMEFRSCCPGWSAMARSWLTTILPPRFKRFSCLSLPSS

SEQ ID NO: 24603 - protein, 695 aa, Homo sapiens
MNQSGTNQSSLSDSNQAGINQPSTNSLGMNQMDMNQGSASLYEMNQVDMKQPSMSQAGMRQSGTNLPDINQPDMKQPDTWQLGRSQPGMLQQELSQLVLSKAGISQPDPSQPGPSQSGPSQSRMRQIGTNQSGMSQPVMQQLDSQSGGSQPSMRQVGTSQLGTSQIGMSQPGTWQTGLSQPVLRQPNMSPPGMWQPGVQQPGISQQVPSHPDMSQPGMSQQVPSQPGIRQPDTSQSCKNQTDMSQPDANQSSLSDSNQTGIIQPSPSLLGMNQMDMNQWSASLYEMNQVDMKQPSMSQAGMRQSGTNLPDINQPGMKQPGTWQLGRSQPGMWPQSLSELVLSEASISQPGPPQRAPSQSGPRQSSTSQAGTNQSGISQPVMWQLDMRQSGGSQPSMRQVGTSQSGTSQIGMSQPGTWQTGLSQPVPRQPNKSPPGMWQRGMWQPGMSQQVPSQLGMRQPGTSQSSKNQTGMSHPGRGQPGIWEPGPSQPGLSQQDLNQLVLSQPGLSQPGRSQPSVSQMGMRQTSMDYFQIRHAEAGDCPEILRLIKELAACENMLDAMELTAADLLRDGFGDNPLFYCLIAEVNDQQKPSGKLTVGFAMYYFTYDSWTGKVLYLEDFYVTQAYQGLGIGAEMLKRLSQIAITTQCNCMHFLVVIWNQASINYYTSRGALDLSSEEGWHLFRFNREELLDMAWEE

SEQ ID NO: 24604 - protein, 717 aa, Homo sapiens
MIDSVKLRRDSAADFFSHYEYLCALQNSVPLPAVRACLREGVLDFNADRLRGVDWAPLLSTLKINKDLPLVSIKSFFQPWLGDTGSDMNKFCRSRVPAIRYKDVTFQLCKALKGCLSISSVLKNLELNGLILRERDLTILAKGLNKSASLVHLSLANCPIGDGGLEIICQGIKSSITLKTVNFTGCNLTWQGADHMAKILKYQTMRRHEETWAESLRYRRPDLDCMAGLRRITLNCNTLIGDLGACAFADSLSEDLWLRALDLQQCGLTNEGAKALLEALETNTTLVVLDIRKNPLIDHSMMKAVIKKVLQNGRSAKSEYQWITSPSVKEPSKTAKQKRRTIILGSGHKGKATIRIVIWRHRVGLATKKPVSSGRKHSLGKEYYAPAPLPPGVSGFLPWRTAERAKRHRGFPLIKTRDICNQLQQPGFPVTVTVESPSSSEVEEVDDSSESVHEVPEKTSIEQEALQEKLEECLKQLKEERVIRLKVDKRVSELEHENAQLRNINFSLSEALHAQSLTNMILDDEGVLGSIENSFQKFHAFLDLLKDAGLGQLATMAGIDQSDFQLLGHPQMTSTVSNPPKEEKKALEDEKPEPKQNALGQMQNIQVSICMQSAYNEGTLMKFQKITGDARIPLPLDSFPVPVSTPEGLGTSSNNLGVPATEQRQESFEGFIARMCSPSPDATSGTGSQRKEEELSRNSRSSSEKKTKTGEYTKKHS

SEQ ID NO: 24605 - protein, 564 aa, Homo sapiens
GSENHSAAYRVDQGVLNNGCFVDALNVVPHVFLLFITFPILFIGWGSQSSKVHIHHSTWLHFPGHNLRWILTFMLLFVLVCEIAEGILSDGVTESHHLHLYMPAGMAFMAAVTSVVYYHNIETSNFPKLLIALLVYWTLAFITKTIKFVKFLDHAIGFSQLRFCLTGLLVILYGMLLLVEVNVIRVRRYIFFKTPREVKPPEDLQDLGVRFLQPFVNLLSKGTYWWMNAFIKTAHKKPIDLRAIGKLPIAMRALTNYQRLCEAFDAQRKDIQGTQGARAIWQALSHAFGRRLVLSSTFRILADLLGFAGPLCIFGIVDHLGKENDVFQPKTQFLGVYFVSSQEFLANAYVLAVLLFLALLLQRTFLQASYYVAIETGINLRGAIQTKIYNKIMHLSTSNLSMGEMTAGQICNLVAIDTNQLMWFFFLCPNLWAMPVQIIVGVILLYYILGVSALIGAAVIILLAPVQYFVATKLSQAQRSTLEYSNERLKQTNEMLRGIKLLKLYAWENIFRTRVETTRRKEMTSLRAFAIYTSISIFMNTAIPIAAVLIRAKAKRVPVQCRDP

SEQ ID NO: 24606 - protein, 419 aa, Homo sapiens
QLPRWWELGDPCAWTGQGRGTRRMSPATTGTFLLTVYSIFSKVHSDRNVYPSAGVLFVHVLEREYFKGEFPPYPKPGEISNDPITFNTNLMGYPDRPGWLRYIQRTPYSDGVLYGSPTAENVGKPTIIEITAYNRRTFETARHNLIINIMSAEEFFIKNMNVEEMLASEVLGDFLGAVKNVWQPERLNAINITSALDRGGRVPLPINDLKEGVYVMVGADVPFSSCLREVENPQNQLRCSQEMEPVITCDKKFRTQFYIDWCKISLVDKTKQVSTYQEVIRGEGILPDGGEYKPPSDSLKSRDYYTDFLITLAVPSAVALVLFLILAYIMCCRREGVIQLVHHSAIQKSTKELRDMSKNREIAWPLSTLPVFHPVTGEIIPPLHTDNYDSTNMPLMQTQQNLPHQTQIPQQQTTGKWYP

SEQ ID NO: 24607 - protein, 631 aa, Homo sapiens
MKLLHVFLLFLCFHLRFCKVTYTSQEDLVEKKCLAKKYTHLSCDKVFCQPWQRCIEGTCVCKLPYQCPKNGTAVCATNRRSFPTYCQQKSLECLHPGTKFLNNGTCTAEGKFSVSLKHGNTDSEGIVEVKLVDQDKTMFICKSSWSMREANVACLDLGFQQGADTQRRFKLSDLSINSTECLHVHCRGLETSLAECTFTKRRTMGYQDFADVVCYTQKADSPMDDFFQCVNGKYISQMKACDGINDCGDQSDELCCKACQGKGFHCKSGVCIPSQYQCNGEVDCITGEDEVGCAGFASVTQEETEILTADMDAERRRIKSLLPKLSCGVKNRMHIRRKRIVGGKRAQLGDLPWQVAIKDASGITCGGIYIGGCWILTAAHCLRASKTHRYQIWTTVVDWIHPDLKRIVIEYVDRIIFHENYNAGTYQNDIALIEMKKDGNKKDCELPRSIPACVPWSPYLFQPNDTCIVSGWGREKDNERVFSLQWGEVKLISNCSKFYGNRFYEKEMECAGSKPFPRYGYKPSPPNGCGSPLFGVHLNIGIPSLTKCCNQHDRCYETCGKSKNDCDEEFQYCLSKICRDVQKTLGLTQHVQACETTVELLFDSVIHLGCKPYLDSQRAACRCHYEEKTDL

SEQ ID NO: 24608 - protein, 1517 aa, Homo sapiens
MSRNDKEPFFVKFLKSSDNSKCFFKALESIKEFQSEEYLQIITEEEALKIKENDRSLYICDPFSGVVFDHLKKLGCRIVGPQVVIFCMHHQRCVPRAEHPVYNMVMSDVTISCTSLEKEKREEVHKYVQMMGGRVYRDLNVSVTHLIAGEVGSKKYLVAANLKKPILLPSWIKTLWEKSQEKKITRYTDINMEDFKCPIFLGCIICVTGLCGLDRKEVQQLTVKHGGQYMGQLKMNECTHLIVQEPKGQKYECAKRWNVHCVTTQWFFDSIEKGFCQDESIYKTEPRPEAKTMPNSSTPTSQINTIDNVSNISNINASCVSESICNSLNSKLEPTLENLENLDVSAFQAPEDLLDGCRIYLCGFSGRKLDKLRRLINSGGGVRFNQLNEDVTHVIVGDYDDELKQFWNKSAHRPHVVGAKWLLECFSKGYMLSEEPYIHANYQPVEIPVSHKPESKAALLKKKNSSFSKKDFAPSEKHEQADEDLLSQYENGSSTVVEAKTSEARPFNDSTHAEPLNDSTHISLQEENQSSVSHCVPDVSTITEEGLFSQKSFLVLGFSNENESNIANIIKENAGKIMSLLSRTVADYAVVPLLGCEVEATVGEVVTNTWLVTCIDYQTLFDPKSNPLFTPVPVMTGMTPLEDCVISFSQCAGAEKESLTFLANLLGASVQEYFVRKSNAKKGMFASTHLILKERGGSKYEAAKKWNLPAVTIAWLLETARTGKRADESHFLIENSTKEERSLETEITNGINLNSDTAEHPGTRLQTHRKTVVTPLDMNRFQSKAFRAVVSQHARQVAASPAVGQPLQKEPSLHLDTPSKFLSKDKLFKPSFDVKDALAALETPGRPSQQKRKPSTPLSEVIVKNLQLALANSSRNAVALSASPQLKEAQSEKEEAPKPLHKVVVCVSKKLSKKQSELNGIAASLGADYRWSFDETVTHFIYQGRPNDTNREYKSVKERGVHIVSEHWLLDCAQECKHLPESLYPHTYNPKMSLDISAVQDGRLCNSRLLSAVSSTKDDEPDPLILEENDVDNMATNNKESAPSNGSGKNDSKGVLTQTLEMRENFQKQLQEIMSATSIVKPQGQRTSLSRSGCNSASSTPDSTRSARSGRSRVLEALRQSRQTVPDVNTEPSQNEQIIWDDPTAREERARLASNLQWPSCPTQYSELQVDIQNLEDSPFQKPLHDSEIAKQAVCDPGNIRVTEAPKHPISEELETPIKDSHLIPTPQAPSIAFPLANPPVAPHPREKIITIEETHEELKKQYIFQLSSLNPQERIDYCHLIEKLGGLVIEKQCFDPTCTHIVVGHPLRNEKYLASVAAGKWVLHRSYLEACRTAGHFVQEEDYEWGSSSILDVLTGINVQQRRLALAAMRWRKKIQQRQESGIVEGAFSGWKVILHVDQSREAGFKRLLQSGGAKVLPGHSVPLFKEATHLFSDLNKLKPDDSGVNIAEAAAQNVYCLRTEYIADYLMQESPPHVENYCLPEAISFIQNNKELGTGLSQKRKAPTEKNKIKRPRVH

SEQ ID NO: 24609 - protein, 1191 aa, Homo sapiens
RRDTALETALNAKAYKRSKRQSLREARITEKLEKQQKIEQERKRRQKHQEYLNSILQHAKDFKEYHRSVTGKIQKLTKAVATYHANTEREQKKENERIEKERMRRLMAEDEEGYRKLIDQKKDKRLAYLLQQTDEYVANLTELVRQHKAAQVAKEKKKKKKKKAENAEGQTPAIGPDGEPLDETSQMSDLPVKVIHVESGKILTGTDAPKAGQLEAWLEMNPGYEVAPRSDSEESGSEEEEEEEEEEQPQAAQPPTLPVEEKKKIPDPDSDDVSEVDARHIIENAKQDVDDEYGVSQALARGLQSYYAVAHAVTERVDKQSALMVNGVLKQYQIKGLEWLVSLYNNNLNGILADEMGLGKTIQTIALITYLMEHKRINGPFLIIVPLSTLSNWAYEFDKWAPSVVKVSYKGSPAARRAFVPQLRSGKFNVLLTTYEYIIKDKHILAKIRWKYMIVDEGHRMKNHHCKLTQVLNTHYVAPRRLLLTGTPLQNKLPELWALLNFLLPTIFKSCSTFEQWFNAPFAMTGEKVDLNEEETILIIRRLHKVLRPFLLRRLKKEVEAQLPEKVEYVIKCDMSALQRVLYRHMQAKGVLLTDGSEKDKKGKGGTKTLMNTIMQLRKICNHPYMFQHIEESFSEHLGFTGGIVQGLDLYRASGKFELLDRILPKLRATNHKVLLFCQMTSLMTIMEDYFAYRGFKYLRLDGTTKAEDRGMLLKTFNEPGSEYFIFLLSTRAGGLGLNLQSADTVIIFDSDWNPHQDLQAQDRAHRIGQQNEVRVLRLCTVNSVEEKILAAAKYKLNVDQKVIQAGMFDQKSSSHERRAFLQAILEHEEQDEEEDEVPDDETVNQMIARHEEEFDLFMRMDLDRRREEARNPKRKPRLMEEDELPSWIIKDDAEVERLTCEEEEEKMFGRGSRHRKEVDYSDSLTEKQWLKTLKAIEEGTLEEIEEEVRQKKSSRKRKRDSDAGSSTPTTSTRSRDKDDESKKQKKRGRPPAEKLSPNPPNLTKKMKKIVDAVIKYKDSSGRQLSEVFIQLPSRKELPEYYELIRKPVDFKKIKERIRNHKYRSLNDLEKDVMLLCQNAQTFNLEGSLIYEDSIVLQSVFTSVRQKIEKEDDSEGEESEEEEEGEEEGSESESRSVKVKIKLGRKEKAQDRLKGGRRRPSRGSRAKPVVSDDDSEEEQEEDRSGSGSEED

SEQ ID NO: 24610 - protein, 1888 aa, Homo sapiens
DMDALLNNSLPPPHPENEEDPEEDLSETETPKLKKKKKPKKPRDPKIPKSKRQKKELGDSSGEGPEFVEEEEEVALRSDSEGSDYTPGKKKKKKLGPKKEKKSKSKRKEEEEEEDDDDDSKEPKSSAQLLEDWGMEDIDHVFSEEDYRTLTNYKAFSQFVRPLIAAKNPKIAVSKMMMVLGAKWREFSTNNPFKGSSGASVAAAAAAAVAVVESMVTATEVAPPPPPVEVPIRKAKTKEGKGPNARRKPKGSPRVPDAKKPKPKKVAPLKIKLGGFGSKRKRSSSEDDDLDVESDFDDASINSYSVSDGSTSRSSRSRKKLRTTKKKKKGEEEVTAVDGYETDHQDYCEVCQQGGEIILCDTCPRAYHMVCLDPDMEKAPEGKWSCPHCEKEGIQWEAKEDNSEGEEILEEVGGDLEEEDDHHMEFCRVCKDGGELLCCDTCPSSYHIHCLNPPLPEIPNGEWLCPRCTCPALKGKVQKILIWKWGQPPSPTPVPRPPDADPNTPSPKPLEGRPERQFFVKWQGMSYWHCSWVSELQLELHCQVMFRNYQRKNDMDEPPSGDFGGDEEKSRKRKNKDPKFAEMEERFYRYGIKPEWMMIHRILNHSVDKKGHVHYLIKWRDLPYDQASWESEDVEIQDYDLFKQSYWNHRELMRGEEGRPGKKLKKVKLRKLERPPETPTVDPTVKYERQPEYLDATGGTLHPYQMEGLNWLRFSWAQGTDTILADEMGLGKTVQTAVFLYSLYKEGHSKGPFLVSAPLSTIINWEREFEMWAPDMYVVTYVGDKDSRAIIRENEFSFEDNAIRGGKKASRMKKEASVKFHVLLTSYELITIDMAILGSIDWACLIVDEAHRLKNNQSKFFRVLNGYSLQHKLLLTGTPLQNNLEELFHLLNFLTPERFHNLEGFLEEFADIAKEDQIKKLHDMLGPHMLRRLKADVFKNMPSKTELIVRVELSPMQKKYYKYILTRNFEALNARGGGNQVSLLNVVMDLKKCCNHPYLFPVAAMEAPKMPNGMYDGSALIRASGKLLLLQKMLKNLKEGGHRVLIFSQMTKMLDLLEDFLEHEGYKYERIDGGITGNMRQEAIDRFNAPGAQQFCFLLSTRAGGLGINLATADTVIIYDSDWNPHNDIQAFSRAHRIGQNKKVMIYRFVTRASVEERITQVAKKKMMLTHLVVRPGLGSKTGSMSKQELDDILKFGTEELFKDEATDGGGDNKEGEDSSVIHYDDKAIERLLDRNQDETEDTELQGMNEYLSSFKVAQYVVREEEMGEEEEVEREIIKQEESVDPDYWEKLLRHHYEQQQEDLARNLGKGKRIRKQVNYNDGSQEDRDWQDDQSDNQSDYSVASEEGDEDFDERSEAPRRPSRKGLRNDKDKPLPPLLARVGGNIEVLGFNARQRKAFLNAIMRYGMPPQDAFTTQWLVRDLRGKSEKEFKAYVSLFMRHLCEPGADGAETFADGVPREGLSRQHVLTRIGVMSLIRKKVQEFEHVNGRWSMPELAEVEENKKMSQPGSPSPKTPTPSTPGDTQPNTPAPVPPAEDGIKIEENSLKEEESIEGEKEVKSTAPETAIECTQAPAPASEDEKVVVEPPEGEEKVEKAEVKERTEEPMETEPKGAADVEKVEEKSAIDLTPIVVEDKEEKKEEEEKKEVMLQNGETPKDLNDEKQKKNIKQRFMFNIADGGFTELHSLWQNEERAATVTKKTYEIWHRRHDYWLLAGIINHGYARWQDIQNDPRYAILNEPFKGEMNRGNFLEIKNKFLARRFKLLEQALVIEEQLRRAAYLNMSEDPSHPSMALNTRFAEVECLAESHQHLSKESMAGNKPANAVLHKGILKQLEELLSDMKADVTRLPATIARIPPVAVRLQMSERNILSRLANRAPEPTPQQVAQQQ

SEQ ID NO: 24611 - protein, 839 aa, Homo sapiens
MDGKADVKSLMAKYNTGGNPTEDVSVNSRPFRVTGPNSSSGIQARKNLFNNQGNASPPAGPSNVPKFGSPKPPVAVKPSSEEKPDKEPKPPFLKPTGAGQRFGTPASLTTRDPEAKVGFLKPVGPKPINLPKEDSKPTFPWPPGNKPSLHSVNQDHDLKPLGPKSGPTPPTSENEQKQAFPKLTGVKGKFMSASQDLEPKPLFPKPAFGQKPPLSTENSHEDESPMKNVSSSKGSPAPLGVRSKSGPLKPAREDSENKDHAGEISSLPFPGVVLKPAASRGGPGLSKNGEEKKEDRKIDAAKNTFQSKINQEELASGTPPARFPKAPSKLTVGGPWGQSQEKEKGDKNSATPKQKPLPPLFTLGPPPPKPNRPPNVDLTKFHKTSSGNSTSKGQTSYSTTSLPPPPPSHPASQPPLPASHPSQPPVPSLPPRNIKPPFDLKSPVNEDNQDGVTHSDGAGNLDEEQDSEGETYEDIEASKEREKKREKEEKKRLELEKKEQKEKEKKEQEIKKKFKLTGPIQVIHLAKACCDVKGGKNELSFKQGEQIEIIRITDNPEGKWLGRTARGSYGYIKTTAVEIDYDSLKLKKDSLGAPSRPIEDDQEVYDDVAEQDDISSHSQSGSGGIFPPPPDDDIYDGIEEEDADDGSTLQVQEKSNTWSWGILKMLKGKDDRKKSIREKPKVSDSDNNEGSSFPAPPKQLDMGDEVYDDVDTSDFPVSSAEMSQGTNVGKAKTEEKDLKKLKKQEKEEKDFRKKFKYDGEIRVLYSTKVTTSITSKKWGTRDLQVKPGESLEVIQTTDDTKVLCRNEEGKYGYVLRSYLADNDGEIYDDIADGCIYDND

SEQ ID NO: 24612 - protein, 754 aa, Homo sapiens
MHTGGETSACKPSSVRLAPSFSFHAAGLQMAGQMPHSHQYSDRRQPNISDQQVSALSYSDQIQQPLTNQRRMPQTFRDPATAPLRKLSVDLIKTYKHINEVYYAKKKRRHQQGQGDDSSHKKERKVYNDGYDDDNYDYIVKNGEKWMDRYEIDSLIGKGSFGQVVKAYDRVEQEWVAIKIIKNKKAFLNQAQIEVRLLELMNKHDTEMKYYIVHLKRHFMFRNHLCLVFEMLSYNLYDLLRNTNFRGVSLNLTRKFAQQMCTALLFLATPELSIIHCDLKPENILLCNPKRSAIKIVDFGSSCQLGQRIYQYIQSRFYRSPEVLLGMPYDLAIDMWSLGCILVEMHTGEPLFSGANEVDQMNKIVEVLGIPPAHILDQAPKARKFFEKLPDGTWNLKKTKDGKREYKPPGTRKLHNILGVETGGPGGRRAGESGHTVADYLKFKDLILRMLDYDPKTRIQPYYALQHSFFKKTADEGTNTSNSVSTSPAMEQSQSSGTTSSTSSSSGGSSGTSNSGRARSDPTHQHRHSGGHFTAAVQAMDCETHSPQVRQQFPAPLGWSGTEAPTQVTVETHPVQETTFHVAPQQNALHHHHGNSSHHHHHHHHHHHHHGQQALGNRTRPRVYNSPTNSSSTQDSMEVGHSHHSMTSLSSSTTSSSTSSSSTGNQGNQAYQNRPVAANTLDFGQNGAMDVNLTVYSNPRQETGIAGHPTYQFSANTGPAHYMTEGHLTMRQGADREESPMTGVCVQQSPVASS

SEQ ID NO: 24613 - protein, 1671 aa, Homo sapiens
MASGLGSPSPCSAGSEEEDMDALLNNSLPPPHPENEEDPEEDLSETETPKLKKKKKPKKPRDPKIPKSKRQKKELGDSSGEGPEFVEEEEEVALRSDSEGSDYTPGKKKKKKLGPKKEKKSKSKRKEEEEEEDDDDDSKEPKSSAQLLEDWGMEDIDHVFSEEDYRTLTNYKAFSQFVRPLIAAKNPKIAVSKMMMVLGAKWREFSTNNPFKGSSGASVAAAAAAAVAVVESMVTATEVAPPPPPVEVPIRKAKTKEGKGPNARRKPKGSPRVPDAKKPKPKKVAPLKIKLGGFGSKRKRSSSEDDDLDVESDFDDASINSYSVSDGSTSRSSRSRKKLRTTKKKKKGEEEVTAVDGYETDHQDYCEVCQQGGEIILCDTCPRAYHMVCLDPDMEKAPEGKWSCPHCEKEGIQWEAKEDNSEGEEILEEVGGDLEEEDDHHMEFCRVCKDGGELLCCDTCPSSYHIHCLNPPLPEIPNGEWLCPRCTCPALKGKVQKILIWKWGQPPSPTPVPRPPDADPNTPSPKPLEGRPERQFFVKWQGMSYWHCSWVSELQLELHCQVMFRNYQRKNDMDEPPSGDFGGDEEKSRKRKNKDPKFAEMEERFYRYGIKPEWMMIHRILNHSVDKKGHVHYLIKWRDLPYDQASWESEDVEIQDYDLFKQSYWNHRELMRGEEGRPGKKLKKVKLRKLERPPETPTVDPTVKYERQPEYLDATGGTLHPYQMEGLNWLRFSWAQGTDTILADEMGLGKTVQTAVFLYSLYKEGHSKGPFLVSAPLSTIINWEREFEMWAPDMYVVTYVGDKDSRAIIRENEFSFEDNAIRGGKKASRMKKEASVKFHVLLTSYELITIDMAILGSIDWACLIVDEAHRLKNNQSKFFRVLNGYSLQHKLLLTGTPLQNNLEELFHLLNFLTPERFHNLEGFLEEFADIAKEDQIKKLHDMLGPHMLRRLKADVFKNMPSKTELIVRVELSPMQKKYYKYILTRNFEALNARGGGNQVSLLNVVMDLKKCCNHPYLFPVAAMEAPKMPNGMYDGSALIRASGKLLLLQKMLKNLKEGGHRVLIFSQMTKMLDLLEDFLEHEGYKYERIDGGITGNMRQEAIDRFNAPGAQQFCFLLSTRAGGLGINLATADTVIIYDSDWNPHNDIQAFSRAHRIGQNKKVMIYRFVTRASVEERITQVAKKKMMLTHLVVRPGLGSKTGSMSKQELDDILKFGTEELFKDEATDGGGDNKEGEDSSVIHYDDKAIERLLDRNQDETEDTELQGMNEYLSSFKVAQYVVREEEMGEEEEVEREIIKQEESVDPDYWEKLLRHHYEQQQEDLARNLGKGKRIRKQVNYNDGSQEDRDWQDDQSDNQSDYSVASEEGDEDFDERSEAPRRPSRKGLRNDKDKPLPPLLARVGGNIEVLGFNARQRKAFLNAIMRYGMPPQDAFTTQWLVRDLRGKSEKEFKAYVSLFMRHLCEPGADGAETFADGVPREGLSRQHVLTRIGVMSLIRKKVQEFEHVNGRWSMPELAEVEENKKMSQPGSPSPKTPTPSTPGDTQPNTPAPVPPAEDGIKIEENSLKEEESIEGEKEVKSTAPETAIECTQAPAPASEDEKVVVEPPEGEEKVEKAEVKERTEEPMETEPKGVLLVAQAGVQWCDLGLLQPPPPEFKRFSCLSLLSSWDYRCC

SEQ ID NO: 24614 - protein, 347 aa, Homo sapiens
MAQQANVGELLAMLDSPMLGVRDDVTAVFKENLNSDRGPMLVNTLVDYYLETSSQPALHILTTLQEPHDKMDTDVVVLTTGVLVLITMLPMIPQSGKQHLLDFFDIFGRLSSWCLKKPGHVAEVYLVHLHASVYALFHRLYGMYPCNFVSFLRSHYSMKENLETFEEVVKPMMEHVRIHPELVTGSKDHELDPRRWKRLETHDVVIECAKISLDPTEASYEDGYSVSHQISARFPHRSADVTTSPYADTQNSYGCATSTPYSTSRLMLLNMPGQLPQTLSSPSTRLITEPPQATLWSPSMVCGMTTPPTSPGNVPPDLSHPYSKVFGTTGGKGTPLGTPATSPPPAP

SEQ ID NO: 24615 - protein, 944 aa, Homo sapiens
MPKGGCPKAPQQEELPLSSDMVEKQTGKKDKDKVSLTKTPKLERGDGGKEVRERASKRKLPFTAGANGEQKDSDTGWTALHEACNRGYYDVAKQLLAAGAEVNTKGLDDDTPLHDAANNGHYKVVKLLLRYGGNPQQSNRKGETPLKVANSPTMVNLLLGKGTYTSSEESSTESSEEEDAPSFAPSSSVDGNNTDSEFEKGLKHKAKNPEPQKATAPVKDEYEFDEDDEQDRVPPVDDKHLLKKDYRKETKSNSFISIPKMEVKSYTKNNTIAPKKASHRILSDTSDEEDASVTVGTGEKLRLSAHTILPGSKTREPSNAKQQKEKNKVKKKRKKETKGREVRFGKRSDKFCSSESESESSESGEDDRDSLGSSGCLKGSPLVLKDPSLFSSLSASSTSSHGSSAAQKQNPSHTDQHTKHWRTDNWKTISSPAWSEVSSLSDSTRTRLTSESDYSSEGSSVESLKPVRKRQEHRKRASLSEKKSPFLSSAEGAVPKLDKEGKVVKKHKTKHKHKNKEKGQCSISQELKLKSFTYEYEDSKQKSDKAILLENDLSTENKLKVLKHDRDHFKKEEKLSKMKLEEKEWLFKDEKSLKRIKDTNKDISRSFREEKDRSNKAEKERSLKEKSPKEEKLRLYKEERKKKSKDRPSKLEKKNDLKEDKISKEKEKIFKEDKEKLKKEKVYREDSAFDEYCNKNQFLENEDTKFSLSDDQRDRWFSDLSDSSFDFKGEDSWDSPVTDYRDMKSDSVAKLILETVKEDSKERRRDSRAREKRDYREPFFRKKDRDYLDKNSEKRKEQTEKHKSVPGYLSEKDKKRRESAEAGRDRKDALESCKERRDGRAKPEEAHREELKECGCESGFKDKSDGDFGKGLEPWERHHPAREKEKKDGPDKERKEKTKPERYKEKSSDKDKSEKSILEKCQKDKEFDKCFKEKKDTKEKHKDT

SEQ ID NO: 24616 - protein, 400 aa, Homo sapiens
MAGQMPHSHQYSDRRQPNISDQQVSALSYSDQIQQPLTNQRRMPQTFRDPATAPLRKLSVDLIKTYKHINEVYYAKKKRRHQQGQGDDSSHKKERKVYNDGYDDDNYDYIVKNGEKWMDRYEIDSLIGKGSFGQVVKAYDRVEQEWVAIKIIKNKKAFLNQAQIEVRLLELMNKHDTEMKYYIVHLKRHFMFRNHLCLVFEMLSYNLYDLLRNTNFRGVSLNLTRKFAQQMCTALLFLATPELSIIHCDLKPENILLCNPKRSAIKIVDFGSSCQLGQRIYQYIQSRFYRSPEVLLGMPYDLAIDMWSLGCILVEMHTGEPLFSGANEVDQMNKIVEVLGIPPAHILDQAPKARKFFEKLPDGTWNLKKTKDGKREYKPPGTRKLHNILGVETGGPGGRR

SEQ ID NO: 24617 - protein, 317 aa, Homo sapiens
MENEIFTPLLEQFMTSPLVTWVKTFGPLAAGNGTNLDEYVALVDGVFLNQVMLQINPKLESQRVNKKVNNDASLRMHNLSILVRQIKFYYQETLQQLIMMSLPNVLIIGKNPFSEQGTEEVKKLLLLLLGCAVQCQKKEEFIERIQGLDFDTKAAVAAHIQETIIELSEERDGLHFLPHASSSAQSPCGSPGMKRTESRQHLSVELADAKAKIRRLRQELEEKTEQLLDCKQELEQMEIELKRLQQENMNLLSDARSARMYRDELDALREKAVRVDKLESEVSRYKERLHDIEFYKARVEELKEDNQVLLETKTMLE

SEQ ID NO: 24618 - protein, 685 aa, Homo sapiens
MIDSVKLRRDSAADFFSHYEYLCALQNSVPLPAVRACLREGVLDFNADRLRGVDWAPLLSTLKINKDLPLVSIKSFFQPWLGDTGSDMNKFCRSRVPAIRYKDVTFQLCKALKGCLSISSVLKNLELNGLILRERDLTILAKGLNKSASLVHLSLANCPIGDGGLEIICQGIKSSITLKTVNFTGCNLTWQGADHMAKILKYQTMRRHEETWAESLRYRRPDLDCMAGLRRITLNCNTLIGDLGACAFADSLSEDLWLRALDLQQCGLTNEGAKALLEALETNTTLVVLDIRKNPLIDHSMMKAVIKKVLQNGRSAKSEYQWITSPSVKEPSKTAKQKRRTIILGSGHKGKATIRIVIWRHRGLATKKPVSSGRKHSLGKEYYAPAPLPPGVSGFLPWRTAERAKRHRGFPLIKTRDICNQLQQPGFPVTVTVESPSSSEVEEVDDSSESVHEVPEKTSIEQEALQLEHENAQLRNINFSLSEALHAQSLTNMILDDEGVLGSIENSFQKFHAFLDLLKDAGLGQLATMAGIDQSDFQLLGHPQMTSTVSNPPKEEKKALEDEKPEPKQNALGQMQNIQFQKITGDARIPLPLDSFPVPVSTPEGLGTSSNNLGVPATEQRQESFEGFIARMCSPSPDATSGTGSQRKEEELSRNSRSSSEKKTKTGEYTKKHSDKQHPGKDLHS

SEQ ID NO: 24619 - protein, 2199 aa, Homo sapiens
MGCTASIVLLQAFRSVVQRSCPHICRRRQEEPSHEILPLESDDEMNRPRTLIIMQEKPRLLEPLDYETVIEELEKTYRNDPLQDLLFFPSDDFSAATVSWDIRTLYSTVPEDAEHKAENLLVKEACKFYSSQWHVVNYKYEQYSGDIRQLPRAEYKPEKLPSHSFEIDHEDADKDEDTTSHSSSKGGGGAGGTGVFKSGWLYKGNFNSTVNNTVTVRSFKKRYFQLTQLPDNSYIMNFYKDEKISKEPKGCIFLDSCTGVVQNNRLRKYAFELKMNDLTYFVLAAETESDMDEWIHTLNRILQISPEGPLQGRRSTELTDLGLDSLDNSVTCECTPEETDSSENNLHADFAKYLTETEDTVKTTRNMERLNLFSLDPDIDTLKLQKKDLLEPESVIKPFEEKAAKRIMIICKALNSNLQGCVTENENDPITNIEPFFVSVALYDLRDSRKISADFHVDLNHAAVRQMLLGASVALENGNIDTITPRQSEEPHIKGLPEEWLKFPKQAVFSVSNPHSEIVLVAKIEKVLMGNIASGAEPYIKNPDSNKYAQKILKSNRQFCSKLGKYRMPFAWAVRSVFKDNQGNVDRDSRFSPLFRQESSKISTEDLVKLVSDYRRADRISKMQTIPGSLDIAVDNVPLEHPNCVTSSFIPVKPFNMMAQTEPTVEVEEFVYDSTKYCRPYRVYKNQIYIYPKHLKYDSQKCFNKARNITVCIEFKNSDEESAKPLKCIYGKPGGPLFTSAAYTAVLHHSQNPDFSDEVKIELPTQLHEKHHILFSFYHVTCDINAKANAKKKEALETSVGYAWLPLMKHDQIASQEYNIPIATSLPPNYLSFQDSASGKHGGSDIKWVDGGKPLFKVSTFVVSTVNTQDPHVNAFFQECQKREKDMSQSPTSNFIRSCKNLLNVEKIHAIMSFLPIILNQLFKVLVQNEEDEITTTVTRVLTDIVAKCHEEQLDHSVQSYIKFVFKTRACKERTVHEELAKNVTGLLKSNDSTTVKHVLKHSWFFFAIILKSMAQHLIDTNKIQLPRPQRFPESYQNELDNLVMVLSDHVIWKYKDALEETRRANHSVARFLKRCFTFMDRGYVFKMVNNYISMFSSGDLKTLCQYKFDFLQEVCQHEHFIPLCLPIRSANIPDPLTPSESTQELHASDMPEYSVTNEFCRKHFLIGILLREVGFALQEDQDVRHLALAVLKNLMAKHSFDDRYREPRKQAQIASLYMPLYGMLLDNMPRIYLKDLYPFTVNTSNQGSRDDLSTNGGFQSQTAIKHANSVDTSFSKDVLNSIAAFSSIAISTVNHADSRASLASLDSNPSTNEKSSEKTDNCEKIPRPLSLIGSTLRFDKLDQAETRSLLMCFLHIMKTISYETLIAYWQRAPSPEVSDFFSILDVCLQNFRYLGKRNIIRKIAAAFKFVQSTQNNGTLKGSNPSCQTSGLLSQWMHSTSSHEGHKQHRSQTLPIIRGKNALSNPKLLQMLDNTMTSNSNEIDIVHHVDTEANIATEVCLTILDLLSLFTQTHQRQLQQCDCQNSLMKRVFDTYMLFFQVNQSATALKHVFASLRLFVCKFPSAFFQGPADLCGSFCYEVLKCCNHRSRSTQTEASALLYFFMRKNFEFNKQKSIVRSHLQLIKAVSQLIADAGIGGSRFQHSLAITNNFANGDKQMKNSNFPAEVKDLTKRIRTVLMATAQMKEHEKDPEMLVDLQYSLANSYASTPELRRTWLESMAKIHARNGDLSEAAMCYIHIAALIAEYLKRKGYWKVEKICTASLLSEDTHPCDSNSLLTTPSGGSMFSMGWPAFLSITPNIKEEGAMKEDSGMQDTPYNENILVEQLYMCVEFLWKSERYELIADVNKPIIAVFEKQRDFKKLSDLYYDIHRSYLKVAEVVNSEKRLFGRYYRVAFYGQGFFEEEEGKEYIYKEPKLTGLSEISQRLLKLYADKFGADNVKIIQDSNKVNPKDLDPKYAYIQVTYVTPFFEEKEIEDRKTDFEMHHNINRFVFETPFTLSGKKHGGVAEQCKRRTILTTSHLFPYVKKRIQVISQSSTELNPIEVAIDEMSKKVSELNQLCTMEEVDMIRLQLKLQGSVSVKVNAGPMAYARAFLEETNAKKYPDNQVKLLKEIFRQFADACGQALDVNERLIKEDQLEYQEELRSHYKDMLSELSTVMNEQITGRDDLSKRGVDQTCTRVISKATPALPTVSISSSAEV

SEQ ID NO: 24620 - protein, 1191 aa, Homo sapiens
MLHTNTRIGDGTFFKIPGKSGLYALKKEESSCPADGTLDLVCESELDGTDMAEANAHGEENGVCSKQVTDEASSTRDSSLTNTAVQSKLVSSFQQHTKKALKQALRQQQKRRNGVSMMVNKTVPRVVLTPLKVSDEQSDSPSGSESKNGEADSSDKEMKHGQKSPTGKQTSQHLKRLKKSGLGHLKWTKAEDIDIETPGSILVNTNLRALINKHTFASLPQHFQQYLLLLLPEVDRQMGSDGILRLSTSALNNEFFAYAAQGWKQRLAEGEFTPEMQLRIRQEIEKEKKTEPWKEKFFERFYGEKLGMSREESVKLTTGPNNAGAQSSSSCGTSGLPVSAQTALAEQQPKSMKSPASPEPGFCATLCPMVEIPPKDIMAELESEDILIPEESVIQEEIAEEVETSICECQDENHKTIPEFSEEAESLTNSHEEPQIAPPEDNLESCVMMNDVLETLPHIEVKIEGKSESPQEEMTVVIDQLEVCDSLIPSTSSMTHVSDTEHKESETAVETSTPKIKTGSSSLEGQFPNEGIAIDMELQSDPEEQLSENACISETSFSSESPEGACTSLPSPGGETQSTSEESCTPASLETTFCSEVSSTENTDKYNQRNSTDENFHASLMSEISPISTSPEISEASLMSNLPLTSEASPVSNLPLTSETSPMSDLPLTSETSSVSSMLLTSETTFVSSLPLPSETSPISNSSINERMAHQQRKSPSVSEEPLSPQKDESSATAKPLGENLTSQQKNLSNTPEPIIMSSSSIAPEAFPSEDLHNKTLSQQTCKSHVDTEKPYPASIPELASTEMIKVKNHSVLQRTEKKVLPSPLELSVFSEGTDNKGNELPSAKLQDKQYISSVDKAPFSEGSRNKTHKQGSTQSRLETSHTSKSSEPSKSPDGIRNESRDSEISKRKTAEQHSFGICKEKRARIEDDQSTRNISSSSPPEKEQPPREEPRVPPLKIQLSKIGPPFIIKSQPVSKPESRASTSTSVSGGRNTGARTLADIKARAQQARAQREAAAAAAVAAAASIVSGAMGSPGEGGKTRTLAHIKEQTKAKLFAKHQARAHLFQTSKETRLPPPLSSKEGPPNLEVSSTPETKMEGSTGVIIVNPNCRSPSNKSAHLRETTTVLQQSLNPSKLPETATDLSVHSSDENIPVSHLSEKIVSSTSSENSSVPMLFNKNSVPVSVCSTAISG

SEQ ID NO: 24621 - protein, 1016 aa, Homo sapiens
MKMASTRCKLARYLEDLEDVDLKKFKMHLEDYPPQKGCIPLPRGQTEKADHVDLATLMIDFNGEEKAWAMAVWIFAAINRRDLYEKAKRDEPKWGSDNARVSNPTVICQEDSIEEEWMGLLEYLSRISICKMKKDYRKKYRKYVRSRFQCIEDRNARLGESVSLNKRYTRLRLIKEHRSQQEREQELLAIGKTKTCESPVSPIKMELLFDPDDEHSEPVHTVVFQGAAGIGKTILARKMMLDWASGTLYQDRFDYLFYIHCREVSLVTQRSLGDLIMSCCPDPNPPIHKIVRKPSRILFLMDGFDELQGAFDEHIGPLCTDWQKAERGDILLSSLIRKKLLPEASLLITTRPVALEKLQHLLDHPRHVEILGFSEAKRKEYFFKYFSDEAQARAAFSLIQENEVLFTMCFIPLVCWIVCTGLKQQMESGKSLAQTSKTTTAVYVFFLSSLLQPRGGSQEHGLCAHLWGLCSLAADGIWNQKILFEESDLRNHGLQKADVSAFLRMNLFQKEVDCEKFYSFIHMTFQEFFAAMYYLLEEEKEGRTNVPGSRLKLPSRDVTVLLENYGKFEKGYLIFVVRFLFGLVNQERTSYLEKKLSCKISQQIRLELLKWIEVKAKAKKLQIQPSQLELFYCLYEMQEEDFVQRAMDYFPKIEINLSTRMDHMVSSFCIENCHRVESLSLGFLHNMPKEEEEEEKEGRHLDMVQCVLPSSSHAACSHGLVNSHLTSSFCRGLFSVLSTSQSLTELDLSDNSLGDPGMRVLCETLQHPGCNIRRLCNQKLVELDLSDNALGDFGIRLLCVGLKHLLCNLKKLWLVSCCLTSACCQDLASVLSTSHSLTRLYVGENALGDSGVAILCEKAKNPQCNLQKLGLVNSGLTSVCCSALSSVLSTNQNLTHLYLRGNTLGDKGIKLLCEGLLHPDCKLQVLELDNCNLTSHCCWDLSTLLTSSQSLRKLSLGNNDLGDLGVMMFCEVLKQQSCLLQNLGLSEMYFNYETKSALETLQEEKPELTVVFEPSW

SEQ ID NO: 24622 - protein, 693 aa, Homo sapiens
MPLAFCGSENHSAAYRVDQGVLNNGCFVDALNVVPHVFLLFITFPILFIGWGSQSSKVHIHHSTWLHFPGHNLRWILTFMLLFVLVCEIAEGILSDGVTESHHLHLYMPAGMAFMAAVTSVVYYHNIETSNFPKLLIALLVYWTLAFITKTIKFVKFLDHAIGFSQLRFCLTGLLVILYGMLLLVEVNVIRVRRYIFFKTPREVKPPEDLQDLGVRFLQPFVNLLSKGTYWWMNAFIKTAHKKPIDLRAIGKLPIAMRALTNYQRLCEAFDAQRKDIQGTQGARAIWQALSHAFGRRLVLSSTFRILADLLGFAGPLCIFGIVDHLGKENDVFQPKTQFLGVYFVSSQEFLANAYVLAVLLFLALLLQRTFLQASYYVAIETGINLRGAIQTKIYNKIMHLSTSNLSMGEMTAGQICNLVAIDTNQLMWFFFLCPNLWAMPVQIIVGVILLYYILGVSALIGAAVIILLAPVQYFVATKLSQAQRSTLEYSNERLKQTNEMLRGIKLLKLYAWENIFRTRVETTRRKEMTSLRAFAIYTSISIFMNTAIPIAAVLITFVGHVSFFKEADFSPSVAFASLSLFHILVTPLFLLSSVVRSTVKALVRATKNEAIPSPRGCPMDIRRHPLCLSFPGQVSPTLSTAPEPSQPQPVKQLPPSAGSCSDWPTALGGSHFQALEPHGDSATVPEALPSWE

SEQ ID NO: 24623 - protein, 985 aa, Homo sapiens
ATYHANTEREQKKENERIEKERMRRLMAEDEEGYRKLIDQKKDKRLAYLLQQTDEYVANLTELVRQHKAAQVAKEKKKKKKKKKAENAEGQTPAIGPDGEPLDETSQMSDLPVKVIHVESGKILTGTDAPKAGQLEAWLEMNPGYEVAPRSDSEESGSEEEEEEEEEEQPQAAQPPTLPVEEKKKIPDPDSDDVSEVDARHIIENAKQDVDDEYGVSQALARGLQSYYAVAHAVTERVDKQSALMVNGVLKQYQIKGLEWLVSLYNNNLNGILADEMGLGKTIQTIALITYLMEHKRINGPFLIIVPLSTLSNWAYEFDKWAPSVVKVSYKGSPAARRAFVPQLRSGKFNVLLTTYEYIIKDKHILAKIRWKYMIVDEGHRMKNHHCKLTQVLNTHYVAPRRLLLTGTPLQNKLPELWALLNFLLPTIFKSCSTFEQWFNAPFAMTGEKVDLNEEETILIIRRLHKVLRPFLLRRLKKEVEAQLPEKVEYVIKCDMSALQRVLYRHMQAKGVLLTDGSEKDKKGKGGTKTLMNTIMQLRKICNHPYMFQHIEESFSEHLGFTGGIVQGLDLYRASGKFELLDRILPKLRATNHKVLLFCQMTSLMTIMEDYFAYRGFKYLRLDGTTKAEDRGMLLKTFNEPGSEYFIFLLSTRAGGLGLNLQSADTVIIFDSDWNPHQDLQAQDRAHRIGQQNEVRVLRLCTVNSVEEKILAAAKYKLNVDQKVIQAGMFDQKSSSHERRAFLQAILEHEEQDESRHCSTGSGSASFAHTAPPPAGVNPDLEEPPLKEEDEVPDDETVNQMIARHEEEFDLFMRMDLDRRREEARNPKRKPRLMEEDELPSWIIKDDAEVERLTCEEEEEKMFGRGSRHRKEVDYSDSLTEKQWLKAIEEGTLEEIEEEVRQKKSSRKRKRDSDAGSSTPTTSTRSRDKDDESKKQKKRGRPPAEKLSPNPPNLTKKMKKIVDAVIKYKDRVTEQQAHPLCVLIF

SEQ ID NO: 24624 - protein, 985 aa, Homo sapiens
MHRRRLALGLGFCLLAGTSLSVLWVYLENWLPVSYVPYYLPCPEILPMMMALSCLCHQQHEAALQEGEATPARGMVTVPSAQAAGAQAHTAADTHTLVGAHRLRGNLQPRASAAHLPATEPDHWGHGVCRGESSTQEIGEELINGVIYSISLRKVQLHHGGNKGQRWLGYENESALNLYETCKVRTVKAGTLEKLVEHLVPAFQGSDLSYVTIFLCTYRAFTTTQQVLDLLFKRYGRCDALTASSRYGCILPYSDEDGGPQDQLKNAISSILGTWLDQYSEDFCQPPDFPCLKQLVAYVQLNMPGSDLERRAHLLLAQLEHSEPIEAEPEALSPVPALKPTPELELALTPARAPSPVPAPAPEPEPAPTPAPGSELEVAPAPAPELQQAPEPAVGLESAPAPALELEPAPEQDPAPSQTLELEPAPAPVPSLQPSWPSPVVAENGLSEEKPHLLVFPPDLVAEQFTLMDAELFKKVVPYHCLGSIWSQRDKKGKEHLAPTIRATVTQFNSVANCVITTCLGNRSTKAPDRARVVEHWIEVARECRILKNFSSLYAILSALQSNSIHRLKKTWEDVSRDSFRIFQKLSEIFSDENNYSLSRELLIKEGTSKFATLEMNPKRAQKRPKETGIIQGTVPYLGTFLTDLVMLDTAMKDYLYGRLINFEKRRKEFEVIAQIKLLQSACNNYSIAPDEQFGAWFRAVERLSETESYNLSCELEPPSESASNTLRTKKNTAIVKRWSDRQAPSTELSTSGSSHSKSCDQLRCGPYLSSGDIADALSVHSAGSSSSDVEEINISFVPESPDGQEKKFWESASQSSPETSGISSASSSTSSSSASTTPVAATRTHKRSVSGLCNSSSALPLYNQQVGDCCIIRVSLDVDNGNMYKSILVTSQDKAPAVIRKAMDKHNLEEEEPEDYELLQILSDDRKLKIPENANVFYAMNSTANYDFVLKKRTFTKGVKVKHGASSTLPRMKQKGLKIAKGIF

SEQ ID NO: 24625 - protein, 316 aa, Homo sapiens
MVWQQKTKAVVMLNRIVEKESVKCAQYWPTDDQEMLFKETGFSVKLLSEDVKSYYTVHLLQLENINSGETRTISHFHYTTWPDFGVPESPASFLNFLFKVRESGSLNPDHGPAVIHCSAGIGRSGTFSLVDTCLVLMEKGDDINIKQVLLNMRKYRMGLIQTPDQLRFSYMAIIEGAKCIKGDSSIQKRWKELSKEDLSPAFDHSPNKIMTEKYNGNRIGLEEEKLTGDRCTGLSSKMQDTMEENSESALRKRIREDRKATTAQKVQQMKQRLNENERKRKRWLYWQPILTKMGFMSVILVGAFVGWTLFFQQNAL

SEQ ID NO: 24626 - protein, 1796 aa, Homo sapiens
MENEIFTPLLEQFMTSPLVTWVKTFGPLAAGNGTNLDEYVALVDGVFLNQVMLQINPKLESQRVNKKVNNDASLRMHNLSILVRQIKFYYQETLQQLIMMSLPNVLIIGKNPFSEQGTEEVKKLLLLLLGCAVQCQKKEEFIERIQGLDFDTKAAVAAHIQEVTHNQENVFDLQWMEVTDMSQEDIEPLLKNMALHLKRLIDERDEHSETIIELSEERDGLHFLPHASSSAQSPCGSPGMKRTESRQHLSVELADAKAKIRRLRQELEEKTEQLLDCKQELEQMEIELKRLQQENMNLLSDARSARMYRDELDALREKAVRVDKLESEVSRYKERLHDIEFYKARVEELKEDNQVLLETKTMLEDQLEGTRARSDKLHELEKENLQLKAKLHDMEMERDMDRKKIEELMEENMTLEMAQKQSMDESLHLGWELEQISRTSELSEAPQKSLGHEVNELTSSRLLKLEMENQSLTKTVEELRTTVDSVEGNASKILKMEKENQRLSKKVEILENEIVQEKQSLQNCQNLSKDLMKEKAQLEKTIETLRENSERQIKILEQENEHLNQTVSSLRQRSQISAEARVKDIEKENKILHESIKETSSKLSKIEFEKRQIKKELEHYKEKGERAEELENELHHLEKENELLQKKITNLKITCEKIEALEQENSELERENRKLKKTLDSFKNLTFQLESLEKENSQLDEENLELRRNVESLKCASMKMAQLQLENKELESEKEQLKKGLELLKASFKKTERLEVSYQGLDIENQRLQKTLENSNKKIQQLESELQDLEMENQTLQKNLEELKISSKRLEQLEKENKSLEQETSQLEKDKKQLEKENKRLRQQAEIKDTTLEENNVKIGNLEKENKTLSKEIGIYKESCVRLKELEKENKELVKRATIDIKTLVTLREDLVSEKLKTQQMNNDLEKLTHELEKIGLNKERLLHDEQSTDDRYKLLESKLESTLKKSLEIKEEKIAALEARLEESTNYNQQLRQELKTVKKNYEALKQRQDEERMVQSSPPISGEDNKWERESQETTRELLKVKDRLIEVERNNATLQAEKQALKTQLKQLETQNNNLQAQILALQRQTVSLQEQNTTLQTQNAKLQVENSTLNSQSTSLMNQNAQLLIQQSSLENENESVIKEREDLKSLYDSLIKDHEKLELLHERQASEYESLISKHGTLKSAHKNLEVEHRDLEDRYNQLLKQKGQLEDLEKMLKVEQEKMLLENKNHETVAAEYKKLCGENDRLNHTYSQLLKETEVLQTDHKNLKSLLNNSKLEQTRLEAEFSKLKEQYQQLDITSTKLNNQCELLSQLKGNLEEENRHLLDQIQTLMLQNRTLLEQNMESKDLFHVEQRQYIDKLNELRRQKEKLEEKIMDQYKFYDPSPPRRRGNWITLKMRKLIKSKKDINRERQKSLTLTPTRSDSSEGFLQLPHQDSQDSSSVGSNSLEDGQTLGTKKSSMVALKRLPFLRNRPKDKDKMKACYRRSMSMNDLVQSMVLAGQWTGSTENLEVPDDISTGKRRKELGAMAFSTTAINFSTVNSSAGFRSKQLVNNKDTTSFEDISPQGVSDDSSTGSRVHASRPASLDSGRTSTSNSNNNASLHEVKAGAVNNQSRPQSHSSGEFSLLHDHEAWSSSGSSPIQYLKRQTRSSPVLQHKISETLESRHHKIKTGSPGSEVVTLQQFLEESNKLTSVQIKSSSQENLLDEVMKSLSVSSDFLGKDKPVSCGLASVISTAEGTTRRTSIHDFLTKDSRLPISVDSPPAAADSNTTAASNVDKVQESRNSKSRSREQQSS

SEQ ID NO: 24627 - protein, 651 aa, Homo sapiens
MALLAMHSWRWAAAAAAFEKRRHSAILIRPLVSVSGSGPQWRPHQLGALGTARAYQQIPESLKSITWQRLGKGNSGQFLDAAKALQVWPLIEKRTCWHGHAGGGLHTDPKEGLKDVDTRKIIKAMLSYVWPKDRPDLRARVAISLGFLGGAKAMNIVVPFMFKYAVDSLNQMSGNMLNLSDAPNTVATMATAVLIGYGVSRAGAAFFNEVRNAVFGKVAQNSIRRIAKNVFLHLHNLDLGFHLSRQTGALSKAIDRGTRGISFVLSALVFNLLPIMFEVMLVSGVLYYKCGAQFALVTLGTLGTYTAFTVAVTRWRTRFRIEMNKADNDAGNAAIDSLLNYETVKYFNNERYEAQRYDGFLKTYETASLKSTSTLAMLNFGQSAIFSVGLTAIMVLASQGIVAGTLTVGDLVMVNGLLFQLSLPLNFLGTVYRETRQALIDMNTLFTLLKVDTQIKDKVMASPLQITPQTATVAFDNVHFEYIEGQKVLSGISFEVPAGKKVAIVGGSGSGKSTIVRLLFRFYEPQKGSIYLAGQNIQDVSLESLRRAVGVVPQDAVLFHNTIYYNLLYGNISASPEEVYAVAKLAGLHDAILRMPHGYDTQVGERGLKLSGGEKQRVAIARAILKDPPVILYDEATSSLDSITEEIVNSG

SEQ ID NO: 24628 - protein, 315 aa, Homo sapiens
MKANYSAEERFLLLGFSDWPSLQPVLFALVLLCYLLTLTGNSALVLLAVRDPRLHTPMYYFLCHLALVDAGFTTSVVPPLLANLRGPALWLPRSHCTAQLCASLALGSAECVLLAVMALDRAAAVCRPLRYAGLVSPRLCRTLASASWLSGLTNSVAQTALLAERPLCAPRLLDHFICELPALLKLACGGDGDTTENQMFAARVVILLLPFAVILASYGAVARAVCCMRFSGGRRRAVGTCGSHLTAVCLFYGSAIYTYLQPAQRYNQARGKFVSLFYTVVTPALNPLIYTLRNKKVKGAARRLLRSLGRGQAGQ

SEQ ID NO: 24629 - protein, 558 aa, Homo sapiens
MPLAFCGSENHSAAYRVDQGVLNNGCFVDALNVVPHVFLLFITFPILFIGWGSQSSKVHIHHSTWLHFPGHNLRWILTFMLLFVLVCEIAEGILSDGVTESHHLHLYMPAGMAFMAAVTSVVYYHNIETSNFPKLLIALLVYWTLAFITKTIKFVKFLDHAIGFSQLRFCLTGLLVILYGMLLLVEVNVIRVRRYIFFKTPREVKPPEDLQDLGVRFLQPFVNLLSKGTYWWMNAFIKTAHKKPIDLRAIGKLPIAMRALTNYQRLCEAFDAQVRKDIQGTQGARAIWQALSHAFGRRLVLSSTFRILADLLGFAGPLCIFGIVDHLGKENDVFQPKTQFLGVYFVSSQEFLANAYVLAVLLFLALLLQRTFLQASYYVAIETGINLRGAIQTKIYNKIMHLSTSNLSMGEMTAGQICNLVAIDTNQLMWFFFLCPNLWAMPVQIIVGVILLYYILGVSALIGAAVIILLAPVQYFVATKLSQAQRSTLEYSNERLKQTNEMLRGIKLLKLYAWENIFRTRVETTRRKEMTSLRAFAIYTSISIFMNTAIPIAAVLIC

SEQ ID NO: 24630 - protein, 454 aa, Homo sapiens
MQLPRWWELGDPCAWTGQGRGTRRMSPATTGTFLLTAFLLSCADGINGTVNWKTRQANNFIISRKMAAGMKDVYSIFSKVHSDRNVYPSAGVLFVHVLEREYFKGEFPPYPKPGEISNDPITFNTNLMGYPDRPGWLRYIQRTPYSDGVLYGSPTAENVGKPTIIEITAYNRRTFETARHNLIINIMSAEDFPLPYQAEFFIKNMNVEEMLASEVLGDFLGAVKNVWQPERLNAINITSALDRGGRVPLPINDLKEGVYVMVGADVPFSSCLREVENPQNQLRCSQEMEPVITCDKKFRTQFYIDWCKISLVDKTKQVSTYQEVIRGEGILPDGGEYKPPSDSLKSRDYYTDFLITLAVPSAVALVLFLILAYIMCCRREGVEKRNMQTPDIQLVHHSAIQKSTKELRDMSKNREIAWPLSTLPVFHPVTGEIIPPLHTDNYDSTNMPLMQTQQ

SEQ ID NO: 24631 - protein, 566 aa, Homo sapiens
MSLAAYCVICCRRIGTSTSPPKSGTHWRDINPFSTVDIEDHECAVWLLLRKSKSDDKTTRLEAVREMSETHHWHDYQYRIIAQACDPKTLIGLARSEESDLRFFLLPPPLPSLKEDSSTEEELRQLLASLPQTELDECIQYFTSLALSESSQSLAAQKGGLWCFGGNGLPYAESFGEVPSATVEMFCLEAIVKHSEISTHCDKIEANGGLQLLQRLYRLHKDCPKVQRNIMRVIGNMALNEHLHSSIVRSGWVSIMAEAMKSPHIMESSHAARILANLDRETVQEKYQDGVYVLHPQYRTSQPIKADVLFIHGLMGAAFKTWRQQDSEQAVIEKPMEDEDRYTTCWPKTWLAKDCPALRIISVEYDTSLSDWRARCPMERKSIAFRSNELLRKLRAAGVGDRPVVWISHSMGGLLVKKMLLEASTKPEMSTVINNTRGIIFYSVPHHGSRLAEYSVNIRYLLFPSLEVKELSKDSPALKTLQDDFLEFAKDKNFQVLNFVETLPTYIGSMIKLHVVPVESADLGIGDLIPVDVNHLNICKPKKKDAFLYQRTLQFIREALAKDLEN

SEQ ID NO: 24632 - protein, 892 aa, Homo sapiens
MSERAADDVRGEPRRAAAAAGGAAAAAARQQQQQQQQQQPPPPQPQRQQHPPPPPRRTRPEDGGPGAASTSAAAMATVGERRPLPSPEVMLGQSWNLWVEASKLPGKDGTELDESFKEFGKNREVMGLCREDMPIFGFCPAHDDFYLVVCNDCNQVVKPQAFQSHYERRHSSSSKPPLAVPPTSVFSFFPSLSKSKGGSASGSNRSSSGGVLSASSSSSKLLKSPKEKLQLRGNTRPMHPIQQSRVPHGRIMTPSVKVEKIHPKMDGTLLKSAVGPTCPATVSSLVKPGLNCPSIPKPTLPSPGQILNGKGLPAPPTLEKKPEDNSNNRKFLNKRLSEREFDPDIHCGVIDLDTKKPCTRSLTCKTHSLTQRRAVQGRRKRFDVLLAEHKNKTREKELIRHPDSQQPPQPLRDPHPAPPRTSQEPHQNPHGVIPSESKPFVASKPKPHTPSLPRPPGCPAQQGGSAPIDPPPVHESPHPPLPATEPASRLSSEEGEGDDKEESVEKLDCHYSGHHPQPASFCTFGSRQIGRGYYVFDSRWNRLRCALNLMVEKHLNAQLWKKIPPVPSTTSPISTRIPHRTNSVPTSQCGVSYLAAATVSTSPVLLSSTCISPNSKSVPAHGTTLNAQPAASGAMDPVCSMQSRQVSSSSSSPSTPSGLSSVPSSPMSRKPQKLKSSKSLRPKESSGNSTNCQNASSSTSGGSGKKRKNSSPLLVHSSSSSSSSSSSSHSMESFRKNCVAHSGPPYPSTVTSSHSIGLNCVTNKANAVNVRHDQSGRGPPTGSPAESIKRMSVMVNSSDSTLSLGPFIHQSNELPVNSHGSFSHSHTPLDKLIGKKRKCSPSSSSINNSSSKPTKVAKVPAVNNVHMKHTGTIPGAQGLMNSSLLHQVGNGL

SEQ ID NO: 24633 - protein, 1580 aa, Homo sapiens
MPLAFCGSENHSAAYRVDQGVLNNGCFVDALNVVPHVFLLFITFPILFIGWGSQSSKVHIHHSTWLHFPGHNLRWILTFMLLFVLVCEIAEGILSDGVTESHHLHLYMPAGMAFMAAVTSVVYYHNIETSNFPKLLIALLVYWTLAFITKTIKFVKFLDHAIGFSQLRFCLTGLLVILYGMLLLVEVNVIRVRRYIFFKTPREVKPPEDLQDLGVRFLQPFVNLLSKGTYWWMNAFIKTAHKKPIDLRAIGKLPIAMRALTNYQRLCEAFDAQRKDIQGTQGARAIWQALSHAFGRRLVLSSTFRILADLLGFAGPLCIFGIVDHLGKENDVFQPKTQFLGVYFVSSQEFLANAYVLAVLLFLALLLQRTFLQASYYVAIETGINLRGAIQTKIYNKIMHLSTSNLSMGEMTAGQICNLVAIDTNQLMWFFFLCPNLWAMPVQIIVGVILLYYILGVSALIGAAVIILLAPVQYFVATKLSQAQRSTLEYSNERLKQTNEMLRGIKLLKLYAWENIFRTRVETTRRKEMTSLRAFAIYTSISIFMNTAIPIAAVLITFVGHVSFFKEADFSPSVAFASLSLFHILVTPLFLLSSVVRSTVKALVSVQKLSEFLSSAEIREEQCAPHEPTPQGPASKYQAVPLRVVNRKRPAREDCRGLTGPLQSLVPSADGDADNCCVQIMGGYFTWTPDGIPTLSNITIRIPRGQLTMIVGQVGCGKSSLLLAALGEMQKVSGAVFWSSLPDSEIGEDPSPERETATDLDIRKRGPVAYASQKPWLLNATVEENIIFESPFNKQRYKMVIEACSLQPDIDILPHGDQTQIGERGINLSGGQRQRISVARALYQHANVVFLDDPFSALDIHLSDHLMQAGILELLRDDKRTVVLVTHKLQYLPHADWIIAMKDGTIQREGTLKDFQRSECQLFEHWKTLMNRQDQELEKETVTERKATEPPQGLSRAMSSRDGLLQDEEEEEEEAAESEEDDNLSSMLHQRAEIPWRACAKYLSSAGILLLSLLVFSQLLKHMVLVAIDYWLAKWTDSALTLTPAARNCSLSQECTLDQTVYAMVFTVLCSLGIVLCLVTSVTVEWTGLKVAKRLHRSLLNRIILAPMRFFETTPLGSILNRFSSDCNTIDQHIPSTLECLSRSTLLCVSALAVISYVTPVFLVALLPLAIVCYFIQKYFRVASRDLQQLDDTTQLPLLSHFAETVEGLTTIRAFRYEARFQQKLLEYTDSNNIASLFLTAANRWLEVRMEYIGACVVLIAAVTSISNSLHRELSAGLVGLGLTYALMVSNYLNWMVRNLADMELQLGAVKRIHGLLKTEAESYEGLLAPSLIPKNWPDQGKIQIQNLSVRYDSSLKPVLKHVNALIAPGQKIGICGRTGSGKSSFSLAFFRMVDTFEGHIIIDGIDIAKLPLHTLRSRLSIILQDPVLFSGTIRFNLDPERKCSDSTLWEALEIAQLKLVVKALPGGLDAIITEGGENFSQGQRQLFCLARAFVRKTSIFIMDEATASIDMATENILQKVVMTAFADRTVVTIAHRVHTILSADLVIVLKRGAILEFDKPEKLLSRKDSVFASFVRADK

SEQ ID NO: 24634 - protein, 387 aa, Homo sapiens
MQLPRWWELGDPCAWTGQGRGTRRMSPATTGTFLLTGEISNDPITFNTNLMGYPDRPGWLRYIQRTPYSDGVLYGSPTAENVGKPTIIEITAYNRRTFETARHNLIINIMSAEDFPLPYQAEFFIKNMNVEEMLASEVLGDFLGAVKNVWQPERLNAINITSALDRGGRVPLPINDLKEGVYVMVGADVPFSSCLREVENPQNQLRCSQEMEPVITCDKKFRTQFYIDWCKISLVDKTKQVSTYQEVIRGEGILPDGGEYKPPSDSLKSRDYYTDFLITLAVPSAVALVLFLILAYIMCCRREGVIQLVHHSAIQKSTKELRDMSKNREIAWPLSTLPVFHPVTGEIIPPLHTDNYDSTNMPLMQTQQNLPHQTQIPQQQTTGKWYP

SEQ ID NO: 24635 - protein, 1163 aa, Homo sapiens
MAQQANVGELLAMLDSPMLGVRDDVTAVFKENLNSDRGPMLVNTLVDYYLETSSQPALHILTTLQEPHDKHLLDRINEYVGKAATRLSILSLLGHVIRLQPSWKHKLSQAPLLPSLLKCLKMDTDVVVLTTGVLVLITMLPMIPQSGKQHLLDFFDIFGRLSSWCLKKPGHVAEVYLVHLHASVYALFHRLYGMYPCNFVSFLRSHYSMKENLETFEEVVKPMMEHVRIHPELVTGSKDHELDPRRWKRLETHDVVIECAKISLDPTEASYEDGYSVSHQISARFPHRSADVTTSPYADTQNSYGCATSTPYSTSRLMLLNMPGQLPQTLSSPSTRLITEPPQATLWSPSMVCGMTTPPTSPGNVPPDLSHPYSKVFGTTGGKGTPLGTPATSPPPAPLCHSDDYVHISLPQATVTPPRKEERMDSARPCLHRQHHLLNDRGSEEPPGSKGSVTLSDLPGFLGDLASEEDSIEKDKEEAAISRELSEITTAEAEPVVPRGGFDSPFYRDSLPGSQRKTHSAASSSQGASVNPEPLHSSLDKLGPDTPKQAFTPIDLPCGSADESPAGDRECQTSLETSIFTPSPCKIPPPTRVGFGSGQPPPYDHLFEVALPKTAHHFVIRKTEELLKKAKGNTEEDGVPSTSPMEVLDRLIQQGADAHSKELNKLPLPSKSVDWTHFGGSPPSDEIRTLRDQLLLLHNQLLYERFKRQQHALRNRRLLRKVIKAAALEEHNAAMKDQLKLQEKDIQMWKVSLQKEQARYNQLQEQRDTMVTKLHSQIRQLQHDREEFYNQSQELQTKLEDCRNMIAELRIELKKANNKVCHTELLLSQVSQKLSNSESVQQQMEFLNRQLLVLGEVNELYLEQLQNKHSDTTKEVEMMKAAYRKELEKNRSHVLQQTQRLDTSQKRILELESHLAKKDHLLLEQKKYLEDVKLQARGQLQAAESRYEAQKRITQVFELEILDLYGRLEKDGLLKKLEEEKAEAAEAAEERLDCCNDGCSDSMVGHNEEASGHNGETKTPRPSSARGSSGSRGGGGSSSSSSELSTPEKPPHQRAGPFSSRWETTMGEASASIPTTVGSLPSSKSFLGMKARELFRNKSESQCDEDGMTSSLSESLKTELGKDLGVEAKIPLNLDGPHPSPPTPDSVGQLHIMDYNETHHEHS

SEQ ID NO: 24636 - protein, 454 aa, Homo sapiens
MDVSELCIPDPLGYHNQLLNRMSSDDRHLGSSCGSFIKTEPSSPSSGIDALSHHSPSGSSDASGGFGLALGTHANGLDSPPMFAGAGLGGTPCRKSYEDCASGIMEDSAIKCEYMLNAIPKRLCLVCGDIASGYHYGVASCEACKAFFKRTIQGNIEYSCPATNECEITKRRRKSCQACRFMKCLKVGMLKEGVRLDRVRGGRQKYKRRLDSESSPYLSLQISPPAKKPLTKIVSYLLVAEPDKLYAMPPPGMPEGDIKALTTLCDLADRELVVIIGWAKHIPGFSSLSLGDQMSLLQSAWMEILILGIVYRSLPYDDKLVYAEDYIMDEEHSRLAGLLELYRAILQLVRRYKKLKVEKEEFVTLKALALANSDSMYIEDLEAVQKLQDLLHEALQDYELSQRHEEPWRTGKLLLTLPLLRQTAAKAVQHFYSVKLQGKVPMHKLFLEMLEAKV

SEQ ID NO: 24637 - protein, 380 aa, Homo sapiens
MATNGSKVADGQISTEVSEAPVANDKPKTLVVKVQKKAADLPDRDTWKGRFDFLMSCVGYAIGLGNVWRFPYLCGKNGGGAFLIPYFLTLIFAGVPLFLLECSLGQYTSIGGLGVWKLAPMFKGVGLAAAVLSFWLNIYYIVIISWAIYYLYNSFTTTLPWKQCDNPWNTDRCFSNYSMVNTTNMTSAVVEFWERNMHQMTDGLDKPGQIRWPLAITLAIAWILVYFCIWKGVGWTGKVVYFSATYPYIMLIILFFRGVTLPGAKEGILFYITPNFRKLSDSEVWLDAATQIFFSYGLGLGSLIALGSYNSFHNNVYRDSIIVCCINSCTSMFAGFVIFSIVGFMAHVTKRSIADVAASVDIPRAASPAVCGASLSPPPE

SEQ ID NO: 24638 - protein, 1319 aa, Homo sapiens
MWTLGRRAVAGLLASPSPAQAQTLTRVPRPAELAPLCGRRGLRTDIDATCTPRRAVNVAPVAVPSLRKSEDHALQTGHVLDYLCFCLLGFQSASEQRSNPDSVVHRMAGVRSTTLLSSPCEWDWHPGCSSRSKYSRKHRAVPVHGPRCQAPGMEELIWEQYTVTLQKDSKRGFGIAVSGGRDNPHFENGETSIVISDVLPGGPADGLLQENDRVVMVNGTPMEDVLHSFAVQQLRKSGKVAAIVVKRPRKVQVAALQASPPLDQDDRAFEVMDEFDGRSFRSGYSERSRLNSHGGRSRSWEDSPERGRPHERARSRERDLSRDRSRGRSLERGLDQDHARTRDRSRGRSLERGLDHDFGPSRDRDRDRSRGRSIDQDYERAYHRAYDPDYERAYSPEYRRGARHDARSRGPRSRSREHPHSRSPSPEPRGRPGPIGVLLMKSRANEEYGLRLGSQIFVKEMTRTGLATKDGNLHEGDIILKINGTVTENMSLTDARKLIEKSRGKLQLVVLRDSQQTLINIPSLNDSDSEIEDISEIESNRSFSPEERRHQYSDYDYHSSSEKLKERPSSREDTPSRLSRMGATPTPFKSTGDIAGTVVPETNKEPRYQEDPPAPQPKAAPRTFLRPSPEDEAIYGPNTKMVRFKKGDSVGLRLAGGNDVGIFVAGIQEGTSAEQEGLQEGDQILKVNTQDFRGLVREDAVLYLLEIPKGEMVTILAQSRADVYRDILACGRGDSFFIRSHFECEKETPQSLAFTRGEVFRVVDTLYDGKLGNWLAVRIGNELEKGLIPNKSRAEQMASVQNAQRDNAGDRADFWRMRGQRSGVKKNLRKSREDLTAVVSVSTKFPAYERVLLREAGFKRPVVLFGPIADIAMEKLANELPDWFQTAKTEPKDAGSEKSTGVVRLNTVRQIIEQDKHALLDVTPKAVDLLNYTQWFPIVIFFNPDSRQGVKTMRQRLNPTSNKSSRKLFDQANKLKKTCAHLFTATINLNSANDSWFGSLKDTIQHQQGEAVWVSEGKMEGMDDDPEDRMSYLTAMGADYLSCDSRLISDFEDTDGEGGAYTDNELDEPAEEPLVSSITRSSEPVQHEESIRKPSPEPRAQMRRAASSDQLRDNSPPPAFKPEPPKAKTQNKEESYDFSKSYEYKSNPSAVAGNETPGASTKGYPPPVAAKPTFGRSILKPSTPIPPQEGEEVGESSEEQDNAPKSVLGKVKIFEKMDHKARLQRMQELQEAQNARIEIAQKHPDIYAVPIKTHKPDPGTPQHTSSRPPEPQKAPSRPYQDTRGSYGSDAEEEEYRQQLSEHSKRGYYGQSARYRDTEL

SEQ ID NO: 24639 - protein, 410 aa, Homo sapiens
EEASLAETALTSGSSPSAPASDSIGPQILTSPSPSKSIPIPQPFRPADEDHRNQFGQRDRSSSAPNVHINTIEPVNIDDLIRDQGFRGDGGSTTGLSATPPASLPGSLTNVKALQKSPGPQRERKSSSSSEDRNRMKTLGRRDSSDDWEIPDGQITVGQRIGSGSFGTVYKGKWHGDVAVKMLNVTAPTPQQLQAFKNEVGVLRKTRHVNILLFMGYSTKPQLAIVTQWCEGSSLYHHLHIIETKFEMIKLIDIARQTAQGMDYLHAKSIIHRDLKSNNIFLHEDLTVKIGDFGLATVKSRWSGSHQFEQLSGSILWMAPEVIRMQDKNPYSFQSDVYAFGIVLYELMTGQLPYSNINNRDQKLQLQEWIFLDHRTIRRMSSATIASGHYTFHCITDCAVRTGALSSMGV

SEQ ID NO: 24640 - protein, 1494 aa, Homo sapiens
MIESENLNQEEIIKELCLCNGLSYEMVGQEGSDTSKLEMFFLGYPRIVGLSLFPNLTSLTIVAQDIKEISGLEPCLQLKELWIAECCIEKIEGLQECRNLEKLYLYFNKISKIENLEKLIKLKVLWLNHNTIKNIEGLQTLKNLKDLNLAGNLINSIGRCLDSNEQLERLNLSGNQICSFKELTNLTRLPCLKDLCLNDPQYTTNPVCLLCNYSTHVLYHLPCLQRFDTLDVSAKQIKELADTTAMKKIMYYNMRIKTLQRHLKEDLEKLNDQKCKLQKLPEERVKLFSFVKKTLERELAELKGSGKGHSDGSNNSKVTDPETLKSCETVTEEPSLQQKILAKLNALNERVTFWNKKLDEIEAIYHIEVKQKKKSHGLLIPLLLIELETVGNFHFEEGTRSDDWFNFCYELILSRFCAWDFRTYGITGVKVKRIIKVNNRILRLKFEEKFQKFLENEDMHDSESYRRMLECLFYVFDPEVSVKKKHLLQILEKGFKDSETSKLPLKKEAIIVSNSLSISECPRIEFLQQKHKDEKKISLKHELFRHGILLITKVFLGQSVQAHEKESISQSNYPMVNSVFIPRKYLLNSVMGQRNCDCSVRQCKWFVFDHDLVLPEYVVEFEYITMVKAPSLFSVFNNVILEESKKNPEVSVFSKDLKFDDEVIKMEPRIKARPKLISLDDKTILSLAKTSVYSHIVSLNLHGNSLSKLRDLSKLTGLRKLNISFNEFTCLDDVYHLYNLEYLDASHNHVITLEGFRGLMKLKHLDLSWNQLKKSGNEINMLCKHTTSLLTLDIQHNPWQKPATLRLSVIGRLKTLTHLNGVFISEEEATAAMKFIAGTRITQLSLLRHSSTKEERPRILSIWPSAKILTQVSKLGPHLHLSGNCYLKITALNLDGQHLFEITNLEKLENLKWASFSNNNLTKMEGLESCINLEELTLDGNCISKIEGISKMTKLTRLSINNNLLTGWEEHTFDNMLHLHSLSLENNRITSLSGLQKSFTLVELYISNNYIAVNQEMHNLKGLCNLVILDMCGNIIIWNQENYRLFVIFHLPELKALDGIPIEPSETDSAKDLFGGRLTSDMIAERQGHSNFKQMQELNWTSSSIRTVDLIPVDQFRNVCNVNLQNNHLTSFSGLIYLPNVKVLCLNYNHIESIMPRLKPQTHLTSRQLLYQKVPSSGYGQQGISKTNRDIMSSENLPPIMHSLEVLHLGYNGICNLIQLQLNRLRNLKFLFLQGNEISQVEGLDNLVVLQELVVDHNRIRSFNDSAFAKPSSLLALHLEENRLRELGKLQSLVKLEKLFLGYNKIQDITELEKLDVISTLRELTVYGNPICRKMLHRHMLIFRLPNLQMLDGSPVNSDDRAKAEFHLAELQAKKNSLIPVTHSPMDGRSFGQVKTPPIEITNVLLPSGFSHYLGSDVTLTPEVEDKKNKNAGILTNNPRSIHAEIAFRQLRGISISPSLLSHQNIASPTAQIYQSNQDKRRIFGSNFPRSNRM

SEQ ID NO: 24641 - protein, 476 aa, Homo sapiens
MGEIIMGNIELTRYTRPTPVQKHAIPIIKEKRDLMACAQTGSGKTAAFLLPILSQIYSDGPGEALRAMKENGRYGRRKQYPISLVLAPTRELAVQIYEEARKFSYRSRVRPCVVYGGADIGQQIRDLERGCHLLVATPGRLVDMMERGKIGLDFCKYLVLDEADRMLDMGFEPQIRRIVEQDTMPPKGVRHTMMFSATFPKEIQMLARDFLDEYIFLAVGRVGSTSENITQKVVWVEESDKRSFLLDLLNATGKDSLTLVFVETKKGADSLEDFLYHEGYACTSIHGDRSQRDREEALHQFRSGKSPILVATAVAARGLDISNVKHVINFDLPSDIEEYVHRIGRTGRVGNLGLATSFFNERNINITKDLLDLLVEAKQEVPSWLENMAYEHHYKGSSRGRSKSSRFSGGFGARDYRQSSGASSSSFSSSRASSSRSGGGGHGSSRGFGGGGYGGFYNSDGYGGNYNSQGVDWWGN

SEQ ID NO: 24642 - protein, 1433 aa, Homo sapiens
MKKEGRKRWKRKEDKKRVVVSNLLFEGWSHKENPNRHHRGNQIKTSKYTVLSFVPKNIFEQLHRFANLYFVGIAVLNFIPVVNAFQPEVSMIPICVILAVTAIKDAWEDLRRYKSDKVINNRECLIYSRKEQTYVQKCWKDVRVGDFIQMKCNEIVPADILLLFSSDPNGICHLETASLDGETNLKQRCVVKGFSQQEVQFEPELFHNTIVCEKPNNHLNKFKGYMEHPDQTRTGFGCESLLLRGCTIRNTEMAVGIVIYAGHETKAMLNNSGPRYKRSKIERRMNIDIFFCIGILILMCLIGAVGHSIWNGTFEEHPPFDVPDANGSFLPSALGGFYMFLTMIILLQVLIPISLYVSIELVKLGQVFFLSNDLDLYDEETDLSIQCRALNIAEDLGQIQYIFSDKTGTLTENKMVFRRCTIMGSEYSHQENAKRLETPKELDSDGEEWTQYQCLSFSARWAQDPATMRSQKGAQPLRRSQSARVPIQGHYRQRSMGHRESSQPPVAFSSSIEKDVTPDKNLLTKVRDAALWLETLSDSRPAKASLSTTSSIADFFLALTICNSVMVSTTTEPRQRVTIKPSSKALGTSLEKIQQLFQKLKLLSLSQSFSSTAPSDTDLGESLGANVATTDSDERDDASVCSGGDSTDDGGYRSSMWDQGDILESGSGTSLEEALEAPATDLARPEFCYEAESPDEAALVHAAHAYSFTLVSRTPEQVTVRLPQGTCLTFSLLCTLGFDSVRKRMSVVVRHPLTGEIVVYTKGADSVIMDLLEDPACVPDINMEKKLRKIRARTQKHLDLYARDGLRTLCIAKKVVSEEDFRRWASFRREAEASLDNRDELLMETAQHLENQLTLLGATGIEDRLQEGVPDTIATLREAGIQLWVLTGDKQETAVNIAHSCRLLNQTDTVYTINTENQETCESILNCALEELKQFRELQKPDRKLFGFRLPSKTPSITSEAVVPEAGLVIDGKTLNAIFQGKLEKKFLELTQYCRSVLCCRSTPLQKSMIVKLVRDKLRVMTLSIGDGANDVSMIQAADIGIGISGQEGMQAVMSSDFAITRFKHLKKLLLVHGHWCYSRLARMVVYYLYKNVCYVNLLFWYQFFCGFSSSTMIDYWQMIFFNLFFTSLPPLVFGVLDKDISAETLLALPELYKSGQNSECYNLSTFWISMVDAFYQSLICFFIPYLAYKGSDIDVFTFGTPINTISLTTILLHQAMEMKTWTIFHGVVLLGSFLMYFLVSLLYNATCVICNSPTNPYWVMEGQLSNPTFYLVCFLTPVVALLPRYFFLSLQGTCGKSLISKAQKIDKLPPDKRNLEIQSWRSRQRPAPVPEVARPTHHPVSSITGQDFSASTPKSSNPPKRKHVEESVLHEQRCGTECMRDDSCSGDSSAQLSSGEHLLGPNRIMAYSRGQTDMCRCSKRSSHRRSQSSLTI

SEQ ID NO: 24643 - protein, 479 aa, Homo sapiens
MFKGVGLAAAVLSFWLNIYYIVIISWAIYYLYNSFTTTLPWKQCDNPWNTDRCFSNYSMVNTTNMTSAVVEFWERNMHQMTDGLDKPGQIRWPLAITLAIAWILVYFCIWKGVGWTGKVVYFSATYPYIMLIILFFRGVTLPGAKEGILFYITPNFRKLSDSEVWLDAATQIFFSYGLGLGSLIALGSYNSFHNNVYRDSIIVCCINSCTSMFAGFVIFSIVGFMAHVTKRSIADVAASGPGLAFLAYPEAVTQLPISPLWAILFFSMLLMLGIDSQFCTVEGFITALVDEYPRLLRNRRELFIAAVCIISYLIGLSNITQGGIYVFKLFDYYSASGMSLLFLVFFECVSISWFYGVNRFYDNIQEMVGSRPCIWWKLCWSFFTPIIVAGVFIFSAVQMTPLTMGNYVFPKWGQGVGWLMALSSMVLIPGYMAYMFLTLKGSLKQRIQVMVQPSEDIVRPENGPEQPQAGSSTSKEAYI

SEQ ID NO: 24644 - protein, 727 aa, Homo sapiens
MFDHNGKIIQKTPYPRPRGTTVSVQQLFSTLPVRHKEFQRNIKKEYAKMVQVLHAYCIISAGIRVSCTNQLGQGKRQPVVCTGGSPSIKENIGSVFGQKQLQSLIPFVQLPPSDSVCEEYGLSCSDALHNLFYISGFISQCTHGVGRSSTDRQFFFINRRPCDPAKVCRLVNEVYHMYNRHQYPFVVLNISVDSECVDINVTPDKRQILLQEEKLLLAVLKTSLIGMFDSDVNKLNVSQQPLLDVEGNLIKMHAADLEKPMVEKQDQSPSLRTGEEKKDVSISRLREAFSLRHTTENKPHSPKTPEPRRSPLGQKRGMLSSSTSGAISDKGVLRPQKEAVSSSHGPSDPTDRAEVEKDSGHGSTSVDSEGFSIPDTGSHCSSEYAASSPGDRGSQEHVDSQEKAPKTDDSFSDVDCHSNQEDTGCKFRVLPQPTNLATPNTKRFKKEEILSSSDICQKLVNTQDMSASQVDVAVKINKKVVPLDFSMSSLAKRIKQLHHEAQQSEGEQNYRKFRAKICPGENQAAEDELRKEISKTMFAEMEIIGQFNLGFIITKLNEDIFIVDQHATDEKYNFEMLQQHTVLQGQRLIAPQTLNLTAVNEAVLIENLEIFRKNGFDFVIDENAPVTERAKLISLPTSKNWTFGPQDVDELIFMLSDSPGVMCRPSRVKQMFASRACRKSVMIGTALNTSEMKKLITHMGEMDHPWNCPHGRPTMRHIANLGVISQN

SEQ ID NO: 24645 - protein, 1489 aa, Homo sapiens
MAEARKRRELLPLIYHHLLRAGYVRAAREVKEQSGQKCFLAQPVTLLDIYTHWQQTSELGRKRKAEEDAALQAKKTRVSDPISTSESSEEEEEAEAETAKATPRLASTNSSVLGADLPSSMKEKAKAETEKAGKTGNSMPHPATGKTVANLLSGKSPRKSAEPSANTTLVSETEEEGSVPAFGAAAKPGMVSAGQADSSSEDTSSSSDETDVEGKPSVKPAQVKASSVSTKESPARKAAPAPGKVGDVTPQVKGGALPPAKRAKKPEEESESSEEGSESEEEAPAGTRSQVKASEKILQVRAASAPAKGTPGKGATPAPPGKAGAVASQTKAGKPEEDSESSSEESSDSEEETPAAKALLQAKASGKTSQVGAASAPAKESPRKGAAPAPPGKTGPAVAKAQAGKREEDSQSSSEESDSEEEAPAQAKPSGKAPQVRAASAPAKESPRKGAAPAPPRKTGPAAAQVQVGKQEEDSRSSSEESDSDREALAAMNAAQVKPLGKSPQVKPASTMGMGPLGKGAGPVPPGKVGPATPSAQVGKWEEDSESSSEESSDSSDGEVPTAVAPAQEKSLGNILQAKPTSSPAKGPPQKAGPVAVQVKAEKPMDNSESSEESSDSADSEEAPAAMTAAQAKPALKIPQTKACPKKTNTTASAKVAPVRVGTQAPRKAGTATSPAGSSPAVAGGTQRPAEDSSSSEESDSEEEKTGLAVTVGQAKSVGKGLQVKAASVPVKGSLGQGTAPVLPGKTGPTVTQVKAEKQEDSESSEEESDSEEAAASPAQVKTSVKKTQAKANPAAARAPSAKGTISAPGKVVTAAAQAKQRSPSKVKPPVRNPQNSTVLARGPASVPSVGKAVATAAQAQTGPEEDSGSSEEESDSEEEAETLAQVKPSGKTHQIRAALAPAKESPRKGAAPTPPGKTGPSAAQAGKQDDSGSSSEESDSDGEAPAAVTSAQVIKPPLIFVDPNRSPAGPAATPAQAQAASTPRKARASESTARSSSSESEDEDVIPATQCLTPGIRTNVVTMPTAHPRIAPKASMAGASSSKESSRISDGKKQEGPATQVSKKNPASLPLTQAALKVLAQKASEAQPPVARTQPSSGVDSAVGTLPATSPQSTSVQAKGTNKLRKPKLPEVQQATKAPESSDDSEDSSDSSSGSEEDGEGPQGAKSAHTLVGPTPSRTETLVEETAAESSEDDVVAPSQSLLSGYMTPGLTPANSQASKATPKLDSSPSVSSTLAAKDDPDGKQEAKPQQAAGMLSPKTGGKEAASGTTPQKSRKPKKGAGNPQASTLALQSNITQCLLGQPWPLNEAQVQASVVKVLTELLEQERKKVVDTTKESSRKGWESRKRKLSGDQPAARTPRSKKKKKLGAGEGGEASVSPEKTSTTSKGKAKRDKASGDVKEKKGKGSLGSQGAKDEPEEELQKGMGTVEGGDQSNPKSKKEKKKSDKRKKDKEKKEKKKKAKKASTKDSESPSQKKKKKKKKTAEQTV

SEQ ID NO: 24646 - protein, 662 aa, Homo sapiens
MSHVAVENALGLDQQFAGLDLNSSDNQSGGSTASKGRYIPPHLRNREATKGFYDKDSSGWSSSKDKDAYSSFGSRSDSRGKSSFFSDRGSGSRGRFDDRGRSDYDGIGSRGDRSGFGKFERGGNSRWCDKSDEDDWSKPLPPSERLEQELFSGGNTGINFEKYDDIPVEATGNNCPPHIESFSDVEMGEIIMGNIELTRYTRPTPVQKHAIPIIKEKRDLMACAQTGSGKTAAFLLPILSQIYSDGPGEALRAMKENGRYGRRKQYPISLVLAPTRELAVQIYEEARKFSYRSRVRPCVVYGGADIGQQIRDLERGCHLLVATPGRLVDMMERGKIGLDFCKYLVLDEADRMLDMGFEPQIRRIVEQDTMPPKGVRHTMMFSATFPKEIQMLARDFLDEYIFLAVGRVGSTSENITQKVVWVEESDKRSFLLDLLNATGKDSLTLVFVETKKGADSLEDFLYHEGYACTSIHGDRSQRDREEALHQFRSGKSPILVATAVAARGLDISNVKHVINFDLPSDIEEYVHRIGRTGRVGNLGLATSFFNERNINITKDLLDLLVEAKQEVPSWLENMAYEHHYKGSSRGRSKSRFSGGFGARDYRQSSGASSSSFSSSRASSSRSGGGGHGSSRGFGGGSGYGGFYNSDGYGGNYNSQGVDWWGN

SEQ ID NO: 24647 - protein, 323 aa, Homo sapiens
MNHSDASVFRIQKNQTAGVTFILLGFSEFPDLQIPLFLVFLTIYTITVMGNLGMIMVIRINPKLHTPMYFFLSHLSFVDFCYSTTITPKLLENLVVEDRIISFTGCIMQFFFACIFVVTETFMLAAMAYDRFVAVCNPLLYTVAMSQRLCSLLVAASYSWSLVCSLTYTYFLLTLSFCRTNFINNFVCEHAAIVAVSCSDPYMSQKVILVSATFNEISSLVIILTSYAFIFITVMKMPSTGGRKKAFSTCASHLTAITIFHGTILFLYCVPNSKSSWLMVKVASVFYTVVIPMLNPLIYSLRNKDVKETVRKLVITKLLCHKM

SEQ ID NO: 24648 - protein, 736 aa, Homo sapiens
MEPWSSRWKTKRWLWDFTVTTLALTFLFQAREVRGAAPVDVLKALDFHNSPEGISKTTGFCTNRKNSKGSDTAYRVSKQAQLSAPTKQLFPGGTFPEDFSILFTVKPKKGIQSFLLSIYNEHGIQQIGVEVGRSPVFLFEDHTGKPAPEDYPLFRTVNIADGKWHRVAISVEKKTVTMIVDCKKKTTKPLDRSERAIVDTNGITVFGTRILDEEVFEGDIQQFLITGDPKAAYDYCEHYSPDCDSSAPKAAQAQEPQIDEYAPEDIIEYDYEYGEAEYKEAESVTEGPTVTEETIAQTEANIVDDFQEYNYGTMESYQTEAPRHVSGTNEPNPVEEIFTEEYLTGEDYDSQRKNSEDTLYENKEIDGRDSDLLVDGDLGEYDFYEYKEYEDKPTSPPNEEFGPGVPAETDITETSINGHGAYGEKGQKGEPAVVEPGMLVEGPPGPAGPAGIMGPPGLQGPTGPPGDPGDRGPPGRPGLPGADGLPGPPGTMLMLPFRYGGDGSKGPTISAQEAQAQAILQQARIALRGPPGPMGLTGRPGPVGGPGSSGAKGESGDPGPQGPRGVQGPPGPTGKPGKRGRPGADGGRGMPGEPGAKGDRGFDGLPGLPGDKGHRGERGPQGPPGPPGDDGMRGEDGEIGPRGLPGEAGPRGLLGPRGTPGAPGQPGMAGVDGPPGPKGNMGPQGEPGPPGQQGNPGPQGLPGPQGPIGPPGEKVSYSVVLVKPGEHVCFSNLRQV

SEQ ID NO: 24649 - protein, 721 aa, Homo sapiens
MIDSVKLRRDSAADFFSHYEYLCALQNSVPLPAVRACLREGVLDFNADRLRGVDWAPLLSTLKINKDLPLVSIKSFFQPWLGDTGSDMNKFCRSRVPAIRYKDVTFQLCKALKGCLSISSVLKNLELNGLILRERDLTILAKGLNKSASLVHLSLANCPIGDGGLEIICQGIKSSITLKTVNFTGCNLTWQGADHMAKILKYQTMRRHEETWAESLRYRRPDLDCMAGLRRITLNCNTLIGDLGACAFADSLSEDLWLRALDLQQCGLTNEGAKALLEALETNTTLVVLDIRKNPLIDHSMMKAVIKKVLQNGRSAKSEYQWITSPSVKEPSKTAKQKRRTIILGSGHKGKATIRIGLATKKPVSSGRKHSLGKEYYAPAPLPPGVSGFLPWRTAERAKRHRGFPLIKTRDICNQLQQPGFPVTVTVESPSSSEVEEVDDSSESVHEVPEKTSIEQEALQEKLEECLKQLKEERVIRLKVDKRVSELEHENAQLRNINFSLSEALHAQSLTNMILDDEGVLGSIENSFQKFHAFLDLLKDAGLGQLATMAGIDQSDFQLLGHPQMTSTVSNPPKEEKKALEDEKPEPKQNALGQMQNIQVSICMQSAYNEGTLMKFQKITGDARIPLPLDSFPVPVSTPEGLGTSSNNLGVPATEQRQESFEGFIARMCSPSPDATSGTGSQRKEEELSRNSRSSSEKKTKTGEYTKKHSDKQHPGKDLHS

SEQ ID NO: 24650 - protein, 449 aa, Homo sapiens
MGLLVFVRNLLLALCLFLVLGFLYYSAWKLHLLQWEEDSSKYSHSSSPQEKPVADSVVLSFDSAGQTLGSEYDRLGFLLNLDSKLPAELATKYANFSEGACKPGYASALMTAIFPRFSKPAPMFLDDSFRKWARIREFVPPFGIKGQDNLIKAILSVTKEYRLTPALDSLRCRRCIIVGNGGVLANKSLGSRIDDYDIVVRLNSAPVKGFEKDVGSKTTLRITYPEGAMQRPEQYERDSLFVLAGFKWQDFKWLKYIVYKERVSASDGFWKSVATRVPKEPPEIRILNPYFIQEAAFTLIGLPFNNGLMGRGNIPTLGSVAVTMALHGCDEVAVAGFGYDMSTPNAPLHYYETVRMAAIKEPRPHVENLNPSELRLPHFCFDHQPSTDPSLKPGNLGPVLQQLLCCYIWVMGGCWREPPICADSCFFLDAQYPARERVSAEAGESSRHH

SEQ ID NO: 24651 - protein, 808 aa, Homo sapiens
MSQNGYFEDSSYYKCDTDDTFEAREEILGDEAFDTANSSIVSGESIRFFVNVNLEMQATNTENEATSGGCVLLHTSRKYLKLKNFKEEIRAHRDLDGFLAQASIVLNETATSLDNVLRTMLRRFARDPDNNEPNCNLDLLMAMLFTDAGAPMRGKVHLLSDTIQGVTATVTGVRYQQSWLCIICTMKALQKRHVCISRLVRPQNWGENSCEVRFVILVLAPPKMKLLETRTEEEFKEALVHQRQLLTMVSHGPVAPRTKERSTVSLPAHRHPEPPKCKDFVPFGKGIREDIARRFPLYPLDFTDGIIGKNKAVGKYITTTLFLYFACLLPTIAFGSLNDENTDGAIDVQKTIAGQSIGGLLYALFSGQPLVILLTTAPLALYIQVIRVICDDYDLDFNSFYAWTGLWNSFFLALYAFFNLSLVMSLFKRSTEEIIALFISITFVLDAVKGTVKIFWKYYYGHYLDDYHTKRTSSLVSLSGLGASLNASLHTALNASFLASPTELPSATHSGQATAVLSLLIMLGTLWLGYTLYQFKKSPYLHPCVREILSDCALPIAVLAFSLISSHGFREIEMSKFRYNPSESPFAMAQIQSLSLRAVSGAMGLGFLLSMLFFIEQNLVAALVNAPENRLVKGTAYHWDLLLLAIINTGLSLFGLPWIHAAYPHSPLHVRALALVEERVENGHIYDTIVNVKETRLTSLGASVLVGLSLLLLPVPLQWIPKPVLYGLFLYIALTSLDGNQLVQRVALLLKEQVLQLLLLCAFGMSSLPYMKMIFPLIMIAMIPIRYILLPRIIEAKYLDVMDAEHRP

SEQ ID NO: 24652 - protein, 1553 aa, Homo sapiens
LRTTKKKKKDHQDYCEVCQQGGEIILCDTCPRAYHMVCLDPDMEKAPEGKWSCPHCEKEGIQWEAKEDNSEGEEILEEVGGDLEEEDDHHMEFCRVCKDGGELLCCDTCPSSYHIHCLNPPLPEIPNGEWLCPRCTCPALKGKVQKILIWKWGQPPSPTPVPRPPDADPNTPSPKPLEGRPERQFFVKWQGMSYWHCSWVSELQLELHCQVMFRNYQRKNDMDEPPSGDFGGDEEKSRKRKNKDPKFAEMEERFYRYGIKPEWMMIHRILNHSVDKKGHVHYLIKWRDLPYDQASWESEDVEIQDYDLFKQSYWNHRELMRGEEGRPGKKLKKVKLRKLERPPETPTVDPTVKYERQPEYLDATGGTLHPYQMEGLNWLRFSWAQGTDTILADEMGLGKTVQTAVFLYSLYKEGHSKGPFLVSAPLSTIINWEREFEMWAPDMYVVTYVGDKDSRAIIRENEFSFEDNAIRGGKKASRMKKEASVKFHVLLTSYELITIDMAILGSIDWACLIVDEAHRLKNNQSKFFRVLNGYSLQHKLLLTGTPLQNNLEELFHLLNFLTPERFHNLEGFLEEFADIAKEDQIKKLHDMLGPHMLRRLKADVFKNMPSKTELIVRVELSPMQKKYYKYILTRNFEALNARGGGNQVSLLNVVMDLKKCCNHPYLFPVAAMEAPKMPNGMYDGSALIRASGKLLLLQKMLKNLKEGGHRVLIFSQMTKMLDLLEDFLEHEGYKYERIDGGITGNMRQEAIDRFNAPGAQQFCFLLSTRAGGLGINLATADTVIIYDSDWNPHNDIQAFSRAHRIGQNKKVMIYRFVTRASVEERITQVAKKKMMLTHLVVRPGLGSKTGSMSKQELDDILKFGTEELFKDEATDGGGDNKEGEDSSVIHYDDKAIERLLDRNQDETEDTELQGMNEYLSSFKVAQYVVREEEMGEEEEVEREIIKQEESVDPDYWEKLLRHHYEQQQEDLARNLGKGKRIRKQVNYNDGSQEDRDWQDDQSDNQSDYSVASEEGDEDFDERSEAPRRPSRKGLRNDKDKPLPPLLARVGGNIEVLGFNARQRKAFLNAIMRYGMPPQDAFTTQWLVRDLRGKSEKEFKAYVSLFMRHLCEPGADGAETFADGVPREGLSRQHVLTRIGVMSLIRKKVQEFEHVNGRWSMPELAEVEENKKMSQPGSPSPKTPTPSTPGDTQPNTPAPVPPADGIKIEENSLKEEESIEGEKEVKSTAPETAIECTQAPAPASEDEKVVVEPPEGEEKVEKAEVKERTEEPMETEPKGAADVEKVEEKSAIDLTPIVVEDKEEKKEEEEKKEVMLQNGETPKDLNDEKQKKNIKQRFMFNIADGGFTELHSLWQNEERAATVTKKTYEIWHRRHDYWLLAGIINHGYARWQDIQNDPRYAILNEPFKGEMNRGNFLEIKNKFLARRFKLLEQALVIEEQLRRAAYLNMSEDPSHPSMALNTRFAEVECLAESHQHLSKESMAGNKPANAVLHKVLKQLEELLSDMKADVTRLPATIARIPPVAVRLQMSERNILSRLANRAPEPTPQQVAQQQ

SEQ ID NO: 24653 - protein, 1741 aa, Homo sapiens
MAKPTSKDSGLKEKFKILLGLGTPRPNPRSAEGKQTEFIITAEILRELSMECGLNNRIRMIGQICEVAKTKKFEEHAVEALWKAVADLLQPERPLEARHAVLALLKAIVQGQGERLGVLRALFFKVIKDYPSNEDLHERLEVFKALTDNGRHITYLEEELADFVLQWMDVGLSSEFLLVLVNLVKFNSCYLDEYIARMVQMICLLCVRTASSVDIEVSLQVLDAVVCYNCLPAESLPLFIVTLCRTINVKELCEPCWKLMRNLLGTHLGHSAIYNMCHLMEDRAYMEDAPLLRGAVFFVGMALWGAHRLYSLRNSPTSVLPSFYQAMACPNEVVSYEIVLSITRLIKKYRKELQVVAWDILLNIIERLLQQLQTLDSPELRTIVHDLLTTVEELCDQNEFHGSQERYFELVERCADQRPESSLLNLISYRAQSIHPAKDGWIQNLQALMERFFRSESRGAVRIKVLDVLSFVLLINRQFYEEELINSVVISQLSHIPEDKDHQVRKLATQLLVDLAEGCHTHHFNSLLDIIEKVMARSLSPPPELEERDVAAYSASLEDVKTAVLGLLVILQTKLYTLPASHATRVYEMLVSHIQLHYKHSYTLPIASSIRLQAFDFLLLLRADSLHRLGLPNKDGVVRFSPYCVCDYMEPERGSEKKTSGPLSPPTGPPGPAPAGPAVRLGSVPYSLLFRVLLQCLKQESDWKVLKLVLGRLPESLRYKVLIFTSPCSVDQLCSALCSMLSGPKTLERLRGAPEGFSRTDLHLAVVPVLTALISYHNYLDKTKQREMVYCLEQGLIHRCASQCVVALSICSVEMPDIIIKALPVLVVKLTHISATASMAVPLLEFLSTLARLPHLYRNFAAEQYASVFAISLPYTNPSKFNQYIVCLAHHVIAMWFIRCRLPFRKDFVPFITKGLRSNVLLSFDDTPEKDSFRARSTSLNERPKSRIQTSLTSASLGSADENSVAQADDSLKNLHLELTETCLDMMARYVFSNFTAVPKRSPVGEFLLAGGRTKTWLVGNKLVTVTTSVGTGTRSLLGLDSGELQSGPESSSSPGVHVRQTKEAPAKLESQAGQQVSRGARDRVRSMSGGHGLRVGALDVPASQFLGSATSPGPRTAPAAKPEKASAGTRVPVQEKTNLAAYVPLLTQGWAEILVRRPTGNTSWLMSLENPLSPFSSDINNMPLQELSNALMAAERFKEHRDTALYKSLSVPAASTAKPPPLPRSNTDSAVVMEEGSPGEVPVLVEPPGLEDVEAALGMDRRTDAYSRSSSVSSQEEKSLHAEELVGRGIPIERVVSSEGGRPSVDLSFQPSQPLSKSSSSPELQTLQDILGDPGDKADVGRLSPEVKARSQSGTLDGESAAWSASGEDSRGQPEGPLPSSSPRSPSGLRPRGYTISDSAPSRRGKRVERDALKSRATASNAEKVPGINPSFVFLQLYHSPFFGDESNKPILLPNESQSFERSVQLLDQIPSYDTHKIAVLYVGEGQSNSELAILSNEHGSYRYTEFLTGLGRLIELKDCQPDKVYLGGLDVCGEDGQFTYCWHDDIMQAVFHIATLMPTKDVDKHRCDKKRHLGNDFVSIVYNDSGEDFKLGTIKGQFNFVHVIVTPLDYECNLVSLQCRKDMEGLVDTSVAKIVSDRNLPFVARQMALHANMASQVHHSRSNPTDIYPSKWIARLRHIKRLRQRICEEAAYSNPSLPLVHPPSHSKAPAQTPAEPTPGYEVGQRKRLISSVEDFTEFV

SEQ ID NO: 24654 - protein, 2150 aa, Homo sapiens
MNYSSFLRIWVSFIFALVQHQAQPRELMYPFWQNDTKTPKVDDGSSSEIKLAIPVFFFGVPYRTVYVNNNGVVSFNVLVSQFTPESFPLTDGRAFVAPFWADVHNGIRGEIYYRETMEPAILKRATKDIRKYFKDMATFSATWVFIVTWEEVTFYGGSSTTPVNTFQAVLVSDGSYTFTLFNYYEINWTTGTASGGDPLTGLGGVMAQAGFNGGNLTNFFSLPGSRTPEIVNIQETTNVNVPGRWAFKVDGKEIDPANGCTSRGQFLRRGEVFWDDLNCTVKCRCLDFNNEIYCQEASCSPYEVCEPKGKFFYCSAVETSTCVVFGEPHYHTFDGFLFHFQGSCAYLLARQCLQTSSLPFFSVEAKNEHRRGSAVSWVKELSVEVNGYKILIPKGSYGRVKVNDLVTSLPVTLDLGTVKIYQSGISTAVETDFGLLVTFDGQHYASISVPGSYINSTCGLCGNYNKNPLDDFLRPDGRPAMSVLDLGESWRVYHADWKCDSGCVDNCTQCDAATEALYFGSDYCGFLNKTDGPLWECGTVVDPTAFVHSCVYDLCSVRDNGTLLCQAIQAYALVCQALGIPIGDWRTQTGCVSTVQCPSFSHYSVCTSSCPDTCSDLTASRNCATPCTEGCECNQGFVLSTSQCVPLHKCGCDFDGHYYTMGEFFWATANCTVQCLCEEGGDVYCFNKTCGSGEVCAVEDGYQGCFPKRETVCLLSQNQVLHTFDGASYAFPSEFSYTLLKTCPERPEYLEIDINKKKPDAGPAWLRGLRILVADQEVKIGGIGASEVKLNGQEVELPFFHPSGKLEIYRNKNSTTVESKGVVTVQYSDIGLLYIRLSTTYFNCTGGLCGFYNANASDEFCLPNGKCTDNLAVFLESWTTFEEICNGECGDLLKACNNDSELLKFYRSRSRCGIINDPSNSSFLECHGVVNVTAYYRTCLFRLCQSGGNESELCDSVARYASACKNADVEVGPWRTYDFCPLECPENSHFEECITCTETCETLTLGPICVDSCSEGCQCDEGYALLGSQCVTRSECGCNFEGHQLATNETFWVDLDCQIFCYCSGTDNRVHCETIPCKDDEYCMEEGGLYYCQARTDASCIVSGYGHYLTFDGFPFDFQTSCPLILCTTGSRPSSDSFPKFVVTAKNEDRDPSLALWVKQVDVTVFGYSIVIHRAYKHTVLVNSERLYLPLKLGQGKINIFSFGFHVVVETDFGLKVVYDWKTFLSITVPRSMQNSTYGLCGRYNGNPDDDLEMPMGLLASSVNEFGQSWVKRDTFCQVGCGDRCPSCAKVEGFSKVQQLCSLIPNQNAAFSKCHSKVNPTFFYKNCLFDSCIDGGAVQTACSWLQNYASTCQTQGITVTGWRNYTSCTVTCPPNSHYESCVSVCQPRCAAIRLKSDCSHYCVEGCHCDAGYVLNGKSCILPHSCGCYSDGKYYEPKQLFWNSDCTRRCRCFRRNVIQCDPRQCKSDEECALRNGVRGCFSTKTSYCLAAGGGVFRTFDGAFLRFPANCAFVLSTICQKLPDISFQLIINFDKWSAPNLTIISPVYFYINEEQILINDRNTVKVNGTQVNVPFITGLATKIYSSEGFLVIDTSPDIQIYYNGFNVIKISISERLQNKVCGLCGNFNGDLTDDYVTLRGKPVVSSVVLAQSWKTNGMQKSCNELQFSQYAAMCDNVHIQKMQGDGYCLKLTDMKGFFQPCYGLLDPLPFYESCYLDGCYSHKKFQLCGSLAAYGEACRSFGILSTEWIEKENCSGVVEDPCVGADCPNRTCELGNGRELCGCIEPPPYGNNSHDIIDAEVTCKAAQMEVSISKCKLFQLGFEREGVRINDRQCTGIEGEDFISFQINNTKGNCGNIVQSNGTHIMYKNTLWIESANNTGNIITRDRTINVEFSCAYELDIKISLDSVVKPMLSVINLTVPTQEGSFITKMALYKNASYKHPYRQGEVVLTTRDVLYVGVFVVGADATHLILTLNKCYATPTRDSNDKLRYFIIEGGCQNLKDNTIGIEENAVSLTCRFHVTVFKFIGDYDEVHLHCAVSLCDSEKYSCKITCPHNSRIATDYTKEPKEQIISVGPIRRKRLDWCEDNGGCEQICTSRVDGPLCSCVTGTLQEDGKSCRASNSSMELQVWTLLLIMIQISLWHFVYKSGTTS

SEQ ID NO: 24655 - protein, 1101 aa, Homo sapiens
DPIEEALGLPSSLDSLDQMNQDGGGGDVGNSSASELVPPPEETAPTELSKESTAPAPESITLHDYTTQPASQEQPAQPVLQTSTPTSGLLQVSKSQEILSQGNPFMGVSATAVSSSSAGGQPPQSAPKIVILKAPPSSSVTGAHVAQIQAQGITSTAQPLVAGTANGGKVTFTKVLTGTPLRPGVSIVSGNTVLAAKVPGNQAAVQRIVQPSRPVKQLVLQPVKGSAPAGNPGATGPPLKPAVTLTSTPTQGESKRITLVLQQPQSGGPQGHRHVVLGSLPGKIVLQGNQLAALTQAKNAQGQPAKVVTIQLQVQQPQQKIQIVPQPPSSQPQPQQPPSTQPVTLSSVQQAQIMGPGQSPGQRLSVPVKVVLQPQAGSSQGASSGLSVVKVLSASEVAALSSPASSAPHSGGKTGMEENRRLEHQKKQEKANRIVAEAIARARARGEQNIPRVLNEDELPSVRPEEEGEKKRRKKSAGERLKEEKPKKSKTSGASKTKGKSKLNTITPVVGKKRKRNTSSDNSDVEVMPAQSPREDEESSIQKRRSNRQVKRKKYTEDLDIKITDDEEEEEVDVTGPIKPEPILPEPVQEPDGETLPSMQFFVENPSEEDAAIVDKVLSMRIVKKELPSGQYTEAEEFFVKYKNYSYLHCEWATISQLEKDKRIHQKLKRFKTKMAQMRHFFHEDEEPFNPDYVEVDRILDESHSIDKDNGEPVIYYLVKWCSLPYEDSTWELKEDVDEGKIREFKRIQSRHPELKRVNRPQASAWKKLELSHEYKNRNQLREYQLEGVNWLLFNWYNRQNCILADEMGLGKTIQSIAFLQEVYNVGIHGPFLVIAPLSTITNWEREFNTWTEMNTIVYHGSLASRQMIQQYEMYCKDSRGRLIPGAYKFDALITTFEMILSDCPELREIEWRCVIIDEAHRLKNRNCKLLDSLKHMDLEHKVLLTGTPLQNTVEELFSLLHFLEPSQFPSESEFLKDFGDLKTEEQVQKLQAILKPMMLRRLKEDVEKNLAPKQETIIEVELTNIQKKYYRAILEKNFSFLSKGAGHTNMPNLLNTMMELRKCCNHPYLINGEGMLGIYLNFCSTCVYFPDDSPWGQWMH

SEQ ID NO: 24656 - protein, 669 aa, Homo sapiens
MNLFCISLEGSMDSLYEPIPEQQANQENMSSRTDSPIPPFGESEQTPNNLFVGVSNLENAKPKKRKLFRRFMSENKIFEGKTVNDKIWQEHSKHKNDSHIRRPCQLKDLNEDDFLSNNIHTYQGKTLQGTSYQVTSECWSPFHYQRHVETTVDELAIKSGSDPVESMGTLKRLQKLVWTKKARVQNLDEVKPTLINLQDEDDTLISCLKLTKSREKKVNSVSTRRKEEMEIRLDTLSASLGRSSTLNNCNLEDKLAWYEGEAYMWHHWKPFPENPLWTCLDFQIAQVGPWDHCSSCIRHTRLKSSCSDMDLLHSWRSSSFGNFDRFRNNSLSKPDDSTEAHEGDPTNGSGEQSKTSNNGGGLGKKMRAISWTMKKKVGKKYIKALSEEKDEEDGENAHPYRNSDPVIGTHTEKVSLKASDSMDSLYSGQSSSSGITSCSDGTSNRDSFRLDDDGPYSGPFCGRARVHTDFTPSPYDTDSLKIKKGDIIDIICKTPMGMWTGMLNNKVGNFKFIYVDVISEEEAAPKKIKANRRSNSKKSKTLQEFLERIHLQEYTSTLLLNGYETLEDLKDIKESHLIELNIENPDDRRRLLSAAENFLEEEIIQEQENEPEPLSLSSDISLNKSQLDDCPRDSGCYISSGNSDNGKEDLESENLSDMVHKIIITEPSD

SEQ ID NO: 24657 - protein, 775 aa, Homo sapiens
MGDHLDLLLGVVLMAGPVFGIPSCSFDGRIAFYRFCNLTQVPQVLNTTERLLLSFNYIRTVTASSFPFLEQLQLLELGSQYTPLTIDKEAFRNLPNLRILDLGSSKIYFLHPDAFQGLFHLFELRLYFCGLSDAVLKDGYFRNLKALTRLDLSKNQIRSLYLHPSFGKLNSLKSIDFSSNQIFLVCEHELEPLQGKTLSFFSLAANSLYSRVSVDWGKCMNPFRNMVLEILDVSGNGWTVDITGNFSNAISKSQAFSLILAHHIMGAGFGFHNIKDPDQNTFAGLARSSVRHLDLSHGFVFSLNSRVFETLKDLKVLNLAYNKINKIADEAFYGLDNLQVLNLSYNLLGELYSSNFYGLPKVAYIDLQKNHIAIIQDQTFKFLEKLQTLDLRDNALTTIHFIPSIPDIFLSGNKLVTLPKINLTANLIHLSENRLENLDILYFLLRVPHLQILILNQNRFSSCSGDQTPSENPSLEQLFLGENMLQLAWETELCWDVFEGLSHLQVLYLNHNYLNSLPPGVFSHLTALRGLSLNSNRLTVLSHNDLPANLEILDISRNQLLAPNPDVFVSLSVLDITHNKFICECELSTFINWLNHTNVTIAGPPADIYCVYPDSFSGVSLFSLSTEGCDEEEVLKSLKFSLFIVCTVTLTLFLMTILTVTKFRGFCFICYKTAQRLVFKDHPQGTEPDMYKYDAYLCFSSKDFTWVQNALLKHLDTQYSDQNRFNLCFEERDFVPGENRIANIQDAIWNSRKIVCLVSRHFLRDGWCLEAFSYA

SEQ ID NO: 24658 - protein, 968 aa, Homo sapiens
MSLKPQQQQQQQQQQQQQQQQQQQQQQQPPPAAANVRKPGGSGLLASPAAAPSPSSSSVSSSSATAPSSVVAATSGGGRPGLGRGRNSNKGLPQSTISFDGIYANMRMVHILTSVVGSKCEVQVKNGGIYEGVFKTYSPKCDLVLDAAHEKSTESSSGPKREEIMESILFKCSDFVVVQFKDMDSSYAKRDAFTDSAISAKVNGEHKEKDLEPWDAGELTANEELEALENDVSNGWDPNDMFRYNEENYGVVSTYDSSLSSYTVPLERDNSEEFLKREARANQLAEEIESSAQYKARVALENDDRSEEEKYTAVQRNSSEREGHSINTRENKYIPPGQRNREVISWGSGRQNSPRMGQPGSGSMPSRSTSHTSDFNPNSGSDQRVVNGGVPWPSPCPSPSSRPPSRYQSGPNSLPPRAATPTRPPSRPPSRPSRPPSHPSAHGSPAPVSTMPKRMSSEGPPRMSPKAQRHPRNHRVSAGRGSISSGLEFVSHNPPSEAATPPVARTSPSGGTWSSVVSGVPRLSPKTHRPRSPRQNSIGNTPSGPVLASPQAGIIPTEAVAMPIPAASPTPASPASNRAVTPSSEAKDSRLQDQRQNSPAGNKENIKPNETSPSFSKAENKGISPVVSEHRKQIDDLKKFKNDFRLQPSSTSESMDQLLNKNREGEKSRDLIKDKIEPSAKDSFIENSSSNCTSGSSKPNSPSISPSILSNTEHKRGPEVTSQGVQTSSPACKQEKDDKEEKKDAAEQVRKSTLNPNAKEFNPRSFSQPKPSTTPTSPRPQAQPSPSMVGHQQPTPVYTQPVCFAPNMMYPVPVSPGVQPLYPIPMTPMPVNQAKTYRAVKYLELELLRYVPNMPQQRQDQHHQSAMMHPASAAGPPIAATPPAYSTQYVAYSPQQFPNQPLVQHVPHYQSQHPHVYSPVIQGNARMMAPPTHAQPGLVSSSATQYGAHEQTHAMYGRKHFVCLFQCV

SEQ ID NO: 24659 - protein, 312 aa, Homo sapiens
MEGAAAREARGTETPRASAPPPAPSEPPAAPRARPRLVFRTQLAHGSPTGKIEGFTNVRELYAKIAEAFGIAPTEILFCTLNSHKVDMQKLLGGQIGLEDFIFAHVRGETKEVEVTKTEDALGLTITDNGAGYAFIKRIKEGSIINRIEAVCVGDSIEAINDHSIVGCRHYEVAKMLRELPKSQPFTLRLVQPKRAFDMIGQRSRSSKCPVEAKVTSGRETLRLRSGGAATVEEAPSEFEEEASRKVDDLLESYMGIRDPELASTMVETSKKTASAQEFARCLDSVLGEFAFPDEFVVEVWAAIGEAREACG

SEQ ID NO: 24660 - protein, 171 aa, Homo sapiens
MEERGDSEPTPGCSGLGPGGVRGFGDGGGAPSWAPEDAWMGTHPKYLEMMELDIGDATQVYVAFLVYLDLMESKSWHEVNCVGLPELQLICLVGTEIEGEGLQTVVPTPITASLSHNRIREILKASRKLQGDPDLPMSFTLAIVESDSTIVYYKLTDGFMLPDPQNISLRR

SEQ ID NO: 24661 - protein, 1046 aa, Homo sapiens
LNFQRQLRQEVVVCMRRDTALETALNAKAYKRSKRQSLREARITEKLEKQQKIEQERKRRQKHQEYLNSILQHAKDFKEYHRSVTGKIQKLTKAVATYHANTEREQKKENERIEKERMRRLMAEDEEGYRKLIDQKKDKRLAYLLQQTDEYVANLTELVRQHKAAQVAKEKKKKKKKKAENAEGQTPAIGPDGEPLDETSQMSDLPVKVIHVESGKILTGTDAPKAGQLEAWLEMNPGYEVAPRSDSEESGSEEEEEEEEEEQPQAAQPPTLPVEEKKKIPDPDSDDVSEVDARHIIENAKQDVDDEYGVSQALARGLQSYYAVAHAVTERVDKQSALMVNGVLKQYQIKGLEWLVSLYNNNLNGILADEMGLGKTIQTIALITYLMEHKRINGPFLIIVPLSTLSNWAYEFDKWAPSVVKVSYKGSPAARRAFVPQLRSGKFNVLLTTYEYIIKDKHILAKIRWKYMIVDEGHRMKNHHCKLTQVLNTHYVAPRRLLLTGTPLQNKLPELWALLNFLLPTIFKSCSTFEQWFNAPFAMTGEKVDLNEEETILIIRRLHKVLRPFLLRRLKKEVEAQLPEKVEYVIKCDMSALQRVLYRHMQAKGVLLTDGSEKDKKGKGGTKTLMNTIMQLRKICNHPYMFQHIEESFSEHLGFTGGIVQGLDLYRASGKFELLDRILPKLRATNHKVLLFCQMTSLMTIMEDYFAYRGFKYLRLDGTTKAEDRGMLLKTFNEPGSEYFIFLLSTRAGGLGLNLQSADTVIIFDSDWNPHQDLQAQDRAHRIGQQNEVRVLRLCTVNSVEEKILAAAKYKLNVDQKVIQAGMFDQKSSSHERRAFLQAILEHEEQDEEEDEVPDDETVNQMIARHEEEFDLFMRMDLDRRREEARNPKRKPRLMEEDELPSWIIKDDAEVERLTCEEEEEKMFGRGSRHRKEVDYSDSLTEKQWLKAIEEGTLEEIEEEVRQKKSSRKRKRDSDAGSSTPTTSTRSRDKDDESKKQKKRGRPPAEKLSPNPPNLTKKMKKIVDAVIKYKDRVTEQQAHPLCVLIF

SEQ ID NO: 24662 - protein, 169 aa, Homo sapiens
KGSLPLQKLHLVSRSIYHSHHPTLKLQRPQLRTSFQQFSSLTNLPLRKLKFSPIKYGYQPRRNFWPARLATRLLKLRYLILGSAVGGGYTAKKTFDQWKDMIPDLSEYKWIVPDIVWEIDEYIDFEKIRKALPSSEDLVKLAPDFDKIVESLSLLKDFFTSGYQSCSLK

SEQ ID NO: 24663 - protein, 1229 aa, Homo sapiens
MDREERKTINQGQEDEMEIYGYNLSRWKLAIVSLGVICSGGFLLLLLYWMPEWRVKATCVRAAIKDCEVVLLRTTDEFKMWFCAKIRVLSLETYPVSSPKSMSNKLSNGHAVCLIENPTEENRHRISKYSQTESQQIRYFTHHSVKYFWNDTIHNFDFLKKLLYGVNEIAVKVPSVFKLLIKEVLNPFYIFQLFSVILWSTDEYYYYALAIVVMSIVSIVSSLYSIRKQYVMLHDMVATHSTVRVSVCRVNEEIEEIFSTDLVPGDVMVIPLNGTIMPCDAVLINGTCIVNESMLTGESVPVTKTNLPNPSVDVKGIGDELYNPETHKRHTLFCGTTVIQTRFYTGELVKAIVVRTGFSTSKGQLVRSILYPKPTDFKLYRDAYLFLLCLVAVAGIGFIYTIINSILNEVQVGVIIIESLDIITITVPPALPAAMTAGIVYAQRRLKKIGIFCISPQRINICGQLNLVCFDKTGTLTEDGLDLWGIQRVENARFLSPEENVCNEMLVKSQFVACMATCHSLTKIEGVLSGDPLDLKMFEAIGWILEEATEEETALHNRIMPTVVRPPKQLLPESTPAGNQEMELFELPATYEIGIVRQFPFSSALQRMSVVARVLGDRKMDAYMKGAPEAIAGLCKPETVPVDFQNVLEDFTKQGFRVIALAHRKLESKLTWHKVQNISRDAIENNMDFMGLIIMQNKLKQETPAVLEDLHKANIRTVMVTGDSMLTAVSVARDCGMILPQDKVIIAEALPPKDGKVAKINWHYADSLTQCSHPSAIDPEAIPVKLVHDSLEDLQMTRYHFAMNGKSFSVILEHFQDLVPKLMLHGTVFARMAPDQKTQLIEALQNVDYFVGMCGDGANDCGALKRAHGGISLSELEASVASPFTSKTPSISCVPNLIREGRAALITSFCVFKFMALYSIIQYFSVTLLYSILSNLGDFQFLFIDLAIILVVVFTMSLNPAWKELVAQRPPSGLISGALLFSVLSQIIICIGFQSLGFFWVKQQPWYEVWHPKSDACNTTGSGFWNSSHVDNETELDEHNIQNYENTTVFFISSFQYLIVAIAFSKGKPFRQPCYKNYFFVFSVIFLYIFILFIMLYPVASVDQVLQIVCVPYQWRVTMLIIVLVNAFVSITVENFFLDMVLWKVVFNRDKQGEYRFSTTQPPQESVDRWGKCCLPWALGCRKKTPKAKYMYLAQELLVDPEWPPKPQTTTEAKALVKENGSCQIITIT

SEQ ID NO: 24664 - protein, 234 aa, Homo sapiens
ARRAFVPQLRSGKFNVLLTTYEYIIKDKHILAKIRWKYMIVDEGHRMKNHHCKLTQVLNTHYVAPRRLLLTGTPLQNKLPELWALLNFLLPTIFKSCSTFEQWFNAPFAMTGEKVDLNEEETILIIRRLHKVLRPFLLRRLKKEVEAQLPEKVEYVIKCDMSALQRVLYRHMQAKGVLLTDGSEKDKKGKGGTKTLMNTIMQLRKICNHPYMFQHIEVSPPRLGRLRPCCLLSS

SEQ ID NO: 24665 - protein, 719 aa, Homo sapiens
MKMASTRCKLARYLEDLEDVDLKKFKMHLEDYPPQKGCIPLPRGQTEKADHVDLATLMIDFNGEEKAWAMAVWIFAAINRRDLYEKAKRDEPKWGSDNARVSNPTVICQEDSIEEEWMGLLEYLSRISICKMKKDYRKKYRKYVRSRFQCIEDRNARLGESVSLNKRYTRLRLIKEHRSQQEREQELLAIGKTKTCESPVSPIKMELLFDPDDEHSEPVHTVVFQGAAGIGKTILARKMMLDWASGTLYQDRFDYLFYIHCREVSLVTQRSLGDLIMSCCPDPNPPIHKIVRKPSRILFLMDGFDELQGAFDEHIGPLCTDWQKAERGDILLSSLIRKKLLPEASLLITTRPVALEKLQHLLDHPRHVEILGFSEAKRKEYFFKYFSDEAQARAAFSLIQENEVLFTMCFIPLVCWIVCTGLKQQMESGKSLAQTSKTTTAVYVFFLSSLLQPRGGSQEHGLCAHLWGLCSLAADGIWNQKILFEESDLRNHGLQKADVSAFLRMNLFQKEVDCEKFYSFIHMTFQEFFAAMYYLLEEEKEGRTNVPGSRLKLPSRDVTVLLENYGKFEKGYLIFVVRFLFGLVNQERTSYLEKKLSCKISQQIRLELLKWIEVKAKAKKLQIQPSQLELFYCLYEMQEEDFVQRAMDYFPKIEINLSTRMDHMVSSFCIENCHRVESLSLGFLHNMPKEEEEEEKEGRHLDMVQCVLPSSSHAACSHG

SEQ ID NO: 24666 - protein, 1936 aa, Homo sapiens
MAMLPPPGPQSFVHFTKQSLALIEQRIAERKSKEPKEEKKDDDEEAPKPSSDLEAGKQLPFIYGDIPPGMVSEPLEDLDPYYADKKTFIVLNKGKTIFRFNATPALYMLSPFSPLRRISIKILVHSLFSMLIMCTILTNCIFMTMNNPPDWTKNVEYTFTGIYTFESLVKILARGFCVGEFTFLRDPWNWLDFVVIVFAYVTEFVDLGNVSALRTFRVLRALKTISVIPGLKTIVGALIQSVKKLSDVMILTVFCLSVFALIGLQLFMGNLKHKCFRNSLENNETLESIMNTLESEEDFRKYFYYLEGSKDALLCGFSTDSGQCPEGYTCVKIGRNPDYGYTSFDTFSWAFLALFRLMTQDYWENLYQQTLRAAGKTYMIFFVVVIFLGSFYLINLILAVVAMAYEEQNQANIEEAKQKELEFQQMLDRLKKEQEEAEAIAAAAAEYTSIRRSRIMGLSESSSETSKLSSKSAKERRNRRKKKNQKKLSSGEEKGDAEKLSKSESEDSIRRKSFHLGVEGHRRAHEKRLSTPNQSPLSIRGSLFSARRSSRTSLFSFKGRGRDIGSETEFADDEHSIFGDNESRRGSLFVPHRPQERRSSNISQASRSPPMLPVNGKMHSAVDCNGVVSLVDGRSALMLPNGQLLPEGTTNQIHKKRRCSSYLLSEDMLNDPNLRQRAMSRASILTNTVEELEESRQKCPPWWYRFAHKFLIWNCSPYWIKFKKCIYFIVMDPFVDLAITICIVLNTLFMAMEHHPMTEEFKNVLAIGNLVFTGIFAAEMVLKLIAMDPYEYFQVGWNIFDSLIVTLSLVELFLADVEGLSVLRSFRLLRVFKLAKSWPTLNMLIKIIGNSVGALGNLTLVLAIIVFIFAVVGMQLFGKSYKECVCKINDDCTLPRWHMNDFFHSFLIVFRVLCGEWIETMWDCMEVAGQAMCLIVYMMVMVIGNLVVLNLFLALLLSSFSSDNLTAIEEDPDANNLQIAVTRIKKGINYVKQTLREFILKAFSKKPKISREIRQAEDLNTKKENYISNHTLAEMSKGHNFLKEKDKISGFGSSVDKHLMEDSDGQSFIHNPSLTVTVPIAPGESDLENMNAEELSSDSDSEYSKVRLNRSSSSECSTVDNPLPGEGEEAEAEPMNSDEPEACFTDGCVWRFSCCQVNIESGKGKIWWNIRKTCYKIVEHSWFESFIVLMILLSSGALAFEDIYIERKKTIKIILEYADKIFTYIFILEMLLKWIAYGYKTYFTNAWCWLDFLIVDVVVNALIGAIPSIMNVLLVCLIFWLIFSIMGVNLFAGKFYECINTTDGSRFPASQVPNRSECFALMNVSQNVRWKNLKVNFDNVGLGYLSLLQVATFKGWTIIMYAAVDSVNVDKQPKYEYSLYMYIYFVVFIIFGSFFTLNLFIGVIIDNFNQQKKKLGGQDIFMTEEQKKYYNAMKKLGSKKPQKPIPRPGNKIQGCIFDLVTNQAFDISIMVLICLNMVTMMVEKEGQSQHMTEVLYWINVVFIILFTGECVLKLISLRHYYFTVGWNIFDFVVVIISIVGMFLADLIETYFVSPTLFRVIRLARIGRILRLVKGAKGIRTLLFALMMSLPALFNIGLLLFLVMFIYAIFGMSNFAYVKKEDGINDMFNFETFGNSMICLFQITTSAGWDGLLAPILNSKPPDCDPKKVHPGSSVEGDCGNPSVGIFYFVSYIIISFLVVVNMYIAVILENFSVATEESTEPLSEDDFEMFYEVWEKFDPDATQFIEFSKLSDFAAALDPPLLIAKPNKVQLIAMDLPMVSGDRIHCLDILFAFTKRVLGESGEMDSLRSQMEERFMSANPSKVSYEPITTTLKRKQEDVSATVIQRAYRRYRLRQNVKNISSIYIKDGDRDDDLLNKKDMAFDNVNENSSPEKTDATSSTTSPPSYDSVTKPDKEKYEQDRTEKEDKGKDSKESKK

SEQ ID NO: 24667 - protein, 1044 aa, Homo sapiens
MLQMVKTLAQFTIALEDMRDMGPAAASGEPAGGSSTDAEEPGEAQDMRKHVAMTLLDTEQSYVESLRTLMQGYMQPLKQPENSVLCDPSLVDEIFDQIPELLEHHEQFLEQVRHCMQTWHAQQKVGALLVQSFSKDVLVNIYSAYIDNFLNAKDAVRVAKEARPAFLKFLEQSMRENKEKQALSDLMIKPVQRIPRYELLVKDLLKHTPEDHPDHPLLLEAQRNIKQVAERINKGVRSAEEAERHARVLQEIEAHIEGMEDLQAPLRRFLRQEMVIEVKAIGGKKDRSLFLFTDLIVCTTLKRKSGSLRRSSMSLYTAASVIDTASKYKMLWKLPLEDADIIKGASQATNRENIQKAISRLDEDLTTLGQMSKLSESLGFPHQSLDDALRDLSAAMHRDLSEKQALCYALSFPPTKLELCATRPEGTDSYIFEFPHPDARLGFEQAFDEAKRKLASSKSCLDPEFLKAIPIMKTRSGMQFSCAAPTLNSCPEPSPEVWVCNSDGYVGQVCLLSLRAEPDVEACIAVCSARILCIGAVPGLQPRCHREPPPSLRSPPETAPEPAGPELDVEAAADEEAATLAEPGPQPCLHISIAGSGLEMTPGLGEGDPRPELVPFDSDSDDESSPSPSGTLQSQASRSTISSSFGNEETPSSKEATAETTSSEEEQEPGFLPLSGSFGPGGPCGTSPMDGRALRRSSHGSFTRGSLEDLLSVDPEAYQSSVWLGTEDGCVHVYQSSDSIRDRRNSMKLQHAASVTCILYLNNQVFVSLANGELVVYQREAGHFWDPQNFKSVTLGTQGSPITKMVSVGGRLWCGCQNRVLVLSPDTLQLEHMFYVGQDSSRCVACMVDSSLGVWVTLKGSAHVCLYHPDTFEQLAEVDVTPPVHRMLAGSDAIIRQHKAACLRITALLVCEELLWVGTSAGVVLTMPTSPGTVSCPRAPLSPTGLGQGHTGHVRFLAAVQLPDGFNLLCPTPPPPPDTGPEKLPSLEHRDSPWHRGPAPARPKMLVISGGDGYEDFRLSSGGGSSSETVGRDDSTNHLLLWRV

SEQ ID NO: 24668 - protein, 1315 aa, Homo sapiens
MSGPTDETAGDLPVKDTGLNLFGMGGLQETSTTRTMKSRQAVSRVSREELEDRFLRLHDENILLKQHARKQEDKIKRMATKLIRLVNDKKRYERVGGGPKRLGRDVEMEEMIEQLQEKVHELEKQNETLKNRLISAKQQLQTQGYRQTPYNNVQSRINTGRRKANENAGLQECPRKGIKFQDADVAETPHPMFTKYGNSLLEEARGEIRNLENVIQSQRGQIEELEHLAEILKTQLRRKENEIELSLLQLREQQATDQRSNIRDNVEMIKLHKQLVEKSNALSAMEGKFIQLQEKQRTLRISHDALMANGDELNMQLKEQRLKCCSLEKQLHSMKFSERRIEELQDRINDLEKERELLKENYDKLYDSAFSAAHEEQWKLKEQQLKVQIAQLETALKSDLTDKTEILDRLKTERDQNEKLVQENRELQLQYLEQKQQLDELKKRIKLYNQENDINADELSEALLLIKAQKEQKNGDLSFLVKVDSEINKDLERSMRELQATHAETVQELEKTRNMLIMQHKINKDYQMEVEAVTRKMENLQQDYELKVEQYVHLLDIRAARIHKLEAQLKDIAYGTKQYKFKPEIMPDDSVDEFDETIHLERGENLFEIHINKVTFSSEVLQASGDKEPVTFCTYAFYDFELQTTPVVRGLHPEYNFTSQYLVHVNDLFLQYIQKNTITLEVHQAYSTEYETIAACQLKFHEILEKSGRIFCTASLIGTKGDIPNFGTVEYWFRLRVPMDQAIRLYRERAKALGYITSNFKGPEHMQSLSQQAPKTAQLSSTDSTDGNLNELHITIRCCNHLQSRASHLQPHPYVVYKFFDFADHDTAIIPSSNDPQFDDHMYFPVPMNMDLDRYLKSESLSFYVFDDSDTQENIYIGKVNVPLISLAHDRCISGIFELTDHQKHPAGTIHVILKWKFAYLPPSGSITTEDLGNFIRSEEPEVVQRLPPASSVSTLVLAPRPKPRQRLTPVDKKVSFVDIMPHQSDETSPPPEDRKEISPEVEHIPEIEINMLTVPHVPKVSQEGSVDEVKENTEKMQQGKDDVSLLSEGQLAEQSLASSEDETEITEDLEPEVEEDMSASDSDDCIIPGPISKNIKQSLALSPGLGCSSAISAHCNFRLPGSSDFPASASQVDGITGACHHTQPSEKIRIEIIALSLNDSQVTMDDTIQRLFVECRFYSLPAEETPVSLPKPKSGQWVYYNYSNVIYVDKENNKAKRDILKAILQKQEMPNRSLRFTVVSDPPEDEQDLECEDIGVAHVDLADMFQEGRDLIEQNIDVFDARADGEGIGKLRVTVEALHALQSVYKQYRDDLEA

SEQ ID NO: 24669 - protein, 196 aa, Homo sapiens
CDKKFRTQFYIDWCKISLVDKTKQVSTYQEVIRGEGILPDGGEYKPPSDSLKSRDYYTDFLITLAVPSAVALVLFLILAYIMCCRREGVEKRNMQTPDIQLVHHSAIQKSTKELRDMSKNREIAWPLSTLPVFHPVTGEIIPPLHTDNYDSTNMPLMQTQQNLPHQTQIPQQQTTGTFRNVLDVFIQKLSSLLLLS

SEQ ID NO: 24670 - protein, 599 aa, Homo sapiens
MAFPHRPDAPELPDFSMLKRLARDQLIYLLEQLPGKKDLFIEADLMSPLDRIANVSILKQHEVDKLYKVENKPALSSNEQLCFLVRPRIKNMRYIASLVNADKLAGRTRKYKVIFSPQKFYACEMVLEEEGIYGDVSCDEWAFSLLPLDVDLLSMELPEFFRDYFLEGDQRWINTVAQALHLLSTLYGPFPNCYGIGRCAKMAYELWRNLEEEEDGETKGRRPEIGHIFLLDRDVDFVTALCSQVVYEGLVDDTFRIKCGSVDFGPEVTSSDKSLKVLLNAEDKVFNEIRNEHFSNVFGFLSQKARNLQAQYDRRRGMDIKQMKNFVSQELKGLKQEHRLLSLHIGACESIMKKKTKQDFQELIKTEHALLEGFNIRESTSYIEEHIDRQVSPIESLRLMCLLSITENGLIPKDYRSLKTQYLQSYGPEHLLTFSNLRRAGLLTEQAPGDTLTAVESKVSKLVTDKAAGKITDAFSSLAKRSNFRAISKKLNLIPRVDGEYDLKVPRDMAYVFGGAYVPLSCRIIEQVLERRSWQGLDEVVRLLNCSDFAFTDMTKEDKASSESLRLILVVFLGGCTFSEISALRFLGREKVRCWRRSP

SEQ ID NO: 24671 - protein, 454 aa, Homo sapiens
MAQQANVGELLAMLDSPMLGVRDDVTAVFKENLNSDRGPMLVNTLVDYYLETSSQPALHILTTLQEPHDKHLLDRINEYVGKAATRLSILSLLGHVIRLQPSWKHKLSQAPLLPSLLKCLKMDTDVVVLTTGVLVLITMLPMIPQSGKQHLLDFFDIFGRLSSWCLKKPGHVAEVYLVHLHASVYALFHRLYGMYPCNFVSFLRSHYSMKENLETFEEVVKPMMEHVRIHPELVTGSKDHELDPRRWKRLETHDVVIECAKISLDPTEASYEDGYSVSHQISARFPHRSADVTTSPYADTQNSYGCATSTPYSTSRLMLLNMPGQLPQTLSSPSTRLITEPPQATLWSPSMVCGMTTPPTSPGNVPPDLSHPYSKVFGTTAGGKGTPLGTPATSPPPAPLCHSDDYVHISLPQATVTPPRKVRSSSSAIPLPRHSDSLASLTLRSLIMPDRILT

SEQ ID NO: 24672 - protein, 1860 aa, Homo sapiens
MTRLSWCFSCVIRWGKYLFSCLLPLRFCLRSQPEDLEAPKTHRFKVKTFKKVKPCGICRQVITQEGCTCKVCSFSCHRKCQAKVAAPCVPPSNHELVPITTENAPKNVVDKGEGASRGGNTRKSLEDNGSTRVTPSVQPHLQPIRNMSVSRTMEDSCELDLVYVTERIIAVSFPSTANEENFRSNLREVAQMLKSKHGGNYLLFNLSERRPDITKLHAKVLEFGWPDLHTPALEKICSICKAMDTWLNADPHNVVVLHNKGNRGRIGVVIAAYMHYSNISASADQALDRFAMKRFYEDKIVPIGQPSQRRYVHYFSGLLSGSIKMNNKPLFLHHVIMHGIPNFESKGGCRPFLRIYQAMQPVYTSGIYNIPGDSQTSVCITIEPGLLLKGDILLKCYHKKFRSPARDVIFRVQFHTCAIHDLGVVFGKEDLDDAFKDDRFPEYGKVEFVFSYGPEKIQGMEHLENGPSVSVDYNTSDPLIRWDSYDNFSGHRDDGMEEVVGHTQGPLDGSLYAKVKKKDSLHGSTGAVNATRPTLSATPNHVEHTLSVSSDSGNSTASTKTDKTDEPVPGASSATAALSPQEKRELDRLLSGFGLEREKQGAMYHTQHLRSRPAGGSAVPSSGRHVVPAQVHVNGGALASERETDILDDELPNQDGHSAGSMGTLSSLDGVTNTSEGGYPEALSPLTNGLDKSYPMEPMVNGGGYPYESASRAGPAHAGHTAPMRPSYSAQEGLAGYQREGPHPAWPQPVTTSHYAHDPSGMFRSQSFSEAEPQLPPAPVRGGSSREAVQRGLNSWQQQQQQQQQPRPPPRQQERAHLESLVASRPSPQPLAETPIPSLPEFPRAASQQEIEQSIETLNMLMLDLEPASAAAPLHKSQSVPGAWPGASPLSSQPLSGSSRQSHPLTQSRSGYIPSGHSLGTPEPAPRASLESVPPGRSYSPYDYQPCLAGPNQDFHSKSPASSSLPAFLPTTHSPPGPQQPPASLPGLTAQPLLSPKEATSDPSRTPEEEPLNLEGLVAHRVAGVQAREKQPAEPPAPLRRRAASDGQYENQSPEATSPRSPGVRSPVQCVSPELALTIALNPGGRPKEPHLHSYKEAFEEMEGTSPSSPPPSGVRSPPGLAKTPLSALGLKPHNPADILLHPTGEPRSYVESVARTAVAGPRAQDSEPKSFSAPATQAYGHEIPLRNGTLGGSFVSPSPLSTSSPILSADSTSVGSFPSGESSDQGPRTPTQPLLESGFRSGSLGQPSPSAQRNYQSSSPLPTVGSSYSSPDYSLQHFSSSPESQARAQFSVAGVHTVPGSPQARHRTVGTNTPPSPGFGWRAINPSMAAPSSPSLSHHQMMGPPGTGFHGSTVSSPQSSAATTPGSPSLCRHPAGVYQVSGLHNKVATTPGSPSLGRHPGAHQGNLASGLHSNAIASPGSPSLGRHLGGSGSVVPGSPCLDRHVAYGGYSTPEDRRPTLSRQSSASGYQAPSTPSFPVSPAYYPGLSSPATSPSPDSAAFRQGSPTPALPEKRRMSVGDRAGSLPNYATINGKVSSPVASGMSSPSGGSTVSFSHTLPDFSKYSMPDNSPETRAKVKFVQDTSKYWYKPEISREQAIALLKDQEPGAFIIRDSHSFRGAYGLAMKVSSPPPTIMQQNKKGDMTHELVRHFLIETGPRGVKLKGCPNEPNFGSLSALVYQHSIIPLALPCKLVIPNRDPTDESKDSSGPANSTADLLKQGAACNVLFVNSVDMESLTGPQAISKATSETLAADPTPAATIVHFKVSAQGITLTDNQRKLFFRRHYPLNTVTFCDLDPQERKWMKTEGGAPAKLFGFVARKQGSTTDNACHLFAELDPNQPASAIVNFVSKVMLNAGQKR

SEQ ID NO: 24673 - protein, 659 aa, Homo sapiens
MAEAVAAPISPWTMAATIQAMERKIESQAARLLSLEGRTGMAEKKLADCEKTAVEFGNQLEGKWAVLGTLLQEYGLLQRRLENVENLLRNRNFWILRLPPGSKGESPKVPVTFDDVAVYFSEQEWGKLEDWQKELYKHVMRGNYETLVSLDYAISKPEVLSQIEQGKEPCNWRRPGPKIPDVPVDPSPGSGPPVPAPDLLMQIKQEGELQLQEQQALGVEAWAAGQPDIGEEPWGLSQLDSGAGDISTDATSGVHSNFSTTIPPTSWQTDLPPHHPSSACSDGTLKLNTAASTEDVKIVIKTEVQEEEVVATPVHPTDLEAHGTLFGPGQATRFFPSPAQEGAWESQGSSFPSQDPVLGLREPARPERDMGELSPAVAQEETPPGDWLFGGVRWGWNFRCKPPVGLNPRTGPEGLPYSSPDNGEAILDPSQAPRPFNEPCKYPGRTKGFGHKPGLKKHPAAPPGGRPFTCATCGKSFQLQVSLSAHQRSCGAPDGSGPGTGGGGSGSGGGGGGSGGGSARDGSALRCGECGRCFTRPAHLIRHRMLHTGERPFPCTECEKRFTERSKLIDHYRTHTGVRPFTCTVCGKSFIRKDHLRKHQRNHAAGAKTPARGQPLPTPPAPPDPFKSPASKGPLASTDLVTDWTCGLSVLGPTDGGDM

SEQ ID NO: 24674 - protein, 761 aa, Homo sapiens
MRLTQDPIQVLLIFAKEDSQSDGFWWACDRAGYRCNIARTPESALECFLDKHHEIIVIDHRQTQNFDAEAVCRSIRATNPSEHTVILAVVSRVSDDHEEASVLPLLHAGFNRRFMENSSIIACYNELIQIEHGEVRSQFKLRACNSVFTALDHCHEAIEITSDDHVIQYVNPAFERMMGYHKGELLGKELADLPKSDKNRADLLDTINTCIKKGKEWQGVYYARRKSGDSIQQHVKITPVIGQGGKIRHFVSLKKLCCTTDNNKQIHKIHRDSGDNSQTEPHSFRYKNRRKESIDVKSISSRGSDAPSLQNRRYPSMARIHSMTIEAPITKVINIINAAQENSPVTVAEALDRVLEILRTTELYSPQLGTKDEDPHTSDLVGGLMTDGLRRLSGNEYVFTKNVHQSHSHLAMPITINDVPPCISQLLDNEESWDFNIFELEAITHKRPLVYLGLKVFSRFGVCEFLNCSETTLRAWFQVIEANYHSSNAYHNSTHAADVLHATAFFLGKERVKGSLDQLDEVAALIAATVHDVDHPGRTNSFLCNAGSELAVLYNDTAVLESHHTALAFQLTVKDTKCNIFKNIDRNHYRTLRQAIIDMVLATEMTKHFEHVNKFVNSINKPMAAEIEGSDCECNPAGKNFPENQILIKRMMIKCADVANPCRPLDLCIEWAGRISEEYFAQTDEEKRQGLPVVMPVFDRNTCSIPKSQISFIDYFITDMFDAWDAFAHLPALMQHLADNYKHWKTLDDLKCKSLRLPSDS

SEQ ID NO: 24675 - protein, 1649 aa, Homo sapiens
MSTPDPPLGGTPRPGPSPGPGPSPGAMLGPSPGPSPGSAHSMMGPSPGPPSAGHPIPTQGPGGYPQDNMHQMHKPMESMHEKGMSDDPRYNQMKGMGMRSGGHAGMGPPPSPMDQHSQGYPSPLGGSEHASSPVPASGPSSGPQMSSGPGGAPLDGADPQALGQQNRGPTPFNQNQLHQLRAQIMAYKMLARGQPLPDHLQMAVQGKRPMPGMQQQMPTLPPPSVSATGPGPGPGPGPGPGPGPAPPNYSRPHGMGGPNMPPPGPSGVPPGMPGQPPGGPPKPWPEGPMANAAAPTSTPQKLIPPQPTGRPSPAPPAVPPAASPVMPPQTQSPGQPAQPAPMVPLHQKQSRITPIQKPRGLDPVEILQEREYRLQARIAHRIQELENLPGSLAGDLRTKATIELKALRLLNFQRQLRQEVVVCMRRDTALETALNAKAYKRSKRQSLREARITEKLEKQQKIEQERKRRQKHQEYLNSILQHAKDFKEYHRSVTGKIQKLTKAVATYHANTEREQKKENERIEKERMRRLMAEDEEGYRKLIDQKKDKRLAYLLQQTDEYVANLTELVRQHKAAQVAKEKKKKKKKKKAENAEGQTPAIGPDGEPLDETSQMSDLPVKVIHVESGKILTGTDAPKAGQLEAWLEMNPGYEVAPRSDSEESGSEEEEEEEEEEQPQAAQPPTLPVEEKKKIPDPDSDDVSEVDARHIIENAKQDVDDEYGVSQALARGLQSYYAVAHAVTERVDKQSALMVNGVLKQYQIKGLEWLVSLYNNNLNGILADEMGLGKTIQTIALITYLMEHKRINGPFLIIVPLSTLSNWAYEFDKWAPSVVKVSYKGSPAARRAFVPQLRSGKFNVLLTTYEYIIKDKHILAKIRWKYMIVDEGHRMKNHHCKLTQVLNTHYVAPRRLLLTGTPLQNKLPELWALLNFLLPTIFKSCSTFEQWFNAPFAMTGEKVDLNEEETILIIRRLHKVLRPFLLRRLKKEVEAQLPEKVEYVIKCDMSALQRVLYRHMQAKGVLLTDGSEKDKKGKGGTKTLMNTIMQLRKICNHPYMFQHIEESFSEHLGFTGGIVQGLDLYRASGKFELLDRILPKLRATNHKVLLFCQMTSLMTIMEDYFAYRGFKYLRLDGTTKAEDRGMLLKTFNEPGSEYFIFLLSTRAGGLGLNLQSADTVIIFDSDWNPHQDLQAQDRAHRIGQQNEVRVLRLCTVNSVEEKILAAAKYKLNVDQKVIQAGMFDQKSSSHERRAFLQAILEHEEQDEEEDEVPDDETVNQMIARHEEEFDLFMRMDLDRRREEARNPKRKPRLMEEDELPSWIIKDDAEVERLTCEEEEEKMFGRGSRHRKEVDYSDSLTEKQWLKKITGKDIHDTASSVARGLQFQRGLQFCTRASKTLKAIEEGTLEEIEEEVRQKKSSRKRKRDSDAGSSTPTTSTRSRDKDDESKKQKKRGRPPAEKLSPNPPNLTKKMKKIVDAVIKYKDSSSGRQLSEVFIQLPSRKELPEYYELIRKPVDFKKIKERIRNHKYRSLNDLEKDVMLLCQNAQTFNLEGSLIYEDSIVLQSVFTSVRQKIEKEDDSEGEESEEEEEGEEEGSESESRSVKVKIKLGRKEKAQDRLKGGRRRPSRGSRAKPVVSDDDSEEEQEEDRSGSGSEED

SEQ ID NO: 24676 - protein, 405 aa, Homo sapiens
MSMELLQEAGVSVPKGYVAKSPDEAYAIAKKLGSKDVVIKAQVLAGGRGKGTFESGLKGGVKIVFSPEEAKAVSSQMIGKKLFTKQTGEKGRICNQVLVCERKYPRREYYFAITMERSFQGPVLIGSSHGGVNIEDVAAESPEAIIKEPIDIEEGIKKEQALQLAQKMGFPPNIVESAAENMVKLYSLFLKYDATMIEINPMVEDSDGAVLCMDAKINFDSNSAYRQKKIFDLQDWTQEDERDKDAAKANLNYIGLDGNIGCLVNGAGLAMATMDIIKLHGGTPANFLDVGGGATVHQVTEAFKLITSDKKVLAILVNIFGGIMRCDVIAQGIVMAVKDLEIKIPVVVRLQGTRVDDAKALIADSGLKILACDDLDEAARMVVKLSEIVTLAKQAHVDVKFQLPI

SEQ ID NO: 24677 - protein, 464 aa, Homo sapiens
MQLPRWWELGDPCAWTGQGRGTRRMSPATTGTFLLTVYSIFSKVHSDRNVYPSAGVLFVHVLEREYFKGEFPPYPKPGEISNDPITFNTNLMGYPDRPGWLRYIQRTPYSDGVLYGSPTAENVGKPTIIEITAYNRRTFETARHNLIINIMSAEDGVLLSSPRLECNGTISANCNLRLLGSDFPLPYQAEFFIKNMNVEEMLASEVLGDFLGAVKNVWQPERLNAINITSALDRGGRVPLPINDLKEGVYVMVGADVPFSSCLREVENPQNQLRCSQEMEPVITCDKKFRTQFYIDWCKISLVDKTKQVSTYQEVIRGEGILPDGGEYKPPSDSLKSRDYYTDFLITLAVPSAVALVLFLILAYIMCCRREGVEKRNMQTPDIQLVHHSAIQKSTKELRDMSKNREIAWPLSTLPVFHPVTGEIIPPLHTDNYDSTNMPLMQTQQNLPHQTQIPQQQTTGKWYP

SEQ ID NO: 24678 - protein, 360 aa, Homo sapiens
MGYPDRPGWLRYIQRTPYSDGVLYGSPTAENVGKPTIIEITAYNRRTFETARHNLIINIMSAEDFPLPYQAEFFIKNMNVEEMLASEVLGDFLGAVKNVWQPERLNAINITSALDRGGRVPLPINDLKEGVYVMVGADVPFSSCLREVENPQNQLRCSQEMEPVITCDKKFRTQFYIDWCKISLVDKTKQVSTYQEVIRGEGILPDGGEYKPPSDSLKSRDYYTDFLITLAVPSAVALVLFLILAYIMCCRREGVIQLVHHSAIQKSTKELRDMSKNREIAWPLSTLPVFHPVTGEIIPPLHTDNYDSTNMPLMQTQQNLPHQTQIPQQQTTGDFRLTTFQRFEVNGIPEERKLTEAMNL

SEQ ID NO: 24679 - protein, 644 aa, Homo sapiens
MKLITILFLCSRLLLSLTQESQSEEIDCNDKDLFKAVDAALKKYNSQNQSNNQFVLYRITEATKTVGSDTFYSFKYEIKEGDCPVQSGKTWQDCEYKDAAKAATGECTATVGKRSSTKFSVATQTCQITPAEGPVVTAQYDCLGCVHPISTQSPDLEPILRHGIQYFNNNTQHSSLFMLNEVKRAQRQVVAGLNFRITYSIVQTNCSKENFLFLTPDCKSLWNGDTGECTDNAYIDIQLRIASFSQNCDIYPGKDFVQPPTKICVGCPRDIPTNSPELEETLTHTITKLNAENNATFYFKIDNVKKARVQVVAGKKYFIDFVARETTCSKESNEELTESCETKKLGQSLDCNAEVYVVPWEKKIYPTVNCQPLGMISLMKRPPGFSPFRSSRIGEIKEETTVSPPHTSMAPAQDEERDSGKEQGHTRRHDWGHEKQRKHNLGHGHKHERDQGHGHQRGHGLGHGHEQQHGLGHGHKFKLDDDLEHQGGHVLDHGHKHKHGHGHGKHKNKGKKNGKHNGWKTEHLASSSEDSTTPSAQTQEKTEGPTPIPSLAKPGVTVTFSDFQDSDLIATMMPPISPAPIQSDDDWIPDIQIDPNGLSFNPISDFPDTTSPKCPGRPWKSVSEINPTTQMKESYYFDLTDGLS

SEQ ID NO: 24680 - protein, 1780 aa, Homo sapiens
PTSKDSGLKEKFKILLGLGTPRPNPRSAEGKQTEFIITAEILRELSMECGLNNRIRMIGQICEVAKTKKFEEHAVEALWKAVADLLQPERPLEARHAVLALLKAIVQGQGERLGVLRALFFKVIKDYPSNEDLHERLEVFKALTDNGRHITYLEEELADFVLQWMDVGLSSEFLLVLVNLVKFNSCYLDEYIARMVQMICLLCVRTASSVDIEVSLQVLDAVVCYNCLPAESLPLFIVTLCRTINVKELCEPCWKLMRNLLGTHLGHSAIYNMCHLMEDRAYMEDAPLLRGAVFFVGMALWGAHRLYSLRNSPTSVLPSFYQAMACPNEVVSYEIVLSITRLIKKYRKELQVVAWDILLNIIERLLQQLQTLDSPELRTIVHDLLTTVEELCDQNEFHGSQERYFELVERCADQRPESSLLNLISYRAQSIHPAKDGWIQNLQALMERFFRSESRGAVRIKVLDVLSFVLLINRQFYEEELINSVVISQLSHIPEDKDHQVRKLATQLLVDLAEGCHTHHFNSLLDIIEKVMARSLSPPPELEERDVAAYSASLEDVKTAVLGLLVILQTKLYTLPASHATRVYEMLVSHIQLHYKHSYTLPIASSIRLQAFDFLLLLRADSLHRLGLPNKDGVVRFSPYCVCDYMEPERGSEKKTSGPLSPPTGPPGPAPAGPAVRLGSVPYSLLFRVLLQCLKQESDWKVLKLVLGRLPESLRYKVLIFTSPCSVDQLCSALCSMLSGPKTLERLRGAPEGFSRTDLHLAVVPVLTALISYHNYLDKTKQREMVYCLEQGLIHRCASQCVVALSICSVEMPDIIIKALPVLVVKLTHISATASMAVPLLEFLSTLARLPHLYRNFAAEQYASVFAISLPYTNPSKFNQYIVCLAHHVIAMWFIRCRLPFRKDFVPFITKGLRSNVLLSFDDTPEKDSFRARSTSLNERPKSLRIARPPKQGLNNSPPVKEFKESSAAEAFRCRSISVSEHVVRRIQTSLTSASLGSADENSVAQADDSLKNLHLELTETCLDMMARYVFSNFTAVPKRSPVGEFLLAGGRTKTWLVGNKLVTVTTSVGTGTRSLLGLDSGELQSGPESSSSPGVHVRQTKEAPAKLESQAGQQVSRGARDRVRSMSGGHGLRVGALDVPASQFLGSATSPGPRTAPAAKPEKASAGTRVPVQEKTNLAAYVPLLTQGWAEILVRRPTGNTSWLMSLENPLSPFSSDINNMPLQELSNALMAAERFKEHRDTALYKSLSVPAASTAKPPPLPRSNTDSAVVMEEGSPGEVPVLVEPPGLEDVEAALGMDRRTDAYSRSSSVSSQEEKSLHAEELVGRGIPIERVVSSEGGRPSVDLSFQPSQPLSKSSSSPELQTLQDILGDPGDKADVGRLSPEVKARSQSGTLDGESAAWSASGEDSRGQPEGPLPSSSPRSPSGLRPRGYTISDSAPSRRGKRVERDALKSRATASNAEKVPGINPSFVFLQLYHSPFFGDESNKPILLPNESQSFERSVQLLDQIPSYDTHKIAVLYVGEGQSNSELAILSNEHGSYRYTEFLTGLGRLIELKDCQPDKVYLGGLDVCGEDGQFTYCWHDDIMQAVFHIATLMPTKDVDKHRCDKKRHLGNDFVSIVYNDSGEDFKLGTIKGQFNFVHVIVTPLDYECNLVSLQCRKDMEGLVDTSVAKIVSDRNLPFVARQMALHANMASQVHHSRSNPTDIYPSKWIARLRHIKRLRQRICEEAAYSNPSLPLVHPPSHSKAPAQTPAEPTPGYEVGQRKRLISSVEDFTEFV

SEQ ID NO: 24681 - protein, 1108 aa, Homo sapiens
ASMKMAQLQLENKELESEKEQLKKGLELLKASFKKTERLEVSYQGLDIENQRLQKTLENSNKKIQQLESELQDLEMENQTLQKNLEELKISSKRLEQLEKENKSLEQETSQLEKDKKQLEKENKRLRQQAEIKDTTLEENNVKIGNLEKENKTLSKEIGIYKESCVRLKELEKENKELVKRATIDIKTLVTLREDLVSEKLKTQQMNNDLEKLTHELEKIGLNKERLLHDEQSTDDSRYKLLESKLESTLKKSLEIKEEKIAALEARLEESTNYNQQLRQELKTVKKNYEALKQRQDEERMVQSSPPISGEDNKWERESQETTRELLKVKDRLIEVERNNATLQAEKQALKTQLKQLETQNNNLQAQILALQRQTVSLQEQNTTLQTQNAKLQVENSTLNSQSTSLMNQNAQLLIQQSSLENENESVIKEREDLKSLYDSLIKDHEKLELLHERQASEYESLISKHGTLKSAHKNLEVEHRDLEDRLNHTYSQLLKETEVLQTDHKNLKSLLNNSKLEQTRLEAEFSKLKEQYQQLDITSTKLNNQCELLSQLKGNLEEENRHLLDQIQTLMLQNRTLLEQNMESKDLFHVEQRQYIDKLNELRRQKEKLEEKIMDQYKFYDPSPPRRRGNWITLKMRKLIKSKKDINRERQKSLTLTPTRSDSSEGFLQLPHQDSQDSSSVGSNSLEDGQTLGTKKSSMVALKRLPFLRNRPKDKDKMKACYRRSMSMNDLVQSMVLAGQWTGSTENLEVPDDISTGKRRKELGAMAFSTTAINFSTVNSSAGFRSKQLVNNKDTTSFEDISPQGVSDDSSTGSRVHASRPASLDSGRTSTSNSNNNASLHEVKAGAVNNQSRPQSHSSGEFSLLHDHEAWSSSGSSPIQYLKRQTRSSPVLQHKISETLESRHHKIKTGSPGSEVVTLQQFLEESNKLTSVQIKSSSQENLLDEVMKSLSVSSDFLGKDKPVSCGLARSVSGKTPGDFYDRRTTKPEFLRPGPRKTEDTYFISSAGKPTPGTQGKIKLVKESSLSRQSKDSNPYATLPRASSVISTAEGTTRRTSIHDFLTKDSRLPISVDSPPAAADSNTTAASNVDKVQESRNSKSRSREQQSS

SEQ ID NO: 24682 - protein, 397 aa, Homo sapiens
MFKLRNSSSPATGEDPEGSDILNYFESYLAVASTVPSMLCLVANFLLVNRVAVHIRVLASLTVILAIFMVITALVKVDTSSWTRGFFAVTIVCMVILSGASTVFSSSIYGMTGSFPMRNSQALISGGAMGGTVSAVASLVDLAASSDVRNSALAFFLTATVFLVLCMGLYLLLSRLEYARYYMRPVLAAHVFSGEEELPQDSLSAPSVASRFIDSHTPPLRPILKKTASLGFCVTYVFFITSLIYPAICTNIESLNKGSGSLWTTKFFIPLTTFLLYNFADLCGRQLTAWIQVPGPNSKALPGFVLLRTCLIPLFVLCNYQPRVHLKTVVFQSDVYPALLSSLLGLSNGYLSTLALLYGPKIVPRELAEATGVVMSFYVCLGLTLGSACSTLLVHLI

SEQ ID NO: 24683 - protein, 996 aa, Homo sapiens
DESSLTGESDQVRKSVDKDPMLLSGTHVMEGSGRMLVTAVGVNSQTGIIFTLLGAGGEEEEKKDKKAADGAAASNAADSANASLVNGKMQDGNVDASQSKAKQQDGAAAMEMQPLKSAEGGDADDRKKASMHKKEKSVLQGKLTKLAVQIGKAGLVMSAITVIILVLYFTVDTFVVNKKPWLPECTPVYVQYFVKFFIIGVTVLVVAVPEGLPLAVTISLAYSVKKMMKDNNLVRHLDACETMGNATAICSDKTGTLTTNRMTVVQAYVGDVHYKEIPDPSSINTKTMELLINAIAINSAYTTKILPPEKEGALPRQVGNKTECGLLGFVLDLKQDYEPVRSQMPEEKLYKVYTFNSVRKSMSTVIKLPDESFRMYSKGASEIVLKKCCKILNGAGEPRVFRPRDRDEMVKKVIEPMACDGLRTICVAYRDFPSSPEPDWDNENDILNELTCICVVGIEDPVRPEVPEAIRKCQRAGITVRMVTGDNINTARAIAIKCGIIHPGEDFLCLEGKEFNRRIRNEKGEIEQERIDKIWPKLRVLARSSPTDKHTLVKGIIDSTHTEQRQVVAVTGDGTNDGPALKKADVGFAMGIAGTDVAKEASDIILTDDNFSSIVKAVMWGRNVYDSISKFLQFQLTVNVVAVIVAFTGACITQDSPLKAVQMLWVNLIMDTFASLALATEPPTETLLLRKPYGRNKPLISRTMMKNILGHAVYQLALIFTLLFVGEKMFQIDSGRNAPLHSPPSEHYTIIFNTFVMMQLFNEINARKIHGERNVFDGIFRNPIFCTIVLGTFAIQIVIVQFGGKPFSCSPLQLDQWMWCIFIGLGELVWGQVIATIPTSRLKFLKEAGRLTQKEEIPEEELNEDVEEIDHAERELRRGQILWFRGLNRIQTQIRVVKAFRSSLYEGLEKPESRTSIHNFMAHPEFRIEDSQPHIPLIDDTDLEEDAALKQNSSPPSSLNKNNSAIDSGINLTTDTSKSATSSSPGSPIHSLETSL

SEQ ID NO: 24684 - protein, 780 aa, Homo sapiens
MAAPGGRSEPPQLPEYSCSYMVSRPVYSELAFQQQHERRLQERKTLRESLAKCCSCSRKRAFGVLKTLVPILEWLPKYRVKEWLLSDVISGVSTGLVATLQGMAYALLAAVPVGYGLYSAFFPILTYFIFGTSRHISVGPFPVVSLMVGSVVLSMAPDEHFLVSSSNGTVLNTTMIDTAARDTARVLIASALTLLVGIIQLIFGGLQIGFIVRYLADPLVGGFTTAAAFQVLVSQLKIVLNVSTKNYNGVLSIIYTLVEIFQNIGDTNLADFTAGLLTIVVCMAVKELNDRFRHKIPVPIPIEVIVTIIATAISYGANLEKNYNAGIVKSIPRGFLPPELPPVSLFSEMLAASFSIAVVAYAIAVSVGKVYATKYDYTIDGNQEFIAFGISNIFSGFFSCFVATTALSRTAVQESTGGKTQVAGIISAAIVMIAILALGKLLEPLQKSVLAAVVIANLKGMFMQLCDIPRLWRQNKIDAVIWVFTCIVSIILGLDLGLLAGLIFGLLTVVLRVQFPSWNGLGSIPSTDIYKSTKNYKNIEEPQGVKILRFSSPIFYGNVDGFKKCIKSTVGFDAIRVYNKRLKALRKIQKLIKSGQLRATKNGIISDAVSTNNAFEPDEDIEDLEELDIPTKEIEIQVDWNSELPVKVNVPKVPIHSLVLDCGAISFLDVVGVRSLRVIVKEFQRIDVNVYFASLQDYVIEKLEQCGFFDDNIRKDTFFLTVHDAILYLQNQVKSQEGQGSILETITLIQDCKDTLELIETELTEEELDVQDEAMRTLAS

SEQ ID NO: 24685 - protein, 1493 aa, Homo sapiens
MENEIFTPLLEQFMTSPLVTWVKTFGPLAAGNGTNLDEYVALVDGVFLNQVMLQINPKLESQRVNKKVNNDASLRMHNLSILVRQIKFYYQETLQQLIMMSLPNVLIIGKNPFSEQGTEEVKKLLLLLLGCAVQCQKKEEFIERIQGLDFDTKAAVAAHIQEVTHNQENVFDLQWMEVTDMSQEDIEPLLKNMALHLKRLIDERDEHSETIIELSEERDGLHFLPHASSSAQSPCGSPGMKRTESRQHLSVELADAKAKIRRLRQELEEKTEQLLDCKQELEQMEIELKRLQQENMNLLSDARSARMYRDELDALREKAVRVDKLESEVSRYKERLHDIEFYKARVEELKEDNQVLLETKTMLEDQLEGTRARSDKLHELEKENLQLKAKLHDMEMERDMDRKKIEELMEENMTLEMAQKQSMDESLHLGWELEQISRTSELSEAPQKSLGHEVNELTSSRLLKLEMENQSLTKTVEELRTTVDSVEGNASKILKMEKENQRLSKKVEILENEIVQEKQSLQNCQNLSKDLMKEKAQLEKTIETLRENSERQIKILEQENEHLNQTVSSLRQRSQISAEARVKDIEKENKILHESIKETSSKLSKIEFEKRQIKKELEHYKEKGERAEELENELHHLEKENELLQKKITNLKITCEKIEALEQENSELERENRKLKKTLDSFKNLTFQLESLEKENSQLDEENLELRRNVESLKCASMKMAQLQLENKELESEKEQLKKGLELLKASFKKTERLEVSYQGLDIENQRLQKTLENSNKKIQQLESELQDLEMENQTLQKNLEELKISSKRLEQLEKENKSLEQETSQLEKDKKQLEKENKRLRQQAEIKDTTLEENNVKIGNLEKENKTLSKEIGIYKESCVRLKELEKENKELVKRATIDIKTLVTLREDLVSEKLKTQQMNNDLEKLTHELEKIGLNKERLLHDEQSTDDRYKLLESKLESTLKKSLEIKEEKIAALEARLEESTNYNQQLRQELKTVKKNYEALKQRQDEERMVQSSPPISGEDNKWERESQETTRELLKVKDRLIEVERNNATLQAEKQALKTQLKQLETQNNNLQAQILALQRQTVSLQEQNTTLQTQNAKLQVENSTLNSQSTSLMNQNAQLLIQQSSLENENESVIKEREDLKSLYDSLIKDHEKLELLHERQASEYESLISKHGTLKSAHKNLEVEHRDLEDRYNQLLKQKGQLEDLEKMLKVEQEKMLLENKNHETVAAEYKKLCGENDRLNHTYSQLLKETEVLQTDHKNLKSLLNNSKLEQTRLEAEFSKLKEQYQQLDITSTKLNNQCELLSQLKGNLEEENRHLLDQIQTLMLQNRTLLEQNMESKDLFHVEQRQYIDKLNELRRQKEKLEEKIMDQYKFYDPSPPRRRGNWITLKMRKLIKSKKDINRERQKSLTLTPTRSDSSEGFLQLPHQDSQDSSSVGSNSLEDGQTLGTKKSSMVALKRLPFLRNRPKDKDKMKACYRRSMCKTL

SEQ ID NO: 24686 - protein, 829 aa, Homo sapiens
MNRLWSWVTAKVSRGTGPPPLGMPREARGVSPPGLEDYEEIPRDLTLDALLEMNEAKVKETLRRCGASGDECGRLQYALTCLRKVTGLGGEHKEDSSWSSLDARRESGSGPSTDTLSAASLPWPPGSSQLGRAGNSAQGPRSISVSALPASDSPTPSFSEGLSDTCIPLHASGRLTPRALHSFITPPTTPQLRRHTKLKPPRTPPPPSRKVFQLLPSFPTLTRSKSHESQLGNRIDDVSSMRFDLSHGSPQMVRRDIGLSVTHRFSTKSWLSQVCHVCQKSMIFGVKCKHCRLKCHNKCTKEAPACRISFLPLTRLRRTESVPSDINNPVDRAAEPHFGTLPKALTKKEHPPAMNHLDSSSNPSSTTSSTPSSPAPFPTSSNPSSATTPPNPSPGQRDSRFNFPDISAFAHAAPLPEAADGTRLDDQPKADVLEAHEAEAEEPEAGKSEAEDDEDEVDDLPSSRRPWRGPISRKASQTSVYLQEWDIPFEQVELGEPIGQGRWGRVHRGRWHGEVAIRLLEMDGHNQDHLKLFKKEVMNYRQTRHENVVLFMGACMNPPHLAIITSFCKGRTLHSFVRDPKTSLDINKTRQIAQEIIKGMGYLHAKGIVHKDLKSKNVFYDNGKVVITDFGLFGISGVVREGRRENQLKLSHDWLCYLAPEIVREMTPGKDEDQLPFSKAADVYAFGTVWYELQARDWPLKNQAAEASIWQIGSGEGMKRVLTSVSLGKEVSEILSACWAFDLQERPSFSLLMDMLEKLPKLNRRLSHPGHFWKSADRWRSRYYGKGRYGHPDFKSSCPILEEYINSSKVVPRFERFGLGVLESSNPKM

SEQ ID NO: 24687 - protein, 748 aa, Homo sapiens
MTTEKSLVTEAENSQHQQKEEGEEAINSGQQEPQQEESCQTAAEGDNWCEQKLKASNGDTPTHEDLTKNKERTSESRGLSRLFSSFLKRPKSQVSEEEGKEVESDKEKGEGGQKEIEFGTSLDEEIILKAPIAAPEPELKTDPSLDLHSLSSAETQKHAKGQDLLKRVCEHLNLLEEDYFGLAIWDNATSKTWLDSAKEIKKQVRGVPWNFTFNVKFYPPDPAQLTEDITRYYLCLQLRQDIVAGRLPCSFATLALLGSYTIQSELGDYDPELHGVDYVSDFKLAPNQTKELEEKVMELHKSYRSMTPAQADLEFLENAKKLSMYGVDLHKAKDLEGVDIILGVCSSGLLVYKDKLRINRFPWPKVLKISYKRSSFFIKIRPGEQEQYESTIGFKLPSYRAAKKLWKVCVEHHTFFRLTSTDTIPKSKFLALGSKFRYSGRTQAQTRQASALIDRPAPHFERTASKRASRSLDGAAAVDSADRSPRPTSAPAITQGQVAEGGVLDASAKKTVVPKAQKETVKAEVKKEDEPPEQAEPEPTEAWKVEKTHIEVTVPTSNGDQTQKLAEKTEDLIRMRKKKRERLDGENIYIRHSNLMLEDLDKSQEEIKKHHASISELKKNFMESVPEPRPSEWDKRLSTHSPFRTLNINGQIPTGEGVKKTSVLPSERKVGGPEDEEKIKRQERSTERALPQQENEEILPKVSIPIPEDHKSLKKCHLYFSTFPSPRIPFMMSFLVILVLAVWWLVFL

SEQ ID NO: 24688 - protein, 385 aa, Homo sapiens
MMMMALSKTFGQKPVKFQLEDDGEFYMIGSEVGNYLRMFRGSLYKRYPSLWRRLATVEERKKIVASSHGKKTKPNTKDHGYTTLATSVTLLKASEVEEILDGNDEKYKAVSISTEPPTYLREQKAKRNSQWVPTLPNSSHHLDAVPCSTTINRNRMGRDKKRTFPLCFDDHDPAVIHENASQPEVLVPIRLDMEIDGQKLRDAFTWNMNEKLMTPEMFSEILCDDLDLNPLTFVPAIASAIRQQIESYPTDSILEDQSDQRVIIKLNIHVGNISLVDQFEWDMSEKENSPEKFALKLCSELGLGGEFVTTIAYSIRGQLSWHQKTYAFSENPLPTVEIAIRNTGDADQWCPLLETLTDAEMEKKIRDQDRNTRRMRRLANTAPAW

SEQ ID NO: 24689 - protein, 856 aa, Homo sapiens
MDHNFAPAPPEMQSHGAPGPGTSFSHSHVLGRPIRPSRLPGGGSPLTPVLRKTIHLDTFPQSHIPQTSSRLGLGARTRSVPPQETGIALGASLSPLPTSSLVPRKLSSISLTLHQNSQARSLDRPLSHWEELPTPGKKAAPHEGGRVSSPGSPPVTLVPGGRVHSEGPGNPGLTKSNRMLATEKPLVSSYLALPFQSRLAQSAPVLAEPGSLGQGHLVSVTDHMPTRASPGKGKPRARGIPRPRGRLQRANTTVNLTAMDTRTDAARHLATMATNRPSLAINLATPNTSQLDTGTEFPALDIKLGTARDLSSVGTVKSGKTVNLATAGTIKPGTAMNLTTVGTTKPGMVMDLIASEPDKLGKAMATRSTAKPDMTTEGIAMDSATSDPVKPDTITATVGTSRLETAMALARVNRAKLGTAKNSLALDTSRMGTAVGSVVPVTPDPATGKTTLGSVNNLTISDVATCLLMPSRSTDLALDNTNAAMDRATEPASLDLATEYKGLPETRTDAAMSELVPEPRPKPAVPMKPMSINSNLLGYIGIDTIIEQMRKKTMKTGFDFNIMVVGQSGLGKSTLVNTLFKSQVSRKASSWNREEKIPKTVEIKAIGHVIEEGGVKMKLTVIDTPGFGDQINNENCWEPIEKYINEQYEKFLKEEVNIARKKRIPDTRVHCCLYFISPTGHSLRPLDLEFMKHLSKVVNIIPVIAKADTMTLEEKSEFKQRVRKELEVNGIEFYPQKEFDEDLEDKTENDKIRQESMPFAVVGSDKEYQVNGKRVLGRKTPWGIIEVENLNHCEFALLRDFVIRTHLQDLKEVTHNIHYETYRAKRLNDNGGLPPGEGLLGTVLPPVPATPCPTAE

SEQ ID NO: 24690 - protein, 1406 aa, Homo sapiens
MENEIFTPLLEQFMTSPLVTWVKTFGPLAAGNGTNLDEYVALVDGVFLNQVMLQINPKLESQRVNKKVNNDASLRMHNLSILVRQIKFYYQETLQQLIMMSLPNVLIIGKNPFSEQGTEEVKKLLLLLLGCAVQCQKKEEFIERIQGLDFDTKAAVAAHIQEVTHNQENVFDLQWMEVTDMSQEDIEPLLKNMALHLKRLIDERDEHSETIIELSEERDGLHFLPHASSSAQSPCGSPGMKRTESRQHLSVELADAKAKIRRLRQELEEKTEQLLDCKQELEQMEIELKRLQQENMNLLSDARSARMYRDELDALREKAVRVDKLESEVSRYKERLHDIEFYKARVEELKEDNQVLLETKTMLEDQLEGTRARSDKLHELEKENLQLKAKLHDMEMERDMDRKKIEELMEENMTLEMAQKQSMDESLHLGWELEQISRTSELSEAPQKSLGHEVNELTSSRLLKLEMENQSLTKTVEELRTTVDSVEGNASKILKMEKENQRLSKKVEILENEIVQEKQSLQNCQNLSKDLMKEKAQLEKTIETLRENSERQIKILEQENEHLNQTVSSLRQRSQISAEARVKDIEKENKILHESIKETSSKLSKIEFEKRQIKKELEHYKEKGERAEELENELHHLEKENELLQKKITNLKITCEKIEALEQENSELERENRKLKKTLDSFKNLTFQLESLEKENSQLDEENLELRRNVESLKCASMKMAQLQLENKELESEKEQLKKGLELLKASFKKTERLEVSYQGLDIENQRLQKTLENSNKKIQQLESELQDLEMENQTLQKNLEELKISSKRLEQLEKENKSLEQETSQLEKDKKQLEKENKRLRQQAEIKDTTLEENNVKIGNLEKENKTLSKEIGIYKESCVRLKELEKENKELVKRATIDIKTLVTLREDLVSEKLKTQQMNNDLEKLTHELEKIGLNKERLLHDEQSTDDSRYKLLESKLESTLKKSLEIKEEKIAALEARLEESTNYNQQLRQELKTVKKNYEALKQRQDEERMVQSSPPISGEDNKWERESQETTRELLKVKDRLIEVERNNATLQAEKQALKTQLKQLETQNNNLQAQILALQRQTVSLQEQNTTLQTQNAKLQVENSTLNSQSTSLMNQNAQLLIQQSSLENENESVIKEREDLKSLYDSLIKDHEKLELLHERQASEYESLISKHGTLKSAHKNLEVEHRDLEDRYNQLLKQKGQLEDLEKMLKVEQEKMLLENKNHETVAAEYKKLCGENDRLNHTYSQLLKETEVLQTDHKNLKSLLNNSKLEQTRLEAEFSKLKEQYQQLDITSTKLNNQCELLSQLKGNLEEENRHLLDQIQTLMLQNRTLLEQNMESKDLFHVEQRQYIDKLNELRRQKEKLEEKIMDQYKFYDPSPPRSGCTEKTALFEEQTEG

SEQ ID NO: 24691 - protein, 170 aa, Homo sapiens
MDADEGQDMSQVSGKESPPVSDTPDEGDEPMPIPEDLSTTSGGQQSSKSDRVVGERPFQCNQCGASFTQKGNLLRHIKLHSGEKPFKCHLCNYACRRRDALTGHLRTHSVIKEETNHSEMAEDLCKIGSERSLVLDRLASNVAKRKSSMPQKFLGDKGLSDTPYDSSASY

SEQ ID NO: 24692 - protein, 630 aa, Homo sapiens
MASAGHIITLLLWGYLLELWTGGHTADTTHPRLRLSHKELLNLNRTSIFHSPFGFLDLHTMLLDEYQERLFVGGRDLVYSLSLERISDGYKEIHWPSTALKMEECIMKGKDAGECANYVRVLHHYNRTHLLTCGTGAFDPVCAFIRVGYHLEDPLFHLESPRSERGRGRCPFDPSSSFISTLIGSELFAGLYSDYWSRDAAIFRSMGRLAHIRTEHDDERLLKEPKFVGSYMIPDNEDRDDNKVYFFFTEKALEAENNAHAIYTRVGRLCVNDVGGQRILVNKWSTFLKARLVCSVPGMNGIDTYFDELEDVFLLPTRDHKNPVIFGLFNTTSNIFRGHAICVYHMSSIRAAFNGPYAHKEGPEYHWSVYEGKVPYPRPGSCASKVNGGRYGTTKDYPDDAIRFARSHPLMYQAIKPAHKKPILVKTDGKYNLKQIAVDRVEAEDGQYDVLFIGTDNGIVLKVITIYNQEMESMEEVILEELQIFKDPVPIISMEISSKRQQLYIGSASAVAQVRFHHCDMYGSACADCCLARDPYCAWDGISCSRYYPTGTHAKRRFRRQDVRHGNAAQQCFGQQFVGDALDKTEEHLAYGIENNSTLLECTPRSLQAKVIWFVQKGRETRKEEVKAMS

SEQ ID NO: 24693 - protein, 1096 aa, Homo sapiens
MSWFNASQLSSFAKQALSQAQKSIDRVLDIQEEEPSIWAETIPYGEPGISSPVSGGWDTSTWGLKSNTEPQSPPIASPKAITKPVRRTVVDESENFFSAFLSPTDVQTIQKSPVVSKPPAKSQRPEEEVKSSLHESLHIGQSRTPETTESQVKDSSLCVSGETLAAGTSSPKTEGKHEETVNKESDMKVPTVSLKVSESVIDVKTTMESISNTSTQSLTAETKDIALEPKEQKHEDRQSNTPSPPVSTFSSGTSTTSDIEVLDHESVISESSASSRQETTDSKSSLHLMQTSFQLLSASACPEYNRLDDFQKLTESCCSSDAFERIDSFSVQSLDSRSVSEINSDDELSGKGYALVPIIVNSSTPKSKTVESAEGKSEEVNETLVIPTEEAEMEESGRSATPVNCEQPDILVSSTPINEGQTVLDKVAEQCEPAESQPEALSEKEDVCKVTLTVEFLNEKLEKREAQLLSLSKEKALLEEAFDNLKDEMFRVKEESSSISSLKDEFTQRIAEAEKKVQLACKERDAAKKEIKNIKEELATRLNSSETADLLKEKDEQIRGLMEEGEKLSKQQLHNSNIIKKLRAKDKENENMVAKLNKKVKELEEELQHLKQVLDGKEEVEKQHRENIKKLNSMVERQEKDLGRLQVDMDELEEKNRSIQAALDSAYKELTDLHKANAAKDSEAQEAALSREMKAKEELSAALEKAQEEARQQQETLAIQVGDLRLALQRTEQAAARKEDYLRHEIGELQQRLQEAENRNQELSQSVSSTTRPLLRQIENLQATLGSQTSSWEKLEKNLSDRLGESQTLLAAAVERERAATEELLANKIQMSSMESQNSLLRQENSRFQAQLESEKNRLCKLEDENNRYQVELENLKDEYVRTLEETRKEKTLLNSQLEMERMKVEQERKKAIFTQETIKEKERKPFSVSSTPTMSRSSSISGVDMAGLQTSFLSQDESHDHSFGPMPISANGSNLYDAVRMGAGSSIIENLQSQLKLREGEITHLQLEIGNLEKTRSIMAEELVKLTNQNDELEEKVKEIPKLRTQLRDLDQRYNTILQMYGEKAEEAEELRLDLEDVKNMYKTQIDELLRQSLS

SEQ ID NO: 24694 - protein, 479 aa, Homo sapiens
MLLKSPENSLLQFQFKYGVPTPTNVTIESYNMNPIVYWEYQIMPQVPVFTVEVKNYGVKNSEWIDACINISHHYCNISDHVGDPSNSLWVRVKARVGQKESAYAKSEEFAVCRDGKIGPPKLDIRKEEKQIMIDIFHPSVFVNGDEQEVDYDPETTCYIRVYNVYVRMNGSEIQYKILTQKEDDCDEIQCQLAIPVSSLNSQYCVSAEGVLHVWGVTTEKSKEVCITIFNSSIKGSLWIPVVAALLLFLVLSLVFICFYIKKINPLKEKSIILPKSLISVVRSATLETKPESKYVSLITSYQPFSLEKEVVCEEPLSPATVPGMHTEDNPGKVEHTEELSSITEVVTTEENIPDVVPGSHLTPIERESSSPLSSNQSEPGSIALNSYHSRNCSESDHSRNGFDTDSSCLESHSSLSDSEFPPNNKGEIKTEGQELITVIKAPTSFGYDKPHVLVDLLVDDSGKESLIGYRPTEDSKEFS

SEQ ID NO: 24695 - protein, 2963 aa, Homo sapiens
MLPINVDPDSKPGEYVLKSLFVNFTTQAERKIRIIMAEPLEKPLTKSLQRGEDPQFDQVISSMSSLSEYCLPSILRTLFDWYKRQNGIEDESHEYRPRTSNKSKSDEQQRDYLMERRDLAIDFIFSLVLIEVLKQIPLHPVIDSLIHDVINLAFKHFKYKEGYLGPNTGNMHIVADLYAEVIGVLAQAKFPAVKKKFMAELKELRHKEQNPYVVQSIISLIMGMKFFRIKMYPVEDFEASLQFMQECAHYFLEVKDKDIKHALAGLFVEILVPVAAAVKNEVNVPCLRNFVESLYDTTLELSSRKKHSLALYPLVTCLLCVSQKQLFLNRWHIFLNNCLSNLKNKDPKMARVALESLYRLLWVYMIRIKCESNTATQSRLITIITTLFPKGSRGVVPRDMPLNIFVKIIQFIAQERLDFAMKEIIFDFLCVGKPAKAFSLNPERMNIGLRAFLVIADSLQQKDGEPPMPVTGAVLPSGNTLRVKKTYLSKTLTEEEAKMIGMSLYYSQVRKAVDNILRHLDKEVGRCMMLTNVQMLNKEPEDMITGERKPKIDLFRTCVAAIPRLLPDGMSKLELIDLLARLSIHMDDELRHIAQNSLQGLLVDFSDWREDVLFGFTNFLLREVNDMHHTLLDSSLKLLLQLLTQWKLVIQTQGKVYEQANKIRNSELIANGSSHRIQSERGPHCSVLHAVEGFALVLLCSFQVATRKLSVLILKEIRALFIALGQPEDDDRPMIDVMDQLSSSILESFIHVAVSDSATLPLTHNVDLQWLVEWNAVLVNSHYDVKSPSHVWIFAQSVKDPWVLCLFSFLRQENLPKHCPTALSYAWPYAFTRLQSVMPLVDPNSPINAKKTSTAGSGDNYVTLWRNYLILCFGVAKPSIMSPGHLRASTPEIMATTPDGTVSYDNKAIGTPSVGVLLKQLVPLMRLESIEITESLVLGFGRTNSLVFRELVEELHPLMKEALERRPENKKRRERRDLLRLQLLRIFELLADAGVISDSTNGALERDTLALGALFLEYVDLTRMLLEAENDKEVEILKDIRAHFSAMVANLIQCVPVHHRRFLFPQQSLRHHLFILFSQWAGPFSIMFTPLDRYSDRNHQITRYQYCALKAMSAVLCCGPVFDNVGLSPDGYLYKWLDNILACQDLRVHQLGCEVVVLLLELNPDQINLFNWAIDRCYTGSYQLASGCFKAIATVCGSRNYPFDIVTLLNLVLFKASDTNREIYEISMQLMQILEAKLFVYSKKVAEQRPGSILYGTHGPLPPLYSVSLALLSCELARMYPELTLPLFSEVSQRFPTTHPNGRQIMLTYLLPWLHNIELVDSRLLLPGSSPSSPEDEVKDREGDVTASHGLRGNGWGSPEATSLVLNNLMYMTAKYGDEVPGPEMENAWNALANNEKWSNNLRITLQFLISLCGVSSDTVLLPYIKKVAIYLCRNNTIQTMEELLFELQQTEPVNPIVQHCDNPPFYRFTASSKASAAASGTTSSSNTVVAGQENFPDAEENKILKESDERFSNVIRAHTRLESRYSNSSGGSYDEDKNDPISPYTGWLLTITETKQPQPLPMPCTGGCWAPLVDYLPETITPRGPLHRCNIAVIFMTEMVVDHSVREDWALHLPLLLHAVFLGLDHYRPEVFEHSKKLLLHLLIALSCNSNFHSIASVLLQTREMGEAKTLTVQPAYQPEYLYTGGFDFLREDQSSPVPDSGLSSSSTSSSISLGGSSGNLPQMTQEVEDVDTAAETDEKANKLIEFLTTRAFGPLWCHEDITPKNQNSKSAEQLTNFLRHVVSVFKDSKSGFHLEHQLSEVALQTALASSSRHYAGRSFQIFRALKQPLSAHALSDLLSRLVEVIGEHGDEIQGYVMEALLTLEAAVDNLSDCLKNSDLLTVLSRSSSPDLSSSSKLTASRKSTGQLNMNPGTTSGNTATAERSRHQRSFSVPKKFGVIDRSSDPPRSATLDRIQACTQQGLSSKTRSSSSLKDSLTDPSHINHPTNLLATIFWVTVALMESDFEFEYLMALRLLSRLLAHMPLDKAENREKLEKLQAQLKWADFSGLQQLLLKGFTSLTTTDLTLQLFSLLTPVSKISMVDASHAIGFPLNVLCLLPQLIQHFENPNQFCKDIAERIAQVCLEEKNPKLSNLAHVMTLYKTHSYTRDCATWVNVVCRYLHEAYADITLNMVTYLAELLEKGLPSVQQPLLQVIYSLLSYMDLSVVPVKQFNVEVLKTIEKYVQSVHWREALNILKLVVSRSASLVLPSYQHSDLSKIEIHRVWTSASKELPGKTLDFHFDISETPIIGRRYDELQNSSGRDGKPRAMAVTRSTSSTSSGSNSNVLVPVSWKRPQYSQKRTKEKLVHVLSLCGQEVGLSKNPSVIFSSCGDLDLLEHQTSLVSSEDGAREQENMDDTNSEQQFRVFRDFDFLDVELEDGEGESMDNFNWGVRRRSLDSLDKCDMQILEERQLSGSTPSLNKMHHEDSDESSEEEDLTASQILEHSDLIMTLSPSEETNPMELLTTACDSTPAEPHSFNTRMSSFDASLPDMNNLQISEGSKAEAVREEEDTTVHEDDLSSSINELPAAFECSDSFSLDMTEGEEKGNRALDQFTLASFGEGDRGVSPPPSPFFSAILAAFQPAACDDAEEAWRSHINQLMCDSDGSCAVYTFHVFSSLFKNIQKRFCFLTCDAASYLGDNLRGIGSKFVSSSQMLTSCSECPTLFVDAETLLSCGLLDKLKFSVLELQEYLDTYNNRKEATLSWLANCKATFAGGSRDGVITCQPGDSEEKQLELCQRLYKLHFQLLLLFQSYCKLIGQVHEVSSMPELLNMSRELSDLKKHLKEASAVIAADPLYSDGAWSEPTFTSTEAAIQSMLECLKNNELGKALRQIRECRSLWPNDIFGSSSDDEVQTLLNIYFRHQTLGQTGTYALVGSNQSLTEICTKLMELNMEIRDMIRRAQSYRVLTTFLPDSSVSGTSL

SEQ ID NO: 24696 - protein, 1570 aa, Homo sapiens
MPLAFCGSENHSAAYRVDQGVLNNGCFVDALNVVPHVFLLFITFPILFIGWGSQSSKVHIHHSTWLHFPGHNLRWILTFMLLFVLVCEIAEGILSDGVTESHHLHLYMPAGMAFMAAVTSVVYYHNIETSNFPKLLIALLVYWTLAFITKTIKFVKFLDHAIGFSQLRFCLTGLLVILYGMLLLVEVNVIRVRRYIFFKTPREVKPPEDLQDLGVRFLQPFVNLLSKGTYWWMNAFIKTAHKKPIDLRAIGKLPIAMRALTNYQRLCEAFDAQRKDIQGTQGARAIWQALSHAFGRRLVLSSTFRILADLLGFAGPLCIFGIVDHLGKENDVFQPKTQFLGVYFVSSQEFLANAYVLAVLLFLALLLQRTFLQASYYVAIETGINLRGAIQTKIYNKIMHLSTSNLSMGEMTAGQICNLVAIDTNQLMWFFFLCPNLWAMPVQIIVGVILLYYILGVSALIGAAVIILLAPVQYFVATKLSQAQRSTLEYSNERLKQTNEMLRGIKLLKLYAWENIFRTRVETTRRKEMTSLRAFAIYTSISIFMNTAIPIAAVLITFVGHVSFFKEADFSPSVAFASLSLFHILVTPLFLLSSVVRSTVKALVSVQKLSEFLSSAEIREEQCAPHEPTPQGPASKYQAVPLRVVNRKRPAREDCRGLTGPLQSLVPSADGDADNCCVQIMGGYFTWTPDGIPTLSNITIRIPRGQLTMIVGQVGCGKSSLLLAALGEMQKVSGAVFWSSLPDSEIGEDPSPERETATDLDIRKRGPVAYASQKPWLLNATVEENIIFESPFNKQRYKMVIEACSLQPDIDILPHGDQTQIGERGINLSGGQRQRISVARALYQHANVVFLDDPFSALDIHLSDHLMQAGILELLRDDKRTVVLVTHKLQYLPHADWIIAMKDGTIQREGTLKDFQRSECQLFEHWKTLMNRQDQELEKETVTERKATEPPQGLSRAMSSRDGLLQDEEEEEEEAAESEEDDNLSSMLHQRAEIPWRACAKYLSSAGILLLSLLVFSQLLKHMVLVAIDYWLAKWTDSALTLTPAARNCSLSQECTLDQTVYAMVFTVLCSLGIVLCLVTSVTVEWTGLKVAKRLHRSLLNRIILAPMRFFETTPLGSILNRFSSDCNTIDQHIPSTLECLSRSTLLCVSALAVISYVTPVFLVALLPLAIVCYFIQKYFRVASRDLQQLDDTTQLPLLSHFAETVEGLTTIRAFRYEARFQQKLLEYTDSNNIASLFLTAANRWLEVRMEYIGACVVLIAAVTSISNSLHRELSAGLVGLGLTYALMVSNYLNWMVRNLADMELQLGAVKRIHGLLKTEAESYEGLLDQGKIQIQNLSVRYDSSLKPVLKHVNALIAPGQKIGICGRTGSGKSSFSLAFFRMVDTFEGHIIIDGIDIAKLPLHTLRSRLSIILQDPVLFSGTIRFNLDPERKCSDSTLWEALEIAQLKLVVKALPGGLDAIITEGGENFSQGQRQLFCLARAFVRKTSIFIMDEATASIDMATENILQKVVMTAFADRTVVTIAHRVHTILSADLVIVLKRGAILEFDKPEKLLSRKDSVFASFVRADK

SEQ ID NO: 24697 - protein, 444 aa, Homo sapiens
MPATLLRAVARSHHILSKAHQCRRIGHLMLKPLKEFENTTCSTLTIRQSLDLFLPDKTASGLNKSQILEMNQKKSDTSMLSPLNAARCQDEKAHLPTMKSFGTHRRVTHKPNLLGSKWFIKILKRHFSSVSTETFVPKQDFPQVKRPLKASRTRQPSRTNLPVLSVNEDLMHCTAFATADEYHLGNLSQDLASHGYVEVTSLPRDAANILVMGVENSAKEGDPGTIFFFREGAAVFWNVKDKTMKHVMKVLEKHEIQPYEIALVHWENEELNYIKIEGQSKLHRGEIKLNSELDLDDAILEKFAFSNALCLSVKLAIWEASLDKFIESIQSIPEALKAGKKVKLSHEEVMQKIGELFALRHRINLSSDFLITPDFYWDRENLEGLYDKTCQFLSIGRRVKVRSLAWPKVKMLIPLWRLRVESISSPFPVTGGHPYSLLMAPSSI

SEQ ID NO: 24698 - protein, 615 aa, Homo sapiens
RNNVIQLCLELTTIVQQVGWQLKNLVNALREDPSGVILTLKKRPQSMLTSAPALLKNMRWKPLALQPLIPRSPTSSVATPSSTISTPTKRDSSALQDLYIPPPPAEPYIPRDEKGNLPCEDLRGHMVGKPVHKGSESPNSFLDQEYRKRFNIVEEDTVLYCYEYEKGRSSSQGRRESTPTYENSLLRYMSNEKIAQEEYMFQRNSKKDTGKKSKKKGDKSNSPTHYSLLPSLQMDALRQDIMGTPVPETTLYHTFQQSSLQHKSKKKNKGPIAGKSKRRISCKDLGRGDCEGWLWKKKDAKSYFSQKWKKYWFVLKDASLYWYINEEDEKAEGFISLPEFKIDRASECRKKYAFKACHPKIKSFYFAAEHLDDMNRWLNRINMLTAGYAERERIKQEQDYWSESDKEEADTPSTPKQDSPPPPYDTYPRPPSMSCASPYVEAKHSRLSSTETSQSQSSHEEFRQEVTGSSAVSPIRKTASQRRSWQDLIETPLTSSGLHYLQTLPLEDSVFSDSAAISPEHRRQSTLPTQKCHLQDHYGPYPLAESERMQVLNGNGGKPRSFTLPRDSGFNHCCLNAPVSACDPQDDVQPPEVEEEEEEEEEEGEAAGENIGEKS

SEQ ID NO: 24699 - protein, 963 aa, Homo sapiens
MWRLRRAAVACEVCQSLVKHSSGIKGSLPLQKLHLVSRSIYHSHHPTLKLQRPQLRTSFQQFSSLTNLPLRKLKFSPIKYGYQPRRNFWPARLATRLLKLRYLILGSAVGGGYTAKKTFDQWKDMIPDLSEYKWIVPDIVWEIDEYIDFEKIRKALPSSEDLVKLAPDFDKIVESLSLLKDFFTSGSPEETAFRATDRGSESDKHFRKVSDKEKIDQLQEELLHTQLKYQRILERLEKENKELRKLVLQKDDKGIHHRKLKKSLIDMYSEVLDVLSDYDASYNTQDHLPRVVVVGDQSAGKTSVLEMIAQARIFPRGSGEMMTRSPVKVTLSEGPHHVALFKDSSREFDLTKEEDLAALRHEIELRMRKNVKEGCTVSPETISLNVKGPGLQRMVLVDLPGVINTVTSGMAPDTKETIFSISKAYMQNPNAIILCIQDGSVDAERSIVTDLVSQMDPHGRRTIFVLTKVDLAEKNVASPSRIQQIIEGKLFPMKALGYFAVVTGKGNSSESIEAIREYEEEFFQNSKLLKTSMLKAHQVTTRNLSLAVSDCFWKMVRESVEQQADSFKATRFNLETEWKNNYPRLRELDRNELFEKAKNEILDEVISLSQVTPKHWEEILQQSLWERVSTHVIENIYLPAAQTMNSGTFNTTVDIKLKQWTDKQLPNKAVEVAWETLQEEFSRFMTEPKGKEHDDIFDKLKEAVKEESIKRHKWNDFAEDSLRVIQHNALEDRSISDKQQWDAAIYFMEEALQARLKDTENAIENMVGPDWKKRWLYWKNRTQEQCVHNETKNELEKMLKCNEEHPAYLASDEITTVRKNLESRGVEVDPSLIKDTWHQVYRRHFLKTALNHCNLCRRGFYYYQRHFVDSELECNDVVLFWRIQRMLAITANTLRQQLTNTEVRRLEKNVKEVLEDFAEDGEKKIKLLTGKRVQLAEDLTMIPARLYENQMKRQIWKYIVDTS

SEQ ID NO: 24700 - protein, 323 aa, Homo sapiens
MGTLRDLQYALQEKIEELRQRDALIDELELELDQKDELIQKLQNELDKYRSVIRPATQQAQKQSASTLQGEPRTKRQAISAEPTAFDIQDLSHVTLPFYPKSPQSKDLIKEAILDNDFMKNLELSQIQEIVDCMYPVEYGKDSCIIKEGDVGSLVYVMEDGKVEVTKEGVKLCTMGPGKVFGELAILYNCTRTATVKTLVNVKLWAIDRQCFQTIMMRTGLIKHTEYMEFLKSVPTFQSLPEEILSKLADVLEETHYENGEYIIRQGARGDTFFIISKGTVNVTREDSPSEDPVFLRTLGKGDWFGEKALQGWTWNLFEYVVE

SEQ ID NO: 24701 - protein, 1261 aa, Homo sapiens
KQSYWNHRELMRGEEGRPGKKLKKVKLRKLERPPETPTVDPTVKYERQPEYLDATGGTLHPYQMEGLNWLRFSWAQGTDTILADEMGLGKTVQTAVFLYSLYKEGHSKGPFLVSAPLSTIINWEREFEMWAPDMYVVTYVGDKDSRAIIRENEFSFEDNAIRGGKKASRMKKEASVKFHVLLTSYELITIDMAILGSIDWACLIVDEAHRLKNNQSKFFRVLNGYSLQHKLLLTGTPLQNNLEELFHLLNFLTPERFHNLEGFLEEFADIAKEDQIKKLHDMLGPHMLRRLKADVFKNMPSKTELIVRVELSPMQKKYYKYILTRNFEALNARGGGNQVSLLNVVMDLKKCCNHPYLFPVAAMEAPKMPNGMYDGSALIRASGKLLLLQKMLKNLKEGGHRVLIFSQMTKMLDLLEDFLEHEGYKYERIDGGITGNMRQEAIDRFNAPGAQQFCFLLSTRAGGLGINLATADTVIIYDSDWNPHNDIQAFSRAHRIGQNKKVMIYRFVTRASVEERITQVAKKKMMLTHLVVRPGLGSKTGSMSKQELDDILKFGTEELFKDEATDGGEVVRNLRFGVGLGLSKGGDNKEGEDSSVIHYDDKAIERLLDRNQDETEDTELQGMNEYLSSFKVAQYVVREEEMGEEEVEREIIKQEESVDPDYWEKLLRHHYEQQQEDLARNLGKGKRIRKQVNYNDGSQEDRDWQDDQSDNQSDYSVASEEGDEDFDERSEAPRRPSRKGLRNDKDKPLPPLLARVGGNIEVLGFNARQRKAFLNAIMRYGMPPQDAFTTQWLVRDLRGKSEKEFKAYVSLFMRHLCEPGADGAETFADGVPREGLSRQHVLTRIGVMSLIRKKVQEFEHVNGRWSMPELAEVEENKKMSQPGSPSPKTPTPSTPGDTQPNTPAPVPPAEDGIKIEENSLKEEESIEGEKEVKSTAPETAIECTQAPAPASEDEKVVVEPPEGEEKVEKAEVKERTEEPMETEPKGAADVEKVEEKSAIDLTPIVVEDKEEKKEEEEKKEVMLQNGETPKDLNDEKQKKNIKQRFMFNIADGGFTELHSLWQNEERAATVTKKTYEIWHRRHDYWLLAGIINHGYARWQDIQNDPRYAILNEPFKGEMNRGNFLEIKNKFLARRFKLLEQALVIEEQLRRAAYLNMSEDPSHPSMALNTRFAEVECLAESHQHLSKESMAGNKPANAVLHKVLKQLEELLSDMKADVTRLPATIARIPPVAVRLQMSERNILSRLANRAPEPTPQQVAQQQ

SEQ ID NO: 24702 - protein, 151 aa, Homo sapiens
LAAQGESQSLEDLSNTSRPTSEVYKISFIFPNGDKYDGDCTRTSSGIYERNGIGIHTTPNGIVYTGSWKDDKMNGFGRLEHFSGAVYEGQFKDNMFHGLGTYTFPNGAKYTGNFNENRVEGEGEYTDIQGLEWSGNFHFTAAPDLKLKLHM

SEQ ID NO: 24703 - protein, 465 aa, Homo sapiens
MDSPGYNCFVDKDKMDAAIQDLGPKELSCTELQELKQLARQGYWAQSHALRGKVYQRLIRDIPCRTVTPDASVYSDIVGKIVGKHSSSCLPLPEFVDNTQVPSYCLNARGEGAVRKILLCLANQFPDISFCPALPAVVALLLHYSIDEAECFEKACRILACNDPGRRLIDQSFLAFESSCMTFGDLVNKYCQAAHKLMVAVSEDVLQVYADWQRWLFGELPLCYFARVFDVFLVEGYKVLYRVALAILKFFHKVRAGQPLESDSVKQDIRTFVRDIAKTVSPEKLLEKAFAIRLFSRKEIQLLQMANEKALKQKGITVKQKRQFVHLAVHAENFRSEIVSVREMRDIWSWVPERFALCQPLLLFSSLQHGYSLARFYFQCEGHEPTLLLIKTTQKEVCGAYLSTDWSERNKFGGKLGFFGTGECFVFRLQPEVQRYEWVVIKHPELTKPPPLMAAEPTAPLSHSA

SEQ ID NO: 24704 - protein, 798 aa, Homo sapiens
DEGHRMKNHHCKLTQVLNTHYVAPRRLLLTGTPLQNKLPELWALLNFLLPTIFKSCSTFEQWFNAPFAMTGEKVDLNEEETILIIRRLHKVLRPFLLRRLKKEVEAQLPEKVEYVIKCDMSALQRVLYRHMQAKGVLLTDGSEKDKKGKGGTKTLMNTIMQLRKICNHPYMFQHIEESFSEHLGFTGGIVQGLDLYRASGKFELLDRILPKLRATNHKVLLFCQMTSLMTIMEDYFAYRGFKYLRLDGTTKAEDRGMLLKTFNEPGSEYFIFLLSTRAGGLGLNLQSADTVIIFDSDWNPHQDLQAQDRAHRIGQQNEVRVLRLCTVNSVEEKILAAAKYKLNVDQKVIQAGMFDQKSSSHERRAFLQAILEHEEQDESRHCSTGSGSASFAHTAPPPAGVNPDLEEPPLKEEDEVPDDETVNQMIARHEEEFDLFMRMDLDRRREEARNPKRKPRLMEEDELPSWIIKDDAEVERLTCEEEEEKMFGRGSRHRKEVDYSDSLTEKQWLKKITGKDIHDTASSVARGLQFQRGLQFCTRASKAIEEGTLEEIEEEVRQKKSSRKRKRDSDAGSSTPTTSTRSRDKDDESKKQKKRGRPPAEKLSPNPPNLTKKMKKIVDAVIKYKDSSGRQLSEVFIQLPSRKELPEYYELIRKPVDFKKIKERIRNHKYRSLNDLEKDVMLLCQNAQTFNLEGSLIYEDSIVLQSVFTSVRQKIEKEDDSEGEESEEEEEGEEEGSESESRSVKVKIKLGRKEKAQDRLKGGRRRPSRGSRAKPVVSDDDSEEEQEEDRSGSGSEED

SEQ ID NO: 24705 - protein, 1067 aa, Homo sapiens
LAYLLQQTDEYVANLTELVRQHKAAQVAKEKKKKKKKKKAENAEGQTPAIGPDGEPLDETSQMSDLPVKVIHVESGKILTGTDAPKAGQLEAWLEMNPGYEVAPRSDSEESGSEEEEEEEEEEQPQAAQPPTLPVEEKKKIPDPDSDDVSEVDARHIIENAKQDVDDEYGVSQALARGLQSYYAVAHAVTERVDKQSALMVNGVLKQYQIKGLEWLVSLYNNNLNGILADEMGLGKTIQTIALITYLMEHKRINGPFLIIVPLSTLSNWAYEFDKWAPSVVKVSYKGSPAARRAFVPQLRSGKFNVLLTTYEYIIKDKHILAKIRWKYMIVDEGHRMKNHHCKLTQVLNTHYVAPRRLLLTGTPLQNKLPELWALLNFLLPTIFKSCSTFEQWFNAPFAMTGEKVDLNEEETILIIRRLHKVLRPFLLRRLKKEVEAQLPEKVEYVIKCDMSALQRVLYRHMQAKGVLLTDGSEKDKKGKGGTKTLMNTIMQLRKICNHPYMFQHIEESFSEHLGFTGGIVQGLDLYRASGKFELLDRILPKLRATNHKVLLFCQMTSLMTIMEDYFAYRGFKYLRLDGTTKAEDRGMLLKTFNEPGSEYFIFLLSTRAGGLGLNLQSADTVIIFDSDWNPHQDLQAQDRAHRIGQQNEVRVLRLCTVNSVEEKILAAAKYKLNVDQKVIQAGMFDQKSSSHERRAFLQAILEHEEQDESRHCSTGSGSASFAHTAPPPAGVNPDLEEPPLKEEDEVPDDETVNQMIARHEEEFDLFMRMDLDRRREEARNPKRKPRLMEEDELPSWIIKDDAEVERLTCEEEEEKMFGRGSRHRKEVDYSDSLTEKQWLKTLKAIEEGTLEEIEEEVRQKKSSRKRKRDSDAGSSTPTTSTRSRDKDDESKKQKKRGRPPAEKLSPNPPNLTKKMKKIVDAVIKYKDSSSGRQLSEVFIQLPSRKELPEYYELIRKPVDFKKIKIYEDSIVLQSVFTSVRQKIEKEDDSEGEESEEEEEGEEEGSESESRSVKVKIKLGRKEKAQDRLKGGRRRPSRGSRAKPVVSDDDSEEEQEEDRSGSGSEED

SEQ ID NO: 24706 - protein, 751 aa, Homo sapiens
MGSRSGRGRTEARSASESLQLRLLTPTFEGINGLLLKQHLVQNPVRLWQLLGGTFYFNTSRLKQKNKEKDKSKGKAPEEDEEERRRRERDDQMYRERLRTLLVIAVVMSLLNALSTSGGSISWNDFVHEMLAKGEVQRVQVVPESDVVEVYLHPGAVVFGRPRLALMYRMQVANIDKFEEKLRAAEDELNIEAKDRIPVSYKRTGFFGNALYSVGMTAVGLAILWYVFRLAGMTGREGGFSAFNQLKMARFTIVDGKMGKGVSFKDVAGMHEAKLEVREFVDYLKSPERFLQLGAKVPKGALLLGPPGCGKTLLAKAVATEAQVPFLAMAGPEFVEVIGGLGAARVRSLFKEARARAPCIVYIDEIDAVGKKRSTTMSGFSNTEEEQTLNQLLVEMDGMGTTDHVIVLASTNRADILDGALMRPGRLDRHVFIDLPTLQERREIFEQHLKSLKLTQSSTFYSQRLAELTPGFSGADIANICNEAALHAAREGHTSVHTLNFEYAVERVLAGTAKKSKILSKEEQKVVAFHESGHALVGWMLEHTEAVMKVSITPRTNAALGFAQMLPRDQHLFTKEQLFERMCMALGGRASEALSFNEVTSGAQDDLRKVTRIAYSMVKQFGMAPGIGPISFPEAQEGLMGIGRRPFSQGLQQMMDHEARLLVAKAYRHTEKVLQDNLDKLQALANALLEKEVINYEDIEALIGPPPHGPKKMIAPQRWIDAQREKQDLGEEETEETQQPPLGGEEPTWPK

SEQ ID NO: 24707 - protein, 474 aa, Homo sapiens
MALAVAPWGRQWEEARALGRAVRMLQRLEEQCVDPRLSVSPPSLRDLLPRTAQLLREVAHSRRAAGGGGPGGPGGSGDFLLIYLANLEAKSRQVAALLPPRGRRSANDELFRAGSRLRRQLAKLAIIFSHMHAELHALFPGGKYCGHMYQLTKAPAHTFWRESCGARCVLPWAEFESLLGTCHPVEPGCTALALRTTIDLTCSGHVSIFEFDVFTRLFQPWPTLLKNWQLLAVNHPGYMAFLTYDEVQERLQACRDKPGSYIFRPSCTRLGQWAIGYVSSDGSILQTIPANKPLSQVLLEGQKDGFYLYPDGKTHNPDLTELGQAEPQQRIHVSEEQLQLYWAMDSTFELCKICAESNKDVKIEPCGHLLCSCCLAAWQHSDSQTCPFCRCEIKGWEAVSIYQFHGQATAEDSGNSSDQEGRELELGQVPLSAPPLPPRPDLPPRKPRNAQPKVRLLKGNSPPAALGPQDPAPA

SEQ ID NO: 24708 - protein, 410 aa, Homo sapiens
MQLPRWWELGDPCAWTGQGRGTRRMSPATTGTFLLTGEISNDPITFNTNLMGYPDRPGWLRYIQRTPYSDGVLYGSPTAENVGKPTIIEITAYNRRTFETARHNLIINIMSAEDFPLPYQAEFFIKNMNVEEMLASEVLGDFLGAVKNVWQPERLNAINITSALDRGGRVPLPINDLKEGVYVMVGADVPFSSCLREVENPQNQLRCSQEMEPVITCDKKFRTQFYIDWCKISLVDKTKQVSTYQEVIRGEGILPDGGEYKPPSDSLKSRDYYTDFLITLAVPSAVALVLFLILAYIMCCRREGVIQLVHHSAIQKSTKELRDMSKNREIAWPLSTLPVFHPVTGEIIPPLHTDNYDSTNMPLMQTQQNLPHQTQIPQQQTTGDFRLTTFQRFEVNGIPEERKLTEAMNL

SEQ ID NO: 24709 - protein, 614 aa, Homo sapiens
METSRPEEERVGPRRTPGLSHEEIWAVVSSSSRPLPVHCPALTSRTWQASLFHHEQASREDKTFRGARCMEPSPERPACSQQEPTLGMDAMASEHRDVLVLLPSREQLRLAVGVKATGRELFQQVCNVASIRDAQFFGLCVVRNNEYIFMDLEQKLSKYFSKDWKKERNEGNEKPRAPFVAFLRVQHYVENGRVISDHRARHLYYCHLKERVLRSQCAHREEAYFLLAACALQADLGEHRESAHAGRYFEPHSYFPQWIITKRGIDYILRHMPTLHRERQGLSPKEAMLCFIQEACRLEDVPVHFFRLHKDKKEGRPTVILGLALRGVHIYQEVDRAPQLLYDLPWPHVGKLAFLGKKLEIQLDGLPAAQKLVYYTGCTWRSRHLLHLLRASHQLHLRVRPTLQQLRQREEAEEKQHYRESYISDELELDLASRSFPGSGVSSQHCPHCLSRHSADSHGSSYTSGIKANSWLRESREMSVDVPLEVHGLHEKEPSSSPRTSRSHPSTRGDSQATRQEPCTQVRTRGQSAEAVHQIQEMTAGVSEEQHSHGLDDMQLHQLALHPAPTSLSHTFHRALDCRLAGPCETRATLPSKRSSNCLALDLFGEAPPQEFVV

SEQ ID NO: 24710 - protein, 1308 aa, Homo sapiens
GQRGGSEASKSRSRHSHSGEERAEVAKSGSSSSSGGRRKSASATSSSSSSRKDRDSKAHRSRTKSSKEPPSAYKEPPKAYREDKTEPKAYRRRRSLSPLGGRDDSPVSHRASQSLRSRKSPSPAGGGSSPYSRRLPRSPSPYSRRRSPSYSRHSSYERGGDVSPSPYSSSSWRRSRSPYSPVLRRSGKSRSRSPYSSRHSRSRSRHRLSRSRSRHSSISPSTLTLKSSLAAELNKNKKARAAEAARAAEAAKAAEATKAAEAAAKAAKASNTSTPTKGNTETSASASQTNHVKDVKKIKIEHAPSPSSGGTLKNDKAKTKPPLQVTKVENNLIVDKATKKAVIVGKESKSAATKEESVSLKEKTKPLTPSIGAKEKEQHVALVTSTLPPLPLPPMLPEDKEADSLRGNISVKAVKKEVEKKLRCLLADLPLPPELPGGDDLSKSPEEKKTATQLHSKRRPKICGPRYGETKEKDIDWGKRCVDKFDIIGIIGEGTYGQVYKARDKDTGEMVALKKVRLDNEKEGFPITAIREIKILRQLTHQSIINMKEIVTDKEDALDFKKDKGAFYLVFEYMDHDLMGLLESGLVHFNENHIKSFMRQLMEGLDYCHKKNFLHRDIKCSNILLNNRGQIKLADFGLARLYSSEESRPYTNKVITLWYRPPELLLGEERYTPAIDVWSCGCILGELFTKKPIFQANQELAQLELISRICGSPCPAVWPDVIKLPYFNTMKPKKQYRRKLREEFVFIPAAALDLFDYMLALDPSKRCTAEQALQCEFLRDVEPSKMPPPERFLHAEAMHHSKMAESLPLWQDCHELWSKKRRRQKQMGMTDDVSTIKAPRKDLSLGLDDSRTNTPQGVLPSSQLKSQGSSNVAPVKTGPGQHLNHSELAILLNLLQSKTSVNMADFVQVLNIKVNSETQQQLNKINLPAGILATGEKQTDPSTPQQESSKPLGGIQPSSQTIQPKVETDAAQAAVQSAFAVLLTQLIKAQQSKQKDVLLEERENGSGHEASLQLRPPPEPSTPVSGQDDLIQHQDMRILELTPEPDRPRILPPDQRPPEPPEPPPVTEEDLDYRTENQHVPTTSSSLTDPHAGVKAALLQLLAQHQPQDDPKREGGIDYQAGDTYVSTSDYKDNFGSSSFSSAPYVSNDGLGSSSAPPLERRSFIGNSDIQSLDNYSTASSHSGGPPQPSAFSESFPSSVAGYGDIYLNAGPMLFSGDKDHRFEYSHGPIAVLANSSDPSTGPESTHPLPAKMHNYNYGGNLQENPSGPSLMHGQTWTSPAQGPGYSQGYRGHISTSTGRGRGRGLPY

SEQ ID NO: 24711 - protein, 332 aa, Homo sapiens
MTECTSLQFVSPFAFEAMQKVDVVCLASLSDPELRLLLPCLVRMALCAPADQSQSWAQDKKLILRLLSGVEAVNSIVALLSVDFHALEQDASKEQQLRHKLGGGSGESILVSQLQHGLTLEFEHSDSPRRLRLVLSELLAIMNKVSESNGEFFFKSSELFESPVYLEEAADVLCILQAELPSLLPIVDVAEALLHVRNGAWFLCLLVANVPDSFNEVCRGLIKNGERQDEESLGGRRRTDALRFLCKMNPSQALKVRGMVVEECHLPGLGVALTLDHTKNEACEDGVSDLVCFVSGLLLGTNAKVRTWFGTFIRNGQQVRVKYLYRLRIRIL

SEQ ID NO: 24712 - protein, 729 aa, Homo sapiens
MEPWSSRWKTKRWLWDFTVTTLALTFLFQAREVRGAAPVDVLKALDFHNSPEGISKTTGFCTNRKNSKGSDTAYRVSKQAQLSAPTKQLFPGGTFPEDFSILFTVKPKKGIQSFLLSIYNEHGIQQIGVEVGRSPVFLFEDHTGKPAPEDYPLFRTVNIADGKWHRVAISVEKKTVTMIVDCKKKTTKPLDRSERAIVDTNGITVFGTRILDEEVFEGDIQQFLITGDPKAAYDYCEHYSPDCDSSAPKAAQAQEPQIDEYAPEDIIEYDYEYGEAEYKEAESVTEGPTVTEETIAQTEANIVDDFQEYNYGTMESYQTEAPRHVSGTNEPNPVEEIFTEEYLTGEDYDSQRKNSEDTLYENKEIDGRDSDLLVDGDLGEYDFYEYKEYEDKPTSPPNEEFGPGVPAETDITETSINGHGAYGEKGQKGEPAVVEPGMLVEGPPGPAGPAGIMGPPGLQGPTGPPGDPGDRGPPGRPGLPGADGLPGPPGTMLMLPFRYGGDGSKGPTISAQEAQAQAILQQARIALRGPPGPMGLTGRPGPVGGPGSSGAKGESGDPGPQGPRGVQGPPGPTGKPGKRGRPGADGGRGMPGEPGAKGDRGFDGLPGLPGDKGHRGERGPQGPPGPPGDDGMRGEDGEIGPRGLPGEAGPRGLLGPRGTPGAPGQPGMAGVDGPPGPKGNMGPQGEPGPPGQQGNPGPQGLPGPQGPIGPPGEKMCCNLSFGILIPLQK

SEQ ID NO: 24713 - protein, 1075 aa, Homo sapiens
EFIMNEYKDRKITRTSFLDDAFRKNLESALRFGNPLLVQDVESYDPVLNPVLNREVRRTGGRVLITLGDQDIDLSPSFVIFLSTRDPTVEFPPDLCSRVTFVNFTVTRSSLQSQCLNEVLKAERPDVDEKRSDLLKLQGEFQLRLRQLEKSLLQALNEVKGRILDDDTIITTLENLKREAAEVTRKVEETDIVMQEVETVSQQYLPLSTACSSIYFTMESLKQIHFLYQYSLQFFLDIYHNVLYENPNLKGVTDHTQRLSIITKDLFQVAFNRVARGMLHQDHITFAMLLARIKLKGTVGEPTYDAEFQHFLRGNEIVLSAGSTPRIQGLTVEQAEAVVRLSCLPAFKDLIAKVQADEQFGIWLDSSSPEQTVPYLWSEETPATPIGQAIHRLLLIQAFRPDRLLAMAHMFVSTNLGESFMSIMEQPLDLTHIVGTEVKPNTPVLMCSVPGYDASGHVEDLAAEQNTQITSIAIGSAEGFNQADKAINTAVKSGRWVMLKNVHLAPGWLMQLEKKLHSLQPHACFRLFLTMEINPKVPVNLLRAGRIFVFEPPPGVKANMLRTFSSIPVSRICKSPNERARLYFLLAWFHAIIQERLRYAPLGWSKKYEFGESDLRSACDTVDTWLDDTAKGRQNISPDKIPWSALKTLMAQSIYGGRVDNEFDQRLLNTFLERLFTTRSFDSEFKLACKVDGHKDIQMPDGIRREEFVQWVELLPDTQTPSWLGLPNNAERVLLTTQGVDMISKMLKMQMLEDEDDLAYAETEKKTRTDSTSDGRPAWMRTLHTTASNWLHLIPQTLSHLKRTVENIKDPLFRFFEREVKMGAKLLQDVRQDLADVVQVCEGKKKQTNYLRTLINELVKGILPRSWSHYTVPAGMTVIQWVSDFSERIKQLQNISLAAASGGAKELKNIHVCLGGLFVPEAYITATRQYVAQANSWSLEELCLEVNVTTSQGATLDACSFGVTGLKLQGATCNNNKLSLSNAISTALPLTQLRWVKQTNTEKKASVVRRHCLSQAFCRDPCGNKGRGGSSSMPGFHLEREMRFTEEIHFAPVQTSPCRAPSAVPGSLPVFLLFP

SEQ ID NO: 24714 - protein, 500 aa, Homo sapiens
MQLPRWWELGDPCAWTGQGRGTRRMSPATTGTFLLTAFLLSCADGINGTVNWKTRQANNFIISRKMAAGMKDVYSIFSKVHSDRNVYPSAGVLFVHVLEREYFKGEFPPYPKPGEISNDPITFNTNLMGYPDRPGWLRYIQRTPYSDGVLYGSPTAENVGKPTIIEITAYNRRTFETARHNLIINIMSAEDFPLPYQAEFFIKNMNVEEMLASEVLGDFLGAVKNVWQPERLNAINITSALDRGGRVPLPINDLKEGVYVMVGADVPFSSCLREVENPQNQLRCSQEMEPVITCDKKFRTQFYIDWCKISLVDKTKQVSTYQEVIRGEGILPDGGEYKPPSDSLKSRDYYTDFLITLAVPSAVALVLFLILAYIMCCRREGVEKRNMQTPDIQLVHHSAIQKSTKELRDMSKNREIAWPLSTLPVFHPVTGEIIPPLHTDNYDSTNMPLMQTQQWSFAPVAQAGVQWSDLGSLQPPPPRFKNLPHQTQIPQQQTTGKWYP

SEQ ID NO: 24715 - protein, 301 aa, Homo sapiens
MAGKGIPGLEHLHAWISIPFCFAYTLALLGNCTLLFIIQADAALHEPMYLFLAMLATIDLVLSSTTLPKMLAIFWFRDQEINFFACLVQMFFLHSFSIMESAVLLAMAFDRYVAICKPLHYTTVLTGSLITKIGMAAVARAVTLMTPLPFLLRRFHYCRGPVIAHCYCEHMAVVRLACGDTSFNNIYGIAVAMFIVVLDLLFVILSYVFILQAVLQLASQEARYKAFGTCVSHIGAILSTYTPVVISSVMHRVARHAAPRVHILLAIFYLLFPPMVNPIIYGVKTKQIREYVLSLFQRKNM

SEQ ID NO: 24716 - protein, 611 aa, Homo sapiens
MSLAAYCVICCRRIGTSTSPPKSGTHWRDISSLFLTYEVLALKKAVTLDTQVVEREKMKSYIYVHTVSLDKGENHDPFSTVDIEDHECAVWLLLRKSKSDDKTTRLEAVREMSETHHWHDYQYRIIAQACDPKTLIGLARSEESDLRFFLLPPPLPSLKEDSSTEEELRQLLASLPQTELDECIQYFTSLALSESSQSLAAQKGGLWCFGGNGLPYAESFGEVPSATVEMFCLEAIVKHSEISTHCDKIEANGGLQLLQRLYRLHKDCPKVQRNIMRVIGNMALNEHLHSSIVRSGWVSIMAEAMKSPHIMESSHAARILANLDRETVQEKYQDGVYVLHPQYRTSQPIKADVLFIHGLMGAAFKTWRQQDSEQAVIEKPMEDEDRYTTCWPKTWLAKDCPALRIISVEYDTSLSDWRARCPMERKSIAFRSNELLRKLRAAGVGDRPVVWISHSMGGLLVKKMLLEASTKPEMSTVINNTRGIIFYSVPHHGSRLAEYSVNIRYLLFPSLEVKELSKDSPALKTLQDDFLEFAKDKNFQVLNFVETLPTYIGSMIKLHVVPVESADLGIGDLIPVDVNHLNICKPKKKDAFLYQRTLQFIREALAKDLEN

SEQ ID NO: 24717 - protein, 455 aa, Homo sapiens
AKAAKASNTSTPTKGNTETSASASQTNHVKDVKKIKIEHAPSPSSGGTLKNDKAKTKPPLQVTKVENNLIVDKATKKAVIVGKESKSAATKEESVSLKEKTKPLTPSIGAKEKEQHVALVTSTLPPLPLPPMLPEDKEADSLRGNISVKAVKKEVEKKLRCLLADLPLPPELPGGDDLSKSPEEKKTATQLHSKRRPKICGPRYGETKEKDIDWGKRCVDKFDIIGIIGEGTYGQVYKARDKDTGEMVALKKVRLDNEKEGFPITAIREIKILRQLTHQSIINMKEIVTDKEDALDFKKDKGAFYLVFEYMDHDLMGLLESGLVHFNENHIKSFMRQLMEGLDYCHKKNFLHRDIKCSNILLNNRGQIKLADFGLARLYSSEESRPYTNKVITLWYRPPELLLGEERYTPAIDVWSCGCILGELFTKKPIFQANQELAQLELIRHEENEVSDKQI

SEQ ID NO: 24718 - protein, 584 aa, Homo sapiens
MNQGSGLDLLKISYGKGARRKNRFKGSDGSTSSDTTSNSFVRQGSADSYTSRPSDSDVSLEEDREAVRREAERQAQAQLEKAKTKPVAFAVRTNVSYSAAHEDDVPVPGMAISFEAKDFLHVKEKFNNDWWIGRLVKEGCEIGFIPSPVKLENMRLQHEQRAKQGKFYSSKSGGNSSSSLGDIVPSSRKSTPPSSAKQKQKSTEHTPPYDVVPSMRPVVLVGPSLKGYEVTDMMQKALFDFLKHRFEGRISITRVTADISLAKRSVLNNPSKHAIIERSNTRSSLAEVQSEIERIFELARTLQLVVLDADTINHPAQLSKTSLAPIIVYVKISSPKVLQRLIKSRGKSQAKHLNVQMVAADKLAQCPPELFDVILDENQLEDACEHLADYLEAYWKATHPPSSSLPNPLLSRTLATSSLPLSPTLASNSQGSQGDQRTDRSAPIRSASQAEEEPSVEPVKKSQHRSSSSAPHHNHRSGTSRGLSRQETFDSETQESRDSAYVEPKEDYSHDHVDHYASHRDHNHRDETHGSSDHRHRESRHRSRDVDREQDHNECNKQRSRHKSKDRYCEKDGEVISKKRNEAG

SEQ ID NO: 24719 - protein, 655 aa, Homo sapiens
MHCKVSLLDDTVYECVVEKHAKGQDLLKRVCEHLNLLEEDYFGLAIWDNATSKTWLDSAKEIKKQVRGVPWNFTFNVKFYPPDPAQLTEDITRYYLCLQLRQDIVAGRLPCSFATLALLGSYTIQSELGDYDPELHGVDYVSDFKLAPNQTKELEEKVMELHKSYRSMTPAQADLEFLENAKKLSMYGVDLHKAKDLEGVDIILGVCSSGLLVYKDKLRINRFPWPKVLKISYKRSSFFIKIRPGEQEQYESTIGFKLPSYRAAKKLWKVCVEHHTFFRLTSTDTIPKSKFLALGSKFRYSGRTQAQTRQASALIDRPAPHFERTASKRASRSLDGAAAVDSADRSPRPTSAPAITQGQVAEGGVLDASAKKTVVPKAQKETVKAEVKKEDEPPEQAEPEPTEAWKVEKTHIEVTVPTSNGDQTQKLAEKTEDLIRMRKKKRERLDGENIYIRHSNLMLEDLDKSQEEIKKHHASISELKKNFMESVPEPRPSEWDKRLSTHSPFRTLNINGQIPTGEGPPLVKTQTVTISDNANAVKSEIPTKDVPIVHTETKTITYEAAQTDDNSGDLDPGVLLTAQTITSETPSSTTTTQITKTVKGGISETRIEKRIVITGDADIDHDQVLVQAIKEAKEQHPDMSVTKVVVHQETEIADE

SEQ ID NO: 24720 - protein, 608 aa, Homo sapiens
MTASPDYLVVLFGITAGATGAKLGSDEKELILLFWKVVDLANKKVGQLHEVLVRPDQLELTEDCKEETKIDVESLSSASQLDQALRQFNQSVSNELNIGVGTSFCLCTDGQLHVRQILHPEASKKNVLLPECFYSFFDLRKEFKKCCPGSPDIDKLDVATMTEYLNFEKSSSVSRYGASQVEDMGNIILAMISEPYNHRFSDPERVNYKFESGTCSKMELIDDNTVVRARGLPWQSSDQDIARFFKGLNIAKGGAALCLNAQGRRNGEALVRFVSEEHRDLALQRHKHHMGTRYIEVYKATGEDFLKIAGGTSNEVAQFLSKENQVIVRMRGLPFTATAEEVVAFFGQHCPITGGKEGILFVTYPDGRPTGDAFVLFACEEYAQNALRKHKDLLGKRYIELFRSTAAEVQQVLNRFSSAPLIPLPTPPIIPVLPQQFVPPTNVRDCIRLRGLPYAATIEDILDFLGEFATDIRTHGVHMVLNHQGRPSGDAFIQMKSADRAFMAAQKCHKKNMKDRYVEVFQCSAEEMNFVLMGGTLNRNGLSPPPCKLPCLSPPSYTFPAPAAVIPTEAAIYQPSVILNPRALQPSTAYYPAGTQLFMNYTAYYPSV

SEQ ID NO: 24721 - protein, 544 aa, Homo sapiens
MYEIYVETCGQNTENQVNPATFGKLVRLVFPDLGTRRLGTRGSARYHYDGICIKKSSFFYAQYCYLIGEKRYHSGDAIAFEKSTNYNSIIQQEATCEDHSPMKTDPVGSPLSEFRRCPFLEQEQAKKYSCNMMAFLADEYCNYCRDILRNVEDLLTSFWKSLQQDTVMLMSLPDVCQLFKCYDVQLYKGIEDVLLHDFLEDVSIQYLKSVQLFSKKFKLWLLNALEGVPALLQISKLKEVTLFVKRLRRKTYLSNMAKTMRMVLKSKRRVSVLKSDLQAIINQGTLATSKKALASDRSGADELENNPEMKCLRNLISLLGTSTDLRVFLSCLSSHLQAFVFQTSRSKEEFTKLAASFQLRWNLLLTAVSKAMTLCHRDSFGSWHLFHLLLLEYMIHILQSCLEEEEEEEDMGTVKEMLPDDPTLGQPDQALFHSLNSSLSQACASPSMEPLGVMPTHMGQGRYPVGVSNMVLRILGFLVDTAMGNKLIQVLLEDETTESAVKLSLPMGQEALITLKDGQQFVIQISDVPQSSEDIYFRENNANV

SEQ ID NO: 24722 - protein, 335 aa, Homo sapiens
MAQQRGSAAQCPSYTEPQNLTGVSEFLLLGLSEDPELQPVLAGLFLSMYLVTVLGNLLIILAVSSDSHLHTPMYFFLSNLSLADIGFTSTTVPKMIVDMQTHSRVISYEGCLTQMSFFVLFACMDDMLLSVMAYDRFVAICHPLHYRIIMNPRLCGFLILLSFFISLLDSQLHNLIMLQLTCFKDVDISNFFCDPSQLLHLRCSDTFINEMVIYFMGAIFGCLPISGILFSYYKIVSPILRVPTSDGKYKAFSTCGSHLAVVCLFYGTGLVGYLSSAVLPSPRKSMVASVMYTVVTPMLNPFIYSLRNKDIQSALCRLHGRIIKSHHLHPFCYMG

SEQ ID NO: 24723 - protein, 1483 aa, Homo sapiens
EGEEILEEVGGDLEEEDDHHMEFCRVCKDGGELLCCDTCPSSYHIHCLNPPLPEIPNGEWLCPRCTCPALKGKVQKILIWKWGQPPSPTPVPRPPDADPNTPSPKPLEGRPERQFFVKWQGMSYWHCSWVSELQLELHCQVMFRNYQRKNDMDEPPSGDFGGDEEKSRKRKNKDPKFAEMEERFYRYGIKPEWMMIHRILNHSVDKKGHVHYLIKWRDLPYDQASWESEDVEIQDYDLFKQSYWNHRELMRGEEGRPGKKLKKVKLRKLERPPETPTVDPTVKYERQPEYLDATGGTLHPYQMEGLNWLRFSWAQGTDTILADEMGLGKTVQTAVFLYSLYKEGHSKGPFLVSAPLSTIINWEREFEMWAPDMYVVTYVGDKDSRAIIRENEFSFEDNAIRGGKKASRMKKEASVKFHVLLTSYELITIDMAILGSIDWACLIVDEAHRLKNNQSKFFRVLNGYSLQHKLLLTGTPLQNNLEELFHLLNFLTPERFHNLEGFLEEFADIAKEDQIKKLHDMLGPHMLRRLKADVFKNMPSKTELIVRVELSPMQKKYYKYILTRNFEALNARGGGNQVSLLNVVMDLKKCCNHPYLFPVAAMEAPKMPNGMYDGSALIRASGKLLLLQKMLKNLKEGGHRVLIFSQMTKMLDLLEDFLEHEGYKYERIDGGITGNMRQEAIDRFNAPGAQQFCFLLSTRAGGLGINLATADTVIIYDSDWNPHNDIQAFSRAHRIGQNKKVMIYRFVTRASVEERITQVAKKKMMLTHLVVRPGLGSKTGSMSKQELDDILKFGTEELFKDEATDGGGDNKEGEDSSVIHYDDKAIERLLDRNQDETEDTELQGMNEYLSSFKVAQYVVREEEMGEEEVEREIIKQEESVDPDYWEKLLRHHYEQQQEDLARNLGKGKRIRKQVNYNDGSQEDRDWQDDQSDNQSDYSVASEEGDEDFDERSEAPRRPSRKGLRNDKDKPLPPLLARVGGNIEVLGFNARQRKAFLNAIMRYGMPPQDAFTTQWLVRDLRGKSEKEFKAYVSLFMRHLCEPGADGAETFADGVPREGLSRQHVLTRIGVMSLIRKKVQEFEHVNGRWSMPELAEVEENKKMSQPGSPSPKTPTPSTPGDTQPNTPAPVPPAEDGIKIEENSLKEEESIEGEKEVKSTAPETAIECTQAPAPASEDEKVVVEPPEGEEKVEKAEVKERTEEPMETEPKGAADVEKVEEKSAIDLTPIVVEDKEEKKEEEEKKEVMLQNGETPKDLNDEKQKKNIKQRFMFNIADGGFTELHSLWQNEERAATVTKKTYEIWHRRHDYWLLAGIINHGYARWQDIQNDPRYAILNEPFKGEMNRGNFLEIKNKFLARRFKLLEQALVIEEQLRRAAYLNMSEDPSHPSMALNTRFAEVECLAESHQHLSKESMAGNKPANAVLHKVLKQLEELLSDMKADVTRLPATIARIPPVAVRLQMSERNILSRLANRAPEPTPQQVAQQQ

SEQ ID NO: 24724 - protein, 515 aa, Homo sapiens
MAEGVPASPSSGEGSRGPHSGVIQWLVDNFCICEECSVPRCLMYEIYVETCGQNTENQVNPATFGKCEDHSPMKTDPVGSPLSEFRRCPFLEQEQAKKYSCNMMAFLADEYCNYCRDILRNVEDLLTSFWKSLQQDTVMLMSLPDVCQLFKCYDVQLYKGIEDVLLHDFLEDVSIQYLKSVQLFSKKFKLWLLNALEGVPALLQISKLKEVTLFVKRLRRKTYLSNMAKTMRMVLKSKRRVSVLKSDLQAIINQGTLATSKKALASDRSGADELENNPEMKCLRNLISLLGTSTDLRVFLSCLSSHLQAFVFQTSRSKEEFTKLAASFQLRWNLLLTAVSKAMTLCHRDSFGSWHLFHLLLLEYMIHILQSCLEEEEEEEDMGTVKEMLPDDPTLGQPDQALFHSLNSSLSQACASPSMEPLGVMPTHMGQGRYPVGVSNMVLRILGFLVDTAMGNKLIQVLLEDETTESAVKLSLPMGQEALITLKDGQQFVIQISDVPQSSEDIYFRENNANV

SEQ ID NO: 24725 - protein, 311 aa, Homo sapiens
MEVSNMTTVTVFILLGLSNNPQVQALLFVLFLVIYLLTLLGNLLMVLVISTDSHLCTPMYFFLRQLSFLDAFYSSIIVPKLLENLLSKGETISFLECFTQISLVIFSGATEACLLSVMAYDRFQAMCHPLLYVVIINRRVCAGLVGASWAIGMGTGLINTLLLAQQHFCGPNVIHSFACELPPVLLLTCSDPCASIVSILTTMSVLGLGTLVLLLGSYSCIIMTALRINSATGRSKIFSTCSSHFLVVTIFYTSGVLRYMIPASGSALEQVLSVQYSVITPLLNPLIYSLKSQEVKVALRRMLARKSRLPL

SEQ ID NO: 24726 - protein, 335 aa, Homo sapiens
MDNARMNSFLEYPILSSGDSGTCSARAYPSDHRITTFQSCAVSANSCGGDDRFLVGRGVQIGSPHHHHHHHHRHPQPATYQTSGNLGVSYSHSSCGPSYGSQNFSAPYSPYALNQEADVSGGYPQCAPAVYSGNLSSPMVQHHHHHQGYAGGAVGSPQYIHHSYGQEHQSLALATYNNSLSPLHASHQEACRSPASETSSPAQTFDWMKVKRNPPKTGKVGEYGYLGQPNAVRTNFTTKQLTELEKEFHFNKYLTRARRVEIAASLQLNETQVKIWFQNRRMKQKKREKEGLLPISPATPPGNDEKAEESSEKSSSSPCVPSPGSSTSDTLTTSH

SEQ ID NO: 24727 - protein, 715 aa, Homo sapiens
MATQADLMELDMAMEPDRKAAVSHWQQQSYLDSGIHSGATTTAPSLSGKGNPEEEDVDTSQVLYEWEQGFSQSFTQEQVADIDGQYAMTRAQRVRAAMFPETLDEGMQIPSTQFDAAHPTNVQRLAEPSQMLKHAVVNLINYQDDAELATRAIPELTKLLNDEDQVVVNKAAVMVHQLSKKEASRHAIMRSPQMVSAIVRTMQNTNDVETARCTAGTLHNLSHHREGLLAIFKSGGIPALVKMLGSPVDSVLFYAITTLHNLLLHQEGAKMAVRLAGGLQKMVALLNKTNVKFLAITTDCLQILAYGNQESKLIILASGGPQALVNIMRTYTYEKLLWTTSRVLKVLSVCSSNKPAIVEAGGMQALGLHLTDPSQRLVQNCLWTLRNLSDAATKQEGMEGLLGTLVQLLGSDDINVVTCAAGILSNLTCNNYKNKMMVCQVGGIEALVRTVLRAGDREDITEPAICALRHLTSRHQEAEMAQNAVRLHYGLPVVVKLLHPPSHWPLIKATVGLIRNLALCPANHAPLREQGAIPRLVQLLVRAHQDTQRRTSMGGTQQQFVEGVRMEEIVEGCTGALHILARDVHNRIVIRGLNTIPLFVQLLYSPIENIQRVAAGVLCELAQDKEAAEAIEAEGATAPLTELLHSRNEGVATYAAAVLFRMSEDKPQDYKKRLSVELTSSLFRTEPMAWNETADLGLDIGAQGEPLGYRQDEDS

SEQ ID NO: 24728 - protein, 1047 aa, Homo sapiens
MQFFDAEELLVDEEDDVFGEGLPTRLPEIMLVGSQSFSPGGPNGIIRSQSFAGFSGLQERRSRCNSFIENSSALKKPQAKLKKMHNLGHKNNNPPKEPQPKRVEEVYRALKNGLDEYLEVHQTELDKLTAQLKDMKRNSRLGVLYDLDKQIKTIERYMRRLEFHISKVDELYEAYCIQRRLQDGASKMKQAFATSPASKAARESLTEINRSFKEYTENMCTIEVELENLLGEFSIKMKGLAGFARLCPGDQYEIFMKYGRQRWKLKGKIEVNGKQSWDGEETVFLPLIVGFISIKVTELKGLATHILVGSVTCETKELFAARPQVVAVDINDLGTIKLNLEITWYPFDVEDMTASSGAGNKAAALQRRMSMYSQGTPETPTFKDHSFFSNLPDDIFENGKAAEEKMPLSLSFSDLPNGDCALTSHSTGSPSNSTNPEITITPAEFNLSSLASQNEGMDDTSSASSRNSLGEGQEPKSHLKEEDPEEPRKPASAPSEACRRQSSGAGAEHLFLENDVAEALLQESEEASELKPVELDTSEGNITKQLVKRLTSAEVPMATDRLLSEGSVGGESEGCRSFLDGSLEDAFNGLLLALEPHKEQYKEFQDLNQEVMNLDDILKCKPAVSRSRSSSLSLTVESALESFDFLNTSDFDEEEDGDEVCNVGGGADSVFSDTETEKHSYRSVHPEARGHLSEALTEDTGVGTSVAGSPLPLTTGNESLDITIVRHLQYCTQLVQQIVFSSKTPFVARSLLEKLSRQIQVMEKLAAVSDENIGNISSVVEAIPEFHKKLSLLSFWTKCCSPVGVYHSPADRVMKQLEASFARTVNKEYPGLADPVFRTLVSQILDRAEPLLSSSLSSEVVTVFQYYSYFTSHGVSDLESYLSQLARQVSMVQTLQSLRDEKLLQTMSDLAPSNLLAQQEVLRTLALLLTREDNEVSEAVTLYLAAASKNQHFREKALLYYCEALTKTNLQLQKAACLALKILEATESIKMLVTLCQSDTEEIRNVASETLLSLGEDGRLAYEQLDKFPRDCVKVGGRHGTEVATAF

SEQ ID NO: 24729 - protein, 375 aa, Homo sapiens
MDDDIAALVVDNGSGMCKAGFAGDDAPRAVFPSIVGRPRHQGVMVGMGQKDSYVGDEAQSKRGILTLKYPIEHGIVTNWDDMEKIWHHTFYNELRVAPEEHPVLLTEAPLNPKANREKMTQIMFETFNTPAMYVAIQAVLSLYASGRTTGIVMDSGDGVTHTVPIYEGYALPHAILRLDLAGRDLTDYLMKILTERGYSFTTTAEREIVRDIKEKLCYVALDFEQEMATAASSSSLEKSYELPDGQVITIGNERFRCPEALFQPSFLGMESCGIHETTFNSIMKCDVDIRKDLYANTVLSGGTTMYPGIADRMQKEITALAPSTMKIKIIAPPERKYSVWIGGSILASLSTFQQMWISKQEYDESGPSIVHRKCF

SEQ ID NO: 24730 - protein, 569 aa, Homo sapiens
MWRLRRAAVACEVCQSLVKHSSGIKGSLPLQKLHLVSRSIYHSHHPTLKLQRPQLRTSFQQFSSLTNLPLRKLKFSPIKYGYQPRRNFWPARLATRLLKLRYLILGSAVGGGYTAKKTFDQWKDMIPDLSEYKWIVPDIVWEIDEYIDFEKIRKALPSSEDLVKLAPDFDKIVESLSLLKDFFTSGSPEETAFRATDRGSESDKHFRKVSDKEKIDQLQEELLHTQLKYQRILERLEKENKELRKLVLQKDDKGIHHRKLKKSLIDMYSEVLDVLSDYDASYNTQDHLPRVVVVGDQSAGKTSVLEMIAQARIFPRGSGEMMTRSPVKVTLSEGPHHVALFKDSSREFDLTKEEDLAALRHEIELRMRKNVKEGCTVSPETISLNVKGPGLQRMVLVDLPGVINTVTSGMAPDTKETIFSISKAYMQNPNAIILCIQDGSVDAERSIVTDLVSQMDPHGRRTIFVLTKVDLAEKNVASPSRIQQIIEGKLFPMKALGYFAVVTGKGNSSESIEAIREYEEEFFQNSKLLKTSMLKAHQVTTRNLSLAVSDCFWKMVRESVEQQADSFKE

SEQ ID NO: 24731 - protein, 673 aa, Homo sapiens
MIDSVKLRRDSAADFFSHYEYLCALQNSVPLPAVRACLREGVLDFNADRLRGVDWAPLLSTLKINKDLPLVSIKSFFQPWLGDTGSDMNKFCRSRVPAIRYKDVTFQLCKALKGCLSISSVLKNLELNGLILRERDLTILAKGLNKSASLVHLSLANCPIGDGGLEIICQGIKSSITLKTVNFTGCNLTWQGADHMAKILKYQTMRRHEETWAESLRYRRPDLDCMAGLRRITLNCNTLIGDLGACAFADSLSEDLWLRDHSMMKAVIKKVLQNGRSAKSEYQWITSPSVKEPSKTAKQKRRTIILGSGHKGKATIRIVIWRHRGLATKKPVSSGRKHSLGKEYYAPAPLPPGVSGFLPWRTAERAKRHRGFPLIKTRDICNQLQQPGFPVTVTVESPSSSEVEEVDDSSESVHEVPEKTSIEQEALQEKLEECLKQLKEERVIRLKVDKRVSELEHENAQLRNINFSLSEALHAQSLTNMILDDEGVLGSIENSFQKFHAFLDLLKDAGLGQLATMAGIDQSDFQLLGHPQMTSTVSNPPKEEKKALEDEKPEPKQNALGQMQNIQVSICMQSAYNEGTLMKFQKITGDARIPLPLDSFPVPVSTPEGLGTSSNNLGVPATEQRQESFEGFIARMCSPSPDATSGTGSQRKEEELSRNSRSSSEKKTKTESH

SEQ ID NO: 24732 - protein, 1882 aa, Homo sapiens
MPENPATDKLQVLQVLDRLKMKLQEKGDTSQNEKLSMFYETLKSPLFNQILTLQQSIKQLKGQLNHIPSDCSANFDFSRKGLLVFTDGSITNGNVHRPSNNSTVSGLFPWTPKLGNEDFNSVIQQMAQGRQIEYIDIERPSTGGLGFSVVALRSQNLGKVDIFVKDVQPGSVADRDQRLKENDQILAINHTPLDQNISHQQAIALLQQTTGSLRLIVAREPVHTKSSTSSSLNDTTLPETVCWGHVEEVELINDGSGLGFGIVGGKTSGVVVRTIVPGGLADRDGRLQTGDHILKIGGTNVQGMTSEQVAQVLRNCGNSVRMLVARDPAGDISVTPPAPAALPVALPTVASKGPGSDSSLFETYNVELVRKDGQSLGIRIVGYVGTSHTGEASGIYVKSIIPGSAAYHNGHIQVNDKIVAVDGVNIQGFANHDVVEVLRNAGQVVHLTLVRRKTSSSTSPLEPPSDRGTVVEPLKPPALFLTGAVETETNVDGEDEEIKERIDTLKNDNIQALEKLEKVPDSPENELKSRWENLLGPDYEVMVATLDTQIADDAELQKYSKLLPIHTLRLGVEVDSFDGHHYISSIVSGGPVDTLGLLQPEDELLEVNGMQLYGKSRREAVSFLKEVPPPFTLVCCRRLFDDEASVDEPRRTETSLPETEVDHNMDVNTEEDDDGELALWSPEVKIVELVKDCKGLGFSILDYQDPLDPTRSVIVIRSLVADGVAERSGGLLPGDRLVSVNEYCLDNTSLAEAVEILKAVPPGLVHLGICKPLVEDNEEESCYILHSSSNEDKTEFSGTIHDINSSLILEAPKGFRDEPYFKEELVDEPFLDLGKSFHSQQKEIEQSKEAWEMHEFLTPRLQEMDEEREILVDEEYELYQDPSPSMELYPLSHIQEATPVPSVNELHFGTQWLHDNEPSESQEARTGRTVYSQEAQPYGYCPENVMKENFVMESLPSVPSTEGNSQQGRFDDLENLNSLAKTSLDLGMIPNDVQGPSLLIDLPVVAQRREQEDLPLYQHQATRVISKASAYTGMLSSRYATDTCELPEREEGEGEETPNFSHWGPPRIVEIFREPNVSLGISIVGGQTVIKRLKNGEELKGIFIKQVLEDSPAGKTNALKTGDKILEVSGVDLQNASHSEAVEAIKNAGNPVVFIVQSLSSTPRVIPNVHNKANKITGNQNQDTQEKKEKRQGTAPPPMKLPPPYKALTDDSDENEEEDAFTDQKIRQRYADLPGELHIIELEKDKNGLGLSLAGNKDRSRMSIFVVGINPEGPAAADGRMRIGDELLEINNQILYGRSHQNASAIIKTAPSKVKLVFIRNEDAVNQMAVTPFPVPSSSPSSIEDQSGTEPISSEEDGSVEVGIKQLPESESFKLAVSQMKQQKYPTKVSFSSQEIPLAPASSYHSTDADFTGYGGFQAPLSVDPATCPIVPGQEMIIEISKGRSGLGLSIVGGKDTPLNAIVIHEVYEEGAAARDGRLWAGDQILEVNGVDLRNSSHEEAITALRQTPQKVRLVVYRDEAHYRDEENLEIFPVDLQKKAGRGLGLSIVGKRNGSGVFISDIVKGGAADLDGRLIQGDQILSVNGEDMRNASQETVATILKCAQGLVQLEIGRLRAGSWTSARTTSQNSQGSQQSAHSSCHPSFAPVITGLQNLVGTKRVSDPSQKNSGTDMEPRTVEINRELSDALGISIAGGRGSPLGDIPVFIAMIQASGVAARTQKLKVGDRIVSINGQPLDGLSHADVVNLLKNAYGRIILQVVADTNISAIAAQLENMSTGYHLGSPTAEHHPEDTETPPPKIITLEKGSEGLGFSIVGGYGSPHGDLPIYVKTVFAKGAAADDGRLKRGDQILAVNGETLEGVTHEQAVAILKHQRGTVTLTVLS

SEQ ID NO: 24733 - protein, 513 aa, Homo sapiens
MGPLTFTDVAIKFSLEEWQFLDTAQQNLYRDVMLENYRNLVFLGVGVSKPDLITCLEQGKEPWNMKRHKMVAKPPVVCSHFAQDLWPEQGIKDSFQKVILRSYGKYGHDNLQLRKGCESVDECKMHKGGYDELKQCLTTTPSKIFQCDKYVKVFHKFSSSNSQKIRHTGNNSFKCKECGKSFCMLSHLTKHERNHTRVNCYKCEECGKAFSVPSKLNNHKRIHTGEKPYKCEECGKAFNVSSSLNNHKRIHTGEKPYKCEECGKTFNMFSSLNNHKRIHTGEKPYKCKECGKAFNVFSSLNNHKRIHTGEKPYKCEECGKAFNQPSHLATHKRIHTGEKLYKCEECGKAFSQSSHITTHKRIHTGEKPYKCEECGKAFKVSVHLTTHKRIHTGEKPYKCEECGKAFNQSSALTTHKIIHTGERPYKCKQCGKGFSQSSTLTKHKIIHTKEKPYKCEECGKAFNQYSTLNKHKIIHAREKPYKCEECGKAFNKSSILNRHKIIHTKEKSQTLKM

SEQ ID NO: 24734 - protein, 382 aa, Homo sapiens
MDFTLRRKDVWVVGSVCLLSSSVLWCLIRFVMTRGGHWQTPALEDVQAKEVWSNADLTERMPVKSKRTSALAVDIPAPPAPFDHRIVTAKQGAVNSFYTVSKTEILGGGRFGQVHKCEETATGLKLAAKIIKTRGMKDKEEVKNEISVMNQLDHANLIQLYDAFESKNDIVLVMEYVDGGELFDRIIDESYNLTELDTILFMKQICEGIRHMHQMYILHLDLKPENILCVNRDAKQIKIIDFGLARRYKPREKLKVNFGTPEFLAPEVVNYDFVSFPTDMWSVGVIAYMLLSGLSPFLGDNDAETLNNILACRWDLEDEEFQDISEEAKEFISKLLIKEKSWRISASEALKHPWLSDHKLHSRLNAQKKKNRGSDAQDFVTK

SEQ ID NO: 24735 - protein, 1216 aa, Homo sapiens
MAAMAPGGSGSGGGVNPFLSDSDEDDDEVAATEERRAVLRLGAGSGLDPGSAGSLSPQDPVALGSSARPGLPGEASAAAVALGGTGETPARLSIDAIAAQLLRDQYLLTALELHTELLESGRELPRLRDYFSNPGNFERQSGTPPGMGAPGVPGAAGVGGAGGREPSTASGGGQLNRAGSISTLDSLDFARYSDDGNRETDEKVAVLEFELRKAKETIQALRANLTKAAEHEVPLQERKNYKSSPEIQEPIKPLEKRALNFLVNEFLLKNNYKLTSITFSDENDDQDFELWDDVGLNIPKPPDLLQLYRDFGNHQVTGKDLVDVASGVEEDELEALTPIISNLPPTLETPQPAENSMLVQKLEDKISLLNSEKWSLMEQIRRLKSEMDFLKNEHFAIPAVCDSVQPPLDQLPHKDSEDSGQHPDVNSSDKGKNTDIHLSISDEADSTIPKENSPNSFPRREREGMPPSSLSSKKTVHFDKPNRKLSPAFHQALLSFCRMSADSRLGYEVSRIADSEKSVMLMLGRCLPHIVPNVLLAKREELIPLILCTACLHPEPKERDQLLHILFNLIKRPDDEQRQMILTGCVAFARHVGPTRVEAELLPQCWEQINHKYPERRLLVAESCGALAPYLPKEIRSSLVLSMLQQMLMEDKADLVREAVIKSLGIIMGYIDDPDKYHQGFELLLSALGDPSERVVSATHQVFLPAYAAWTTELGNLQSHLILTLLNKIEKLLREGEHGLDEHKLHMYLSALQSLIPSLFALVLQNAPFSSKAKLHGEVPQIEVTRFPRPMSPLQDVSTIIGSREQLAVLLQLYDYQLEQEGTTGWESLLWVVNQLLPQLIEIVGKINVTSTACVHEFSRFFWRLCRTFGKIFTNTKVKPQFQEILRLSEENIDSSAGNGVLTKATVPIYATGVLTCYIQEEDRKLLVGFLEDVMTLLSLSHAPLDSLKASFVELGANPAYHELLLTVLWYGVVHTSALVRCTAARMFELLVKGVNETLVAQRVVPALITLSSDPEISVRIATIPAFGTIMETVIQRELLERVKMQLASFLEDPQYQDQHSLHTEIIKTFGRVGPNAEPRFRDEFVIPHLHKLALVNNLQIVDSKRLDIATHLFEAYSALSCCFISEDLMVNHFLPGLRCLRTDMEHLSPEHEVILSSMIKECEQKVENKTVQEPQGSMSIAASLVSEDTKTKFLNKMGQLTTSGAMLANVFQRKK

SEQ ID NO: 24736 - protein, 473 aa, Homo sapiens
MQLPRWWELGDPCAWTGQGRGTRRMSPATTGTFLLTVYSIFSKVHSDRNVYPSAGVLFVHVLEREYFKGEFPPYPKPGEISNDPITFNTNLMGYPDRPGWLRYIQRTPYSDGVLYGSPTAENVGKPTIIECHLQLQSLPEALSSHCPEKEYFITAYNRRTFETARHNLIINIMSAEDFPLPYQAEFFIKNMNVEEMLASEVLGDFLGAVKNVWQPERLNAINITSALDRGGRVPLPINDLKEGVYVMVGADVPFSSCLREVENPQNQLRCSQEMEPVITCDKKFRTQFYIDWCKISLVDKTKQVSTYQEVIRGEGILPDGGEYKPPSDSLKSRDYYTDFLITLAVPSAVALVLFLILAYIMCCRREGVIQLVHHSAIQKSTKELRDMSKNREIAWPLSTLPVFHPVTGEIIPPLHTDNYDSTNMPLMQTQQNLPHQTQIPQQQTTGDFRLTTFQRFEVNGIPEERKLTEAMNL

SEQ ID NO: 24737 - protein, 1603 aa, Homo sapiens
MPLAFCGSENHSAAYRVDQGVLNNGCFVDALNVVPHVFLLFITFPILFIGWGSQSSKVHIHHSTWLHFPGHNLRWILTFMLLFVLVCEIAEGILSDGVTESHHLHLYMPAGMAFMAAVTSVVYYHNIETSNFPKLLIALLVYWTLAFITKTIKFVKFLDHAIGFSQLRFCLTGLLVILYGMLLLVEVNVIRVRRYIFFKTPREVKPPEDLQDLGVRFLQPFVNLLSKGTYWWMNAFIKTAHKKPIDLRAIGKLPIAMRALTNYQRLCEAFDAQVRKDIQGTQGARAIWQALSHAFGRRLVLSSTFRILADLLGFAGPLCIFGIVDHLGKENDVFQPKTQFLGVYFVSSQEFLANAYVLAVLLFLALLLQRTFLQASYYVAIETGINLRGAIQTKIYNKIMHLSTSNLSMGEMTAGQICNLVAIDTNQLMWFFFLCPNLWAMPVQIIVGVILLYYILGVSALIGAAVIILLAPVQYFVATKLSQAQRSTLEYSNERLKQTNEMLRGIKLLKLYAWENIFRTRVETTRRKEMTSLRAFAIYTSISIFMNTAIPIAAVLITFVGHVSFFKEADFSPSVAFASLSLFHILVTPLFLLSSVVRSTVKALVSVQKLSEFLSSAEIREEQCAPHEPTPQGPASKYQAVEEGLPSLHSSQPSGSSPPNHPQPLRVVNRKRPAREDCRGLTGPLQSLVPSADGDADNCCVQIMGGYFTWTPDGIPTLSNITIRIPRGQLTMIVGQVGCGKSSLLLAALGEMQKVSGAVFWSSLPDSEIGEDPSPERETATDLDIRKRGPVAYASQKPWLLNATVEENIIFESPFNKQRYKMVIEACSLQPDIDILPHGDQTQIGERGINLSGGQRQRISVARALYQHANVVFLDDPFSALDIHLSDHLMQAGILELLRDDKRTVVLVTHKLQYLPHADWIIAMKDGTIQREGTLKDFQRSECQLFEHWKTLMNRQDQELEKETVTERKATEPPQGLSRAMSSRDGLLQDEEEEEEEAAESEEDDNLSSMLHQRAEIPWRACAKYLSSAGILLLSLLVFSQLLKHMVLVAIDYWLAKWTDSALTLTPAARNCSLSQECTLDQTVYAMVFTVLCSLGIVLCLVTSVTVEWTGLKVAKRLHRSLLNRIILAPMRFFETTPLGSILNRFSSDCNTIDQHIPSTLECLSRSTLLCVSALAVISYVTPVFLVALLPLAIVCYFIQKYFRVASRDLQQLDDTTQLPLLSHFAETVEGLTTIRAFRYEARFQQKLLEYTDSNNIASLFLTAANRWLEVRMEYIGACVVLIAAVTSISNSLHRELSAGLVGLGLTYALMVSNYLNWMVRNLADMELQLGAVKRIHGLLKTEAESYEGLLAPSLIPKNWPDQGKIQIQNLSVRYDSSLKPVLKHVNALIAPGQKIGICGRTGSGKSSFSLAFFRMVDTFEGHIIIDGIDIAKLPLHTLRSRLSIILQDPVLFSGTIRFNLDPERKCSDSTLWEALEIAQLKLVVKALPGGLDAIITEGGENFSQGQRQLFCLARAFVRKTSIFIMDEATASIDMATENILQKVVMTAFADRTVVTIAHRVHTILSADLVIVLKRGAILEFDKPEKLLSRKDSVFASFVRADK

SEQ ID NO: 24738 - protein, 672 aa, Homo sapiens
KADHVDLATLMIDFNGEEKAWAMAVWIFAAINRRDLYEKAKRDEPKWGSDNARVSNPTVICQEDSIEEEWMGLLEYLSRISICKMKKDYRKKYRKYVRSRFQCIEDRNARLGESVSLNKRYTRLRLIKEHRSQQEREQELLAIGKTKTCESPVSPIKMELLFDPDDEHSEPVHTVVFQGAAGIGKTILARKMMLDWASGTLYQDRFDYLFYIHCREVSLVTQRSLGDLIMSCCPDPNPPIHKIVRKPSRILFLMDGFDELQGAFDEHIGPLCTDWQKAERGDILLSSLIRKKLLPEASLLITTRPVALEKLQHLLDHPRHVEILGFSEAKRKEYFFKYFSDEAQARAAFSLIQENEVLFTMCFIPLVCWIVCTGLKQQMESGKSLAQTSKTTTAVYVFFLSSLLQPRGGSQEHGLCAHLWGLCSLAADGIWNQKILFEESDLRNHGLQKADVSAFLRMNLFQKEVDCEKFYSFIHMTFQEFFAAMYYLLEEEKEGRTNVPGSRLKLPSRDVTVLLENYGKFEKGYLIFVVRFLFGLVNQERTSYLEKKLSCKISQQIRLELLKWIEVKAKAKKLQIQPSQLELFYCLYEMQEEDFVQRAMDYFPKIEINLSTRMDHMVSSFCIENCHRVESLSLGFLHNMPKEEEEEEKEGRHLDMVQCVLPSSSHAACSHG

SEQ ID NO: 24739 - protein, 433 aa, Homo sapiens
MRFTFPLMAIVLEIAMIVLFGLFVEYETDQTVLEQLNITKPTDMGIFFELYPLFQDVHVMIFVGFGFLMTFLKKYGFSSVGINLLVAALGLQWGTIVQGILQSQGQKFNIGIKNMINADFSAATVLISFGAVLGKTSPTQMLIMTILEIVFFAHNEYLVSEIFKASDIGASMTIHAFGAYFGLAVAGILYRSGLRKGHENEESAYYSDLFAMIGTLFLWMFWPSFNSAIAEPGDKQCRAIVNTYFSLAACVLTAFAFSSLVEHRGKLNMVHIQNATLAGGVAVGTCADMAIHPFGSMIIGSIAGMVSVLGYKFLTPLFTTKLRIHDTCGVHNLHGLPGVVGGLAGIVAVAMGASNTSMAMQAAALGSSIGTAVVGGLMTGLILKLPLWGQPSDQNCYDDSVYWKVLYSILNKNVNDDSISESFTHFKPRYLCA

SEQ ID NO: 24740 - protein, 250 aa, Homo sapiens
VMIAILALGKLLEPLQKSVLAAVVIANLKGMFMQLCDIPRLWRQNKIDAVIWVFTCIVSIILGLDLGLLAGLIFGLLTVVLRVQFPSWNGLGSIPSTDIYKSTKNYKNIEEPQGVKILRFSSPIFYGNVDGFKKCIKSTVGFDAIRVYNKRLKALRKIQKLIKSGQLRATKNGIISDAVSTNNAFEPDEDIEDLEELDIPTKEIEIQVDWNSELPVKVNVPKVPIHSLVLDCGAISFLDVVGVRSLRVIM

SEQ ID NO: 24741 - protein, 1555 aa, Homo sapiens
KFDDSLVHINIFLVDKKHPEFSSSYNRVNRSIDVDFNCLDVLITLQTWVVILDFFGIGSTADNHAMRLPPEGILHNVKLEPHASMESGLQDPVNTKLDLKVHSLSLVLNKTTSELAKANVSKLVAHLEMIEGDLALQGSIGSLSLSDLTCHGEFYRERFTTSGEEALIFQTFKYGRPDPLLRREHDIRVSLRMASVQYVHTQRFQAEVVAFIQHFTQLQDVLGRQRAAIEGQTVRDQAQRCSRVLLDIEAGAPVLLIPESSRSNNLIVANLGKLKVKNKFLFAGFPGTFSLQDKESVPSASPTGIPKHSLRKTTSTEEPRGTHSQGQFTMPLAGMSLGSLKSEFVPSTSTKQQGPQPTLSVGQESSSPEDHVCLLDCVVVDLQDMDIFAAERHPREYSKAPEDSSGDLIFPSYFVRQTGGSLLTEPCRLKLQVERNLDKEISHTVPDISIHGNLSSVHCSLDLYKYKLIRGLLENNLGEPIEEFMRPYDLQDPRIHTVLSGEVYTCMCFLIDMVNVSLELKDPKRKEGAGSLARFDFKKCKLLYESFSNQTKSINLVSHSMMAFDTRYAGQKTSPGMTNVFSCIFQPAKNSSTTQGSIQIELHFRSTKDSSCFTVVLNNLRVFLIFDWLLLVHDFLHTPSDIKKQNHVTPSRHRNSSSESAIVPKTVKSGVVTKRSSLPVSNERHLEVKVNVTGTEFVVIEDVSCFDTNAIILKGTTVLTYKPRFVDRPFSGSLFGIEVFSCRLGNEHDTALSIVDPVQIQMELVGNSSYQNSSGLMDAFNSEDFPPVLEIQLQALDIRLSYNDVQLFLAIAKSIPEQANAAVPDSVALESDSVGTYLPGASRVGEEIREGTRHTLDPVLELQLARLQELGFSMDDCRKALLACQGQLKKAASWLFKNAEPLKSLSLASTSRDSPGAVAAPLISGVEIKAESVCICFIDDCMDCDVPLAELTFSRLNFLQRVRTSPEGYAHFTLSGDYYNRALSGWEPFIEPWPCSVSWQQQAASRLHPPRLKLEAKAKPRLDINITSVLIDQYVSTKESWMADYCKDDKDIESAKSEDWMGSSVDPPCFGQSLPLVYLRTRSTASLTNLEHQIYAREVKTPKRRQPFVPFALRNHTGCTLWFATLTTTPTRAALSHSGSPGVVPEGNGTFLDDTHNVSEWREVLTGEEIPFEFEARGKLRHRHTHDLRIHQLQVRVNGWEQVSPVSVDKVGTFFRYAAPDKNSSSSTIGSPSSRTNIIHPQVYFSSLPPVRVVFAVTMEGSARKVITVRSALIVRNRLETPMELRLDSPSAPDKPVVLPAIMPGDSFAVPLHLTSWRLQARPKGLGVFFCKAPIHWTNVVKTAEISSSKRECHSMDTEKSRFFRFCVAIKKENYPDYMPSNIFSDSAKQIFRQPGHTIYLLPTVVICNLLPCELDFYVKGMPINGTLKPGKEAALHTADTSQNIELGVSLENFPLCKELLIPPGTQNYMVRMRLYDVNRRQLNLTIRIVCRAEGSLKIFISAPYWLINKTGLPLIFRQDNAKTDAAGQFEEHELARSLSPLLFCYADKEQPNLY

SEQ ID NO: 24742 - protein, 454 aa, Homo sapiens
MQLPRWWELGDPCAWTGQGRGTRRMSPATTGTFLLTVYSIFSKVHSDRNVYPSAGVLFVHVLEREYFKGEFPPYPKPGEISNDPITFNTNLMGYPDRPGWLRYIQRTPYSDGVLYGSPTAENVGKPTIIEITAYNRRTFETARHNLIINIMSAEDFPLPYQAEFFIKNMNVEEMLASEVLGDFLGAVKNVWQPERLNAINITSALDRGGRVPLPINDLKEGVYVMVGADVPFSSCLREVENPQNQLRCSQEMEPVITCDKKFRTQFYIDWCKISLVDKTKQVSTYQEVIRGEGILPDGGEYKPPSDSLKSRDYYTDFLITLAVPSAVALVLFLILAYIMCCRREGVEKRNMQTPDIQLVHHSAIQKSTKELRDMSKNREIAWPLSTLPVFHPVTGEIIPPLHTDNYDSTNMPLMQTQQWSFAPVAQAGVQWSDLGSLQPPPPRDGVSPCWPGWS

SEQ ID NO: 24743 - protein, 1646 aa, Homo sapiens
MSTPDPPLGGTPRPGPSPGPGPSPGAMLGPSPGPSPGSAHSMMGPSPGPPSAGHPIPTQGPGGYPQDNMHQMHKPMESMHEKGMSDDPRYNQMKGMGMRSGGHAGMGPPPSPMDQHSQGYPSPLGGSEHASSPVPASGPSSGPQMSSGPGGAPLDGADPQALGQQNRGPTPFNQNQLHQLRAQIMAYKMLARGQPLPDHLQMAVQGKRPMPGMQQQMPTLPPPSVSATGPGPGPGPGPGPGPGPAPPNYSRPHGMGGPNMPPPGPSGVPPGMPGQPPGGPPKPWPEGPMANAAAPTSTPQKLIPPQPTGRPSPAPPAVPPAASPVMPPQTQSPGQPAQPAPMVPLHQKQSRITPIQKPRGLDPVEILQEREYRLQARIAHRIQELENLPGSLAGDLRTKATIELKALRLLNFQRQLRQEVVVCMRRDTALETALNAKAYKRSKRQSLREARITEKLEKQQKIEQERKRRQKHQEYLNSILQHAKDFKEYHRSVTGKIQKLTKAVATYHANTEREQKKENERIEKERMRRLMAEDEEGYRKLIDQKKDKRLAYLLQQTDEYVANLTELVRQHKAAQVAKEKKKKKKKKKAENAEGQTPAIGPDGEPLDETSQMSDLPVKVIHVESGKILTGTDAPKAGQLEAWLEMNPGYEVAPRSDSEESGSEEEEEEEEEEQPQAAQPPTLPVEEKKKIPDPDSDDVSEVDARHIIENAKQDVDDEYGVSQALARGLQSYYAVAHAVTERVDKQSALMVNGVLKQYQIKGLEWLVSLYNNNLNGILADEMGLGKTIQTIALITYLMEHKRINGPFLIIVPLSTLSNWAYEFDKWAPSVVKVSYKGSPAARRAFVPQLRSGKFNVLLTTYEYIIKDKHILAKIRWKYMIVDEGHRMKNHHCKLTQVLNTHYVAPRRLLLTGTPLQNKLPELWALLNFLLPTIFKSCSTFEQWFNAPFAMTGEKVDLNEEETILIIRRLHKVLRPFLLRRLKKEVEAQLPEKVEYVIKCDMSALQRVLYRHMQAKGVLLTDGSEKDKKGKGGTKTLMNTIMQLRKICNHPYMFQHIEESFSEHLGFTGGIVQGLDLYRASGKFELLDRILPKLRATNHKVLLFCQMTSLMTIMEDYFAYRGFKYLRLDGTTKAEDRGMLLKTFNEPGSEYFIFLLSTRAGGLGLNLQSADTVIIFDSDWNPHQDLQAQDRAHRIGQQNEVRVLRLCTVNSVEEKILAAAKYKLNVDQKVIQAGMFDQKSSSHERRAFLQAILEHEEQDEEEDEVPDDETVNQMIARHEEEFDLFMRMDLDRRREEARNPKRKPRLMEEDELPSWIIKDDAEVERLTCEEEEEKMFGRGSRHRKEVDYSDSLTEKQWLKKITGKDIHDTASSVARGLQFQRGLQFCTRASKAIEEGTLEEIEEEVRQKKSSRKRKRDSDAGSSTPTTSTRSRDKDDESKKQKKRGRPPAEKLSPNPPNLTKKMKKIVDAVIKYKDSSSGRQLSEVFIQLPSRKELPEYYELIRKPVDFKKIKERIRNHKYRSLNDLEKDVMLLCQNAQTFNLEGSLIYEDSIVLQSVFTSVRQKIEKEDDSEGEESEEEEEGEEEGSESESRSVKVKIKLGRKEKAQDRLKGGRRRPSRGSRAKPVVSDDDSEEEQEEDRSGSGSEED

SEQ ID NO: 24744 - protein, 205 aa, Homo sapiens
MWVTKLLPALLLQHVLLHLLLLPIAIPYAEGQRKRRNTIHEFKKSAKTTLIKIDPALKIKTKKVNTADQCANRCTRNKGLPFTCKAFVFDKARKQCLWFPFNSMSSGVKKEFGHEFDLYENKDYIRNCIIGKGRSYKGTVSITKSGIKCQPWSSMIPHEHSYRGKDLQENYCRNPRGEEGGPWCFTSNPEVRYEVCDIPQCSEGK

SEQ ID NO: 24745 - protein, 638 aa, Homo sapiens
MEGDAVEAIVEESETFIKGKERKTYQRRREGGQEEDACHLPQNQTDGGEVVQDVNSSVQMVMMEQLDPTLLQMKTEVMEGTVAPEAEAAVDDTQIITLQVVNMEEQPINIGELQLVQVPVPVTVPVATTSVEELQGAYENEVSKEGLAESEPMICHTLPLPEGFQVVKVGANGEVETLEQGELPPQEDPSWQKDPDYQPPAKKTKKTKKSKLRYTEEGKDVDVSVYDFEEEQQEGLLSEVNAEKVVGNMKPPKPTKIKKKGVKKTFQCELCSYTCPRRSNLDRHMKSHTDERPHKCHLCGRAFRTVTLLRNHLNTHTGTRPHKCPDCDMAFVTSGELVRHRRYKHTHEKPFKCSMCDYASVEVSKLKRHIRSHTGERPFQCSLCSYASRDTYKLKRHMRTHSGEKPYECYICHARFTQSGTMKMHILQKHTENVAKFHCPHCDTVIARKSDLGVHLRKQHSYIEQGKKCRYCDAVFHERYALIQHQKSHKNEKRFKCDQCDYACRQERHMIMHKRTHTGEKPYACSHCDKTFRQKQLLDMHFKRYHDPNFVPAAFVCSKCGKTFTRRNTMARHADNCAGPDGVEGENGGETKKSKRGRKRKMRSKKEDSSDSEFHSCGPGWSAVADLSSPQPPPPRFK

SEQ ID NO: 24746 - protein, 463 aa, Homo sapiens
MAASMFYGRLVAVATLRNHRPRTAQRAAAQVLGSSGLFNNHGLQVQQQQQRNLSLHEYMSMELLQEAGVSVPKGYVAKSPDEAYAIAKKLGSKDVVIKAQVLAGGRGKGTFESGLKGGVKIVFSPEEAKAVSSQMIGKKLFTKQTGEKGRICNQVLVCERKYPRREYYFAITMERSFQGPVLIGSSHGGVNIEDVAAESPEAIIKEPIDIEEGIKKEQALQLAQKMGFPPNIVESAAENMVKLYSLFLKYDATMIEINPMVEDSDGAVLCMDAKINFDSNSAYRQKKIFDLQDWTQEDERDKDAAKANLNYIGLDGNIGCLVNGAGLAMATMDIIKLHGGTPANFLDVGGGATVHQVTEAFKLITSDKKVLAILVNIFGGIMRCDVIAQGIVMAVKDLEIKIPVVVRLQGTRVDDAKALIADSGLKILACDDLDEAARMVVKLSEIVTLAKQAHVDVKFQLPI

SEQ ID NO: 24747 - protein, 707 aa, Homo sapiens
QTVSLQEQNTTLQTQNAKLQVENSTLNSQSTSLMNQNAQLLIQQSSLENENESVIKEREDLKSLYDSLIKDHEKLELLHERQASEYESLISKHGTLKSAHKNLEVEHRDLEDRLNHTYSQLLKETEVLQTDHKNLKSLLNNSKLEQTRLEAEFSKLKEQYQQLDITSTKLNNQCELLSQLKGNLEEENRHLLDQIQTLMLQNRTLLEQNMESKDLFHVEQRQYIDKLNELRRQKEKLEEKIMDQYKFYDPSPPRRRGNWITLKMRKLIKSKKDINRERQKSLTLTPTRSDSSEGFLQLPHQDSQDSSSVGSNSLEDGQTLGTKKSSTMNDLVQSMVLAGQWTGSTENLEVPDDISTGKRRKELGAMAFSTTAINFSTVNSSAGFRSKQLVNNKDTTSFEDISPQGVSDDSSTGSRVHASRPASLDSGRTSTSNSNNNASLHEVKAGAVNNQSRPQSHSSGEFSLLHDHEAWSSSGSSPIQYLKRQTRSSPVLQHKISETLESRHHKIKTGSPGSEVVTLQQFLEESNKLTSVQIKSSSQENLLDEVMKSLSVSSDFLGKDKPVSCGLARSVSGKTPGDFYDRRTTKPEFLRPGPRKTEDTYFISSAGKPTPGTQGKIKLVKESSLSRQSKDSNPYATLPRASSVISTAEGTTRRTSIHDFLTKDSRLPISVDSPPAAADSNTTAASNVDKVQESRNSKSRSREQQSS

SEQ ID NO: 24748 - protein, 203 aa, Homo sapiens
MLPLLIICLLPAIEGKNCLRCWPELSALIDYDLQILWVTPGPPTELSQSIHSLFLEDNNFLKPWYLDRDHLEEETAKFFTQVHQAIKTLRDDKTVLLEEIYTHKNLFTERLNKISDGLKEKACNESCDIQSTLKVTSCADCRTHFLSCNDPTFCPARNRRTSLWAVSLSSALLLAIAGGGCFFYWQRKKEAVKVLGKETPTQF

SEQ ID NO: 24749 - protein, 870 aa, Homo sapiens
MANSMNGRNPGGRGGNPRKGRILGIIDAIQDAVGPPKQAAADRRTVEKTWKLMDKVVRLCQNPKLQLKNSPPYILDILPDTYQHLRLILSKYDDNQKLAQLSENEYFKIYIDSLMKKSKRAIRLFKEGKERMYEEQSQDRRNLTKLSLIFSHMLAEIKAIFPNGQFQGDNFRITKADAAEFWRKFFGDKTIVPWKVFRQCLHEVHQISSGLEAMALKSTIDLTCNDYISVFEFDIFTRLFQPWGSILRNWNFLAVTHPGYMAFLTYDEVKARLQKYSTKPGSYIFRLSCTRLGQWAIGYVTGDGNILQTIPHNKPLFQALIDGSREGFYLYPDGRSYNPDLTGLCEPTPHDHIKVTQEQYELYCEMGSTFQLCKICAENDKDVKIEPCGHLMCTSCLTAWQESDGQGCPFCRCEIKGTEPIIVDPFDPRDEGSRCCSIIDPFGMPMLDLDDDDDREESLMMNRLANVRKCTDRQNSPVTSPGSSPLAQRRKPQPDPLQIPHLSLPPVPPRLDLIQKGIVRSPCGSPTGSPKSSPCMVRKQDKPLPAPPPPLRDPPPPPPERPPPIPPDNRLSRHIHHVESVPSRDPPMPLEAWCPRDVFGTNQLVGCRLLGEGSPKPGITASSNVNGRHSRVGSDPVLMRKHRRHDLPLEGAKVFSNGHLGSEEYDVPPRLSPPPPVTTLLPSIKCTGPLANSLSEKTRDPVEEDDDEYKIPSSHPVSLNSQPSHCHNVKPPVRSCDNGHCMLNGTHGPSSEKKSNIPDLSIYLKGDVFDSASDPVPLPPARPPTRDNPKHGSSLNRTPSDYDLLIPPLGEDAFDALPPSLPPPPPPARHSLIEHSKPPGSSSRPSSGQDLFLLPSDAPSLTAKVIPLLI

SEQ ID NO: 24750 - protein, 298 aa, Homo sapiens
MGLLVFVRNLLLALCLFLVLGFLYYSAWKLHLLQWEEDSKYDRLGFLLNLDSKLPAELATKYANFSEGACKPGYASALMTAIFPRFSKPAPMFLDDSFRKWARIREFVPPFGIKGQDNLIKAILSVTKEYRLTPALDSLRCRRCIIVGNGGVLANKSLGSRIDDYDIVVRLNSAPVKGFEKDVGSKTTLRITYPEGAMQRPEQYERDSLFVLAGFKWQDFKWLKYIVYKERVARFCCVHRVHRMASGNLWPLECPRSPLRFESSTHISSRRPPSPSLACPSTMASWAGGTSLPLAVWQ

SEQ ID NO: 24751 - protein, 295 aa, Homo sapiens
HGIQDINCIDACIPPLLDISAMCRVPCLICSSRPASLDSGRTSTSNSNNNASLHEVKGAVNNQSRPQSHSSGEFSLLHDHEAWSSSGSSPIQYLKRQTRSSPVLQHKISETLESRHHKIKTGSPGSEVVTLQQFLEESNKLTSVQIKSSSQENLLDEVMKSLSVSSDFLGKDKPVSCGLARSVSGKTPGDFYDRRTTKPEFLRPGPRKTEDTYFISSAGKPTPGTQGKIKLVKESSLSRQSKDSNPYATLPRASSVISTAEGTTRRTSIHDFLTKDSRLPISVDSPPAAADSNTT

SEQ ID NO: 24752 - protein, 297 aa, Homo sapiens
IGKLPIAMRALTNYQRLCEAFDAQRKDIQGTQGARAIWQALSHAFGRRLVLSSTFRILADLLGFAGPLCIFGIVDHLGKENDVFQPKTQFLGVYFVSSQEFLANAYVLAVLLFLALLLQRTFLQASYYVAIETGINLRGAIQTKIYNKIMHLSTSNLSMGEMTAGQICNLVAIDTNQLMWFFFLCPNLWAMPVQIIVGVILLYYILGVSALIGAAVIILLAPVQYFVATKLSQAQRSTLEYSNERLKQTNEMLRGIKLLKLYAWENIFRTRVETTRRKEMTSLRAFAIYTSISTCKS

SEQ ID NO: 24753 - protein, 709 aa, Homo sapiens
TTFGAFLHKGAFCRNYFNLLDMLVVGVSLVSFGIQSSAISVVKILRVLRVLRPLRAINRAKGLKHVVQCVFVAIRTIGNIMIVTTLLQFMFACIGVQLFKGKFYRCTDEAKSNPEECRGLFILYKDGDVDSPVVRERIWQNSDFNFDNVLSAMMALFTVSTFEGWPALLYKAIDSNGENIGPIYNHRVEISIFFIIYIIIVAFFMMNIFVGFVIVTFQEQGEKEYKNCELDKNQRQCVEYALKARPLRRYIPKNPYQYKFWYVVNSSPFEYMMFVLIMLNTLCLAMQHYEQSKMFNDAMDILNMVFTGVFTVEMVLKVIAFKPKHYFTDAWNTFDALIVVGSVVDIAITEVNPTESENVPVPTATPGNSEESNRISITFFRLFRVMRLVKLLSRGEGIRTLLWTFIKSFQALPYVALLIAMLFFIYAVIGMQMFGKVAMRDNNQINRNNNFQTFPQAVLLLFRCATGEAWQEIMLACLPGKLCDPESDYNPGEEYTCGSNFAIVYFISFYMLCAFLIINLFVAVIMDNFDYLTRDWSILGPHHLDEFKRIWSEYDPEAKGRIKHLDVVTLLRRIQPPLGFGKLCPHRVACKRLVAMNMPLNSDGTVMFNATLFALVRTALKIKTEGNLEQANEELRAVIKKIWKKTSMKLLDQVVPPAGDDEVTVGKFYATFLIQDYFRKFKKRKEQGLVGKYPAKNTTIALQMLERML

SEQ ID NO: 24754 - protein, 453 aa, Homo sapiens
MGENDPPAVEAPFSFRSLFGLDDLKISPVAPDADAVAAQILSLLPLKFFPIIVIGIIALILALAIGLGIHFDCSGKYRCRSSFKCIELIARCDGVSDCKDGEDEYRCVRVGGQNAVLQVFTAASWKTMCSDDWKGHYANVACAQLGFPSYVSSDNLRVSSLEGQFREEFVSIDHLLPDDKVTALHHSVYVREGCASGHVVTLQCTACGHRRGYSSRIVGGNMSLLSQWPWQASLQFQGYHLCGGSVITPLWIITAAHCVYDLYLPKSWTIQVGLVSLLDNPAPSHLVEKIVYHSKYKPKRLGNDIALMKLAGPLTFNEMIQPVCLPNSEENFPDGKVCWTSGWGATEDGGDASPVLNHAAVPLISNKICNHRDVYGGIISPSMLCAGYLTGGVDSCQGDSGGPLVCQERRLWKLVGATSFGIGCAEVNKPGVYTRVTSFLDWIHEQMERDLKT

SEQ ID NO: 24755 - protein, 333 aa, Homo sapiens
MVYRYCCKLNKKLKSYSLSRKKIVHYTCFDQRKRANAAFLIGAYAVIYLKKTPEEAYRALLSGSNPPYLPFRDASFGNCTYNLTILDCLQGIRKGLQHGFFDFETFDVDEYEHYERVENGDFNWIVPGKFLAFSGPHPKSKIENGYPLHAPEAYFPYFKKHNVTAVVRLNKKIYEAKRFTDAGFEHYDLFFIDGSTPSDNIVRRFLNICENTEGAIAVHCKAGLGRTGTLIACYVMKHYRFTHAEIIAWIRICRPGSIIGPQQHFLEEKQASLWVQGDIFRSKLKNRPSSEGSINKILSGLDDMSIGGNLSKTQNMERFGEGQRMETVGRNDF

SEQ ID NO: 24756 - protein, 737 aa, Homo sapiens
MELDMAMEPDRKAAVSHWQQQSYLDSGIHSGATTTAPSLSGKGNPEEEDVDTSQVLYEWEQGFSQSFTQEQVADIDGQYAMTRAQRMLKHAVVNLINYQDDAELATRAIPELTKLLNDEDQVVVNKAAVMVHQLSKKEASRHAIMRSPQMVSAIVRTMQNTNDVETARCTAGTLHNLSHHREGLLAIFKSGGIPALVKMLGSPVDSVLFYAITTLHNLLLHQEGAKMAVRLAGGLQKMVALLNKTNVKFLAITTDCLQILAYGNQESKLIILASGGPQALVNIMRTYTYEKLLWTTSRVLKVLSVCSSNKPAIVEAGGMQALGLHLTDPSQRLVQNCLWTLRNLSDAATKQEGMEGLLGTLVQLLGSDDINVVTCAAGILSNLTCNNYKNKMMVCQVGGIEALVRTVLRAGDREDITEPAICALRHLTSRHQEAEMAQNAVRLHYGLPVVVKLLHPPSHWPLIKATVGLIRNLALCPANHAPLREQGAIPRLVQLLVRAHQDTQRRTSMGGTQQQFVEGVRMEEIVEGCTGALHILARDVHNRIVIRGLNTIPLFVQLLYSPIENIQRVAAGVLCELAQDKEAAEAIEAEGATAPLTELLHSRNEGVATYAAAVLFRMSEDKPQDYKKRLSVELTSSLFRTEPMAWNETADLGLDIGAQGEPLGYRQDDPSYRSFHSGGYGQDALGMDPMMEHEMGGHHPGADYPVDGLPDLGHAQDLMDGLPPGDSNQLAWFDTDL

SEQ ID NO: 24757 - protein, 1057 aa, Homo sapiens
MSSQQFPRLGAPSTGLSQAPSQIANSGSAGLINPAATVNDESGRDSEVSAREHMSSSSSLQSREEKQEPVVVRPYPQVQMLSTHHAVASATPVAVTAPPAHLTPAVPLSFSEGLMKPPPKPTMPSRPIAPAPPSTLSLPPKVPGQVTVTMESSIPQASAIPVATISGQQGHPSNLHHIMTTNVQMSIIRSNAPGPPLHIGASHLPRGAAAAAVMSSSKVTTVLRPTSQLPNAATAQPAVQHIIHQPIQSRPPVTTSNAIPPAVVATVSATRAQSPVITTTAAHATDSALSRPTLSIQHPPSAAISIQRPAQSRDVTTRITLPSHPALGTPKQQLHTMAQKTIFSTGTPVAAATVAPILATNTIPSATTAGSVSHTQAPTSTIVTMTVPSHSSHATAVTTSNIPVAKVVPQQITHTSPRIQPDYPAERSSLIPISGHRASPNPVAMETRSDNRPSVPVQFQYFLPTYPPSAYPLAAHTYTPITSSVSTIRQYPVSAQAPNSAITAQTGVGVASTVHLNPMQLMTVDASHARHIQGIQPAPISTQGIQPAPIGTPGIQPAPLGTQGIHSATPINTQGLQPAPMGTQQPQPEGKTSAVVLADGATIVANPISNPFSAAPAATTVVQTHSQSASTNAPAQGSSPRPSILRKKPATDGMAVRKTLIPPQPPDVASPRVESSMRSTSGSPRPAGAKPKSEIHVSMATPVTVSMETVSNQNNDQPTIAVPPTAQQPPPTIPTMIAAASPPSQPAVALSTIPGAVPITPPITTIAAAPPPSVTVGGSLSSVLGPPVPEIKVKEEVEPMDIMRPVSAVPPLATNTVSPSLALLANNLSMPTSDLPPGASPRKKPRKQQHVISTEEGDMMETNSTDDEKSTAKSLLVKAEKRKSPPKEYIDEEGVRYVPVRPRPPITLLRHYRNPWKAAYHHFQRYSDVRVKEEKKAMLQEIANQKGVSCRAQGWKVHLCAAQLLQLTNLEHDVYERLTNLQEGIIPKKKAATDDDLHRINELIQGNMQRCKLVMDQISEARDSMLKVLDHKDRVLKLLNKNGTVKKVSKLKRKEKV

SEQ ID NO: 24758 - protein, 669 aa, Homo sapiens
MESRCVTQAGVQWRSLSSLQPPPPVFKQSSCLSHQTSRWLNPLFKIGHKRRLEEDDMYSVLPEDRSQHLGEELQGFWDKEVLRAENDAQKPSLTRAIIKCYWKSYLVLGIFTLIEESAKVIQPIFLGKIINYFENYDPMDSVALNTAYAYATVLTFCTLILAILHHLYFYHVQCAGMRLRVAMCHMIYRKALRLSNMAMGKTTTGQIVNLLSNDVNKFDQVTVFLHFLWAGPLQAIAVTALLWMEIGISCLAGMAVLIILLPLQSCFGKLFSSLRSKTATFTDARIRTMNEVITGIRIIKMYAWEKSFSNLITNLRKKEISKILRSSCLRGMNLASFFSASKIIVFVTFTTYVLLGSVITASRVFVAVTLYGAVRLTVTLFFPSAIERVSEAIVSIRRIQTFLLLDEISQRNRQLPSDGKKMVHVQDFTAFWDKASETPTLQGLSFTVRPGELLAVVGPVGAGKSSLLSAVLGELAPSHGLVSVHGRIAYVSQQPWVFSGTLRSNILFGKKYEKERYEKVIKACALKKDLQLLEDGDLTVIGDRGTTLSGGQKARVNLARAVYQDADIYLLDDPLSAVDAEVSRHLFELCICQILHEKITILVTHQLQYLKAASQILILKDGKMVQKGTYTEFLKSGIDFGSLLKKDNEESEQPPVPGTPTLRNRTFSE

SEQ ID NO: 24759 - protein, 398 aa, Homo sapiens
MDFRTACEETKTGICLLQDGNQEPFKVRLHLAKDILMIQEQDVICVSGEPFYSGERTVTIRRQTVGGFGLSIKGGAEHNIPVVVSKISKEQRAELSGLLFIGDAILQINGINVRKCRHEEVVQVLRNAGEEVTLTVSFLKRAPAFLKLPLNEDCACAPSDQSSGTSSPLCDSGLHLNYHPNNTDTLSCSSWPTSPGLRWEKRWCDLRLIPLLHSRFSQYVPGTDLSRQNAFQVIAVDGVCTGIIQCLSAEDCVDWLQAIATNISNLTKHNIKKINRNFPVNQQIVYMGWCEAREQDPLQDRVYSPTFLALRGSCLYKFLAPPVTTWDWTRAEKTFSVYEIMCKILKELEFSNLFAVLHCIHSFFAAKVACLDPLFLGNQATASTAASSATTSKAKYTT

SEQ ID NO: 24760 - protein, 725 aa, Homo sapiens
MEGDAVEAIVEESETFIKGKERKTYQRRREGGQEEDACHLPQNQTDGGEVVQDVNSSVQMVMMEQLDPTLLQMKTEVMEGTVAPEAEAAVDDTQIITLQVVNMEEQPINIGELQLVQVPVPVTVPVATTSVEELQGAYENEVSKEGLAESEPMICHTLPLPEGFQVVKVGANGEVETLEQGELPPQEDPSWQKDPDYQPPAKKTKKTKKSKLRYTEEGKDVDVSVYDFEEEQQEGLLSEVNAEKVVGNMKPPKPTKIKKKGVKKTFQCELCSYTCPRRSNLDRHMKSHTDERPHKCHLCGRAFRTVTLLRNHLNTHTGTRPHKCPDCDMAFVTSGELVRHRRYKHTHEKPFKCSMCDYASVEVSKLKRHIRSHTGERPFQCSLCSYASRDTYKLKRHMRTHSGEKPYECYICHARFTQSGTMKMHILQKHTENVAKFHCPHCDTVIARKSDLGVHLRKQHSYIEQGKKCRYCDAVFHERYALIQHQKSHKNEKRFKCDQCDYACRQERHMIMHKRTHTGEKPYACSHCDKTFRQKQLLDMHFKRYHDPNFVPAAFVCSKCGKTFTRRNTMARHADNCAGPDGVEGENGGETKKSKRGRKRKMRSKKEDSSDSENAEPDLDDNEDEEEPAVEIEPEPEPQPVTPAPPPAKKRRGRPPGRTNQPKQNQPIIQVEDQNTGAIENIIVEVKKEPDAEPAEGEEEEAQPAATDAPNGDLTPEMILSMMDR

SEQ ID NO: 24761 - protein, 150 aa, Homo sapiens
RKRRESTSAEEDIIDGFAMTSFVTFEALEKDVALKPQERVEKRQTPLTKKKREALTNGLSFHSKKSRLSHPHHYSSDRENDRNLCQHLGKRKKMPKALRQLKPGQNSCRDSDSESASGESKGFHRSSSRERLSDVSLSKKKKKKKINENH

SEQ ID NO: 24762 - protein, 1581 aa, Homo sapiens
MPLAFCGSENHSAAYRVDQGVLNNGCFVDALNVVPHVFLLFITFPILFIGWGSQSSKVHIHHSTWLHFPGHNLRWILTFMLLFVLVCEIAEGILSDGVTESHHLHLYMPAGMAFMAAVTSVVYYHNIETSNFPKLLIALLVYWTLAFITKTIKFVKFLDHAIGFSQLRFCLTGLLVILYGMLLLVEVNVIRVRRYIFFKTPREVKPPEDLQDLGVRFLQPFVNLLSKGTYWWMNAFIKTAHKKPIDLRAIGKLPIAMRALTNYQRLCEAFDAQRKDIQGTQGARAIWQALSHAFGRRLVLSSTFRILADLLGFAGPLCIFGIVDHLGKENDVFQPKTQFLGVYFVSSQEFLANAYVLAVLLFLALLLQRTFLQASYYVAIETGINLRGAIQTKIYNKIMHLSTSNLSMGEMTAGQICNLVAIDTNQLMWFFFLCPNLWAMPVQIIVGVILLYYILGVSALIGAAVIILLAPVQYFVATKLSQAQRSTLEYSNERLKQTNEMLRGIKLLKLYAWENIFRTRVETTRRKEMTSLRAFAIYTSISIFMNTAIPIAAVLITFVGHVSFFKEADFSPSVAFASLSLFHILVTPLFLLSSVVRSTVKALVSVQKLSEFLSSAEIREEQCAPHEPTPQGPASKYQAVPLRVVNRKRPAREDCRGLTGPLQSLVPSADGDADNCCVQIMGGYFTWTPDGIPTLSNITIRIPRGQLTMIVGQVGCGKSSLLLAALGEMQKVSGAVFWSSSLPDSEIGEDPSPERETATDLDIRKRGPVAYASQKPWLLNATVEENIIFESPFNKQRYKMVIEACSLQPDIDILPHGDQTQIGERGINLSGGQRQRISVARALYQHANVVFLDDPFSALDIHLSDHLMQAGILELLRDDKRTVVLVTHKLQYLPHADWIIAMKDGTIQREGTLKDFQRSECQLFEHWKTLMNRQDQELEKETVTERKATEPPQGLSRAMSSRDGLLQDEEEEEEEAAESEEDDNLSSMLHQRAEIPWRACAKYLSSAGILLLSLLVFSQLLKHMVLVAIDYWLAKWTDSALTLTPAARNCSLSQECTLDQTVYAMVFTVLCSLGIVLCLVTSVTVEWTGLKVAKRLHRSLLNRIILAPMRFFETTPLGSILNRFSSDCNTIDQHIPSTLECLSRSTLLCVSALAVISYVTPVFLVALLPLAIVCYFIQKYFRVASRDLQQLDDTTQLPLLSHFAETVEGLTTIRAFRYEARFQQKLLEYTDSNNIASLFLTAANRWLEVRMEYIGACVVLIAAVTSISNSLHRELSAGLVGLGLTYALMVSNYLNWMVRNLADMELQLGAVKRIHGLLKTEAESYEGLLAPSLIPKNWPDQGKIQIQNLSVRYDSSLKPVLKHVNALIAPGQKIGICGRTGSGKSSFSLAFFRMVDTFEGHIIIDGIDIAKLPLHTLRSRLSIILQDPVLFSGTIRFNLDPERKCSDSTLWEALEIAQLKLVVKALPGGLDAIITEGGENFSQGQRQLFCLARAFVRKTSIFIMDEATASIDMATENILQKVVMTAFADRTVVTIAHRVHTILSADLVIVLKRGAILEFDKPEKLLSRKDSVFASFVRADK

SEQ ID NO: 24763 - protein, 46 aa, Homo sapiens
MEERGDSEPTPGCSGLGPGGVRGFGDGGGAPSWAPEDAWMGTHPKK

SEQ ID NO: 24764 - protein, 1920 aa, Homo sapiens
MASGLGSPSPCSAGSEEEDMDALLNNSLPPPHPENEEDPEEDLSETETPKLKKKKKPKKPRDPKIPKSKRQKKELGDSSGEGPEFVEEEEEVALRSDSEGSDYTPGKKKKKKLGPKKEKKSKSKRKEEEEEEDDDDDSKEPKSSAQLLEDWGMEDIDHVFSEEDYRTLTNYKAFSQFVRPLIAAKNPKIAVSKMMMVLGAKWREFSTNNPFKGSSGASVAAAAAAAVAVVESMVTATEVAPPPPPVEVPIRKAKTKEGKGPNARRKPKGSPRVPDAKKPKPKKVAPLKIKLGGFGSKRKRSSSEDDDLDVESDFDDASINSYSVSDGSTSRSSRSRKKLRTTKKKKKDHQDYCEVCQQGGEIILCDTCPRAYHMVCLDPDMEKAPEGKWSCPHCEKEGIQWEAKEDNSEGEEILEEVGGDLEEEDDHHMEFCRVCKDGGELLCCDTCPSSYHIHCLNPPLPEIPNGEWLCPRCTCPALKGKVQKILIWKWGQPPSPTPVPRPPDADPNTPSPKPLEGRPERQFFVKWQGMSYWHCSWVSELQLELHCQVMFRNYQRKNDMDEPPSGDFGGDEEKSRKRKNKDPKFAEMEERFYRYGIKPEWMMIHRILNHSVDKKGHVHYLIKWRDLPYDQASWESEDVEIQDYDLFKQSYWNHRELMRGEEGRPGKKLKKVKLRKLERPPETPTVDPTVKYERQPEYLDATGGTLHPYQMEGLNWLRFSWAQGTDTILADEMGLGKTVQTAVFLYSLYKEGHSKGPFLVSAPLSTIINWEREFEMWAPDMYVVTYVGDKDSRAIIRENEFSFEDNAIRGGKKASRMKKEASVKFHVLLTSYELITIDMAILGSIDWACLIVDEAHRLKNNQSKFFRVLNGYSLQHKLLLTGTPLQNNLEELFHLLNFLTPERFHNLEGFLEEFADIAKEDQIKKLHDMLGPHMLRRLKADVFKNMPSKTELIVRVELSPMQKKYYKYILTRNFEALNARGGGNQVSLLNVVMDLKKCCNHPYLFPVAAMEAPKMPNGMYDGSALIRASGKLLLLQKMLKNLKEGGHRVLIFSQMTKMLDLLEDFLEHEGYKYERIDGGITGNMRQEAIDRFNAPGAQQFCFLLSTRAGGLGINLATADTVIIYDSDWNPHNDIQAFSRAHRIGQNKKVMIYRFVTRASVEERITQVAKKKMMLTHLVVRPGLGSKTGSMSKQELDDILKFGTEELFKDEATDGGGDNKEGEDSSVIHYDDKAIERLLDRNQDETEDTELQGMNEYLSSFKVAQYVVREEEMGEEEEVEREIIKQEESVDPDYWEKLLRHHYEQQQEDLARNLGKGKRIRKQVNYNDGSQEDRGVCGRPRPPPMGRSTRAVGPAHLPSLPPDWQDDQSDNQSDYSVASEEGDEDFDERSEAPRRPSRKGLRNDKDKPLPPLLARVGGNIEVLGFNARQRKAFLNAIMRYGMPPQDAFTTQWLVRDLRGKSEKEFKAYVSLFMRHLCEPGADGAETFADGVPREGLSRQHVLTRIGVMSLIRKKVQEFEHVNGRWSMPELAEVEENKKMSQPGSPSPKTPTPSTPGDTQPNTPAPVPPAEDGIKIEENSLKEEESIEGEKEVKSTAPETAIECTQAPAPASEDEKVVVEPPEGEEKVEKAEVKERTEEPMETEPKGAADVEKVEEKSAIDLTPIVVEDKEEKKEEEEKKEVMLQNGETPKDLNDEKQKKNIKQRFMFNIADGGFTELHSLWQNEERAATVTKKTYEIWHRRHDYWLLAGIINHGYARWQDIQNDPRYAILNEPFKGEMNRGNFLEIKNKFLARRFKLLEQALVIEEQLRRAAYLNMSEDPSHPSMALNTRFAEVECLAESHQHLSKESMAGNKPANAVLHKVLKQLEELLSDMKADVTRLPATIARIPPVAVRLQMSERNILSRLANRAPEPTPQQVAQQQ

SEQ ID NO: 24765 - protein, 401 aa, Homo sapiens
GRGTRRMSPATTGTFLLTVYSIFSKVHSDRNVYPSAGVLFVHVLEREYFKGEFPPYPKPGEISNDPITFNTNLMGYPDRPGWLRYIQRTPYSDGVLYGSPTAENVGKPTIIEITAYNRRTFETARHNLIINIMSAEAEFFIKNMNVEEMLASEVLGDFLGAVKNVWQPERLNAINITSALDRGGRVPLPINDLKEGVYVMVGADVPFSSCLREVENPQNQLRCSQEMEPVITCDKKFRTQFYIDWCKISLVDKTKQVSTYQEVIRGEGILPDGGEYKPPSDSLKSRDYYTDFLITLAVPSAVALVLFLILAYIMCCRREGVEKRNMQTPDIQLVHHSAIQKSTKELRDMSKNREIAWPLSTLPVFHPVTGEIIPPLHTDNYDSTNMPLMQTQQNLPHQTQI

SEQ ID NO: 24766 - protein, 82 aa, Homo sapiens
MASPDDPLRADHMVKEPVEDTDPSTLSFNMSDKYPIQDTELPKAEECDTITLNCPRNSDMKNQGEENGFPDSTGDPLPEDRG

SEQ ID NO: 24767 - protein, 886 aa, Homo sapiens
MRLHLLLLLALCGAGTTAAELSYSLRGNWSICNGNGSLELPGAVPGCVHSALFQQGLIQDSYYRFNDLNYRWVSLDNWTYSKEFKIPFEISKWQKVNLILEGVDTVSKILFNEVTIGETDNMFNRYSFDITNVVRDVNSIELRFQSAVLYAAQQSKAHTRYQVPPDCPPLVQKGECHVNFVRKEQCSFSWDWGPSFPTQGIWKDVRIEAYNICHLNYFTFSPIYDKSAQEWNLEIESTFDVVSSKPVGGQVIVAIPKLQTQQTYSIELQPGKRIVELFVNISKNITVETWWPHGHGNQTGYNMTVLFELDGGLNIEKSAKVYFRTVELIEEPIKGSPGLSFYFKINGFPIFLKGSNWIPADSFQDRVTSELLRLLLQSVVDANMNTLRVWGGGIYEQDEFYELCDELGIMVWQDFMFACALYPTDQGFLDSVTAEVAYQIKRLKSHPSIIIWSGNNENEEALMMNWYHISFTDRPIYIKDYVTLYVKNIRELVLAGDKSRPFITSSPTNGAETVAEAWVSQNPNSNYFGDVHFYDYISDCWNWKVFPKARFASEYGYQSWPSFSTLEKVSSTEDWSFNSKFSLHRQHHEGGNKQMLYQAGLHFKLPQSTDPLRTFKDTIYLTQVMQAQCVKTETEFYRRSRSEIVDQQGHTMGALYWQLNDIWQAPSWASLEYGGKWKMLHYFAQNFFAPLLPVGFENENTFYIYGVSDLHSDYSMTLSVRVHTWSSLEPVCSRVTERFVMKGGEAVCLYEEPVSELLRRCGNCTRESCVVSFYLSADHELLSPTNYHFLSSPKEAVGLCKAQITGASLNPRLCSQTYREEISNPTKITSISMTPASLSALVLEQQKLMLPWQLPGQAGMSRMNLVPVAALGPSLEQLGGHHLSAR

SEQ ID NO: 24768 - protein, 608 aa, Homo sapiens
MATNGSKVADGQISTEVSEAPVANDKPKTLVVKVQKKAADLPDRDTWKGRFDFLMSCVGYAIGLGNVWRFPYLCGKNGGGAFLIPYFLTLIFAGVPLFLLECSLGQYTSIGGLGVWKLAPMFKGVGLAAAVLSFWLNIYYIVIISWAIYYLYNSFTTTLPWKQCDNPWNTDRCFSNYSMVNTTNMTSAVVEFWERNMHQMTDGLDKPGQIRWPLAITLAIAWILVYFCIWKGVGWTGKVVYFSATYPYIMLIILFFRGVTLPGAKEGILFYITPNFRKLSDSEVWLDAATQIFFSYGLGLGSLIALGSYNSFHNNVYRDSIIVCCINSCTSMFAGFVIFSIVGFMAHVTKRSIADVAASGPGLAFLAYPEAVTQLPISPLWAILFFSMLLMLGIDSQVADLCSHLKFCTVEGFITALVDEYPRLLRNRRELFIAAVCIISYLIGLSNITQGGIYVFKLFDYYSASGMSLLFLVFFECVSISWFYGVNRFYDNIQEMVGSRPCIWWKLCWSFFTPIIVAGVFIFSAVQMTPLTMGNYVFPKWGQGVGWLMALSSMVLIPGYMAYMFLTLKGSLKQRIQVMVQPSEDIVRPENGPEQPQAGSSTSKEAYI

SEQ ID NO: 24769 - protein, 2969 aa, Homo sapiens
MWDPRAARMDLTAYAELLKESGNQVLKNGNFSLAIRKYDEAIQILLQLYQWGVPPRDLAVLLCNKSNAFFSLGKWNEAFVAAKECLQWDPTYVKGYYRAGYSLLRLHQPYEAARMFFEGLRLVQRSQDQAPVADFLVGVFTTMSSDSIVLQSFLPCFDHIFTTGFPTEVWQSVIEKLAKKGLWHSFLLLSAKKDRLPRNIHVPELSLKSLFEKYVFIGLYEKMEQVPKLVQWLISIGASVETIGPYPLHALMRLCIQARENHLFRWLMDHKPEWKGRINQKDGDGCTVLHVVAAHSPGYLVKRQTEDVQMLLRFGADPTLLDRQSRSVVDVLKRNKNFKAIEKINSHLEKLATCSKDLSGFSNGDGPTSENDIFRKVLEQLVKYMNSGNRLLHKNFLKQEVVQRFLRLLSTLQEIPPDLVCDINQDCATTVFKFLLEKQRWPEVLLLLTRKVSGEPPLGDCLIKDCNFSDLDICTIIPHLSTWDQRKKQLLGCLIDSGALPDGLQESQERPVVTCLKHEDFELAFLLLTKGADPRAISLTEGDTPLHAALHIFLEIKADIGFSFLSHLLDLFWSNPTEFDYLNPNVQDSNGNTLMHILFQKGMLKRVKKLLDLLVKFDINFNLKNKEGKDARHRIKKNDSLLLAWNKALMENRRRSRQDSAAHLGKLSKSTAPGHTSQLKSQGSFKSVPCGATARTLPEGSAVPDSWETLPGTQVTRKEPGALRPCSLRDCLMQDITVLIQQVEVDPSFPEDCLQSSEPLEAGAGKEGKKDDKPTLGAGAPDCSEVGEGHAQVGLGALQLVPDDNRGKEGNDDQDDWSTQEIEACLQDFDNMTWEIECTSEMLKKLSSKVMTKVIKKKIILAIQQLGNGEWTQGLQKRLKHLKGSIQLFEAKLDKGARMLWELAIDFSPRCSENPEKIIATEQNTCAMEKSGRIYTEIIRIWDIVLDHCKLADSIKAICNAYNRGLSCVLRKKLKGINKGQVSANMKIQKRIPRCYVEDTEAEKGREHVNPEYFPPASAVETEYNIMKFHSFSTNMAFNILNDTTATVEYPFRVGELEYAVIDLNPRPLEPIILIGRSGTGKTTCCLYRLWKKFHVYWEKAEQAGSPLLAKQVWLKRRLEVEPGKESPGGEEEEEEEDEEEEDSIEVETVESIDEQEYEACAGGAGVEPAGDGQAAEVCAPEHPHQLEHLHQIFVTKNHVLCQEVQRNFIELSKSTKATSHYKPLDPNIHKLQDLRDENFPLFVTSKQLLLLLDASLPKPFFLRNEDGSLKRTIIGWSAQEESTIPSWQEDEEEAEVDGDYSEEDKAVEMRTGDSDPRVYVTFEVFKNEIWPKMTKGRTAYNPALIWKEIKSFLKGSFEALSCPHGRLTEEVYKKLGRKRCPNFKEDRSEIYSLFSLYQQIRSQKGYFDEEDVLYNISRRLSKLRVLPWSIHELYGDEIQDFTQAELALLMKCINDPNSMFLTGDTAQSIMKGVAFRFSDLRSLFHYASRNTIDKQCAVRKPKKIHQLYQNYRSHSGILNLASGVVDLLQFYFPESFDRLPRDSGLFDGPKPTVLESCSVSDLAILLRGNKRKTQPIEFGAHQVILVANETAKEKIPEELGLALVLTIYEAKGLEFDDVLLYNFFTDSEAYKEWKIISSFTPTSTDSREENRPLVEVPLDKPGSSQGRSLMVNPEMYKLLNGELKQLYTAITRARVNLWIFDENREKRAPAFKYFIRRDFVQVVKTDENKDFDDSMFVKTSTPAEWIAQGDYYAKHQCWKVAAKCYQKGGAFEKEKLALAHDTALSMKSKKVSPKEKQLEYLELAKTYLECKEPTLSLKCLSYAKEFQLSAQLCERLGKIRDAAYFYKRSQCYKDAFRCFEQIQEFDLALKMYCQEELFEEAAIAVEKYEEMLKTKTLPISKLSYSASQFYLEAAAKYLSANKMKEMMAVLSKLDIEDQLVFLKSRKRLAEAADLLNREGRREEAALLMKQHGCLLEAARLTADKDFQASCLLGAARLNVARDSDIEHTKDILREALDICYQTGQLSGIAEAHFLQGVILRDFQKLRDAFFKFDTLNHSAGVVEALYEAASQCEAEPEKILGLAPGGLEILLSLVRALKRVTNNAEKEMVKSCFEFFGISQVDAKYCQIAQNDPGPILRIIFDLDLNLREKKTKDHFLIMTDQVKLALNKHLLGRLCQITRSLLGKTYRGVCMRFIVGLKCEDENCEHFHRPLRRCEAKCLVQSKMNLVAINGLLLEAKKVFPKILAEELKEIDYILSTDMYGLCKSILDVLFPKHFHQRVLSENPMACKEILKPNYKSFRFYRFALKEYIHFLFENESARNRRESTDLWLSAMQAFLLSSNYPEEFEKLLHQEEDNYNRELKALESEKDERGRGRGSRIKGIEGKFGMLAPNRDDENMDKTHLCFIRLLENCIDQFYVYRNPEDYKRLFFRFMNVLIKRCKEPLIPSIGNTVALLEFQFIHCGVVLARLWKNVILCLPKSYIALLHYWEFLFSKKDKELGDVFSIIQEYKPKDVTRAIQDFRFHLSYLAKVLCGYENVNFNVLLDAFSEIDYVVSGEAERTLVLCLVMLVNAEEILQPYCKPLLYRHFREIESRLQLMSMDCPGQVPERLLKVVKRVLVAVNVKSVAEALQDLLFERDEEYLMDCDWRWDPVHTKGSIVRGLYYEEVRLNRLLCLDPVDYFAEPECEFGQDEMDELALEDRDHVLATILSQKQRKASIQRKLRRACLVVSLCISWRRRVGTQMERVREEAREPRAGNFKKADVDRTQCDLCGVKFTRGPENYFSPSKAFEGAASEVAVLSRAELEREECQERNSESYEQHIHLEHHQRQQVAYQKYSEFFHEKVDPAIDEGKLVVQDIEQSVWIHSHVGSKEHSHMLQKVQEHIKRVSDMVEDLYRRKAWAGAEEAMTRLVNILILSVRDARDWLMKTETRLKKEGIVQEDDYENEVEDFGELRPRRRSRKCGKQRKY

SEQ ID NO: 24770 - protein, 1121 aa, Homo sapiens
MASLTAYDKDVSSGSYNLSSATTGSYYSCVSQITIGYDVAGPVAIGLTHWKNPYVQGRPTLPSDLPLFVSKDAGIPVYHRSFTRKTDQATPLSCPASLSITPVPSYSSSSQETLSQDTTGLSLSIHGAEKRLQIHQRRSVASRPASRRRLPVVRHSSLPPGRRSIKMEASSSGITNGKTKVFHPEGGVDLQGYQLDMQILPDGPKSDVDFSEILNAIQEMAKDVNILFDELEAVSSPCKDDDSLLHPGNLTSTSDDASRLEAGGETVPERNKSNGLYFRDGKCRIDYILVYRKSNPQTEKREVFERNIRAEGLQMEKESSLINSDIIFVKLHAPWEVLGRYAEQMNVRMPFRRKIYYLPRRYKFMSRIDKQISRFRRWLPKKPMRLDKETLPDLEENDCYTAPFSQQRIHHFIIHNKETFFNNATRSRIVHHILQRIKYEEGKNKIGLNRLLTNGSYEAAFPLHEGSYRSKNSIRTHGAENHRHLLYECWASWGVWYKYQPLDLVRRYFGEKIGLYFAWLGWYTGMLFPAAFIGLFVFLYGVTTLDHSQVSKEVCQATDIIMCPVCDKYCPFMRLSDSCVYAKVTHLFDNGATVFFAVFMAVWATVFLEFWKRRRAVIAYDWDLIDWEEEEEEIRPQFEAKYSKKERMNPISGKPEPYQAFTDKCSRLIVSASGIFFMICVVIAAVFGIVIYRVVTVSTFAAFKWALIRNNSQVATTGTAVCINFCIIMLLNVLYEKVALLLTNLEQPRTESEWENSFTLKMFLFQFVNLNSSTFYIAFFLGRFTGHPGAYLRLINRWRLEECHPSGCLIDLCMQMGIIMVLKQTWNNFMELGYPLIQNWWTRRKVRQEHGPERKISFPQWEKDYNLQPMNAYGLFDEYLEMILQFGFTTIFVAAFPLAPLLALLNNIIEIRLDAYKFVTQWRRPLASRAKDIGIWYGILEGIGILSVITNAFVIAITSDFIPRLVYAYKYGPCAGQGEAGQKCMVGYVNASLSVFRISDFENRSEPESDGSEFSGTPLKYCRYRDYRDPPHSLVPYGYTLQFWHVLAARLAFIIVFEHLVFCIKHLISYLIPDLPKDLRDRMRREKYLIQEMMYEAELERLQKERKERKKNGKAHHNEWP

SEQ ID NO: 24771 - protein, 795 aa, Homo sapiens
MRTTKVYKLVIHKKGFGGSDDELVVNPKVFPHIKLGDIVEIAHPNDEYSPLLLQVKSLKEDLQKETISVDQTVTQVFRLRPYQDVYVNVVDPKDVTLDLVELTFKDQYIGRGDMWRLKKSLVSTCAYITQKVEFAGIRAQAGELWVKNEKVMCGYISEDTRVVFRSTSAMVYIFIQMSCEMWDFDIYGDLYFEKAVNGFLADLFTKWKEKNCSHEVTVVLFSRTFYDAKSVDEFPEINRASIRQDHKGRFYEDFYKVVVQNERREEWTSLLVTIKKLFIQYPVLVRLEQAEGFPQGDNSTSAQGNYLEAINLSFNVFDKHYINRNFDRTGQMSVVITPGVGVFEVDRLLMILTKQRMIDNGIGVDLVCMGEQPLHAVPLFKLHNRSAPRDSRLGDDYNIPHWINHSFYTSKSQLFCNSFTPRIKLAGKKPASEKAKNGRDTSLGSPKESENALPIQVDYDAYDAQVFRLPGPSRAQCLTTCRSVRERESHSRKSASSCDVSSSPSLPSRTLPTEEVRSQASDDSSLGKSANILMIPHPHLHQYEVSSSLGYTSTRDVLENMMEPPQRDSSAPGRFHVGSAESMLHVRPGGYTPQRALINPFAPSRMPMKLTSNRRRWMHTFPVGPSGEAIQIHHQTRQNMAELQGSGQRDPTHSSAELLELAYHEAAGRHSNSRQPGDGMSFLNFSGTEELSVGLLSNSGAVPGFCCTVGVDWKSLTTPACLPLTTDYFPDRQGLQNDYTEGCYDLLPEADIDRSVSEKKALGLVGEGFGYIPHMHQNTGFVLASATHILKLERY

SEQ ID NO: 24772 - protein, 464 aa, Homo sapiens
MQLPRWWELGDPCAWTGQGRGTRRMSPATTGTFLLTAFLLSCADGINGTVNWKTRQANNFIISRKMAAGMKDVYSIFSKVHSDRNVYPSAGVLFVHVLEREYFKGEFPPYPKPGEISNDPITFNTNLMGYPDRPGWLRYIQRTPYSDGVLYGSPTAENVGKPTIIEITAYNRRTFETARHNLIINIMSAEDFPLPYQAEFFIKNMNVEEMLASEVLGDFLGAVKNVWQPERLNAINITSALDRGGRVPLPINDLKEGVYVMVGADVPFSSCLREVENPQNQLRCSQEMEPVITCDKKFRTQFYIDWCKISLVDKTKQVSTYQEVIRGEGILPDGGEYKPPSDSLKSRDYYTDFLITLAVPSAVALVLFLILAYIMCCRREGVIQLVHHSAIQKSTKELRDMSKNREIAWPLSTLPVFHPVTGEIIPPLHTDNYDSTNMPLMQTQQNLPHQTQIPQQQTTGKWYP

SEQ ID NO: 24773 - protein, 228 aa, Homo sapiens
MAQQANVGELLAMLDSPMLGVRDDVTAVFKENLNSDRGPMLVNTLVDYYLETSSQPALHILTTLQEPHDKHLLDRINEYVGKAATRLSILSLLGHVIRLQPSWKHKLSQAPLLPSLLKCLKMDTDVVVLTTGVLVLITMLPMIPQSGKQHLLDFFDIFGRLSSWCLKKPGHVAEVYLVHLHASVYALFHRLYGMYPCNFVSFLRSHYSMKENLETFEEVVKVEEIRNS

SEQ ID NO: 24774 - protein, 1160 aa, Homo sapiens
MKKLGQAMEEDLIVGLQGMDLNLEAEALAGTGLVLDEQLNEFHCLWDDSFPEGPERLHAIKEQLIQEGLLDRCVSFQARFAEKEELMLVHSLEYIDLMETTQYMNEGELRVLADTYDSVYLHPNSYSCACLASGSVLRLVDAVLGAEIRNGMAIIRPPGHHAQHSLMDGYCMFNHVAVAARYAQQKHRIRRVLIVDWDVHHGQGTQFTFDQDPSVLYFSIHRYEQGRFWPHLKASNWSTTGFGQGQGYTINVPWNQVGMRDADYIAAFLHVLLPVALEFQPQLVLVAAGFDALQGDPKGEMAATPAGFAQLTHLLMGLAGGKLILSLEGGYNLRALAEGVSASLHTLLGDPCPMLESPGAPCRSAQASVSCALEALEPFWEVLVRSTETVERDNMEEDNVEESEEEGPWEPPVLPILTWPVLQSRTGLVYDQNMMNHCNLWDSHHPEVPQRILRIMCRLEELGLAGRCLTLTPRPATEAELLTCHSAEYVGHLRATEKMKTRELHRESSNFDSIYICPSTFACAQLATGAACRLVEAVLSGEVLNGAAVVRPPGHHAEQDAACGFCFFNSVAVAARHAQTISGHALRILIVDWDVHHGNGTQHMFEDDPSVLYVSLHRYDHGTFFPMGDEGASSQIGRAAGTGFTVNVAWNGPRMGDADYLAAWHRLVLPIAYEFNPELVLVSAGFDAARGDPLGGCQVSPEGYAHLTHLLMGLASGRIILILEGGYNLTSISESMAACTRSLLGDPPPLLTLPRPPLSGALASITETIQVHRRYWRSLRVMKVEDREGPSSSKLVTKKAPQPAKPRLAERMTTREKKVLEAGMGKVTSASFGEESTPGQTNSETAVVALTQDQPSEAATGGATLAQTISEAAIGGAMLGQTTSEEAVGGATPDQTTSEETVGGAILDQTTSEDAVGGATLGQTTSEEAVGGATLAQTTSEAAMEGATLDQTTSEEAPGGTELIQTPLASSTDHQTPPTSPVQGTTPQISPSTLIGSLRTLELGSESQGASESQAPGEENLLGEAAGGQDMADSMLMQGSRGLTDQAIFYAVTPLPWCPHLVAVCPIPAAGLDVTQPCGDCGTIQENWVCLSCYQVYCGRYINGHMLQHHGNSGHPLVLSYIDLSAWCYYCQAYVHHQALLDVKNIAHQNKFGEDMPHPH

SEQ ID NO: 24775 - protein, 209 aa, Homo sapiens
MWRLRRAAVACEVCQSLVKHSSGIKGSLPLQKLHLVSRSIYHSHHPTLKLQRPQLRTSFQQFSSLTNLPLRKLKFSPIKYGYQPRRNFWPARLATRLLKLRYLILGSAVGGGYTAKKTFDQWKDMIPDLSEYKWIVPDIVWEIDEYIDFEKIRKALPSSEDLVKLAPDFDKIVESLSLLKDFFTSGSPEETAFRATDRGSESDKHFRKL

SEQ ID NO: 24776 - protein, 924 aa, Homo sapiens
MWRLRRAAVACEVCQSLVKHSSGIKGSLPLQKLHLVSRSIYHSHHPTLKLQRPQLRTSFQQFSSLTNLPLRKLKFSPIKYGYQPRRNFWPARLATRLLKLRYLILGSAVGGGYTAKKTFDQWKDMIPDLSEYKWIVPDIVWEIDEYIDFGSPEETAFRATDRGSESDKHFRKVSDKEKIDQLQEELLHTQLKYQRILERLEKENKELRKLVLQKDDKGIHHRKLKKSLIDMYSEVLDVLSDYDASYNTQDHLPRVVVVGDQSAGKTSVLEMIAQARIFPRGSGEMMTRSPVKVTLSEGPHHVALFKDSSREFDLTKEEDLAALRHEIELRMRKNVKEGCTVSPETISLNVKGPGLQRMVLVDLPGVINTVTSGMAPDTKETIFSISKAYMQNPNAIILCIQDGSVDAERSIVTDLVSQMDPHGRRTIFVLTKVDLAEKNVASPSRIQQIIEGKLFPMKALGYFAVVTGKGNSSESIEAIREYEEEFFQNSKLLKTSMLKAHQVTTRNLSLAVSDCFWKMVRESVEQQADSFKATRFNLETEWKNNYPRLRELDRNELFEKAKNEILDEVISLSQVTPKHWEEILQQSLWERVSTHVIENIYLPAAQTMNSGTFNTTVDIKLKQWTDKQLPNKAVEVAWETLQEEFSRFMTEPKGKEHDDIFDKLKEAVKEESIKRHKWNDFAEDSLRVIQHNALEDRSISDKQQWDAAIYFMEEALQARLKDTENAIENMVGPDWKKRWLYWKNRTQEQCVHNETKNELEKMLKCNEEHPAYLASDEITTVRKNLESRGVEVDPSLIKDTWHQVYRRHFLKTALNHCNLCRRGFYYYQRHFVDSELECNDVVLFWRIQRMLAITANTLRQQLTNTEVRRLEKNVKEVLEDFAEDGEKKIKLLTGKRVQLAEDLKKVREIQEKLDAFIEALHQEK

SEQ ID NO: 24777 - protein, 1763 aa, Homo sapiens
MAKPTSKDSGLKEKFKILLGLGTPRPNPRSAEGKQTEFIITAEILRELSMECGLNNRIRMIGQICEVAKTKKFEEHAVEALWKAVADLLQPERPLEARHAVLALLKAIVQGQGERLGVLRALFFKVIKDYPSNEDLHERLEVFKALTDNGRHITYLEEELADFVLQWMDVGLSSEFLLVLVNLVKFNSCYLDEYIARMVQMICLLCVRTASSVDIEVSLQVLDAVVCYNCLPAESLPLFIVTLCRTINVKELCEPCWKLMRNLLGTHLGHSAIYNMCHLMEDRAYMEDAPLLRGAVFFVGMALWGAHRLYSLRNSPTSVLPSFYQAMACPNEVVSYEIVLSITRLIKKYRKELQVVAWDILLNIIERLLQQLQTLDSPELRTIVHDLLTTVEELCDQNEFHGSQERYFELVERCADQRPESSLLNLISYRAQSIHPAKDGWIQNLQALMERFFRSESRGAVRIKVLDVLSFVLLINRQFYEEELINSVVISQLSHIPEDKDHQVRKLATQLLVDLAEGCHTHHFNSLLDIIEKVMARSLSPPPELEERDVAAYSASLEDVKTAVLGLLVILQTKLYTLPASHATRVYEMLVSHIQLHYKHSYTLPIASSIRLQAFDFLLLLRADSLHRLGLPNKDGVVRFSPYCVCDYMEPERGSEKKTSGPLSPPTGPPGPAPAGPAVRLGSVPYSLLFRVLLQCLKQESDWKVLKLVLGRLPESLRYKVLIFTSPCSVDQLCSALCSMLSGPKTLERLRGAPEGFSRTDLHLAVVPVLTALISYHNYLDKTKQREMVYCLEQGLIHRCASQCVVALSICSVEMPDIIIKALPVLVVKLTHISATASMAVPLLEFLSTLARLPHLYRNFAAEQYASVFAISLPYTNPSKFNQYIVCLAHHVIAMWFIRCRLPFRKDFVPFITKGLRSNVLLSFDDTPEKDSFRARSTSLNERPKRIQTSLTSASLGSADENSVAQADDSLKNLHLELTETCLDMMARYVFSNFTAVPKRSPVGEFLLAGGRTKTWLVGNKLVTVTTSVGTGTRSLLGLDSGELQSGPESSSSPGVHVRQTKEAPAKLESQAGQQVSRGARDRVRSMSGGHGLRVGALDVPASQFLGSATSPGPRTAPAAKPEKASAGTRVPVQEKTNLAAYVPLLTQGWAEILVRRPTGNTSWLMSLENPLSPFSSDINNMPLQELSNALMAAERFKEHRDTALYKSLSVPAASTAKPPPLPRSNTVASFSSLYQSSCQGQLHRSVSWADSAVVMEEGSPGEVPVLVEPPGLEDVEAALGMDRRTDAYSRSSSVSSQEEKSLHAEELVGRGIPIERVVSSEGGRPSVDLSFQPSQPLSKSSSSPELQTLQDILGDPGDKADVGRLSPEVKARSQSGTLDGESAAWSASGEDSRGQPEGPLPSSSPRSPSGLRPRGYTISDSAPSRRGKRVERDALKSRATASNAEKVPGINPSFVFLQLYHSPFFGDESNKPILLPNESQSFERSVQLLDQIPSYDTHKIAVLYVGEGQSNSELAILSNEHGSYRYTEFLTGLGRLIELKDCQPDKVYLGGLDVCGEDGQFTYCWHDDIMQAVFHIATLMPTKDVDKHRCDKKRHLGNDFVSIVYNDSGEDFKLGTIKGQFNFVHVIVTPLDYECNLVSLQCRKDMEGLVDTSVAKIVSDRNLPFVARQMALHANMASQVHHSRSNPTDIYPSKWIARLRHIKRLRQRICEEAAYSNPSLPLVHPPSHSKAPAQTPAEPTPGYEVGQRKRLISSVEDFTEFV

SEQ ID NO: 24778 - protein, 622 aa, Homo sapiens
MNTTSKKHGNNGFYDKDSSGWSSSKDKDAYSSFGSRSDSRGKSSFFSDRGSGSRGRFDDRGRSDYDGIGSRGDRSGFGKFERGGNSRWCDKSDEDDWSKPLPPSERLEQELFSGGNTGINFEKYDDIPVEATGNNCPPHIESFSDVEMGEIIMGNIELTRYTRPTPVQKHAIPIIKEKRDLMACAQTGSGKTAAFLLPILSQIYSDGPGEALRAMKENGRYGRRKQYPISLVLAPTRELAVQIYEEARKFSYRSRVRPCVVYGGADIGQQIRDLERGCHLLVATPGRLVDMMERGKIGLDFCKYLVLDEADRMLDMGFEPQIRRIVEQDTMPPKGVRHTMMFSATFPKEIQMLARDFLDEYIFLAVGRVGSTSENITQKVVWVEESDKRSFLLDLLNATGKDSLTLVFVETKKGADSLEDFLYHEGYACTSIHGDRSQRDREEALHQFRSGKSPILVATAVAARGLDISNVKHVINFDLPSDIEEYVHRIGRTGRVGNLGLATSFFNERNINITKDLLDLLVEAKQEVPSWLENMAYEHHYKGSSRGRSKSRFSGGFGARDYRQSSGASSSSFSSSRASSSRSGGGGHGSSRGFGGGGYGGFYNSDGYGGNYNSQGVDWWGN

SEQ ID NO: 24779 - protein, 415 aa, Homo sapiens
LCIFGIVDHLGKENDVFQPKTQFLGVYFVSSQEFLANAYVLAVLLFLALLLQRTFLQASYYVAIETGINLRGAIQTKIYNKIMHLSTSNLSMGEMTAGQICNLVAIDTNQLMWFFFLCPNLWAMPVQAQPKLAEEHPDGLHLSTTNEGLDARDKSRRVMLQGRPGKRIIVGVILLYYILGVSALIGAAVIILLAPVQYFVATKLSQAQRSTLEYSNERLKQTNEMLRGIKLLKLYAWENIFRTRVETTRRKEMTSLRAFAIYTSISIFMNTAIPIAAVLITFVGHVSFFKEADFSPSVAFASLSLFHILVTPLFLLSSVVRSTVKALVSVQKLSEFLSSAEIREEQCAPHEPTPQGPASKYQAVPLRVVNRKRPAREDCRGLTGPLQSLVPSADGDADNCCVQIMGGYFTWTPDG

SEQ ID NO: 24780 - protein, 51 aa, Homo sapiens
MEERGDSEPTPGCSGLGPGGVRGFGDGGGAPSWAPEDAWMGTHPKAKAGMK

SEQ ID NO: 24781 - protein, 519 aa, Homo sapiens
MRTTQEAAGGGGETSACKPSSVRLAPSFSFHAAGLQMAGQMPHSHQYSDRRQPNISDQQVSALSYSDQIQQPLTNQVMPDIVMLQRRMPQTFRDPATAPLRKLSVDLIKTYKHINEVYYAKKKRRHQQGQGDDSSHKKERKVYNDGYDDDNYDYIVKNGEKWMDRYEIDSLIGKGSFGQVVKAYDRVEQEWVAIKIIKNKKAFLNQAQIEVRLLELMNKHDTEMKYYIVHLKRHFMFRNHLCLVFEMLSYNLYDLLRNTNFRGVSLNLTRKFAQQMCTALLFLATPELSIIHCDLKPENILLCNPKRSAIKIVDFGSSCQLGQRIYQYIQSRFYRSPEVLLGMPYDLAIDMWSLGCILVEMHTGEPLFSGANEVLLFLFLIQVDQMNKIVEVLGIPPAHILDQAPKARKFFEKLPDGTWNLKKTKDGKREYKPPGTRKLHNILGVETGGPGGRRAGESGHTVADYLKFKDLILRMLDYDPKTRIQPYYALQHSFFKKTADEGTNTSNSVSTSPAMEQSQ

SEQ ID NO: 24782 - protein, 1098 aa, Homo sapiens; identical to SEQ ID NO: 23194

SEQ ID NO: 24783 - protein, 334 aa, Homo sapiens
MVYRYCCKLNKKLKSYSLSRKKIVHYTCFDQRKRANAAFLIGAYAVIYLKKTPEEAYRALLSGSNPPYLPFRDASFGNCTYNLTILDCLQGIRKGLQHGFFDFETFDVDEYEHYERVENGDFNWIVPGKFLAFSGPHPKSKIENGYPLHAPEAYFPYFKKHNVTAVVRLNKKIYEAKRFTDAGFEHYDLFFIDGSTPSDNIVRRFLNICENTEGAIAVHCKAGLGRTGTLIACYVMKHYRFTHAEIIAWIRICRPGSIIGPQQHFLEENSLNIFLVNLPLVPQHLKNSLNTCCLPAPCILVTASHLSSFDSKKTSIVVGPRRHFPIQTEKSTIQ

SEQ ID NO: 24784 - protein, 928 aa, Homo sapiens
MDRAALRAAAMGEKKEGGGGGDAAAAEGGAGAAASRALQQCGQLQKLIDISIGSLRGLRTKCAVSNDLTQQEIRTLEAKLVRYICKQRQCKLSVAPGERTPELNSYPRFSDWLYTFNVRPEVVQEIPRDLTLDALLEMNEAKVKETLRRCGASGDECGRLQYALTCLRKVTGLGGEHKEDSSWSSLDARRESGSGPSTDTLSAASLPWPPGSSQLGRAGNSAQGPRSISVSALPASDSPTPSFSEGLSDTCIPLHASGRLTPRALHSFITPPTTPQLRRHTKLKPPRTPPPPSRKVFQLLPSFPTLTRSKSHESQLGNRIDDVSSMRFDLSHGSPQMVRRDIGLSVTHRFSTKSWLSQVCHVCQKSMIFGVKCKHCRLKCHNKCTKEAPACRISFLPLTRLRRTESVPSDINNPVDRAAEPHFGTLPKALTKKEHPPAMNHLDSSSNPSSTTSSTPSSPAPFPTSSNPSSATTPPNPSPGQRDSRFNFPAAYFIHHRQQFIFPDISAFAHAAPLPEAADGTRLDDQPKADVLEAHEAEAEEPEAGKSEAEDDEDEVDDLPSSRRPWRGPISRKASQTSVYLQEWDIPFEQVELGEPIGQGRWGRVHRGRWHGEVAIRLLEMDGHNQDHLKLFKKEVMNYRQTRHENVVLFMGACMNPPHLAIITSFCKGRTLHSFVRDPKTSLDINKTRQIAQEIIKGMGYLHAKGIVHKDLKSKNVFYDNGKVVITDFGLFGISGVVREGRRENQLKLSHDWLCYLAPEIVREMTPGKDEDQLPFSKAADVYAFGTVWYELQARDWPLKNQAAEASIWQIGSGEGMKRVLTSVSLGKEVSEILSACWAFDLQERPSFSLLMDMLEKLPKLNRRLSHPGHFWKSADRWRSRYYGKGRYGHPDFKSSCPILEEYINSSKVVPRFERFGLGVLESSNPKM

SEQ ID NO: 24785 - protein, 487 aa, Homo sapiens
MQLPRWWELGDPCAWTGQGRGTRRMSPATTGTFLLTVYSIFSKVHSDRNVYPSAGVLFVHVLEREYFKGEFPPYPKPGEISNDPITFNTNLMGYPDRPGWLRYIQRTPYSDGVLYGSPTAENVGKPTIIEITAYNRRTFETARHNLIINIMSAEDGVLLSSPRLECNGTISANCNLRLLGSDFPLPYQAEFFIKNMNVEEMLASEVLGDFLGAVKNVWQPERLNAINITSALDRGGRVPLPINDLKEGVYVMVGADVPFSSCLREVENPQNQLRCSQEMEPVITCDKKFRTQFYIDWCKISLVDKTKQVSTYQEVIRGEGILPDGGEYKPPSDSLKSRDYYTDFLITLAVPSAVALVLFLILAYIMCCRREGVEKRNMQTPDIQLVHHSAIQKSTKELRDMSKNREIAWPLSTLPVFHPVTGEIIPPLHTDNYDSTNMPLMQTQQNLPHQTQIPQQQTTGDFRLTTFQRFEVNGIPEERKLTEAMNL

SEQ ID NO: 24786 - protein, 753 aa, Homo sapiens
MREPEELMPDSGAVFTFGKSKFAENNPGKFWFKNDVPVHLSCGDEHSAVVTGNNKLYMFGSNNWGQLGLGSKSAISKPTCVKALKPEKVKLAACGRNHTLVSTEGGNVYATGGNNEGQLGLGDTEERNTFHVISFFTSEHKIKQLSAGSNTSAALTEDGRLFMWGDNSEGQIGLKNVSNVCVPQQVTIGKPVSWISCGYYHSAFVTTDGELYVFGEPENGKLGLPNQLLGNHRTPQLVSEIPEKVIQVACGGEHTVVLTENAVYTFGLGQFGQLGLGTFLFETSEPKVIENIRDQTISYISCGENHTALITDIGLMYTFGDGRHGKLGLGLENFTNHFIPTLCSNFLRFIVKLERSPDSFSMRRTLPPIEGTLGLSACFLPNSVFPRCSERNLQESVLSEQDLMQPEEPDYLLDEMTKEAEIDNSSTVESLGETTDILNMTHIMSLNSNEKSLKLSPVQKQKKQQTIGELTQDTALTENDDSDEYEEMSEMKEGKACKQHVSQGIFMTQPATTIEAFSDEEVEIPEEKEGAEDSKGNGIEEQEVEANEENVKVHGGRKEKTEILSDDLTDKAEDHEFSKTEELKLEDVDEEINAENVESKKKTVGDDESVPTGYHSKTEGAERTNDDSSAETIEKKEKANLEERAICEYNENPKGYMLDDADSSSLEILENSETTPSKDMKKTKKIFLFKRVPSINQKIVKNNNEPLPEIKSIGDQIILKSDNKDADQNHMSQNHQNIPPTNTERRSKSCTIL

SEQ ID NO: 24787 - protein, 1101 aa, Homo sapiens
MARPVQLAPGSLALVLCRLEAQKAAGAAEEPGGRAVFRAFRRANARCFWNARLARAASRLAFQGWLRRGVLLVRAPPACLQVLRDAWRRRALRPPRGFRIRAVGECGTRRGGASRPVQLAPGSLALVLCRLEAQKAAGAAEEPGGRAVFRAFRRANARCFWNARLARAASRLAFQGWLRRGVLLVRAPPACLQVLRDAWRRRALRPPRGFRIRAVGDVFPVQMNPITQSQFVPLGEVLCCAISDMNTAQIVVTQESLLERLMKHYPGIAIPSEDILYTTLGTLIKERKIYHTGEGYFIVTPQTYFITNTTTQENKRMLPSDESRLMPASMTYLVSMESCAESAQENAAPISHCQSCQCFRDMHTQDVQEAPVAAEVTRKSHRGLGESVSWVQNGAVSVSAEHHICESTKPLPYTRDKEKGKKFGFSLLWRSLSRKEKPKTEHSSFSAQFPPEEWPVRDEDDLDNIPRDVEHEIIKRINPILTVDNLIKHTVLMQKYEEQKKYNSQGTSTDMLTIGHKYPSKEGVKKRQGLSAKPQGQGHSRRDRHKARNQGSEFQPGSIRLEKHPKLPATQPIPRIKSPNEMVGQKPLGEITTVLGSHLIYKKRISNPFQGLSHRGSTISKGHKIQKTSDLKPSQTGPKEKPFQKPRSLDSSRIFDGKAKEPYAEQPNDKMEAESIYINDPTVKPINDDFRGHLFSHPQQSMLQNDGKCCPFMESMLRYEVYGGENEVIPEVLRKSHSHFDKLGETKQTPHSLPSRGASFSDRTPSACRLVDNTIHQFQNLGLLDYPVGVNPLRQAARQDKDSEELLRKGFVQDAETTSLENEQLSNDDQALYQNEVEDDDGACSSLYLEEDDISENDDLRQMLPGHSQYSFTGGSQGNHLGKQKVIERSLTEYNSTMERVESQVLKRNECYKPTGLHATPGESQEPNLSAESCGLNSGAQFGFNYEEEPSVAKCVQASAPADERIFDYYSARKASFEAEVIQDTIGDTGKKPASWSQSPQNQEMRKHFPQKFQLFNTSHMPVLAQDVQYEHSHLEGTENHSMAGDSGIDSPRTQSLGSNNSVILDGLKRRQNFLQNVEGTKSSQPLTSNSLLPLTPVINV

SEQ ID NO: 24788 - protein, 1581 aa, Homo sapiens
MRGQAAAPGPVWILAPLLLLLLLLGRRARAAAGADAGPGPEPCATLVQGKFFGYFSAAAVFPANASRCSWTLRNPDPRRYTLYMKVAKAPVPCSGPGRVRTYQFDSFLESTRTYLGVESFDEVLRLCDPSAPLAFLQASKQFLQMRRQQPPQHDGLRPRAGPPGPTDDFSVEYLVVGNRNPSRAACQMLCRWLDACLAGSRSSHPCGIMQTPCACLGGEAGGPAAGPLAPRGDVCLRDAVAGGPENCLTSLTQDRGGHGATGGWKLWSLWGECTRDCGGGLQTRTRTCLPAPGVEGGGCEGVLEEGRQCNREACGPAGRTSSRSQSLRSTDARRREELGDELQQFGFPAPQTGDPAAEEWSPWSVCSSTCGEGWQTRTRFCVSSSYSTQCSGPLREQRLCNNSAVCPVHGAWDEWSPWSLCSSTCGRGFRDRTRTCRPPQFGGNPCEGPEKQTKFCNIALCPVDGNWNEWSSWSACSASCSQGRQQRTRECNGPSYGGAECQGHWVETRDCFLQQCPVDGKWQAWASWGSCSVTCGAGSQRRERVCSGPFFGGAACQGPQDEYRQCGTQRCPEPHEICDEDNFGAVIWKETPAGEVAAVRCPRNATGLILRRCELDEEGIAYWEPPTYIRCVSIDYRNIQMMTREHLAKAQRGLPGEGVSEVIQTLVEISQDGTSYSGDLLSTIDVLRNMTEIFRRAYYSPTPGDVQNFVQILSNLLAEENRDKWEEAQLAGPNAKELFRLVEDFVDVIGFRMKDLRDAYQVTDNLVLSIHKLPASGATDISFPMKGWRATGDWAKVPEDRVTVSKSVFSTGLTEADEASVFVVGTVLYRNLGSFLALQRNTTVLNSKVISVTVKPPPRSLRTPLEIEFAHMYNGTTNQTCILWDETDVPSSSAPPQLGPWSWRGCRTVPLDALRTRCLCDRLSTFAILAQLSADANMEKATLPSVTLIVGCGVSSLTLLMLVIIYVSVWRYIRSERSVILINFCLSIISSNALILIGQTQTRNKVVCTLVAAFLHFFFLSSFCWVLTEAWQSYMAVTGHLRNRLIRKRFLCLGWGLPALVVAISVGFTKAKGYSTMNYCWLSLEGGLLYAFVGPAAAVVLVNMVIGILVFNKLVSKDGITDKKLKERAGASLWSSCVVLPLLALTWMSAVLAVTDRRSALFQILFAVFDSLEGFVIVMVHCILRREVQDAVKCRVVDRQEEGNGDSGGSFQNGHAQLMTDFEKDVDLACRSVLNKDIAACRTATITGTLKRPSLPEEEKLKLAHAKGPPTNFNSLPANVSKLHLHGSPRYPGGPLPDFPNHSLTLKRDKAPKSSFVGDGDIFKKLDSELSRAQEKALDTSYVILPTATATLRPKPKEEPKYSIHIDQMPQTRLIHLSTAPEASLPARSPPSRQPPSGGPPEAPPAQPPPPPPPPPPPPQQPLPPPPNLEPAPPSLGDPGEPAAHPGPSTGPSTKNENVATLSVSSLERRKSRYAELDFEKIMHTRKRHQDMFQDLNRKLQHAAEKDKEVLGPDSKPEKQQTPNKRPWESLRKAHGTPTWVKKELEPLQPSPLELRSVEWERSGATIPLVGQDIIDLQTEV

SEQ ID NO: 24789 - protein, 338 aa, Homo sapiens
MPLAFCGSENHSAAYRVDQGVLNNGCFVDALNVVPHVFLLFITFPILFIGWGSQSSKVHIHHSTWLHFPGHNLRWILTFMLLFVLVCEIAEGILSDGVTESHHLHLYMPAGMAFMAAVTSVVYYHNIETSNFPKLLIALLVYWTLAFITKTIKFVKFLDHAIGFSQLRFCLTGLLVILYGMLLLVEVNVIRVRRYIFFKTPREVKPPEDLQDLGVRFLQPFVNLLSKGTYWWMNAFIKTAHKKPIDLRAIGKLPIAMRALTNYQRLCEAFDAQRKDIQGTQGARAIWQALSHAFGRRLVLSSTFRILADLLGFAGPLCIFGIVDHLGKENDVFQPKFS

SEQ ID NO: 24790 - protein, 619 aa, Homo sapiens
MPLAFCGSENHSAAYRVDQGVLNNGCFVDALNVVPHVFLLFITFPILFIGWGSQSSKVHIHHSTWLHFPGHNLRWILTFMLLFVLVCEIAEGILSDGVTESHHLHLYMPAGMAFMAAVTSVVYYHNIETSNFPKLLIALLVYWTLAFITKTIKFVKFLDHAIGFSQLRFCLTGLLVILYGMLLLVEVNVIRVRRYIFFKTPREVKPPEDLQDLGVRFLQPFVNLLSKGTYWWMNAFIKTAHKKPIDLRAIGKLPIAMRALTNYQRLCEAFDAQRKDIQGTQGARAIWQALSHAFGRRLVLSSTFRILADLLGFAGPLCIFGIVDHLGKENDVFQPKTQFLGVYFVSSQEFLANAYVLAVLLFLALLLQRTFLQASYYVAIETGINLRGAIQTKIYNKIMHLSTSNLSMGEMTAGQICNLVAIDTNQLMWFFFLCPNLWAMPVQIIVGVILLYYILGVSALIGAAVIILLAPVQYFVATKLSQAQRSTLEYSNERLKQTNEMLRGIKLLKLYAWENIFRTRVETTRRKEMTSLRAFAIYTSISIFMNTAIPIAAVLITFVGHVSFFKEADFSPSVAFASLSLFHILVTPLFLLSSVVRSTVKALVRGEGCLCASRAACKS

SEQ ID NO: 24791 - protein, 586 aa, Homo sapiens
MEDPRGINGQSVQTSQASSDVAVSSSCRSMEMQDLTSPHSRLSGSSESPSGPKLGNSHINSNSMTPNGTEVKTEPMSSSETASTTADGSLNNFSGSAIGSSSFSPRPTHQFSPPQIYPSNRPYPHILPTPSSQTMAAYGQTQFTTGMQQATAYATYPQPGQPYGISSYGIKTEGGLSQSQSPGQTGFLSYGTSFSTPQPGQAPYSYQMQGSSFTTSSGIYTGNNSLTNSSGFNSSQQDYPSYPSFGQGQYAQYYNSSPYPAHYMTSSNTSPTTPSTNATYQLQEPPSGITSQAVTDPTAEYSTIHSPSTPIKDSDSDRLRRGSDGKSRGRGRRNNNPSPPPDSDLERVFIWDLDETIIVFHSLLTGSYANRYGRECDQVHIDDVSSDDNGQDLSTYNFGTDGFPAAATSANLCLATGVRGGVDWMRKLAFRYRRVKEIYNTYKNNVGGLLGPAKREAWLQLRAEIEALTDSWLTLALKALSLIHSRTNCVNILVTTTQLIPALAKVLLYGLGIVFPIENIYSATKIGKESCFERIIQRFGRKVVYVVIGDGVEEEQGAKKHAMPFWRISSHSDLMALHHALELEYL

SEQ ID NO: 24792 - protein, 554 aa, Homo sapiens
AFSRAHRIGQNKKVMIYRFVTRASVEERITQVAKKKMMLTHLVVRPGLGSKTGSMSKQELDDILKFGTEELFKDEATDGGGDNKEGEDSSVIHYDDKAIERLLDRNQDETEDTELQGMNEYLSSFKVAQYVVREEEMGEEEEVEREIIKQEESVDPDYWEKLLRHHYEQQQEDLARNLGKGKRIRKQVNYNDGSQEDRDWQDDQSDNQSDYSVASEEGDEDFDERSEAPRRPSRKGLRNDKDKPLPPLLARVGGNIEVLGFNARQRKAFLNAIMRYGMPPQDAFTTQWLVRDLRGKSEKEFKAYVSLFMRHLCEPGADGAETFADGVPREGLSRQHVLTRIGVMSLIRKKVQEFEHVNGRWSMPELAEVEENKKMSQPGSPSPKTPTPSTPGDTQPNTPAPVPPAEDGIKIEENSLKEEESIEGEKEVKSTAPETAIECTQAPAPASEDEKVVVEPPEGEEKVEKAEVKERTEEPMETEPKGKGAADVEKVEEKSAIDLTPIVVEDKEEKKEEEEKKEVMLQNGETPKDLNDEKQKKNIKQRFMFNIADGGFTE

SEQ ID NO: 24793 - protein, 1892 aa, Homo sapiens
MASGLGSPSPCSAGSEEEDMDALLNNSLPPPHPENEEDPEEDLSETETPKLKKKKKPKKPRDPKIPKSKRQKKELGDSSGEGPEFVEEEEEVALRSDSEGSDYTPGKKKKKKLGPKKEKKSKSKRKEEEEEEDDDDDSKEPKSSAQLLEDWGMEDIDHVFSEEDYRTLTNYKAFSQFVRPLIAAKNPKIAVSKMMMVLGAKWREFSTNNPFKGSSGASVAAAAAAAVAVVESMVTATEVAPPPPPVEVPIRKAKTKEGKGPNARRKPKGSPRVPDAKKPKPKKVAPLKIKLGGFGSKRKRSSSEDDDLDVESDFDDASINSYSVSDGSTSRSSRSRKKLRTTKKKKKDHQDYCEVCQQGGEIILCDTCPRAYHMVCLDPDMEKAPEGKWSCPHCEKEGIQWEAKEDNSEGEEILEEVGGDLEEEDDHHMEFCRVCKDGGELLCCDTCPSSYHIHCLNPPLPEIPNGEWLCPRCTCPALKGKVQKILIWKWGQPPSPTPVPRPPDADPNTPSPKPLEGRPERQFFVKWQGMSYWHCSWVSELQLELHCQVMFRNYQRKNDMDEPPSGDFGGDEEKSRKRKNKDPKFAEMEERFYRYGIKPEWMMIHRILNHSVDKKGHVHYLIKWRDLPYDQASWESEDVEIQDYDLFKQSYWNHRELMRGEEGRPGKKLKKVKLRKLERPPETPTVDPTVKYERQPEYLDATGGTLHPYQMEGLNWLRFSWAQGTDTILADEMGLGKTVQTAVFLYSLYKEGHSKGPFLVSAPLSTIINWEREFEMWAPDMYVVTYVGDKDSRAIIRENEFSFEDNAIRGGKKASRMKKEASVKFHVLLTSYELITIDMAILGSIDWACLIVDEAHRLKNNQSKFFRVLNGYSLQHKLLLTGTPLQNNLEELFHLLNFLTPERFHNLEGFLEEFADIAKEDQIKKLHDMLGPHMLRRLKADVFKNMPSKTELIVRVELSPMQKKYYKYILTRNFEALNARGGGNQVSLLNVVMDLKKCCNHPYLFPVAAMEAPKMPNGMYDGSALIRASGKLLLLQKMLKNLKEGGHRVLIFSQMTKMLDLLEDFLEHEGYKYERIDGGITGNMRQEAIDRFNAPGAQQFCFLLSTRAGGLGINLATADTVIIYDSDWNPHNDIQAFSRAHRIGQNKKVMIYRFVTRASVEERITQVAKKKMMLTHLVVRPGLGSKTGSMSKQELDDILKFGTEELFKDEATDGGGDNKEGEDSSVIHYDDKAIERLLDRNQDETEDTELQGMNEYLSSFKVAQYVVREEEMGEEEEVEREIIKQEESVDPDYWEKLLRHHYEQQQEDLARNLGKGKRIRKQVNYNDGSQEDRDWQDDQSDNQSDYSVASEEGDEDFDERSEAPRRPSRKGLRNDKDKPLPPLLARVGGNIEVLGFNARQRKAFLNAIMRYGMPPQDAFTTQWLVRDLRGKSEKEFKAYVSLFMRHLCEPGADGAETFADGVPREGLSRQHVLTRIGVMSLIRKKVQEFEHVNGRWSMPELAEVEENKKMSQPGSPSPKTPTPSTPGDTQPNTPAPVPPAEDGIKIEENSLKEEESIEGEKEVKSTAPETAIECTQAPAPASEDEKVVVEPPEGEEKVEKAEVKERTEEPMETEPKGAADVEKVEEKSAIDLTPIVVEDKEEKKEEEEKKEVMLQNGETPKDLNDEKQKKNIKQRFMFNIADGGFTELHSLWQNEERAATVTKKTYEIWHRRHDYWLLAGIINHGYARWQDIQNDPRYAILNEPFKGEMNRGNFLEIKNKFLARRFKLLEQALVIEEQLRRAAYLNMSEDPSHPSMALNTRFAEVECLAESHQHLSKESMAGNKPANAVLHKVLKQLEELLSDMKADVTRLPATIARIPPVAVRLQMSERNILSRLANRAPEPTPQQVAQQQ

SEQ ID NO: 24794 - protein, 756 aa, Homo sapiens
MEPWSSRWKTKRWLWDFTVTTLALTFLFQAREVRGAAPVDVLKALDFHNSPEGISKTTGFCTNRKNSKGSDTAYRVSKQAQLSAPTKQLFPGGTFPEDFSILFTVKPKKGIQSFLLSIYNEHGIQQIGVEVGRSPVFLFEDHTGKPAPEDYPLFRTVNIADGKWHRVAISVEKKTVTMIVDCKKKTTKPLDRSERAIVDTNGITVFGTRILDEEVFEGDIQQFLITGDPKAAYDYCEHYSPDCDSSAPKAAQAQEPQIDEYAPEDIIEYDYEYGEAEYKEAESVTEGPTVTEETIAQTEANIVDDFQEYNYGTMESYQTEAPRHVSGTNEPNPVEEIFTEEYLTGEDYDSQRKNSEDTLYENKEIDGRDSDLLVDGDLGEYDFYEYKEYEDKPTSPPNEEFGPGVPAETDITETSINGHGAYGEKGQKGEPAVVEPGMLVEGPPGPAGPAGIMGPPGLQGPTGPPGDPGDRGPPGRPGLPGADGLPGPPGTMLMLPFRYGGDGSKGPTISAQEAQAQAILQQARIALRGPPGPMGLTGRPGPVGGPGSSGAKGESGDPGPQGPRGVQGPPGPTGKPGKRGRPGADGGRGMPGEPGAKGDRGFDGLPGLPGDKGHRGERGPQGPPGPPGDDGMRGEDGEIGPRGLPGEAGPRGLLGPRGTPGAPGQPGMAGVDGPPGPKGNMGPQGEPGPPGQQGNPGPQGLPGPQGPIGPPGEKVSFSFSLFYKKVIKFACDKRFVGRHDERKVVKLSLPLYLIYE

SEQ ID NO: 24795 - protein, 480 aa, Homo sapiens
ELGDPCAWTGQGRGTRRMSPATTGTFLLTAFLLSCADGINGTVNWKTRQANNFIISRKMAAGMKDVYSIFSKVHSDRNVYPSAGVLFVHVLEREYFKGEFPPYPKPGEISNDPITFNTNLMGYPDRPGWLRYIQRTPYSDGVLYGSPTAENVGKPTIIEITAYNRRTFETARHNLIINIMSAEDFPLPYQAEFFIKNMNVEEMLASEVLGDFLGAVKNVWQPERLNAINITSALDRGGRVPLPINDLKEGVYVMVGADVPFSSCLREVENPQNQLRCSQEMEPVITCDKKFRTQFYIDWCKISLVDKTKQVSTYQEVIRGEGILPDGGEYKPPSDSLKSRDYYTDFLITLAVPSAVALVLFLILAYIMCCRREGVIQLVHHSAIQKSTKELRDMSKNREIAWPLSTLPVFHPVTGEIIPPLHTDNYDSTNMPLMQTQQNLPHQTQIPQQQTTGDFRLTTFQRFEVNGIPEERKLTEAMNL

SEQ ID NO: 24796 - protein, 503 aa, Homo sapiens
MSHVAVENALGLDQQFAGLDLNSSDNQSGGSTASKGRYIPPHLRNREATKGFYDKDSSGWSSSKDKDAYSSFGSRSDSRGKSSFFSDRGSGSRGRFDDRGRSDYDGIGSRGDRSGFGKFERGGNSRWCDKSDEDDWSKPLPPSERLEQELFSGGNTGINFEKYDDIPVEATGNNCPPHIESFSDVEMGEIIMGNIELTRYTRPTPVQKHAIPIIKEKRDLMACAQTGSGKTAAFLLPILSQIYSDGPGEALRAMKENGRYGRRKQYPISLVLAPTRELAVQIYEEARKFSYRSRVRPCVVYGGADIGQQIRDLERGCHLLVATPGRLVDMMERGKIGLDFCKYLVLDEADRMLDMGFEPQIRRIVEQDTMPPKGVRHTMMFSATFPKEIQMLARDFLDEYIFLAVGRVGSTSENITQKVVWVEESDKRSFLLDLLNATGKDSLTLVFVETKKGADSLEDFLYHEGYACTSIHGDRSQRDREEALHQFRSGKSPILVATALFSR

SEQ ID NO: 24797 - protein, 978 aa, Homo sapiens
MEPGEVKDRILENISLSVKKLQSYFAACEDEIPAIRNHDKVLQRLCEHLDHALLYGLQDLSSGYWVLVVHFTRREAIKQIEVLQHVATNLGRSRAWLYLALNENSLESYLRLFQENLGLLHKYYVKNALVCSHDHLTLFLTLVSGLEFIRFELDLDAPYLDLAPYMPDYYKPQYLLDFEDRLPSSVHGSDSLSLNSFNSVTSTNLEWDDSAIAPSSEDYDFGDVFPAVPSVPSTDWEDGDLTDTVSGPRSTASDLTSSKASTRSPTQRQNPFNEEPAETVSSSDTTPVHTTSQEKEEAQALDPPDACTELEVIRVTKKKKIGKKKKSRSDEEEEGEGPSSTTESSERSEPGLLIPEMKDTSMERLGQPLSKVIDQLNGQLDPSTWCSRAEPPDQSFRTGSPGDAPERPPLCDFSEGLSAPMDFYRFTVESPSTVTSGGGHHDPAGLGQPLHVPSSPEAAGQEEEGGGGEGQTPRPLEDTTREAQELEAQLSLVREGPVSEPEPGTQEVLCQLKRDQPSPCLSSAEDSGVDEGQGSPSEMVHSSEFRVDNNHLLLLMIHVFRENEEQLFKMIRMSTGHMEGNLQLLYVLLTDCYVYLLRKGATEKPYLVEEAVSYNELDYVSVGLDQQTVKLVCTNRRKQFLLDTADVALAEFFLASLKSAMIKGCREPPYPSILTDATMEKLALAKFVAQESKCEASAVTVRFYGLVHWEDPTDESLGPTPCHCSPPEGTITKEGMLHYKAGTSYLGKEHWKTCFVVLSNGILYQYPDRTDVIPLLSVNMGGEQCGGCRRANTTDRPHAFQVILSDRPCLELSAESEAEMAEWMQHLCQAVSKGVIPQGVAPSPCIPCCLVLTDDRLFTCHEDCQTSFFRSLGTAKLGDISAVSTEPGKEYCVLEFSQDSQQLLPPWVIYLSCTSELDRLLSALNSGWKTIYQVDLPHTAIQEASNKKKFEDALSLIHSAWQRSDSLCRGRASRDPWC

SEQ ID NO: 24798 - protein, 791 aa, Homo sapiens
MYAFYSLLIYIFYSLFRRDGGAAAAAEPGDPAQRARKPRGRRRPDLPAPELWTELTGLAASSEPEDGSEGAAEGRAAAVSLEEALLRLAEFLSVQLGAEESCGGPADLGQSGEVPSLLTVTSQLLALLAWLRSPRGRQALLQGTQPAPRVRPPSPDGSTSQEESPSHFTAVPGEPLGDETQGQQPLQLEEDQRAWQRLEQLILGQLEELKQQLEQQEEELGRLRLGVGATDSEKRVQHLTLENEALKQSLSLMRDLLLHWGPGPPIRAPQEEAEALLELQGRLQEAQDTTEALRAQLGVQEVQLQGLQGALQQLQQETEQNCRRELQQMHGQLAGLRARMASLRQGCGDLRGLVSTFTQSCQGSLSEARGQVSWALGALSSGGPGTQLPEGQQGPPAGCPGRLPELKGNIRVLCRLRPGTSSSLVSVEPGPGGTVTTCYRGRHRRFRLDWVFPPDASQEEVFRELEPAVLSCLRGYSVCIFTYGQTGTGKTYSMEGPPEDPGIVPRALQSLFREMGAGRQHRVTLSMVEIYNEAVRDLLAPGPPERLAVRQGPEGQGGIQVAGLTHWDVPNLETLHQMLKLGRSNRATAATAMNQRSSRSHALVTLTLRAASPPRAPGTAGTLHLVDLAGSERARKAGAAGPPRGDPDGARRLREAQTINRSLLALGGVMAALRAHRPHVPFRDSQLTRLLQPALGPGTTAVLLLQISTRPEDLGETVCSLKFADRVGQVELGPARRRRVPRSSGTPSSLSTDTPLTGTPCTPTPSPGSPPCPSPDNGSGSALAPAEGLPL

SEQ ID NO: 24799 - protein, 225 aa, Homo sapiens
MWTLGRRAVAGLLASPSPAQAQTLTRVPRPAELAPLCGRRGLRTDIDATCTPRRASSNQRGLNQIWNVKKQSVYLMNLRKSGTLGHPGSLDETTYERLAEETLDSLAEFFEDLADKPYTFEDYDVSFGVNVAPVAVPSLRKSEDHALQTGHVLDYLCFCLLGFQSASEQRSNPDSVVHRMAGVRSTTLLSSPCEWDWHPGCSSRSKYSRKHRAVPVHGPRCQAPG

SEQ ID NO: 24800 - protein, 521 aa, Homo sapiens
FLLSTRAGGLGLNLQSADTVIIFDSDWNPHQDLQAQDRAHRIGQQNEVRVLRLCTVNSVEEKILAAAKYKLNVDQKVIQAGMFDQKSSSHERRAFLQAILEHEEQDESRHCSTGSGSASFAHTAPPPAGVNPDLEEPPLKEEDEVPDDETVNQMIARHEEEFDLFMRMDLDRRREEARNPKRKPRLMEEDELPSWIIKDDAEVERLTCEEEEEKMFGRGSRHRKEVDYSDSLTEKQWLKAIEEGTLEEIEEEVRQKKSSRKRKRDSDAGSSTPTTSTRSRDKDDESKKQKKRGRPPAEKLSPNPPNLTKKMKKIVDAVIKYKDSSGRQLSEVFIQLPSRKELPEYYELIRKPVDFKKIKERIRNHKYRSLNDLEKDVMLLCQNAQTFNLEGSLIYEDSIVLQSVFTSVRQKIEKEDDSEGEESEEEEEGEEEGSESESRSVKVKIKLGRKEKAQDRLKGGRRRPSRGSRAKPVVSDDDSEEEQEELRTCQITASLFPSNCNGSAHHWEMEDLAAQVFVDQD

SEQ ID NO: 24801 - protein, 1325 aa, Homo sapiens
MLPVYQEVKPNPLQDANLCSRVFFWWLNPLFKIGHKRRLEEDDMYSVLPEDRSQHLGEELQGFWDKEVLRAENDAQKPSLTRAIIKCYWKSYLVLGIFTLIEESAKVIQPIFLGKIINYFENYDPMDSVALNTAYAYATVLTFCTLILAILHHLYFYHVQCAGMRLRVAMCHMIYRKALRLSNMAMGKTTTGQIVNLLSNDVNKFDQVTVFLHFLWAGPLQAIAVTALLWMEIGISCLAGMAVLIILLPLQSCFGKLFSSLRSKTATFTDARIRTMNEVITGIRIIKMYAWEKSFSNLITNLRKKEISKILRSSCLRGMNLASFFSASKIIVFVTFTTYVLLGSVITASRVFVAVTLYGAVRLTVTLFFPSAIERVSEAIVSIRRIQTFLLLDEISQRNRQLPSDGKKMVHVQDFTAFWDKASETPTLQGLSFTVRPGELLAVVGPVGAGKSSLLSAVLGELAPSHGLVSVHGRIAYVSQQPWVFSGTLRSNILFGKKYEKERYEKVIKACALKKDLQLLEDGDLTVIGDRGTTLSGGQKARVNLARAVYQDADIYLLDDPLSAVDAEVSRHLFELCICQILHEKITILVTHQLQYLKAASQILILKDGKMVQKGTYTEFLKSGIDFGSLLKKDNEESEQPPVPGTPTLRNRTFSESSVWSQQSSRPSLKDGALESQDTENVPVTLSEENRSEGKVGFQAYKNYFRAGAHWIVFIFLILLNTAAQVAYVLQDWWLSYWANKQSMLNVTVNGGGNVTEKLDLNWYLGIYSGLTVATVLFGIARSLLVFYVLVNSSQTLHNKMFESILKAPVLFFDRNPIGRILNRFSKDIGHLDDLLPLTFLDFIQTLLQVVGVVSVAVAVIPWIAIPLVPLGIIFIFLRRYFLETSRDVKRLESTTRSPVFSHLSSSLQGLWTIRAYKAEERCQELFDAHQDLHSEAWFLFLTTSRWFAVRLDAICAMFVIIVAFGSLILAKTLDAGQVGLALSYALTLMGMFQWCVRQSAEVENMMISVERVIEYTDLEKEAPWEYQKRPPPAWPHEGVIIFDNVNFMYSPGGPLVLKHLTALIKSQEKVGIVGRTGAGKSSLISALFRLSEPEGKIWIDKILTTEIGLHDLRKKMSIIPQEPVLFTGTMRKNLDPFNEHTDEELWNALQEVQLKETIEDLPGKMDTELAESGSNFSVGQRQLVCLARAILRKNQILIIDEATANVDPRTDELIQKKIREKFAHCTVLTIAHRLNTIIDSDKIMVLDSGRLKEYDEPYVLLQNKESLFYKMVQQLGKAEAAALTETAKQVYFKRNYPHIGHTDHMVTNTSNGQPSTLTIFETAL

SEQ ID NO: 24802 - protein, 1358 aa, Homo sapiens
MAANVGSMFQYWKRFDLQQLQRELDATATVLANRQDESEQSRKRLIEQSREFKKNTPEDLRKQVAPLLKSFQGEIDALSKRSKEAEAAFLNVYKRLIDVPDPVPALDLGQQLQLKVQRLHDIETENQKLRETLEEYNKEFAEVKNQEVTIKALKEKIREYEQTLKNQAETIALEKEQKLQNDFAEKERKLQETQMSTTSKLEEAEHKVQSLQTALEKTRTELFDLKTKYDEETTAKADEIEMIMTDLERANQRAEVAQREAETLREQLSSANHSLQLASQIQKAPDVEQAIEVLTRSSLEVELAAKEREIAQLVEDVQRLQASLTKLRENSASQISQLEQQLSAKNSTLKQLEEKLKGQADYEEVKKELNILKSMEFAPSEGAGTQDAAKPLEVLLLEKNRSLQSENAALRISNSDLSGPYSTNSISSQSPLQQSPDVNGMAPSPSQSESAGSVSEGEEMDTAEIARQVKEQLIKHNIGQRIFGHYVLGLSQGSVSEILARPKPWNKLTVRGKEPFHKMKQFLSDEQNILALRSIQGRQRAEPAQPSSASGSGNSDDAIRSILQQARREMEAQQAALDPALKQAPLSQSDITILTPKLLSTSPMPTVSSYPPLAISLKKPSAAPEAGASALPNPPALKKEAQDAPGLDPQGAADCAQGVLRQVKNEVGRSGAWKDHWWSAVQPERRNAASSEEAKAEETGGGKEKGSGGSGGGSQPRAERSQLQGPSSSEYWKEWPSAESPYSQSSELSLTGASRSETPQNSPLPSSPIVPMSKPTKPSVPPLTPEQYEVYMYQEVDTIELTRQVKEKLAKNGICQRIFGEKVLGLSQGSVSDMLSRPKPWSKLTQKGREPFIRMQLWLNGELGQGVLPVQGQQQGPVLHSVTSLQDPLQQGCVSSESTPKTSASCSPAPESPMSSSESVKSLTELVQQPCPPIEASKDSKPPEPSDPPASDSQPTTPLPLSGHSALSIQELVAMSPELDTYGITKRVKEVLTDNNLGQRLFGETILGLTQGSVSDLLARPKPWHKLSLKGREPFVRMQLWLNDPNNVEKLMDMKRMEKKAYMKRRHSSVSDSQPCEPPSVGTEYSQGASPQPQHQLKKPRVVLAPEEKEALKRAYQQKPYPSPKTIEDLATQLNLKTSTVINWFHNYRSRIRRELFIEEIQAGSQGQAGASDSPSARSGRAAPSSEGDSCDGVEATEGPGSADTEEPKSQGEAEREEVPRPAEQTEPPPSGTPGPDDARDDDHEGGPVEGPGPLPSPASATATAAPAAPEDAATSAAAAPGEGPAAPSSAPPPSNSSSSSAPRRPSSLQSLFGLPEAAGARDSRDNPLRKKKAANLNSIIHRLEKAASREEPIEWEF

SEQ ID NO: 24803 - protein, 446 aa, Homo sapiens
GDPCAWTGQGRGTRRMSPATTGTFLLTVYSIFSKVHSDRNVYPSAGVLFVHVLEREYFKGEFPPYPKPGEISNDPITFNTNLMGYPDRPGWLRYIQRTPYSDGVLYGSPTAENVGKPTIIEITAYNRRTFETARHNLIINIMSAEDFPLPYQAEFFIKNMNVEEMLASEVLGDFLGAVKNVWQPERLNAINITSALDRGGRVPLPINDLKEGVYVMVGADVPFSSCLREVENPQNQLRCSQEMEPVITCDKKFRTQFYIDWCKISLVDKTKQVSTYQEVIRGEGILPDGGEYKPPSDSLKSRDYYTDFLITLAVPSAVALVLFLILAYIMCCRREGVEKRNMQTPDIQLVHHSAIQKSTKELRDMSKNREIAWPLSTLPVFHPVTGEIIPPLHTDNYDSTNMPLMQTQQNLPHQTQIPQQQTTEIIFSITAFVNLRRFSFDNFSKI

SEQ ID NO: 24804 - protein, 783 aa, Homo sapiens
MATQADLMELDMAMEPDRKAAVSHWQQQSYLDSGIHSGATTTAPSLSGKGNPEEEDVDTSQVLYEWEQGFSQSFTQEQVAGKNIDGQYAMTRAQRVRAAMFPETLDEGMQIPSTQFDAAHPTNVQRLAEPSQMLKHAVVNLINYQDDAELATRAIPELTKLLNDEDQVVVNKAAVMVHQLSKKEASRHAIMRSPQMVSAIVRTMQNTNDVETARCTAGTLHNLSHHREGLLAIFKSGGIPALVKMLGSPVDSVLFYAITTLHNLLLHQEGAKMAVRLAGGLQKMVALLNKTNVKFLAITTDCLQILAYGNQESKLIILASGGPQALVNIMRTYTYEKLLWTTSRVLKVLSVCSSNKPAIVEAGGMQALGLHLTDPSQRLVQNCLWTLRNLSDAATKQEGMEGLLGTLVQLLGSDDINVVTCAAGILSNLTCNNYKNKMMVCQVGGIEALVRTVLRAGDREDITEPAICALRHLTSRHQEAEMAQNAVRLHYGLPVVVKLLHPPSHWPLIKATVGLIRNLALCPANHAPLREQGAIPRLVQLLVRAHQDTQRRTSMGGTQQQFVEGVRMEEIVEGCTGALHILARDVHNRIVIRGLNTIPLFVQLLYSPIENIQRVAAGVLCELAQDKEAAEAIEAEGATAPLTELLHSRNEGVATYAAAVLFRMSEDKPQDYKKRLSVELTSSLFRTEPMAWNETADLGLDIGAQGEPLGYRQDDPSYRSFHSGGYGQDALGMDPMMEHEMGGHHPGADYPVDGLPDLGHAQDLMDGLPPGDSNQLAWFDTDL

SEQ ID NO: 24805 - protein, 624 aa, Homo sapiens
MGNFLSRENKVQVISESDRLYFATLRNRPKSTVNTHYFSIDEELVYENFYADFGPLNLAMVYRYCCKLNKKLKSYSLSRKKIVHYTCFDQRKRANAAFLIGAYAVIYLKKTPEEAYRALLSGSNPPYLPFRDASFGNCTYNLTILDCLQGIRKGLQHGFFDFETFDVDEYEHYERVENGDFNWIVPGKFLAFSGPHPKSKIENGYPLHAPEAYFPYFKKHNVTAVVRLNKKIYEAKRFTDAGFEHYDLFFIDGSTPSDNIVRRFLNICENTEGAIAVHCKAGLGRTGTLIACYVMKHYRFTHAEIIAWIRICRPGSIIGPQQHFLEEKQASLWVQGDIFRSKLKNRPSSEGSINKILSGLDDMSIGGNLSKTQNMERFGEDNLEDDDVEMKNGITQGDKLRALKSQRQPRTSPSCAFRSDDTKGHPRAVSQPFRLSSSLQGSAVTLKTSKMALSPSATAKRINRTSLSSGATVRSFSINSRLASSLGNLNAATDDPENKKTSSSSKAGFTASPFTNLLNGSSQPTTRNYPELNNNQYNRSSNSNGGNLNSPPGPHSAKTEEHTTILRPSYTGLSSSSARFLSRSIPVSAQTPPPGPQNPECNFCALPSQPRLPPKKFNSAKEAF

SEQ ID NO: 24806 - protein, 1285 aa, Homo sapiens
MRTTKVYKLVIHKKGFGGSDDELVVNPKVFPHIKLGDIVEIAHPNDEYSPLLLQVKSLKEDLQKETISVDQTVTQVFRLRPYQDVYVNVVDPKDVTLDLVELTFKDQYIGRGDMWRLKKSLVSTCAYITQKVEFAGIRAQAGELWVKNEKVMCGYISEDTRVVFRSTSAMVYIFIQMSCEMWDFDIYGDLYFEKAVNGFLADLFTKWKEKNCSHEVTVVLFSRTFYDAKSVDEFPEINRASIRQDHKGRFYEDFYKVVVQNERREEWTSLLVTIKKLFIQYPVLVRLEQAEGFPQGDNSTSAQGNYLEAINLSFNVFDKHYINRNFDRTGQMSVVITPGVGVFEVDRLLMILTKQRMIDNGIGVDLVCMGEQPLHAVPLFKLHNRSAPRDSRLGDDYNIPHWINHSFYTSKSQLFCNSFTPRIKLAGKKPASEKAKNGRDTSLGSPKESENALPIQVDYDAYDAQVFRLPGPSRAQCLTTCRSVRERESHSRKSASSCDVSSSPSLPSRTLPTEEVRSQASDDSSLGKSANILMIPHPHLHQYEVSSSLGYTSTRDVLENMMEPPQRDSSAPGRFHVGSAESMLHVRPGGYTPQRALINPFAPSRMPMKLTSNRRRWMHTFPVGPSGEAIQIHHQTRQNMAELQGSGQRDPTHSSAELLELAYHEAAGRHSNSRQPGDGMSFLNFSGTEELSVGLLSNSGAGMNPRTQNKDSLEDSVSTSPDPILTLSAPPVVPGFCCTVGVDWKSLTTPACLPLTTDYFPDRQGLQNDYTEGCYDLLPEADIDRRDEDGVQMTAQQVFEEFICQRLMQGYQIIVQPKTQKPNPAVPPPLSSSPLYSRGLVSRNRPEEEDQYWLSMGRTFHKVTLKDKMITVTRYLPKYPYESAQIHYTYSLCPSHSDSEFVSCWVEFSHERLEEYKWNYLDQYICSAGSEDFSLIESLKFWRTRFLLLPACVTATKRITEGEAHCDIYGDRPRADEDEWQLLDGFVRFVEGLNRIRRRHRSDRMMRKGTAMKGLQMTGPISTHSLESTAPPVGKKGTSALSALLEMEASQKCLGEQQAAVHGGKSSAQSAESSSVAMTPTYMDSPRKVSVDQTATPMLDGTSLGICTGQSMDRGNSQTFGNSQNIGEQGYSSTNSSDSSSQQLVASSLTSSSTLTEILEAMKHPSTGVQLLSEQKGLSPYCFISAEVVHWLVNHVEGIQTQAMAIDIMQWPCSSPPPPGTQQEWTTSPASSASGLRWPLWQKSSCTLRFLPFSCPGCLAGQPPMQVGTAPLAEVLEDGARRQHF

SEQ ID NO: 24807 - protein, 1166 aa, Homo sapiens
MSLKPQQQQQQQQQQQQQQQQQQQQQQQPPPAAANVRKPGGSGLLASPAAAPSPSSSSVSSSSATAPSSVVAATSGGGRPGLGRGRNSNKGLPQSTISFDGIYANMRMVHILTSVVGSKCEVQVKNGGIYEGVFKTYSPKCDLVLDAAHEKSTESSSGPKREEIMESILFKCSDFVVVQFKDMDSSYAKRDAFTDSAISAKVNGEHKEKDLEPWDAGELTANEELEALENDVSNGWDPNDMFRYNEENYGVVSTYDSSLSSYTVPLERDNSEEFLKREARANQLAEEIESSAQYKARVALENDDRSEEEKYTAVQRNSSEREGHSINTRENKYIPPGQRNREVISWGSGRQNSPRMGQPGSGSMPSRSTSHTSDFNPNSGSDQRVVNGGVPWPSPCPSPSSRPPSRYQSGPNSLPPRAATPTRPPSRPPSRPSRPPSHPSAHGSPAPVSTMPKRMSSEGPPRMSPKAQRHPRNHRVSAGRGSISSGLEFVSHNPPSEAATPPVARTSPSGGTWSSVVSGVPRLSPKTHRPRSPRQNSIGNTPSGPVLASPQAGIIPTEAVAMPIPAASPTPASPASNRAVTPSSEAKDSRLQDQRQNSPAGNKENIKPNETSPSFSKAENKGISPVVSEHRKQIDDLKKFKNDFRLQPSSTSESMDQLLNKNREGEKSRDLIKDKIEPSAKDSFIENSSSNCTSGSSKPNSPSISPSILSNTEHKRGPEVTSQGVQTSSPACKQEKDDKEEKKDAAEQVRKSTLNPNAKEFNPRSFSQPKPSTTPTSPRPQAQPSPSMVGHQQPTPVYTQPVCFAPNMMYPVPVSPGVQPLYPIPMTPMPVNQAKTYRAGKVKYLELELLRYVPNMPQQRQDQHHQSAMMHPASAAGPPIAATPPAYSTQYVAYSPQQFPNQPLVQHVPHYQSQHPHVYSPVIQGNARMMAPPTHAQPGLVSSSATQYGAHEQTHAMYACPKLPYNKETSPSFYFAISTGSLAQQYAHPNATLHPHTPHPQPSATPTGQQQSQHGGSHPAPSPVQHHQHQAAQALHLASPQQQSAIYHAGLAPTPPSMTPASNTQSPQNSFPAAQQTVFTIHPSHVQPAYTNPPHMAHVPQAHVQSGMVPSHPTAHAPMMLMTTQPPGGPQAALAQSALQPIPVSTTAHFPYMTHPSVQAHHQQQL

SEQ ID NO: 24808 - protein, 485 aa, Homo sapiens
MQLPRWWELGDPCAWTGQGRGTRRMSPATTGTFLLTVYSIFSKVHSDRNVYPSAGVLFVHVLEREYFKGEFPPYPKPGEISNDPITFNTNLMGYPDRPGWLRYIQRTPYSDGVLYGSPTAENVGKPTIIEITAYNRRTFETARHNLIINIMSAEDFPLPYQAEFFIKNMNVEEMLASEVLGDFLGAVKNVWQPERLNAINITSALDRGGRVPLPINDLKEGVYVMVGADVPFSSCLREVENPQNQLRCSQEMEPVITCDKKFRTQFYIDWCKISLVDKTKQVSTYQEVIRGEGILPDGGEYKPPSDSLKSRDYYTDFLITLAVPSAVALVLFLILAYIMCCRREGVEKRNMQTPDIQLVHHSAIQKSTKELRDMSKNREIAWPLSTLPVFHPVTGEIIPPLHTDNYDSTNMPLMQTQQWSFAPVAQAGVQWSDLGSLQPPPPRNLPHQTQIPQQQTTGDFRLTTFQRFEVNGIPEERKLTEAMNL

SEQ ID NO: 24809 - protein, 1045 aa, Homo sapiens
KPMINKDLEGNISFLAQTGEFSVPLKCSTKKCSLSLDKELIDFGSYVVGETTSRTITLTNVGGLGTTFKFLPASEPCEMDDSQSALKLSSLLTYEDKSLYDKAATSFSEQQLEGTESSQADMQSRKELEKLDKEQEEEQPAEPERLTTVIPPSEEQTEITLGEVTEGEIGPFSSIKVPIVFTPVVPGDVQARFKVTFKNPQCPTLHFRVVGVAIDVPVWVPKPSVDLKICMYDRLYQDSVLVHTRSKAALRLKFEVCKELRAHLELLPKTGYIQAQSSYSVQLKFLPRHSLPEDAGRYFDKETRVLEAPMTIWVADQNKPVGFTVHAIVTTSDLELSPSEVDFGYCTIYEAIRTEISLHNHSLLPQEFGFVRLPKFVDVQPNDGFGTILPLETLQFCVIFQPTKAEEHRFQLTCKSEINRCFKLSCRAVGVHPPLELSHYQIKFAATALYDTSVATVYVINSHLSMSSPTHSKPRIGSEDASPMGPTSFEFLLPPDSPITISPSVGTVWPGKRCLVQVAFRPVLPEKLIRQEALPLLNKEMETKSFRKNMAPQRKDLHGLSFSVLRAQNRDKLFKVSVPHVLEMRKRELRPSSDEYQAARATLLRAFQAKFDTFVVPCVVASGDIKDRKGSEPLSFSPHNTLYLELWCPTVAPSVVVTSHKGKTIFNFGDVAVGHRSIKKISIQNVSPEDLALDFSLLNPNGPFVLLNHSSLLRAGGTQVLVLSFSPHESILAQETLDIITKRGTLTLTLMGTGVASMITCSIEGSVLNMGYVIAGESVSSGFKLQNNSLLPIKFSMHLDSLSSTRGRGQQQLPQFLSSPSQRTEVVGTQNLNGQSVFSVAPVKGVMDPGKTQDFTVTFSPDHESLYFSDKLQVVLFEKKISHQILLKGAACQHMMFVEGGDPLDVPVESLTAIPVFDPRHREEAEELRPILVTLDYIQFDTDTPAPPATRELQVGCIRTTQPSPKKTVEFSIDSVASLQHKGFSIEPSRGSVERGQTKTISISWVPPADFDPDHPLMVSALLQLRGDVKETYKVIFVAQVLTGP

SEQ ID NO: 24810 - protein, 824 aa, Homo sapiens
SEVKKDSSQLGTDATKEKPKEVAENQQNQSSDPEEEKGSQPPPAAESQSSLRRQKREKETSESRGISRFIPPWLKKQKSYTLVVAKDGGDKKEPTQAVVEEQVLDKEEPLPEEQRQAKGDAEEMAQKKQEIKVEVKEEKPSVSKEEKPSVSKVEMQPTELVSKEREEKVKETQEDKLEGGAAKRETKEVQTNELKAEKASQKVTKKTKTVQCKVTLLDGTEYSCDLEKHAKGQVLFDKVCEHLNLLEKDYFGLLFQESPEQKNWLDPAKEIKRQLRNLPWLFTFNVKFYPPDPSQLTEDITRYFLCLQLRQDIASGRLPCSFVTHALLGSYTLQAELGDYDPEEHGSIDLSEFQFAPTQTKELEEKVAELHKTHRGLSPAQADSQFLENAKRLSMYGVDLHHAKDSEGVDIKLGVCANGLLIYKDRLRINRFAWPKILKISYKRSNFYIKVRPAELEQFESTIGFKLPNHRAAKRLWKVCVEHHTFYRLVSPEQPPKAKFLTLGSKFRYSGRTQAQTRQASTLIDRPAPHFERTSSKRVSRSLDGAPIGVMDQSLMKDFPGAAGEISAYGPGLVSIAVVQDGDGRREVRSPTKAPHLQLIEGKTVSMCPPSPLIHRTSSFSPNLLPVPEMDLLSDISEEDPFGEADQITLDSLEHLSTGEISEQGDSEVAMPDLVLDSAIAPSQPDCPSPIHGKTLKAADDSDSEFGYFSFSFSKCFPSGFPSLLDEDGYLAFPSLPKVWVSFLPAGVQHYVPITSPSFIPSLILIFGLLLSASQSVPFSLAFSLPLALSLCYLEAKAASFNVSYDCDLNDKLEEEEVVAGMPT

SEQ ID NO: 24811 - protein, 1250 aa, Homo sapiens
MEPPGGSLGPGRGTRDKKKGRSPDELPSAGGDGGKSKKFTLKRLMADELERFTSMRIKKEKEKPNSAHRNSSASYGDDPTAQSLQDVSDEQVLVLFEQMLLDMNLNEEKQQPLREKDIIIKREMVSQYLYTSKAGMSQKESSKSAMMYIQELRSGLRDMPLLSCLESLRVSLNNNPVSWVQTFGAEGLASLLDILKRLHDEKEETAGSYDSRNKHEIIRCLKAFMNNKFGIKTMLETEEGILLLVRAMDPAVPNMMIDAAKLLSALCILPQPEDMNERVLEAMTERAEMDEVERFQPLLDGLKSGTTIALKVGCLQLINALITPAEELDFRVHIRSELMRLGLHQVLQDLREIENEDMRVQLNVFDEQGEEDSYDLKGRLDDIRMEMDDFNEVFQILLNTVKDSKAEPHFLSILQHLLLVRNDYEARPQYYKLIEECISQIVLHKNGADPDFKCRHLQIEIEGLIDQMIDKTKVEKSEAKAAELEKKLDSELTARHELQVEMKKMESDFEQKLQDLQGEKDALHSEKQQIATEKQDLEAEVSQLTGEVAKLTKELEDAKKEMASLSAAAITVPPSVPSRAPVPPAPPLPGDSGTIIPPPPAPGDSTTPPPPPPPPPPPPPLPGGVCISSPPSLPGGTAISPPPPLSGDATIPPPPPLPEGVGIPSPSSLPGGTAIPPPPPLPGSARIPPPPPPLPGSAGIPPPPPPLPGEAGMPPPPPPLPGGPGIPPPPPFPGGPGIPPPPPGMGMPPPPPFGFGVPAAPVLPFGLTPKKLYKPEVQLRRPNWSKLVAEDLSQDCFWTKVKEDRFENNELFAKLTLTFSAQTKTSKAKKDQEGGEEKKSVQKKKVKELKVLDSKTAQNLSIFLGSFRMPYQEIKNVILEVNEAVLTESMIQNLIKQMPEPEQLKMLSELKDEYDDLAESEQFGVVMGTVPRLRPRLNAILFKLQFSEQVENIKPEIVSVTAACEELRKSESFSNLLEITLLVGNYMNAGSRNAGAFGFNISFLCKLRDTKSTDQKMTLLHFLAELCENDYPDVLKFPDELAHVEKASRVSAENLQKNLDQMKKQISDVERDVQNFPAATDEKDKFVEKMTSFVKDAQEQYNKLRMMHSNMETLYKELGEYFLFDPKKLSVEEFFMDLHNFRNMFLQAVKENQKRRETEEKMRRAKLAKEKAEKERLEKQQKREQLIDMNAEGDETGVMDSLLEALQSGAAFRRKRGPRQDNLLCPWEVEEEEETFKLPTGRPGVQSHLC

SEQ ID NO: 24812 - protein, 559 aa, Homo sapiens
MDSPGYNCFVDKDKMDAAIQDLGPKELSCTELQELKQLARQGYWAQSHALRGKVYQRLIRDIPCRTVTPDASVYSDIVGKIVGKHSSSCLPLPEFVDNTQVPSYCLNARGEGAVRKILLCLANQFPDISFCPALPAVVALLLHYSIDEAECFEKACRILACNDPGRRLIDQSFLAFESSCMTFGDLVNKYCQAAHKLMVAVSEDVLQVYADWQRWLFGELPLCYFARVFDVFLVEGYKVLYRVALAILKFFHKVRAGQPLESDSVKQDIRTFVRDIAKTVSPEKLLEKAFAIRLFSRKEIQLLQMANEKALKQKGITVKQKSVSLSKRQFVHLAVHAENFRSEIVSVREMRDIWSWVPERFALCQPLLLFSSLQHGYSLARFYFQCEGHEPTLLLIKTTQKEVCGAYLSTDWSERNKFGGKLGFFGTGECFVFRLQPEVQRYEWVVIKHPELTKPPPLMAAEPTAPLSHSASSDPADRLSPFLAARHFNLPSKTESMFMAGGSDCLIVGGGGGQALYIDGDLNRGRTSHCDTFNNQPLCSENFLIAAVEAWGFQDPDTQ

SEQ ID NO: 24813 - protein, 305 aa, Homo sapiens
MLKNSRVTFPQHLLPILFLLYLLMFLFTLLGNLLIMATIWIEHRLHTPMYLFLCTLSVSEILFTVAITPRMLADLLSTHHSITFVACANQMFFSFMFGFTHSFLLLVMGYDRYVAICHPLRYNVLMSPRDCAHLVACTWAGGSVMGMMVTTIVFHLTFCGSNVIHHFFCHVLSLLKLACENKTSSVIMGVMLVCVTALIGCLFLIILSYVFIVAAILRIPSAEGRHKTFSTCVSHLTVVVTHYSFASFIYLKPKGLHSMYSDALMATTYTVFTPFLSPIIFSLRNKELKNAINKNFYRKFCPPSS

SEQ ID NO: 24814 - protein, 1159 aa, Homo sapiens
MAQQANVGELLAMLDSPMLGVRDDVTAVFKENLNSDRGPMLVNTLVDYYLETSSQPALHILTTLQEPHDKHLLDRINEYVGKAATRLSILSLLGHVIRLQPSWKHKLSQAPLLPSLLKCLKMDTDVVVLTTGVLVLITMLPMIPQSGKQHLLDFFDIFGRLSSWCLKKPGHVAEVYLVHLHASVYALFHRLYGMYPCNFVSFLRSHYSMKENLETFEEVVKPMMEHVRIHPELVTGSKDHELDPRRWKRLETHDVVIECAKISLDPTEASYEDGYSVSHQISARFPHRSADVTTSPYADTQNSYGCATSTPYSTSRLMLLNMPGQLPQTLSSPSTRLITEPPQATLWSPSMVCGMTTPPTSPGNVPPDLSHPYSKVFGTTAGGKGTPLGTPATSPPPAPLCHSDDYVHISLPQATVTPPRKEERMDSARPCLHRQHHLLNDRGSEEPPGSKGSVTLSDLPGFLGDLASEEDSIEKDKEEAAISRELSEITTAEAEPVVPRGGFDSPFYRDSLPGSQRKTHSAASSSQGASVNPEPLHSSLDKLGPDTPKQAFTPIDLPCGSADESPAGDRECQTSLETSIFTPSPCKIPPPTRVGFGSGQPPPYDHLFEVALPKTAHHFVIRKTEELLKKAKGNTEEDGVPSTSPMEVLDRLIQQGADAHSKELNKLPLPSKSVDWTHFGDEIRTLRDQLLLLHNQLLYERFKRQQHALRNRRLLRKVIKAAALEEHNAAMKDQLKLQEKDIQMWKVSLQKEQARYNQLQEQRDTMVTKLHSQIRQLQHDREEFYNQSQELQTKLEDCRNMIAELRIELKKANNKVCHTELLLSQVSQKLSNSESVQQQMEFLNRQLLVLGEVNELYLEQLQNKHSDTTKEVEMMKAAYRKELEKNRSHVLQQTQRLDTSQKRILELESHLAKKDHLLLEQKKYLEDVKLQARGQLQAAESRYEAQKRITQVFELEILDLYGRLEKDGLLKKLEEEKAEAAEAAEERLDCCNDGCSDSMVGHNEEASGHNGETKTPRPSSARGSSGSRGGGGSSSSSSELSTPEKPPHQRAGPFSSRWETTMGEASASIPTTVGSLPSSKSFLGMKARELFRNKSESQCDEDGMTSSLSESLKTELGKDLGVEAKIPLNLDGPHPSPPTPDSVGQLHIMDYNETHHEHS

SEQ ID NO: 24815 - protein, 590 aa, Homo sapiens
MPKPINVRVTTMDAELEFAIQPNTTGKQLFDQVVKTVGLREVWFFGLQYVDSKGYSTWLKLNKKVTQQDVKKENPLQFKFRAKFFPEDVSEELIQEITQRLFFLQVKEAILNDEIYCPPETAVLLASYAVQAKYGDYNKEIHKPGYLANDRLLPQRVLEQHKLTKEQWEERIQNWHEEHRGMLREDSMMEYLKIAQDLEMYGVNYFEIKNKKGTELWLGVDALGLNIYEHDDKLTPKIGFPWSEIRNISFNDKKFVIKPIDKKAPDFVFYAPRLRINKRILALCMGNHELYMRRRKPDTIEVQQMKAQAREEKHQKQLERAQLENEKKKREIAEKEKERIEREKEELMERLKQIEEQTIKAQKELEEQTRKALELDQERKRAKEEAERLEKERRAAEEAKSAIAKQAADQMKNQEQLAAELAEFTAKIALLEEAKKKKEEEATEWQHKAFAAQEDLEKTKEELKTVMSAPPPPPPPPVIPPTENEHDEHDENNAEASAELSNEGVMNHRSEEERVTETQKNERVKKQLQALSSELAQARDETKKTQNDVLHAENVKAGRDKYKTLRQIRQGNTKQRIDEFEAMDISENGR

SEQ ID NO: 24816 - protein, 1198 aa, Homo sapiens
MRTTKVYKLVIHKKGFGGSDDELVVNPKVFPHIKLGDIVEIAHPNDEYSPLLLQVKSLKEDLQKETISVDQTVTQVFRLRPYQDVYVNVVDPKDVTLDLVELTFKDQYIGRGDMWRLKKSLVSTCAYITQKVEFAGIRAQAGELWVKNEKVMCGYISEDTRVVFRSTSAMVYIFIQMSCEMWDFDIYGDLYFEKAVNGFLADLFTKWKEKNCSHEVTVVLFSRTFYDAKSVDEFPEINRASIRQDHKGRFYEDFYKVVVQNERREEWTSLLVTIKKLFIQYPVLVRLEQAEGFPQGDNSTSAQGNYLEAINLSFNVFDKHYINRNFDRTGQMSVVITPGVGVFEVDRLLMILTKQRMIDNGIGVDLVCMGEQPLHAVPLFKLHNRSAPRDSRLGDDYNIPHWINHSFYTSKSQLFCNSFTPRIKLAGKKPASEKAKNGRDTSLGSPKESENALPIQVDYDAYDAQVFRLPGPSRAQCLTTCRSVRERESHSRKSASSCDVSSSPSLPSRTLPTEEVRSQASDDSSLGKSANILMIPHPHLHQYEVSSSLGYTSTRDVLENMMEPPQRDSSAPGRFHVGSAESMLHVRPGGYTPQRALINPFAPSRMPMKLTSNRRRWMHTFPVGPSGEAIQIHHQTRQNMAELQGSGQRDPTHSSAELLELAYHEAAGRHSNSRQPGDGMSFLNFSGTEELSVGLLSNSGAGMNPRTQNKDSLEDSVSTSPDPILTLSAPPVVPGFCCTVGVDWKSLTTPACLPLTTDYFPDRQGLQNDYTEGCYDLLPEADIDRRDEDGVQMTAQQVFEEFICQRLMQGYQIIVQPKTQKPNPAVPPPLSSSPLYSRGLVSRNRPEEEDQYWLSMGRTFHKVTLKDKMITVTRYLPKYPYESAQIHYTYSLCPSHSDSEFVSCWVEFSHERLEEYKWNYLDQYICSAGSEDFSLIESLKFWRTRFLLLPACVTATKRITEGEAHCDIYGDRPRADEDEWQLLDGFVRFVEGLNRIRRRHRSDRMMRKGTAMKGLQMTGPISTHSLESTAPPVGKKGTSALSALLEMEASQKCLGEQQAAVHGGKSSAQSAESSSVAMTPTYMDSPRKDGAFFMEFVRSPRTASSAFYPQVSVDQTATPMLDGTSLGICTGQSMDRGNSQTFGNSQNIGEQGYSSTNSSDSRKWRLFLIFVLLTAYVPSCFADLTPCVTALSSWWQAP

SEQ ID NO: 24817 - protein, 147 aa, Homo sapiens
MVHLTPEEKTAVNALWGKVNVDAVGGEALGRLLVVYPWTQRFFESFGDLSSPDAVMGNPKVKAHGKKVLGAFSDGLAHLDNLKGTFSQLSELHCDKLHVDPENFRLLGNVLVCVLARNFGKEFTPQMQAAYQKVVAGVANALAHKYH

SEQ ID NO: 24818 - protein, 351 aa, Homo sapiens
MRFTFPLMAIVLEIAMIVLFGLFVEYETDQTVLEQLNITKPTDMGIFFELYPLFQDVHVMIFVGFGFLMTFLKKYGFSSVGINLLVAALGLQWGTIVQGILQSQGQKFNIGIKNMINADFSAATVLISFGAVLGKTSPTQMLIMTILEIVFFAHNEYLVSEIFKASDIGASMTIHAFGAYFGLAVAGILYRSGLRKGHENEESAYYSDLFAMIGTLFLWMFWPSFNSAIAEPGDKQCRAIVNTYFSLAACVLTAFAFSSLVEHRGKLNMVHIQNATLAGGVAVGTCADMAIHPFGSMIIGSIAGMVSVLGYKFLTVYGHAGSCTGFLYRNSSCWRSDDRFNSKVASLGTAI

SEQ ID NO: 24819 - protein, 1010 aa, Homo sapiens
MGDKKDDKDSPKKNKGKERRDLDDLKKEVAMTEHKMSVEEVCRKYNTDCVQGLTHSKAQEILARDGPNALTPPPTTPEWVKFCRQLFGGFSILLWIGAILCFLAYGIQAGTEDDPSGDNLYLGIVLAAVVIITGCFSYYQEAKSSKIMESFKNMVPQQALVIREGEKMQVNAEEVVVGDLVEIKGGDRVPADLRIISAHGCKVDNSSLTGESEPQTRSPDCTHDNPLETRNITFFSTNCVEGTARGVVVATGDRTVMGRIATLASGLEVGKTPIAIEIEHFIQLITGVAVFLGVSFFILSLILGYTWLEAVIFLIGIIVANVPEGLLATVTVCLTLTAKRMARKNCLVKNLEAVETLGSTSTICSDKTGTLTQNRMTVAHMWFDNQIHEADTTEDQSGTSFDKSSHTWVALSHIAGLCNRAVFKGGQDNIPVLKRDVAGDASESALLKCIELSSGSVKLMRERNKKVAEIPFNSTNKYQLSIHETEDPNDNRYLLVMKGAPERILDRCSTILLQGKEQPLDEEMKEAFQNAYLELGGLGERVLGFCHYYLPEEQFPKGFAFDCDDVNFTTDNLCFVGLMSMIDPPRAAVPDAVGKCRSAGIKVIMVTGDHPITAKAIAKGVGIISEGNETVEDIAARLNIPVSQVNPRDAKACVIHGTDLKDFTSEQIDEILQNHTEIVFARTSPQQKLIIVEGCQRQGAIVAVTGDGVNDSPALKKADIGVAMGIAGSDVSKQAADMILLDDNFASIVTGVEEGRLIFDNLKKSIAYTLTSNIPEITPFLLFIMANIPLPLGTITILCIDLGTDMVPAISLAYEAAESDIMKRQPRNPRTDKLVNERLISMAYGQIGMIQALGGFFSYFVILAENGFLPGNLVGIRLNWDDRTVNDLEDSYGQQWTYEQRKVVEFTCHTAFFVSIVVVQWADLIICKTRRNSVFQQGMKNKILIFGLFEETALAAFLSYCPGMDVALRMYPLKPSWWFCAFPYSFLIFVYDEIRKLILRRNPGGPCCRS

SEQ ID NO: 24820 - protein, 946 aa, Homo sapiens
MSTERDSETTFDEDSQPNDEVVPYSDDETEDELDDQGSAVEPEQNRVNREAEENREPFRKECTWQVKANDRKYHEQPHFMNTKFLCIKESKYANNAIKTYKYNAFTFIPMNLFEQFKRAANLYFLALLILQAVPQISTLAWYTTLVPLLVVLGVTAIKDLVDDVARHKMDKEINNRTCEVIKDGRFKVAKWKEIQVGDVIRLKKNDFVPADILLLSSSEPNSLCYVETAELDGETNLKFKMSLEITDQYLQREDTLATFDGFIECEEPNNRLDKFTGTLFWRNTSFPLDADKILLRGCVIRNTDFCHGLVIFAGADTKIMKNSGKTRFKRTKIDYLMNYMVYTIFVVLILLSAGLAIGHAYWEAQVGNSSWYLYDGEDDTPSYRGFLIFWGYIIVLNTMVPISLYVSVEVIRLGQSHFINWDLQMYYAEKDTPAKARTTTLNEQLGQIHYIFSDKTGTLTQNIMTFKKCCINGQIYGDHRDASQHNHNKIEQVDFSWNTYADGKLAFYDHYLIEQIQSGKEPEVRQFFFLLAVCHTVMVDRTDGQLNYQAASPDEGALVNAARNFGFAFLARTQNTITISELGTERTYNVLAILDFNSDRKRMSIIVRTPEGNIKLYCKGADTVIYERLHRMNPTKQETQDALDIFANETLRTLCLCYKEIEEKEFTEWNKKFMAASVASTNRDEALDKVYEEIEKDLILLGATAIEDKLQDGVPETISKLAKADIKIWVLTGDKKETAENIGFACELLTEDTTICYGEDINSLLHARMENQRNRGGVYAKFAPPVQESFFPPGGNRALIITGSWLNEILLEKKTKRNKILKLKFPRTEEERRMRTQSKRRLEAKKEQRQKNFVDLACECSAVICCRVTPKQKAMVVDLVKRYKKAITLAIGDGANDVNMIKISSSSLMYTKNIPTLSSSTGVSCMTCPHWRWNKWTRRNASCHVE

SEQ ID NO: 24821 - protein, 435 aa, Homo sapiens
MDFRTACEETKTGICLLQDGNQEPFKVRLHLAKDILMIQEQDVICVSGEPFYSGERTVTIRRQTVGGFGLSIKGGAEHNIPVVVSKISKEQRAELSGLLFIGDAILQINGINVRKCRHEEVVQVLRNAGEEVTLTVSFLKRAPAFLKLPLNEDCACAPSDQSSGTSSPLCDSGLHLNYHPNNTDTLSCSSWPTSPGLRWEKRWCDLRLIPLLHSRFSQYVPGTDLSRQNAFQVIAVDGVCTGIIQCLSAEDCVDWLQAIATNISNLTKHNIKKINRNFPVNQQIVYMGWCEAREQDPLQDRVYSPTFLALRGSCLYKFLAPPVTTWDWTRAEKTFSVYEIMCKILKDSDLLDRRKQCFTVQSESGEDLYFSVELESDLAQWERAFQTATFLEVERIQCKTYACVLESHLMGLTIDFSTGFICFDAATKVMCSGQL

SEQ ID NO: 24822 - protein, 531 aa, Homo sapiens
MRTTKVYKLVIHKKGFGGSDDELVVNPKVFPHIKLGDIVEIAHPNDEYSPLLLQVKSLKEDLQKETISVDQTVTQVFRLRPYQDVYVNVVDPKVSTCAYITQKVEFAGIRAQAGELWVKNEKVMCGYISEDTRVVFRSTSAMVYIFIQMSCEMWDFDIYGDLYFEKAVNGFLADLFTKWKEKNCSHEVTVVLFSRTFYDAKSVDEFPEINRASIRQDHKGRFYEDFYKVVVQNERREEWTSLLVTIKKLFIQYPVLVRLEQAEGFPQGDNSTSAQGNYLEAINLSFNVFDKHYINRNFDRTGQMSVVITPGVGVFEVDRLLMILTKQRMIDNGIGVDLVCMGEQPLHAVPLFKLHNRSAPRDSRLGDDYNIPHWINHSFYTSKSQLFCNSFTPRIKLAGKKPASEKAKNGRDTSLGSPKESENALPIQVDYDAYDAQVFRLPGPSRAQCLTTCRSVRERESHSRKSASSCDVSSSPSLPSRTLPTEEVRSQASDDSSLGKSANILMIPHPHLHQYEVSSSLGYTSTREHLG

SEQ ID NO: 24823 - protein, 402 aa, Homo sapiens
MLMRLVLTVRSNLIPSPPTYNSAHDYISWESFSNVSYYTRILPSVPKDCPTPMGTKGKKQLPDAQLLARRFLLRRKFIPDPQGTNLMFAFFAQHFTHQFFKTSGKMGPGFTKALGHGVDLGHIYGDNLERQYQLRLFKDGKLKYQVLDGEMYPPSVEEAPVLMHYPRGIPPQSQMAVGQEVFGLLPGLMLYATLWLREHNRVCDLLKAEHPTWGDEQLFQTTRLILIGETIKIVIEEYVQQLSGYFLQLKFDPELLFGVQFQYRNRIAMEFNHLYHWHPLMPDSFKIGGGRNMDHHILHVAVDVIRESREMRLQPFNEYRKRFGMKPYTSFQELVGEKEMAAELEELYGDIDALEFYPGLLLEKCHPNSIFGESMIEIGAPFSLKGLLGNPICSPEYWKPST

SEQ ID NO: 24824 - protein, 965 aa, Homo sapiens
MWRLRRAAVACEVCQSLVKHSSGIKGSLPLQKLHLVSRSIYHSHHPTLKLQRPQLRTSFQQFSSLTNLPLRKLKFSPIKYGYQPRRNFWPARLATRLLKLRYLILGSAVGGGYTAKKTFDQWKDMIPDLSEYKWIVPDIVWEIDEYIDFEKIRKALPSSEDLVKLAPDFDKIVESLSLLKDFFTSGSPEETAFRATDRGSESDKHFRKVSDKEKIDQLQEELLHTQSKIWKLKYQRILERLEKENKELRKLVLQKDDKGIHHRKLKKSLIDMYSEVLDVLSDYDASYNTQDHLPRVVVVGDQSAGKTSVLEMIAQARIFPRGSGEMMTRSPVKVTLSEGPHHVALFKDSSREFDLTKEEDLAALRHEIELRMRKNVKEGCTVSPETISLNVKGPGLQRMVLVDLPGVINTVTSGMAPDTKETIFSISKAYMQNPNAIILCIQDGSVDAERSIVTDLVSQMDPHGRRTIFVLTKVDLAEKNVASPSRIQQIIEGKLFPMKALGYFAVVTGKGNSSESIEAIREYEEEFFQNSKLLKTSMLKAHQVTTRNLSLAVSDCFWKMVRESVEQQADSFKATRFNLETEWKNNYPRLRELDRNELFEKAKNEILDEVISLSQVTPKHWEEILQQSLWERVSTHVIENIYLPAAQTMNSGTFNTTVDIKLKQWTDKQLPNKAVEVAWETLQEEFSRFMTEPKGKEHDDIFDKLKEAVKEESIKRHKWNDFAEDSLRVIQHNALEDRSISDKQQWDAAIYFMEEALQARLKDTENAIENMVGPDWKKRWLYWKNRTQEQCVHNETKNELEKMLKCNEEHPAYLASDEITTVRKNLESRGVEVDPSLIKDTWHQVYRRHFLKTALNHCNLCRRGFYYYQRHFVDSELECNDVVLFWRIQRMLAITANTLRQQLTNTEVRRLEKNVKEVLEDFAEDGEKKIKLLTGKRVQLAEDLKKVREIQEKLDAFIEALHQEK

SEQ ID NO: 24825 - protein, 453 aa, Homo sapiens
TVYSIFSKVHSDRNVYPSAGVLFVHVLEREYFKGEFPPYPKPGEISNDPITFNTNLMGYPDRPGWLRYIQRTPYSDGVLYGSPTAENVGKPTIIEITAYNRRTFETARHNLIINIMSAEDGVLLSSPRLECNGTISANCNLRLLGSGDSPASASRVDFPLPYQAEFFIKNMNVEEMLASEVLGDFLGAVKNVWQPERLNAINITSALDRGGRVPLPINDLKEGVYVMVGADVPFSSCLREVENPQNQLRCSQEMEPVITCDKKFRTQFYIDWCKISLVDKTKQVSTYQEVIRGEGILPDGGEYKPPSDSLKSRDYYTDFLITLAVPSAVALVLFLILAYIMCCRREGVIQLVHHSAIQKSTKELRDMSKNREIAWPLSTLPVFHPVTGEIIPPLHTDNYDSTNMPLMQTQQNLPHQTQIPQQQTTGDFRLTTFQRFEVNGIPEERKLTEAMNL

SEQ ID NO: 24826 - protein, 508 aa, Homo sapiens
MREPEELMPDSGAVFTFGKSKFAENNPGKFWFKNDVPVHLSCGDEHSAVVTGNNKLYMFGSNNWGQLGLGSKSAISKPTCVKALKPEKVKLAACGRNHTLVSTEGGNVYATGGNNEGQLGLGDTEERNTFHVISFFTSEHKIKQLSAGSNTSAALTEDGRLFMWGDNSEGQIGLKNVSNVCVPQQVTIGKPVSWISCGYYHSAFVTTDGELYVFGEPENGKLGLPNQLLGNHRTPQLVSEIPEKVIQVACGGEHTVVLTENAVYTFGLGQFGQLGLGTFLFETSEPKVIENIRDQTISYISCGENHTALITVLLDLLSMQSLCRLKPEVPKDIGLMYTFGDGRHGKLGLGLENFTNHFIPTLCSNFLRFIVKLVACGGCHMVVFAAPHRGVAKEIEFDEINDTCLSVATFLPYSSLTSGNVLQRTLSARMRRRERERSPDSFSMRRTLPPIEGTLGLSACFLPNSVFPRCSERNLQESVLSEQDLMQPEEPDMRFHRVSQDGLDLLTL

SEQ ID NO: 24827 - protein, 1738 aa, Homo sapiens
MAKPTSKDSGLKEKFKILLGLGTPRPNPRSAEGKQTEFIITAEILRELSMECGLNNRIRMIGQICEVAKTKKFEEHAVEALWKAVADLLQPERPLEARHAVLALLKAIVQGQGERLGVLRALFFKVIKDYPSNEDLHERLEVFKALTDNGRHITYLEEELADFVLQWMDVGLSSEFLLVLVNLVKFNSCYLDEYIARMVQMICLLCVRTASSVDIEVSLQVLDAVVCYNCLPAESLPLFIVTLCRTINVKELCEPCWKLMRNLLGTHLGHSAIYNMCHLMEDRAYMEDAPLLRGAVFFVGMALWGAHRLYSLRNSPTSVLPSFYQAMACPNEVVSYEIVLSITRLIKKYRKELQVVAWDILLNIIERLLQQLQTLDSPELRTIVHDLLTTVEELCDQNEFHGSQERYFELVERCADQRPESSLLNLISYRAQSIHPAKDGWIQNLQALMERFFRSESRGAVRIKVLDVLSFVLLINRQFYEEELINSVVISQLSHIPEDKDHQVRKLATQLLVDLAEGCHTHHFNSLLDIIEKVMARSLSPPPELEERDVAAYSASLEDVKTAVLGLLVILQTKLYTLPASHATRVYEMLVSHIQLHYKHSYTLPIASSIRLQAFDFLLLLRADSLHRLGLPNKDGVVRFSPYCVCDYMEPERGSEKKTSGPLSPPTGPPGPAPAGPAVRLGSVPYSLLFRVLLQCLKQESDWKVLKLVLGRLPESLRYKVLIFTSPCSVDQLCSALCSMLSGPKTLERLRGAPEGFSRTDLHLAVVPVLTALISYHNYLDKTKQREMVYCLEQGLIHRCASQCVVALSICSVEMPDIIIKALPVLVVKLTHISATASMAVPLLEFLSTLARLPHLYRNFAAEQYASVFAISLPYTNPSKFNQYIVCLAHHVIAMWFIRCRLPFRKDFVPFITKGLRSNVLLSFDDTPEKDSFRARSTSLNERPKRIQTSLTSASLGSADENSVAQADDSLKNLHLELTETCLDMMARYVFSNFTAVPKRSPVGEFLLAGGRTKTWLVGNKLVTVTTSVGTGTRSLLGLDSGELQSGPESSSSPGVHVRQTKEAPAKLESQAGQQVSRGARDRVRSMSGGHGLRVGALDVPASQFLGSATSPGPRTAPAAKPEKASAGTRVPVQEKTNLAAYVPLLTQGWAEILVRRPTGNTSWLMSLENPLSPFSSDINNMPLQELSNALMAAERFKEHRDTALYKSLSVPAASTAKPPPLPRSNTDSAVVMEEGSPGEVPVLVEPPGLEDVEAALGMDRRTDAYSRSSSVSSQEEKSLHAEELVGRGIPIERVVSSEGGRPSVDLSFQPSQPLSKSSSSPELQTLQDILGDPGDKADVGRLSPEVKARSQSGTLDGESAAWSASGEDSRGQPEGPLPSSSPRSPSGLRPRGYTISDSAPSRRGKRVERDALKSRATASNAEKVPGINPSFVFLQLYHSPFFGDESNKPILLPNESFERSVQLLDQIPSYDTHKIAVLYVGEGQSNSELAILSNEHGSYRYTEFLTGLGRLIELKDCQPDKVYLGGLDVCGEDGQFTYCWHDDIMQAVFHIATLMPTKDVDKHRCDKKRHLGNDFVSIVYNDSGEDFKLGTIKGQFNFVHVIVTPLDYECNLVSLQCRKDMEGLVDTSVAKIVSDRNLPFVARQMALHANMASQVHHSRSNPTDIYPSKWIARLRHIKRLRQRICEEAAYSNPSLPLVHPPSHSKAPAQTPAEPTPGYEVGQRKRLISSVEDFTEFV

SEQ ID NO: 24828 - protein, 1278 aa, Homo sapiens
MLPVYQEVKPNPLQDANLCSRVFFWWLNPLFKIGHKRRLEEDDMYSVLPEDRSQHLGEELQGFWDKEVLRAENDAQKPSLTRAIIKCYWKSYLVLGIFTLIEESAKVIQPIFLGKIINYFENYDPMDSVALNTAYAYATVLTFCTLILAILHHLYFYHVQCAGMRLRVAMCHMIYRKALRLSNMAMGKTTTGQIVNLLSNDVNKFDQVTVFLHFLWAGPLQAIAVTALLWMEIGISCLAGMAVLIILLPLQSCFGKLFSSLRSKTATFTDARIRTMNEVITGIRIIKMYAWEKSFSNLITNLRKKEISKILRSSCLRGMNLASFFSASKIIVFVTFTTYVLLGSVITASRVFVAVTLYGAVRLTVTLFFPSAIERVSEAIVSIRRIQTFLLLDEISQRNRQLPSDGKKMVHVQDFTAFWDKASETPTLQGLSFTVRPGELLAVVGPVGAGKSSLLSAVLGELAPSHGLVSVHGRIAYVSQQPWVFSGTLRSNILFGKKYEKERYEKVIKACALKKDLQLLEDGDLTVIGDRGTTLSGGQKARVNLARAVYQDADIYLLDDPLSAVDAEVSRHLFELCICQILHEKITILVTHQLQYLKAASQILILKDGKMVQKGTYTEFLKSGIDFGSLLKKDNEESEQPPVPGTPTLRNRTFSESSVWSQQSSRPSLKDGALESQDVAYVLQDWWLSYWANKQSMLNVTVNGGGNVTEKLDLNWYLGIYSGLTVATVLFGIARSLLVFYVLVNSSQTLHNKMFESILKAPVLFFDRNPIGRILNRFSKDIGHLDDLLPLTFLDFIQTLLQVVGVVSVAVAVIPWIAIPLVPLGIIFIFLRRYFLETSRDVKRLESTTRSPVFSHLSSSLQGLWTIRAYKAEERCQELFDAHQDLHSEAWFLFLTTSRWFAVRLDAICAMFVIIVAFGSLILAKTLDAGQVGLALSYALTLMGMFQWCVRQSAEVENMMISVERVIEYTDLEKEAPWEYQKRPPPAWPHEGVIIFDNVNFMYSPGGPLVLKHLTALIKSQEKVGIVGRTGAGKSSLISALFRLSEPEGKIWIDKILTTEIGLHDLRKKMSIIPQEPVLFTGTMRKNLDPFNEHTDEELWNALQEVQLKETIEDLPGKMDTELAESGSNFSVGQRQLVCLARAILRKNQILIIDEATANVDPRTDELIQKKIREKFAHCTVLTIAHRLNTIIDSDKIMVLDSGRLKEYDEPYVLLQNKESLFYKMVQQLGKAEAAALTETAKQVYFKRNYPHIGHTDHMVTNTSNGQPSTLTIFETAL

SEQ ID NO: 24829 - protein, 368 aa, Homo sapiens
MDFRTACEETKTGICLLQDGNQEPFKVRLHLAKDILMIQEQDVICVSGEPFYSGERTVTIRRQTVGGFGLSIKGGAEHNIPVVVSKISKEQRAELSGLLFIGDAILQINGINVRKCRHEEVIKKINRNFPVNQQIVYMGWCEAREQDPLQDRVYSPTFLALRGSCLYKFLAPPVTTWDWTRAEKTFSVYEIMCKILKDSDLLDRRKQCFTVQSESGEDLYFSVELESDLAQWERAFQTATFLEVERIQCKTYACVLESHLMGLTIDFSTGFICFDAATKAVLWRYKFSQLKGSSDDGKSKIKFLFQNPDTKQIEAKELEFSNLFAVLHCIHSFFAAKVACLDPLFLGNQATASTAASSATTSKAKYTT

SEQ ID NO: 24830 - protein, 3058 aa, Homo sapiens
MAVDDSNLYSRTKNKLNSSQNDYKSSRRSSLPPELLIGNDIRGRLQRNIKNLDPIHLRHPKKRPSIFPASPVGNGYIKPPVPPASGTHREKGPPTMLPINVDPDSKPGEYVLKSLFVNFTTQAERKIRIIMAEPLEKPLTKSLQRGEDPQFDQVISSMSSLSEYCLPSILRTLFDWYKRQNGIEDESHEYRPRTSNKSKSDEQQRDYLMERRDLAIDFIFSLVLIEVLKQIPLHPVIDSLIHDVINLAFKHFKYKEGYLGPNTGNMHIVADLYAEVIGVLAQAKFPAVKKKFMAELKELRHKEQNPYVVQSIISLIMGMKFFRIKMYPVEDFEASLQFMQECAHYFLEVKDKDIKHALAGLFVEILVPVAAAVKNEVNVPCLRNFVESLYDTTLELSSRKKHSLALYPLVTCLLCVSQKQLFLNRWHIFLNNCLSNLKNKDPKMARVALESLYRLLWVYMIRIKCESNTATQSRLITIITTLFPKGSRGVVPRDMPLNIFVKIIQFIAQERLDFAMKEIIFDFLCVGKPAKAFSLNPERMNIGLRAFLVIADSLQQKDGEPPMPVTGAVLPSGNTLRVKKTYLSKTLTEEEAKMIGMSLYYSQVRKAVDNILRHLDKEVGRCMMLTNVQMLNKEPEDMITGERKPKIDLFRTCVAAIPRLLPDGMSKLELIDLLARLSIHMDDELRHIAQNSLQGLLVDFSDWREDVLFGFTNFLLREVNDMHHTLLDSSLKLLLQLLTQWKLVIQTQGKVYEQANKIRNSELIANGSSHRIQSERGPHCSVLHAVEGFALVLLCSFQVATRKLSVLILKEIRALFIALGQPEDDDRPMIDVMDQLSSSILESFIHVAVSDSATLPLTHNVDLQWLVEWNAVLVNSHYDVKSPSHVWIFAQSVKDPWVLCLFSFLRQENLPKHCPTALSYAWPYAFTRLQSVMPLVDPNSPINAKKTSTAGSGDNYVTLWRNYLILCFGVAKPSIMSPGHLRASTPEIMATTPDGTVSYDNKAIGTPSVGVLLKQLVPLMRLESIEITESLVLGFGRTNSLVFRELVEELHPLMKEALERRPENKKRRERRDLLRLQLLRIFELLADAGVISDSTNGALERDTLALGALFLEYVDLTRMLLEAENDKEVEILKDIRAHFSAMVANLIQCVPVHHRRFLFPQQSLRHHLFILFSQWAGPFSIMFTPLDRYSDRNHQITRYQYCALKAMSAVLCCGPVFDNVGLSPDGYLYKWLDNILACQDLRVHQLGCEVVVLLLELNPDQINLFNWAIDRCYTGSYQLASGCFKAIATVCGSRNYPFDIVTLLNLVLFKASDTNREIYEISMQLMQILEAKLFVYSKKVAEQRPGSILYGTHGPLPPLYSVSLALLSCELARMYPELTLPLFSEVSQRFPTTHPNGRQIMLTYLLPWLHNIELVDSRLLLPGSSPSSPEDEVKDREGDVTASHGLRGNGWGSPEATSLVLNNLMYMTAKYGDEVPGPEMENAWNALANNEKWSNNLRITLQFLISLCGVSSDTVLLPYIKKVAIYLCRNNTIQTMEELLFELQQTEPVNPIVQHCDNPPFYRFTASSKASAAASGTTSSSNTVVAGQENFPDAEENKILKESDERFSNVIRAHTRLESRYSNSSGGSYDEDKNDPISPYTGWLLTITETKQPQPLPMPCTGGCWAPLVDYLPETITPRGPLHRCNIAVIFMTEMVVDHSVREDWALHLPLLLHAVFLGLDHYRPEVFEHSKKLLLHLLIALSCNSNFHSIASVLLQTREMGEAKTLTVQPAYQPEYLYTGGFDFLREDQSSPVPDSGLSSSSTSSSISLGGSSGNLPQMTQEVEDVDTAAETDEKANKLIEFLTTRAFGPLWCHEDITPKNQNSKSAEQLTNFLRHVVSVFKDSKSGFHLEHQLSEVALQTALASSSRHYAGRSFQIFRALKQPLSAHALSDLLSRLVEVIGEHGDEIQGYVMEALLTLEAAVDNLSDCLKNSDLLTVLSRSSSPDLSSSSKLTASRKSTGQLNMNPGTTSGNTATAERSRHQRSFSVPKKFGVIDRSSDPPRSATLDRIQACTQQGLSSKTRSSSSLKDSLTDPSHINHPTNLLATIFWVTVALMESDFEFEYLMALRLLSRLLAHMPLDKAENREKLEKLQAQLKWADFSGLQQLLLKGFTSLTTTDLTLQLFSLLTPVSKISMVDASHAIGFPLNVLCLLPQLIQHFENPNQFCKDIAERIAQVCLEEKNPKLSNLAHVMTLYKTHSYTRDCATWVNVVCRYLHEAYADITLNMVTYLAELLEKGLPSVQQPLLQVIYSLLSYMDLSVVPVKQFNVEVLKTIEKYVQSVHWREALNILKLVVSRSASLVLPSYQHSDLSKIEIHRVWTSASKELPGKTLDFHFDISETPIIGRRYDELQNSSGRDGKPRAMAVTRSTSSTSSGSNSNVLVPVSWKRPQYSQKRTKEKLVHVLSLCGQEVGLSKNPSVIFSSCGDLDLLEHQTSLVSSEDGAREQENMDDTNSEQQFRVFRDFDFLDVELEDGEGESMDNFNWGVRRRSLDSLDKCDMQILEERQLSGSTPSLNKMHHEDSDESSEEEDLTASQILEHSDLIMTLSPSEETNPMELLTTACDSTPAEPHSFNTRMSSFDASLPDMNNLQISEGSKAEAVREEEDTTVHEDDLSSSINELPAAFECSDSFSLDMTEGEEKGNRALDQFTLASFGEGDRGVSPPPSPFFSAILAAFQPAACDDAEEAWRSHINQLMCDSDGSCAVYTFHVFSSLFKNIQKRFCFLTCDAASYLGDNLRGIGSKFVSSSQMLTSCSECPTLFVDAETLLSCGLLDKLKFSVLELQEYLDTYNNRKEATLSWLANCKATFAGGSRDGVITCQPGDSEEKQLELCQRLYKLHFQLLLLFQSYCKLIGQVHEVSSMPELLNMSRELSDLKKHLKEASAVIAADPLYSDGAWSEPTFTSTEAAIQSMLECLKNNELGKALRQIRECRSLWPNDIFGSSSDDEVQTLLNIYFRHQTLGQTGTYALVGSNQSLTEICTKLMELNMEIRDMIRRAQSYRVLTTFLPDSSVSGTSL

SEQ ID NO: 24831 - protein, 711 aa, Homo sapiens
MIDSVKLRRDSAADFFSHYEYLCALQNSVPLPAVRACLREGVLDFNADRLRGVDWAPLLSTLKINKDLPLVSIKSFFQPWLGDTGSDMNKFCRSRVPAIRYKDVTFQLCKALKGCLSISSVLKNLELNGLILRERDLTILAKGLNKSASLVHLSLANCPIGDGGLEIICQGIKSSITLKTVNFTGCNLTWQGADHMAKILKYQTMRRHEETWAESLRYRRPDLDCMAGLRRITLNCNTLIGDLGACAFADSLSEDLWLRALDLQQCGLTNEGAKALLEALETNTTLVVLDIRKNPLIDHSMMKAVIKKVLQNGRSAKSEYQWITSPSVKEPSKTAKQKRRTIILGSGHKGKATIRIVIWRHRGLATKKPVSSGRKHSLGKEYYAPAPLPPGVSGFLPWRTAERAKRHRGFPLIKTRDICNQLQQPGFPVTVTVESPSSSEVEEVDDSSESVHEVPEKTSIEQEALQEKLEECLKQLKEERVIRLKVDKRVSELEHENAQLRNINFSLSEALHAQSLTNMILDDEGVLGSIENSFQKFHAFLDLLKDAGLGQLATMAGIDQSDFQLLGHPQMTSTVSNPPKEEKKALEDEKPEPKQNALGQMQNIQFQKITGDARIPLPLDSFPVPVSTPEGLGTSSNNLGVPATEQRQESFEGFIARMCSPSPDATSGTGSQRKEEELSRNSRSSSEKKTKTGEYTKKHSDKQHPGKDLHS

SEQ ID NO: 24832 - protein, 584 aa, Homo sapiens
MAALSGGGGGGAEPGQALFNGDMEPEAGAGAGAAASSAADPAIPEEVWNIKQMIKLTQEHIEALLDKFGGEHNPPSIYLEAYEEYTSKLDALQQREQQLLESLGNGTDFSVSSSASMDTVTSSSSSSLSVLPSSLSVFQNPTDVARSNPKSPQKPIVRVFLPNKQRTVVPARCGVTVRDSLKKALMMRGLIPECCAVYRIQDGEKKPIGWDTDISWLTGEELHVEVLENVPLTTHNFVRKTFFTLAFCDFCRKLLFQGFRCQTCGYKFHQRCSTEVPLMCVNYDQLDLLFVSKFFEHHPIPQEEASLAETALTSGSSPSAPASDSIGPQILTSPSPSKSIPIPQPFRPADEDHRNQFGQRDRSSSAPNVHINTIEPVNIDDLIRDQGFRGDGGSTTGLSATPPASLPGSLTNVKALQKSPGPQRERKSSSSSEDRNRMKTLGRRDSSDDWEIPDGQITVGQRIGSGSFGTVYKGKWHGDVAVKMLNVTAPTPQQLQAFKNEVGVLRKTRHVNILLFMGYSTKPQLAIVTQWCEGSSLYHHLHIIETKFEMIKLIDIARQTAQGMERFEESWVNFTSSRGKTQRK

SEQ ID NO: 24833 - protein, 725 aa, Homo sapiens
AHKKPIDLRAIGKLPIAMRALTNYQRLCEAFDAQRKDIQGTQGARAIWQALSHAFGRRLVLSSTFRILADLLGFAGPLCIFGIVDHLGKENDVFQPKTQFLGVYFVSSQEFLANAYVLAVLLFLALLLQRTFLQASYYVAIETGINLRGAIQTKIYNKIMHLSTSNLSMGEMTAGQICNLVAIDTNQLMWFFFLCPNLWAMPVQIIVGVILLYYILGVSALIGAAVIILLAPVQYFVATKLSQAQRSTLEYSNERLKQTNEMLRGIKLLKLYAWENIFRTRVETTRRKEMTSLRAFAIYTSISIFMNTAIPIAAVLITFVGHVSFFKEADFSPSVAFASLSLFHILVTPLFLLSSVVRSTVKALVSAEIREEQCAPHEPTPQGPASKYQAVPLRVVNRKRPAREDCRGLTGPLQSLVPSADGDADNCCVQIMGGYFTWTPDGIPTLSNITIRIPRGQLTMIVGQVGCGKSSLLLAALGEMQKVSGAVFWSSLPDSEIGEDPSPERETATDLDIRKRGPVAYASQKPWLLNATVEENIIFESPFNKQRYKMVIEACSLQPDIDILPHGDQTQIGERGINLSGGQRQRISVARALYQHANVVFLDDPFSALDIHLSDHLMQAGILELLRDDKRTVVLVTHKLQYLPHADWIIAMKDGTIQREGTLKDFQRSECQLFEHWKTLMNRQDQELEKETVTERKATEPPQGLSRAMSSRDGLLQDEEEEEAC

SEQ ID NO: 24834 - protein, 1842 aa, Homo sapiens
MENEIFTPLLEQFMTSPLVTWVKTFGPLAAGNGTNLDEYVALVDGVFLNQVMLQINPKLESQRVNKKVNNDASLRMHNLSILVRQIKFYYQETLQQLIMMSLPNVLIIGKNPFSEQGTEEVKKLLLLLLGCAVQCQKKEEFIERIQGLDFDTKAAVAAHIQEVTHNQENVFDLQWMEVTDMSQEDIEPLLKNMALHLKRLIDERDEHSETIIELSEERDGLHFLPHASSSAQSPCGSPGMKRTESRQHLSVELADAKAKIRRLRQELEEKTEQLLDCKQELEQMEIELKRLQQENMNLLSDARSARMYRDELDALREKAVRVDKLESEVSRYKERLHDIEFYKARVEELKEDNQVLLETKTMLEDQLEGTRARSDKLHELEKENLQLKAKLHDMEMERDMDRKKIEELMEENMTLEMAQKQSMDESLHLGWELEQISRTSELSEAPQKSLGHEVNELTSSRLLKLEMENQSLTKTVEELRTTVDSVEGNASKILKMEKENQRLSKKVEILENEIVQEKQSLQNCQNLSKDLMKEKAQLEKTIETLRENSERQIKILEQENEHLNQTVSSLRQRSQISAEARVKDIEKENKILHESIKETSSKLSKIEFEKRQIKKELEHYKEKGERAEELENELHHLEKENELLQKKITNLKITCEKIEALEQENSELERENRKLKKTLDSFKNLTFQLESLEKENSQLDEENLELRRNVESLKCASMKMAQLQLENKELESEKEQLKKGLELLKASFKKTERLEVSYQGLDIENQRLQKTLENSNKKIQQLESELQDLEMENQTLQKNLEELKISSKRLEQLEKENKSLEQETSQLEKDKKQLEKENKRLRQQAEIKDTTLEENNVKIGNLEKENKTLSKEIGIYKESCVRLKELEKENKELVKRATIDIKTLVTLREDLVSEKLKTQQMNNDLEKLTHELEKIGLNKERLLHDEQSTDDRYKLLESKLESTLKKSLEIKEEKIAALEARLEESTNYNQQLRQELKTVKKNYEALKQRQDEERMVQSSPPISGEDNKWERESQETTRELLKVKDRLIEVERNNATLQAEKQALKTQLKQLETQNNNLQAQILALQRQTVSLQEQNTTLQTQNAKLQVENSTLNSQSTSLMNQNAQLLIQQSSLENENESVIKEREDLKSLYDSLIKDHEKLELLHERQASEYESLISKHGTLKSAHKNLEVEHRDLEDRYNQLLKQKGQLEDLEKMLKVEQEKMLLENKNHETVAAEYKKLCGENDRLNHTYSQLLKETEVLQTDHKNLKSLLNNSKLEQTRLEAEFSKLKEQYQQLDITSTKLNNQCELLSQLKGNLEEENRHLLDQIQTLMLQNRTLLEQNMESKDLFHVEQRQYIDKLNELRRQKEKLEEKIMDQYKFYDPSPPRRRGNWITLKMRKLIKSKKDINRERQKSLTLTPTRSDSSEGFLQLPHQDSQDSSSVGSNSLEDGQTLGTKKSSTMNDLVQSMVLAGQWTGSTENLEVPDDISTGKRRKELGAMAFSTTAINFSTVNSSAGFRSKQLVNNKDTTSFEDISPQGVSDDSSTGSRVHASRPASLDSGRTSTSNSNNNASLHEVKAGAVNNQSRPQSHSSGEFSLLHDHEAWSSSGSSPIQYLKRQTRSSPVLQHKISETLESRHHKIKTGSPGSEVVTLQQFLEESNKLTSVQIKSSSQENLLDEVMKSLSVSSDFLGKDKPVSCGLARSVSGKTPGDFYDRRTTKPEFLRPGPRKTEDTYFISSAGKPTPGTQGKIKLVKESSLSRQSKDSNPYATLPRASSVISTAEGTTRRTSIHDFLTKDSRLPISVDSPPAAADSNTTAASNVDKVQESRNSKSRSREQQSS

SEQ ID NO: 24835 - protein, 204 aa, Homo sapiens
LETIILGKQYSLNIILSVFAIILGAFIAAGSDLAFNLEGYIFVFLNDIFTAANGVYTKQKMDPKELGKYGVLFYNACFMIIPTLIISVSTGDLQQATEFNQWKNVVFILQFLLSCFLGFLLMYSTVLCSYYNSALTTAVVGAIKNVSVAYIGILIGGDYIFSLLNFVGLNICMAGGLRYSFLTLSSQLKPKPVGEENICLDLKS

SEQ ID NO: 24836 - protein, 666 aa, Homo sapiens
MVQGGFPEKIRQRYADLPGELHIIELEKDKNGLGLSLAGNKDRSRMSIFVVGINPEGPAAADGRMRIGDELLEINNQILYGRSHQNASAIIKTAPSKVKLVFIRNEDAVNQMAVTPFPVPSSSPSSIEDQSGTEPISSEEDGSVEVGIKQLPESESFKLAVSQMKQQKYPTKVSFSSQEIPLAPASSYHSTDADFTGYGGFQAPLSVDPATCPIVPGQEMIIEISKGRSGLGLSIVGGKDTPLNAIVIHEVYEEGAAARDGRLWAGDQILEVNGVDLRNSSHEEAITALRQTPQKVRLVVYRDEAHYRDEENLEIFPVDLQKKAGRGLGLSIVGKRNGSGVFISDIVKGGAADLDGRLIQGDQILSVNGEDMRNASQETVATILKCAQGLVQLEIGRLRAGSWTSARTTSQNSQGSQQSAHSSCHPSFAPVITGLQNLVGTKRVSDPSQKNSGTDMEPRTVEINRELSDALGISIAGGRGSPLGDIPVFIAMIQASGVAARTQKLKVGDRIVSINGQPLDGLSHADVVNLLKNAYGRIILQVVADTNISAIAAQLENMSTGYHLGSPTAEHHPEDTETPPPKIITLEKGSEGLGFSIVGGYGSPHGDLPIYVKTVFAKGAAADDGRLKRGDQILAVNGETLEGVTHEQAVAILKHQRGTVTLTVLS

SEQ ID NO: 24837 - protein, 447 aa, Homo sapiens
MSPTISHKDSSRQRRPGNFSHSLDMKSGPLPPGGWDDSHLDSAGREGDREALLGDTGTGDFLKAPQSFRAELSSILLLLFLYVLQGIPLGLAGSIPLILQSKNVSYTDQAFFSFVFWPFSLKLLWAPLVDAVYVKNFGRRKSWLVPTQYILGLFMIYLSTQVDRLLGNTDDRTPDVIALTVAFFLFEFLAATQDIAVDGWALTMLSRENVGYASTCNSVGQTAGYFLGNVLFLALESADFCNKYLRFQPQPRGIVTLSDWFFSSRCCNRTEIGRRGSTQRTFSLIGSSNGSFADNTASDYQQIHCRSPAIKHILQSHALQVTVYSMYVSIMAFNAKVSDPLIGGTYMTLLNTVSNLGGNWPSTVALWLVDPLTVKECVGASNQNCRTPDAVELCKKLGGSCVTALDGYYVESIICVFIGFGWWFFLGPKFKKLQDEGSSSWKCKRNN

SEQ ID NO: 24838 - protein, 752 aa, Homo sapiens
MELDMAMEPDRKAAVSHWQQQSYLDSGIHSGATTTAPSLSGKGNPEEEDVDTSQVLYEWEQGFSQSFTQEQVADIDGQYAMTRAQRVRAAMFPETLDEGMQIPSTQFDAAHPTNVQRLAEPSQMLKHAVVNLINYQDDAELATRAIPELTKLLNDEDQVVVNKAAVMVHQLSKKEASRHAIMRSPQMVSAIVRTMQNTNDVETARCTAGTLHNLSHHREGLLAIFKSGGIPALVKMLGSPVDSVLFYAITTLHNLLLHQEGAKMAVRLAGGLQKMVALLNKTNVKFLAITTDCLQILAYGNQESKLIILASGGPQALVNIMRTYTYEKLLWTTSRVLKVLSVCSSNKPAIVEAGGMQALGLHLTDPSQRLVQNCLWTLRNLSDAATKQEGMEGLLGTLVQLLGSDDINVVTCAAGILSNLTCNNYKNKMMVCQVGGIEALVRTVLRAGDREDITEPAICALRHLTSRHQEAEMAQNAVRLHYGLPVVVKLLHPPSHWPLIKGAIPRLVQLLVRAHQDTQRRTSMGGTQQQFVEGVRMEEIVEGCTGALHILARDVHNRIVIRGLNTIPLFVQLLYSPIENIQRVAAGVLCELAQDKEAAEAIEAEGATAPLTELLHSRNEGVATYAAAVLFRMSEDKPQDYKKRLSVELTSSLFRTEPMAWNETADLGLDIGAQGEPLGYRQDDPSYRSFHSGGYGQDALGMDPMMEHEMGGHHPGADYPVDGLPDLGHAQDLMDGLPPGDSNQLAWFDTDL

SEQ ID NO: 24839 - protein, 1152 aa, Homo sapiens
MREGLGAACEAAGPRLCRLLCRILRPKPDCCPRRASPVTQDDLQYHNLSKQQNESPQPLVETGKKSPESLVKLDATPLSSPRHVRIKNWGSGMTFQDTLHHKAKGILTCRSKSCLGSIMTPKSLTRGPRDKPTPPDELLPQAIEFVNQYYGSFKEAKIEEHLARVEAVTKEIETTGTYQLTGDELIFATKQAWRNAPRCIGRIQWSNLQVFDARSCSTAREMFEHICRHVRYSTNNGNIRSAITVFPQRSDGKHDFRVWNAQLIRYAGYQMPDGSIRGDPANVEFTQLCIDLGWKPKYGRFDVVPLVLQANGRDPELFEIPPDLVLEVAMEHPKYEWFRELELKWYALPAVANMLLEVGGLEFPGCPFNGWYMGTEIGVRDFCDVQRYNILEEVGRRMGLETHKLASLWKDQAVVEINIAVLHSFQKQNVTIMDHHSAAESFMKYMQNEYRSRGGCPADWIWLVPPMSGSITPVFHQEMLNYVLSPFYYYQVEAWKTHVWQDEKRRPKRREIPLKVLVKAVLFACMLMRKTMASRVRVTILFATETGKSEALAWDLGALFSCAFNPKVVCMDKYRLSCLEEERLLLVVTSTFGNGDCPGNGEKLKKSLFMLKELNNKFRYAVFGLGSSMYPRFCAFAHDIDQKLSHLGASQLTPMGEGDELSGQEDAFRSWAVQTFKAACETFDVRGKQHIQIPKLYTSNVTWDPHHYRLVQDSQPLDLSKALSSMHAKNVFTMRLKSRQNLQSPTSSRATILVELSCEDGQGLNYLPGEHLGVCPGNQPALVQGILERVVDGPTPHQTVRLEALDESGSYWVSDKRLPPCSLSQALTYFLDITTPPTQLLLQKLAQVATEEPERQRLEALCQPSEYSKWKFTNSPTFLEVLEEFPSLRVSAGFLLSQLPILKPRFYSISSSRDHTPTEIHLTVAVVTYHTRDGQGPLHHGVCSTWLNSLKPQDPVPCFVRNASGFHLPEDPSHPCILIGPGTGIAPFRSFWQQRLHDSQHKGVRGGRMTLVFGCRRPDEDHIYQEEMLEMAQKGVLHAVHTAYSRLPGKPKVYVQDILRQQLASEVLRVLHKEPGHLYVCGDVRMARDVAHTLKQLVAAKLKLNEEQVEDYFFQLKSQKRYHEDIFGAVFPYEAKKDRVAVQPSSLEMSAL

SEQ ID NO: 24840 - protein, 929 aa, Homo sapiens
LRQQAEIKDTTLEENNVKIGNLEKENKTLSKEIGIYKESCVRLKELEKENKELVKRATIDIKTLVTLREDLVSEKLKTQQMNNDLEKLTHELEKIGLNKERLLHDEQSTDDSRYKLLESKLESTLKKSLEIKEEKIAALEARLEESTNYNQQLRQELKTVKKNYEALKQRQDEERMVQSSPPISGEDNKWERESQETTRELLKVKDRLIEVERNNATLQAEKQALKTQLKQLETQNNNLQAQILALQRQTVSLQEQNTTLQTQNAKLQVENSTLNSQSTSLMNQNAQLLIQQSSLENENESVIKEREDLKSLYDSLIKDHEKLELLHERQASEYESLISKHGTLKSAHKNLEVEHRDLEDRYNQLLKQKGQLEDLEKMLKVEQEKMLLENKNHETVAAEYKKLCGENDRLNHTYSQLLKETEVLQTDHKNLKSLLNNSKLEQTRLEAEFSKLKEQYQQLDITSTKLNNQCELLSQLKGNLEEENRHLLDQIQTLMLQNRTLLEQNMESKDLFHVEQRQYIDKLNELRRQKEKLEEKIMDQYKFYDPSPPRRRGNWITLKMRKLIKSKKDINRERQKSLTLTPTRSDSSEGFLQLPHQDSQDSSSVGSNSLEDGQTLGTKKSSTMNDLVQSMVLAGQWTGSTENLEVPDDISTGKRRKELGAMAFSTTAINFSTVNSSAGFRSKQLVNNKDTTSFEDISPQGVSDDSSTGSRVHASRPASLDSGRTSTSNSNNNASLHEVKAGAVNNQSRPQSHSSGEFSLLHDHEAWSSSGSSPIQYLKRQTRSSPVLQHKISETLESRHHKIKTGSPGSEVVTLQQFLEESNKLTSVQIKSSSQENLLDEVMKSLSVSSDFLGKDKPVSCGLASVISTAEGTTRRTSIHDFLTKDSRLPISVDSPPAAADSNTTAASNVDKVQESRNSKSRSREQQSS

SEQ ID NO: 24841 - protein, 1484 aa, Homo sapiens
MRTTKVYKLVIHKKGFGGSDDELVVNPKVFPHIKLGDIVEIAHPNDEYSPLLLQVKSLKEDLQKETISVDQTVTQVFRLRPYQDVYVNVVDPKVSTCAYITQKVEFAGIRAQAGELWVKNEKVMCGYISEDTRVVFRSTSAMVYIFIQMSCEMWDFDIYGDLYFEKAVNGFLADLFTKWKEKNCSHEVTVVLFSRTFYDAKSVDEFPEINRASIRQDHKGRFYEDFYKVVVQNERREEWTSLLVTIKKLFIQYPVLVRLEQAEGFPQGDNSTSAQGNYLEAINLSFNVFDKHYINRNFDRTGQMSVVITPGVGVFEVDRLLMILTKQRMIDNGIGVDLVCMGEQPLHAVPLFKLHNRSAPRDSRLGDDYNIPHWINHSFYTSKSQLFCNSFTPRIKLAGKKPASEKAKNGRDTSLGSPKESENALPIQVDYDAYDAQVFRLPGPSRAQCLTTCRSVRERESHSRKSASSCDVSSSPSLPSRTLPTEEVRSQASDDSSLGKSANILMIPHPHLHQYEVSSSLGYTSTRDVLENMMEPPQRDSSAPGRFHVGSAESMLHVRPGGYTPQRALINPFAPSRMPMKLTSNRRRWMHTFPVGPSGEAIQIHHQTRQNMAELQGSGQRDPTHSSAELLELAYHEAAGRHSNSRQPGDGMSFLNFSGTEELSVGLLSNSGAGMNPRTQNKDSLEDSVSTSPDPILTLSAPPVVPGFCCTVGVDWKSLTTPACLPLTTDYFPDRQGLQNDYTEGCYDLLPEADIDRRDEDGVQMTAQQVFEEFICQRLMQGYQIIVQPKTQKPNPAVPPPLSSSPLYSRGLVSRNRPEEEDQYWLSMGRTFHKVTLKDKMITVTRYLPKYPYESAQIHYTYSLCPSHSDSEFVSCWVEFSHERLEEYKWNYLDQYICSAGSEDFSLIESLKFWRTRFLLLPACVTATKRITEGEAHCDIYGDRPRADEDEWQLLDGFVRFVEGLNRIRRRHRSDRMMRKGTAMKGLQMTGPISTHSLESTAPPVGKKGTSALSALLEMEASQKCLGEQQAAVHGGKSSAQSAESSSVAMTPTYMDSPRKDGAFFMEFVRSPRTASSAFYPQVSVDQTATPMLDGTSLGICTGQSMDRGNSQTFGNSQNIGEQGYSSTNSSDSSSQQLVASSLTSSSTLTEILEAMKHPSTGVQLLSEQKGLSPYCFISAEVVHWLVNHVEGIQTQAMAIDIMQKMLEEQLITHASGEAWRTFIYGFYFYKIVTDKEPDRVAMQQPATTWHTAGVDDFASFQRKWFEVAFVAEELVHSEIPAFLLPWLPSRPASYASRHSSFSRSFGGRSQAAALLAATVPEQRTVTLDVDVNNRTDRLEWCSCYYHGNFSLNAAFEIKLHWMAVTAAVLFEMVQGWHRKATSCGFLLVPVLEGPFALPSYLYGDPLRAQLFIPLNISCLLKEGSEHLFDSFEPETYWDRMHLFQEAIAHRFGFVQDKYSASAFNFPAENKPQYIHVTGTVFLQ

SEQ ID NO: 24842 - protein, 475 aa, Homo sapiens
MGEIIMGNIELTRYTRPTPVQKHAIPIIKEKRDLMACAQTGSGKTAAFLLPILSQIYSDGPGEALRAMKENGRYGRRKQYPISLVLAPTRELAVQIYEEARKFSYRSRVRPCVVYGGADIGQQIRDLERGCHLLVATPGRLVDMMERGKIGLDFCKYLVLDEADRMLDMGFEPQIRRIVEQDTMPPKGVRHTMMFSATFPKEIQMLARDFLDEYIFLAVGRVGSTSENITQKVVWVEESDKRSFLLDLLNATGKDSLTLVFVETKKGADSLEDFLYHEGYACTSIHGDRSQRDREEALHQFRSGKSPILVATAVAARGLDISNVKHVINFDLPSDIEEYVHRIGRTGRVGNLGLATSFFNERNINITKDLLDLLVEAKQEVPSWLENMAYEHHYKGSSRGRSKSRFSGGFGARDYRQSSGASSSSFSSSRASSSRSGGGGHGSSRGFGGGGYGGFYNSDGYGGNYNSQGVDWWGN

SEQ ID NO: 24843 - protein, 702 aa, Homo sapiens
MESLTESGVLWSLLLEQESQLLQWYLKQLGHAPAAAEHRCWHGSEEIPAVLSPTYKQRNEDFRKLFKQLPDTERLIVDYSCALQRDILLQGRLYLSENWICFYSNIFRWETLLTVRLKDICSMTKEKTARLIPNAIQVCTDSEKHFFTSFGARDRTYMMMFRLWQNALLEKPLCPKELWHFVHQCYGNELGLTSDDEDYVPPDDDFNTMGYCEEIPVEENEVNDSSSKSSIETKPDASPQLPKKSITNSTLTSTGSSEAPVSFDGLPLEEEALEGDGSLEKELAIDNIMGEKIEMIAPVNSPSLDFNDNEDIPTELSDSSDTHDEGEVQAFYEDLSGRQYVNEVFNFSVDKLYDLLFTNSPFQRDFMEQRRFSDIIFHPWKKEENGNQSRVILYTITLTNPLAPKTATVRETQTMYKASQESECYVIDAEVLTHDVPYHDYFYTINRYTLTRVARNKSRLRVSTELRYRKQPWGLVKTFIEKNFWSGLEDYFRHLESELAKTESTYLAEMHRQSPKEKASKTTTVRRRKRPHAHLRVPHLEEVMSPVTTPTDEDVGHRIKHVAGSTQTRHIPEDTPNGFHLQSVSKLLLVISCVICFSLVLLVILNMMLFYKLWMLEYTTQTLTAWQGLRLQERLPQSQTEWAQLLESQQKYHDTELQKWREIIKSSVMLLDQMKDSLINLQNGIRSRDYTSESEEKRNRYH

SEQ ID NO: 24844 - protein, 514 aa, Homo sapiens
GNVWRFPYLCGKNGGGAFLIPYFLTLIFAGVPLFLLECSLGQYTSIGGLGVWKLAPMFKGVGLAAAVLSFWLNIYYIVIISWAIYYLYNSFTTTLPWKQCDNPWNTDRCFSNYSMVNTTNMTSAVVEFWERNMHQMTDGLDKPGQIRWPLAITLAIAWILVYFCIWKGVGWTGKVVYFSATYPYIMLIILFFRGVTLPGAKEGILFYITPNFRKLSDSEVWLDAATQIFFSYGLGLGSLIALGSYNSFHNNVYRDSIIVCCINSCTSMFAGFVIFSIVGFMAHVTKRSIADVAASGPGLAFLAYPEAVTQLPISPLWAILFFSMLLMLGIDSQGFITALVDEYPRLLRNRRELFIAAVCIISYLIGLSNITQGGIYVFKLFDYYSASGMSLLFLVFFECVSISWFYGVNRFYDNIQEMVGSRPCIWWKLCWSFFTPIIVAGVFIFSAVQMTPLTMGNYVFPKWGQGVGWLMALSSMVLIPGYMAYMFLTLKGSLKQRIQVMVQPSEDIVRPENG

SEQ ID NO: 24845 - protein, 525 aa, Homo sapiens
MHTGGETSACKPSSVRLAPSFSFHAAGLQMAGQMPHSHQYSDRRQPNISDQQVSALSYSDQIQQPLTNQVMPDIVMLQRRMPQTFRDPATAPLRKLSVDLIKTYKHINEVYYAKKKRRHQQGQGDDSSHKKERKVYNDGYDDDNYDYIVKNGEKWMDRYEIDSLIGKGSFGQVVKAYDRVEQEWVAIKIIKNKKAFLNQAQIEVRLLELMNKHDTEMKYYIVHLKRHFMFRNHLCLVFEMLSYNLYDLLRNTNFRGVSLNLTRKFAQQMCTALLFLATPELSIIHCDLKPENILLCNPKRSAIKIVDFGSSCQLGQRIYQYIQSRFYRSPEVLLGMPYDLAIDMWSLGCILVEMHTGEPLFSGANEVDQMNKIVEVLGIPPAHILDQAPKARKFFEKLPDGTWNLKKTKDGKREYKPPGTRKLHNILGVETGGPGGRRAGESGHTVADYLKFKDLILRMLDYDPKTRIQPYYALQHSFFKKTADEGTNTSNSVSTSPAMEQSQSSGTTSSTSSSSGGAALDARCL

SEQ ID NO: 24846 - protein, 460 aa, Homo sapiens
MQLPRWWELGDPCAWTGQGRGTRRMSPATTGTFLLTVYSIFSKVHSDRNVYPSAGVLFVHVLEREYFKGEFPPYPKPGEISNDPITFNTNLMGYPDRPGWLRYIQRTPYSDGVLYGSPTAENVGKPTIIEITAYNRRTFETARHNLIINIMSAEDFPLPYQAEFFIKNMNVEEMLASEVLGDFLGAVKNVWQPERLNAINITSALDRGGRVPLPINDLKEGVYVMVGADVPFSSCLREVENPQNQLRCSQEMEPVITCDKKFRTQFYIDWCKISLVDKTKQVSTYQEVIRGEGILPDGGEYKPPSDSLKSRDYYTDFLITLAVPSAVALVLFLILAYIMCCRREGVEKRNMQTPDIQLVHHSAIQKSTKELRDMSKNREIAWPLSTLPVFHPVTGEIIPPLHTDNYDSTNMPLMQTQQNLPHQTQIPQQQTTGDFRLTTFQRFEVNGIPEERKLTEAMNL

SEQ ID NO: 24847 - protein, 663 aa, Homo sapiens
MLVGSQSFSPGGPNGIIRSQSFAGFSGLQERRSRCNSFIENSSALKKPQAKLKKMHNLGHKNNNPPKEPQPKRVEEVYRALKNGLDEYLEVHQTELDKLTAQLKDMKRNSRLGVLYDLDKQIKTIERYMRRLEFHISKVDELYEAYCIQRRLQDGASKMKQAFATSPASKAARESLTEINRSFKEYTENMCTIEVELENLLGEFSIKMKGLAGFARLCPGDQYEIFMKYGRQRWKLKGKIEVNGKQSWDGEETVFLPLIVGFISIKVTELKGLATHILVGSVTCETKELFAARPQVVAVDINDLGTIKLNLEITWYPFDVEDMTASSGAGNKAAALQRRMSMYSQGTPETPTFKDHSFFRWLHPSPDKPRRLSVLSALQDTFFAKLHRSRSFSDLPSLRPSPKAVLELYSNLPDDIFENGKAAEEKMPLSLSFSDLPNGDCALTSHSTGSPSNSTNPEITITPAEFNLSSLASQNEGMDDTSSASSRNSLGEGQEPKSHLKEEDPEEPRKPASAPSEACRRQSSGAGAEHLFLENDVAEALLQESEEASELKPVELDTSEGNITKQLVKRLTSAEVPMATDRLLSEGSVGGESEGCRSFLDGSLEDAFNGLLLALEPHKEQYKEFQDLNQEVMNLDDILKDAKHLDDQKLNGAASWTEITEGE

SEQ ID NO: 24848 - protein, 819 aa, Homo sapiens
MALIMEPVSKWSPSQVVDWMKGLDDCLQQYIKNFEREKISGDQLLRITHQELEDLGVSRIGHQELILEAVDLLCALNYGLETENLKTLSHKLNASAKNLQNFITGRRRSGHYDGRTSRKLPNDFLTSVVDLIGAAKSLLAWLDRSPFAAVTDYSVTRNNVIQLCLELTTIVQQDCTVYETENKILHVCKTLSGVCDHIISLSSDPLVSQSAHLEVIQLANIKPSEGLGMYIKSTYDGLHVITGTTENSPADRCKKIHAGDEVIQVNHQTVPLIPRSPTSSVATPSSTISTPTKRDSSALQDLYIPPPPAEPYIPRDEKGNLPCEDLRGHMVGKPVHKGSESPNSFLDQEYRKRFNIVEEDTVLYCYEYEKGRSSSQGRRESTPTYENSLLRYMSNEKIAQEEYMFQRNSKKDTGKKSKKKGDKSNSPTHYSLLPSLQMDALRQDIMGTPVPETTLYHTFQQSSLQHKSKKKNKGPIAGKSKRRISCKDLGRGDCEGWLWKKKDAKSYFSQKWKKYWFVLKDASLYWYINEEDEKAEGFISLPEFKIDRASECRKKYAFKACHPKIKSFYFAAEHLDDMNRWLNRINMLTAGYAERERIKQEQDYWSESDKEEADTPSTPKQDSPPPPYDTYPRPPSMSCASPYVEAKHSRLSSTETSQSQSSHEEFRQEVTGSSAVSPIRKTASQRRSWQDLIETPLTSSGLHYLQTLPLEDSVFSDSAAISPEHRRQSTLPTQKCHLQDHYGPYPLAESERMQVLNGNGGKPRSFTLPRDSGFNHCCLNAPVSACDPQDDVQPPEVEEEEEEEEEEGEAAGENIGEKS

SEQ ID NO: 24849 - protein, 780 aa, Homo sapiens
MEPWSSRWKTKRWLWDFTVTTLALTFLFQAREVRGAAPVDVLKALDFHNSPEGISKTTGFCTNRKNSKGSDTAYRVSKQAQLSAPTKQLFPGGTFPEDFSILFTVKPKKGIQSFLLSIYNEHGIQQIGVEVGRSPVFLFEDHTGKPAPEDYPLFRTVNIADGKWHRVAISVEKKTVTMIVDCKKKTTKPLDRSERAIVDTNGITVFGTRILDEEVFEGDIQQFLITGDPKAAYDYCEHYSPDCDSSAPKAAQAQEPQIDEYAPEDIIEYDYEYGEAEYKEAESVTEGPTVTEETIAQTEKKKSNFKKKMRTVATKSKEKSKKFTPPKSEKFSSKKKKSYQASAKAKLGVKANIVDDFQEYNYGTMESYQTEAPRHVSGTNEPNPVEEIFTEEYLTGEDYDSQRKNSEDTLYENKEIDGRDSDLLVDGDLGEYDFYEYKEYEDKPTSPPNEEFGPGVPAETDITETSINGHGAYGEKGQKGEPAVVEPGMLVEGPPGPAGPAGIMGPPGLQGPTGPPGDPGDRGPPGRPGLPGADGLPGPPGTMLMLPFRYGGDGSKGPTISAQEAQAQAILQQARIALRGPPGPMGLTGRPGPVGGPGSSGAKGESGDPGPQGPRGVQGPPGPTGKPGKRGRPGADGGRGMPGEPGAKGDRGFDGLPGLPGDKGHRGERGPQGPPGPPGDDGMRGEDGEIGPRGLPGEAGPRGLLGPRGTPGAPGQPGMAGVDGPPGPKGNMGPQGEPGPPGQQGNPGPQGLPGPQGPIGPPGEKMCCNLSFGILIPLQK

SEQ ID NO: 24850 - protein, 1093 aa, Homo sapiens
LLQQTDEYVANLTELVRQHKAAQVAKEKKKKKKKKKAENAEGQTPAIGPDGEPLDETSQMSDLPVKVIHVESGKILTGTDAPKAGQLEAWLEMNPGYEVAPRSDSEESGSEEEEEEEEEEQPQAAQPPTLPVEEKKKIPDPDSDDVSEVDARHIIENAKQDVDDEYGVSQALARGLQSYYAVAHAVTERVDKQSALMVNGVLKQYQIKGLEWLVSLYNNNLNGILADEMGLGKTIQTIALITYLMEHKRINGPFLIIVPLSTLSNWAYEFDKWAPSVVKVSYKGSPAARRAFVPQLRSGKFNVLLTTYEYIIKDKHILAKIRWKYMIVDEGHRMKNHHCKLTQVLNTHYVAPRRLLLTGTPLQNKLPELWALLNFLLPTIFKSCSTFEQWFNAPFAMTGEKVDLNEEETILIIRRLHKVLRPFLLRRLKKEVEAQLPEKVEYVIKCDMSALQRVLYRHMQAKGVLLTDGSEKDKKGKGGTKTLMNTIMQLRKICNHPYMFQHIEESFSEHLGFTGGIVQGLDLYRASGKFELLDRILPKLRATNHKVLLFCQMTSLMTIMEDYFAYRGFKYLRLDGTTKAEDRGMLLKTFNEPGSEYFIFLLSTRAGGLGLNLQSADTVIIFDSDWNPHQDLQAQDRAHRIGQQNEVRVLRLCTVNSVEEKILAAAKYKLNVDQKVIQAGMFDQKSSSHERRAFLQAILEHEEQDEEEDEVPDDETVNQMIARHEEEFDLFMRMDLDRRREEARNPKRKPRLMEEDELPSWIIKDDAEVERLTCEEEEEKMFGRGSRHRKEVDYSDSLTEKQWLKKITGKDIHDTASSVARGLQFQRGLQFCTRASKAIEEGTLEEIEEEVRQKKSSRKRKRDSDAGSSTPTTSTRSRDKDDESKKQKKRGRPPAEKLSPNPPNLTKKMKKIVDAVIKYKDSSGRQLSEVFIQLPSRKELPEYYELIRKPVDFKKIKERIRNHKYRSLNDLEKDVMLLCQNAQTFNLEGSLIYEDSIVLQSVFTSVRQKIEKEDDSEGEESEEEEEGEEEGSESESRSVKVKIKLGRKEKAQDRLKGGRRRPSRGSRAKPVVSDDDSEEEQEEDRSGSGSEED

SEQ ID NO: 24851 - protein, 203 aa, Homo sapiens
MDTDVVVLTTGVLVLITMLPMIPQSGKQHLLDFFDIFGRLSSWCLKKPGHVAEVYLVHLHASVYALFHRLYGMYPCNFVSFLRSHYSMKENLETFEEVVKPMMEHVRIHPELVTGSKDHELDPRRWKRLETHDVVIECAKISLDPTEASYEDGYSVSHQISARFPHRSADVTTSPYADTQNSYGCATSTPYSTSRLMLLNMPG

SEQ ID NO: 24852 - protein, 472 aa, Homo sapiens
MDFRTACEEERTVTIRRQTVGGFGLSIKGGAEHNIPVVVSKISKEQRAELSGLLFIGDAILQINGINVRKCRHEEVVQVLRNAGEEVTLTVSFLKRAPAFLKLPLNEDCACAPSDQSSGTSSPLCDSGLHLNYHPNNTDTLSCSSWPTSPGLRWEKRWCDLRLIPLLHSRFSQYVPGTDLSRQNAFQVIAVDGVCTGIIQCLSAEDCVDWLQAIATNISNLTKHNIKKINRNFPVNQQIVYMGWCEAREQDPLQDRVYSPTFLALRGSCLYKFLAPPVTTWDWTRAEKTFSVYEIMCKILKDSDLLDRRKQCFTVQSESGEDLYFSVELESDLAQWERAFQTATFLEVERIQCKTYACVLESHLMGLTIDFSTGFICFDAATKAVLWRYKFSQLKGSSDDGKSKIKFLFQNPDTKQIEAKELEFSNLFAVLHCIHSFFAAKVACLDPLFLGNQATASTAASSATTSKAKYTT

SEQ ID NO: 24853 - protein, 155 aa, Homo sapiens
MEERGDSEPTPGCSGLGPGGVRGFGDGGGAPSWAPEDAWMGTHPKYLEMMELDIGDATQVYVAFLVYLDLMESKSWHEVNCVGLPELQLICLVGTEIEGEGLQTVVPTPITASLSHNSCTQKKAHMRTQQEGGCLQAKKRGLIRDGMFLHFGLDF

SEQ ID NO: 24854 - protein, 1163 aa, Homo sapiens
YPVSSPKSMSNKLSNGHAVCLIENPTEENRHRISKYSQTESQQIRYFTHHSVKYFWNDTIHNFDFLKGLDEGVSCTSIYEKHSAGLTKGMHAYRKLLYGVNEIAVKVPSVFKLLIKEVLNPFYIFQLFSVILWSTDEYYYYALAIVVMSIVSIVSSLYSIRKQYVMLHDMVATHSTVRVSVCRVNEEIEEIFSTDLVPGDVMVIPLNGTIMPCDAVLINGTCIVNESMLTGESVPVTKTNLPNPSVDVKGIGDELYNPETHKRHTLFCGTTVIQTRFYTGELVKAIVVRTGFSTSKGQLVRSILYPKPTDFKLYRDAYLFLLCLVAVAGIGFIYTIINSILNEVQVGVIIIESLDIITITVPPALPAAMTAGIVYAQRRLKKIGIFCISPQRINICGQLNLVCFDKTGTLTEDGLDLWGIQRVENARFLSPEENVCNEMLVKSQFVACMATCHSLTKIEGVLSGDPLDLKMFEAIGWILEEATEEETALHNRIMPTVVRPPKQLLPESTPAGNQEMELFELPATYEIGIVRQFPFSSALQRMSVVARVLGDRKMDAYMKGAPEAIAGLCKPETVPVDFQNVLEDFTKQGFRVIALAHRKLESKLTWHKVQNISRDAIENNMDFMGLIIMQNKLKQETPAVLEDLHKANIRTVMVTGDSMLTAVSVARDCGMILPQDKVIIAEALPPKDGKVAKINWHYADSLTQCSHPSAIDPEAIPVKLVHDSLEDLQMTRYHFAMNGKSFSVILEHFQDLVPKLMLHGTVFARMAPDQKTQLIEALQNVDYFVGMCGDGANDCGALKRAHGGISLSELEASVASPFTSKTPSISCVPNLIREGRAALITSFCVFKFMALYSIIQYFSVTLLYSILSNLGDFQFLFIDLAIILVVVFTMSLNPAWKELVAQRPPSGLISGALLFSVLSQIIICIGFQSLGFFWVKQQPWYEVWHPKSDACNTTGSGFWNSSHVDNETELDEHNIQNYENTTVFFISSFQYLIVAIAFSKGKPFRQPCYKNYFFVFSVIFLYIFILFIMLYPVASVDQVLQIVCVPYQWRVTMLIIVLVNAFVSITVENFFLDMVLWKVVFNRDKQGEYRFSTTQPPQESVDRWGKCCLPWALGCRKKTPKAKYMYLAQELLVDPEWPPKPQTTTEAKALVKENGSCQIITIT

SEQ ID NO: 24855 - protein, 144 aa, Homo sapiens
MGLHSWQCGQLRQPPRALRGQRWRAWSRMEPRSPAAAMPGHRTTPEKSKDRGSNTIGARLNRVEDKVTQLDQRLALITDMLHQLLSLHGGSTPGSGGPPREGGAHITQPCGSGGSVDPELFLPSNTLPTYEQLTVPRRGPDEGS

SEQ ID NO: 24856 - protein, 1174 aa, Homo sapiens
MEEMIPLDSAKESLGTQLQSMEDRMECESPEPHPLQDNGSFLWFSMMSQSMGGDNLSSLDTNEAEIEPENMREKFFRSLARLLENKSNNTKIFSKAKYCQLIKEVKEAKAKAKKESVDYRRLARFDVILVQGNEKLIEAVNGETDKIRYYLHSEDLFDILHNTHLSIGHGGRTRMEKELQAKYKNITKEVIMLYLTLCKPCQQKNSKLKKVLTSKSIKEVSSRCQVDLIDMQLNPDGEYRFILHYQDLCTKLTFLRSLKSKRPTEVAHALLDIFTIIGAPSVLQSDNGREFSSQVVSELSNIWPELKIVHGKSQTCQSQSSAEQTEDIRKRIFSWMQTNNSSHWTEFLWFIQMSQNQPYHRSMQQTPCESAFSSEAKLGLSHSQLTEELVASLHTENELDQADKELENTLRAQYEENIETGTDSSDIEENLSVTPKVAEKSPPESRLRFLSCVVCEKECTGVNSCISCDGNIHAICGVPSQHGTEGCGRQITCSLCYETSTMKRKHDEIQRSLPVKPSKMLKPSGTPFSPDKVGDWMAKQASLDFFVKKRHAFSEHSSSNKRNVNNRSYPEEGKTKRVHASFTRKYDPSYIEFGFVAVIDGEVLKPQCIICGDVLANEAMKPSKLKRHLYSKHKEISSQPKEFFERKSSELKSQPKQVFNVSHINISALRASYKVALPVAKSKTPYTIAETLVKDCIKEVCLEMLGESAAKKVAQVPLSNDTIARRIQELANDMEDQLIEQIKLAKYFSLQLDECRDIANMIILLVYVRFEHDDDIKEEFFFSASLPTNTTSSELYEAVKNYIVNKCGLEFKFCVGVCSDGAASMTGKHSEVVTQIKELAPECKTTHCFIHRESLAMKKISAELNSVLNDIVKIVNYIKSNSLNSRLFSLLCDNMEADHKQLLLHAEIRWLSRGKVLSRMFEIRNELLVFLQGKKPMWSQLFKDVNWTARLAYLSDIFSIFNDLNASMQGKNATYFSMADKVEGQKQKLEAWKNRISTDCYDMFHNLTTIINEVGNDLDIAHLRKVISEHLTNLLECFEFYFPSKEDPRIGNLWIQNPFLSSKDNLNLTVTLQDKLLKLATDEGLKISFENTASLPSFWIKAKNDYPELAEIALKLLLLFPSTYLCETGFSTLSVIKTKHRNSLNIHYPLRVALSSIQPRLDKLTSKKQAHLSH

SEQ ID NO: 24857 - protein, 197 aa, Homo sapiens
MADVLSVLRQYNIQKKEIVVKGDEVIFGEFSWPKNVKTNYVVWGTGKEGQPREYYTLDSILFLLNNVHLSHPVYVRRAATENIPVVRRPDRKDLLGYLNGEASTSASIDRSAPLEIGLQRSTQVKRAADEVLAEAKKPRIEDEECVRLDKERLAARLEGHKEGIVQTEQIRFCVNIFQDFHLVTKVIFLSTVIKVFV

SEQ ID NO: 24858 - protein, 445 aa, Homo sapiens
MGIKVLQQSKSQKQKEEAYLLFAKAADMGNLKAMEKMADALLFGNFGVQNITAAIQLYESLAKEGSCKAQNALGFLSSYGIGMEYDQAKALIYYTFGSAGGNMMSQMILGYRYLSGINVLQNCEVALSYYKKVADYIADTFEKSEGVPVEKVRLTERPENLSSNSEILDWDIYQYYKFLAERGDVQIQKALHYFLKAAKAGSANAMAFIGKMYLEGNAAVPQNNATAFKYFSMAASKGNAIGLHGLGLLYFHGKGVPLNYAEALKYFQKAAEKGWPDAQFQLGFMYYSGSGIWKDYKLAFKYFYLASQSGQPLAIYYLAKMYATGTGVVRSCRTAVEKRLTFLKKRRCIQWRFSYGIELPFKDIHLARRLYDMAAQTSPDAHIPVLFAVMKLETTHLLRDILFFNQFTTRWNWLKLDNTIGPHWDLFVIGLIVPGLILLLRNHHG

SEQ ID NO: 24859 - protein, 716 aa, Homo sapiens
MSHVAVENALGLDQQFAGLDLNSSDNQSGGSTASRRYIPPHLRNREATKGFYDKDSSGWSSSKDKDAYSSFGSRSDSRGKSSFFSDRGSGSRGRFDDRGRSDYDGIGSRGDRSGFGKFERGGNSRWCDKSDEDDWSKPLPPSERLEQELFSGGNTGINFEKYDDIPVEATGNNCPPHIESFSDVEMGEIIMGNIELTRYTRPTPVQKHAIPIIKEKRDLMACAQTGSGKTAAFLLPILSQIYSDGPGEALRAMKENGRYGRRKQYPISLVLAPTRELAVQIYEEARKFSYRSRVRPCVVYGGADIGQQIRDLERGCHLLVATPGRLVDMMERGKIGLDFCKYVLFCFCFFVLFCFVLLFLAELRSCCPGWSAMARSRLTTTSASRVQAILLPQPPRYLVLDEADRMLDMGFEPQIRRIVEQDTMPPKGVRHTMMFSATFPKEIQMLARDFLDEYIFLAVGRVGSTSENITQKVVWVEESDKRSFLLDLLNATGKDSLTLVFVETKKGADSLEDFLYHEGYACTSIHGDRSQRDREEALHQFRSGKSPILVATAVAARGLDISNVKHVINFDLPSDIEEYVHRIGRTGRVGNLGLATSFFNERNINITKDLLDLLVEAKQEVPSWLENMAYEHHYKGSSRGRSKSSRFSGGFGARDYRQSSGASSSSFSSSRASSSRSGGGGHGSSRGFGGGGYGGFYNSDGYGGNYNSQGVDWWGN

SEQ ID NO: 24860 - protein, 230 aa, Homo sapiens
MGRLHCTEDPVPEAVGGDMQQLNQLGAQFSALTEVLFHFLTEPKEVERFLAQLSEFATTNQISLGSLRSIVKSLLLVPNGALKKSLTAKQVQADFITLGLSEEKATYFSEKWKQNAPTLARWAIGQTLMINQLIDMEWKFGVTSGSSELEKVGSIFLQLKLVVKKGNQTENVYIDWGPLKGRVNLRFILVPSWGLVQDPASSRCSTNVNIGIQVPSSPHSRDPRLPLPLP

SEQ ID NO: 24861 - protein, 600 aa, Homo sapiens
MSEETVSESQFSLKTAALRVFDLPLTWYYSLSQIKFSPVAKKLFVVTAVSAISVIFLAHHFKRKRGKKKGKILPWEPEHLILEYTKRAASDKGSSCSSSRQNLTLSLSSTKDKGSQVCNYANGGLFSKYSGSAQSLASVQSVNSCHSCACGNSNSWDKADEDDIKLVNIPVTTPENLYLMGMELFEEALRRWEQALTFRNRQAEDEACGSIKLGAGDAIAEENVDDIISTEFIHKLEALLQRAYRLQEEFEATLGASDPNSLADDIDKDTDITMKGNVEDFGLRDTLSIASTDSFASAAELAEHREVRHTYSLESLCHCPFYEEAMHLVEEGKIYSRVLRTEMLECLGDSDFLAKLHCIRQAFQVILSESANRIFLAESGRKILSALIVKARKNPKKFEDVFDEMIYFLEQTDHWGSTEMELAARGVKNLNFYDVVLDFILMDSFEDLENPPTSIQNVVNNRWLNSSFKETAVASSCWSVLKQKRQQMKIPDGFFAHFYAICEHISPVLAWGFLGPRNSLYDLCCFFKNQVLLFLKDIFDFEKVRYSSTETLAEDLMQLLIRRTELLMAYLEADALRHTSSCLSSHGHVMSTGLLEAKVQ

SEQ ID NO: 24862 - protein, 1915 aa, Homo sapiens
MVVSKGGCLALMLPRLGTQNSRRQRNIDVCTDPGHADTGASNFVSPEHLTSGPQHRKAAWSGGVKLRLKHRRSEPAGRPHSWHTTKSGEKQPDASMMQISQGMIGPPWHQSYHSSSSTSDLSNYDHAYLRRSPDQCSSQGSMESLEPSGAYPPCHLSPAKSTGSIDQLSHFHNKRDSAYSSFSTSSSILEYPHPGISGRERSGSMDNTSARGGLLEGMRQADIRYVKTVYDTRRGVSAEYEVNSSALLLQGREARASANGQGYDKWSNIPRGKGVPPPSWSQQCPSSLETATDNLPPKVGAPLPPARSDSYAAFRHRERPSSWSSLDQKRLCRPQANSLGSLKSPFIEEQLHTVLEKSPENSPPVKPKHNYTQKAQPGQPLLPTSIYPVPSLEPHFAQVPQPSVSSNGMLYPALAKESGYIAPQGACNKMATIDENGNQNGSGRPGFAFCQPLEHDLLSPVEKKPEATAKYVPSKVHFCSVPENEEDASLKRHLTPPQGNSPHSNERKSTHSNKPSSHPHSLKCPQAQAWQAGEDKRSSRLSEPWEGDFQEDHNANLWRRLEREGLGQSLSGNFGKTKSAFSSLQNIPESLRRHSSLELGRGTQEGYPGGRPTCAVNTKAEDPGRKAAPDLGSHLDRQVSYPRPEGRTGASASFNSTDPSPEEPPAPSHPHTSSLGRRGPGPGSASALQGFQYGKPHCSVLEKVSKFEQREQGSQRPSVGGSGFGHNYRPHRTVSTSSTSGNDFEETKAHIRFSESAEPLGNGEQHFKNGELKLEEASRQPCGQQLSGGASDSGRGPQRPDARLLRSQSTFQLSSEPEREPEWRDRPGSPESPLLDAPFSRAYRNSIKDAQSRVLGATSFRRRDLELGAPVASRSWRPRPSSAHVGLRSPEASASASPHTPRERHSVTPAEGDLARPVPPAARRGARRRLTPEQKKRSYSEPEKMNEVGIVEEAEPAPLGPQRNGMRFPESSVADRRRLFERDGKACSTLSLSGPELKQFQQSALADYIQRKTGKRPTSAAGCSLQEPGPLRERAQSAYLQPGPAALEGSGLASASSLSSLREPSLQPRREATLLPATVAETQQAPRDRSSSFAGGRRLGERRRGDLLSGANGGTRGTQRGDETPREPSSWGARAGKSMSAEDLLERSDVLAGPVHVRSRSSPATADKRQDVLLGQDSGFGLVKDPCYLAGPGSRSLSCSERGQEEMLPLFHHLTPRWGGSGCKAIGDSSVPSECPGTLDHQRQASRTPCPRPPLAGTQGLVTDTRAAPLTPIGTPLPSAIPSGYCSQDGQTGRQPLPPYTPAMMHRSNGHTLTQPPGPRGCEGDGPEHGVEEGTRKRVSLPQWPPPSRAKWAHAAREDSLPEESSAPDFANLKHYQKQQSLPSLCSTSDPDTPLGAPSTPGRISLRISESVLRDSPPPHEDYEDEVFVRDPHPKATSSPTFEPLPPPPPPPPSQETPVYSMDDFPPPPPHTVCEAQLDSEDPEGPRPSFNKLSKVTIARERHMPGAAHVVGSQTLASRLQTSIKGSEAESTPPSFMSVHAQLAGSLGGQPAPIQTQSLSHDPVSGTQGLEKKVSPDPQKSSEDIRTEALAKEIVHQDKSLADILDPDSRLKTTMDLMEGLFPRDVNLLKENSVKRKAIQRTVSSSGCEGKRNEDKEAVSMLVNCPAYYSVSAPKAELLNKIKEMPAEVNEEEEQADVNEKKAELIGSLTHKLETLQEAKGSLLTDIKLNNALGEEVEALISELCKPNEFDKYRMFIGDLDKVVNLLLSLSGRLARVENVLSGLGEDASNEERSSLYEKRKILAGQHEDARELKENLDRRERVVLGILANYLSEEQLQDYQHFVKMKSTLLIEQRKLDDKIKLGQEQVKCLLESLPSDFIPKAGALALPPNLTSEPIPAGGCTFSGIFPTLTSPL

SEQ ID NO: 24863 - protein, 945 aa, Homo sapiens
LIEPLTNLIHSTSAMSLLYECVNTVIAVLISLSSGMPNHSASIQLCVQKLRILIEDSDQNLKYLGLLAMSKILKTHPKSVQSHKDLILQCLDDKDESIRLRALDLLYGMVSKKNLMEIVKKLMTHVDKAEGTTYRDELLTKIIDICSQSNYQYITNFEWYISILVELTRLEGTRHGHLIAAQMLDVAIRVKAIRKFAVSQMSALLDSAHLLASSTQRNGICEVLYAAAWICGEFSEHLQEPHHTLEAMLRPRVTTLPGHIQAVYVQNVVKLYASILQQKEQAGEAEGAQAVTQLMVDRLPQFVQSADLEVQERASCILQLVKHIQKLQAKDVPVAEEVSALFAGELNPVAPKAQKKVPVPEGLDLDAWINEPLSDSESEDERPRAVFHEEEQRRPKHRPSEADEEELARRREARKQEQANNPFYIKSSPSPQKRYQDTPGVEHIPVVQIDLSVPLKVPGLPMSDQYVKLEEERRHRQKLEKDKRRKKRKEKEKKGKRRHSSLPTESDEDIAPAQQVDIVTEEMPENALPSDEDDKDPNDPYRALDIDLDKPLADSEKLPIQKHRNTETSKSPEKDVPMVEKKSKKPKKKEKKHKEKERDKEKKKEKEKKAEDLDFWLSTTPPPAPAPAPAPVPSTDECEDAKTEAQGEEDDAEGQDQDKKSPKPKKKKHRKEKEERTKGKKKSKKQPPGSEEAAGEPVQNGAPEEEQLPPESSYSLLAENSYVKMTCDIRGSLQEDSQVTVAIVLENRSSSILKGMELSVLDSLNARMARPQGSSVHDGVPVPFQLPPGVSNEAQYVFTIQSIVMAQKLKGTLSFIAKNDEGATHEKLDFRLHFSCSSYLITTPCYSDAFAKLLESGDLSMSSIKVDGIRMSFQNLLAKICFHHHFSVVERVDSCASMYSRSIQGHHVCLLVKKGENSVSVDGKCSDSTLLSNLLEEMKATLAKC

SEQ ID NO: 24864 - protein, 491 aa, Homo sapiens
MQLPRWWELGDPCAWTGQGRGTRRMSPATTGTFLLTAFLLSCADGINGTVNWKTRQANNFIISRKMAAGMKDVYSIFSKVHSDRNVYPSAGVLFVHVLEREYFKGEFPPYPKPGEISNDPITFNTNLMGYPDRPGWLRYIQRTPYSDGVLYGSPTAENVGKPTIIEITAYNRRTFETARHNLIINIMSAEDGVLLSSPRLECNGTISANCNLRLLGSDFPLPYQAEFFIKNMNVEEMLASEVLGDFLGAVKNVWQPERLNAINITSALDRGGRVPLPINDLKEGVYVMVGADVPFSSCLREVENPQNQLRCSQEMEPVITCDKKFRTQFYIDWCKISLVDKTKQVSTYQEVIRGEGILPDGGEYKPPSDSLKSRDYYTDFLITLAVPSAVALVLFLILAYIMCCRREGVIQLVHHSAIQKSTKELRDMSKNREIAWPLSTLPVFHPVTGEIIPPLHTDNYDSTNMPLMQTQQNLPHQTQIPQQQTTGKWYP

SEQ ID NO: 24865 - protein, 60 aa, Homo sapiens
SGLGPGGVRGFGDGGGAPSWAPEDAWMGTHPKYLEMMELDIGDATQVYVAFLVYLDLMER

SEQ ID NO: 24866 - protein, 1215 aa, Homo sapiens
QPEYLDATGGTLHPYQMEGLNWLRFSWAQGTDTILADEMGLGKTVQTAVFLYSLYKEGHSKGPFLVSAPLSTIINWEREFEMWAPDMYVVTYVGDKDSRAIIRENEFSFEDNAIRGGKKASRMKKEASVKFHVLLTSYELITIDMAILGSIDWACLIVDEAHRLKNNQSKFFRVLNGYSLQHKLLLTGTPLQNNLEELFHLLNFLTPERFHNLEGFLEEFADIAKEDQIKKLHDMLGPHMLRRLKADVFKNMPSKTELIVRVELSPMQKKYYKYILTRNFEALNARGGGNQVSLLNVVMDLKKCCNHPYLFPVAAMEAPKMPNGMYDGSALIRASGKLLLLQKMLKNLKEGGHRVLIFSQMTKMLDLLEDFLEHEGYKYERIDGGITGNMRQEAIDRFNAPGAQQFCFLLSTRAGGLGINLATADTVIIYDSDWNPHNDIQAFSRAHRIGQNKKVMIYRFVTRASVEERITQVAKKKMMLTHLVVRPGLGSKTGSMSKQELDDILKFGTEELFKDEATDGGGDNKEGEDSSVIHYDDKAIERLLDRNQDETEDTELQGMNEYLSSFKVAQYVVREEEMGEEEEVEREIIKQEESVDPDYWEKLLRHHYEQQQEDLARNLGKGKRIRKQVNYNDGSQEDRDWQDDQSDNQSDYSVASEEGDEDFDERSEAPRRPSRKGLRNDKDKPLPPLLARVGGNIEVLGFNARQRKAFLNAIMRYGMPPQDAFTTQWLVRDLRGKSEKEFKAYVSLFMRHLCEPGADGAETFADGVPREGLSRQHVLTRIGVMSLIRKKVQEFEHVNGRWSMPELAEVEENKKMSQPGSPSPKTPTPSTPGDTQPNTPAPVPPAEDGIKIEENSLKEEESIEGEKEVKSTAPETAIECTQAPAPASEDEKVVVEPPEGEEKVEKAEVKERTEEPMETEPKGAADVEKVEEKSAIDLTPIVVEDKEEKKEEEEKKEVMLQNGETPKDLNDEKQKKNIKQRFMFNIADGGFTGMEMRGPPGLEGSDVKLGFLSETTNEERAATVTKKTYEIWHRRHDYWLLAGIINHGYARWQDIQNDPRYAILNEPFKGEMNRGNFLEIKNKFLARRFKLLEQALVIEEQLRRAAYLNMSEDPSHPSMALNTRFAEVECLAESHQHLSKESMAGNKPANAVLHKVLKQLEELLSDMKADVTRLPATIARIPPVAVRLQMSERNILSRLANRAPEPTPQQVAQQQ

SEQ ID NO: 24867 - protein, 1957 aa, Homo sapiens
MGENEDEKQAQAGQVFENFVQASTCKGTLQAFNILTRHLDLDPLDHRNFYSKLKSKVTTWKAKALWYKLDKRGSHKEYKRGKSCTNTKCLIVGGGPCGLRTAIELAYLGAKVVVVEKRDSFSRNNVLHLWPFTIHDLRGLGAKKFYGKFCAGSIDHISIRQLQLILFKVALMLGVEIHVNVEFVKVLEPPEDQENQKIGWRAEFLPTDHSLSEFEFDVIIGADGRRNTLEGFRRKEFRGKLAIAITANFINRNSTAEAKVEEISGVAFIFNQKFFQDLKEETGIDLENIVYYKDCTHYFVMTAKKQSLLDKGVIINDYIDTEMLLCAENVNQDNLLSYAREAADFATNYQLPSLDFAMNHYGQPDVAMFDFTCMYASENAALVRERQAHQLLVALVGDSLLEPFWPMGTGCARGFLAAFDTAWMVKSWNQGTPPLELLAERESLYRLLPQTTPENINKNFEQYTLDPGTRYPNLNSHCVRPHQVKHLYITKELEHYPLERLGSVRRSVNLSRKESDIRPSKLLTWCQQQTEGYQHVNVTDLTTSWRSGLALCAIIHRFRPELINFDSLNEDDAVENNQLAFDVAEREFGIPPVTTGKEMASAQEPDKLSMVMYLSKFYELFRGTPLRPVDSWRKNYGENADLSLAKSSISNNYLNLTFPRKRTPRVDGQTGENDMNKRRRKGFTNLDEPSNFSSRSLGSNQECGSSKEGGNQNKVKSMANQLLAKFEESTRNPSLMKQERRVSGIGKPVLCSSSGPPVHSCCPKPEEATPSPSPPLKRQFPSVVVTGHVLRELKQVSAGSECLSRPWRARAKSDLQLGGTENFATLPSTRPRAQALSGVLWRLQQVEEKILQKRAQNLANREFHTKNIKEKAAHLASMFGHGDFPQNKLLSKGLSHTHPPSPPSRLPSPDPAASSSPSTVDSASPARKEKKSPSGFHFHPSHLRTVHPQLTVGKVSSGIGAAAEVLVNLYMNDHRPKAQATSPDLESMRKSFPLNLGGSDTCYFCKKRVYVMERLSAEGHFFHRECFRCSICATTLRLAAYTFDCDEGKFYCKPHFIHCKTNSKQRKRRAELKQQREEEATWQEQEAPRRDTPTESSCAVAAIGTLEGSPPDEPTSPKRPKSISEPQHSDAEGDAASPLPSEWTSVRISPGEEAAGQDVLAVRVLVTSEDSSSDTESDYGGSEGSHTEPCEEKPWRPGSPHLPHTSLGEALSRAVSPQCPEEPRAVHAALQRANSFQSPTPSKYQNWRREFWWSLTPVNKRTMSPPKDPSPSLPLPSSSSHSSSPPSSSSTSVSGNAPDGSSPPQMTASEPLSQVSRGHPSPPTPNFRRRAVAQGAPREIPLYLPHHPKPEWAEYCLVSPGEDGLSDPAEMTSDECQPAEAPLGDIGSNHRDPHPIWGKDRSWTGQELSPLAGEDREKGSTGARKEEEGGPVLVKEKLGLKKLVLTQEQKTMLLDWNDSIPESVHLKAGERISQKSAENGRGGRVLKPVRPLLLPRAAGEPLPTQRGAQEKMGTPAEQAQGERNVPPPKSPLRLIANAIRRSLEPLLSNSEGGKKAWAKQESKTLPAQACTRSFSLRKTNSNKDGDQHSPGRNQSSAFSPPDPALRTHSLPNRPSKVFPALRSPPCSKIEDVPTLLEKVSLQENFPDASKPPKKRISLFSSLRLKDKSFESFLQESRQRKDIRDLFGSPKRKVLPEDSAQALEKLLQPFKSTSLRQAAPPPPPPPPPPPPPPTAGGADSKNFPLRAQVTEASSSASSTSSSSADEEFDPQLSLQLKEKKTLRRRKKLEKAMKQLVKQEELKRLYKAQAIQRQLEEVEERQRASEIQGVRLEKALRGEADSGTQDEAQLLQEWFKLVLEKNKLMRYESELLIMAQELELEDHQSRLEQKLREKMLKEESQKDEKDLNEEQEVFTELMQVIEQRDKLVDSLEEQRIREKAEDQHFESFVFSRGCQLSRT

SEQ ID NO: 24868 - protein, 815 aa, Homo sapiens
MALIMEPVSKWSPSQVVDWMKGLDDCLQQYIKNFEREKISGDQLLRITHQELEDLGVSRIGHQELILEAVDLLCALNYGLETENLKTLSHKLNASAKNLQNFITGRRRSGHYDGRTSRKLPNDFLTSVVDLIGAAKSLLAWLDRSPFAAVTDYSVTRNNVIQLCLELTTIVQQDCTVYETENKILHVCKTLSGVCDHIISLSSDPLVSQSAHLEVIQLANIKPSEGLGMYIKSTYDGLHVITGTTENSPADRCKKIHAGDEVIQVNHQTVPLIPRSPTSSVATPSSTISTPTKRDSSALQDLYIPPPPAEPYIPRDEKGNLPCEDLRGHMVGKPVHKGSESPNSFLDQEYRKRFNIVEEDTVLYCYEYEKGRSSSQGRRESTPTYENSLLRYMSNEKIAQEEYMFQRNSKKDTGKKSKKKGDKSNSPTHYSLLPSLQMDALRQDIMGTPVPETTLYHTFQQSSLQHKSKKKNKGKSKRRISCKDLGRGDCEGWLWKKKDAKSYFSQKWKKYWFVLKDASLYWYINEEDEKAEGFISLPEFKIDRASECRKKYAFKACHPKIKSFYFAAEHLDDMNRWLNRINMLTAGYAERERIKQEQDYWSESDKEEADTPSTPKQDSPPPPYDTYPRPPSMSCASPYVEAKHSRLSSTETSQSQSSHEEFRQEVTGSSAVSPIRKTASQRRSWQDLIETPLTSSGLHYLQTLPLEDSVFSDSAAISPEHRRQSTLPTQKCHLQDHYGPYPLAESERMQVLNGNGGKPRSFTLPRDSGFNHCCLNAPVSACDPQDDVQPPEVEEEEEEEEEEGEAAGENIGEKS

SEQ ID NO: 24869 - protein, 1475 aa, Homo sapiens
YDKLPQPPSHREAIVNSCVFVHQTLHQANARLAKRGGRTMAITPRHYLDFINHYANLFHEKRSELEEQQMHLNVGLRKIKETVDQVEELRRDLRIKSQELEVKNAAANDKLKKMVKDQQEAEKKKVMSQEIQEQLHKQQEVIADKQMSVKEDLDKVEPAVIEAQNAVKSIKKQHLVEVRSMANPPAAVKLALESICLLLGESTTDWKQIRSIIMRENFIPTIVNFSAEEISDAIREKMKKNYMSNPSYNYEIVNRASLACGPMVKWAIAQLNYADMLKRVEPLRNELQKLEDDAKDNQQKANEVEQMIRDLEASIARYKEEYAVLISEAQAIKADLAAVEAKVNRSTALLKSLSAERERWEKTSETFKNQMSTIAGDCLLSAAFIAYAGYFDQQMRQNLFTTWSHHLQQANIQFRTDIARTEYLSNADERLRWQASSLPADDLCTENAIMLKRFNRYPLIIDPSGQATEFIMNEYKDRKITRTSFLDDAFRKNLESALRFGNPLLVQDVESYDPVLNPVLNREVRRTGGRVLITLGDQDIDLSPSFVIFLSTRDPTVEFPPDLCSRVTFVNFTVTRSSLQSQCLNEVLKAERPDVDEKRSDLLKLQGEFQLRLRQLEKSLLQALNEVKGRILDDDTIITTLENLKREAAEVTRKVEETDIVMQEVETVSQQYLPLSTACSSIYFTMESLKQIHFLYQYSLQFFLDIYHNVLYENPNLKGVTDHTQRLSIITKDLFQVAFNRVARGMLHQDHITFAMLLARIKLKGTVGEPTYDAEFQHFLRGNEIVLSAGSTPRIQGLTVEQAEAVVRLSCLPAFKDLIAKVQADEQFGIWLDSSSPEQTVPYLWSEETPATPIGQAIHRLLLIQAFRPDRLLAMAHMFVSTNLGESFMSIMEQPLDLTHIVGTEVKPNTPVLMCSVPGYDASGHVEDLAAEQNTQITSIAIGSAEGFNQADKAINTAVKSGRWVMLKNVHLAPGWLMQLEKKLHSLQPHACFRLFLTMEINPKVPVNLLRAGRIFVFEPPPGVKANMLRTFSSIPVSRICKSPNERARLYFLLAWFHAIIQERLRYAPLGWSKKYEFGESDLRSACDTVDTWLDDTAKGRQNISPDKIPWSALKTLMAQSIYGGRVDNEFDQRLLNTFLERLFTTRSFDSEFKLACKVDGHKDIQMPDGIRREEFVQWVELLPDTQTPSWLGLPNNAERVLLTTQGVDMISKMLKMQMLEDEDDLAYAETEKKTRTDSTSDGRPAWMRTLHTTASNWLHLIPQTLSHLKRTVENIKDPLFRFFEREVKMGAKLLQDVRQDLADVVQVCEGKKKQTNYLRTLINELVKGILPRSWSHYTVPAGMTVIQWVSDFSERIKQLQNISLAAASGGAKELKNIHVCLGGLFVPEAYITATRQYVAQANSWSLEELCLEVNVTTSQGATLDACSFGVTGLKLQGATCNNNKLSLSNAISTALPLTQLRWVKQTNTEKKASV

SEQ ID NO: 24870 - protein, 1377 aa, Homo sapiens
MASGLGSPSPCSAGSEEEDMDALLNNSLPPPHPENEEDPEEDLSETETPKLKKKKKPKKPRDPKIPKSKRQKKELGDSSGEGPEFVEEEEEVALRSDSEGSDYTPGKKKKKKLGPKKEKKSKSKRKEEEEEEDDDDDSKEPKSSAQLLEDWGMEDIDHVFSEEDYRTLTNYKAFSQFVRPLIAAKNPKIAVSKMMMVLGAKWREFSTNNPFKGSSGASVAAAAAAAVAVVESMVTATEVAPPPPPVEVPIRKAKTKEGKGPNARRKPKGSPRVPDAKKPKPKKVAPLKIKLGGFGSKRKRSSSEDDDLDVESDFDDASINSYSVSDGSTSRSSRSRKKLRTTKKKKKGEEEVTAVDGYETDHQDYCEVCQQGGEIILCDTCPRAYHMVCLDPDMEKAPEGKWSCPHCEKEGIQWEAKEDNSEGEEILEEVGGDLEEEDDHHMEFCRVCKDGGELLCCDTCPSSYHIHCLNPPLPEIPNGEWLCPRCTCPALKGKVQKILIWKWGQPPSPTPVPRPPDADPNTPSPKPLEGRPERQFFVKWQGMSYWHCSWVSELQLELHCQVMFRNYQRKNDMDEPPSGDFGGDEEKSRKRKNKDPKFAEMEERFYRYGIKPEWMMIHRILNHSVDKKGHVHYLIKWRDLPYDQASWESEDVEIQDYDLFKQSYWNHRELMRGEEGRPGKKLKKVKLRKLERPPETPTVDPTVKYERQPEYLDATGGTLHPYQMEGLNWLRFSWAQGTDTILADEMGLGKTVQTAVFLYSLYKEGHSKGPFLVSAPLSTIINWEREFEMWAPDMYVVTYVGDKDSRAIIRENEFSFEDNAIRGGKKASRMKKEASVKFHVLLTSYELITIDMAILGSIDWACLIVDEAHRLKNNQSKFFRVLNGYSLQHKLLLTGTPLQNNLEELFHLLNFLTPERFHNLEGFLEEFADIAKEDQIKKLHDMLGPHMLRRLKADVFKNMPSKTELIVRVELSPMQKKYYKYILTRNFEALNARGGGNQVSLLNVVMDLKKCCNHPYLFPVAAMEAPKMPNGMYDGSALIRASGKLLLLQKMLKNLKEGGHRVLIFSQMTKMLDLLEDFLEHEGYKYERIDGGITGNMRQEAIDRFNAPGAQQFCFLLSTRAGGLGINLATADTVIIYDSDWNPHNDIQAFSRAHRIGQNKKVMIYRFVTRASVEERITQVAKKKMMLTHLVVRPGLGSKTGSMSKQELDDILKFGTEELFKDEATDGGGDNKEGEDSSVIHYDDKAIERLLDRNQDETEDTELQGMNEYLSSFKVAQYVVREEEMGIGRTTSPTTSPITQWLQRKVMKTLMNVQKLPVGPVVRACGMIKISHCLLCWPVLVGILKYLVLMLVSEKPFLMQLCDMVCHLRMLLLPSGL

SEQ ID NO: 24871 - protein, 490 aa, Homo sapiens
MPLAFCGSENHSAAYRVDQGVLNNGCFVDALNVVPHVFLLFITFPILFIGWGSQSSKVHIHHSTWLHFPGHNLRWILTFMLLFVLVCEIAEGILSDGVTESHHLHLYMPAGMAFMAAVTSVVYYHNIETSNFPKLLIALLVYWTLAFITKTIKFVKFLDHAIGFSQLRFCLTGLLVILYGMLLLVEVNVIRVRRYIFFKTPREVKPPEDLQDLGVRFLQPFVNLLSKGTYWWMNAFIKTAHKKPIDLRAIGKLPIAMRALTNYQRLCEAFDAQRKDIQGTQGARAIWQALSHAFGRRLVLSSTFRILADLLGFAGPLCIFGIVDHLGKENDVFQPKTQFLGVYFVSSQEFLANAYVLAVLLFLALLLQRTFLQASYYVAIETGINLRGAIQTKIYNKIMHLSTSNLSMGEMTAGQICNLVAIDTNQLMWFFFLCPNLWAMPVQIIVGVILLYYILGVSALIGAAVIILLAPVQYFVATKLSQAQRSTLFS

SEQ ID NO: 24872 - protein, 837 aa, Homo sapiens
MAAATRRVFHLQPCENSPTMSQNGYFEDSSYYKCDTDDTFEAREEILGDEAFDTANSSIVSGESIRFFVNVNLEMQATNTENEATSGGCVLLHTSRKYLKLKNFKEEIRAHRDLDGFLAQASIVLNETATSLDNVLRTMLRRFARDPDNNEPNCNLDLLMAMLFTDAGAPMRGKVHLLSDTIQGVTATVTGVRYQQSWLCIICTMKALQKRHVCISRLVRPQNWGENSCEVRFVILVLAPPKMKSTKTAMEVARTFATMFSDIAFRQKLLETRTEEEFKEALVHQRQLLTMVSHGPVAPRTKERSTVSLPAHRHPEPPKCKDFVPFGKGIREDIARRFPLYPLDFTDGIIGKNKAVGKYITTTLFLYFACLLPTIAFGSLNDENTDGAIVIRVICDDYDLDFNSFYAWTGLWNSFFLALYAFFNLSLVMSLFKRSTEEIIALFISITFVLDAVKGTVKIFWKYYYGHYLDDYHTKRTSSLVSLSGLGASLNASLHTALNASFLASPTELPSATHSGQATAVLSLLIMLGTLWLGYTLYQFKKSPYLHPCVREILSDCALPIAVLAFSLISSHGFREIEMSKFRYNPSESPFAMAQIQSLSLRAVSGAMGLGFLLSMLFFIEQNLVAALVNAPENRLVKGTAYHWDLLLLAIINTGLSLFGLPWIHAAYPHSPLHVRALALVEERVENGHIYDTIVNVKETRLTSLGASVLVGLSLLLLPVPLQWIPKPVLYGLFLYIALTSLDGNQLVQRVALLLKEQTAYPPTHYIRRVPQRKIHYFTGLQVLQLLLLCAFGMSSLPYMKMIFPLIMIAMIPIRYILLPRIIEAKYLDVMDAEHRP

SEQ ID NO: 24873 - protein, 1480 aa, Homo sapiens
MLSFPNLNQVLENYSDAPMTPKQILQVIEAEGLKEMRSGTSPLACLNAMLHSNSRGGEGLFYKLPGRISLFTLKKDALQWSRHPATVEGEEPEDTADVESCGSNEASTVSGENDVSLDETSSNASCSTESQSRPLSNPRDSYRASSQANKQKKKTGVMLPRVVLTPLKVNGAHVESASGQMKRNRGEEIDFETPGSILVNTNLRALINSRTFHALPSHFQQQLLFLLPEVDRQVGTDGLLRLSSSALNNEFFTHAAQSWRERLADGEFTHEMQVRIRQEMEKEKKVEQWKEKFFEDYYGQKLGLTKEESLQQNVGQEEAEIKSGLCVPGESVRIQRGPATRQRDGHFKKRSRPDLRTRARRNLYKKQESEQAGVAKDAKSVASDVPLYKDGEAKTDPAGLSSPHLPGTSSAAPDLEGPEFPVESVASRIQAEPDNLARASASPDRIPSLPQETVDQEPKDQKRKSFEQAASASFPEKKPRLEDRQSFRNTIESVHTEKPQPTKEEPKVPPIRIQLSRIKPPWVVKGQPTYQICPRIIPTTESSCRGWTGARTLADIKARALQVRGARGHHCHREAATTAIGGGGGPGGGGGGATDEGGGRGSSSGDGGEACGHPEPRGGPSTPGKCTSDLQRTQLLPPYPLNGEHTQAGTAMSRARREDLPSLRKEESCLLQRATVGLTDGLGDASQLPVAPTGDQPCQALPLLSSQTSVAERLVEQPQLHPDVRTECESGTTSWESDDEEQGPTVPADNGPIPSLVGDDTLEKGTGQALDSHPTMKDPVNVTPSSTPESSPTDCLQNRAFDDELGLGGSCPPMRESDTRQENLKTKALVSNSSLHWIPIPSNDEVVKQPKPESREHIPSVEPQVGEEWEKAAPTPPALPGDLTAEEGLDPLDSLTSLWTVPSRGGSDSNGSYCQQVDIEKLKINGDSEALSPHGESTDTASDFEGHLTEDSSEADTREAAVTKGSSVDKDEKPNWNQSAPLSKVNGDMRLVTRTDGMVAPQSWVSRVCAVRQKIPDSLLLASTEYQPRAVCLSMPGSSVEATNPLVMQLLQGSLPLEKVLPPAHDDSMSESPQVPLTKDQSHGSLRMGSLHGLGKNSGMVDGSSPSSLRALKEPLLPDSCETGTGLARIEATQAPGAPQKNCKAVPSFDSLHPVTNPITSSRKLEEMDSKEQFSSFSCEDQKEVRAMSQDSNSNAAPGKSPGDLTTSRTPRFSSPNVISFGPEQTGRALGDQSNVTGQGKKLFGSGNVAATLQRPRPADPMPLPAEIPPVFPSGKLGPSTNSMSGGVQTPREDWAPKPHAFVGSVKNEKTFVGGPLKANAENRKATGHSPLELVGHLEGMPFVMDLPFWKLPREPGKGLSEPLEPSSLPSQLSIKQAFYGKLSKLQLSSTSFNYSSSSPTFPKGLAGSVVQLSHKANFGASHSASLSLQMFTDSSTVESISLQCACSLKAMIMCQGCGAFCHDDCIGPSKLCVLCLVVR

SEQ ID NO: 24874 - protein, 1349 aa, Homo sapiens
MEGAAAREARGTETPRASAPPPAPSEPPAAPRARPRLVFRTQLAHGSPTGKIEGFTNVRELYAKIAEAFGIAPTEILFCTLNSHKVDMQKLLGGQIGLEDFIFAHVRGETKEVEVTKTEDALGLTITDNGAGYAFIKRIKEGSIINRIEAVCVGDSIEAINDHSIVGCRHYEVAKMLRELPKSQPFTLRLVQPKRAFDMIGQRSRSSKCPVEAKVTSGRETLRLRSGGAATVEEAPSEFEEEASRKVDDLLESYMGIRDPELGKGPGVHHGGDVQEDSERPGVCTLFRLRLGRVRLPRRVCGGSVGRHRRGQRGLWLVCPGGAQHSPSPEPSPLPRPCSRTQPRSEDKFLSRTQSNLEPQPNSRTQPFSRIQPRSEAKLCARAQASSETKPSIENKLCSKTQASPETKPSSRTQMSFETMPSTETKPCSRTQACSEAKPSSRTQMSSETMPSSRTQMGSETMPSSRTQMGSETEPSSRTQMGSETEPSSKTQMGSETMPSSRTQMGSETEPSSRTQMGSETEPSSRTQMGSETMPSSRTQMGSETKPSSRTQMSSETMPSSRTQMSSETEPSIETKPCSRVQASSETKPSSRTQISSETKPSIETKPCSRIQATSEAKPSSRTQVSPETKPSSRTQISSETNPSIETKPCSRTQATSEAKPSSRTQIRSETKPCSEAQASSETKHISRIQLSPDNKPNSGTQTHFKTQTSLETNPSSRIQASSETKPCWKTQADSGTLDSSTMQPHLDTRSSSGTPVNFGTHVRFMKQPSSGTPVSSGFRDSSQIKSYSRTQTSSETQVHTAAQSRSQPQLHPSAHPHPAAQSSSSDDSSSETEPSSRTSPSATTRPNSRIQTSSGTPSILEARPSSSTQLGAKPHSPCTMQLSSRMQFTSRTQTNFKAWPSSRAQSSPSTAPSSGTQLSSGAQAGSEIPASSKTQTAAETQPSSRIQLSSGVQSSPGTQAIAAIELSSTALSSSDSRSSSRTQRCPGARPASGTQFASKTLPGSRYQLQTTAPDSSGIQLDFGKQSSSESQLSFGTQPSSGTQISSRIQASSGSQLSSGTQLISGAQPSSRTQTSSGNQLSSGTQTTARIQLSPGAHLSSRTQSSPETRLSSEAQSSSGTQFSSGIQFGSETQTGSRIQPDSGAQLSSRTQSSSETGLSSETQTGSRIQPSPGAHLSSGTQPVSGTQSSSRTHTSSRIWLSPGNGICPQTPGLDPRIQLEAPAPAQPQPPGPSPRDPTPAPSKDPQPLPQPHDQVCGIQASLGPIPGLPQASYLAPQSQVSSTPQKPAVSPKPRVGPQKSTPPTISVTPSPAPRAALLSSQLSESPALAPALCPTLGEPGARPYRGGP

SEQ ID NO: 24875 - protein, 561 aa, Homo sapiens
MPLAFCGSENHSAAYRVDQGVLNNGCFVDALNVVPHVFLLFITFPILFIGWGSQSSKVHIHHSTWLHFPGHNLRWILTFMLLFVLVCEIAEGILSDGVTESHHLHLYMPAGMAFMAAVTSVVYYHNIETSNFPKLLIALLVYWTLAFITKTIKFVKFLDHAIGFSQLRFCLTGLLVILYGMLLLVEVNVIRVRRYIFFKTPREVKPPEDLQDLGVRFLQPFVNLLSKGTYWWMNAFIKTAHKKPIDLRAIGKLPIAMRALTNYQRLCEAFDAQVRKDIQGTQGARAIWQALSHAFGRRLVLSSTFRILADLLGFAGPLCIFGIVDHLGKENDVFQPKTQFLGVYFVSSQEFLANAYVLAVLLFLALLLQRTFLQASYYVAIETGINLRGAIQTKIYNKIMHLSTSNLSMGEMTAGQICNLVAIDTNQLMWFFFLCPNLWAMPVQIIVGVILLYYILGVSALIGAAVIILLAPVQYFVATKLSQAQRSTLEYSNERLKQTNEMLRGIKLLKLYAWENIFRTRVETTRRKEMTSLRAFAIYTSISSWPHWTALPPSHPGHLHV

SEQ ID NO: 24876 - protein, 132 aa, Homo sapiens
MAAALFVLLGFALLGTHGASGAAGTVFTTVEDLGSKILLTCSLNDSATEVTGHRWLKGGVVLKEDALPGQKTEFKAPTRPSSRSACAATWPPSGPSWASWLRCWCWSPSSSSTRSAGSPRTSWMMTTPALHP

SEQ ID NO: 24877 - protein, 641 aa, Homo sapiens
IEKLLHHTERLYQNAESNNQELRTQVEELSKILQRGRNEDNKKSDVEVQTENHAPWSISDYFYQTYYNDVSLPNKVTELSDQQDQAIETSILNSKDHLQVENDAYPGTDRTENVKYRQVDHFASNSQEPASALATEDTSLEGSSLAESLRAAAEAAVSQTGFSYDENTGLYFDHSTGFYYDSENQLYYDPSTGIYYYCDVESGRYQFHSRVDLQPYPTSSTKQSKDKKLKKKRKDPDSSATNEEKDLNSEDQKAFSVEHTSCNEEENFANMKKKAKIGIHHKNSPPKVTVPTSGNTIESPLHENISNSTSFKDEKIMETDSEPEEGEITDSQTEDSYDEAITSEGNVTAEDSEDEDEDKIWPPCIRVIVIRSPVLQIGSLFIITAVNPATIGREKDMEHTLRIPEVGVSKFHAEIYFDHDLQSYVLVDQGSQNGTIVNGKQILQPKTKCDPYVLEHGDEVKIGETVLSFHIHPGSDTCDGCEPGQVRAHLRLDKKDESFVGPTLSKEEKELERRKELKKIRVKYGLQNTEYEDEKTLKNPKYKDRAGKRREQVGSEGTFQRDDAPASVHSEITDSNKGRKMLEKMGWKKGEGLGKDGGGMKTPENTDPGAEHEDRAGRRRKWKEGSFSLSLILLGLDAGES

SEQ ID NO: 24878 - protein, 903 aa, Homo sapiens
MASVWQRLGFYASLLKRQLNGGPDVIKWERRVIPGCTRSIYSATGKWTKEYTLQTRKDVEKWWHQRIKEQASKISEADKSKPKFYVLSMFPYPSGKLHMGHVRVYTISDTIARFQKMRGMQVINPMGWDAFGLPAENAAVERNLHPQSWTQSNIKHMRKQLDRLGLCFSWDREITTCLPDYYKWTQYLFIKLYEAGLAYQKEALVNWDPVDQTVLANEQVDEHGCSWRSGAKVEQKYLRQWFIKTTAYAKAMQDALADLPEWYGIKGMQAHWIGDCVGCHLDFTLKVHGQATGEKLTAYTATPEAIYGTSHVAISPSHRLLHGHSSLKEALRMALVPGKDCLTPVMAVNMLTQQEVPVVILAKADLEGSLDSKIGIPSTSSEDTILAQTLGLAYSEVIETLPDGTERLSSSAEFTGMTRQDAFLALTQKARGKRVGGDVTSDKLKDWLISRQRYWGTPIPIVHCPVCGPTPVPLEDLPVTLPNIASFTGKGGPPLAMASEWVNCSCPRCKGAAKRETDTMDTFVDSAWYYFRYTDPHNPHSPFNTAVADYWMPVDLYIGGKEHAVMHLFYARFFSHFCHDQKMVKHREPFHKLLAQGLIKGQTFRLPSGQYLQREEVDLTGSVPVHAKTKEKLEVTWEKMSKSKHNGVDPEEVVEQYGIDTIRLYILFAAPPEKDILWDVKTDALPGVLRWQQRLWTLTTRFIEARASGKSPQPQLLSNKEKAEARKLWEYKNSVISQVTTHFTEDFSLNSAISQLMGLSNALSQASQSVILHSPEFEDALCALMVMAAPLAPHVTSEIWAGLALVPRKLCAHYTWDASVLLQAWPAVDPEFLQQPEVVQMAVLINNKACGKIPVPQQVARDQDKVHEFVLQSELGVRLLQGRSIKKSFLSPRTALINFLVQD

SEQ ID NO: 24879 - protein, 396 aa, Homo sapiens
VITRKVNIQVGDVNDNAPTFHNQPYSVRIPENTPVGTPIFIVNATDPDLGAGGSVLYSFQPPSQFFAIDSARGIVTVIRELDYETTQAYQLTVNATDQDKTRPLSTLANLAIIITDVQDMDPIFINLPYSTNIYEHSPPGTTVRIITAIDQDKGRPRGIGYTIVSGNTNSIFALDYISGVLTLNGLLDRENPLYSHGFILTVKGTELNDDRTPSDATVTTTFNILVIDINDNAPEFNSSEYSVAITELAQVGFALPLFIQVVDKDENLGLNSMFEVYLVGNNSHHFIISPTSVQGKADIRIRVAIPLDYETVDRYDFDLFANESVPDHVGYAKVKITLINENDNRPIFSQPLYNISLYENVTVGTSVLTVLWEKFFCSNSSRFSSAQLVVSSWNQL

SEQ ID NO: 24880 - protein, 1760 aa, Homo sapiens
MAKPTSKDSGLKEKFKILLGLGTPRPNPRSAEGKQTEFIITAEILRELSMECGLNNRIRMIGQICEVAKTKKFEEHAVEALWKAVADLLQPERPLEARHAVLALLKAIVQGQGERLGVLRALFFKVIKDYPSNEDLHERLEVFKALTDNGRHITYLEEELADFVLQWMDVGLSSEFLLVLVNLVKFNSCYLDEYIARMVQMICLLCVRTASSVDIEVSLQVLDAVVCYNCLPAESLPLFIVTLCRTINVKELCEPCWKLMRNLLGTHLGHSAIYNMCHLMEDRAYMEDAPLLRGAVFFVGMALWGAHRLYSLRNSPTSVLPSFYQAMACPNEVVSYEIVLSITRLIKKYRKELQVVAWDILLNIIERLLQQLQTLDSPELRTIVHDLLTTVEELCDQNEFHGSQERYFELVERCADQRPESSLLNLISYRAQSIHPAKDGWIQNLQALMERFFRSESRGAVRIKVLDVLSFVLLINRQFYEEELINSVVISQLSHIPEDKDHQVRKLATQLLVDLAEGCHTHHFNSLLDIIEKVMARSLSPPPELEERDVAAYSASLEDVKTAVLGLLVILQTKLYTLPASHATRVYEMLVSHIQLHYKHSYTLPIASSIRLQAFDFLLLLRADSLHRLGLPNKDGVVRFSPYCVCDYMEPERGSEKKTSGPLSPPTGPPGPAPAGPAVRLGSVPYSLLFRVLLQCLKQESDWKVLKLVLGRLPESLRYKVLIFTSPCSVDQLCSALCSMLSGPKTLERLRGAPEGFSRTDLHLAVVPVLTALISYHNYLDKTKQREMVYCLEQGLIHRCASQCVVALSICSVEMPDIIIKALPVLVVKLTHISATASMAVPLLEFLSTLARLPHLYRNFAAEQYASVFAISLPYTNPSKFNQYIVCLAHHVIAMWFIRCRLPFRKDFVPFITKGLRSNVLLSFDDTPEKDSFRARSTSLNERPKSRIQTSLTSASLGSADENSVAQADDSLKNLHLELTETCLDMMARYVFSNFTAVPKRSPVGEFLLAGGRTKTWLVGNKLVTVTTSVGTGTRSLLGLDSGELQSGPESSSSPGVHVRQTKEAPAKLESQAGQQVSRGARDRVRSMSGGHGLRVGALDVPASQFLGSATSPGPRTAPAAKPEKASAGTRVPVQEKTNLAAYVPLLTQGWAEILVRRPTGNTSWLMSLENPLSPFSSDINNMPLQELSNALMAAERFKEHRDTALYKSLSVPAASTAKPPPLPRSNTVASFSSLYQSSCQGQLHRSVSWADSAVVMEEGSPGEVPVLVEPPGLEDVEAALGMDRRTDAYSRSSSVSSQEEKSLHAEELVGRGIPIERVVSSEGGRPSVDLSFQPSQPLSKSSSSPELQTLQDILGDPGDKADVGRLSPEVKARSQSGTLDGESAAWSASGEDSRGQPEGPLPSSSPRSPSGLRPRGYTISDSAPSRRGKRVERDALKSRATASNAEKVPGINPSFVFLQLYHSPFFGDESNKPILLPNESQSFERSVQLLDQIPSYDTHKIAVLYVGEGQSNSELAILSNEHGSYRYTEFLTGLGRLIELKDCQPDKVYLGGLDVCGEDGQFTYCWHDDIMQAVFHIATLMPTKDVDKHRCDKKRHLGNDFVSIVYNDSGEDFKLGTIKGQFNFVHVIVTPLDYECNLVSLQCRKDMEGLVDTSVAKIVSDRNLPFVARQMALHANVHHSRSNPTDIYPSKWIARLRHIKRLRQRICEEAAYSNPSLPLVHPPSHSKAPAQTPAEPTPGYEVGQRKRLISSVEDFTEFV

SEQ ID NO: 24881 - protein, 448 aa, Homo sapiens
MNPIVYWEYQIMPQVPVFTVEVKNYGVKNSEWIDACINISHHYCNISDHVGDPSNSLWVRVKARVGQKESAYAKSEEFAVCRDGKIGPPKLDIRKEEKQIMIDIFHPSVFVNGDEQEVDYDPETTCYIRVYNVYVRMNGSEIQYKILTQKEDDCDEIQCQLAIPVSSLNSQYCVSAEGVLHVWGVTTEKSKEVCITIFNSSIKGSLWIPVVAALLLFLVLSLVFICFYIKKINPLKEKSIILPKSLISVVRSATLETKPESKYVSLITSYQPFSLEKEVVCEEPLSPATVPGMHTEDNPGKVEHTEELSSITEVVTTEENIPDVVPGSHLTPIERESSSPLSSNQSEPGSIALNSYHSRNCSESDHSRNGFDTDSSCLESHSSLSDSEFPPNNKGEIKTEGQELITVIKAPTSFGYDKPHVLVDLLVDDSGKESLIGYRPTEDSKEFS

SEQ ID NO: 24882 - protein, 125 aa, Homo sapiens
AWMGTHPKYLEMMELDIGDATQVYVAFLVYLDLMESKSWHEVNCVGLPELQLICLVGTEIEGEGLQTVVPTPITASLSHNRRNNPYIFIKDINKKQLSPSCESDPNPLTSSLIQVRGFHYCRSAL

SEQ ID NO: 24883 - protein, 481 aa, Homo sapiens
QLPRWWELGDPCAWTGQGRGTRRMSPATTGTFLLTAFLLSCADGINGTVNWKTRQANNFIISRKMAAGMKDVYSIFSKVHSDRNVYPSAGVLFVHVLEREYFKGEFPPYPKPGEISNDPITFNTNLMGYPDRPGWLRYIQRTPYSDGVLYGSPTAENVGKPTIIEITAYNRRTFETARHNLIINIMSAEDFPLPYQAEFFIKNMNVEEMLASEVLGDFLGAVKNVWQPERLNAINITSALDRGGRVPLPINDLKEGVYVMVGADVPFSSCLREVENPQNQLRCSQEMEPVITCDKKFRTQFYIDWCKISLVDKTKQVSTYQEVIRGEGILPDGGEYKPPSDSLKSRDYYTDFLITLAVPSAVALVLFLILAYIMCCRREGVIQLVHHSAIQKSTKELRDMSKNREIAWPLSTLPVFHPVTGEIIPPLHTDNYDSTNMPLMQTQQNLPHQTQIPQQQTTEIIFSITAFVNLRRFSFDNFSKI

SEQ ID NO: 24884 - protein, 671 aa, Homo sapiens
MASGGSGGVSVPALWSEVNRYGQNGDFTRALKTVNKILQINKDDVTALHCKVVCLIQNGSFKEALNVINTHTKVLANNSLSFEKAYCEYRLNRIENALKTIESANQQTDKLKELYGQVLYRLERYDECLAVYRDLVRNSQDDYDEERKTNLSAVVAAQSNWEKVVPENLGLQEGTHELCYNTACALIGQGQLNQAMKILQKAEDLCRRSLSEDTDGTEEDPQAELAIIHGQMAYILQLQGRTEEALQLYNQIIKLKPTDVGLLAVIANNIITINKDQNVFDSKKKVKLTNAEGVEFKLSKKQLQAIEFNKALLAMYTNQAEQCRKISASLQSQSPEHLLPVLIQAAQLCREKQHTKAIELLQEFSDQHPENAAEIKLTMAQLKISQGNISKACLILRSIEELKHKPGMVSALVTMYSHEEDIDSAIEVFTQAIQWYQNHQPKSPAHLSLIREAANFKLKYGRKKEAISDLQQLWKQNPKDIHTLAQLISAYSLVDPEKAKALSKHLPSSDSMSLKVDVEALENSAGATYIRKKGGKVTGDSQPKEQGQGDLKKKKKKKKGKLPKNYDPKVTPDPERWLPMRERSYYRGRKKGKKKDQIGKGTQGATAGASSELDASKTVSSPPTSPRPGSAATVSASTSNIIPPRHQKPAGAPATKKKQQQKKKKGGKGGW

SEQ ID NO: 24885 - protein, 759 aa, Homo sapiens
MGLPALEFSDCCLDSPHFRETLKSHEAELDKTNKFIKELIKDGKSLISALKNLSSAKRKFADSLNEFKFQCIGDAETDDEMCIARSLQEFATVLRNLEDERIRMIENASEVLITPLEKFRKEQIGAAKEAKKKYDKETEKYCGILEKHLNLSSKKKESQLQEADSQVDLVRQHFYEVSLEYVFKVQEVQERKMFEFVEPLLAFLQGLFTFYHHGYELAKDFGDFKTQLTISIQNTRNRFEGTRSEVESLMKKMKENPLEHKTISPYTMEGYLYVQEKRHFGTSWVKHYCTYQRDSKQITMVPFDQKSGGKGGEDESVILKSCTRRKTDSIEKRFCFDVEAVDRPGVITMQALSEEDRRLWMEAMDGREPVYNSNKDSQSEGTAQLDSIGFSIIRKCIHAVETRGINEQGLYRIVGVNSRVQKLLSVLMDPKTASETETDICAEWEIKTITSALKTYLRMLPGPLMMYQFQRSFIKAAKLENQESRVSEIHSLVHRLPEKNRQMLQLLMNHLANVANNHKQNLMTVANLGVVFGPTLLRPQEETVAAIMDIKFQNIVIEILIENHEKIFNTVPDMPLTNAQLHLSRKKSSDSKPPSCSERPLTLFHTVQSTEKQEQRNSIINSSLESVSSNPNSILNSSSSLQPNMNSSDPDLAVVKPTRPNSLPPNPSPTSPLSPSWPMFSAPSSPMPTSSTSSDSSPVSTPFRKAKALYACKAEHDSELSFTAGTVFDNVHPSQEPGWLEGTLNGKTGLIPENYVEFL

SEQ ID NO: 24886 - protein, 274 aa, Homo sapiens
APASDSIGPQILTSPSPSKSIPIPQPFRPADEDHRNQFGQRDRSSSAPNVHINTIEPVNIDDLIRDQGFRGDGGSTTGLSATPPASLPGSLTNVKALQKSPGPQRERKSSSSSEDRNRMKTLGRRDSSDDWEIPDGQITVGQRIGSGSFGTVYKGKWHGDVAVKMLNVTAPTPQQLQAFKNEVGVLRKTRHVNILLFMGYSTKPQLAIVTQWCEGSSLYHHLHIIETKFEMIKLIDIARQTAQGMEHQKSSECKIKIHTAFSQMYMHLELFCMN

SEQ ID NO: 24887 - protein, 347 aa, Homo sapiens
MNTLMDVLRHRPGWVEVKDEGEWDFYWCDVSWLRENFDHTYMDEHVRISHFRNHYELTRKNYMVKNLKRFRKQLEREAGKLEAAKCDFFPKTFEMPCEYHLFVEEFRKNPGITWIMKPVARSQGKGIFLFRRLKDIVDWRKDTRSSDDQKDDIPVENYVAQRYIENPYLIGGRKFDLRVYVLVMSYIPLRAWLYRDGFARFSNTRFTLNSIDDQYVHLTNVAVQKTSPDYHPKKGCKWTLQRFRQYLASKHGPEAVETLFRDIDNIFVKSLQSVQKVIISDKHCFELYGYDILIDQDLKPWLLEVNASPSLTASSQEDYELKTCLLEDTLHVVDMEARSLRADSPCW

SEQ ID NO: 24888 - protein, 1425 aa, Homo sapiens
MASGLGSPSPCSAGSEEEDMDALLNNSLPPPHPENEEDPEEDLSETETPKLKKKKKPKKPRDPKIPKSKRQKKELGDSSGEGPEFVEEEEEVALRSDSEGSDYTPGKKKKKKLGPKKEKKSKSKRKEEEEEEDDDDDSKEPKSSAQLLEDWGMEDIDHVFSEEDYRTLTNYKAFSQFVRPLIAAKNPKIAVSKMMMVLGAKWREFSTNNPFKGSSGASVAAAAAAAVAVVESMVTATEVAPPPPPVEVPIRKAKTKEGKGPNARRKPKGSPRVPDAKKPKPKKVAPLKIKLGGFGSKRKRSSSEDDDLDVESDFDDASINSYSVSDGSTSRSSRSRKKLRTTKKKKKDHQDYCEVCQQGGEIILCDTCPRAYHMVCLDPDMEKAPEGKWSCPHCEKEGIQWEAKEDNSEGEEILEEVGGDLEEEDDHHMEFCRVCKDGGELLCCDTCPSSYHIHCLNPPLPEIPNGEWLCPRCTCPALKGKVQKILIWKWGQPPSPTPVPRPPDADPNTPSPKPLEGRPERQFFVKWQGMSYWHCSWVSELQLELHCQVMFRNYQRKNDMDEPPSGDFGGDEEKSRKRKNKDPKFAEMEERFYRYGIKPEWMMIHRILNHSVDKKGHVHYLIKWRDLPYDQASWESEDVEIQDYDLFKQSYWNHRELMRGEEGRPGKKLKKVKLRKLERPPETPTVDPTVKYERQPEYLDATGGTLHPYQMEGLNWLRFSWAQGTDTILADEMGLGKTVQTAVFLYSLYKEGHSKGPFLVSAPLSTIINWEREFEMWAPDMYVVTYVGDKDSRAIIRENEFSFEDNAIRGGKKASRMKKEASVKFHVLLTSYELITIDMAILGSIDWACLIVDEAHRLKNNQSKFFRVLNGYSLQHKLLLTGTPLQNNLEELFHLLNFLTPERFHNLEGFLEEFADIAKEDQIKKLHDMLGPHMLRRLKADVFKNMPSKTELIVRVELSPMQKKYYKYILTRNFEALNARGGGNQVSLLNVVMDLKKCCNHPYLFPVAAMEAPKMPNGMYDGSALIRASGKLLLLQKMLKNLKEGGHRVLIFSQMTKMLDLLEDFLEHEGYKYERIDGGITGNMRQEAIDRFNAPGAQQFCFLLSTRAGGLGINLATADTVIIYDSDWNPHNDIQAFSRAHRIGQNKKVMIYRFVTRASVEERITQVAKKKMMLTHLVVRPGLGSKTGSMSKQELDDILKFGTEELFKDEATDGGGDNKEGEDSSVIHYDDKAIERLLDRNQDETEDTELQGMNEYLSSFKVAQYVVREEEMGEEEEVEREIIKQEESVDPDYWEKLLRHHYEQQQEDLARNLGKGKRIRKQVNYNDGSQEDRGIGRTTSPTTSPITQWLQRKVMKTLMNVQKLPVGPVVRACGMIKISHCLLCWPVLVGILKYLVLMLVSEKPFLMQLCDMVCHLRMLLLPSGL

SEQ ID NO: 24889 - protein, 409 aa, Homo sapiens
MQLPRWWELGDPCAWTGQGRGTRRMSPATTGTFLLTVYSIFSKVHSDRNVYPSAGVLFVHVLEREYFKGEFPPYPKPGEISNDPITFNTNLMGYPDRPGWLRYIQRTPYSDGVLYGSPTAENVGKPTIIEITAYNRRTFETARHNLIINIMSAEDFPLPYQAEFFIKNMNVEEMLASEVLGDFLGAVKNVWQPERLNAINITSALDRGGRVPLPINDLKEGVYVMVGADVPFSSCLREVENPQNQLRCSQEMEPVITCDKKFRTQFYIDWCKISLVDKTKQVSTYQEVIRGEGILPDGGEYKPPSDSLKSRDYYTDFLITLAVPSAVALVLFLILAYIMCCRREGVIQLVHHSAIQKSTKELRDMSKNREIAWPLSTLPVFHPVTGEIIPPLHTDNYDSTNMPLMQTQQ

SEQ ID NO: 24890 - protein, 382 aa, Homo sapiens
MVAAINRNNSVVQVLLAAGADPNLGDDFSSVYKTAKEQGIHSLEVLITREDDFNNRLNNRASFKGCTALHYAVLADDYRTVKELLDGGANPLQRNEMGHTPLDYAREGEVMKLLRTSEAKYQEKQRKREAEERRRFPLEQRLKEHIIGQESAIATVGAAIRRKENGWYDEEHPLVFLFLGSSGIGKTELAKQTAKYMHKDAKKGFIRLDMSEFQERHEVAKFIGSPPGYVGHEEGGQLTKKLKQCPNAVVLFDEVDKAHPDVLTIMLQLFDEGRLTDGKGKTIDCKDAIFIMTSNVASDEIAQHALQLRQEALEMSRNRIAENLGDVQISDKITISKNFKENVIRPILKAHFRRDEFLGRINEIVYFLPFCHSELIQLVNKE

SEQ ID NO: 24891 - protein, 310 aa, Homo sapiens
HLKHLAIAQELNDRIGEGRACWSLGNAYTALGNHDQAMHFAEKHLEISREVGDKSGELTARLNLSDLQMVLGLSYSTNNSIMSENTEIDSSLNGVRPKLGRRHSMENMELMKLTPEKVQNWNSEILAKQKPLIAKPSAKLLFVNRLKGKKYKTNSSTKVLQDASNSIDHRIPNSQRKISADTIGDEGFFDLLSRFQSNRMDDQRCCLQEKNCHTASTTTSSTPPKMMLKTSSVPVVSPNTDEFLDLLASSQSRRLDDQRASFSNLPGLRLTQNSQSVLSHLMTNDNKEADEDFFDILVKCQENGIQGREW

SEQ ID NO: 24892 - protein, 183 aa, Homo sapiens
MEERGDSEPTPGCSGLGPGGVRGFGDGGGAPSWAPEDAWMGTHPKYLEMMELDIGDATQVYVAFLVYLDLMESKSWHEVNCVGLPELQLICLVGTEIEGEGLQTVVPTPITASLSHNRIREILKASRKLQGDPDLPMSFTLAIVESDSTIVYYKLTDGFMLPDPQVSFEVTDSKKYKKRKIMT

SEQ ID NO: 24893 - protein, 526 aa, Homo sapiens
MENEIFTPLLEQFMTSPLVTWVKTFGPLAAGNGTNLDEYVALVDGVFLNQVMLQINPKLESQRVNKKVNNDASLRMHNLSILVRQIKFYYQETLQQLIMMSLPNVLIIGKNPFSEQGTEEVKKLLLLLLGCAVQTIIELSEERDGLHFLPHASSSAQSPCGSPGMKRTESRQHLSVELADAKAKIRRLRQELEEKTEQLLDCKQELEQMEIELKRLQQENMNLLSDARSARMYRDELDALREKAVRVDKLESEVSRYKERLHDIEFYKARVEELKEDNQVLLETKTMLEDQLEGTRARSDKLHELEKENLQLKAKLHDMEMERDMDRKKIEELMEENMTLEMAQKQSMDESLHLGWELEQISRTSELSEAPQKSLGHEVNELTSSRLLKLEMENQSLTKTVEELRTTVDSVEGNASKILKMEKENQRLSKKVEILENEIVQEKQSLQNCQNLSKDLMKEKAQLEKTIETLRENSERQIKILEQENEHLNQTVSSLRQRSQISAEARVKDIEKENKILHESIKETSS

SEQ ID NO: 24894 - protein, 591 aa, Homo sapiens
MYIKSTYDGLHVITGTTENSPADRCKKIHAGDEVIQVNHQTVPLIPRSPTSSVATPSSTISTPTKRDSSALQDLYIPPPPAEPYIPRDEKGNLPCEDLRGHMVGKPVHKGSESPNSFLDQEYRKRFNIVEEDTVLYCYEYEKGRSSSQGRRESTPTYENSLLRYMSNEKIAQEEYMFQRNSKKDTGKKSKKKGDKSNSPTHYSLLPSLQMDALRQDIMGTPVPETTLYHTFQQSSLQHKSKKKNKGPIAGKSKRRISCKDLGRGDCEGWLWKKKDAKSYFSQKWKKYWFVLKDASLYWYINEEDEKAEGFISLPEFKIDRASECRKKYAFKACHPKIKSFYFAAEHLDDMNRWLNRINMLTAGYAERERIKQEQDYWSESDKEEADTPSTPKQDSPPPPYDTYPRPPSMSCASPYVEAKHSRLSSTETSQSQSSHEEFRQEVTGSSAVSPIRKTASQRRSWQDLIETPLTSSGLHYLQTLPLEDSVFSDSAAISPEHRRQSTLPTQKCHLQDHYGPYPLAESERMQVLNGNGGKPRSFTLPRDSGFNHCCLNAPVSACDPQDDVQPPEVEEEEEEEEEEGEAAGENIGEKS

SEQ ID NO: 24895 - protein, 1740 aa, Homo sapiens
MFRQFYLWTCLASGIILGSLFEICLGQYDDDCKLARGGPPATIVAIDEESRNGTILVDNMLIKGTAGGPDPTIELSLKDNVDYWVLMDPVKQMLFLNSTGRVLDRDPPMNIHSIVVQVQCINKKVGTIIYHEVRIVVRDRNDNSPTFKHESYYATVNELTPVGTTIFTGFSGDNGATDIDDGPNGQIEYVIQYNPDDPTSNDTFEIPLMLTGNIVLRKRLNYEDKTRYFVIIQANDRAQNLNERRTTTTTLTVDVLDGDDLGPMFLPCVLVPNTRDCRPLTYQAAIPELRTPEELNPIIVTPPIQAIDQDRNIQPPSDRPGILYSILVGTPEDYPRFFHMHPRTAELSLLEPVNRDFHQKFDLVIKAEQDNGHPLPAFAGLHIEILDENNQSPYFTMPSYQGYILESAPVGATISDSLNLTSPLRIVALDKDIEDTKDPELHLFLNDYTSVFTVTQTGITRYLTLLQPVDREEQQTYTFSITAFDGVQESEPVIVNIQVMDANDNTPTFPEISYDVYVYTDMRPGDSVIQLTAVDADEGSNGEITYEILVGAQGDFIINKTTGLITIAPGVEMIVGRTYALTVQAADNAPPAERRNSICTVYIEVLPPNNQSPPRFPQLMYSLEISEAMRVGAVLLNLQATDREGDSITYAIENGDPQRVFNLSETTGILTLGKALDRESTDRYILIITASDGRPDGTSTATVNIVVTDVNDNAPVFDPYLPRNLSVVEEEANAFVGQVKATDPDAGINGQVHYSLGNFNNLFRITSNGSIYTAVKLNREVRDYYELVVVATDGAVHPRHSTLTLAIKVLDIDDNSPVFTNSTYTVLVEENLPAGTTILQIEAKDVDLGANVSYRIRSPEVKHFFALHPFTGELSLLRSLDYEAFPDQEASITFLVEAFDIYGTMPPGIATVTVIVKDMNDYPPVFSKRIYKGMVAPDAVKGTPITTVYAEDADPPGLPASRVRYRVDDVQFPYPASIFEVEEDSGRVITRVNLNEEPTTIFKLVVVAFDDGEPVMSSSATVKILVLHPGEIPRFTQEEYRPPPVSELATKGTMVGVISAAAINQSIVYSIVSGNEEDTFGINNITGVIYVNGPLDYETRTSYVLRVQADSLEVVLANLRVPSKSNTAKVYIEIQDENNHPPVFQKKFYIGGVSEDARMFTSVLRVKATDKDTGNYSVMAYRLIIPPIKEGKEGFVVETYTGLIKTAMLFHNMRRSYFKFQVIATDDYGKGLSGKADVLVSVVNQLDMQVIVSNVPPTLVEKKIEDLTEILDRYVQEQIPGAKVVVESIGARRHGDAFSLEDYTKCDLTVYAIDPQTNRAIDRNELFKFLDGKLLDINKDFQPYYGEGGRILEIRTPEAVTSIKKRGESLGYTEGALLALAFIIILCCIPAILVVLVSYRQFKVRQAECTKTARIQAALPAAKPAVPAPAPVAAPPPPPPPPPGAHLYEELGDSSIWSFCWQLVICMRTCAIWRTLTRRGYGSEQQQLLRPSLLKPEELSMESGIDPGQEYGQDYYSYEHGYEMPQYGSRRRLLPPAGQEEYGEVVGEAEEEYEEEEWARKRMIKLVVDREYETSSTGEDSAPECQRNRLHHPSIHSNINGNIYIAQNGSVVRTRRACLTDNLKVASPVRLGGPFKKLDKLAVTHEENVPLNTLSKGPFSTEKMNARPTLVTFAPCPVGTDNTAVKPLRNRLKSTVEQESMIDSKNIKEALEFHSDHTQSDDEELWMGPWNNLHIPMTKL

SEQ ID NO: 24896 - protein, 335 aa, Homo sapiens
AILEHEEQDEEEDEVPDDETVNQMIARHEEEFDLFMRMDLDRRREEARNPKRKPRLMEEDELPSWIIKDDAEVERLTCEEEEEKMFGRGSRHRKEVDYSDSLTEKQWLKTLKAIEEGTLEEIEEEVRQKKSSRKRKRDSDAGSSTPTTSTRSRDKDDESKKQKKRGRPPAEKLSPNPPNLTKKMKKIVDAVIKYKDSSSGRQLSEVFIQLPSRKELPEYYELIRKPVDFKKIKIYEDSIVLQSVFTSVRQKIEKEDDSEGEESEEEEEGEEEGSESESRSVKVKIKLGRKEKAQDRLKGGRRRPSRGSRAKPVVSDDDSEEEQEEDRSGSGSEED

SEQ ID NO: 24897 - protein, 446 aa, Homo sapiens
MQLPRWWELGDPCAWTGQGRGTRRMSPATTGTFLLTVYSIFSKVHSDRNVYPSAGVLFVHVLEREYFKGEFPPYPKPGEISNDPITFNTNLMGYPDRPGWLRYIQRTPYSDGVLYGSPTAENVGKPTIIEITAYNRRTFETARHNLIINIMSAEDFPLPYQAEFFIKNMNVEEMLASEVLGDFLGAVKNVWQPERLNAINITSALDRGGRVPLPINDLKEGVYVMVGADVPFSSCLREVENPQNQLRCSQEMEPVITCDKKFRTQFYIDWCKISLVDKTKQVSTYQEVIRGEGILPDGGEYKPPSDSLKSRDYYTDFLITLAVPSAVALVLFLILAYIMCCRREGVIQLVHHSAIQKSTKELRDMSKNREIAWPLSTLPVFHPVTGEIIPPLHTDNYDSTNMPLMQTQQNLPHQTQIPQQQTTEIIFSITAFVNLRRFSFDNFSKI

SEQ ID NO: 24898 - protein, 954 aa, Homo sapiens
MPWVEPKPRPGPEQKPKLTKPDSATGPQWYQESQESESEGKQPPPGPLAPPKSPEPSGPLASEQDAPLPEGDDAPPRPSMLDDAPRLPLELDDAPLPEEETPEPTAICRHRHRCHTDCLEGLLSRTFQWLGWQVGAHPWIFLLAPLMLTAALGTGFLYLPKDEEEDLEEHYTPVGSPAKAERRFVQGHFTTNDSYRFSASRRSTEANFVSLLVVSYSDSLLDPATFAEVSKLDGAVQDLRVAREKGSQIQYQQVCARYRALCVPPNPILYAWQVNKTLNLSSISFPAYNHGRHPLYLTGFFGGYILGGSLGMGQLLLRAKAMRLLYYLKTEDPEYDVQSKQWLTHLLDQFTNIKNILALKKIEVVHFTSLSRQLEFEATSVTVIPVFHLAYILIILFAVTSCFRFDCIRNKMCVAAFGVISAFLAVVSGFGLLLHIGVPFVIIVANSPFLILGVGVDDMFIMISAWHKTNLADDIRERMSNVYSKAAVSITITTITNILALYTGIMSSFRSVQCFCIYTGMTLLFCYFYNITCFGAFMALDGKREVVCLCWLKKADPKWPSFKKFCCFPFGSVPDEHGTDIHPISLFFRDYFGPFLTRSESKYFVVFIYVLYIISSIYGCFHVQEGLDLRNLASDDSYITPYFNVEENYFSDYGPRVMVIVTKKVDYWDKDVRQKLENCTKIFEKNVYVDKNLTEFWLDAYVQYLKGNSQDPNEKNTFMNNIPDFLSNFPNFQHDINISSSNEIISSRGFIQTTDVSSSAKKKILLFULRRIAEDCQIPLMVYNQAFIYFDQYAAILEDTVRNVLVASAAMFIVSLLLIPYPLCSLWVTFAIGSVIVGVTGFMAFWKVNLDSISMINLVICIGFSFDFSVHISYAFVSSSQPSVNQKSVEALYLLGYPVLQSAISTIIGVCVLAAAKAYIFRTFFKIMFLVMIFGAAHGLIFIPVFLTFFGRFI

SEQ ID NO: 24899 - protein, 426 aa, Homo sapiens
MQLPRWWELGDPCAWTGQGRGTRRMSPATTGTFLLTVYSIFSKVHSDRNVYPSAGVLFVHVLEREYFKGEFPPYPKPGEISNDPITFNTNLMGYPDRPGWLRYIQRTPYSDGVLYGSPTAENVGKPTIIEITAYNRRTFETARHNLIINIMSAEDFPLPYQAEFFIKNMNVEEMLASEVLGDFLGAVKNVWQPERLNAINITSALDRGGRVPLPINDLKEGVYVMVGADVPFSSCLREVENPQNQLRCSQEMEPVITCDKKFRTQFYIDWCKISLVDKTKQVSTYQEVIRGEGILPDGGEYKPPSDSLKSRDYYTDFLITLAVPSAVALVLFLILAYIMCCRREGVIQLVHHSAIQKSTKELRDMSKNREIAWPLSTLPVFHPVTGEIIPPLHTDNYDSTNMPLMQTQQNLPHQTQIPQQQTTGEC

SEQ ID NO: 24900 - protein, 2419 aa, Homo sapiens
MEQFPKETVVESSGPKVLETAEEIQERRQEVLTRYQSFKERVAERGQKLEDSYHLQVFKRDADDLGKWIMEKVNILTDKSYEDPTNIQGKYQKHQSLEAEVQTKSRLMSELEKTREERFTMGHSAHEETKAHIEELRHLWDLLLELTLEKGDQLLRALKFQQYVQECADILEWIGDKEAIATSVELGEDWERTEVLHKKFEDFQVELVAKEGRVVEVNQYANECAEENHPDLPLIQSKQNEVNAAWERLRGLALQRQKALSNAANLQRFKRDVTEAIQWIKEKEPVLTSEDYGKDLVASEGLFHSHKGLERNLAVMSDKVKELCAKAEKLTLSHPSDAPQIQEMKEDLVSSWEHIRALATSRYEKLQATYWYHRFSSDFDELSGWMNEKTAAINADELPTDVAGGEVLLDRHQQHKHEIDSYDDRFQSADETGQDLVNANHEASDEVREKMEILDNNWTALLELWDERHRQYEQCLDFHLFYRDSEQVDSWMSRQEAFLENEDLGNSLGSAEALLQKHEDFEEAFTAQEEKIITVDKTATKLIGDDHYDSENIKAIRDGLLARRDALREKAATRRRLLKESLLLQKLYEDSDDLKNWINKKKKLADDEDYKDIQNLKSRVQKQQVFEKELAVNKTQLENIQKTGQEMIEGGHYASDNVTTRLSEVASLWEELLEATKQKGTQLHEANQQLQFENNAEDLQRWLEDVEWQVTSEDYGKGLAEVQNRLRKHGLLESAVAARQDQVDILTDLAAYFEEIGHPDSKDIRARQESLVCRFEALKEPLATRKKKLLDLLHLQLICRDTEDEEAWIQETEPSATSTYLGKDLIASKKLLNRHRVILENIASHEPRIQEITERGNKMVEEGHFAAEDVASRVKSLNQNMESLRARAARRQNDLEANVQFQQYLADLHEAETWIREKEPIVDNTNYGADEEAAGALLKKHEAFLLDLNSFGDSMKALRNQANACQQQQAAPVEGVAGEQRVMALYDFQARSPREVTMKKGDVLTLLSSINKDWWKVEAADHQGIVPAVYVRRLAHDEFPMLPQRRREEPGNITQRQEQIENQYRSLLDRAEERRRRLLQRYNEFLLAYEAGDMLEWIQEKKAENTGVELDDVWELQKKFDEFQKDLNTNEPRLRDINKVADDLLFEGLLTPEGAQIRQELNSRWGSLQRLADEQRQLLGSAHAVEVFHREADDTKEQIEKKCQALSAADPGSDLFSVQALQRRHEGFERDLVPLGDKVTILGETAERLSESHPDATEDLQRQKMELNEAWEDLQGRTKDRKESLNEAQKFYLFLSKARDLQNWISSIGGMVSSQELAEDLTGIEILLERHQEHRADMEAEAPTFQALEDFSAELIDSGHHASPEIEKKLQAVKLERDDLEKAWEKRKKILDQCLELQMFQGNCDQVESWMVARENSLRSDDKSSLDSLEALMKKRDDLDKAITAQEGKITDLEHFAESLIADEHYAKEEIATRLQRVLDRWKALKAQLIDERTKLGDYANLKQFYRDLEELEEWISEMLPTACDESYKDATNIQRKYLKHQTFAHEVDGRSEQVHGVINLGNSLIECSACDGNEEAMKEQLEQLKEHWDHLLERTNDKGKKLNEASRQQRFNTSIRDFEFWLSEAETLLAMKDQARDLASAGNLLKKHQLLEREMLAREDALKDLNTLAEDLLSSGTFNVDQIVKKKDNVNKRFLNVQELAAAHHEKLKEAYALFQFFQDLDDEESWIEEKLIRVSSQDYGRDLQGVQNLLKKHKRLEGELVAHEPAIQNVLDMAEKLKDKAAVGQEEIQLRLAQFVEHWEKLKELAKARGLKLEESLEYLQFMQNAEEEEAWINEKNALAVRGDCGDTLAATQSLLMKHEALENDFAVHETRVQNVCAQGEDILNKVLQEESQNKEISSKIEALNEKTPSLAKAIAAWKLQLEDDYAFQEFNWKADVVEAWIADKETSLKTNGNGADLGDFLTLLAKQDTLDASLQSFQQERLPEITDLKDKLISAQHNQSKAIEERYAALLKRWEQLLEASAVHRQKLLEKQLPLQKAEDLFVEFAHKASALNNWCEKMEENLSEPVHCVSLNEIRQLQKDHEDFLASLARAQADFKCLLELDQQIKALGVPSSPYTWLTVEVLERTWKHLSDIIEEREQELQKEEARQVKNFEMCQEFEQNASTFLQWILETRAYFLDGSLLKETGTLESQLEANKRKQKEIQAMKRQLTKIVDLGDNLEDALILDIKYSTIGLAQQWDQLYQLGLRMQHNLEQQIQAKDIKGVSEETLKEFSTIYKHFDENLTGRLTHKEFRSCLRGLNYYLPMVEEDEHEPKFEKFLDAVDPGRKGYVSLEDYTAFLIDKESENIKSSDEIENAFQALAEGKSYITKEDMKQALTPEQVSFCATHMQQYMDPRGRSHLSGYDYVGFTNSYFGN

SEQ ID NO: 24901 - protein, 1400 aa, Homo sapiens
DVVVPTLDTVRHEALLYTWLAEHKPLVLCGPPGSGKTMTLFSALRALPDMEVVGLNFSSATTPELLLKTFDHYCEYRRTPNGVVLAPVQLGKWLVLFCDEINLPDMDKYGTQRVISFIRQMVEHGGFYRTSDQTWVKLERIQFVGACNPPTDPGRKPLSHRFLRHVPVVYVDYPGPASLTQIYGTFNRAMLRLIPSLRTYAEPLTAAMVEFYTMSQERFTQDTQPHYIYSPREMTRWVRGIFEALRPLETLPVEGLIRIWAHEALRLFQDRLVEDEERRWTDENIDTVALKHFPNIDREKAMSRPILYSNWLSKDYIPVDQEELRDYVKARLKVFYEEELDVPLVLFNEVLDHVLRIDRIFRQPQGHLLLIGVSGAGKTTLSRFVAWMNGLSVYQIKVHRKYTGEDFDEDLRTVLRRSGCKNEKIAFIMDESNVLDSGFLERMNTLLANGEVPGLFEGDEYATLMTQCKEGAQKEGLMLDSHEELYKWFTSQVIRNLHVVFTMNPSSEGLKDRAATSPALFNRCVLNWFGDWSTEALYQVGKEFTSKMDLEKPNYIVPDYMPVVYDKLPQPPSHREAIVNSCVFVHQTLHQANARLAKRGGRTMAITPRHYLDFINHYANLFHEKRSELEEQQMHLNVGLRKIKETVDQVEELRRDLRIKSQELEVKNAAANDKLKKMVKDQQEAEKKKVMSQEIQEQLHKQQEVIADKQMSVKEDLDKVEPAVIEAQNAVKSIKKQHLVEVRSMANPPAAVKLALESICLLLGESTTDWKQIRSIIMRENFIPTIVNFSAEEISDAIREKMKKNYMSNPSYNYEIVNRASLACGPMVKWAIAQLNYADMLKRVEPLRNELQKLEDDAKDNQQKANEVEQMIRDLEASIARYKEEYAVLISEAQAIKADLAAVEAKVNRSTALLKSLSAERERWEKTSETFKNQMSTIAGDCLLSAAFIAYAGYFDQQMRQNLFTTWSHHLQQANIQFRTDIARTEYLSNADERLRWQASSLPADDLCTENAIMLKRFNRYPLIIDPSGQATEFIMNEYKDRKITRTSFLDDAFRKNLESALRFGNPLLVQDVESYDPVLNPVLNREVRRTGGRVLITLGDQDIDLSPSFVIFLSTRDPTVEFPPDLCSRVTFVNFTVTRSSLQSQCLNEVLKAERPDVDEKRSDLLKLQGEFQLRLRQLEKSLLQALNEVKGRILDDDTIITTLENLKREAAEVTRKVEETDIVMQEVETVSQQYLPLSTACSSIYFTMESLKQIHFLYQYSLQFFLDIYHNVLYENPNLKGVTDHTQRLSIITKDLFQVAFNRVARGMLHQDHITFAMLLARIKLKGTVGTHWPGHPPPAPDPGFPARSPVGHGPHVCFNKPWGVFHVHHGAAARPDPHCGHRGEAQHSCLNVLCAWL

SEQ ID NO: 24902 - protein, 457 aa, Homo sapiens
DKAIERLLDRNQDETEDTELQGMNEYLSSFKVAQYVVREEEMGEEEEVEREIIKQEESVDPDYWEKLLRHHYEQQQEDLARNLGKGKRIRKQVNYNDGSQEDRDWQDDQSDNQSDYSVASEEGDEDFDERSEAPRRPSRKGLRNDKDKPLPPLLARVGGNIEVLGFNARQRKAFLNAIMRYGMPPQDAFTTQWLVRDLRGKSEKEFKAYVSLFMRHLCEPGADGAETFADGVPREGLSRQHVLTRIGVMSLIRKKVQEFEHVNGRWSMPELAEVEENKKMSQPGSPSPKTPTPSTPGDTQPNTPAPVPPAEDGIKIEENSLKEEESIEGEKEVKSTAPETAIECTQAPAPASEDEKVVVEPPEGEEKVEKAEVKERTEEPMETEPKGAADVEKVEEKSAIDLTPIVVEDKEEKKEEEEKKEVMLQNGETPKDLNDEKQKKNIKQRFMFNIADGGFTE

SEQ ID NO: 24903 - protein, 482 aa, Homo sapiens
MQLPRWWELGDPCAWTGQGRGTRRMSPATTGTFLLTVYSIFSKVHSDRNVYPSAGVLFVHVLEREYFKGEFPPYPKPGEISNDPITFNTNLMGYPDRPGWLRYIQRTPYSDGVLYGSPTAENVGKPTIIEITAYNRRTFETARHNLIINIMSAEDGVLLSSPRLECNGTISANCNLRLLGSDFPLPYQAEFFIKNMNVEEMLASEVLGDFLGAVKNVWQPERLNAINITSALDRGGRVPLPINDLKEGVYVMVGADVPFSSCLREVENPQNQLRCSQEMEPVITCDKKFRTQFYIDWCKISLVDKTKQVSTYQEVIRGEGILPDGGEYKPPSDSLKSRDYYTDFLITLAVPSAVALVLFLILAYIMCCRREGVEKRNMQTPDIQLVHHSAIQKSTKELRDMSKNREIAWPLSTLPVFHPVTGEIIPPLHTDNYDSTNMPLMQTQQNLPHQTQIPQQQTTEIIFSITAFVNLRRFSFDNFSKI

SEQ ID NO: 24904 - protein, 601 aa, Homo sapiens
MSEETVSESQFSLKTAALRVFDLPLTWYYSLSQIKFSPVAKKLFVVTAVSAISVIFLAHHFKRKRGKKKGKILPWEPEHLILEYTKRAASDKGSSCSSSRQNLTLSLSSTKDKGSQVCNYANGGLFSKYSGSAQSLASVQSVNSCHSCACGNSNSWDKADEDDIKLVNIPVTTPENLYLMGMELFEEALRRWEQALTFRNRQAEDEACGSIKLGAGDAIAEENVDDIISTEFIHKLEALLQRAYRLQEEFEATLGASDPNSLADDIDKDTDITMKGNVEDFGLRDTLSIASTDSFASAAELAEHREVRHTYSLESLCHCPFYEEAMHLVEEGKIYSRVLRTEMLECLGDSDFLAKLHCIRQAFQVILSESANRIFLAESGRKILSALIVKARKNPKKFEDVFDEMIYFLEQTDHWGSTEMELAARGVKNLNFYDVVLDFILMDSFEDLENPPTSIQNVVNNRWLNSSFKETAVASSCWSVLKQKRQQMKQIPDGFFAHFYAICEHISPVLAWGFLGPRNSLYDLCCFFKNQVLLFLKDIFDFEKVRYSSTETLAEDLMQLLIRRTELLMAYLEADALRHTSSCLSSHGHVMSTGLLEAKVQ

SEQ ID NO: 24905 - protein, 3112 aa, Homo sapiens
MGRNQRKAPQRLERPGRPASGEQESGSASADGAPSRERRSDRGQADRAKPAAEPATAGGQGTPGGRRKPTAEGNGGCRRPGAGLSPKAQERQSNAQRQGRGPRGGRGGRLEEGSLSGGEELGGRRRRKRKDKGPSARRGRRTPRSLNGDTSGGDGGSSCPDSETREAQESGSQRGTARELRPTPEPTDMGSEGTKTGPESALEPSSDGLDSDWPHADTRGREGSSGTGPLGASEHSGGDSDSSPLGTGPGRGSRAAMASRTFEDSSRAPRDTGPAKDASDNRAQRGAEPETMQASTARAPRHQVGKAVGQVPAAAGEGEAGAAAGAGPEDPAPLAALLVVRRLLARPPPGAASQAVGPRRAGLKERLLSVARALGLLRWLRRRLRLRRRPPEGEGQGTGPRASEGWGRRKPDEGRGHGRGSKGRGRGKADEGRGHERGDEGRGRGKADEGRGHERGYEGRGCGKADEGRGHERGDEGRDHQRGYEGWGREPGLRHRLALRLAGLAGLGGMPRASPGGRSPQVPTSPVPGDPFDQEDETPDPKFAVVFPRIHRAGRASSSRSSEEASADAPTGEGRGWPRAGVGGHSEGCRTSGEGVSGLRRGSLLAPTAPDGPSLDESGSSSEAELETLNDEPPVRWAQGSGPHEGPRLGAAVLLPRLSLETRLQQEGDPGLRGSLRELWEPEDEDEAVLERDLELSLRPGLEAPPFPGAKGRSLGDGLEDMEDLARLRLVCDSSVLLCLKKRFHLGRIYTFGGPVLLVLNPHRSLPLFSPEVQASYHPRKALSTTPHIFAIVASAYDLAQNTGQDPCILLCGHSGSGKTEAAKKIMQFLSSLEQDQTGNRECQVEDMLPILSSFGHAKTILNANASRFGQVFCLYLQQGVIVGASVSHYLLETSRVVFQAQAERSFHVFYKLLAGLDSIERERLSLQGPETYYYLNQGQACRLQGKEDAQDFEGLLKALQGLGLCPEELNAVWAVLAAILQLGNICFSSSERESQEVAAVSSWAEIHTAARLLRVPPECLEGAVTRRVTETPYGQVSRSLPVESAFDARDALAKALYSRLFHRLLRRTNARLAPPGEGGSIGTVTVVDAYGFEALRVNGLEQLCNNLASERLQLFSSQMLLAQEEEECRRELLSWVPVPQPPRESCLDLLVDQPHSLLSILDAQTWLSQATDHTFLQKSHYHHGDHPSYAKPRLPLPVFTVRHYAGTVTYQVHKFLNRNRDQLDPAVVEMLGQSQLQLVGSLFQEAEPQSRGGRGRPTLASRFQQALEDLIARLGRSHVYFIQCLTPNPGKLPGLFDVGHVTEQLHQAAILEAVGTRSANFPVRVPFEAFLASFQALGSEGQEDLSDREKCGAVLSQVLGAESPLYHLGATKVLLQEQGWQRLEELRDQQRSQALVDLHRSFHTCISRQRVLPRMQARMRGFQARSAGVGARAEVGGPVFTHSSNSCWLTVCLIYPWARCWKRYLRRRAALGQLNTILLVAQPLLQRRQRLQLGRWQGWHSSERALERVPSMELGRLEIPAELAVMLKTAESHRDALAGSITECLPPEVPARPSLTLPADIDLFPFSSFVAIGFQEPSLPRPGQPLAKPLTQLDGDNPQRALDINKVMLRLLGDGSLESWQRQIMGAYLVRQGQCRPGLRNELFSQLVAQLWQNPDEQQSQRGWALMAVLLSAFPPLPVLQKPLLKFVSDQAPRGMAALCQHKLLGALEQSQLASGATRAHPPTQLEWLAGWRRGRMALDVFTFSEECYSAEVESWTTGEQLAGWILQSRDAWQDLAGCDFVLDLISQTEDLGDPARPRSYPITPLGSAEAIPLAPGIQAPSLPPGPPPGPAPTLPSRDHTGEVQRSGSLDGFLDQIFQPVISSGLSDLEQSWALSSRMKGGGAIGPTQQGYPMVYPGMIQMPAYQPGMVPAPMPMMPAMGTVPAMPAMVVPPQPPLPSLDAGQLAVQQQNFIQQQALILAQQMTAQAMSLSLEQQMQQRQQQARASEAASQASPSAVTSKPRKPPTPPEKPQRDLGSEGGCLRETSEEAEDRPYQPKSFQQKRNYFQRMGQPQITVRTMKPPAKVHIPQGEAQEEEEEEEEEEEQEEQEVETRAVPSPPPPPIVKKPLKQGGAKAPKEAEAEPAKETAAKGHGQGPAQGRGTVVRSSDSKPKRPQPSREIGNIIRMYQSRPGPVPVPVQPSRPPKAFLRKIDPKDEALAKLGINGAHSSPPMLSPSPGKGPPPAVAPRPKAPLQLGPSSSIKEKQGPLLDLFGQKLPIAHTPPPPPAPPLPLPEDPGTLSAERRCLTQPVEDQGVSTQLLAPSGSVCFSYTGTPWKLFLRKEVFYPRENFSHPYYLRLLCEQILRDTFSESCIRISQNERRKMKDLLGGLEVDLDSLTTTEDSVKKRIVVAARDNWANYFSRFFPVSGESGSDVQLLAVSHRALAHDPGLEVGAGGKVTSVHARSLRSFAEVLGVECRGGSTLELSLKSEQLVLHTARARAIEALVELFLNELKKDSGYVIALRSYITDNCSLLSFHRGDLIKLLPVATLEPGWQFGSAGGRSGLFPADIVQPAAAPDFSFSKEQRSGWHKGQLSNGEPGLARWDRASERPAHPWSQAHSDDSEATSLSSVAYAFLPDSHSYTMQEFARRYFRRSQALLGQTDGGAAGKDTDSLVQYTKAPIQESLLSLSDDVSKLAVASFLALMRFMGDQSKPRGKDEMDLLYELLKLCQQEKLRDEIYCQVIKQVTGHPRPEHCTRGWSFLSLLTGFFPPSTRLMPYLTKFLQDSGPSQELARSSQEHLQRTVKYGGRRRMPPPGEMKAFLVAAEVQEELCRQMGITEPQEVQEFALFLIKEKSQLVRPLQPAEYLNSVVVDQDVSLHSRRLHWETPLHFDNSTYISTHYSQVLWDYLQGKLPVSAKADAQLARLAALQHLSKANRNTPSGQDLLAYVPKQLQRQVNTASIKNLMGQELRRLEGHSPQEAQISFIADLGDQAEQVPGPQQSDFLPAPSPPAEAMSQLPLFGYTVYGVLRVSMQALSGPTLLGLNRQHLILMDPSSQSLYCRIALKSLQRLHLLSPLEEKGPPGLEVNYGSADNPQTIWFELPQAQELLYTTVFLIDSSASCTEWPSIN

SEQ ID NO: 24906 - protein, 879 aa, Homo sapiens
MRLHLLLLLALCGAGTTAAELSYSLRGNWSICNGNGSLELPGAVPGCVHSALFQQGLIQDSYYRFNDLNYRWVSLDNWTYSKEFKIPFEISKWQKVNLILEGVDTVSKILFNEVTIGETDNMFNRYSFDITNVVRDVNSIELRFQSAVLYAAQQSKAHTRYQVPPDCPPLVQKGECHVNFVRKEQCSFSWDWGPSFPTQGIWKDVRIEAYNICHLNYFTFSPIYDKSAQEWNLEIESTFDVVSSKPVGGQVIVAIPKLQTQQTYSIELQPGKRIVELFVNISKNITVETWWPHGHGNQTGYNMTVLFELDGGLNIEKSAKVYFRTVELIEEPIKGSPGLSFYFKINGFPIFLKGSNWIPADSFQDRVTSELLRLLLQSVVDANMNTLRVWGGGIYEQDEFYELCDELGIMVWQDFMFACALYPTDQGFLDSVTAEVAYQIKRLKSHPSIIIWSGNNENEEALMMNWYHISFTDRPIYIKDYVTLYVKNIRELVLAGDKSRPFITSSPTNGAETVAEAWVSQNPNSNYFGDVHFYDYISDCWNWKVFPKARFASEYGYQSWPSFSTLEKVSSTEDWSFNSKFSLHRQHHEGGNKQMLYQAGLHFKLPQSTDPLRTFKDTIYLTQVMQAQCVKTETEFYRRSRSEIVDQQGHTMGALYWQLNDIWQAPSWASLEYGGKWKMLHYFAQNFFAPLLPVGFENENTFYIYGVSDLHSDYSMTLSVRVHTWSSLEPVCSRVTERFVMKGGEAVCLYEEPVSELLRRCGNCTRESCVVSFYLSADHELLSPTNYHFLSSPKEAVGLCKAQITAIISQQGDIFVFDLETSAVAPFVWLDVGSIPGRFSDNGFLMTEKTRTILFYPWEPTSKNELEQSFHVTSLTDIY

SEQ ID NO: 24907 - protein, 570 aa, Homo sapiens
MPLAFCGSENHSAAYRVDQGVLNNGCFVDALNVVPHVFLLFITFPILFIGWGSQSSKVHIHHSTWLHFPGHNLRWILTFMLLFVLVCEIAEGILSDGVTESHHLHLYMPAGMAFMAAVTSVVYYHNIETSNFPKLLIALLVYWTLAFITKTIKFVKFLDHAIGFSQLRFCLTGLLVILYGMLLLVEVNVIRVRRYIFFKTPREVKPPEDLQDLGVRFLQPFVNLLSKGTYWWMNAFIKTAHKKPIDLRAIGKLPIAMRALTNYQRLCEAFDAQRKDIQGTQGARAIWQALSHAFGRRLVLSSTFRILADLLGFAGPLCIFGIVDHLGKENDVFQPKTQFLGVYFVSSQEFLANAYVLAVLLFLALLLQRTFLQASYYVAIETGINLRGAIQTKIYNKIMHLSTSNLSMGEMTAGQICNLVAIDTNQLMWFFFLCPNLWAMPVQIIVGVILLYYILGVSALIGAAVIILLAPVQYFVATKLSQAQRSTLEYSNERLKQTNEMLRGIKLLKLYAWENIFRTRVETTRRKEMTSLRAFAIYTSISIFMNTAIPIAAVLIRAKAKRVPVQCRDP

SEQ ID NO: 24908 - protein, 456 aa, Homo sapiens
MLESVNVRLEDLITVITQTESHRQRLLQEAAANWHSWLIKVQKMKAVYHILNMCNIDVTQQCVIAEIWFPVADATRIKRALEQGMELSGSSMAPIMTTVQSKTAPPTFNRTNKFTAGFQNIVDAYGVGSYREINPAPYTIITFPFLFAVMFGDCGHGTVMLLAALWMILNERRLLSQKTDNEIWNTFFHGRYLILLMGIFSIYTGLIYNDCFSKSLNIFGSSWSVQPMFRNGTWNTHVMEESLYLQLDPAIPGVYFGNPYPFGIDPIWNLASNKLTFLNSYKMKMSVILGIVQMVFGVILSLFNHIYFRRTLNIILQFIPEMIFILCLFGYLVFMIIFKWCCFDVHVSQHAPSILIHFINMFLFNYSDSSNAPLYKHQQEVQSFFVVMALISVPWMLLIKPFILRASHRKSQLQASRIQEDATENIEGDSSSPSSRSGQRTSADTHGALDDHGEEG

SEQ ID NO: 24909 - protein, 282 aa, Homo sapiens
SRAEVAELQLRAASSHEHIAARLTEAVHTMLSSPLEYLPPWDPKDYSARWNEIFGNNLGALAMFCVLYPENIEARDMAKDYMERMAAQPSWLVKDAPWDEVPLAHSLVGFATAYDFLYNYLSKTQQEKFLEVIANASGYMYETSYRRGWGFQYLHNHQPTNCMALLTGSLVLMNQGYLQEAYLWTKQVLTIMEKSLVLLREVTDGSLYEGVAYGSYTTRSLFQYMFLVQRHFNINHFGHPWLKQHFAFMYRTILPGVGLDLDSSCYHHSSDFYICHPMPISS

SEQ ID NO: 24910 - protein, 489 aa, Homo sapiens
MQLPRWWELGDPCAWTGQGRGTRRMSPATTGTFLLTAFLLSCADGINGTVNWKTRQANNFIISRKMAAGMKDVYSIFSKVHSDRNVYPSAGVLFVHVLEREYFKGEFPPYPKPGEISNDPITFNTNLMGYPDRPGWLRYIQRTPYSDGVLYGSPTAENVGKPTIIEITAYNRRTFETARHNLIINIMSAEDFPLPYQAEFFIKNMNVEEMLASEVLGDFLGAVKNVWQPERLNAINITSALDRGGRVPLPINDLKEGVYVMVGADVPFSSCLREVENPQNQLRCSQEMEPVITCDKKFRTQFYIDWCKISLVDKTKQVSTYQEVIRGEGILPDGGEYKPPSDSLKSRDYYTDFLITLAVPSAVALVLFLILAYIMCCRREGVIQLVHHSAIQKSTKELRDMSKNREIAWPLSTLPVFHPVTGEIIPPLHTDNYDSTNMPLMQTQQWSFAPVAQAGVQWSDLGSLQPPPPRNLPHQTQIPQQQTTGKWYP

SEQ ID NO: 24911 - protein, 1215 aa, Homo sapiens
MALKMVKGSIDRMFDKNLQDLVRGIRNHKEDEAKYISQCIDEIKQELKQDNIAVKANAVCKLTYLQMLGYDISWAAFNIIEVMSASKFTFKRIGYLAASQSFHEGTDVIMLTTNQIRKDLSSPSQYDTGVALTGLSCFVTPDLARDLANDIMTLMSHTKPYIRKKAVLIMYKVFLKYPESLRPAFPRLKEKLEDPDPGVQSAAVNVICELARRNPKNYLSLAPLFFKLMTSSTNNWVLIKIIKLFGALTPLEPRLGKKLIEPLTNLIHSTSAMSLLYECVNTVIAVLISLSSGMPNHSASIQLCVQKLRILIEDSDQNLKYLGLLAMSKILKTHPKSVQSHKDLILQCLDDKDESIRLRALDLLYGMVSKKNLMEIVKKLMTHVDKAEGTTYRDELLTKIIDICSQSNYQYITNFEWYISILVELTRLEGTRHGHLIAAQMLDVAIRVKAIRKFAVSQMSALLDSAHLLASSTQRNGICEVLYAAAWICGEFSEHLQEPHHTLEAMLRPRVTTLPGHIQAVYVQNVVKLYASILQQKEQAGEAEGAQAVTQLMVDRLPQFVQSADLEVQERASCILQLVKHIQKLQAKDVPVAEEVSALFAGELNPVAPKAQKKVPVPEGLDLDAWINEPLSDSESEDERPRAVFHEEEQRRPKHRPSEADEEELARRREARKQEQANNPFYIKSSPSPQKRYQDTPGVEHIPVVQIDLSVPLKVPGLPMSDQYVKLEEERRHRQKLEKDKRRKKRKEKEKKGKRRHSSLPTESDEDIAPAQQVDIVTEEMPENALPSDEDDKDPNDPYRALDIDLDKPLADSEKLPIQKHRNTETSKSPEKDVPMVEKKSKKPKKKEKKHKEKERDKEKKKEKEKKAEDLDFWLSTTPPPAPAPAPAPVPSTGELSVNTVTTPKDECEDAKTEAQGEEDDAEGQDQDKKSPKPKKKKHRKEKEERTKGKKKSKKQPPGSEEAAGEPVQNGAPEEEQLPPESSYSLLAENSYVKMTCDIRGSLQEDSQVTVAIVLENRSSSILKGMELSVLDSLNARMARPQGSSVHDGVPVPFQLPPGVSNEAQYVFTIQSIVMAQKLKGTLSFIAKNDEGATHEKLDFRLHFSCSSYLITTPCYSDAFAKLLESGDLSMSSIKVDGIRMSFQNLLAKICFHHHFSVVERVDSCASMYSRSIQGHHVCLLVKKGENSVSVDGKCSDSTLLSNLLEEMKATLAKC

SEQ ID NO: 24912 - protein, 476 aa, Homo sapiens
MQLPRWWELGDPCAWTGQGRGTRRMSPATTGTFLLTVYSIFSKVHSDRNVYPSAGVLFVHVLEREYFKGEFPPYPKPGEISNDPITFNTNLMGYPDRPGWLRYIQRTPYSDGVLYGSPTAENVGKPTIIEITAYNRRTFETARHNLIINIMSAEDFPLPYQAEFFIKNMNVEEMLASEVLGDFLGAVKNVWQPERLNAINITSALDRGGRVPLPINDLKEGVYVMVGADVPFSSCLREVENPQNQLRCSQEMEPVITCDKKFRTQFYIDWCKISLVDKTKQVSTYQEVIRGEGILPDGGEYKPPSDSLKSRDYYTDFLITLAVPSAVALVLFLILAYIMCCRREGVIQLVHHSAIQKSTKELRDMSKNREIAWPLSTLPVFHPVTGEIIPPLHTDNYDSTNMPLMQTQQWSFAPVAQAGVQWSDLGSLQPPPPRNLPHQTQIPQQQTTGDFRLTTFQRFEVNGIPEERKLTEAMNL

SEQ ID NO: 24913 - protein, 366 aa, Homo sapiens
TYTYEKLLWTTSRVLKVLSVCSSNKPAIVEAGGMQALGLHLTDPSQRLVQNCLWTLRNLSDAATKQEGMEGLLGTLVQLLGSDDINVVTCAAGILSNLTCNNYKNKMMVCQVGGIEALVRTVLRAGDREDITEPAICALRHLTSRHQEAEMAQNAVRLHYGLPVVVKLLHPPSHWPLIKATVGLIRNLALCPANHAPLREQGAIPRLVQLLVRAHQDTQRRTSMGGTQQQFVEGVRMEEIVEGCTGALHILARDVHNRIVIRGLNTIPLFVQLLYSPIENIQRVAAGVLCELAQDKEAAEAIEAEGATAPLTELLHSRNEGVGPFSPCLLATYAAAVLFRMSEDKPQDYKKRLSVELTSSLFRTEP

SEQ ID NO: 24914 - protein, 528 aa, Homo sapiens
MWRLRRAAVACEVCQSLVKHSSGIKGSLPLQKLHLVSRSIYHSHHPTLKLQRPQLRTSFQQFSSLTNLPLRKLKFSPIKYGYQPRRNFWPARLATRLLKLRYLILGSAVGGGYTAKKTFDQWKDMIPDLSEYKWIVPDIVWEIDEYIDFEKIRKALPSSEDLVKLAPDFDKIVESLSLLKDFFTSGHKLVSEVIGASDLLLLLGSPEETAFRATDRGSESDKHFRKGLLGELILLQQQIQEHEEEARRAAGQYSTSYAQQKRKVSDKEKIDQLQEELLHTQLKYQRILERLEKENKELRKLVLQKDDKGIHHRKLKKSLIDMYSEVLDVLSDYDASYNTQDHLPRVVVVGDQSAGKTSVLEMIAQARIFPRGSGEMMTRSPVKVTLSEGPHHVALFKDSSREFDLTKEEDLAALRHEIELRMRKNVKEGCTVSPETISLNVKGPGLQRMVLVDLPGVINTVTSGMAPDTKETIFSISKAYMQNPNAIILCIQVSFFYFFQMDLWMLNAVLLQTWSVKWTLMEGEPYSF

SEQ ID NO: 24915 - protein, 641 aa, Homo sapiens
MAVLLLLLRALRRGPGPGPRPLWGPGPAWSPGFPARPGRGRPYMASRPPGDLAEAGGRALQSLQLRLLTPTFEGINGLLLKQHLVQNPVRLWQLLGGTFYFNTSRLKQKNKEKDKSKGKAPEEDEEERRRRERDDQMYRERLRTLLVIAVVMSLLNALSTSGGSISWNDFVHEMLAKGEVQRVQVVPESDVVEVYLHPGAVVFGRPRLALMYRMQVANIDKFEEKLRAAEDELNIEAKDRIPVSYKRTGFFGNALYSVGMTAVGLAILWYVFRLAGMTGREGGFSAFNQLKMARFTIVDGKMGKGVSFKDVAGMHEAKLEVREFVDYLKERREIFEQHLKSLKLTQSSTFYSQRLAELTPGFSGADIANICNEAALHAAREGHTSVHTLNFEYAVERVLAGTAKKSKILSKEEQKVVAFHESGHALVGWMLEHTEAVMKVSITPRTNAALGFAQMLPRDQHLFTKEQLFERMCMALGGRASEALSFNEVTSGAQDDLRKVTRIAYSMVKQFGMAPGIGPISFPEAQEGLMGIGRRPFSQGLQQMMDHEARLLVAKAYRHTEKVLQDNLDKLQALANALLEKEVINYEDIEALIGPPPHGPKKMIAPQRWIDAQREKQDLGEEETEETQQPPLGGEEPTWPK

SEQ ID NO: 24916 - protein, 1559 aa, Homo sapiens
MIEYGLSVDYMDENEEYFQRQASHRQSRRRFRKINQKGERQTIIDTVDPYPMGKPPLPRGYHTLPADFTKLHLTDSLHPQVTHVSSSHSGCSITSDSGSSSLSDIYQATESEAGDMDLSGLPETAVDSEDDDDEEDIERASDPLMSRDIVRDCLEKDPIDRTDDDIEQLLEFMHQLPAFANMTMSVRRELCAVMVFAVVERAGTIVLNDGEELDSWSVILNGSVEVTYPDGKAEILCMGNSFGVSPTMDKEYMKGVMRTKVDDCQFVCIAQQDYCRILNQVEKNMQKVEEEGEIVMVKEHRELDRTGTRKGHIVIKGTSERLTMHLVEEHSVVDPTFIEDFLLTYRTFLSSPMEVGKKLLEWFNDPSLRDKVTRVVLLWVNNHFNDFEGDPAMTRFLEEFENNLEREKMGGHLRLLNIACAAKAKRRLMTLTKPSREAPLPFILLGGSEKGFGIFVDSVDSGSKATEAGLKRGDQILEVNGQNFENIQLSKAMEILRNNTHLSITVKTNLFVFKELLTRLSEEKRNGAPHLPKIGDIKKASRYSIPDLAVDVEQVIGLEKVNKKSKANTVGGRNKLKKILDKTRISILPQKPYNDIGIGQSQDDSIVGLRQTKHIPTALPVSGTLSSSNPDLLQSHHRILDFSATPDLPDQVLRVFKADQQSRYIMISKDTTAKEVVIQAIREFAVTATPDQYSLCEVSVTPEGVIKQRRLPDQLSKLADRIQLSGRYYLKNNMETETLCSDEDAQELLRESQISLLQLSTVEVATQLSMRNFELFRNIEPTEYIDDLFKLRSKTSCANLKRFEEVINQETFWVASEILRETNQLKRMKIIKHFIKIALHCRECKNFNSMFAIISGLNLAPVARLRTTWEKLPNKYEKLFQDLQDLFDPSRNMAKYRNVLNSQNLQPPIIPLFPVIKKDLTFLHEGNDSKVDGLVNFEKLRMIAKEIRHVGRMASVNMDPALMFRTRSLSQGSTNATVLDVAQTGGHKKRVRRSSFLNAKKLYEDAQMARKVKQYLSNLELEMDEESLQTLSLQCEPATNTLPKNPGDKKPVKSETSPVAPRAGSQQKAQSLPQPQQQPPPAHKINQGLQVPAVSLYPSRKKVPVKDLPPFGINSPQALKKILSLSEEGSLERHKKQAEDTISNASSQLSSPPTSPQSSPRKGGSGNQLRSFGSGQLDLTSSSSSLGSYTLAPSGTVDNFSDSGHSEISSRSSIVSNSSFDSVPVSLHDERRQRHSVSIVETNLGMGRMERRTMIEPDQYSLGSYAPMSEGRGLYATATVISSPSTEELSQDQGDRASLDAADSGRGSWTSCSSGSHDNIQTIQHQRSWETLPFGHTHFDYSGDPAGLWASSSHMDQIMFSDHSTKYNRQNQSRESLEQAQSRASWASSTGYWGEDSEGDTGTIKRRGGKDVSIEAESSSLTSVTTEETKPVPMPAHIAVASSTTKGLIARKEGRYREPPPTPPGYIGIPITDFPEGHSHPARKPPDYNVALQRSRMVARSSDTAGPSSVQQPHGHPTSSRPVNKPQWHKPNESDPRLAPYQSQGFSTEEDEDEQVSAV

SEQ ID NO: 24917 - protein, 370 aa, Homo sapiens
MQLPRWWELGDPCAWTGQGRGTRRMSPATTGTFLLTVYSIFSKVHSDRNVYPSAGVLFVHVLEREYFKGEFPPYPKPGEISNDPITFNTNLMGYPDRPGWLRYIQRTPYSDGVLYGSPTAENVGKPTIIEITAYNRRTFETARHNLIINIMSAEDFPLPYQAEFFIKNMNVEEMLASEVLGDFLGAVKNVWQPERLNAINITSALDRGGRVPLPINDLKEGVYVMVGADVPFSSCLREVENPQNQLRCSQEMEPVITCDKKFRTQFYIDWCKISLVDKTKQVSTYQEVIRGEGILPDGGEYKPPSDSLKSRDYYTDFLITLAVPSAVALVLFLILAYIMCCRREGVEKRNMQTPEEQMKRPFIQVFQNLQ

SEQ ID NO: 24918 - protein, 676 aa, Homo sapiens
MNQSGTNQSSLSDSNQAGINQPSTNSLGMNQMDMNQGSASLYEMNQVDMKQPSMSQAGMRQSGTNLPDINQPDMKQPDTWQLGRSQPGMLQQELSQLVLSKAGISQPDPSQPGPSQSGPSQSRMRQIGTNQSGMSQPVMQQLDSQSGGSQPSMRQVGTSQLGTSQIGMSQPGTWQTGLSQPVLRQPNMSPPGMWQPGVQQPGISQQVPSHPDMSQPGMSQQVPSQPGIRQPDTSQSCKNQTDMSQPDANQSSLSDSNQTGIIQPSPSLLGMNQMDMNQWSASLYEMNQVDMKQPSMSQAGMRQSGTNLPDINQPGMKQPGTWQLGRSQPGMWPQSLSELVLSEASISQPGPPQRAPSQSGPRQSSTSQAGTNQSGISQPVMWQLDMRQSGGSQPSMRQVGTSQSGTSQIGMSQPGTWQTGLSQPVPRQPNKSPPGMWQRGMWQPGMSQQVPSQLGMRQPGTSQSSKNQTGMSHPGRGQPGIWEPGPSQPGLSQQDLNQLVLSQPGLSQPGRSQPSVSQMGMRQTSMDYFQIRHAEAGDCPEILRLIKELAACENMLDAMELTAADLLRDGFGDNPLFYCLIAEVNDQQKPSGKLTVGFAMYYFTYDSWTGKVLYLEDFYVTQAYQGLGIGAEMLKRLSQASINYYTSRGALDLSSEEGWHLFRFNREELLDMAWEE

SEQ ID NO: 24919 - protein, 434 aa, Homo sapiens
MGLLVFVRNLLLALCLFLVLGFLYYSAWKLHLLQWEEDSNSVVLSFDSAGQTLGSEYDRLGFLLNLDSKLPAELATKYANFSEGACKPGYASALMTAIFPRFSKPAPMFLDDSFRKWARIREFVPPFGIKGQDNLIKAILSVTKEYRLTPALDSLRCRRCIIVGNGGVLANKSLGSRIDDYDIVVRLNSAPVKGFEKDVGSKTTLRITYPEGAMQRPEQYERDSLFVLAGFKWQDFKWLKYIVYKERVSASDGFWKSVATRVPKEPPEIRILNPYFIQEAAFTLIGLPFNNGLMGRGNIPTLGSVAVTMALHGCDEVAVAGFGYDMSTPNAPLHYYETVRMAAIKEPRPHVENLNPSELRLPHFCFDHQPSTDPSLKPGNLGPVLQQLLCCYIWVMGGCWREPPICADSCFFLDAQYPARERVSAEAGESSRHH

SEQ ID NO: 24920 - protein, 381 aa, Homo sapiens
MRFTFPLMAIVLEIAMIVLFGLFVEYETDQTVLEQLNITKPTDMGIFFELYPLFQDVHVMIFVGFGFLMTFLKKYGFSSVGINLLVAALGLQWGTIVQGILQSQGQKFNIGIKNMINADFSAATVLISFGAVLGKTSPTQMLIMTILEIVFFAHNEYLVSEIFKASDIGASMTIHAFGAYFGLAVAGILYRSGLRKGHENEESAYYSDLFAMIGTLFLWMFWPSFNSAIAEPGDKQCRAIVNTYFSLAACVLTAFAFSSLVEHRGKLNMVHIQNATLAGGVAVGTCADMAIHPFGSMIIGSIAGMVSVLGYKFLTPLFTTKLRIHDTCGVHNLHGLPGVVGGLAGIVAVAMGASNTSMAMQAAALGSSIGTAVVGGLMTGP

SEQ ID NO: 24921 - protein, 638 aa, Homo sapiens
MRTTKVYKLVIHKKGFGGSDDELVVNPKVFPHIKLGDIVEIAHPNDEYSPLLLQVKSLKEDLQKETISVDQTVTQVFRLRPYQDVYVNVVDPKDVTLDLVELTFKDQYIGRGDMWRLKKSLVSTCAYITQKVEFAGIRAQAGELWVKNEKVMCGYISEDTRVVFRSTSAMVYIFIQMSCEMWDFDIYGDLYFEKAVNGFLADLFTKWKEKNCSHEVTVVLFSRTFYDAKSVDEFPEINRASIRQDHKGRFYEDFYKVVVQNERREEWTSLLVTIKKLFIQYPVLVRLEQAEGFPQGDNSTSAQGNYLEAINLSFNVFDKHYINRNFDRTGQMSVVITPGVGVFEVDRLLMILTKQRMIDNGIGVDLVCMGEQPLHAVPLFKLHNRSAPRDSRLGDDYNIPHWINHSFYTSKSQLFCNSFTPRIKLAGKKPASEKAKNGRDTSLGSPKESENALPIQVDYDAYDAQVFRLPGPSRAQCLTTCRSVRERESHSRKSASSCDVSSSPSLPSRTLPTEEVRSQASDDSSLGKSANILMIPHPHLHQYEVSSSLGYTSTRDVLENMMEPPQRDSSAPGRFHVGSAESMLHVRPGGYTPQRALINPFAPSRMPMKLTSNRRRWMHTFPVENLAPSGFWLLTKNR

SEQ ID NO: 24922 - protein, 130 aa, Homo sapiens
MEERGDSEPTPGCSGLGPGGVRGFGDGGGAPSWAPEDAWMGTHPKYLEMMELDIGDATQVYVAFLVYLDLMESKSWHEVNCVGLPELQLICLVGTEIEGEGLQTVVPTPITASLSHNRSGPGREDLLHCC

SEQ ID NO: 24923 - protein, 147 aa, Homo sapiens
MGHFTEEDKATITSLWGKVNVEDAGGETLGRLLVVYPWTQRFFDSFGNLSSASAIMGNPKVKAHGKKVLTSLGDAIKHLDDLKGTFAQLSELHCDKLHVDPENFKLLGNVLVTVLAIHFGKEFTPEVQASWQKMVTAVASALSSRYH

SEQ ID NO: 24924 - protein, 813 aa, Homo sapiens
ELGEVWQRRGSLEGAAAAAESPPQEEGSAGEAQGTCEGATAQEEGATGGSQANGHQPLRSLPSVRQDVSRYQRVDEALPPNWEARIDSHGRIFYVDHVNRTTTWQRPTAPPAPQVLQRSNSIQQMEQLNRRYQSIRRTMTNERPEENTNAIDGAGEEADFHQASADFRRENILPHSTSRSRITLLLQSPPVKFLISPEFFTVLHSNPSAYRMFTNNTCLKHMITKVRRDTHHFERYQHNRDLVGFLNMFANKQLELPRGWEMKHDHQGKAFFVDHNSRTTTFIDPRLPLQSSRPTSALVHRQHLTRQRSHSAGEVGEDSRHAGPPVLPRPSSTFNTVSRPQYQDMVPVAYNDKIVAFLRQPNIFEILQERQPDLTRNHSLSLFEEEIMSYVPPHALLHPSYCQSPRGSPVSSPQNSPGTQRANARAPAPYKRDFEAKLRNFYRKLETKGYGQGPGKLKLIIRRDHLLEDAFNQIMGYSRKDLQRNKLYVTFVGEEGLDYSGPSREFFFLVSRELFNPYYGLFEYSANDTYTVQISPMSAFVDNHHEWFRFSGRILGLALIHQYLLDAFFTRPFYKALLRILCDLSDLEYLDEEFHQSLQWMKDNDIHDILDLTFTVNEEVFGQITERELKPGGANIPVTEKNKKEYIERMVKWRIERGVVQQTESLVRGFYEVVDARLVSVFDARELELVIAGTAEIDLSDWRNNTEYRGGYHDNHIVIRWFWAAVERFNNEQRLRLLQFVTGTSSIPYEGFASLRGSNGPRRFCVEKWGKITALPRAHTCFNRLDLPPYPSFSMLYEKLLTAVEETSTFGLE

SEQ ID NO: 24925 - protein, 1145 aa, Homo sapiens
ATYHANTEREQKKENERIEKERMRRLMAEDEEGYRKLIDQKKDKRLAYLLQQTDEYVANLTELVRQHKAAQVAKEKKKKKKKKAENAEGQTPAIGPDGEPLDETSQMSDLPVKVIHVESGKILTGTDAPKAGQLEAWLEMNPGYEVAPRSDSEESGSEEEEEEEEEEQPQAAQPPTLPVEEKKKIPDPDSDDVSEVDARHIIENAKQDVDDEYGVSQALARGLQSYYAVAHAVTERVDKQSALMVNGVLKQYQIKGLEWLVSLYNNNLNGILADEMGLGKTIQTIALITYLMEHKRINGPFLIIVPLSTLSNWAYEFDKWAPSVVKVSYKGSPAARRAFVPQLRSGKFNVLLTTYEYIIKDKHILAKIRWKYMIVDEGHRMKNHHCKLTQVLNTHYVAPRRLLLTGTPLQNKLPELWALLNFLLPTIFKSCSTFEQWFNAPFAMTGEKVDLNEEETILIIRRLHKVLRPFLLRRLKKEVEAQLPEKVEYVIKCDMSALQRVLYRHMQAKGVLLTDGSEKDKKGKGGTKTLMNTIMQLRKICNHPYMFQHIEESFSEHLGFTGGIVQGLDLYRASGKFELLDRILPKLRATNHKVLLFCQMTSLMTIMEDYFAYRGFKYLRLDGTTKAEDRGMLLKTFNEPGSEYFIFLLSTRAGGLGLNLQSADTVIIFDSDWNPHQDLQAQDRAHRIGQQNEVRVLRLCTVNSVEEKILAAAKYKLNVDQKVIQAGMFDQKSSSHERRAFLQAILEHEEQDESRHCSTGSGSASFAHTAPPPAGVNPDLEEPPLKEEDEVPDDETVNQMIARHEEEFDLFMRMDLDRRREEARNPKRKPRLMEEDELPSWIIKDDAEVERLTCEEEEEKMFGRGSRHRKEVDYSDSLTEKQWLKTLKAIEEGTLEEIEEEVRQKKSSRKRKRDSDAGSSTPTTSTRSRDKDDESKKQKKRGRPPAEKLSPNPPNLTKKMKKIVDAVIKYKDSSSGRQLSEVFIQLPSRKELPEYYELIRKPVDFKKIKERIRNHKYRSLNDLEKDVMLLCQNAQTFNLEGSLIYEDSIVLQSVFTSVRQKIEKEDDSEGEESEEEEEGEEEGSESESRSVKVKIKLGRKEKAQDRLKGGRRRPSRGSRAKPVVSDDDSEEEQEEDRSGSGSEED

SEQ ID NO: 24926 - protein, 405 aa, Homo sapiens
MRTTKVYKLVIHKKGFGGSDDELVVNPKVFPHIKLGDIVEIAHPNDEYSPLLLQVKSLKEDLQKETISVDQTVTQVFRLRPYQDVYVNVVDPKVSTCAYITQKVEFAGIRAQAGELWVKNEKVMCGYISEDTRVVFRSTSAMVYIFIQMSCEMWDFDIYGDLYFEKAVNGFLADLFTKWKEKNCSHEVTVVLFSRTFYDAKSVDEFPEINRASIRQDHKGRFYEDFYKVVVQNERREEWTSLLVTIKKLFIQYPVLVRLEQAEGFPQGDNSTSAQGNYLEAINLSFNVFDKHYINRNFDRTGQMSVVITPGVGVFEVDRLLMILTKQRMIDNGIGVDLVCMGEQPLHAVPLFKLHNRSAPRDSRLGDDYNIPHWINHSPPLRKQKMAVIHLSGVQKNLRTPFPSK

SEQ ID NO: 24927 - protein, 661 aa, Homo sapiens
MSHVAVENALGLDQQFAGLDLNSSDNQSGGSTASKGRYIPPHLRNREATKGFYDKDSSGWSSSKDKDAYSSFGSRSDSRGKSSFFSDRGSGSRGRFDDRGRSDYDGIGSRGDRSGFGKFERGGNSRWCDKSDEDDWSKPLPPSERLEQELFSGGNTGINFEKYDDIPVEATGNNCPPHIESFSDVEMGEIIMGNIELTRYTRPTPVQKHAIPIIKEKRDLMACAQTGSGKTAAFLLPILSQIYSDGPGEALRAMKENGRYGRRKQYPISLVLAPTRELAVQIYEEARKFSYRSRVRPCVVYGGADIGQQIRDLERGCHLLVATPGRLVDMMERGKIGLDFCKYLVLDEADRMLDMGFEPQIRRIVEQDTMPPKGVRHTMMFSATFPKEIQMLARDFLDEYIFLAVGRVGSTSENITQKVVWVEESDKRSFLLDLLNATGKDSLTLVFVETKKGADSLEDFLYHEGYACTSIHGDRSQRDREEALHQFRSGKSPILVATAVAARGLDISNVKHVINFDLPSDIEEYVHRIGRTGRVGNLGLATSFFNERNINITKDLLDLLVEAKQEVPSWLENMAYEHHYKGSSRGRSKSRFSGGFGARDYRQSSGASSSSFSSSRASSSRSGGGGHGSSRGFGGGGYGGFYNSDGYGGNYNSQGVDWWGN

SEQ ID NO: 24928 - protein, 445 aa, Homo sapiens
MPLAFCGSENHSAAYRVDQGVLNNGCFVDALNVVPHVFLLFITFPILFIGWGSQSSKVHIHHSTWLHFPGHNLRWILTFMLLFVLVCEIAEGILSDGVTESHHLHLYMPAGMAFMAAVTSVVYYHNIETSNFPKLLIALLVYWTLAFITKTIKFVKFLDHAIGFSQLRFCLTGLLVILYGMLLLVEVNVIRVRRYIFFKTPREVKPPEDLQDLGVRFLQPFVNLLSKGTYWWMNAFIKTAHKKPIDLRAIGKLPIAMRALTNYQRLCEAFDAQRKDIQGTQGARAIWQALSHAFGRRLVLSSTFRILADLLGFAGPLCIFGIVDHLGKENDVFQPKTQFLGVYFVSSQEFLANAYVLAVLLFLALLLQRTFLQASYYVAIETGINLRGAIQTKIYNKIMHLSTSNLSMGEMTAGQICNLVAIDTNQLMWFFFLCPNLWAMPVQFS

SEQ ID NO: 24929 - protein, 1498 aa, Homo sapiens
MPLAFCGSENHSAAYRVDQGVLNNGCFVDALNVVPHVFLLFITFPILFIGWGSQSSKVHIHHSTWLHFPGHNLRWILTFMLLFVLVCEIAEGILSDGVTESHHLHLYMPAGMAFMAAVTSVVYYHNIETSNFPKLLIALLVYWTLAFITKTIKFVKFLDHAIGFSQLRFCLTGLLVILYGMLLLVEVNVIRVRRYIFFKTPREVKPPEDLQDLGVRFLQPFVNLLSKGTYWWMNAFIKTAHKKPIDLRAIGKLPIAMRALTNYQRLCEAFDAQVRKDIQGTQGARAIWQALSHAFGRRLVLSSTFRILADLLGFAGPLCIFGIVDHLGKENDVFQPKTQFLGVYFVSSQEFLANAYVLAVLLFLALLLQRTFLQASYYVAIETGINLRGAIQTKIYNKIMHLSTSNLSMGEMTAGQICNLVAIDTNQLMWFFFLCPNLWAMPVQIIVGVILLYYILGVSALIGAAVIILLAPVQYFVATKLSQAQRSTLEYSNERLKQTNEMLRGIKLLKLYAWENIFRTRVETTRRKEMTSLRAFAIYTSISIFMNTAIPIAAVLIPLRVVNRKRPAREDCRGLTGPLQSLVPSADGDADNCCVQIMGGYFTWTPDGIPTLSNITIRIPRGQLTMIVGQVGCGKSSLLLAALGEMQKVSGAVFWSSSLPDSEIGEDPSPERETATDLDIRKRGPVAYASQKPWLLNATVEENIIFESPFNKQRYKMVIEACSLQPDIDILPHGDQTQIGERGINLSGGQRQRISVARALYQHANVVFLDDPFSALDIHLSDHLMQAGILELLRDDKRTVVLVTHKLQYLPHADWIIAMKDGTIQREGTLKDFQRSECQLFEHWKTLMNRQDQELEKETVTERKATEPPQGLSRAMSSRDGLLQDEEEEEEEAAESEEDDNLSSMLHQRAEIPWRACAKYLSSAGILLLSLLVFSQLLKHMVLVAIDYWLAKWTDSALTLTPAARNCSLSQECTLDQTVYAMVFTVLCSLGIVLCLVTSVTVEWTGLKVAKRLHRSLLNRIILAPMRFFETTPLGSILNRFSSDCNTIDQHIPSTLECLSRSTLLCVSALAVISYVTPVFLVALLPLAIVCYFIQKYFRVASRDLQQLDDTTQLPLLSHFAETVEGLTTIRAFRYEARFQQKLLEYTDSNNIASLFLTAANRWLEVRMEYIGACVVLIAAVTSISNSLHRELSAGLVGLGLTYALMVSNYLNWMVRNLADMELQLGAVKRIHGLLKTEAESYEGLLAPSLIPKNWPDQGKIQIQNLSVRYDSSLKPVLKHVNALIAPGQKIGICGRTGSGKSSFSLAFFRMVDTFEGHIIIDGIDIAKLPLHTLRSRLSIILQDPVLFSGTIRFNLDPERKCSDSTLWEALEIAQLKLVVKALPGGLDAIITEGGENFSQGQRQLFCLARAFVRKTSIFIMDEATASIDMATENILQKVVMTAFADRTVVTIAHRVHTILSADLVIVLKRGAILEFDKPEKLLSRKDSVFASFVRADK

SEQ ID NO: 24930 - protein, 621 aa, Homo sapiens
MEDPRGINGQSVQTSQASSDVAVSSSCRSMEMQDLTSPHSRLSGSSESPSGPKLGNSHINSNSMTPNGTEVKTEPMSSSETASTTADGSLNNFSGSAIGSSSFSPRPTHQFSPPQIYPSNRPYPHILPTPSSQTMAAYGQTQFTTGMQQATAYATYPQPGQPYGISSYGALWAGIKTEGGLSQSQSPGQTGFLSYGTSFSTPQPGQAPYSYQMQGSSFTTSSGIYTGNNSLTNSSGFNSSQQDYPSYPSFGQGQYAQYYNSSPYPAHYMTSSNTSPTTPSTNATYQLQEPPSGITSQAVTDPTAEYSTIHSPSTPIKDSDSDRLRRGSDGKSRGRGRRNNNPSPPPDSDLERVFIWDLDETIIVFHSLLTGSYANRYGRDPPTSVSLGLRMEEMIFNLADTHLFFNDLEECDQVHIDDVSSDDNGQDLSTYNFGTDGFPAAATSANLCLATGVRGGVDWMRKLAFRYRRVKEIYNTYKNNVGGLLGPAKREAWLQLRAEIEALTDSWLTLALKALSLIHSRTNCVNILVTTTQLIPALAKVLLYGLGIVFPIENIYSATKIGKESCFERIIQRFGRKVVYVVIGDGVEEEQGAKKHAMPFWRISSHSDLMALHHALELEYL

SEQ ID NO: 24931 - protein, 211 aa, Homo sapiens
DPEKPVRLNVKYDKDASFLAGGLFTDFMISVISEDDSIIKNINPARISMKMWKLSTSGNRPPANAETFSCNKIKDNDKEDGCFYFRDKVIPNKVGTYCIQFGFMMDKTNILNSEQVIVEVLPNQPVKLVPKIKPPTPAVSNVRSVASRTLVRDLHLSITDDYDNHTGIDLVGTIIATIKGSNEEDTDTPLFIGKVRTLEFPFVNGSAEIML

SEQ ID NO: 24932 - protein, 379 aa, Homo sapiens
MSRPKNQNYKGHGLSKGKEREQRASIRFKTTLMNTLMDVLRHRPGWVEVKDEGEWDFYWCDVSWLRENFDHTYMDEHVRISHFRNHYELTRKNYMVKNLKRFRKQLEREAGKLEAAKCDFFPKTFEMPCEYHLFVEEFRKNPGITWIMKPVARSQGKGIFLFRRLKDIVDWRKDTRSSDDQKDDIPVENYVAQRYIENPYLIGGRKFDLRVYVLVMSYIPLRAWLYRDGFARFSNTRFTLNSIDDQYVHLTNVAVQKTSPDYHPKKGCKWTLQRFRQYLASKHGPEAVETLFRDIDNIFVKSLQSVQKVIISDKHCFELYGYDILIDQDLKPWLLEVNASPSLTASSQEDYELKTCLLEDTLHVVDMEARSLRADSPCW

SEQ ID NO: 24933 - protein, 187 aa, Homo sapiens
TPGCSGLGPGGVRGFGDGGGAPSWAPEDAWMGTHPKYLEMMELDIGDATQVYVAFLVYLDLMESKSWHEVNCVGLPELQLICLVGTEIEGEGLQTVVPTPITASLSHNRRNNPYIFIKDINKKQLSPSCESDPNPLTSSLIQLYTEESPYEDTARRWLSSSQEERPHQRWNVPALRSGFLVSRTVRK

SEQ ID NO: 24934 - protein, 1392 aa, Homo sapiens
MARLSFWSQGVELARSTRCFSPEDISGKAPVLGTGMAVDMGMSFMGLPLAGQKHCPKSGQMEAMVMTCSLCHQDLPGMGSHLLSCQHLLRKDCFQGLIQELGQIAKAHETVADELISCPGCERVYLTRDVTEHFFLHCVPTEQPKMARNCSECKEKRAAHILCTYCNRWLCSSCTEEHRHSPVPGGPFFPRAQKGSPGVNGGPGDFTLYCPLHTQEVLKLFCETCDMLTCHSCLVVEHKEHRCRHVEEVLQNQRMLLEGVTTQVAHKKSSLQTSAKQIEDRIFEVKHQHRKVENQIKMAKMVLMNELNKQANGLIEELEGITNERKRKLEQQLQSIMVLNRQFEHVQNFINWAVCSKTSVPFLFSKELIVFQMQRLLETSCNTDPGSPWSIRFTWEPNFWTKQLASLGCITTEGGQMSRADAPAYGGLQGSSPFYQSHQSPVAQQEALSHPSHKFQSPAVCSSSVCCSHCSPVSPSLKGQVPPPSIHPAHSFRQPPEMVPQQLGSLQCSALLPREKELACSPHPPKLLQPWLETQPPVEQESTSQRLGQQLTSQPVCIVPPQDVQQGAHAQPTLQTPSIQVQFGHHQKLKLSHFQQQPQQQLPPPPPPLPHPPPPLPPPPQQPHPPLPPSQHLASSQHESPPGPACSQNMDIMHHKFELEEMQKDLELLLQAQQPSLQLSQTKSPQHLQQTIVGQINYIVRQPAPVQSQSQEETLQATDEPPASQGSKPALPLDKNTAAALPQASGEETPLSVPPVDSTIQHSSPNVVRKHSTSLSIMGFSNTLEMELSSTRLERPLEPQIQSVSNLTAGAPQAVPSLLSAPPKMVSSLTSVQNQAMPSLTTSHLQTVPSLVHSTFQSMPNLISDSPQAMASLASDHPQAGPSLMSGHTQAVPSLATCPLQSIPPVSDMQPETGSSSSSGRTSGSLCPRDGADPSLENALCKMESEDSTRFTDLLGQGPIVPGLDAPKDLAIPSELEEPINLSVKKPPLAPVVSTSTALQQYQNPKECENFEQGALELDAKENQSIRAFNSEHKIPYVRLERLKICAASSGEMPVFKLKPQKNDQDGSFLLIIECGTESSSMSIKVSQDRLSEATQAPGLEGRKVTVTSLAGQRPPEVEGTSPEEHRLIPRTPGAKKGPPAPIENEDFCAVCLNGGELLCCDRCPKVFHLSCHVPALLSFPGGEWVCTLCRSLTQPEMEYDCENACYNQPGMRASPGLSMYDQKKCEKLVLSLCCNNLSLPFHEPVSPLARHYYQIIKRPMDLSIIRRKLQKKDPAHYTTPEEVVSDVRLMFWNCAKFNYPDSEVAEAGRCLEVFFEGWLKEIYPEKRFAQPRQEDSDSEEVSSESGCSTPQGFPWPPYMQEGIQPKRRRRHMENERAKRMSFRLANSISQV

SEQ ID NO: 24935 - protein, 455 aa, Homo sapiens
MQSLKPHPRPAESALLQSSLRSTGLGLQDRLFSSESDNSLYFTYSGQPNTLEVRDLNYQVDLASQVPWFEQLAQFKMPWTSPSCQNSCELGIQNLSFKVRSGQMLAIIGSSGCGRASLLDVITGRGHGGKIKSGQIWINGQPSSPQLVRKCVAHVRQHNQLLPNLTVRETLAFIAQMRLPRTFSQAQRDKRVEDVIAELRLRQCADTRVGNMYVRGLSGGERRRVSIGVQLLWNPGILILDEPTSGLDSFTAHNLVKTLSRLAKGNRLVLISLHQPRSDIFRLFDLVLLMTSGTPIYLGAAQHMVQYFTAIGYPCPRYSNPADFYVDLTSIDRRSREQELATREKAQSLAALFLEKVRDLDDFLWKAETKDLDEDTCVESSVTPLDTNCLPSPTKMPGAVQQFTTLIRRQISNDFRDLPTLLIHGAEACLMSMTIGFLYFGHGSIQLSFMDTAAL

SEQ ID NO: 24936 - protein, 469 aa, Homo sapiens
ITFPILFIGWGSQSSKVHIHHSTWLHFPGHNLRWILTFMLLFVLVCEIAEGILSDGVTESHHLHLYMPAGMAFMAAVTSVVYYHNIETSNFPKLLIALLVYWTLAFITKTIKFVKFLDHAIGFSQLRFCLTGLLVILYGMLLLVEVNVIRVRRYIFFKTPREVKPPEDLQDLGVRFLQPFVNLLSKGTYWWMNAFIKTAHKKPIDLRAIGKLPIAMRALTNYQRLCEAFDAQRKDIQGTQGARAIWQALSHAFGRRLVLSSTFRILADLLGFAGPLCIFGIVDHLGKENDVFQPKTQFLGVYFVSSQEFLANAYVLAVLLFLALLLQRTFLQASYYVAIETGINLRGAIQTKIYNKIMHLSTSNLSMGEMTAGQICNLVAIDTNQLMWFFFLCPNLWAMPVQIIVGVILLYYILGVSALIGAAVIILLAPVQYFVATKLSQAQRSTLVSAQSFHEHGHPHCSCPHTCKS

SEQ ID NO: 24937 - protein, 729 aa, Homo sapiens
EERMDSARPCLHRQHHLLNDRGSEEPPGSKGSVTLSDLPGFLGDLASEEDSIEKDKEEAAISRELSEITTAEAEPVVPRGGFDSPFYRDSLPGSQRKTHSAASSSQGASVNPEPLHSSLDKLGPDTPKQAFTPIDLPCGSADESPAGDRECQTSLETSIFTPSPCKIPPPTRVGFGSGQPPPYDHLFEVALPKTAHHFVIRKTEELLKKAKGNTEEDGVPSTSPMEVLDRLIQQGADAHSKELNKLPLPSKSVDWTHFGGSPPSDEIRTLRDQLLLLHNQLLYERFKRQQHALRNRRLLRKVIKAAALEEHNAAMKDQLKLQEKDIQMWKVSLQKEQARYNQLQEQRDTMVTKLHSQIRQLQHDREEFYNQSQELQTKLEDCRNMIAELRIELKKANNKLSNSESVQQQMEFLNRQLLVLGEVNELYLEQLQNKHSDTTKEVEMMKAAYRKELEKNRSHVLQQTQRLDTSQKRILELESHLAKKDHLLLEQKKYLEDVKLQARGQLQAAESRYEAQKRITQVFELEILDLYGRLEKDGLLKKLEEEKAEAAEAAEERLDCCNDGCSDSMVGHNEEASGHNGETKTPRPSSARGSSGSRGGGGSSSSSSELSTPEKPPHQRAGPFSSRWETTMGEASASIPTTVGSLPSSKSFLGMKARELFRNKSESQCDEDGMTSSLSESLKTELGKDLGVEAKIPLNLDGPHPSPPTPDSVGQLHIMDYNETHHEHS

SEQ ID NO: 24938 - protein, 603 aa, Homo sapiens
MIVQMTVILKLEMPQDSLILEKSQNWSSQKMDHILICCVCLGDNSEDADEIIQCDNCGITVHEGCYGVDGESDSIMSSASENSTEPWFCDACKCGVSPSCELCPNQDGIFKETDAGRWVHIVCALYVPGVAFGDIDKLRPVTLTEMNYSKYGAKECSFCEDPRFARTGVCISCDAGMCRAYFHVTCAQKEGLLSEAAAEEDIADPFFAYCKQHADRLDRKWKRKNYLALQSYCKMSLQEREKQLSPEAQARINARLQQYRAKAELARSTRPQAWVPREKLPRPLTSSASAIRKLMRKAELMGISTDIFPVDNSDTSSSVDGRRKHKQPALTADFVNYYFERNMRMIQIQENMAEQKNIKDKLENEQEKLHVEYNKLCESLEELQNLNGKLRSEGQGIWALLGRITGQKLNIPAILRAPKERKPSKKEGGTQKTSTLPAVLYSCGICKKNHDQHLLLLCDTCKLHYHLGCLDPPLTRMPRKTKNSYWQCSECDQAGSSDMEADMAMETLPDGTKRSRRQIKEPVKFVPQDVPPEPKKIPIRNTRTRGRKRSFVPEEEKHEERVPRERRQRQSVLQKKPKAEDLRTECATCKGTGDNENLVRYPS

SEQ ID NO: 24939 - protein, 1699 aa, Homo sapiens
MEGSLAGSLAAPDRPQGPERLPGPAPRENIEGGAEAAEGEGGIFRSTRYLPVTKEGPRDILDGRGGISDGQPHPGLSEALPRVTSATHRISSCCWDGGSLDFRPGSPPPHLLGHFPGTPDGRGPWEHPLVQEAGEGILSERRFEDSVIVRTMKPHAELEGSRRFLHHRGEPRLLEKHAQGRPRFDWLQDEDEQGSPQDAGLHLDLPAQPPPLAPFRRVFVPVEDTPKTLDMAVVGGREDLEDLEGLAQPSEWGLPTSASEVATQTWTVNSEASVERLQPLLPPIRTGPYLCELLEEVAEGVASPDEDEDEEPAVFPCIECSIYFKQKEHLLEHMSQHRRAPGQEPPADLAPLACGECGWAFADPTALEQHRQLHQASREKIIEEIQKLKQVPGDEGREARLQCPKCVFGTNSSRAYVQHAKLHMREPPGQTTKEPFGGSSGAGSPSPEASALLYQPYGAAVGLSACVFCGFPAPSESLLREHVRLVHAHPHWEEDGEAYEEDPASQPGTSQDAHACFPDTAVDYFGKAEPSLAPMWRENPAGYDPSLAFGPGCQQLSIRDFPLSKPLLHGTGQRPLGRLAFPSTLASTPYSLQLGRNKSTVHPQGLGERRRPWSEEEEEEEEEEDVVLTSEMDFSPENGVFSPLATPSLIPQAALELKQAFREALQAVEATQGQQQQLRGMVPIVLVAKLGPQVMAAARVPPRLQPEELGLAGAHPLDFLLLDAPLGGPLGLDTLLDGDPAMALKHEERKCPYCPDRFHNGIGLANHVRGHLNRVGVSYNVRHFISAEEVKAIERRFSFQKKKKKVANFDPGTFSLMRCDFCGAGFDTRAGLSSHARAHLRDFGITNWELTVSPINILQELLATSAAEQPPSPLGREPGGPPGSFLTSRRPRLPLTVPFPPTWAEDPGPAYGDAQSLTTCEVCGACFETRKGLSSHARSHLRQLGVAESESSGAPIDLLYELVKQKGLPDAHLGLPPGLAKKSSSLKEVVAGAPRPGLLSLAKPLDAPAVNKAIKSPPGFSAKGLGHPPSSPLLKKTPLALAGSPTPKNPEDKSPQLSLSPRPASPKAQWPQSEDEGPLNLTSGPEPARDIRCEFCGEFFENRKGLSSHARSHLRQMGVTEWYVNGSPIDTLREILKRRTQSRPGGPPNPPGPSPKALAKMMGGAGPGSSLEARSPSDLHISPLAKKLPPPPGSPLGHSPTASPPPTARKMFPGLAAPSLPKKLKPEQIRVEIKREMLPGALHGELHPSEGPWGAPREDMTPLNLSSRAEPVRDIRCEFCGEFFENRKGLSSHARSHLRQMGVTEWSVNGSPIDTLREILKKKSKPCLIKKEPPAGDLAPALAEDGPPTVAPGPVQSPLPLSPLAGRPGKPGAGPAQVPRELSLTPITGAKPSATGYLGSVAAKRPLQEDRLLPAEVKAKTYIQTELPFKAKTLHEKTSHSSTEACCELCGLYFENRKALASHARAHLRQFGVTEWCVNGSPIETLSEWIKHRPQKVGAYRSYIQGGRPFTKKFRSAGHGRDSDKRPSLGLAPGGLAVVGRSAGGEPGPEAGRAADGGERPLAASPPGTVKAEEHQRQNINKFERRQARPPDASAARGGEDTNDLQQKLEEVRQPPPRVRPVPSLVPRPPQTSLVKFVGNIYTLKCRFCEVEFQGPLSIQEEWVRHLQRHILEMNFSKADPPPEESQAPQAQTAAAEAP

SEQ ID NO: 24940 - protein, 924 aa, Homo sapiens
MAVQPKETLQLESAAEVGFVRFFQGMPEKPTTTVRLFDRGDFYTAHGEDALLAAREVFKTQGVIKYMGPAGAKNLQSVVLSKMNFESFVKDLLLVRQYRVEVYKNRAGNKASKENDWYLAYKASPGNLSQFEDILFGNNDMSASIGVVGVKMSAVDGQRQVGVGYVDSIQRKLGLCEFPDNDQFSNLEALLIQIGPKECVLPGGETAGDMGKLRQIIQRGGILITERKKADFSTKDIYQDLNRLLKGKKGEQMNSAVLPEMENQVAVSSLSAVIKFLELLSDDSNFGQFELTTFDFSQYMKLDIAAVRALNLFQGSVEDTTGSQSLAALLNKCKTPQGQRLVNQWIKQPLMDKNRIEERLNLVEAFVEDAELRQTLQEDLLRRFPDLNRLAKKFQRQAANLQDCYRLYQGINQLPNVIQALEKHEGKHQKLLLAVFVTPLTDLRSDFSKFQEMIETTLDMDQVENHEFLVKPSFDPNLSELREIMNDLEKKMQSTLISAARDLGLDPGKQIKLDSSAQFGYYFRVTCKEEKVLRNNKNFSTVDIQKNGVKFTNSKLTSLNEEYTKNKTEYEEAQDAIVKEIVNISSGYVEPMQTLNDVLAQLDAVVSFAHVSNGAPVPYVRPAILEKGQGRIILKASRHACVEVQDEIAFIPNDVYFEKDKQMFHIITGPNMGGKSTYIRQTGVIVLMAQIGCFVPCESAEVSIVDCILARVGAGDSQLKGVSTFMAEMLETASILRSATKDSLIIIDELGRGTSTYDGFGLAWAISEYIATKIGAFCMFATHFHELTALANQIPTVNNLHVTALTTEETLTMLYQVKKGVCDQSFGIHVAELANFPKHVIECAKQKALELEEFQYIGESQGYDIMEPAAKKCYLERENLRVTEPKDQCLILLTWKRKLRGGKRSACSRPERQNQGSATPSASA

SEQ ID NO: 24941 - protein, 375 aa, Homo sapiens
DAPKAGQLEAWLEMNPGYEVAPRSDSEESGSEEEEEIKGLEWLVSLYNNNLNGILADEMGLGKTIQTIALITYLMEHKRINGPFLIIVPLSTLSNWAYEFDKWAPSVVKVSYKGSPAARRAFVPQLRSGKFNVLLTTYEYIIKDKHILAKIRWKYMIVDEGHRMKNHHCKLTQVLNTHYVAPRRLLLTGTPLQNKLPELWALLNFLLPTIFKSCSTFEQWFNAPFAMTGEKVDLNEEETILIIRRLHKVLRPFLLRRLKKEVEAQLPEKVEYVIKCDMSALQRVLYRHMQAKGVLLTDGSEKDKKGKGGTKTLMNTIMQLRKICNHPYMFQHIEESFSEHLGFTGGIVQGLDLYRASGKFELLDRILPKLRATNH

SEQ ID NO: 24942 - protein, 1358 aa, Homo sapiens
MERFFRSESRGAVRIKVLDVLSFVLLINRQFYEEELINSVVISQLSHIPEDKDHQVRKLATQLLVDLAEGCHTHHFNSLLDIIEKVMARSLSPPPELEERDVAAYSASLEDVKTAVLGLLVILQTKLYTLPASHATRVYEMLVSHIQLHYKHSYTLPIASSIRLQAFDFLLLLRADSLHRLGLPNKDGVVRFSPYCVCDYMEPERGSEKKTSGPLSPPTGPPGPAPAGPAVRLGSVPYSLLFRVLLQCLKQESDWKVLKLVLGRLPESLRYKVLIFTSPCSVDQLCSALCSMLSGPKTLERLRGAPEGFSRTDLHLAVVPVLTALISYHNYLDKTKQREMVYCLEQGLIHRCASQCVVALSICSVEMPDIIIKALPVLVVKLTHISATASMAVPLLEFLSTLARLPHLYRNFAAEQYASVFAISLPYTNPSKFNQYIVCLAHHVIAMWFIRCRLPFRKDFVPFITKGLRSNVLLSFDDTPEKDSFRARSTSLNERPKSLRIARPPKQGLNNSPPVKEFKESSAAEAFRCRSISVSEHVVRRIQTSLTSASLGSADENSVAQADDSLKNLHLELTETCLDMMARYVFSNFTAVPKRSPVGEFLLAGGRTKTWLVGNKLVTVTTSVGTGTRSLLGLDSGELQSGPESSSSPGVHVRQTKEAPAKLESQAGQQVSRGARDRVRSMSGGHGLRVGALDVPASQFLGSATSPGPRTAPAAKPEKASAGTRVPVQEKTNLAAYVPLLTQGWAEILVRRPTGNTSWLMSLENPLSPFSSDINNMPLQELSNALMAAERFKEHRDTALYKSLSVPAASTAKPPPLPRSNTVASFSSLYQSSCQGQLHRSVSWADSAVVMEEGSPGEVPVLVEPPGLEDVEAALGMDRRTDAYSRSSSVSSQEEKSLHAEELVGRGIPIERVVSSEGGRPSVDLSFQPSQPLSKSSSSPELQTLQDILGDPGDKADVGRLSPEVKARSQSGTLDGESAAWSASGEDSRGQPEGPLPSSSPRSPSGLRPRGYTISDSAPSRRGKRVERDALKSRATASNAEKVPGINPSFVFLQLYHSPFFGDESNKPILLPNESQSFERSVQLLDQIPSYDTHKIAVLYVGEGQSNSELAILSNEHGSYRYTEFLTGLGRLIELKDCQPDKVYLGGLDVCGEDGQFTYCWHDDIMQAVFHIATLMPTKDVDKHRCDKKRHLGNDFVSIVYNDSGEDFKLGTIKGQFNFVHVIVTPLDYECNLVSLQCRKDMEGLVDTSVAKIVSDRNLPFVARQMALHANMASQVHHSRSNPTDIYPSKWIARLRHIKRLRQRICEEAAYSNPSLPLVHPPSHSKAPAQTPAEPTPGYEVGQRKRLISSVEDFTEFV

SEQ ID NO: 24943 - protein, 387 aa, Homo sapiens
GRGTRRMSPATTGTFLLTGEISNDPITFNTNLMGYPDRPGWLRYIQRTPYSDGVLYGSPTAENVGKPTIIEITAYNRRTFETARHNLIINIMSAEDFPLPYQAEFFIKNMNVEEMLASEVLGDFLGAVKNVWQPERLNAINITSALDRGGRVPLPINDLKEGVYVMVGADVPFSSCLREVENPQNQLRCSQEMEPVITCDKKFRTQFYIDWCKISLVDKTKQVSTYQEVIRGEGILPDGGEYKPPSDSLKSRDYYTDFLITLAVPSAVALVLFLILAYIMCCRREGVIQLVHHSAIQKSTKELRDMSKNREIAWPLSTLPVFHPVTGEIIPPLHTDNYDSTNMPLMQTQQNLPHQTQIPQQQTTEIIFSITAFVNLRRFSFDNFSKI

SEQ ID NO: 24944 - protein, 416 aa, Homo sapiens
MDFRTACEETKTGICLLQDGNQEPFKVRLHLAKDILMIQEQDVICVSGEPFYSGGGAEHNIPVVVSKISKEQRAELSGLLFIGDAILQINGINVRKCRHEEVVQVLRNAGEEVTLTVSFLKRAPAFLKLPLNEDCACAPSDQSSGTSSPLCDSGLHLNYHPNNTDTLSCSSWPTSPGLRWEKRWCDLRLIPLLHSRFSQYVPGTDLSRQNAFQVIAVDGVCTGIIQCLSAEDCVDWLQAIATNISNLTKHNIKKINRNFPVNQQIVYMGWCEAREQDPLQDRVYSPTFLALRGSCLYKFLAPPVTTWDWTRAEKTFSVYEIMCKILKDSDLLDRRKQCFTVQSESGEDLYFSVELESDLAQWERAFQTATFLEVERIQCKTYACVLESHLMGLTIDFSTGFICFDAATKVMCSGQL

SEQ ID NO: 24945 - protein, 780 aa, Homo sapiens
MAVLLLLLRALRRGPGPGPRPLWGPGPAWSPGFPARPGRGRPYMASRPPGDLAEAGGRALQSLQLRLLTPTFEGINGLLLKQHLVQNPVRLWQLLGGTFYFNTSRLKQKNKEKDKSKGKAPEEDEEERRRRERDDQMYRERLRTLLVIAVVMSLLNALSTSGGSISWNDFVHEMLAKGEVQRVQVVPESDVVEVYLHPGAVVFGRPRLALMYRMQVANIDKFEEKLRAAEDELNIEAKDRIPVSYKRTGFFGNALYSVGMTAVGLAILWYVFRLAGMTGREGGFSAFNQLKMARFTIVDGKMGKGVSFKDVAGMHEAKLEVREFVDYLKSPERFLQLGAKVPKGALLLGPPGCGKTLLAKAVATEAQVPFLAMAGPEFVEVIGGLGAARVRSLFKEARARAPCIVYIDEIDAVGKKRSTTMSGFSNTEEEQTLNQLLVEMDGMGTTDHVIVLASTNRADILDGALMRPGRLDRHVFIDLPTLQERREIFEQHLKSLKLTQSSTFYSQRLAELTPGFSGADIANICNEAALHAAREGHTSVHTLNFEYAVERVLAGTAKKSKILSKEEQKVVAFHESGHALVGWMLEHTEAVMKMLPRDQHLFTKEQLFERMCMALGGRASEALSFNEVTSGAQDDLRKVTRIAYSMVKQFGMAPGIGPISFPEAQEGLMGIGRRPFSQGLQQMMDHEARLLVAKAYRHTEKVLQDNLDKLQALANALLEKEVINYEDIEALIGPPPHGPKKMIAPQRWIDAQREKQDLGEEETEETQQPPLGGEEPTWPK

SEQ ID NO: 24946 - protein, 455 aa, Homo sapiens
MQLPRWWELGDPCAWTGQGRGTRRMSPATTGTFLLTVYSIFSKVHSDRNVYPSAGVLFVHVLEREYFKGEFPPYPKPGEISNDPITFNTNLMGYPDRPGWLRYIQRTPYSDGVLYGSPTAENVGKPTIIEITAYNRRTFETARHNLIINIMSAEDGVLLSSPRLECNGTISANCNLRLLGSDFPLPYQAEFFIKNMNVEEMLASEVLGDFLGAVKNVWQPERLNAINITSALDRGGRVPLPINDLKEGVYVMVGADVPFSSCLREVENPQNQLRCSQEMEPVITCDKKFRTQFYIDWCKISLVDKTKQVSTYQEVIRGEGILPDGGEYKPPSDSLKSRDYYTDFLITLAVPSAVALVLFLILAYIMCCRREGVIQLVHHSAIQKSTKELRDMSKNREIAWPLSTLPVFHPVTGEIIPPLHTDNYDSTNMPLMQTQQNLPHQTQIPQQQTTGKWYP

SEQ ID NO: 24947 - protein, 3530 aa, Homo sapiens
MAKEEDEEKKAKKGKKGKKAPEPEKPKRSLKGTSRLFMGFRDRTPKISKKGQFRSASAFFWGLHTGPQKTKRKRKARTVLKSTSKLMTQMRMGKKKRAMKGKKPSFMVIRFPGRRGYGRLRPRARSLSKASTAINWLTKKFLLKKAEESGSEQATVDAWLQRSSSRMGSRKLPFPSGAEILRPGGRLRRFPRSRSIYASGEPLGFLPFEDEAPFHHSGSRKSLYGLEGFQDLGEYYDYHRDGDDYYDRQSLHRYEEQEPYLAGLGPYSPAWPPYGDHYYGYPPEDPYDYYHPDYYGGPFDPGYTYGYGYDDYEPPYAPPSGYSSPYSYHDGYEGEAHPYGYYLDPYAPYDAPYPPYDLPYHTPYDVPYFDPYGVHYTVPYAEGVYGGGDEAIYPPEVPYFYPEESASAFVYPWVPPPIPSPHNPYAHAMDDIAELEEPEDAGVERQGTSFRLPSAAFFEQQGMDKPARSKLSLIRKFRLFPRPQVKLFGKEKLEVPLPPSLDIPLPLGDADEEEDEEELPPVSAVPYGHPFWGFLTPRQRNLQRALSAFGAHRGLGFGPEFGRPVPRPATSLARFLKKTLSEKKPIARLRGSQKARAGGPAVREAAYKRFGYKLAGMDPEKPGTPIVLRRAQPRARSSNDARRPPAPQPAPRTLSHWSALLSPPVPPRPPSSGPPPAPPLSPALSGLPRPASPYGSLRRHPPPWAAPAHVPPAPQASWWAFVEPPAVSPEVPPDLLAFPGPRPSFRGSRRRGAAFGFPGASPRASRRRAWSPLASPQPSLRSSPGLGYCSPLAPPSPQLSLRTGPFQPPFLPPARRPRSLQESPAPRRAAGRLGPPGSPLPGSPRPPSPPLGLCHSPRRSSLNLPSRLPHTWRRLSEPPTRAVKPQVRLPFHRPPRAGAWRAPLEHRESPREPEDSETPWTVPPLAPSWDVDMPPTQRPPSPWPGGAGSRRGFSRPPPVPENPFLQLLGPVPSPTLQPEDPAADMTRVFLGRHHEPGPGQLTKSAGPTPEKPEEEATLGDPQLPAETKPPTPAPPKDVTPPKDITPPKDVLPEQKTLRPSLSYPLAACDQTRATWPPWHRWGTLPQAAAPLAPIRAPEPLPKGGERRQAAPGRFAVVMPRVQKLSSFQRVGPATLKPQVQPIQDPKPRACSLRWSCLWLRADAYGPWPRVHTHPQSCHLGPGAACLSLRGSWEEVGPPSWRNKMHSIRNLPSMRFREQHGEDGVEDMTQLEDLQETTVLSNLKIRFERNLIYTYIGSILVSVNPYQMFGIYGPEQVQQYNGRALGENPPHLFAVANLAFAKMLDAKQNQCIIISGESGSGKTEATKLILRYLAAMNQKREVMQQIKILEATPLLESFGNAKTVRNDNSSRFGKFVEIFLEGGVISGAITSQYLLEKSRIVFQAKNERNYHIFYELLAGLPAQLRQAFSLQEAETYYYLNQGGNCEIAGKSDADDFRRLLAAMEVLGFSSEDQDSIFRILASILHLGNVYFEKYETDAQEVASVVSAREIQAVAELLQISPEGLQKAITFKVTETMREKIFTPLTVESAVDARDAIAKVLYALLFSWLITRVNALVSPRQDTLSIAILDIYGFEDLSFNSFEQLCINYANENLQYLFNKIVFQEEQEEYIREQIDWQEITFADNQPCINLISLKPYGILRILDDQCCFPQATDHTFLQKCHYHHGANPLYSKPKMPLPEFTIKHYAGKVTYQVHKFLDKNHDQVRQDVLDLFVRSRTRVVAHLFSSHAPQAAPQRLGKSSSVTRLYKAHTVAAKFQQSLLDLVEKMERCNPLFMRCLKPNHKKEPGLFEPDVVMAQLRYSGVLETVRIRKEGFPVRLPFQGFIDRYCCLVALKHDLPANGDMCVSVLSRLCKVMPNMYRVGVSKLFLKEHLYQLLESMREHVLNLAALTLQRCLRGFFIKRRFRSLRHKIILLQSRARGYLARQRYQQMRRSLVKFRSLVHAYVSRRRYLKLRAEWRCQVEGALLWEQEELSKREVVAVGHLEVPAELAGLLQAVAGLGLAQVPQVAPVRTPRLQAEPRVTLPLDINNYPMAKFVQCHFKEPAFGMLTVPLRTPLTQLPAEHHAEAVSIFKLILRFMGDPHLHGARENIFGNYIVQKGLAVPELRDEILAQLANQVWHNHNAHNAERGWLLLAACLSGFAPSPCFNKYLLKFVSDYGRNGFQAVCQHRLMQAMGRAQQQGSGAARTLPPTQLEWTATYEKASMALDVGCFNGDQFSCPVHSWSTGEEVAGDILRHRGLADGWRGWTVAMKNGVQWAELAGHDYVLDLVSDLELLRDFPRQKSYFIVGTEGPAASRGGPKVVFGNSWDSDEDMSTRPQPQEHMPKVLDSDGYSSHNQDGTNGETEAQRGTATHQESDSLGEPAVPHKGLDCYLDSLFDPVLSYGDADLEKPTAIAYRMKGGGQPGGGSSSGTEDTPRRPPEPKPIPGLDASTLALQQAFIHKQAVLLAREMTLQATALQQQPLSAALRSLPAEKPPAPEAQPTSVGTGPPAKPVLLRATPKPLAPAPLAKAPRLPIKPVAAPVLAQDQASPETTSPSPELVRYSTLNSEHFPQPTQQIKNIVRQYQQPFRGGRPEALRKDGGKVFMKRPDPHEEALMILKGQMTHLAAAPGTQVSREAVALVKPVTSAPRPSMAPTSALPSRSLEPPEELTQTRLHRLINPNFYGYQDAPWKIFLRKEVFYPKDSYSHPVQLDLLFRQILHDTLSEACLRISEDERLRMKALFAQNQLDTQKPLVTESVKRAVVSTARDTWEVYFSRIFPATGSVGTGVQLLAVSHVGIKLLRMVKGGQEAGGQLRVLRAYSFADILFVTMPSQNMLEFNLASEKVILFSARAHQVKTLVDDFILELKKDSDYVVAVRNFLPEDPALLAFHKGDIIHLQPLEPPRVGYSAGCVVRRKVVYLEELRRRGPDFGWRFGTIHGRVGRFPSELVQPAAAPDFLQLPTEPGRGRAAAVAAAVASAAAAQEVGRRREGPPVRARSADHGEDALALPPYTMLEFAQKYFRDPQRRPQDGLRLKSKEPRESRTLEDMLCFTKTPLQESLIELSDSSLSKMATDMFLAVMRFMGDAPLKGQSDLDVLCNLLKLCGDHEVMRDECYCQVVKQITDNTSSKQDSCQRGWRLLYIVTAYHSCSEVLHPHLTRFLQDVSRTPGLPFQGIAKACEQNLQKTLRFGGRLELPSSIELRAMLAGRSSKRQLFLLPGGLERHLKIKTCTVALDVVEEICAEMALTRPEAFNEYVIFVVTNRGQHVCPLSRRAYILDVASEMEQVDGGYMLWFRRVLWDQPLKFENELYVTMHYNQVLPDYLKGLFSSVPASRPSEQLLQQVSKLASLQHRAKDHFYLPSVREVQEYIPAQLYRTTAGSTWLNLVSQHRQQTQALSPHQARAQFLGLLSALPMFGSSFFFIQSCSNIAVPAPCILAINHNGLNFLSTETHELMVKFPLKEIQSTRTQRPTANSSYPYVEIALGDVAAQRTLQLQLEQGLELCRVVAVHVENLLSAHEKRLTLPPSEITLL

SEQ ID NO: 24948 - protein, 925 aa, Homo sapiens
MRLHLLLLLALCGAGTTAAELSYSLRGNWSICNGNGSLELPGAVPGCVHSALFQQGLIQDSYYRFNDLNYRWVSLDNWTYSKEFKIPFEISKWQKVNLILEGVDTVSKILFNEVTIGETDNMFNRYSFDITNVVRDVNSIELRFQSAVLYAAQQSKAHTRYQVPPDCPPLVQKGECHVNFVRKEQCSFSWDWGPSFPTQGIWKDVRIEAYNICHLNYFTFSPIYDKSAQEWNLEIESTFDVVSSKPVGGQVIVAIPKLQTQQTYSIELQPGKRIVELFVNISKNITVETWWPHGHGNQTGYNMTVLFELDGGLNIEKSAKVYFRTVELIEEPIKGSPGLSFYFKINGFPIFLKGSNWIPADSFQDRVTSELFHKKMKFFSRHSHGIIGSIFFLFKCSSPLPAGAGLAVVLQPNWANWLRLLLQSVVDANMNTLRVWGGGIYEQDEFYELCDELGIMVWQDFMFACALYPTDQGFLDSVTAEVAYQIKRLKSHPSIIIWSGNNENEEALMMNWYHISFTDRPIYIKDYVTLYVKNIRELVLAGDKSRPFITSSPTNGAETVAEAWVSQNPNSNYFGDVHFYDYISDCWNWKVFPKARFASEYGYQSWPSFSTLEKVSSTEDWSFNSKFSLHRQHHEGGNKQMLYQAGLHFKLPQSTDPLRTFKDTIYLTQVMQAQCVKTETEFYRRSRSEIVDQQGHTMGALYWQLNDIWQAPSWASLEYGGKWKMLHYFAQNFFAPLLPVGFENENTFYIYGVSDLHSDYSMTLSVRVHTWSSLEPVCSRVTERFVMKGGEAVCLYEEPVSELLRRCGNCTRESCVVSFYLSADHELLSPTNYHFLSSPKEAVGLCKAQITAIISQQGDIFVFDLETSAVAPFVWLDVGSIPGRFSDNGFLMTEKTRTILFYPWEPTSKNELEQSFHVTSLTDIY

SEQ ID NO: 24949 - protein, 339 aa, Homo sapiens
MSSNKEQRSAVFVILFALITILILYSSNSANEVFHYGSLRGRSRRPVNLKKWSITDGYVPILGNKTLPSRCHQCVIVSSSSHLLGTKLGPEIERAECTIRMNDAPTTGYSADVGNKTTYRVVAHSSVFRVLRRPQEFVNRTPETVFIFWGPPSKMQKPQGSLVRVIQRAGLVFPNMEAYAVSPGRMRQFDDLFRGETGKDREKSHSWLSTGWFTMVIAVELCDHVHVYGMVPPNYCSQRPRLQRMPYHYYEPKGPDECVTYIQNEHSRKGNHHRFITEKRVFSSWAQLNKHTYAPASCPVSPGSSTAFWSSAACGLRTTSSGWGLPVKRSSASSAASGQ

SEQ ID NO: 24950 - protein, 1187 aa, Homo sapiens
MRTTKVYKLVIHKKGFGGSDDELVVNPKVFPHIKLGDIVEIAHPNDEYSPLLLQVKSLKEDLQKETISVDQTVTQVFRLRPYQDVYVNVVDPKDVTLDLVELTFKDQYIGRGDMWRLKKSLVSTCAYITQKVEFAGIRAQAGELWVKNEKVMCGYISEDTRVVFRSTSAMVYIFIQMSCEMWDFDIYGDLYFEKAVNGFLADLFTKWKEKNCSHEVTVVLFSRTFYDAKSVDEFPEINRASIRQDHKGRFYEDFYKVVVQNERREEWTSLLVTIKKLFIQYPVLVRLEQAEGFPQGDNSTSAQGNYLEAINLSFNVFDKHYINRNFDRTGQMSVVITPGVGVFEVDRLLMILTKQRMIDNGIGVDLVCMGEQPLHAVPLFKLHNRSAPRDSRLGDDYNIPHWINHSFYTSKSQLFCNSFTPRIKLAGKKPASEKAKNGRDTSLGSPKESENALPIQVDYDAYDAQVFRLPGPSRAQCLTTCRSVRERESHSRKSASSCDVSSSPSLPSRTLPTEEVRSQASDDSSLGKSANILMIPHPHLHQYEVSSSLGYTSTRDVLENMMEPPQRDSSAPGRFHVGSAESMLHVRPGGYTPQRALINPFAPSRMPMKLTSNRRRWMHTFPVGPSGEAIQIHHQTRQNMAELQGSGQRDPTHSSAELLELAYHEAAGRHSNSRQPGDGMSFLNFSGTEELSVGLLSNSGAGMNPRTQNKDSLEDSVSTSPDPILTLSAPPVVPGFCCTVGVDWKSLTTPACLPLTTDYFPDRQGLQNDYTEGCYDLLPEADIDRRDEDGVQMTAQQVFEEFICQRLMQGYQIIVQPKTQKPNPAVPPPLSSSPLYSRGLVSRNRPEEEDQYWLSMGRTFHKVTLKDKMITVTRYLPKYPYESAQIHYTYSLCPSHSDSEFVSCWVEFSHERLEEYKWNYLDQYICSAGSEDFSLIESLKFWRTRFLLLPACVTATKRITEGEAHCDIYGDRPRADEDEWQLLDGFVRFVEGLNRIRRRHRSDRMMRKGTAMKGLQMTGPISTHSLESTAPPVGKKGTSALSALLEMEASQKCLGEQQAAVHGGKSSAQSAESSSVAMTPTYMDSPRKDGAFFMEFVRSPRTASSAFYPQVSVDQTATPMLDGTSLGICTGQSMDRGNSQTFGNSQNIGEQGYSSTNSSDSSGHAAARHHLAHSRSGRLRQLPAQVV

SEQ ID NO: 24951 - protein, 1009 aa, Homo sapiens
MALIMEPVSKWSPSQVVDWMKGLDDCLQQYIKNFEREKISGDQLLRITHQELEDLGVSRIGHQELILEAVDLLCALNYGLETENLKTLSHKLNASAKNLQNFITGRRRSGHYDGRTSRKLPNDFLTSVVDLIGAAKSLLAWLDRSPFAAVTDYSVTRNNVIQLCLELTTIVQQDCTVYETENKILHVCKTLSGVCDHIISLSSDPLVSQSAHLEVIQLANIKPSEGLGMYIKSTYDGLHVITGTTENSPADRCKKIHAGDEVIQVNHQTVPLIPRSPTSSVATPSSTISTPTKRDSSALQDLYIPPPPAEPYIPRDEKGNLPCEDLRGHMVGKPVHKGSESPNSFLDQEYRKRFNIVEEDTVLYCYEYEKGRSSSQGRRESTPTYGKLRPISMPVEYNWVGDYEDPNKMKRDSRRENSLLRYMSNEKIAQEEYMFQRNSKKDTGKKSKKKGDKSNSPTHYSLLPSLQMDALRQDIMGTPVPETTLYHTFQQSSLQHKSKKKNKVWFRRAQPPCAKAASFFFSAIIIQGPIAGKSKRRISCKDLGRGDCEGWLWKKKDAKSYFSQKWKKYWFVLKDASLYWYINEEDEKAEGFISLPEFKIDRASECRKKYAFKACHPKIKSFYFAAEHLDDMNRWLNRINMLTAGYAERERIKQEQDYWSESDKEEADTPSTPKQDSPPPPYDTYPRPPSMSCASPYVEAKHSRLSSTETSQSQSSHEEFRQEVTGSSAVSPIRKTASQRRSWQDLIETPLTSSGLHYLQTLPLEDSVFSDSAAISPEHRRQSTLPTQKCHLQDHYGPYPLAESERMQVLNGNGGKPRSFTLPRDSGFNHCCLNAPVSACDPQDDVQPPEVEEEEEEEEEEGEAAGENIGEKSESREEKLGDSLQDLYRALEQASLSPLGEHRISTKMEYKLSFIKRCNDPVMNEKLHRLRILKSTLKAREGEVAIIDKVLDNPDLTSKEFQQWKQMYLDLFLDICQNTTSNDPLSISSEVDVITSSLAHTHSYIETHV

SEQ ID NO: 24952 - protein, 1842 aa, Homo sapiens
MQRPAELSVFRSKEVRRKGACLQKQKSLTNLSLTSDGERRPTVRISNWFGNAAKASQREANYAERRSLSKFLSRSVQSLYHTSSSAWNLLPAGGSQSDSEDLEELSARRGLEGESDEDSRSEDENVSSKPSSISRSWAEEEGESCLREGTAHLDEEVILTMLGDLEQALYTDLLGEDPETRRMRTVKNIADLRQNLEETMSSLRGTQISHSTLETTFDSTVTTEVNGRTIPNLTSRPTPMTWRLGQACPRLQAGDAPSLGAGYPRSGTSRFIHTDPSRFMYTTPLRRAAVSRLGNMSQIDMSEKASSDLDMSSEVDVGGYMSDGDILGKSLRTDDINSGYMTDGGLNLYTRSLNRIPDTATSRDIIQRGVHDVTVDADSWDDSSSVSSGLSDTLDNISTDDLNTTSSVSSYSNITVPSRKNTQLRTDSEKRSTTDETWDSPEELKKPEEDFDSHGDAGGKWKTVSSGLPEDPEKAGQKASLSVSQTGSWRRGMSAQGGAPSRQKAGTSALKTPGKTDDAKASEKGKAPLKGSSLQRSPSDAGKSSGDEGKKPPSGIGRSTATSSFGFKKPSGVGSSAMITSSGATITSGSATLGKIPKSAAIGGKSNAGRKTSLDGSQNQDDVVLHVSSKTTLQYRSLPRPSKSSTSGIPGRGGHRSSTSSIDSNVSSKSAGATTSKLREPTKIGSGRSSPVTVNQTDKEKEKVAVSDSESVSLSGSPKSSPTSASACGAQGLRQPGSKYPDIASPTFRRLFGAKAGGKSASAPNTEGVKSSSVMPSPSTTLARQGSLESPSSGTGSMGSAGGLSGSSSPLFNKPSDLTTDVISLSHSLASSPASVHSFTSGGLVWAANMSSSSAGSKDTPSYQSMTSLHTSSESIDLPLSHHGSLSGLTTGTHEVQSLLMRTGSVRSTLSERYTPSSRQANQEEGKEWLRSHSTGGLQDTGNQSPLVSPSAMSSSAAGKYHFSNLVSPTNLSQFNLPGPSMMRSNSIPAQDSSFDLYDDSQLCGSATSLEERPRAISHSGSFRDSMEEVHGSSLSLVSSTSSLYSTAEEKAHSEQIHKLRRELVASQEKVATLTSQLSANAHLVAAFEKSLGNMTGRLQSLTMTAEQKESELIELRETIEMLKAQNSAAQAAIQGALNGPDHPPKDLRIRRQHSSESVSSINSATSHSSIGSGNDADSKKKKKKNWLRSSFKQAFGKKKSTKPPSSHSDIEELTDSSLPASPKLPHNAGDCGSASMKPSQSASAICECTEAEAEIILQLKSELREKELKLTDIRLEALSSAHHLDQIREAMNRMQNEIEILKAENDRLKAETGNTAKPTRPPSESSSSTSSSSSRQSLGLSLNNLNITEAVSSDILLDDAGDATGHKDGRSVKIIVSISKGYGRAKDQKSQAYLIGSIGVSGKTKWDVLDGVIRRLFKEYVFRIDTSTSLGLSSDCIASYCIGDLIRSHNLEVPELLPCGYLVGDNNIITVNLKGVEENSLDSFVFDTLIPKPITQRYFNLLMEHHRIILSGPSGTGKTYLANKLAEYVITKSGRKKTEDAIATFNVDHKSSKELQQYLANLAEQCSADNNGVELPVVIILDNLHHVGSLSDIFNGFLNCKYNKCPYIIGTMNQGVSSSPNLELHHNFRWVLCANHTEPVKGFLGRYLRRKLIEIEIERNIRNNDLVKIIDWIPKTWHHLNSFLETHSSSDVTIGPRLFLPCPMDVEGSRVWFMDLWNYSLVPYILEAVREGLQMYGKRTPWEDPSKWVLDTYPWSSATLPQESPALLQLRPEDVGYESCTSTKEATTSKHIPQTDTEGDPLMNMLMKLQEAANYSSTQSCDSESTSHHEDILDSSLESTL

SEQ ID NO: 24953 - protein, 1579 aa, Homo sapiens
MASSAREHLLFVRRRNPQMRYTLSPENLQSLAAQSSMPENMTLQRANSDTDLVTSESRSSLTASMYEYTLGQAQNLIIFWDIKEEVDPSDWIGLYHIDENSPANFWDSKNRGVTGTQKGQIVWRIEPGPYFMEPEIKICFKYYHGISGALRATTPCITVKNPAVMMGAEGMEGGASGNLHSRKLVSFTLSDLRAVGLKKGMFFNPDPYLKMSIQPGKKSSFPTCAHHGQERRSTIISNTTNPIWHREKYSFFALLTDVLEIEIKDKFAKSRPIIKRFLGKLTIPVQRLLERQAIGDQMLSYNLGRRLPADHVSGYLQFKVEVTSSVHEEMLFSHSDASPEAVGTILGVNSVNGDLGSPSDDEDMPGSHHDSQVCSNGPVSEDSAADGTPKHSFRTSSTLEIDTEELTSTSSRTSPPRGRQDSLNDYLDAIEHNGHSRPGTATCSERSMGASPKLRSSFPTDTRLNAMLHIDSDEEDHEFQQDLGYPSSLEEEGGLIMFSRASRADDGSLTSQTKLEDNPVENEEASTHEAASFEDKPENLPELAESSLPAGPAPEEGEGGPEPQPSADQGSAELCGSQEVDQPTSGADTGTSDASGGSRRAVSETESLDQGSEPSQVSSETEPSDPARTESVSEASTRPEGESDLECADSSCNESVTTQLSSVDTRCSSLESARFPETPAFSSQEEEDGACAAEPTSSGPAEGSQESVCTAGSLPVVQVPSGEDEGPGAESATVPDQEELGEVWQRRGSLEGAAAAAESPPQEEGSAGEAQGTCEGATAQEEGATGGSQANGHQPLRSLPSVRQDVSRYQRVDEALPPNWEARIDSHGRIFYVDHVNRTTTWQRPTAPPAPQVLQRSNSIQQMEQLNRRYQSIRRTMTNERPEENTNAIDGAGEEADFHQASADFRRENILPHSTSRSRITLLLQSPPVKFLISPEFFTVLHSNPSAYRMFTNNTCLKHMITKVRRDTHHFERYQHNRDLVGFLNMFANKQLELPRGWEMKHDHQGKAFFVDHNSRTTTFIDPRLPLQSSRPTSALVHRQHLTRQRSHSAGEVGEDSRHAGPPVLPRPSSTFNTVSRPQYQDMVPVAYNDKIVAFLRQPNIFEILQERQPDLTRNHSLREKIQFIRTEGTPGLVRLSSDADLVMLLSLFEEEIMSYVPPHALLHPSYCQSPRGSPVSSPQNSPGTQRANARAPAPYKRDFEAKLRNFYRKLETKGYGQGPGKLKLIIRRDHLLEDAFNQIMGYSRKDLQRNKLYVTFVGEEGLDYSGPSREFFFLVSRELFNPYYGLFEYSANDTYTVQISPMSAFVDNHHEWFRFSGRILGLALIHQYLLDAFFTRPFYKALLRILCDLSDLEYLDEEFHQSLQWMKDNDIHDILDLTFTVNEEVFGQITERELKPGGANIPVTEKNKKEYIERMVKWRIERGVVQQTESLVRGFYEVVDARLVSVFDARELELVIAGTAEIDLSDWRNNTEYRGGYHDNHIVIRWFWAAVERFNNEQRLRLLQFVTGTSSIPYEGFASLRGSNGPRRFCVEKWGKITALPRAHTCFNRLDLPPYPSFSMLYEKLLTAVEETSTFGLE

SEQ ID NO: 24954 - protein, 841 aa, Homo sapiens
MKLWIHLFYSSLLACISLHSQTPVLSSRGSCDSLCNCEEKDGTMLINCEAKGIKMVSEISVPPSRPFQLSLLNNGLTMLHTNDFSGLTNAISIHLGFNNIADIEIGAFNGLGLLKQLHINHNSLEILKEDTFHGLENLEFLQADNNFITVIEPSAFSKLNRLKVLILNDNAIESLPPNIFRFVPLTHLDLRGNQLQTLPYVGFLEHIGRILDLQLEDNKWACNCDLLQLKTWLENMPPQSIIGDVVCNSPPFFKGSILSRLKKESICPTPPVYEEHEDPSGSLHLAATSSINDSRMSTKTTSILKLPTKAPGLIPYITKPSTQLPGPYCPIPCNCKVLSPSGLLIHCQERNIESLSDLRPPPQNPRKLILAGNIIHSLMKSDLVEYFTLEMLHLGNNRIEVLEEGSFMNLTRLQKLYLNGNHLTKLSKGMFLGLHNLEYLYLEYNAIKEILPGTFNPMPKLKVLYLNNNLLQVLPPHIFSGVPLTKVNLKTNQFTHLPVSNILDDLDLLTQIDLEDNPWDCSCDLVGLQQWIQKLSKNTVTDDILCTSPGHLDKKELKALNSEILCPGLVNNPSMPTQTSYLMVTTPATTTNTADTILRSLTDAVPLSVLILGLLIMFITIVFCAAGIVVLVLHRRRRYKKKQVDEQMRDNSPVHLQYSMYGHKTTHHTTERPSASLYEQHMVSPMVHVYRSPSFGPKHLEEEEERNEKEGSDAKHLQRSLLEQENHSPLTGSNMKYKTTNQSTEFLSFQDASSLYRNILEKERELQQLGITEYLRKNIAQLQPDMEAHYPGAHEELKLMETLMYSRPRKVLVEQTKNEYFELKANLHAEPDYLEVLEQQT

SEQ ID NO: 24955 - protein, 240 aa, Homo sapiens
MNQGSGLDLLKISYGKGARRKNRFKGSDGSTSSDTTSNSFVRQGSADSYTSRPSDSDVSLEEDREAVRREAERQAQAQLEKAKTKPVAFAVRTNVSYSAAHEDDVPVPGMAISFEAKDFLHVKEKFNNDWWIGRLVKEGCEIGFIPSPVKLENMRLQHEQRAKQGKFYSSKSGGNSSSSLGDIVPSSRKSTPPSSAKQKQKSVQNLQMNKTSGKLQACFGGLLQSTLLRMMWYLPCDQWS

SEQ ID NO: 24956 - protein, 800 aa, Homo sapiens
MLPVYQEVKPNPLQDANLCSRVFFWWLNPLFKIGHKRRLEEDDMYSVLPEDRSQHLGEELQGFWDKEVLRAENDAQKPSLTRAIIKCYWKSYLVLGIFTLIEESAKVIQPIFLGKIINYFENYDPMDSVALNTAYAYATVLTFCTLILAILHHLYFYHVQCAGMRLRVAMCHMIYRKALRLSNMAMGKTTTGQIVNLLSNDVNKFDQVTVFLHFLWAGPLQAIAVTALLWMEIGISCLAGMAVLIILLPLQSCFGKLFSSLRSKTATFTDARIRTMNEVITGIRIIKMYAWEKSFSNLITNLRKKEISKILRSSCLRGMNLASFFSASKIIVFVTFTTYVLLGSVITASRVFVAVTLYGAVRLTVTLFFPSAIERVSEAIVSIRRIQTFLLLDEISQRNRQLPSDGKKMVHVQDFTAFWDKASETPTLQGLSFTVRPGELLAVVGPVGAGKSSLLSAVLGELAPSHGLVSVHGRIAYVSQQPWVFSGTLRSNILFGKKYEKERYEKVIKACALKKDLQLLEDGDLTVIGDRGTTLSGGQKARVNLARAVYQDADIYLLDDPLSAVDAEVSRHLFELCICQILHEKITILVTHQLQYLKAASQILILKDGKMVQKGTYTEFLKSGIDFGSLLKKDNEESEQPPVPGTPTLRNRTFSESSVWSQQSSRPSLKDGALESQDTENVPVTLSEENRSEGKVGFQAYKNYFRAGAHWIVFIFLILLNTAAQVAYVLQDWWLSYWANKQSMLNVTVNGGGNVTEKLDLNWYLGIYSATWAFSTRKRFNCSYRSFWHSKISIGILRPC

SEQ ID NO: 24957 - protein, 980 aa, Homo sapiens
MPLAFCGSENHSAAYRVDQGVLNNGCFVDALNVVPHVFLLFITFPILFIGWGSQSSKVHIHHSTWLHFPGHNLRWILTFMLLFVLVCEIAEGILSDGVTESHHLHLYMPAGMAFMAAVTSVVYYHNIETSNFPKLLIALLVYWTLAFITKTIKFVKFLDHAIGFSQLRFCLTGLLVILYGMLLLVEVNVIRVRRYIFFKTPREVKPPEDLQDLGVRFLQPFVNLLSKGTYWWMNAFIKTAHKKPIDLRAIGKLPIAMRALTNYQRLCEAFDAQRKDIQGTQGARAIWQALSHAFGRRLVLSSTFRILADLLGFAGPLCIFGIVDHLGKENDVFQPKTQFLGVYFVSSQEFLANAYVLAVLLFLALLLQRTFLQASYYVAIETGINLRGAIQTKIYNKIMHLSTSNLSMGEMTAGQICNLVAIDTNQLMWFFFLCPNLWAMPVQIIVGVILLYYILGVSALIGAAVIILLAPVQYFVATKLSQAQRSTLEYSNERLKQTNEMLRGIKLLKLYAWENIFRTRVETTRRKEMTSLRAFAIYTSISIFMNTAIPIAAVLITFVGHVSFFKEADFSPSVAFASLSLFHILVTPLFLLSSVVRSTVKALVSVQKLSEFLSSAEIREEQCAPHEPTPQGPASKYQAVPLRVVNRKRPAREDCRGLTGPLQSLVPSADGDADNCCVQIMGGYFTWTPDGIPTLSNITIRIPRGQLTMIVGQVGCGKSSLLLAALGEMQKVSGAVFWSSSLPDSEIGEDPSPERETATDLDIRKRGPVAYASQKPWLLNATVEENIIFESPFNKQRYKMVIEACSLQPDIDILPHGDQTQIGERGINLSGGQRQRISVARALYQHANVVFLDDPFSALDIHLSDHLMQAGILELLRDDKRTVVLVTHKLQYLPHADWIIAMKDGTIQREGTLKDFQRSECQLFEHWKTLMNRQDQELEKETVTERKATEPPQGLSRAMSSRDGLLQDEEEEEVSGDKMP

SEQ ID NO: 24958 - protein, 1685 aa, Homo sapiens
FDEFNRLEERMLSAVSQQVQCIQEALREHSNPNYDKTSAPITCELLNKQVKVSPDMAIFITMNPGYAGRSNLPDNLKKLFRSLAMTKPDRQLIAQVMLYSQGFRTAEVLANKIVPFFKLCDEQLSSQSHYDFGLRALKSVLVSAGNVKRERIQKIKREKEERGEAVDEGEIAENLPEQEILIQSVCETMVPKLVAEDIPLLFSLLSDVFPGVQYHRGEMTALREELKKVCQEMYLTYGDGEEVGGMWVEKVLQLYQITQINHGLMMVGPSGSGKSMAWRVLLKALERLEGVEGVAHIIDPKAISKDHLYGTLDPNTREWTDGLFTHVLRKIIDSVRGELQKRQWIVFDGDVDPEWVENLNSVLDDNKLLTLPNGERLSLPPNVRIMFEVQDLKYATLATVSRCGMVWFSEDVLSTDMIFNNFLARLRSIPLDEGEDEAQRRRKGKEDEGEEAASPMLQIQRDAATIMQPYFTSNGLVTKALEHAFQLEHIMDLTRLRCLGSLFSMLHQACRNVAQYNANHPDFPMQIEQLERYIQRYLVYAILWSLSGDSRLKMRAELGEYIRRITTVPLPTAPNIPIIDYEVSISGEWSPWQAKVPQIEVETHKVAAPDVVVPTLDTVRHEALLYTWLAEHKPLVLCGPPGSGKTMTLFSALRALPDMEVVGLNFSSATTPELLLKTFDHYCEYRRTPNGVVLAPVQLGKWLVLFCDEINLPDMDKYGTQRVISFIRQMVEHGGFYRTSDQTWVKLERIQFVGACNPPTDPGRKPLSHRFLRHVPVVYVDYPGPASLTQIYGTFNRAMLRLIPSLRTYAEPLTAAMVEFYTMSQERFTQDTQPHYIYSPREMTRWVRGIFEALRPLETLPVEGLIRIWAHEALRLFQDRLVEDEERRWTDENIDTVALKHFPNIDREKAMSRPILYSNWLSKDYIPVDQEELRDYVKARLKVFYEEELDVPLVLFNEVLDHVLRIDRIFRQPQGHLLLIGVSGAGKTTLSRFVAWMNGLSVYQIKVHRKYTGEDFDEDLRTVLRRSGCKNEKIAFIMDESNVLDSGFLERMNTLLANGEVPGLFEGDEYATLMTQCKEGAQKEGLMLDSHEELYKWFTSQVIRNLHVVFTMNPSSEGLKDRAATSPALFNRCVLNWFGDWSTEALYQVGKEFTSKMDLEKPNYIVPDYMPVVYDKLPQPPSHREAIVNSCVFVHQTLHQANARLAKRGGRTMAITPRHYLDFINHYANLFHEKRSELEEQQMHLNVGLRKIKETVDQVEELRRDLRIKSQELEVKNAAANDKLKKMVKDQQEAEKKKVMSQEIQEQLHKQQEVIADKQMSVKEDLDKVEPAVIEAQNAVKSIKKQHLVEVRSMANPPAAVKLALESICLLLGESTTDWKQIRSIIMRENFIPTIVNFSAEEISDAIREKMKKNYMSNPSYNYEIVNRASLACGPMVKWAIAQLNYADMLKRVEPLRNELQKLEDDAKDNQQKANEVEQMIRDLEASIARYKEEYAVLISEAQAIKADLAAVEAKVNRSTALLKSLSAERERWEKTSETFKNQMSTIAGDCLLSAAFIAYAGYFDQQMRQNLFTTWSHHLQQANIQFRTDIARTEYLSNADERLRWQASSLPADDLCTENAIMLKRFNRYPLIIDPSGQATEFIMNEYKDRKITRTSFLDDAFRKNLESALRFGNPLLVQVGVGL

SEQ ID NO: 24959 - protein, 1152 aa, Homo sapiens
MREPEELMPDSGAVFTFGKSKFAENNPGKFWFKNDVPVHLSCGDEHSAVVTGNNKLYMFGSNNWGQLGLGSKSAISKPTCVKALKPEKVKLAACGRNHTLVSTEGGNVYATGGNNEGQLGLGDTEERNTFHVISFFTSEHKIKQLSAGSNTSAALTEDGRLFMWGDNSEGQIGLKNVSNVCVPQQVTIGKPVSWISCGYYHSAFVTTDGELYVFGEPENGKLGLPNQLLGNHRTPQLVSEIPEKVIQVACGGEHTVVLTENAVYTFGLGQFGQLGLGTFLFETSEPKVIENIRDQTISYISCGENHTALITDIGLMYTFGDGRHGKLGLGLENFTNHFIPTLCSNFLRFIVKLVACGGCHMVVFAAPHRGVAKEIEFDEINDTCLSVATFLPYSSLTSGNVLQRTLSARMRRRERERSPDSFSMRRTLPPIEGTLGLSACFLPNSVFPRCSERNLQESVLSEQDLMQPEEPDYLLDEMTKEAEIDNSSTVESLGETTDILNMTHIMSLNSNEKSLKLSPVQKQKKQQTIGELTQDTALTENDDSDEYEEMSEMKEGKACKQHVSQGIFMTQPATTIEAFSDEEVEIPEEKEGAEDSKGNGIEEQEVEANEENVKVHGGRKEKTEILSDDLTDKAEVSEGKAKSVGEAEDGPEGRGDGTCEEGSSGAEHWQDEEREKGEKDKGRGEMERPGEGEKELAEKEEWKKRDGEEQEQKEREQGHQKERNQEMEEGGEEEHGEGEEEEGDREEEEEKEGEGKEEGEGEEVEGEREKEEGERKKEERAGKEEKGEEEGDQGEGEEEETEGRGEEKEEGGEVEGGEVEEGKGEREEEEEEGEGEEEEGEGEEEEGEGEEEEGEGKGEEEGEEGEGEEEGEEGEGEGEEEEGEGEGEEEGEGEGEEEEGEGEGEEEGEGEGEEEEGEGKGEEEGEEGEGEGEEEEGEGEGEDGEGEGEEEEGEWEGEEEEGEGEGEEEGEGEGEEGEGEGEEEEGEGEGEEEEGEEEGEEEGEGEEEGEGEGEEEEEGEVEGEVEGEEGEGEGEEEEGEEEGEEREKEGEGEENRRNREEEEEEEGKYQETGEEENERQDGEEYKKVSKIKGSVKYGKHKTYQKKSVTNTQGNGKEQRSKMPVQSKRLLKNGPSGSKKFWNNVLPHYLELK

SEQ ID NO: 24960 - protein, 874 aa, Homo sapiens
MPKSYEALVQHVIEDHERIGYQVTAMIGHTNVVVPRSKPLMLIAPKPQDKKSMGLPPRIGSLASGNVRSLPSQQMVNRLSIPKPNLNSTGVNMMSSVHLQQNNYGVKSVGQGYSVGQSMRLGLGGNAPVSIPQQSQSVKQLLPSGNGRSYGLGSEQRSQAPARYSLQSANASSLSSGQLKSPSLSQSQASRVLGQSSSKPAAAATGPPPGNTSSTQKWKICTICNELFPENVYSVHFEKEHKAEKVPAVANYIMKIHNFTSKCLYCNRYLPTDTLLNHMLIHGLSCPYCRSTFNDVEKMAAHMRMVHIDEEMGPKTDSTLSFDLTLQQGSHTNIHLLVTTYNLRDAPAESVAYHAQNNPPVPPKPQPKVQEKADIPVKSSPQAAVPYKKDVGKTLCPLCFSILKGPISDALAHHLRERHQVIQTVHPVEKKLTYKCIHCLGVYTSNMTASTITLHLVHCRGVGKTQNGQDKTNAPSRLNQSPSLAPVKRTYEQMEFPLLKKRKLDDDSDSPSFFEEKPEEPVVLALDPKGHEDDSYEARKSFLTKYFNKQPYPTRREIEKLAASLWLWKSDIASHFSNKRKKCVRDCEKYKPGVLLGFNMKELNKVKHEMDFDAEWLFENHDEKDSRVNASKTADKKLNLGKEDDSSSDSFENLEEESNESGSPFDPVFEVEPKISNDNPEEHVLKVIPEDASESEEKLDQKEDGSKYETIHLTEEPTKLMHNASDSEVDQDDVVEWKDGASPSESGPGSQQVSDFEDNTCEMKPGTWSDESSQSEDARSSKPAAKKKATMQGDREQLKWKNSSYGKVEGFWSKDQSQWKNASENDERLSNPQIEWQNSTIDSEDGEQFDNMTDGVAEPMHGSLAGVKLSSQQA

SEQ ID NO: 24961 - protein, 938 aa, Homo sapiens
MAVQPKETLQLESAAEVGFVRFFQGMPEKPTTTVRLFDRGDFYTAHGEDALLAAREVFKTQGVIKYMGPAGAKNLQSVVLSKMNFESFVKDLLLVRQYRVEVYKNRAGNKASKENDWYLAYKASPGNLSQFEDILFGNNDMSASIGVVGVKMSAVDGQRQVGVGYVDSIQRKLGLCEFPDNDQFSNLEALLIQIGPKECVLPGGETAGDMGKLRQIIQRGGILITERKKADFSTKDIYQDLNRLLKGKKGEQMNSAVLPEMENQVAVSSLSAVIKFLELLSDDSNFGQFELTTFDFSQYMKLDIAAVRALNLFQGSVEDTTGSQSLAALLNKCKTPQGQRLVNQWIKQPLMDKNRIEERLNLVEAFVEDAELRQTLQEDLLRRFPDLNRLAKKFQRQAANLQDCYRLYQGINQLPNVIQALEKHEGKHQKLLLAVFVTPLTDLRSDFSKFQEMIETTLDMDQVENHEFLVKPSFDPNLSELREIMNDLEKKMQSTLISAARDLGLDPGKQIKLDSSAQFGYYFRVTCKEEKVLRNNKNFSTVDIQKNGVKFTNSKLTSLNEEYTKNKTEYEEAQDAIVKEIVNISSGYVEPMQTLNDVLAQLDAVVSFAHVSNGAPVPYVRPAILEKGQGRIILKASRHACVEVQDEIAFIPNDVYFEKDKQMFHIITGPNMGGKSTYIRQTGVIVLMAQIGCFVPCESAEVSIVDCILARVGAGDSQLKGVSTFMAEMLETASILRSATKDSLIIIDELGRGTSTYDGFGLAWAISEYIATKIGAFCMFATHFHELTALANQIPTVNNLHVTALTTEETLTMLYQVKKGVCDQSFGIHVAELANFPKHVIECAKQKALELEEFQYIGESQGYDIMEPAAKKCYLERENLRVTEPKDQCLILLTWKRKLRGGKRSACSRPERQNQGSDPTPTRNTQPLTQSWACVGSH

SEQ ID NO: 24962 - protein, 1525 aa, Homo sapiens
MRTTKVYKLVIHKKGFGGSDDELVVNPKVFPHIKLGDIVEIAHPNDEYSPLLLQVKSLKEDLQKETISVDQTVTQVFRLRPYQDVYVNVVDPKDVTLDLVELTFKDQYIGRGDMWRLKKSLVSTCAYITQKVEFAGIRAQAGELWVKNEKVMCGYISEDTRVVFRSTSAMVYIFIQMSCEMWDFDIYGDLYFEKAVNGFLADLFTKWKEKNCSHEVTVVLFSRTFYDAKSVDEFPEINRASIRQDHKGRFYEDFYKVVVQNERREEWTSLLVTIKKLFIQYPVLVRLEQAEGFPQGDNSTSAQGNYLEAINLSFNVFDKHYINRNFDRTGQMSVVITPGVGVFEVDRLLMILTKQRMIDNGIGVDLVCMGEQPLHAVPLFKLHNRSAPRDSRLGDDYNIPHWINHSFYTSKSQLFCNSFTPRIKLAGKKPASEKAKNGRDTSLGSPKESENALPIQVDYDAYDAQVFRLPGPSRAQCLTTCRSVRERESHSRKSASSCDVSSSPSLPSRTLPTEEVRSQASDDSSLGKSANILMIPHPHLHQYEVSSSLGYTSTRDVLENMMEPPQRDSSAPGRFHVGSAESMLHVRPGGYTPQRALINPFAPSRMPMKLTSNRRRWMHTFPVGMNPRTQNKDSLEDSVSTSPDPILTLSAPPVVPGFCCTVGVDWKSLTTPACLPLTTDYFPDRQGLQNDYTEGCYDLLPEADIDRRDEDGVQMTAQQVFEEFICQRLMQGYQIIVQPKTQKPNPAVPPPLSSSPLYSRGLVSRNRPEEEDQYWLSMGRTFHKVTLKDKMITVTRYLPKYPYESAQIHYTYSLCPSHSDSEFVSCWVEFSHERLEEYKWNYLDQYICSAGSEDFSLIESLKFWRTRFLLLPACVTATKRITEGEAHCDIYGDRPRADEDEWQLLDGFVRFVEGLNRIRRRHRSDRMMRKGTAMKGLQMTGPISTHSLESTAPPVGKKGTSALSALLEMEASQKCLGEQQAAVHGGKSSAQSAESSSVAMTPTYMDSPRKDGAFFMEFVRSPRTASSAFYPQVSVDQTATPMLDGTSLGICTGQSMDRGNSQTFGNSQNIGEQGYSSTNSSDSSSQQLVASSLTSSSTLTEILEAMKHPSTGVQLLSEQKGLSPYCFISAEVVHWLVNHVEGIQTQAMAIDIMQKMLEEQLITHASGEAWRTFIYGFYFYKIVTDKEPDRVAMQQPATTWHTAGVDDFASFQRKWFEVAFVAEELVHSEIPAFLLPWLPSRPASYASRHSSFSRSFGGRSQAAALLAATVPEQRTVTLDVDVNNRTDRLEWCSCYYHGNFSLNAAFEIKLHWMAVTAAVLFEMVQGWHRKATSCGFLLVPVLEGPFALPSYLYGDPLRAQLFIPLNISCLLKEGSEHLFDSFEPETYWDRMHLFQEAIAHRFGFVQDKYSASAFNFPAENKPQYIHVTGTVFLQLPYSKRKFSGQQRRRRNSTSSTNQNMFCEERVGYNWAYNTMLTKTWRSSATGDEKFADRLLKDFTDFCINRDNRLVTFWTSCLEKMHASAP

SEQ ID NO: 24963 - protein, 323 aa, Homo sapiens
MDFRTACEEVQVLRNAGEEVTLTVSFLKRAPAFLKLPLNEDCACAPSDQSSGTSSPLCDSGLHLNYHPNNTDTLSCSSWPTSPGLRWEKRWCDLRLIPLLHSRFSQYVPGTDLSRQNAFQVIAVDGVCTGIIQCLSAEDCVDWLQAIATNISNLTKHNIKKINRNFPVNQQIVYMGWCEAREQDPLQDRVYSPTFLALRGSCLYKFLAPPVTTWDWTRAEKTFSVYEIMCKILKDSDLLDRRKQCFTVQSESGEDLYFSVELESDLAQWERAFQTATFLEVERIQCKTYACVLESHLMGLTIDFSTGFICFDAATKVMCSGQL

SEQ ID NO: 24964 - protein, 625 aa, Homo sapiens
MSQESDNNKRLVALVPMPSDPPFNTRRAYTSEDEAWKSYLENPLTAATKAMMSINGDEDSAAALGLLYDYYKVPRDKRLLSVSKASDSQEDQEKRNCLGTSEAQSNLSGGENRVQVLKTVPVNLSLNQDHLENSKREQYSISFPESSAIIPVSGITVVKAEDFTPVFMAPPVHYPRGDGEEQRVVIFEQTQYDVPSLATHSAYLKDDQRSTPDSTYSESFKDAATEKFRSASVGAEEYMYDQTSSGTFQYTLEATKSLRQKQGEGPMTYLNKGQFYAITLSETGDNKCFRHPISKVRSVVMVVFSEDKNRDEQLKYWKYWHSRQHTAKQRVLDIADYKESFNTIGNIEEIAYNAVSFTWDVNEEAKIFITVNCLSTDFSSQKGVKGLPLMIQIDTYSYNNRSNKPIHRAYCQIKVFCDKGAERKIRDEERKQNRKKGKGQASQTQCNSSSDGKLAAIPLQKKSDITYFKTMPDLHSQPVLFIPDVHFANLQRTGQVYYNTDDEREGGSVLVKRMFRPMEEEFGPVPSKQMKEEGTKRVLLYVRKETDDVFDALMLKSPTVKGLMEAISEKYGLPVEKIAKLYKKSKKGILVNMDDNIIEHYSNEDTFILNMESMVEGFKVTLMEI

SEQ ID NO: 24965 - protein, 641 aa, Homo sapiens
MHCKVSLLDDTVYECVVEKHAKGQDLLKRVCEHLNLLEEDYFGLAIWDNATSKTWLDSAKEIKKQVRGVPWNFTFNVKFYPPDPAQLTEDITRYYLCLQLRQDIVAGRLPCSFATLALLGSYTIQSELGDYDPELHGVDYVSDFKLAPNQTKELEEKVMELHKSYRSMTPAQADLEFLENAKKLSMYGVDLHKAKDLEGVDIILGVCSSGLLVYKDKLRINRFPWPKVLKISYKRSSFFIKIRPGEQEQYESTIGFKLPSYRAAKKLWKVCVEHHTFFRLTSTDTIPKSKFLALGSKFRYSGRTQAQTRQASALIDRPAPHFERTASKRASRSLDGAAAVDSADRSPRPTSAPAITQGQVAEGGVLDASAKKTVVPKAQKETVKAEVKKEDEPPEQAEPEPTEAWKVEKTHIEVTVPTSNGDQTQKKRERLDGENIYIRHSNLMLEDLDKSQEEIKKHHASISELKKNFMESVPEPRPSEWDKRLSTHSPFRTLNINGQIPTGEGPPLVKTQTVTISDNANAVKSEIPTKDVPIVHTETKTITYEAAQTDDNSGDLDPGVLLTAQTITSETPSSTTTTQITKTVKGGISETRIEKRIVITGDADIDHDQVLVQAIKEAKEQHPDMSVTKVVVHQETEIADE

SEQ ID NO: 24966 - protein, 901 aa, Homo sapiens
MQKIMHISVLLSPVLWGLIFGVSSNSIQIGGLFPRGADQEYSAFRVGMVQFSTSEFRLTPHIDNLEVANSFAVTNAFCSQFSRGVYAIFGFYDKKSVNTITSFCGTLHVSFITPSFPTDGTHPFVIQMRPDLKGALLSLIEYYQWDKFAYLYDSDRGLSTLQAVLDSAAEKKWQVTAINVGNINNDKKDEMYRSLFQDLELKKERRVILDCERDKVNDIVDQVITIGKHVKGYHYIIANLGFTDGDLLKIQFGGANVSGFQIVDYDDSLVSKFIERWSTLEEKEYPGAHTTTIKYTSALTYDAVQVMTEAFRNLRKQRIEISRRGNAGDCLANPAVPWGQGVEIERALKQVQVEGLSGNIKFDQNGKRINYTINIMELKTNGPRKIGYWSEVDKMVVTLTELPSGNDTSGLENKTVVVTTILESPYVMMKKNHEMLEGNERYEGYCVDLAAEIAKHCGFKYKLTIVGDGKYGARDADTKIWNGMVGELVYGKADIAIAPLTITLVREEVIDFSKPFMSLGISIMIKKPQKSKPGVFSFLDPLAYEIWMCIVFAYIGVSVVLFLVSRFSPYEWHTEEFEDGRETQSSESTNEFGIFNSLWFSLGAFMQQGCDISPRSLSGRIVGGVWWFFTLIIISSYTANLAAFLTVERMVSPIESAEDLSKQTEIAYGTLDSGSTKEFFRRSKIAVFDKMWTYMRSAEPSVFVRTTAEGVARVRKSKGKYAYLLESTMNEYIEQRKPCDTMKVGGNLDSKGYGIATPKGSSLRNAVNLAVLKLNEQGLLDKLKNKWWYDKGECGSGGGDSKEKTSALSLSNVAGVFYILVGGLGLAMLVALIEFCYKSRAEAKRMKMTLNDAMRNKARLSITGSTGENGRVMTPEFPKAVHAVPYVSPGMGMNVSVTDLS

SEQ ID NO: 24967 - protein, 725 aa, Homo sapiens
MAGQMPHSHQYSDRRQPNISDQQVSALSYSDQIQQPLTNQRRMPQTFRDPATAPLRKLSVDLIKTYKHINEVYYAKKKRRHQQGQGDDSSHKKERKVYNDGYDDDNYDYIVKNGEKWMDRYEIDSLIGKGSFGQVVKAYDRVEQEWVAIKIIKNKKAFLNQAQIEVRLLELMNKHDTEMKYYIVHLKRHFMFRNHLCLVFEMLSYNLYDLLRNTNFRGVSLNLTRKFAQQMCTALLFLATPELSIIHCDLKPENILLCNPKRSAIKIVDFGSSCQLGQRIYQYIQSRFYRSPEVLLGMPYDLAIDMWSLGCILVEMHTGEPLFSGANEVDQMNKIVEVLGIPPAHILDQAPKARKFFEKLPDGTWNLKKTKDGKREYKPPGTRKLHNILGVETGGPGGRRAGESGHTVADYLKFKDLILRMLDYDPKTRIQPYYALQHSFFKKTADEGTNTSNSVSTSPAMEQSQSSGTTSSTSSSSGGSSGTSNSGRARSDPTHQHRHSGGHFTAAVQAMDCETHSPQVRQQFPAPLGWSGTEAPTQVTVETHPVQETTFHVAPQQNALHHHHGNSSHHHHHHHHHHHHHGQQALGNRTRPRVYNSPTNSSSTQDSMEVGHSHHSMTSLSSSTTSSSTSSSSTGNQGNQAYQNRPVAANTLDFGQNGAMDVNLTVYSNPRQETGIAGHPTYQFSANTGPAHYMTEGHLTMRQGADREESPMTGVCVQQSPVASS

SEQ ID NO: 24968 - protein, 1362 aa, Homo sapiens
MREAAERRQQLQLEHDQALAVLSAKQQEIDLLQKAQVEAKKEHEGAVRLLESKVRELEEKCRTQSEQFNLLSRDLEKFRQHAGKIDLLGGSAVAPLDISTAPSKPFPQFMNGLATSLGKGQESAIGGSSAIGEYIRPLPQPGDRPEPLSAKPTFLSRSGSARCRSESDMENERNSNTSKQRYSGKVHLCVARYSYNPFDGPNENPEAELPLTAGKYLYVYGDMDEDGFYEGELLDGQRGLVPSNFVDFVQDNESRLASTLGNEQDQNFINHSGIGLEGEHILDLHSPTHIDAGITDNSAGTLDVNIDDIGEDIVPYPRKITLIKQLAKSVIVGWEPPAVPPGWGTVSSYNVLVDKETRMNLTLGSRTKALIEKLNMAACTYRISVQCVTSRGSSDELQCTLLVGKDVVVAPSHLRVDNITQISAQLSWLPTNSNYSHVIFLNEEEFDIVKAARYKYQFFNLRPNMAYKVKVLAKPHQMPWQLPLEQREKKEAFVEFSTLPAGPPAPPQDVTVQAGVTPATIRVSWRPPVLTPTGLSNGANVTGYGVYAKGQRVAEVIFPTADSTAVELVRLRSLEAKGVTVRTLSAQGESVDSAVAAVPPELLVPPTPHPRPAPQSKPLASSGVPETKDEHLGPHARMDEAWEQSRAPGPVHGHMLEPPVGPGRRSPSPSRILPQPQGTPVSTTVAKAMAREAAQRVAESSRLEKRSVFLERSSAGQYAASDEEDAYDSPDFKRRGASVDDFLKGSELGKQPHCCHGDEYHTESSRGSDLSDIMEEDEEELYSEMQLEDGGRRRPSGTSHNALKDCTDHRTSEGTFWEQPEFPHQPHRKRLFSIPEVAEEDGECCGLLHKQGAGPSPRARTGLAREPRPGRPYRGDEAPRGSWFPVKHRGSGAVPHVEDFLLEDRGCRFSRSATRSPDSGLDCGSEEDESRFGFGNTVAACSPGPGHCPCRRGPRPLLARRRTLTRQSSVEEDFGEQVGPGGLLRNDDPQPGPERPPPRKHGWGEPTEHQDFRGVWKKSITMPDSRAAAPHAKPPPRVAQGPLILGNPASAGRVDHMGRRFPRGSAGPQRSRPVTVPSIDDYGRDRLSPDFYEESETDPGAEELPARIFVALFDYDPLTMSPNPDAAEEELPFKEGQIIKVYGDKDADGFYRGETCARLGLIPCNMVSEIQADDEEMMDQLLRQGFLPLNTPVEKIERSRRSGRRHSVSTRRMVALYDYDPRESSPNVDVEAELTFCTGDIITVFGEIDEDGFYYGELNGQKGLVPSNFLEEVPDDVEVYLSDAPSHYSQDTPMRSKAKRVPPEGSGTARRAPSPTVHLHSGSPTSSMGSGSPGRGREMSSKKKKGLLSKGKKLLKKLGAVK

SEQ ID NO: 24969 - protein, 429 aa, Homo sapiens
MQLPRWWELGDPCAWTGQGRGTRRMSPATTGTFLLTVYSIFSKVHSDRNVYPSAGVLFVHVLEREYFKGEFPPYPKPGEISNDPITFNTNLMGYPDRPGWLRYIQRTPYSDGVLYGSPTAENVGKPTIIEITAYNRRTFETARHNLIINIMSAEEFFIKNMNVEEMLASEVLGDFLGAVKNVWQPERLNAINITSALDRGGRVPLPINDLKEGVYVMVGADVPFSSCLREVENPQNQLRCSQEMEPVITCDKKFRTQFYIDWCKISLVDKTKQVSTYQEVIRGEGILPDGGEYKPPSDSLKSRDYYTDFLITLAVPSAVALVLFLILAYIMCCRREGVEKRNMQTPDIQLVHHSAIQKSTKELRDMSKNREIAWPLSTLPVFHPVTGEIIPPLHTDNYDSTNMPLMQTQQNLPHQTQIPQQQTTGKWYP

SEQ ID NO: 24970 - protein, 493 aa, Homo sapiens
MAVLLLLLRALRRGPGPGPRPLWGPGPAWSPGFPARPGRGRPYMASRPPGDLAEAGGRALQSLQLRLLTPTFEGINGLLLKQHLVQNPVRLWQLLGGTFYFNTSRLKQKNKEKDKSKGKAPEEDEGMGTTDHVIVLASTNRADILDGALMRPGRLDRHVFIDLPTLQERREIFEQHLKSLKLTQSSTFYSQRLAELTPGFSGADIANICNEAALHAAREGHTSVHTLNFEYAVERVLAGTAKKSKILSKEEQKVVAFHESGHALVGWMLEHTEAVMKVSITPRTNAALGFAQMLPRDQHLFTKEQLFERMCMALGGRASEALSFNEVTSGAQDDLRKVTRIAYSMVKQFGMAPGIGPISFPEAQEGLMGIGRRPFSQGLQQMMDHEARLLVAKAYRHTEKVLQDNLDKLQARALCVTWGSCLGPLDCRPQPAAAASGQVWAVPSPAEAGLPVDPCSSRLTKQLCRARAHHSGSHNGSKAAAGKRPSGKGSDKL

SEQ ID NO: 24971 - protein, 1955 aa, Homo sapiens
MEFPIGSLETNNFRRFTPESLVEIEKQIAAKQGTKKAREKHREQKDQEEKPRPQLDLKACNQLPKFYGELPAELIGEPLEDLDPFYSTHRTFMVLNKGRTISRFSATRALWLFSPFNLIRRTAIKVSVHSWFSLFITVTILVNCVCMTRTDLPEKIEYVFTVIYTFEALIKILARGFCLNEFTYLRDPWNWLDFSVITLAYVGTAIDLRGISGLRTFRVLRALKTVSVIPGLKVIVGALIHSVKKLADVTILTIFCLSVFALVGLQLFKGNLKNKCVKNDMAVNETTNYSSHRKPDIYINKRGTSDPLLCGNGSDSGHCPDGYICLKTSDNPDFNYTSFDSFAWAFLSLFRLMTQDSWERLYQQTLRTSGKIYMIFFVLVIFLGSFYLVNLILAVVTMAYEEQNQATTDEIEAKEKKFQEALEMLRKEQEVLAALGIDTTSLHSHNGSPLTSKNASERRHRIKPRVSEGSTEDNKSPRSDPYNQRRMSFLGLASGKRRASHGSVFHFRSPGRDISLPEGVTDDGVFPGDHESHRGSLLLGGGAGQQGPLPRSPLPQPSNPDSRHGEDEHQPPPTSELAPGAVDVSAFDAGQKKTFLSAEYLDEPFRAQRAMSVVSIITSVLEELEESEQKCPPCLTSLSQKYLIWDCCPMWVKLKTILFGLVTDPFAELTITLCIVVNTIFMAMEHHGMSPTFEAMLQIGNIVFTIFFTAEMVFKIIAFDPYYYFQKKWNIFDCIIVTVSLLELGVAKKGSLSVLRSFRLLRVFKLAKSWPTLNTLIKIIGNSVGALGNLTIILAIIVFVFALVGKQLLGENYRNNRKNISAPHEDWPRWHMHDFFHSFLIVFRILCGEWIENMWACMEVGQKSICLILFLTVMVLGNLVVLNLFIALLLNSFSADNLTAPEDDGEVNNLQVALARIQVFGHRTKQALCSFFSRSCPFPQPKAEPELVVKLPLSSSKAENHIAANTARGSSGGLQAPRGPRDEHSDFIANPTVWVSVPIAEGESDLDDLEDDGGEDAQSFQQEVIPKGQEQLQQVERCGDHLTPRSPGTGTSSEDLAPSLGETWKDESVPQVPAEGVDDTSSSEGSTVDCLDPEEILRKIPELADDLEEPDDCFTEGCIRHCPCCKLDTTKSPWDVGWQVRKTCYRIVEHSWFESFIIFMILLSSGSLAFEDYYLDQKPTVKALLEYTDRVFTFIFVFEMLLKWVAYGFKKYFTNAWCWLDFLIVNISLISLTAKILEYSEVAPIKALRTLRALRPLRALSRFEGMRVVVDALVGAIPSIMNVLLVCLIFWLIFSIMGVNLFAGKFWRCINYTDGEFSLVPLSIVNNKSDCKIQNSTGSFFWVNVKVNFDNVAMGYLALLQVATFKGWMDIMYAAVDSREVNMQPKWEDNVYMYLYFVIFIIFGGFFTLNLFVGVIIDNFNQQKKKLGGQDIFMTEEQKKYYNAMKKLGSKKPQKPIPRPLNKFQGFVFDIVTRQAFDITIMVLICLNMITMMVETDDQSEEKTKILGKINQFFVAVFTGECVMKMFALRQYYFTNGWNVFDFIVVVLSIASLIFSAILKSLQSYFSPTLFRVIRLARIGRILRLIRAAKGIRTLLFALMMSLPALFNIGLLLFLVMFIYSIFGMSSFPHVRWEAGIDDMFNFQTFANSMLCLFQITTSAGWDGLLSPILNTGPPYCDPNLPNSNGTRGDCGSPAVGIIFFTTYIIISFLIMVNMYIAVILENFNVATEESTEPLSEDDFDMFYETWEKFDPEATQFITFSALSDFADTLSGPLRIPKPNRNILIQMDLPLVPGDKIHCLDILFAFTKNVLGESGELDSLKANMEEKFMATNLSKSSYEPIATTLRWKQEDISATVIQKAYRSYVLHRSMALSNTPCVPRAEEEAASLPDEGFVAFTANENCVLPDKSETASATSFPPSYESVTRGLSDRVNMRTSSSIQNEDEATSMELIAPGP

SEQ ID NO: 24972 - protein, 119 aa, Homo sapiens
MNRFDRPDRNVRQPQEGFWKRPPQRWSGQEHYHLSHPDHYHHHGKSDLSRGSPYRESPLGHFESYGGMPFFQAQKMFVDVPENTVILDEMTLRHMVQDCTAVKTQLLKLKRLLHQHDGS

SEQ ID NO: 24973 - protein, 1197 aa, Homo sapiens
TEKLEKQQKIEQERKRRQKHQEYLNSILQHAKDFKEYHRSVTGKIQKLTKAVATYHANTEREQKKENERIEKERMRRLMAEDEEGYRKLIDQKKDKRLAYLLQQTDEYVANLTELVRQHKAAQVAKEKKKKKKKKKAENAEGQTPAIGPDGEPLDETSQMSDLPVKVIHVESGKILTGTDAPKAGQLEAWLEMNPGYEVAPRSDSEESGSEEEEEEEEEEQPQAAQPPTLPVEEKKKIPDPDSDDVSEVDARHIIENAKQDVDDEYGVSQALARGLQSYYAVAHAVTERVDKQSALMVNGVLKQYQIKGLEWLVSLYNNNLNGILADEMGLGKTIQTIALITYLMEHKRINGPFLIIVPLSTLSNWAYEFDKWAPSVVKVSYKGSPAARRAFVPQLRSGKFNVLLTTYEYIIKDKHILAKIRWKYMIVDEGHRMKNHHCKLTQVLNTHYVAPRRLLLTGTPLQNKLPELWALLNFLLPTIFKSCSTFEQWFNAPFAMTGEKVDLNEEETILIIRRLHKVLRPFLLRRLKKEVEAQLPEKVEYVIKCDMSALQRVLYRHMQAKGVLLTDGSEKDKKGKGGTKTLMNTIMQLRKICNHPYMFQHIEESFSEHLGFTGGIVQGLDLYRASGKFELLDRILPKLRATNHKVLLFCQMTSLMTIMEDYFAYRGFKYLRLDGTTKAEDRGMLLKTFNEPGSEYFIFLLSTRAGGLGLNLQSADTVIIFDSDWNPHQDLQAQDRAHRIGQQNEVRVLRLCTVNSVEEKILAAAKYKLNVDQKVIQAGMFDQKSSSHERRAFLQAILEHEEQDESRHCSTGSGSASFAHTAPPPAGVNPDLEEPPLKEEDEVPDDETVNQMIARHEEEFDLFMRMDLDRRREEARNPKRKPRLMEEDELPSWIIKDDAEVERLTCEEEEEKMFGRGSRHRKEVDYSDSLTEKQWLKTLKAIEEGTLEEIEEEVRQKKSSRKRKRDSDAGSSTPTTSTRSRDKDDESKKQKKRGRPPAEKLSPNPPNLTKKMKKIVDAVIKYKDSSGRQLSEVFIQLPSRKELPEYYELIRKPVDFKKIKERIRNHKYRSLNDLEKDVMLLCQNAQTFNLEGSLIYEDSIVLQSVFTSVRQKIEKEDDSEGEESEEEEEGEEEGSESESRSVKVKIKLGRKEKAQDRLKGGRRRPSRGSRAKPVVSDDDSEEEQEEDRSGSGSEED

SEQ ID NO: 24974 - protein, 2299 aa, Homo sapiens
MDFLIIFLLLFIGTSETQVDVSNVVPGTRYDITISSISTTYTSPVTRIVTTNVTKPGPPVFLAGERVGSAGILLSWNTPPNPNGRIISYIVKYKEVCPWMQTVYTQVRSKPDSLEVLLTNLNPGTTYEIKVAAENSAGIGVFSDPFLFQTAESAPGKVVNLTVEAYNASAVKLIWYLPRQPNGKITSFKISVKHARSGIVVKDVSIRVEDILTGKLPECNENSESFLWSTASPSPTLGRVTPPSRTTHSSSTLTQNEISSVWKEPISFVVTHLRPYTTYLFEVSAATTEAGYIDSTIVRTPESVPEGPPQNCVTGNITGKSFSILWDPPTIVTGKFSYRVELYGPSGRILDNSTKDLKFAFTNLTPFTMYDVYIAAETSAGTGPKSNISVFTPPDVPGAVFDLQLAEVESTQVRITWKKPRQPNGIINQYRVKVLVPETGIILENTLLTGNNEYINDPMAPEIVNIVEPMVGLYEGSAEMSSDLHSLATFIYNSHPDKNFPARNRAEDQTSPVVTTRNQYITDIAAEQLSYVIRRLVPFTEHMISVSAFTIMGEGPPTVLSVRTRQQVPSSIKIINYKNISSSSILLYWDPPEYPNGKITHYTIYAMELDTNRAFQITTIDNSFLITGLKKYTKYKMRVAASTHVGESSLSEENDIFVRTSEDEPESSPQDVEVIDVTADEIRLKWSPPEKPNGIIIAYEVLYKNIDTLYMKNTSTTDIILRNLRPHTLYNISVRSYTRFGHGNQVSSLLSVRTSETVPDSAPENITYKNISSGEIELSFLPPSSPNGIIQKYTIYLKRSNGNEERTINTTSLTQNIKVLKKYTQYIIEVSASTLKGEGVRSAPISILTEEDAPDSPPQDFSVKQLSGVTVKLSWQPPLEPNGIILYYTVYVWNRSSLKTINVTETSLELSDLDYNVEYSAYVTASTRFGDGKTRSNIISFQTPEGAPSDPPKDVYYANLSSSSIILFWTPPSKPNGIIQYYSVYYRNTSGTFMQNFTLHEVTNDFDNMTVSTIIDKLTIFSYYTFWLTASTSVGNGNKSSDIIEVYTDQDIPEGFVGNLTYESISSTAINVSWVPPAQPNGLVFYYVSLILQQTPRHVRPPLVTYERSIYFDNLEKYTDYILKITPSTEKGFSDTYTAQLYIKTEEDVPETSPIINTFKNLSSTSVLLSWDPPVKPNGAIISYDLTLQGPNENYSFITSDNYIILEELSPFTLYSFFAAARTRKGLGPSSILFFYTDESVPLAPPQNLTLINCTSDFVWLKWSPSPLPGGIVKVYSFKIHEHETDTIYYKNISGFKTEAKLVGLEPVSTYSIRVSAFTKVGNGNQFSNVVKFTTQESVPDVVQNMQCMATSWQSVLVKWDPPKKANGIITQYMVTVERNSTKVSPQDHMYTFIKLLANTSYVFKVRASTSAGEGDESTCHVSTLPETVPSVPTNIAFSDVQSTSATLTWIRPDTILGYFQNYKITTQLRAQKCKEWESEECVEYQKIQYLYEAHLTEETVYGLKKFRWYRFQVAASTNAGYGNASNWISTKTLPGPPDGPPENVHVVATSPFSISISWSEPAVITGPTCYLIDVKSVDNDEFNISFIKSNEENKTIEIKDLEIFTRYSVVITAFTGNISAAYVEGKSSAEMIVTTLESAPKDPPNNMTFQKIPDEVTKFQLTFLPPSQPNGNIQVYQALVYREDDPTAVQIHNLSIIQKTNTFVIAMLEGLKGGHTYNISVYAVNSAGAGPKVPMRITMDIKAPARPKTKPTPIYDATGKLLVTSTTITIRMPICYYSDDHGPIKNVQVLVTETGAQHDGNVTKWYDAYFNKARPYFTNEGFPNPPCTEGKTKFSGNEEIYIIGADNACMIPGNEDKICNGPLKPKKQYLFKFRATNIMGQFTDSDYSDPVKTLGEGLSERTVEIILSVTLCILSIILLGTAIFAFARIRQKQKEGGTYSPQDAEIIDTKLKLDQLITVADLELKDERLTRLLSYRKSIKPISKKSFLQHVEELCTNNNLKFQEEFSELPKFLQDLSSTDADLPWNRAKNRFPNIKPYNNNRVKLIADASVPGSDYINASYISGYLCPNEFIATQGPLPGTVGDFWRMVWETRAKTLVMLTQCFEKGRIRCHQYWPEDNKPVTVFGDIVITKLMEDVQIDWTIRDLKIERHGDCMTVRQCNFTAWPEHGVPENSAPLIHFVKLVRASRAHDTTPMIVHCSAGVGRTGVFIALDHLTQHINDHDFVDIYGLVAELRSERMCMVQNLAQYIFLHQCILDLLSNKGSNQPICFVNYSALQKMDSLDAMEGDVELEWEETTM

SEQ ID NO: 24975 - protein, 247 aa, Homo sapiens
MPGPGRRAAASRRMKSSVGGRREKLLGAPKAQPSRDFTCVHDGESEAELIPDDFEEKPEREKKHTNFTLCNVCNIQLNSAAQAQIHYNGKSHQKRLKQLSNGTLKNDNGGTCQSPALPALVRPPAPPLQPSLDIKPFLPFPLDTAAAVNLFPNFNAMDPIQKAVINHTFGVPLPHRRKQIISCNICQLRFNSDSQAAAHYKGTKHAKKLKALEAMKNKQKSVTAKDSAKTTFTSITTNTINTSSDKT

SEQ ID NO: 24976 - protein, 543 aa, Homo sapiens [sequence omitted]

SEQ ID NO: 24977 - protein, 552 aa, Homo sapiens
MVYRYCCKLNKKLKSYSLSRKKIVHYTCFDQRKRANAAFLIGAYAVIYLKKTPEEAYRALLSGSNPPYLPFRDASFGNCTYNLTILDCLQGIRKGLQHGFFDFETFDVDEYEHYERVENGDFNWIVPGKFLAFSGPHPKSKIENGYPLHAPEAYFPYFKKHNVTAVVRLNKKIYEAKRFTDAGFEHYDLFFIDGSTPSDNIVRRFLNICENTEGAIAVHCKAGLGRTGTLIACYVMKHYRFTHAEIIAWIRICRPGSIIGPQQHFLEEKQASLWVQGDIFRSKLKNRPSSEGSINKILSGLDDMSIGGNLSKTQNMERFGEDNLEDDDVEMKNGITQGDKLRALKSQRQPRTSPSCAFRSDDTKGHPRAVSQPFRLSSSLQGSAVTLKTSKMALSPSATAKRINRTSLSSGATVRSFSINSRLASSLGNLNAATDDPENKKTSSSSKAGFTASPFTNLLNGSSQPTTRNYPELNNNQYNRSSNSNGGNLNSPPGPHSAKTEEHTTILRPSYTGLSSSSARFLSRSIPCSCLLLVFRKPFLGSPLLSLPISHL

SEQ ID NO: 24978 - protein, 141 aa, Homo sapiens
MEERGDSEPTPGCSGLGPGGVRGFGDGGGAPSWAPEDAWMGTHPKYLEMMELDIGDATQVYVAFLVYLDLMESKSWHEVNCVGLPELQLICLVGTEIEGEGLQTVVPTPITASLSHNRRIYLNLSFPWLRRMKRQETWGTP

SEQ ID NO: 24979 - protein, 862 aa, Homo sapiens
MNSAEQTVTWLITLGVLESPKKTISDPEGFLQASLKDGVVLCRLLERLLPGTIEKVYPEPRSESECLSNIREFLRGCGASLRLETFDANDLYQGQNFNKVLSSLVTLNKVTADIGLGSDSVCARPSSHRIKSFDSLGSQSLHTRTSKLFQGQYRSLDMTDNSNNQLVVRAKFNFQQTNEDELSFSKGDVIHVTRVEEGGWWEGTLNGRTGWFPSNYVREVKASEKPVSPKSGTLKSPPKGFDTTAINKSYYNVVLQNILETENEYSKELQTVLSTYLRPLQTSEKLSSANISYLMGNLEEICSFQQMLVQSLEECTKLPEAQQRVGGCFLNLMPQMKTLYLTYCANHPSAVNVLTEHSEELGEFMETKGASSPGILVLTTGLSKPFMRLDKYPTLLKELERHMEDYHTDRQDIQKSMAAFKNLSAQCQEVRKRKELELQILTEAIRNWEGDDIKTLGNVTYMSQVLIQCAGSEEKNERYLLLFPNVLLMLSASPRMSGFIYQGKLPTTGMTITKLEDSENHRNAFEISGSMIERILVSCNNQQDLQEWVEHLQKQTKVTSVGNPTIKPHSVPSHTLPSHPVTPSSKHADSKPAPLTPAYHTLPHPSHHGTPHTTINWGPLEPPKTPKPWSLSCLRPAPPLRPSAALCYKEDLSKSPKTMKKLLPKRKPERKPSDEEFASRKSTAALEEDAQILKVIEAYCTSAKTRQTLNSTWQGTDLMHNHVLADDDQPSLDSLGRRSSLSRLEPSDLSEDSDYDSIWTAHSYRMGSTSRSRKESAPQVLLPEEEKIIVEETKSNGQTVIEEKSLVDTVYALKDEVQELRQDNKKMKKSLEEEQRARKDLEKLVRKVLKNMNDPAWDETNL

SEQ ID NO: 24980 - protein, 605 aa, Homo sapiens
MHTGGETSACKPSSVRLAPSFSFHAAGLQMAGQMPHSHQYSDRRQPNISDQQVSALSYSDQIQQPLTNQVMPDIVMLQRRMPQTFRDPATAPLRKLSVDLIKTYKHINEVYYAKKKRRHQQGQGDDSSHKKERKVYNDGYDDDNYDYIVKNGEKWMDRYEIDSLIGKGSFGQVVKAYDRVEQEWVAIKIIKNKKAFLNQAQIEVRLLELMNKHDTEMKYYIVHLKRHFMFRNHLCLVFEMLSYNLYDLLRNTNFRGVSLNLTRKFAQQMCTALLFLATPELSIIHCDLKPENILLCNPKRSAIKIVDFGSSCQLGQRIYQYIQSRFYRSPEVLLGMPYDLAIDMWSLGCILVEMHTGEPLFSGANEVDQMNKIVEVLGIPPAHILDQAPKARKFFEKLPDGTWNLKKTKDGKREYKPPGTRKLHNILGVETGGPGGRRAGESGHTVADYLKFKDLILRMLDYDPKTRIQPYYALQHSFFKKTADEGTNTSNSVSTSPAMEQSQSSGTTSSTSSSSGGSSGTSNSGRARSDPTHQHRHSGGHFTAAVQAMDCETHSPQVRQQFPAPLGWSGTEAPTQVTVETHPVQETTFHVAPQQNALHHHHGNS

SEQ ID NO: 24981 - protein, 1130 aa, Homo sapiens
MATSERALLRTRAASLLRGLGRSRTGARSLQFRAEKERQPCWSFPMGQKTKGSSNIASSYLLQQLMHRYQELDSDGDEDQGEGEAGSEESSESEMLNLEEEFDGVLREEAVAKALHHLGRSGSGTEQVYLNLTLSGCNLIDVSILCGYVHLQKLDLSANKIEDLSCVSCMPYLLELNASQNNLTTFFNFKPPKNLKKADFSHNQISEICDLSAYHALTKLILDGNEIEEISGLEMCNNLIHLSLANNKITTINGLNKLPIKILCLSNNQIEMITGLEDLKALQNLDLSHNQISSLQGLENHDLLEVINLEDNKIAELREIEYIKNLPILRVLNLLENPIQEKSEYWFFVIFMLLRLTELDQKKIKVEEKVSAVNKYDPPPEVVAAQDHLTHVVNSVMQPQRIFDSTLPSLDAPYPMLILAGPEACGKRELAHRLCRQFSTYFRYGACHTTRPPYFGEGDRVDYHFISQDVFDEMVNMGKFILTFSYGNHKYGLNRDTVEGIARDGLASCIHMEIEGVRSLKYSYFEPRYILVVPMNKEKYEGYLRRKGLFSRAEIEFAVSRVDLYIKINQNFPGYFDEVINADDLDVAYQKLSQLIREYLGLTEEPAKSLATTAGAPASKKTVSGVPAHLVPSPRCLAKLQADGQMTEHLSGMQIHAKDLENQSVTPAQNQELAQDGETHQKELSPDSHLNPELPQHLSSSALGLPQQAQDLSLNPTEEDVQQSDLPLKQIATETDVPEVEASEVGQSPITPTLVPPVHPSPPSSRSPQPGQDKESGEAQVTPTGPPLSEPLQGPGPTPLSPQRIQDEEIESDKLPPSSSHHDPPKDSSHTDLVQKLAGDSQQALKEETSKPEAIRVSIPHPELPHPQDLATDTKQPQARGAPGTLLPRSRLAPTRLPQPQVLAPLQSRRPTPKLLSPSREEALGTTSHQTMTVSPRLPPTREADTSKLPPISPPHSKPPPNLSPQAAHSLQQVQEEKVSEVKLPLISPPSQEQAEPRILSPAQEEAAQKVRLPRIPAPLPEPGLPQNSGTQPDPRPAKERKAPQAGSSSRRKIPDMRASPHNQGPLQQTGAREKKLPNQKGTARGLAPLEEAPPGNHQPALQLEPHDQPAPTMVPDDPNPSPPLVSCLS

SEQ ID NO: 24982 - protein, 112 aa, Homo sapiens
MAWTARDRGALGLLLLGLCLCAAQRGPPGEQGPPGPPGPPGVPGIDGIDGDRGPKGPPGPPGPAGEPGKPGAPGKPGTPGADAGVQWHDLGSLQPLPPGFKRFSCLSLQLPE

SEQ ID NO: 24983 - protein, 582 aa, Homo sapiens
MLESVNVRLEDLITVITQTESHRQRLLQEAAANWHSWLIKVQKMKAVYHILNMCNIDVTQQCVIAEIWFPVADATRIKRALEQGMELSGSSMAPIMTTVQSKTAPPTFNRTNKFTAGFQNIVDAYGVGSYREINPAPYTIITFPFLFAVMFGDCGHGTVMLLAALWMILNERRLLSQKTDNEIWNTFFHGRYLILLMGIFSIYTGLIYNDCFSKSLNIFGSSWSVQPMFRNGTWNTHVMEESLYLQLDPAIPGVYFGNPYPFGIDPIWNLASNKLTFLNSYKMKMSVILGIVQMVFGVILSLFNHIYFRRTLNIILQFIPEMIFILCLFGYLVFMIIFKWCCFDVHVSQHAPSILIHFINMFLFNYSDSSNAPLYKHQQEVQSFFVVMALISVPWMLLIKPFILRASHRKSQLQASRIQEDATENIEGDSSSPSSRSGQRTSADTHGALDDHGEEFNFGDVFVHQAIHTIEYCLGCISNTASYLRLWALSLAHAQLSEVLWTMVMNSGLQTRGWGGIVGVFIIFAVFAVLTVAILLIMEGLSAFLHALRLHWVEFQNKFYVGDGYKFSPFSFKHILDGTAEE

SEQ ID NO: 24984 - protein, 828 aa, Homo sapiens
MENEIFTPLLEQFMTSPLVTWVKTFGPLAAGNGTNLDEYVALVDGVFLNQVMLQINPKLESQRVNKKVNNDASLRMHNLSILVRQIKFYYQETLQQLIMMSLPNVLIIGKNPFSEQGTEEVKKLLLLLLGCAVQCQKKEEFIERIQGLDFDTKAAVAAHIQEVTHNQENVFDLQWMEVTDMSQEDIEPLLKNMALHLKRLIDERDEHSETIIELSEERDGLHFLPHASSSAQSPCGSPGMKRTESRQHLSVELADAKAKIRRLRQELEEKTEQLLDCKQELEQMEIELKRLQQENMNLLSDARSARMYRDELDALREKAVRVDKLESEVSRYKERLHDIEFYKARVEELKEDNQVLLETKTMLEDQLEGTRARSDKLHELEKENLQLKAKLHDMEMERDMDRKKIEELMEENMTLEMAQKQSMDESLHLGWELEQISRTSELSEAPQKSLGHEVNELTSSRLLKLEMENQSLTKTVEELRTTVDSVEGNASKILKMEKENQRLSKKVEILENEIVQEKQSLQNCQNLSKDLMKEKAQLEKTIETLRENSERQIKILEQENEHLNQTVSSLRQRSQISAEARVKDIEKENKILHESIKETSSKLSKIEFEKRQIKKELEHYKEKGERAEELENELHHLEKENELLQKKITNLKITCEKIEALEQENSELERENRKLKKTLDSFKNLTFQLESLEKENSQLDEENLELRRNVESLKCASMKMAQLQLENKELESEKEQLKKGLELLKASFKKTERLEVSYQGLDIENQRLQKTLENSNKKIQQLESELQDLEMENQTLQKNLEELKISSKRLEQLEKENKSLEQETSQLE

SEQ ID NO: 24985 - protein, 1496 aa, Homo sapiens
MRTTKVYKLVIHKKGFGGSDDELVVNPKVFPHIKLGDIVEIAHPNDEYSPLLLQVKSLKEDLQKETISVDQTVTQVFRLRPYQDVYVNVVDPKDVTLDLVELTFKDQYIGRGDMWRLKKSLVSTCAYITQKVEFAGIRAQAGELWVKNEKVMCGYISEDTRVVFRSTSAMVYIFIQMSCEMWDFDIYGDLYFEKAVNGFLADLFTKWKEKNCSHEVTVVLFSRTFYDAKSVDEFPEINRASIRQDHKGRFYEDFYKVVVQNERREEWTSLLVTIKKLFIQYPVLVRLEQAEGFPQGDNSTSAQGNYLEAINLSFNVFDKHYINRNFDRTGQMSVVITPGVGVFEVDRLLMILTKQRMIDNGIGVDLVCMGEQPLHAVPLFKLHNRSAPRDSRLGDDYNIPHWINHSFYTSKSQLFCNSFTPRIKLAGKKPASEKAKNGRDTSLGSPKESENALPIQVDYDAYDAQVFRLPGPSRAQCLTTCRSVRERESHSRKSASSCDVSSSPSLPSRTLPTEEVRSQASDDSSLGKSANILMIPHPHLHQYEVSSSLGYTSTRDVLENMMEPPQRDSSAPGRFHVGSAESMLHVRPGGYTPQRALINPFAPSRMPMKLTSNRRRWMHTFPVGMNPRTQNKDSLEDSVSTSPDPILTLSAPPVVPGFCCTVGVDWKSLTTPACLPLTTDYFPDRQGLQNDYTEGCYDLLPEADIDRRDEDGVQMTAQQVFEEFICQRLMQGYQIIVQPKTQKPNPAVPPPLSSSPLYSRGLVSRNRPEEEDQYWLSMGRTFHKVTLKDKMITVTRYLPKYPYESAQIHYTYSLCPSHSDSEFVSCWVEFSHERLEEYKWNYLDQYICSAGSEDFSLIESLKFWRTRFLLLPACVTATKRITEGEAHCDIYGDRPRADEDEWQLLDGFVRFVEGLNRIRRRHRSDRMMRKGTAMKGLQMTGPISTHSLESTAPPVGKKGTSALSALLEMEASQKCLGEQQAAVHGGKSSAQSAESSSVAMTPTYMDSPRKDGAFFMEFVRSPRTASSAFYPQVSVDQTATPMLDGTSLGICTGQSMDRGNSQTFGNSQNIGEQGYSSTNSSDSSSQQLVASSLTSSSTLTEILEAMKHPSTGVQLLSEQKGLSPYCFISAEVVHWLVNHVEGIQTQAMAIDIMQKMLEEQLITHASGEAWRTFIYGFYFYKIVTDKEPDRVAMQQPATTWHTAGVDDFASFQRKWFEVAFVAEELVHSEIPAFLLPWLPSRPASYASRHSSFSRSFGGRSQAAALLAATVPEQRTVTLDVDVNNRTDRLEWCSCYYHGNFSLNAAFEIKLHWMAVTAAVLFEMVQGWHRKATSCGFLLVPVLEGPFALPSYLYGDPLRAQLFIPLNISCLLKEGSEHLFDSFEPETYWDRMHLFQEAIAHRFGFVQDKYSASAFNFPAENKPQYIHVTGEELRAELGRNSVSAAALLQAQVLRAAAAAAELHQLHQPEHVLRGAGRLQLGLQHHAHQNMALQRHRG

SEQ ID NO: 24986 - protein, 323 aa, Homo sapiens
RNVYPSAGVLFVHVLEREYFKGEFPPYPKPGEISNDPITFNTNLMGYPDRPGWLRYIQRTPYSDGVLYGSPTAENVGKPTIIEITAYNRRTFETARHNLIINIMSAEDFPLPYQAEFFIKNMNVEEMLASEVLGDFLGAVKNVWQPERLNAINITSALDRGGRVPLPINDLKEGVYVMVGADVPFSSCLREVENPQNQLRCSQEMEPVITCDKKFRTQFYIDWCKISLVDKTKQVSTYQEVIRGEGILPDGGEYKPPSDSLKSRDYYTDFLITLAVPSAVALVLFLILAYIMCCRREGVEKRNMQTPEEQMKRPFIQVFQNLQ

SEQ ID NO: 24987 - protein, 275 aa, Homo sapiens
ELEQELAELHQKDSALLFSSCFVANDSTLFTLAKILPGCEIYSDAGNHASMIQGIRNSGAAKFVFRHNDPDHLKKLLEKSNPKIPKIVAFETVHSMDGAICPLEELCDVSHQYGALTFVDEVHAVGLYGSRGAGIGERDGIMHKIDIISGTLGKAFGCVGGYIASTRDLVDMVRSYAAGFIFTTSLPPMVLSGALESVRLLKGEEGQALRRAHQRNVKHMRQLLMDRGLPVIPCPSHIIPIRRSCCWLGLRWGCPSRMCLWLPAISVAVLYTLSS

SEQ ID NO: 24988 - protein, 484 aa, Homo sapiens
MAASMFYGRLVAVATLRNHRPRTAQRAAAQVLGSSGLFNNHGLQVQQQQQRNLSLHEYMSMELLQEAGVSVPKGYVAKSPDEAYAIAKKLGSKDVVIKAQVLAGGRGKGTFESGLKGGVKIVFSPEEAKAVSSQMIGKKLFTKQTGEKGRICNQVLVCERKYPRREYYFAITMERSFQGPVLIGSSHGGVNIEDVAAESPEAIIKEPIDIEEGIKKEQALQLAQKMGFPPNIVESAAENMVKLYSLFLKYDATMIEINPMVEDSDGAGPPGSHIELSCHIHLTWNRSGILCMDAKINFDSNSAYRQKKIFDLQDWTQEDERDKDAAKANLNYIGLDGNIGCLVNGAGLAMATMDIIKLHGGTPANFLDVGGGATVHQVTEAFKLITSDKKVLAILVNIFGGIMRCDVIAQGIVMAVKDLEIKIPVVVRLQGTRVDDAKALIADSGLKILACDDLDEAARMVVKLSEIVTLAKQAHVDVKFQLPI

SEQ ID NO: 24989 - protein, 418 aa, Homo sapiens
MGLLVFVRNLLLALCLFLVLGFLYYSAWKLHLLQWEEDSKYDRLGFLLNLDSKLPAELATKYANFSEGACKPGYASALMTAIFPRFSKPAPMFLDDSFRKWARIREFVPPFGIKGQDNLIKAILSVTKEYRLTPALDSLRCRRCIIVGNGGVLANKSLGSRIDDYDIVVRLNSAPVKGFEKDVGSKTTLRITYPEGAMQRPEQYERDSLFVLAGFKWQDFKWLKYIVYKERVSASDGFWKSVATRVPKEPPEIRILNPYFIQEAAFTLIGLPFNNGLMGRGNIPTLGSVAVTMALHGCDEVAVAGFGYDMSTPNAPLHYYETVRMAAIKEPRPHVENLNPSELRLPHFCFDHQPSTDPSLKPGNLGPVLQQLLCCYIWVMGGCWREPPICADSCFFLDAQYPARERVSAEAGESSRHH

SEQ ID NO: 24990 - protein, 695 aa, Homo sapiens
MGPPGPPGFPGERGQKGDEGPPGISIPGPPGLDGQPGAPGLPGPPGPAGPHIPPSDEICEPGPPGPPGSPGDKGLQGEQGVKGDKGDTCFNCIGTGISGPPGQPGLPGLPGPPGSLGFPGQKGEKGQAGATGPKGLPGIPGAPGAPGFPGSKGEPGDILTFPGMKGDKGELGSPGAPGLPGLPGTPGQDGLPGLPGPKGEPGGITFKGERGPPGNPGLPGLPGNIGPMGPPGFGPPGPVGEKGIQGVAGNPGQPGIPGPKGDPGQTITQPGKPGLPGNPGRDGDVGLPGDPGLPGQPGLPGIPGSKGEPGIPGIGLPGPPGPKGFPGIPGPPGAPGTPGRIGLEGPPGPPGFPGPKGEPGFALPGPPGPPGLPGFKGALGPKGDRGFPGPPGPPGRTGLDGLPGPKGDVGPNGQPGPMGPPGLPGIGVQGPPGPPGIPGPIGQPGLHGIPGEKGDPGPPGLDVPGPPGERGSPGIPGAPGPIGPPGSPGLPGKAGASGFPGTKGEMGMMGPPGPPGPLGIPGRSGVPGLKGDDGLQGQPGLPGPTGEKGSKGEPGLPGPPGPMDPNLLGSKGEKGEPGLPGIPGVSGPKGYQGLPGDPGQPGLSGQPGLPGPPGPKGNPGLPGQPGLIGPPGLKGTIGDMGFPGPQGVEGPPGPSGVPGQPGSPGLPGQKGDKGDPGISSIGLPGLPGPKVIFGI

SEQ ID NO: 24991 - protein, 955 aa, Homo sapiens
MALIMEPVSKWSPSQVVDWMKGLDDCLQQYIKNFEREKISGDQLLRITHQELEDLGVSRIGHQELILEAVDLLCALNYGLETENLKTLSHKLNASAKNLQNFITGRRRSGHYDGRTSRKLPNDFLTSVVDLIGAAKSLLAWLDRSPFAAVTDYSVTRNNVIQLCLELTTIVQQDCTVYETENKILHVCKTLSGVCDHIISLSSDPLVSQSAHLEVIQLANIKPSEGLGMYIKSTYDGLHVITGTTENSPADRCKKIHAGDEVIQVNHQTVPLIPRSPTSSVATPSSTISTPTKRDSSALQDLYIPPPPAEPYIPRDEKGNLPCEDLRGHMVGKPVHKGSESPNSFLDQEYRKRFNIVEEDTVLYCYEYEKGRSSSQGRRESTPTYENSLLRYMSNEKIAQEEYMFQRNSKKDTGKKSKKKGDKSNSPTHYSLLPSLQMDALRQDIMGTPVPETTLYHTFQQSSLQHKSKKKNKGPIAGKSKRRISCKDLGRGDCEGWLWKKKDAKSYFSQKWKKYWFVLKDASLYWYINEEDEKAEGFISLPEFKIDRASECRKKYAFKACHPKIKSFYFAAEHLDDMNRWLNRINMLTAGYAERERIKQEQDYWSESDKEEADTPSTPKQDSPPPPYDTYPRPPSMSCASPYVEAKHSRLSSTETSQSQSSHEEFRQEVTGSSAVSPIRKTASQRRSWQDLIETPLTSSGLHYLQTLPLEDSVFSDSAAISPEHRRQSTLPTQKCHLQDHYGPYPLAESERMQVLNGNGGKPRSFTLPRDSGFNHCCLNAPVSACDPQDDVQPPEVEEEEEEEEEEGEAAGENIGEKSESREEKLGDSLQDLYRALEQASLSPLGEHRISTKMEYKLSFIKRCNDPVMNEKLHRLRILKSTLKAREGEVAIIDKVLDNPDLTSKEFQQWKQMYLDLFLDICQNTTSNDPLSISSEVDVITSSLAHTHSYIETHV

SEQ ID NO: 24992 - protein, 464 aa, Homo sapiens
MTEAALVEGQVKLRDGKKWKSRWLVLRKPSPVAGAGVFFLSSAEGEQISFLFDCIVRGISPTKGPFGLRPVLPDPSPPGPSTVEERVAQEALETLQLEKRLSLLSHAGRPGSGGDDRSLSSSSSEASHLDVSASSRLTAWPEQSSSSASTSQEGPRPAAAQAAGEAMVGASRPPPKPLRPRQLQEVGRQSSSDSGIATGSHSSYSSSLSSYAGSSLDVWRATDELGSLLSLPAAGAPEPSLCTCLPGTVEYQVPTSLRAHYDTPRSLCLAPRDHSPPSQGSPGNSAARDSGGQTSAGCPSGWLGTRRRGLVMEAPQGSEATLPGPAPGEPWEAGGPHAGPPPAFFSACPVCGGLKGAAASAPGPATAHSGSPGPVAVDSPGPERPRGESPTYVNIPVSPSSRKQLHYMGLELQEASEGVRGAGASLYAQIDIMATETAHRVGVRHARAREEQLSELEQRKAAPQ

SEQ ID NO: 24993 - protein, 1494 aa, Homo sapiens
MENEIFTPLLEQFMTSPLVTWVKTFGPLAAGNGTNLDEYVALVDGVFLNQVMLQINPKLESQRVNKKVNNDASLRMHNLSILVRQIKFYYQETLQQLIMMSLPNVLIIGKNPFSEQGTEEVKKLLLLLLGCAVQCQKKEEFIERIQGLDFDTKAAVAAHIQEVTHNQENVFDLQWMEVTDMSQEDIEPLLKNMALHLKRLIDERDEHSETIIELSEERDGLHFLPHASSSAQSPCGSPGMKRTESRQHLSVELADAKAKIRRLRQELEEKTEQLLDCKQELEQMEIELKRLQQENMNLLSDARSARMYRDELDALREKAVRVDKLESEVSRYKERLHDIEFYKARVEELKEDNQVLLETKTMLEDQLEGTRARSDKLHELEKENLQLKAKLHDMEMERDMDRKKIEELMEENMTLEMAQKQSMDESLHLGWELEQISRTSELSEAPQKSLGHEVNELTSSRLLKLEMENQSLTKTVEELRTTVDSVEGNASKILKMEKENQRLSKKVEILENEIVQEKQSLQNCQNLSKDLMKEKAQLEKTIETLRENSERQIKILEQENEHLNQTVSSLRQRSQISAEARVKDIEKENKILHESIKETSSKLSKIEFEKRQIKKELEHYKEKGERAEELENELHHLEKENELLQKKITNLKITCEKIEALEQENSELERENRKLKKTLDSFKNLTFQLESLEKENSQLDEENLELRRNVESLKCASMKMAQLQLENKELESEKEQLKKGLELLKASFKKTERLEVSYQGLDIENQRLQKTLENSNKKIQQLESELQDLEMENQTLQKNLEELKISSKRLEQLEKENKSLEQETSQLEKDKKQLEKENKRLRQQAEIKDTTLEENNVKIGNLEKENKTLSKEIGIYKESCVRLKELEKENKELVKRATIDIKTLVTLREDLVSEKLKTQQMNNDLEKLTHELEKIGLNKERLLHDEQSTDDSRYKLLESKLESTLKKSLEIKEEKIAALEARLEESTNYNQQLRQELKTVKKNYEALKQRQDEERMVQSSPPISGEDNKWERESQETTRELLKVKDRLIEVERNNATLQAEKQALKTQLKQLETQNNNLQAQILALQRQTVSLQEQNTTLQTQNAKLQVENSTLNSQSTSLMNQNAQLLIQQSSLENENESVIKEREDLKSLYDSLIKDHEKLELLHERQASEYESLISKHGTLKSAHKNLEVEHRDLEDRYNQLLKQKGQLEDLEKMLKVEQEKMLLENKNHETVAAEYKKLCGENDRLNHTYSQLLKETEVLQTDHKNLKSLLNNSKLEQTRLEAEFSKLKEQYQQLDITSTKLNNQCELLSQLKGNLEEENRHLLDQIQTLMLQNRTLLEQNMESKDLFHVEQRQYIDKLNELRRQKEKLEEKIMDQYKFYDPSPPRRRGNWITLKMRKLIKSKKDINRERQKSLTLTPTRSDSSEGFLQLPHQDSQDSSSVGSNSLEDGQTLGTKKSSMVALKRLPFLRNRPKDKDKMKACYRRSMCKTL

SEQ ID NO: 24994 - protein, 338 aa, Homo sapiens
MMAMNSKQPFGMHPVLQEPKFSSLHSGSEAMRRVCLPAPQLQGNIFGSFDESLLARAEALAAVDIVSHGKNHPFKPDATYHTMSSVPCTSTSSTVPISHPAALTSHPHHAVHQGLEGDLLEHISPTLSVSGLGAPEHSVMPAQIHPHHLGAMGHLHQAMGMSHPHTVAPHSAMPACLSDVESDPRELEAFAERFKQRRIKLGVTQADVGAALANLKIPGVGSLSQSTICRFESLTLSHNNMIALKPVLQAWLEEAEAAYREKNSKPELFNGSERKRKRTSIAAPEKRSLEAYFAIQPRPSSEKIAAIAEKLDLKKNVVRVWFCNQRQKQKRMKYSAVH

SEQ ID NO: 24995 - protein, 716 aa, Homo sapiens
MKALFAQNQLDTQKPLVTESVKRAVVSTARDTWEVYFSRIFPATGSVGTGVQLLAVSHVGIKLLRMVKGGQEAGGQLRVLRAYSFADILFVTMPSQNMLEFNLASEKVILFSARAHQVKTLVDDFILELKKDSDYVVAVRNFLPEDPALLAFHKGDIIHLQPLEPPRVGYSAGCVVRRKVVYLEELRRRGPDFGWRFGTIHGRVGRFPSELVQPAAAPDFLQLPTEPGRGRAAAVAAAVASAAAAQEVGRRREGPPVRARSADHGEDALALPPYTMLEFAQKYFRDPQRRPQDGLRLKSKEPRESRTLEDMLCFTKTPLQESLIELSDSSLSKMATDMFLAVMRFMGDAPLKGQSDLDVLCNLLKLCGDHEVMRDECYCQVVKQITDNTSSKQDSCQRGWRLLYIVTAYHSCSEVLHPHLTRFLQDVSRTPGLPFQGIAKACEQNLQKTLRFGGRLELPSSIELRAMLAGRSSKRQLFLLPGGLERHLKIKTCTVALDVVEEICAEMALTRPEAFNEYVIFVVTNRGQHVCPLSRRAYILDVASEMEQVDGGYMLWFRRVLWDQPLKFENELYVTMHYNQVLPDYLKGLFSSVPASRPSEQLLQQVSKLASLQHRAKDHFYLPSVREVQEYIPAQLYRTTAGSTWLNLVSQHRQQTQALSPHQARAQFLELQQHCCASPLHPCHQPQWPQLSQHRDSWTGTVSCGGRARGEPAQCP

SEQ ID NO: 24996 - protein, 1488 aa, Homo sapiens
MEAGSGPPGGPGSESPNRAVEYLLELNNIIESQQQLLETQRRRIEELEGQLDQLTQENRDLREESQLHRGELHRDPHGARDSPGRESQYQNLRETQFHHRELRESQFHQAARDVGYPNREGAYQNREAVYRDKERDASYPLQDTTGYTARERDVAQCHLHHENPALGRERGGREAGPAHPGREKEAGYSAAVGVGPRPPRERGQLSRGASRSSSPGAGGGHSTSTSTSPATTLQRKSDGENSRTVSVEGDAPGSDLSTAVDSPGSQPPYRLSQLPPSSSHMGGPPAGVGLPWAQRARLQPASVALRKQEEEEIKRSKALSDSYELSTDLQDKKVEMLERKYGGSFLSRRAARTIQTAFRQYRMNKNFERLRSSASESRMSRRIILSNMRMQFSFEEYEKAQNPAYFEGKPASLDEGAMAGARSHRLERGLPYGGSCGGGIDGGGSSVTTSGEFSNDITELEDSFSKQVKSLAESIDEALNCHPSGPMSEEPGSAQLEKRESKEQQEDSSATSFSDLPLYLDDTVPQQSPERLPSTEPPPQGRPEFWAPAPLPPVPPPVPSGTREDGSREEGTRRGPGCLECRDFRLRAAHLPLLTIEPPSDSSVDLSDRSDRGSVHRQLVYEADGCSPHGTLKHKGPPGRAPIPHRHYPAPEGPAPAPPGPLPPAPNSGTGPSGVAGGRRLGKCEAAGENSDGGDNESLESSSNSNETINCSSGSSSRDSLREPPATGLCKQTYQRETRHSWDSPAFNNDVVQRRHYRIGLNLFNKKPEKGIQYLIERGFLSDTPVGVAHFILERKGLSRQMIGEFLGNRQKQFNRDVLDCVVDEMDFSSMDLDDALRKFQSHIRVQGEAQKVERLIEAFSQRYCVCNPALVRQFRNPDTIFILAFAIILLNTDMYSPSVKAERKMKLDDFIKNLRGVDNGEDIPRDLLVGIYQRIQGRELRTNDDHVSQVQAVERMIVGKKPVLSLPHRRLVCCCQLYEVPDPNRPQRLGLHQREVFLFNDLLVVTKIFQKKKILVTYSFRQSFPLVEMHMQLFQNSYYQFGIKLLSAVPGGERKVLIIFNAPSLQDRLRFTSDLRESIAEVQEMEKYRVESELEKQKGMMRPNASQPGGAKDSVNGTMARSSLEDTYGAGDGLKRGALSSSLRDLSDAGKRGRRNSVGSLDSTIEGSVISSPRPHQRMPPPPPPPPPEEYKSQRPVSNSSSFLGSLFGSKRGKGPFQMPPPPTGQASASSSSASSTHHHHHHHHHGHSHGGLGVLPDGQSKLQALHAQYCQGPGPAPPPYLPPQQPSLPPPPQQPPPLPQLGSIPPPPASAPPVGPHRHFHAHGPVPGPQHYTLGRPGRAPRRGAGGHPQFAPHGRHPLHQPTSPLPLYSPAPQHPPAHKQGPKHFIFSHHPQMMPAAGAAGGPGSRPPGGSYSHPHHPQSPLSPHSPIPPHPSYPPLPPPSPHTPHSPLPPTSPHGPLHASGPPGTANPPSANPKAKPSRISTVV

SEQ ID NO: 24997 - protein, 614 aa, Homo sapiens
DETQKSVSLLRPPFSQLPSKSRSSSLTLPSSRDPQPLRIQSCYLGDHISDGAWDPEGEGMRGGSRALAAVREATQRIQAVLAVQGPLLLSRDPAQYCHAVWGDPDSPNYHRCSLLNPGYKGESCLGAKIPDTHLRGYALWPEQGPPQLVQPDGPGVQNTDFLLYVRVAHTSKCHQEPSVIAYAACCQLDSEDRPLAGTIVYCAQHLTSPSLSHSDIVMATLHELLHALGFSGQLFKKWRDCPSGFSVRENCSTRQLVTRQDEWGQLLLTTPAVSLSLAKHLGVSGASLGVPLEEEEGLLSSHWEARLLQGSLMTATFDGAQRTRLDPITLAAFKDSGWYQVNHSAAEELLWGQGSGPEFGLVTTCGTGSSDFFCTGSGLGCHYLHLDKGSCSSDPMLEGCRMYKPLANGIPGYYGLLFCPRGRLCQTNEDINAVTSPPVSLSTPDPLFQLSLELAGPPGHSLGKEQQEGLAEAVLEALASKGGTGRCYFHGPSITTSLVFTVHMWKSPGCQGPSVATLHKALTLTLQKKPLEVYHGGANFTTQPSKLLVTSDHNPSMTHLRLSMGLCLMLLILVGVMGTTAYQKRATLPVRPSASYHSPELHSTRVPVRGIREV

SEQ ID NO: 24998 - protein, 308 aa, Homo sapiens
PYSDGVLYGSPTAENVGKPTIIEITAYNRRTFETARHNLIINIMSAEDFPLPYQAEFFIKNMNVEEMLASEVLGDFLGAVKNVWQPERLNAINITSALDRGGRVPLPINDLKEGVYVMVGADVPFSSCLREVENPQNQLRCSQEMEPVITCDKKFRTQFYIDWCKISLVDKTKQVSTYQEVIRGEGILPDGGEYKPPSDSLKSRDYYTDFLITLAVPSAVALVLFLILAYIMCCRREGVIQLVHHSAIQKSTKELRDMSKNREIAWPLSTLPVFHPVTGEIIPPLHTDNYDSTNMPLMQTQQIPSRTQ

SEQ ID NO: 24999 - protein, 372 aa, Homo sapiens
MAMVVSSWRDPQDDVAGGNPGGPNPAAQSQQHIECVVCGDKSSGKHYGQFTCEGCKSFFKRSVRRNLTYTCRANRNCPIDQHHRNQCQYCRLKKCLKVGMRREAVQRGRMPPTQPNPGQYALTNGDPLNGHCYLSGYISLLLRAEPYPTSRYGSQCMQPNNIMGIENICELAARLLFSAVEWARNIPFFPDLQITDQVSLLRLTWSELFVLNAAQCSMPLHVAPLLAAAGLHASPMSADRVVAFMDHIRIFQEQVEKLKALHVDSAEYSCLKAIVLFTSDACGLSDAAHIESLQEKSQCALEEYVRSQYPNQPSRFGKLLLRLPSLRTVSSSVIEQLFFVRLVGKTPIETLIRDMLLSGSSFNWPYMSIQCS

SEQ ID NO: 25000 - protein, 795 aa, Homo sapiens
MAVLLLLLRALRRGPGPGPRPLWGPGPAWSPGFPARPGRGRPYMASRPPGDLAEAGGRALQSLQLRLLTPTFEGINGLLLKQHLVQNPVRLWQLLGGTFYFNTSRLKQKNKEKDKSKGKAPEEDEEERRRRERDDQMYRERLRTLLVIAVVMSLLNALSTSGGSISWNDFVHEMLAKGEVQRVQVVPESDVVEVYLHPGAVVFGRPRLALMYRMQVANIDKFEEKLRAAEDELNIEAKDRIPVSYKRTGFFGNALYSVGMTAVGLAILWYVFRLAGMTGREGGFSAFNQLKMARFTIVDGKMGKGVSFKDVAGMHEAKLEVREFVDYLKSPERFLQLGAKVPKGALLLGPPGCGKTLLAKAVATEAQVPFLAMAGPEFVEVIGGLGAARVRSLFKEARARAPCIVYIDEIDAVGKKRSTTMSGFSNTEEEQTLNQLLVEMDGMGTTDHVIVLASTNRADILDGALMRPGRLDRHVFIDLPTLQERREIFEQHLKSLKLTQSSTFYSQRLAELTPGFSGADIANICNEAALHAAREGHTSVHTLNFEYAVERVLAGTAKKSKILSKEEQKVVAFHESGHALVGWMLEHTEAVMKVSITPRTNAALGFAQMLPRDQHLFTKEQLFERMCMALGGRASEALSFNEVTSGAQDDLRKVTRIAYSMVKQFGMAPGIGPISFPEAQEGLMGIGRRPFSQGLQQMMDHEARLLVAKAYRHTEKVLQDNLDKLQALANALLEKEVINYEDIEALIGPPPHGPKKMIAPQRWIDAQREKQDLGEEETEETQQPPLGGEEPTWPK

SEQ ID NO: 25001 - protein, 1486 aa, Homo sapiens
MDNQQDKAIVASANGENTLINGVKENDSEDQDVAMKSFAALEAAAPIQPTPVAQKETLMYPRGLLPLPSKKPCMQSPPSPLGLIEAPEHAANSASVNAISLTSGIAKGLNTWSLPNECEKAPFAIMEPAGMSALNGDCLMQPSRTCLGCFMESKDAVDPEPGISLKVGDLNRDYETCAVSDIGIQCINAGENMKYGEQLLSDQLLGFPLHKSRAGDRRETEKPDIDLEDPAQKSYYEALLLDKCNTEEALLANSNQDWGYFETFISESKIELLDLCSKNELSVNLFSEEDVDNYMFDDDESTLGSDVCSLKIRYESFQDNVRDKTTLLMQEDAQFNFFPSVFTTCPKRESKSGALKQSSDFSQFKVPDVSIIWGEEDKNLDKKKGKEEGQEDKGVEKKDGKDNGEKPALNKPCSGTEVEQLKNPKQGHLANSLETSGSFSDDSSFIEISYDAMGEIKDCSRYMARDTNSGSSSSQQNYGLRAKRKVRYSEDYLYDVDSLEGEKVNERKEWLPVGSKEEDDDEWCPKKRRKVTRKEPPVIIKYIIINRFKGEKNMLVKLGKVDASETTVNLSENQLNKYAKLAPLKGFWQKKKKQRNTNTDSIKTPFSQKQSFEPGSFEVSFLPPARKRKSKLGNRHRIQRIPSIEISASSKQISLCNDQRHASNHKEDGGLKGTLKSAPLGAPSCANGSHLNDITGPDSVKVKAQDTEFKGPERKVLNKIKFKSEARLKSKKVKAAGQESKPIVQMSPLLENQSSKANLKNEVIPGTSNSSRLSEFHEAKAAKSSTFLPTTCSSEMPLSSANVTTNIPVIPGGYLQTLLDASDLSNNTSISYFSHHSPEQNEGSLTQTEKSFVPLQPTQDCVLTSSSDSELQQSSHNFKMESSNYRNVWPNKATSGTQEFMAEVSREIAPTQSSEFGASQVVSMENNLTPTTYNPICLNSGGSNCNKVLYDSMQDTQLPSDDSYQLCHFNNGEICFPFQQGPVNMDDGRLFSFDSMAPLSVSSSNYCSLSLKSCEKDGDDDITDDFLAHCSPKLVIQQSIDEIAPLKESTDLLDISNFTPDKFRHSSLSEMSPPDTPSLSPQITRCESMKTLGTLKGFQEGVPGPLDSVEKIKWDCSTLSRQVQMEDGFTLNNHQFQFHMFNDEDSVSLLQKNPCLSTFNDPSGQISTNNKVSKSRKKSSPSKSGAMNQSSSQKNTRKKSLKGNNKGIEKPPGKNSRQVPKSTKKGKYMAAINGEKMQIGIGRGGSQTNTISSTGKTLAECIQHGGPMASMKMPSQKGLSGDWALGKESSPGWSDMSMGTNTNSLLDDDQREFQEPSYILSNIASGMADVQRFMMASIEPLWEPMEHHGDPNIFYSPESNSLKLKTLKILAGTPQESKKKINSGSQGATKNHRSIKGVSKSNGKTAIGDPGRANMPGYNEDSRSTFFDKKYSNMSTLGNNGPTHKKLYRHKSSSKALRDEKCKGKHMEREQVHKDESGTASFEKLR

SEQ ID NO: 25002 - protein, 1040 aa, Homo sapiens
AAQVAKEKKKKKKKKKAENAEGQTPAIGPDGEPLDETSQMSDLPVKVIHVESGKILTGTDAPKAGQLEAWLEMNPGYEVAPRSDSEESGSEEEEEEEEEEQPQAAQPPTLPVEEKKKIPDPDSDDVSEVDARHIIENAKQDVDDEYGVSQALARGLQSYYAVAHAVTERVDKQSALMVNGVLKQYQIKGLEWLVSLYNNNLNGILADEMGLGKTIQTIALITYLMEHKRINGPFLIIVPLSTLSNWAYEFDKWAPSVVKVSYKGSPAARRAFVPQLRSGKFNVLLTTYEYIIKDKHILAKIRWKYMIVDEGHRMKNHHCKLTQVLNTHYVAPRRLLLTGTPLQNKLPELWALLNFLLPTIFKSCSTFEQWFNAPFAMTGEKVDLNEEETILIIRRLHKVLRPFLLRRLKKEVEAQLPEKVEYVIKCDMSALQRVLYRHMQAKGVLLTDGSEKDKKGKGGTKTLMNTIMQLRKICNHPYMFQHIEESFSEHLGFTGGIVQGLDLYRASGKFELLDRILPKLRATNHKVLLFCQMTSLMTIMEDYFAYRGFKYLRLDGTTKAEDRGMLLKTFNEPGSEYFIFLLSTRAGGLGLNLQSADTVIIFDSDWNPHQDLQAQDRAHRIGQQNEVRVLRLCTVNSVEEKILAAAKYKLNVDQKVIQAGMFDQKSSSHERRAFLQAILEHEEQDESRHCSTGSGSASFAHTAPPPAGVNPDLEEPPLKEEDEVPDDETVNQMIARHEEEFDLFMRMDLDRRREEARNPKRKPRLMEEDELPSWIIKDDAEVERLTCEEEEEKMFGRGSRHRKEVDYSDSLTEKQWLKAIEEGTLEEIEEEVRQKKSSRKRKRDSDAGSSTPTTSTRSRDKDDESKKQKKRGRPPAEKLSPNPPNLTKKMKKIVDAVIKYKDSSGRQLSEVFIQLPSRKELPEYYELIRKPVDFKKIKIYEDSIVLQSVFTSVRQKIEKEDDSEGEESEEEEEGEEEGSESESRSVKVKIKLGRKEKAQDRLKGGRRRPSRGSRAKPVVSDDDSEEEQEEDRSGSGSEED

SEQ ID NO: 25003 - protein, 310 aa, Homo sapiens
GWKCFVYHFAVFLIVLVCLIFSVLSTIEQYAALATGTLFWMVTVTTIGYGDKVPQTWVGKTIASCFSVFAISFFALPATAWRCYAAENPDSSTWKIYIRKAPRSHTLLSPSPKPKKSVVVKKKKFKLDKDNGVTPGEKMLTVPHITCDPPEERRLDHFSVDGYDSSVRKSPTLLEVSMPHFMRTNSFAEDLDLEGETLLTPITHISQLREHHRATIKVIRRMQYFVAKKKFQQARKPYDVRDVIEQYSQGHLNLMVRIKELQRRLDQSIGKPSLFISVSEKSKDRGSNTIGARLNRVEDKSTKKRPSPGS

SEQ ID NO: 25004 - protein, 1145 aa, Homo sapiens
MSLNNSSNVFLDSVPSNTNRFQVSVINENHESSAAADDNTDPPHYEETSFGDEAQKRLRISFRPGNQECYDNFLQSGETAKTDASFHAYDSHTNTYYLQTFGHNTMDAVPKIEYYRNTGSISGPKVNRPSLLEIHEQLAKGLTLSPRLECSGTTVVHCSLDLPSSSNPPTSASQVDGTRGACHHTQNVAVTPSSADRVANGDGIPGDEQAENKEDDQAGVVKFGWVKGVLVRCMLNIWGVMLFIRLSWIVGEAGIGLGVLIILLSTMVTSITGLSTSAIATNGFVRGGGAYYLISRSLGPEFGGSIGLIFAFANAVAVAMYVVGFAETVVDLLKESDSMMVDPTNDIRIIGSITVVILLGISVAGMEWEAKAQVILLVILLIAIANFFIGTVIPSNNEKKSRGFFNYQASIFAENFGPRFTKGEGFFSVFAIFFPAATGILAGANISGDLEDPQDAIPRGTMLAIFITTVAYLGVAICVGACVVRDATGNMNDTIISGMNCNGSAACGLGYDFSRCRHEPCQYGLMNNFQVMSMVSGFGPLITAGIFSATLSSALASLVSAPKVFQALCKDNIYKALQFFAKGYGKNNEPLRGYILTFLIAMAFILIAELNTIAPIISNFFLASYALINFSCFHASYAKSPGWRPAYGIYNMWVSLFGAVLCCAVMFVINWWAAVITYVIEFFLYVYVTCKKPDVNWGSSTQALSYVSALDNALELTTVEDHVKNFRPQCIVLTGGPMTRPALLDITHAFTKNSGLCICCEVFVGPRKLCVKEMNSGMAKKQAWLIKNKIKAFYAAVAADCFRDGVRSLLQASGLGRMKPNTLVIGYKKNWRKAPLTEIENYVGIIHDAFDFEIGVVIVRISQGFDISQVLQVQEELERLEQERLALEATIKDNECEEESGGIRGLFKKAGKLNITKTTPKKDGSINTSQSMHVGEFNQKLVEASTQFKKKQEKGTIDVWWLFDDGGLTLLIPYILTLRKKWKDCKLRIYVGGKINRIEEEKIVMASLLSKFRIKFADIHIIGDINIRPNKESWKVFEEMIEPYRLHESCKDLTTAEKLKRETPWKITDAELEAVKEKSYRQVRLNELLQEHSRAANLIVLSLPVARKGSISDLLYMAWLEILTKNLPPVLLVRGNHKNVLTFYS

SEQ ID NO: 25005 - protein, 409 aa, Homo sapiens
MQPPPSLCGRALVALVLACGLSRIWGEERGFPPDRATPLLQTAEIMTPPTKTLWPKGSNASLARSLAPAEVPKGDRTAGSPPRTISPPPCQGPIEIKETFKYINTVVSCLVFVLGIIGNSTLLRIIYKNKCMRNGPNILIASLALGDLLHIVIDIPINVYKLLAEDWPFGAEMCKLVPFIQKASVGITVLSLCALSIDRYRAVASWSRIKGIGVPKWTAVEIVLIWVVSVVLAVPEAIGFDIITMDYKGSYLRICLLHPVQKTAFMQFYKTAKDWWLFSFYFCLPLAITAFFYTLMTCEMLRKKSGMQIALNDHLKQRREVAKTVFCLVLVFALCWLPLHLSRILKLTLYNQNDPNRCELLSFLLVLDYIGINMASLNSCINPIALYLVSKRFKNCFKVRDYPKIKSSL

SEQ ID NO: 25006 - protein, 1645 aa, Homo sapiens
MASGLGSPSPCSAGSEEEDMDALLNNSLPPPHPENEEDPEEDLSETETPKLKKKKKPKKPRDPKIPKSKRQKKELGDSSGEGPEFVEEEEEVALRSDSEGSDYTPGKKKKKKLGPKKEKKSKSKRKEEEEEEDDDDDSKEPKSSAQLLEDWGMEDIDHVFSEEDYRTLTNYKAFSQFVRPLIAAKNPKIAVSKMMMVLGAKWREFSTNNPFKGSSGASVAAAAAAAVAVVESMVTATEVAPPPPPVEVPIRKAKTKEGKGPNARRKPKGSPRVPDAKKPKPKKVAPLKIKLGGFGSKRKRSSSEDDDLDVESDFDDASINSYSVSDGSTSRSSRSRKKLRTTKKKKKGEEEVTAVDGYETDHQDYCEVCQQGGEIILCDTCPRAYHMVCLDPDMEKAPEGKWSCPHCEKEGIQWEAKEDNSEGEEILEEVGGDLEEEDDHHMEFCRVCKDGGELLCCDTCPSSYHIHCLNPPLPEIPNGEWLCPRCTCPALKGKVQKILIWKWGQPPSPTPVPRPPDADPNTPSPKPLEGRPERQFFVKWQGMSYWHCSWVSELQLELHCQVMFRNYQRKNDMDEPPSGDFGGDEEKSRKRKNKDPKFAEMEERFYRYGIKPEWMMIHRILNHSVDKKGHVHYLIKWRDLPYDQASWESEDVEIQDYDLFKQSYWNHRELMRGEEGRPGKKLKKVKLRKLERPPETPTVDPTVKYERQPEYLDATGGTLHPYQMEGLNWLRFSWAQGTDTILADEMGLGKTVQTAVFLYSLYKEGHSKGPFLVSAPLSTIINWEREFEMWAPDMYVVTYVGDKDSRAIIRENEFSFEDNAIRGGKKASRMKKEASVKFHVLLTSYELITIDMAILGSIDWACLIVDEAHRLKNNQSKFFRVLNGYSLQHKLLLTGTPLQNNLEELFHLLNFLTPERFHNLEGFLEEFADIAKEDQIKKLHDMLGPHMLRRLKADVFKNMPSKTELIVRVELSPMQKKYYKYILTRNFEALNARGGGNQVSLLNVVMDLKKCCNHPYLFPVAAMEAPKMPNGMYDGSALIRASGKLLLLQKMLKNLKEGGHRVLIFSQMTKMLDLLEDFLEHEGYKYERIDGGITGNMRQEAIDRFNAPGAQQFCFLLSTRAGGLGINLATADTVIIYDSDWNPHNDIQAFSRAHRIGQNKKVMIYRFVTRASVEERITQVAKKKMMLTHLVVRPGLGSKTGSMSKQELDDILKFGTEELFKDEATDGGGDNKEGEDSSVIHYDDKAIERLLDRNQDETEDTELQGMNEYLSSFKVAQYVVREEEMGEEEEVEREIIKQEESVDPDYWEKLLRHHYEQQQEDLARNLGKGKRIRKQVNYNDGSQEDRDWQDDQSDNQSDYSVASEEGDEDFDERSEAPRRPSRKGLRNDKDKPLPPLLARVGGNIEVLGFNARQRKAFLNAIMRYGMPPQDAFTTQWLVRDLRGKSEKEFKAYVSLFMRHLCEPGADGAETFADGVPREGLSRQHVLTRIGVMSLIRKKVQEFEHVNGRWSMPELAEVEENKKMSQPGSPSPKTPTPSTPGDTQPNTPAPVPPAEDGIKIEENSLKEEESIEGEKEVKSTAPETAIECTQAPAPASEDEKVVVEPPEGEEKVEKAEVKERTEEPMETEPKGWSAMVRSRLTATSAS

SEQ ID NO: 25007 - protein, 453 aa, Homo sapiens
MAQQANVGELLAMLDSPMLGVRDDVTAVFKENLNSDRGPMLVNTLVDYYLETSSQPALHILTTLQEPHDKHLLDRINEYVGKAATRLSILSLLGHVIRLQPSWKHKLSQAPLLPSLLKCLKMDTDVVVLTTGVLVLITMLPMIPQSGKQHLLDFFDIFGRLSSWCLKKPGHVAEVYLVHLHASVYALFHRLYGMYPCNFVSFLRSHYSMKENLETFEEVVKPMMEHVRIHPELVTGSKDHELDPRRWKRLETHDVVIECAKISLDPTEASYEDGYSVSHQISARFPHRSADVTTSPYADTQNSYGCATSTPYSTSRLMLLNMPGQLPQTLSSPSTRLITEPPQATLWSPSMVCGMTTPPTSPGNVPPDLSHPYSKVFGTTGGKGTPLGTPATSPPPAPLCHSDDYVHISLPQATVTPPRKVRSSSSAIPLPRHSDSLASLTLRSLIMPDRILT

SEQ ID NO: 25008 - protein, 686 aa, Homo sapiens
MERALPRGRCLPLGKDLSSAKRKFADSLNEFKFQCIGDAETDDEMCIARSLQEFATVLRNLEDERIRMIENASEVLITPLEKFRKEQIGAAKEAKKKYDKETEKYCGILEKHLNLSSKKKESQLQEADSQVDLVRQHFYEVSLEYVFKVQEVQERKMFEFVEPLLAFLQGLFTFYHHGYELAKDFGDFKTQLTISIQNTRNRFEGTRSEVESLMKKMKENPLEHKTISPYTMEGYLYVQEKRHFGTSWVKHYCTYQRDSKQITMVPFDQKSGGKGGEDESVILKSCTRRKTDSIEKRFCFDVEAVDRPGVITMQALSEEDRRLWMEAMDGREPVYNSNKDSQSEGTAQLDSIGFSIIRKCIHAVETRGINEQGLYRIVGVNSRVQKLLSVLMDPKTASETETDICAEWEIKTITSALKTYLRMLPGPLMMYQFQRSFIKAAKLENQESRVSEIHSLVHRLPEKNRQMLQLLMNHLANVANNHKQNLMTVANLGVVFGPTLLRPQEETVAAIMDIKFQNIVIEILIENHEKIFNTVPDMPLTNAQLHLSRKKSSDSKPPSCSERPLTLFHTVQSTEKQEQRNSIINSSLESVSSNPNSILNSSSSLQPNMNSSDPDLAVVKPTRPNSLTPFRKAKALYACKAEHDSELSFTAGTVFDNVHPSQEPGWLEGTLNGKTGLIPENYVEFL

SEQ ID NO: 25009 - protein, 220 aa, Homo sapiens
MKATWIRLLKRAKGGRLKNSDICGSADSYTSRPSDSDVSLEEDREAVRREAERQAQAQLEKAKTKPVAFAVRTNVSYSAAHEDDVPVPGMAISFEAKDFLHVKEKFNNDWWIGRLVKEGCEIGFIPSPVKLENMRLQHEQRAKQGKFYSSKSGGNSSSSLGDIVPSSRKSTPPSSAKQKQKSVQNLQMNKTSGKLQACFGGLLQSTLLRMMWYLPCDQWS

SEQ ID NO: 25010 - protein, 1865 aa, Homo sapiens
MSQKSWIESTLTKRECVYIIPSSKDPHRCLPGCQICQQLVRCFCGRLVKQHACFTASLAMKYSDVKLGDHFNQAIEEWSVEKHTEQSPTDAYGVINFQGGSHSYRAKYVRLSYDTKPEVILQLLLKEWQMELPKLVISVHGGMQKFELHPRIKQLLGKGLIKAAVTTGAWILTGGVNTGVAKHVGDALKEHASRSSRKICTIGIAPWGVIENRNDLVGRDVVAPYQTLLNPLSKLNVLNNLHSHFILVDDGTVGKYGAEVRLRRELEKTINQQRIHARIGQGVPVVALIFEGGPNVILTVLEYLQESPPVPVVVCEGTGRAADLLAYIHKQTEEGGNLPDAAEPDIISTIKKTFNFGQNEALHLFQTLMECMKRKELITVFHIGSDEHQDIDVAILTALLKGTNASAFDQLILTLAWDRVDIAKNHVFVYGQQWLVGSLEQAMLDALVMDRVAFVKLLIENGVSMHKFLTIPRLEELYNTKQGPTNPMLFHLVRDVKQGNLPPGYKITLIDIGLVIEYLMGGTYRCTYTRKRFRLIYNSLGGNNRRSGRNTSSSTPQLRKSHESFGNRADKKEKMRHNHFIKTAQPYRPKIDTVMEEGKKKRTKDEIVDIDDPETKRFPYPLNELLIWACLMKRQVMARFLWQHGEESMAKALVACKIYRSMAYEAKQSDLVDDTSEELKQYSNDFGQLAVELLEQSFRQDETMAMKLLTYELKNWSNSTCLKLAVSSRLRPFVAHTCTQMLLSDMWMGRLNMRKNSWYKVILSILVPPAILLLEYKTKAEMSHIPQSQDAHQMTMDDSENNFQNITEEIPMEVFKEVRILDSNEGKNEMEIQMKSKKLPITRKFYAFYHAPIVKFWFNTLAYLGFLMLYTFVVLVQMEQLPSVQEWIVIAYIFTYAIEKVREIFMSEAGKVNQKIKVWFSDYFNISDTIAIISFFIGFGLRFGAKWNFANAYDNHVFVAGRLIYCLNIIFWYVRLLDFLAVNQQAGPYVMMIGKMVANMFYIVVIMALVLLSFGVPRKAILYPHEAPSWTLAKDIVFHPYWMIFGEVYAYEIDVCANDSVIPQICGPGTWLTPFLQAVYLFVQYIIMVNLLIAFFNNVYLQVKAISNIVWKYQRYHFIMAYHEKPVLPPPLIILSHIVSLFCCICKRRKKDKTSDGPKLFLTEEDQKKLHDFEEQCVEMYFNEKDDKFHSGSEERIRVTFERVEQMCIQIKEVGDRVNYIKRSLQSLDSQIGHLQDLSALTVDTLKTLTAQKASEASKVHNEITRELSISKHLAQNLIDDGPVRPSVWKKHGVVNTLSSSLPQGDLESNNPFHCNILMKDDKDPQCNIFGQDLPAVPQRKEFNFPEAGSSSGALFPSAVSPPELRQRLHGVELLKIFNKNQKLGSSSTSIPHLSSPPTKFFVSTPSQPSCKSHLETGTKDQETVCSKATEGDNTEFGAFVGHRDSMDLQRFKETSNKIKILSNNNTSENTLKRVSSLAGFTDCHRTSIPVHSKQAEKISRRPSTEDTHEVDSKAALIPDWLQDRPSNREMPSEEGTLNGLTSPFKPAMDTNYYYSAVERNNLMRLSQSIPFTPVPPRGEPVTVYRLEESSPNILNNSMSSWSQLGLCAKIEFLSKEEMGGGLRRAVKVQCTWSEHDILKSGHLYIIKSFLPEVVNTWSSIYKEDTVLHLCLREIQQQRAAQKLTFAFNQMKPKSIPYSPRFLEVFLLYCHSAGQWFAVEECMTGEFRKYNNNNGDEIIPTNTLEEIMLAFSHWTYEYTRGELLVLDLQGVGENLTDPSVIKAEEKRSCDMVFGPANLGEDAIKNFRAKHHCNSCCRKLKLPDLKRNDYTPDKIIFPQDEPSDLNLQPGNSTKESESTNSVRLML

SEQ ID NO: 25011 - protein, 1089 aa, Homo sapiens
PVSASASVSASVPASTSAAAITSSSAPASAPAPTPILASVSTPASVTILASASIPILASALASTSAPTPAPAASSPAAPVITAPTIPASAPTASVPLAPASASAPAPAPTPVSAPNPAPPAPAQTQAQTHKPVQNPLQTTSQSSKQPPPSIRLPSAQTPNGTDYVASGKSIQTPQSHGTLTAELWDNKVAPPAVLNDISKKLGPISPPQPPSVSAWNKPLTSFGSAPSSEGAKNGQESGLEIGTDTIQFGAPASNGNENEVVPVLSEKSADKIPEPKEQRQKQPRAGPIKAQKLPDLSPVENKEHKPGPIGKERSLKNRKVKDAQQVEPEGQEKPSPATVRSTDPVTTKETKAVSEMSTEIGTMISVSSAEYGTNAKESVTDYTTPSSSLPNTVATNNTKMEDTLVNNVPLPNTLPLPKRETIQQSSSLTSVPPTTFSLTFKMESARKAWENSPNVREKGSPVTSTAPPIATGVSSSASGPSTANYNSFSSASMPQIPVASVTPTASLSGAGTYTTSSLSTKSTTTSDPPNICKVKPQQLQTSSLPSASHFSQLSCMPSLIAQQQQNPQVYVSQSAAAQIPAFYMDTSHLFNTQHARLAPPSLAQQQGFQPGLSQPTSVQQIPIPIYAPLQGQHQAQLSLGAGPAVSQAQELFSSSLQPYRSQPAFMQSSLSQPSVVLSGTAIHNFPTVQHQELAKAQSGLAFQQTSNTQPIPILYEHQLGQASGLGGSQLIDTHLLQARANLTQASNLYSGQVQQPGQTNFYNTAQSPSALQQVTVPLPASQLSLPNFGSTGQPLIALPQTLQPPLQHTTPQAQAQSLSRPAQVSQPFRGLIPAGTQHSMIATTGKMSEMELKAFGSGIDIKPGTPPIAGRSTTPTSSPFRATSTSPNSQSSKMNSIVYQKQFQSAPATVRMTQPFPTQFAPQILSQPNLVPPLVRAPHTNTFPAPVQRPPMALASQMPPPLTTGLMSHARLPHVARGPCGSLSGVRGNQAQAALKAEQDMKAKQRAEVLQSTQRFFSEQQQSKQIGGGKAQKVDSDSSKPPETLTDPPGVCQEKVEEKPPPAPSIATKPVRTGPIKPQAIKTEETKS

SEQ ID NO: 25012 - protein, 642 aa, Homo sapiens
MQFFDAEELLVDEEDDVFGEGLPTRLPEIMLVGSQSFSPGGPNGIIRSQSFAGFSGLQERRSRCNSFIENSSALKKPQAKLKKMHNLGHKNNNPPKEPQPKRVEEVYRALKNGLDEYLEVHQTELDKLTAQLKDMKRNSRLGVLYDLDKQIKTIERYMRRLEFHISKVDELYEAYCIQRRLQDGASKMKQAFATSPASKAARESLTEINRSFKEYTENMCTIEVELENLLGEFSIKMKGLAGFARLCPGDQYEIFMKYGRQRWKLKGKIEVNGKQSWDGEETVFLPLIVGFISIKVTELKGLATHILVGSVTCETKELFAARPQVVAVDINDLGTIKLNLEITWYPFDVEDMTASSGAGNKAAALQRRMSMYSQGTPETPTFKDHSFFSNLPDDIFENGKAAEEKMPLSLSFSDLPNGDCALTSHSTGSPSNSTNPEITITPAEFNLSSLASQNEGMDDTSSASSRNSLGEGQEPKSHLKEEDPEEPRKPASAPSEACRRQSSGAGAEHLFLENDVAEALLQESEEASELKPVELDTSEGNITKQLVKRLTSAEVPMATDRLLSEGSVGGESEGCRSFLDGSLEDAFNGLLLALEPHKEQYKEFQDLNQEVMNLDDILKDAKHLDDQKLNGAASWTEITEGE

SEQ ID NO: 25013 - protein, 470 aa, Homo sapiens
MGLQACLLGLFALILSGKCSYSPEPDQRRTLPPGWVSLGRADPEEELSLTFALRQQNVERLSELVQAVSDPSSPQYVGGLHRFPPTSSLRQRPEPQVTGTVGLHLGVTPSVIRKRYNLTSQDVGSGTSNNSQACAQFLEQYFHDSDLAQFMRLFGGNFAHQASVARVVGQQGRGRAGIEASLDVQYLMSAGANISTWVYSSPGRHEGQEPFLQWLMLLSNESALPHVHTVSYGDDEDSLSSAYIQRVNTELMKAAARGLTLLFASGDSGAGCWSVSGRHQFRPTFPASSPYVTTVGGTSFQEPFLITNEIVDYISGGGFSNVFPRPSYQEEAVTKFLSSSPHLPPSSYFNASGRAYPDVAALSDGYWVVSNRVPIPWVSGTSASTPVFGGILSLINEHRILSGRPPLGFLNPRLYQQHGAGLFDVTRGCHESCLDEEVEGQGFCSGPGWDPVTGWGTPNFPALLKTLLNP

SEQ ID NO: 25014 - protein, 889 aa, Homo sapiens
MWGLGARGPDRGLLLALALGGLARAGGVEVEPGGAHGESGGFQVVTFEWAHVQDPYVIALWILVASLAKIGFHLSHKVTSVVPESALLIVLGLVLGGIVWAADHIASFTLTPTVFFFYLLPPIVLDAGYFMPNRLFFGNLGTILLYAVVGTVWNAATTGLSLYGVFLSGLMGDLQIGLLDFLLFGSLMAAVDPVAVLAVFEEVHVNEVLFIIVFGESLLNDAVTVVLYNVFESFVALGGDNVTGVDCVKGIVSFFVVSLGGTLVGVVFAFLLSLVTRFTKHVRIIEPGFVFIISYLSYLTSEMLSLSAILAITFCGICCQKYVKANISEQSATTVRYTMKMLASSAETIIFMFLGISAVNPFIWTWNTAFVLLTLVFISVYRAIGVVLQTWLLNRYRMVQLEPIDQVVLSYGGLRGAVAFALVVLLDGDKVKEKNLFVSTTIIVVFFTVIFQGLTIKPLVQWLKVKRSEHREPRLNEKLHGRAFDHILSAIEDISGQIGHNYLRDKWSHFDRKFLSRVLMRRSAQKSRDRILNVFHELNLKDAISYVAEGERRGSLAFIRSPSTDNVVNVDFTPRSSTVEASVSYLLRENVSAVCLDMQSLEQRRRSIRDAEDMVTHHTLQQYLYKPRQEYKHLYSRHELTPTEDEKQDREIFHRTMRKRLESFKSTKLGLNQNKKAAKLYKRERAQKRRNSSIPNGKLPMESPAQNFTIKEKDLELSDTEEPPNYDEEMSGGIEFLASVTKDTASDSPAGDTGSDTPLTGRSSPRHGPPTAAAAVPEKPQIPARLQRPRAPSPASPTPAPAQNSESAAPAPAEPPEGEPGAGPAPGAGPERRGLPSAHARSAAARRVHSRRSFQRPRARRRPALLKLASLPPSCHAPPHALEQEETPL

SEQ ID NO: 25015 - protein, 1679 aa, Homo sapiens
MASYVDNSFRQAVMKNPPERTPQDLEIVYSYLHGMEALSNLREHQLRLMCETVRYERHEANEVLYYPDDIGTCWYILLSGSVFIKESMFLPRSSFGKRSAGSFRRGCECIVLEPSEMIVVDYMDENEEYFQRQASHRQSRRRFRKINQKGERQTIIDTVDPYPMGKPPLPRGYHTLPADFTKLHLTDSLHPQVTHVSSSHSGCSITSDSGSSSLSDIYQATESEAGDMDLSGLPETAVDSEDDDDEEDIERASDPLMSRDIVRDCLEKDPIDRTDDDIEQLLEFMHQLPAFANMTMSVRRELCAVMVFAVVERAGTIVLNDGEELDSWSVILNGSVEVTYPDGKAEILCMGNSFGVSPTMDKEYMKGVMRTKVDDCQFVCIAQQDYCRILNQVEKNMQKVEEEGEIVMVKEHRELDRTGTRKGHIVIKGTSERLTMHLVEEHSVVDPTFIEDFLLTYRTFLSSPMEVGKKLLEWFNDPSLRDKVTRVVLLWVNNHFNDFEGDPAMTRFLEEFENNLEREKMGGHLRLLNIACAAKAKRRLMTLTKPSREAPLPFILLGGSEKGFGIFVDSVDSGSKATEAGLKRGDQILEVNGQNFENIQLSKAMEILRNNTHLSITVKTNLFVFKELLTRLSEEKRNGAPHLPKIGDIKKASRYSIPDLAVDVEQVIGLEKVNKKSKANTVGGRNKLKKILDKTRISILPQKPYNDIGIGQSQDDSIVGLRQTKHIPTALPVSGTLSSSNPDLLQSHHRILDFSATPDLPDQVLRVFKADQQSRYIMISKDTTAKEVVIQAIREFAVTATPDQYSLCEVSVTPEGVIKQRRLPDQLSKLADRIQLSGRYYLKNNMETETLCSDEDAQELLRESQISLLQLSTVEVATQLSMRNFELFRNIEPTEYIDDLFKLRSKTSCANLKRFEEVINQETFWVASEILRETNQLKRMKIIKHFIKIALHCRECKNFNSMFAIISGLNLAPVARLRTTWEKLPNKYEKLFQDLQDLFDPSRNMAKYRNVLNSQNLQPPIIPLFPVIKKDLTFLHEGNDSKVDGLVNFEKLRMIAKEIRHVGRMASVNMDPALMFRTRKKKWRSLGSLSQGSTNATVLDVAQTGGHKKRVRRSSFLNAKKLYEDAQMARKVKQYLSNLELEMDEESLQTLSLQCEPATNTLPKNPGDKKPVKSETSPVAPRAGSQQKAQSLPQPQQQPPPAHKINQGLQVPAVSLYPSRKKVPVKDLPPFGINSPQALKKILSLSEEGSLERHKKQAEDTISNASSQLSSPPTSPQSSPRKGGSGNQLRSFGSGQLDLTSSSSSLGSYTLAPSGTVDNFSDSGHSEISSRSSIVSNSSFDSVPVSLHDERRQRHSVSIVETNLGMGRMERRTMIEPDQYSLGSYAPMSEGRGLYATATVISSPSTEELSQDQGDRASLDAADSGRGSWTSCSSGSHDNIQTIQHQRSWETLPFGHTHFDYSGDPAGLWASSSHMDQIMFSDHSTKYNRQNQSRESLEQAQSRASWASSTGYWGEDSEGDTGTIKRRGGKDVSIEAESSSLTSVTTEETKPVPMPAHIAVASSTTKGLIARKEGRYREPPPTPPGYIGIPITDFPEGHSHPARKPPDYNVALQRSRMVARSSDTAGPSSVQQPHGHPTSSRPVNKPQWHKPNESDPRLAPYQSQGFSTEEDEDEQVSAV

SEQ ID NO: 25016 - protein, 1805 aa, Homo sapiens
MAKPTSKDSGLKEKFKILLGLGTPRPNPRSAEGKQTEFIITAEILRELSMECGLNNRIRMIGQICEVAKTKKFEEHAVEALWKAVADLLQPERPLEARHAVLALLKAIVQGQGERLGVLRALFFKVIKDYPSNEDLHERLEVFKALTDNGRHITYLEEELADFVLQWMDVGLSSEFLLVLVNLVKFNSCYLDEYIARMVQMICLLCVRTASSVDIEVSLQVLDAVVCYNCLPAESLPLFIVTLCRTINVKELCEPCWKLMRNLLGTHLGHSAIYNMCHLMEDRAYMEDAPLLRGAVFFVGMALWGAHRLYSLRNSPTSVLPSFYQAMACPNEVVSYEIVLSITRLIKKYRKELQVVAWDILLNIIERLLQQLQTLDSPELRTIVHDLLTTVEELCDQNEFHGSQERYFELVERCADQRPESSLLNLISYRAQSIHPAKDGWIQNLQALMERFFRSESRGAVRIKVLDVLSFVLLINRQFYEEELINSVVISQLSHIPEDKDHQVRKLATQLLVDLAEGCHTHHFNSLLDIIEKVMARSLSPPPELEERDVAAYSASLEDVKTAVLGLLVILQTKLYTLPASHATRVYEMLVSHIQLHYKHSYTLPIASSIRLQAFDFLLLLRADSLHRLGLPNKDGVVRFSPYCVCDYMEPERGSEKKTSGPLSPPTGPPGPAPAGPAVRLGSVPYSLLFRVLLQCLKQESDWKVLKLVLGRLPESLRYKVLIFTSPCSVDQLCSALCSMLSGPKTLERLRGAPEGFSRTDLHLAVVPVLTALISYHNYLDKTKQREMVYCLEQGLIHRCASQCVVALSICSVEMPDIIIKALPVLVVKLTHISATASMAVPLLEFLSTLARLPHLYRNFAAEQYASVFAISLPYTNPSKFNQYIVCLAHHVIAMWFIRCRLPFRKDFVPFITKGLRSNVLLSFDDTPEKDSFRARSTSLNERPKSLRIARPPKQGLNNSPPVKEFKESSAAEAFRCRSISVSEHVVRSRIQTSLTSASLGSADENSVAQADDSLKNLHLELTETCLDMMARYVFSNFTAVPKRSPVGEFLLAGGRTKTWLVGNKLVTVTTSVGTGTRSLLGLDSGELQSGPESSSSPGVHVRQTKEAPAKLESQAGQQVSRGARDRVRSMSGGHGLRVGALDVPASQFLGSATSPGPRTAPAAKPEKASAGTRVPVQEKTNLAAYVPLLTQGWAEILVRRPTGNTSWLMSLENPLSPFSSDINNMPLQELSNALMAAERFKEHRDTALYKSLSVPAASTAKPPPLPRSNTVASFSSLYQSSCQGQLHRSVSWADSAVVMEEGSPGEVPVLVEPPGLEDVEAALGMDRRTDAYSRSSSVSSQEEKSLHAEELVGRGIPIERVVSSEGGRPSVDLSFQPSQPLSKSSSSPELQTLQDILGDPGDKADVGRLSPEVKARSQSGTLDGESAAWSASGEDSRGQPEGPLPSSSPRSPSGLRPRGYTISDSAPSRRGKRVERDALKSRATASNAEKVPGINPSFVFLQLYHSPFFGDESNKPILLPNESFERSVQLLDQIPSYDTHKIAVLYVGEGQSNSELAILSNEHGSYRYTEFLTGLGRLIELKDCQPDKVYLGGLDVCGEDGQFTYCWHDDIMQAVFHIATLMPTKDVDKHRCDKKRHLGNDFVSIVYNDSGEDFKLGTIKGQFNFVHVIVTPLDYECNLVSLQCRKDMEGLVDTSVAKIVSDRNLPFVARQMALHANMASQVHHSRSNPTDIYPSKWIARLRHIKRLRQRICEEAAYSNPSLPLVHPPSHSKAPAQTPAEPTPGYEVGQRKRLISSVEDFTEFV

SEQ ID NO: 25017 - protein, 1168 aa, Homo sapiens
MGDMTNSDFYSKNQRNESSHGGEFGCTMEELRSLMELRGTEAVVKIKETYGDTEAICRRLKTSPVEGLPGTAPDLEKRKQIFGQNFIPPKKPKTFLQLVWEALQDVTLIILEIAAIISLGLSFYHPPGEGNEGCATAQGGAEDEGEAEAGWIEGAAILLSVICVVLVTAFNDWSKEKQFRGLQSRIEQEQKFTVVRAGQVVQIPVAEIVVGDIAQVKYGDLLPADGLFIQGNDLKIDESSLTGESDQVRKSVDKDPMLLSGTHVMEGSGRMLVTAVGVNSQTGIIFTLLGAGGEEEEKKDKKGKMQDGNVDASQSKAKQQDGAAAMEMQPLKSAEGGDADDRKKASMHKKEKSVLQGKLTKLAVQIGKAGLVMSAITVIILVLYFTVDTFVVNKKPWLPECTPVYVQYFVKFFIIGVTVLVVAVPEGLPLAVTISLAYSVKKMMKDNNLVRHLDACETMGNATAICSDKTGTLTTNRMTVVQAYVGDVHYKEIPDPSSINTKTMELLINAIAINSAYTTKILPPEKEGALPRQVGNKTECGLLGFVLDLKQDYEPVRSQMPEEKLYKVYTFNSVRKSMSTVIKLPDESFRMYSKGASEIVLKKCCKILNGAGEPRVFRPRDRDEMVKKVIEPMACDGLRTICVAYRDFPSSPEPDWDNENDILNELTCICVVGIEDPVRPEVPEAIRKCQRAGITVRMVTGDNINTARAIAIKCGIIHPGEDFLCLEGKEFNRRIRNEKGEIEQERIDKIWPKLRVLARSSPTDKHTLVKGIIDSTHTEQRQVVAVTGDGTNDGPALKKADVGFAMGIAGTDVAKEASDIILTDDNFSSIVKAVMWGRNVYDSISKFLQFQLTVNVVAVIVAFTGACITQDSPLKAVQMLWVNLIMDTFASLALATEPPTETLLLRKPYGRNKPLISRTMMKNILGHAVYQLALIFTLLFVGEKMFQIDSGRNAPLHSPPSEHYTIIFNTFVMMQLFNEINARKIHGERNVFDGIFRNPIFCTIVLGTFAIQIVIVQFGGKPFSCSPLQLDQWMWCIFIGLGELVWGQVIATIPTSRLKFLKEAGRLTQKEEIPEEELNEDVEEIDHAERELRRGQILWFRGLNRIQTQIEVVNTFKSGASFQGALRRQSSVTSQSQDVANLSSPSRVSLSNALSSPTSLPPAAAGQG

SEQ ID NO: 25018 - protein, 1782 aa, Homo sapiens
MAKPTSKDSGLKEKFKILLGLGTPRPNPRSAEGKQTEFIITAEILRELSMECGLNNRIRMIGQICEVAKTKKFEEHAVEALWKAVADLLQPERPLEARHAVLALLKAIVQGQGERLGVLRALFFKVIKDYPSNEDLHERLEVFKALTDNGRHITYLEEELADFVLQWMDVGLSSEFLLVLVNLVKFNSCYLDEYIARMVQMICLLCVRTASSVDIEVSLQVLDAVVCYNCLPAESLPLFIVTLCRTINVKELCEPCWKLMRNLLGTHLGHSAIYNMCHLMEDRAYMEDAPLLRGAVFFVGMALWGAHRLYSLRNSPTSVLPSFYQAMACPNEVVSYEIVLSITRLIKKYRKELQVVAWDILLNIIERLLQQLQTLDSPELRTIVHDLLTTVEELCDQNEFHGSQERYFELVERCADQRPESSLLNLISYRAQSIHPAKDGWIQNLQALMERFFRSESRGAVRIKVLDVLSFVLLINRQFYEEELINSVVISQLSHIPEDKDHQVRKLATQLLVDLAEGCHTHHFNSLLDIIEKVMARSLSPPPELEERDVAAYSASLEDVKTAVLGLLVILQTKLYTLPASHATRVYEMLVSHIQLHYKHSYTLPIASSIRLQAFDFLLLLRADSLHRLGLPNKDGVVRFSPYCVCDYMEPERGSEKKTSGPLSPPTGPPGPAPAGPAVRLGSVPYSLLFRVLLQCLKQESDWKVLKLVLGRLPESLRYKVLIFTSPCSVDQLCSALCSMLSGPKTLERLRGAPEGFSRTDLHLAVVPVLTALISYHNYLDKTKQREMVYCLEQGLIHRCASQCVVALSICSVEMPDIIIKALPVLVVKLTHISATASMAVPLLEFLSTLARLPHLYRNFAAEQYASVFAISLPYTNPSKFNQYIVCLAHHVIAMWFIRCRLPFRKDFVPFITKGLRSNVLLSFDDTPEKDSFRARSTSLNERPKSLRIARPPKQGLNNSPPVKEFKESSAAEAFRCRSISVSEHVVRSRIQTSLTSASLGSADENSVAQADDSLKNLHLELTETCLDMMARYVFSNFTAVPKRSPVGEFLLAGGRTKTWLVGNKLVTVTTSVGTGTRSLLGLDSGELQSGPESSSSPGVHVRQTKEAPAKLESQAGQQVSRGARDRVRSMSGGHGLRVGALDVPASQFLGSATSPGPRTAPAAKPEKASAGTRVPVQEKTNLAAYVPLLTQGWAEILVRRPTGNTSWLMSLENPLSPFSSDINNMPLQELSNALMAAERFKEHRDTALYKSLSVPAASTAKPPPLPRSNTDSAVVMEEGSPGEVPVLVEPPGLEDVEAALGMDRRTDAYSRSSSVSSQEEKSLHAEELVGRGIPIERVVSSEGGRPSVDLSFQPSQPLSKSSSSPELQTLQDILGDPGDKADVGRLSPEVKARSQSGTLDGESAAWSASGEDSRGQPEGPLPSSSPRSPSGLRPRGYTISDSAPSRRGKRVERDALKSRATASNAEKVPGINPSFVFLQLYHSPFFGDESNKPILLPNESFERSVQLLDQIPSYDTHKIAVLYVGEGQSNSELAILSNEHGSYRYTEFLTGLGRLIELKDCQPDKVYLGGLDVCGEDGQFTYCWHDDIMQAVFHIATLMPTKDVDKHRCDKKRHLGNDFVSIVYNDSGEDFKLGTIKGQFNFVHVIVTPLDYECNLVSLQCRKDMEGLVDTSVAKIVSDRNLPFVARQMALHANMASQVHHSRSNPTDIYPSKWIARLRHIKRLRQRICEEAAYSNPSLPLVHPPSHSKAPAQTPAEPTPGYEVGQRKRLISSVEDFTEFV

SEQ ID NO: 25019 - protein, 1359 aa, Homo sapiens
HIEILDENNQSPYFTMPSYQGYILESAPVGATISDSLNLTSPLRIVALDKDIEDTKDPELHLFLNDYTSVFTVTQTGITRYLTLLQPVDREEQQTYTFSITAFDGVQESEPVIVNIQVMDANDNTPTFPEISYDVYVYTDMRPGDSVIQLTAVDADEGSNGEITYEILVGAQGDFIINKTTGLITIAPGVEMIVGRTYALTVQAADNAPPAERRNSICTVYIEVLPPNNQSPPRFPQLMYSLEISEAMRVGAVLLNLQATDREGDSITYAIENGDPQRVFNLSETTGILTLGKALDRESTDRYILIITASDGRPDGTSTATVNIVVTDVNDNAPVFDPYLPRNLSVVEEEANAFVGQVKATDPDAGINGQVHYSLGNFNNLFRITSNGSIYTAVKLNREVRDYYELVVVATDGAVHPRHSTLTLAIKVLDIDDNSPVFTNSTYTVLVEENLPAGTTILQIEAKDVDLGANVSYRIRSPEVKHFFALHPFTGELSLLRSLDYEAFPDQEASITFLVEAFDIYGTMPPGIATVTVIVKDMNDYPPVFSKRIYKGMVAPDAVKGTPITTVYAEDADPPGLPASRVRYRVDDVQFPYPASIFEVEEDSGRVITRVNLNEEPTTIFKLVVVAFDDGEPVMSSSATVKILVLHPGEIPRFTQEEYRPPPVSELATKGTMVGVISAAAINQSIVYSIVSGNEEDTFGINNITGVIYVNGPLDYETRTSYVLRVQADSLEVVLANLRVPSKSNTAKVYIEIQDENNHPPVFQKKFYIGGVSEDARMFTSVLRVKATDKDTGNYSVMAYRLIIPPIKEGKEGFVVETYTGLIKTAMLFHNMRRSYFKFQVIATDDYGKGLSGKADVLVSVVNQLDMQVIVSNVPPTLVEKKIEDLTEILDRYVQEQIPGAKVVVESIGARRHGDAFSLEDYTKCDLTVYAIDPQTNRAIDRNELFKFLDGKLLDINKDFQPYYGEGGRILEIRTPEAVTSIKKRGESLGYTEGALLALAFIIILCCIPAILVVLVSYRQFKVRQAECTKTARIQAALPAAKPAVPAPAPVAAPPPPPPPPPGAHLYEELGDSSIWSFCWQLVICMRTCAIWRTLTRRGYGSEQQQLLRPSLLKPEELSMESGIDPGQEYGQDYYSYEHGYEMPQYGSRRRLLPPAGQEEYGEVVGEAEEEYEEEEWARKRMIKLVVDREYETSSTGEDSAPECQRNRLHHPSIHSNINGNIYIAQNGSVVRTRRACLTDNLKVASPVRLGGPFKKLDKLAVTHEENVPLNTLSKGPFSTEKMNARPTLVTFAPCPVGTDNTAVKPLRNRLKSTVEQESMIDSKNIKEALEFHSDHTQSDDEELWMGPWNNLHIPMTKL

SEQ ID NO: 25020 - protein, 454 aa, Homo sapiens; identical to SEQ ID NO: 24630

SEQ ID NO: 25021 - protein, 939 aa, Homo sapiens
KQLEKENKRLRQQAEIKDTTLEENNVKIGNLEKENKTLSKEIGIYKESCVRLKELEKENKELVKRATIDIKTLVTLREDLVSEKLKTQQMNNDLEKLTHELEKIGLNKERLLHDEQSTDDSRYKLLESKLESTLKKSLEIKEEKIAALEARLEESTNYNQQLRQELKTVKKNYEALKQRQDEERMVQSSPPISGEDNKWERESQETTRELLKVKDRLIEVERNNATLQAEKQALKTQLKQLETQNNNLQAQILALQRQTVSLQEQNTTLQTQNAKLQVENSTLNSQSTSLMNQNAQLLIQQSSLENENESVIKEREDLKSLYDSLIKDHEKLELLHERQASEYESLISKHGTLKSAHKNLEVEHRDLEDRYNQLLKQKGQLEDLEKMLKVEQEKMLLENKNHETVAAEYKKLCGENDRLNHTYSQLLKETEVLQTDHKNLKSLLNNSKLEQTRLEAEFSKLKEQYQQLDITSTKLNNQCELLSQLKGNLEEENRHLLDQIQTLMLQNRTLLEQNMESKDLFHVEQRQYIDKLNELRRQKEKLEEKIMDQYKFYDPSPPRRRGNWITLKMRKLIKSKKDINRERQKSLTLTPTRSDSSEGFLQLPHQDSQDSSSVGSNSLEDGQTLGTKKSSMVALKRLPFLRNRPKDKDKMKACYRRSMSMNDLVQSMVLAGQWTGSTENLEVPDDISTGKRRKELGAMAFSTTAINFSTVNSSAGFRSKQLVNNKDTTSFEDISPQGVSDDSSTGSRVHAGAVNNQSRPQSHSSGEFSLLHDHEAWSSSGSSPIQYLKRQTRSSPVLQHKISETLESRHHKIKTGSPGSEVVTLQQFLEESNKLTSVQIKSSSQENLLDEVMKSLSVSSDFLGKDKPVSCGLASVISTAEGTTRRTSIHDFLTKDSRLPISVDSPPAAADSNTTAASNVDKVQESRNSKSRSREQQSS

SEQ ID NO: 25022 - protein, 411 aa, Homo sapiens
MGLLVFVRNLLLALCLFLVLGFLYYSAWKLHLLQWEEDSNSVVLSFDSAGQTLGSEYDRLGFLLNLDSKLPAELATKYANFSEGACKPGYASALMTAIFPRFSKPAPMFLDDSFRKWARIREFVPPFGIKGQDNLIKAILSVTKEYRLTPALDSLRCRRCIIVGNGGVLANKSLGSRIDDYDIVVRLNSAPVKGFEKDVGSKTTLRITYPEGAMQRPEQYERDSLFVLAGFKWQDFKWLKYIVYKERVSASDGFWKSVATRVPKEPPEIRILNPYFIQEAAFTLIGLPFNNGLMGRGNIPTLGSVAVTMALHGCDEVAVAGFGYDMSTPNAPLHYYETVRMAAIKEPSTDPSLKPGNLGPVLQQLLCCYIWVMGGCWREPPICADSCFFLDAQYPARERVSAEAGESSRHH

SEQ ID NO: 25023 - protein, 663 aa, Homo sapiens
EVCQSLVKHSSGIKGSLPLQKLHLVSRSIYHSHHPTLKLQRPQLRTSFQQFSSLTNLPLRKLKFSPIKYGYQPRRNFWPARLATRLLKLRYLILGSAVGGGYTAKKTFDQWKDMIPDLSEYKWIVPDIVWEIDEYIDFEKIRKALPSSEDLVKLAPDFDKIVESLSLLKDFFTSGSPEETAFRATDRGSESDKHFRKVSDKEKIDQLQEELLHTQLKYQRILERLEKENKELRKLVLQKDDKGIHHRKLKKSLIDMYSEVLDVLSDYDASYNTQDHLPRVVVVGDQSAGKTSVLEMIAQARIFPRGSGEMMTRSPVKVTLSEGPHHVALFKDSSREFDLTKEEDLAALRHEIELRMRKNVKEGCTVSPETISLNVKGPGLQRMVLVDLPGVINTVTSGMAPDTKETIFSISKAYMQNPNAIILCIQDGSVDAERSIVTDLVSQMDPHGRRTIFVLTKVDLAEKNVASPSRIQQIIEGKLFPMKALGYFAVVTGKGNSSESIEAIREYEEEFFQNSKLLKTSMLKAHQVTTRNLSLAVSDCFWKMVRESVEQQADSFKATRFNLETEWKNNYPRLRELDRNELFEKAKNEILDEVISLSQVTPKHWEEILQQSLWERVSTHVIENIYLPAAQTMNSGTFNTTVDIKLKQWTDKQLPNKAVEVRI

SEQ ID NO: 25024 - protein, 1942 aa, Homo sapiens
GKWLVLFCDEINLPDMDKYGTQRVISFIRQMVEHGGFYRTSDQTWVKLERIQFVGACNPPTDPGRKPLSHRFLRHVPVVYVDYPGPASLTQIYGTFNRAMLRLIPSLRTYAEPLTAAMVEFYTMSQERFTQDTQPHYIYSPREMTRWVRGIFEALRPLETLPVEGLIRIWAHEALRLFQDRLVEDEERRWTDENIDTVALKHFPNIDREKAMSRPILYSNWLSKDYIPVDQEELRDYVKARLKVFYEEELDVPLVLFNEVLDHVLRIDRIFRQPQGHLLLIGVSGAGKTTLSRFVAWMNGLSVYQIKVHRKYTGEDFDEDLRTVLRRSGCKNEKIAFIMDESNVLDSGFLERMNTLLANGEVPGLFEGDEYATLMTQCKEGAQKEGLMLDSHEELYKWFTSQVIRNLHVVFTMNPSSEGLKDRAATSPALFNRCVLNWFGDWSTEALYQVGKEFTSKMDLEKPNYIVPDYMPVVYDKLPQPPSHREAIVNSCVFVHQTLHQANARLAKRGGRTMAITPRHYLDFINHYANLFHEKRSELEEQQMHLNVGLRKIKETVDQVEELRRDLRIKSQELEVKNAAANDKLKKMVKDQQEAEKKKVMSQEIQEQLHKQQEVIADKQMSVKEDLDKVEPAVIEAQNAVKSIKKQHLVEVRSMANPPAAVKLALESICLLLGESTTDWKQIRSIIMRENFIPTIVNFSAEEISDAIREKMKKNYMSNPSYNYEIVNRASLACGPMVKWAIAQLNYADMLKRVEPLRNELQKLEDDAKDNQQKANEVEQMIRDLEASIARYKEEYAVLISEAQAIKADLAAVEAKVNRSTALLKSLSAERERWEKTSETFKNQMSTIAGDCLLSAAFIAYAGYFDQQMRQNLFTTWSHHLQQANIQFRTDIARTEYLSNADERLRWQASSLPADDLCTENAIMLKRFNRYPLIIDPSGQATEFIMNEYKDRKITRTSFLDDAFRKNLESALRFGNPLLVQVEFPPDLCSRVTFVNFTVTRSSLQSQCLNEVLKAERPDVDEKRSDLLKLQGEFQLRLRQLEKSLLQALNEVKGRILDDDTIITTLENLKREAAEVTRKVEETDIVMQEVETVSQQYLPLSTACSSIYFTMESLKQIHFLYQYSLQFFLDIYHNVLYENPNLKGVTDHTQRLSIITKDLFQVAFNRVARGMLHQDHITFAMLLARIKLKGTVGEPTYDAEFQHFLRGNEIVLSAGSTPRIQGLTVEQAEAVVRLSCLPAFKDLIAKVQADEQFGIWLDSSSPEQTVPYLWSEETPATPIGQAIHRLLLIQAFRPDRLLAMAHMFVSTNLGESFMSIMEQPLDLTHIVGTEVKPNTPVLMCSVPGYDASGHVEDLAAEQNTQITSIAIGSAEGFNQADKAINTAVKSGRWVMLKNVHLAPGWLMQLEKKLHSLQPHACFRLFLTMEINPKVPVNLLRAGRIFVFEPPPGVKANMLRTFSSIPVSRICKSPNERARLYFLLAWFHAIIQERLRYAPLGWSKKYEFGESDLRSACDTVDTWLDDTAKGRQNISPDKIPWSALKTLMAQSIYGGRVDNEFDQRLLNTFLERLFTTRSFDSEFKLACKVDGHKDIQMPDGIRREEFVQWVELLPDTQTPSWLGLPNNAERVLLTTQGVDMISKMLKMQMLEDEDDLAYAETEKKTRTDSTSDGRPAWMRTLHTTASNWLHLIPQTLSHLKRTVENIKDPLFRFFEREVKMGAKLLQDVRQDLADVVQVCEGKKKQTNYLRTLINELVKGILPRSWSHYTVPAGMTVIQWVSDFSERIKQLQNISLAAASGGAKELKNIHVCLGGLFVPEAYITATRQYVAQANSWSLEELCLEVNVTTSQGATLDACSFGVTGLKLQGATCNNNKLSLSNAISTALPLTQLRWVKQTNTEKKASVVTLPVYLNFTRADLIFTVDFEIATKEDPRSFYERGVAVLCTE

SEQ ID NO: 25025 - protein, 684 aa, Homo sapiens
MSLPSPSPSRELCPPDPAFAPLSSWPGSGPAGGSTRSGHVLYSGWLRKSPPEKKLRLFAWRKRWFILRRGQTSSDPDVLEYYKNDGSKKPLRTINLNLCEQLDVDVTLNFNKKEIQKGYMFDIKTSERTFYLVAETREDMNEWVQSICQICGFRQEESTGFLGNISSASHGLCSSPAEPSCSHQHLPQEQEPTSEPPVSHCVPPTWPIPAPPGCLRSHQHASQRAEHARSASFSQGSEAPFIMRRNTAMQNLAQHSGYSVDGVSGHIHGFHSLSKPSQHNAEFRGSTHRIPWSLASHGHTRGSLTGSEADNEGVYPFKAPRSTLFQEFGGHLVNNSGVPATPLSVHQIPRTVTLDKNLYAMVVATPGPIASLPLPKASQAEACQWGSPQQRPLVSESSRWSVAAAIPRRNTLPAVDNSRCHQASSGKYTQHGGGNASRPAESMHEGVCSFLPGRTLVGLSDSIASEGSCVPMNPGSPTLPAVKQAGDDSQGVCIPVGSCLVRFDLLGSPLTELSMHQDLSQGHEVQLPPVNRSLKPNQKANPTPPNLRNNRVINELSFKPPVTEPWSGTSHTFDSSSSQHPISTQSITNTDSEDSGERYLFPNPASAFPVSGGTSSSAPPRSTGNIHYAALDFQPSKPSIGSVTSGKKVDYVQVDLEKTQALQKTMHEQMCLRQSSEPPRGAKL

SEQ ID NO: 25026 - protein, 985 aa, Homo sapiens
MALIMEPVSKWSPSQVVDWMKGLDDCLQQYIKNFEREKISGDQLLRITHQELEDLGVSRIGHQELILEAVDLLCALNYGLETENLKTLSHKLNASAKNLQNFITGRRRSGHYDGRTSRKLPNDFLTSVVDLIGAAKSLLAWLDRSPFAAVTDYSVTRNNVIQLCLELTTIVQQDCTVYETENKILHVCKTLSGVCDHIISLSSDPLVSQSAHLEVIQLANIKPSEGLGMYIKSTYDGLHVITGTTENSPADRCKKIHAGDEVIQVNHQTVPLIPRSPTSSVATPSSTISTPTKRDSSALQDLYIPPPPAEPYIPRDEKGNLPCEDLRGHMVGKPVHKGSESPNSFLDQEYRKRFNIVEEDTVLYCYEYEKGRSSSQGRRESTPTYGKLRPISMPVEYNWVGDYEDPNKMKRDSRRENSLLRYMSNEKIAQEEYMFQRNSKKDTGKKSKKKGDKSNSPTHYSLLPSLQMDALRQDIMGTPVPETTLYHTFQQSSLQHKSKKKNKGPIAGKSKRRISCKDLGRGDCEGWLWKKKDAKSYFSQKWKKYWFVLKDASLYWYINEEDEKAEGFISLPEFKIDRASECRKKYAFKACHPKIKSFYFAAEHLDDMNRWLNRINMLTAGYAERERIKQEQDYWSESDKEEADTPSTPKQDSPPPPYDTYPRPPSMSCASPYVEAKHSRLSSTETSQSQSSHEEFRQEVTGSSAVSPIRKTASQRRSWQDLIETPLTSSGLHYLQTLPLEDSVFSDSAAISPEHRRQSTLPTQKCHLQDHYGPYPLAESERMQVLNGNGGKPRSFTLPRDSGFNHCCLNAPVSACDPQDDVQPPEVEEEEEEEEEEGEAAGENIGEKSESREEKLGDSLQDLYRALEQASLSPLGEHRISTKMEYKLSFIKRCNDPVMNEKLHRLRILKSTLKAREGEVAIIDKVLDNPDLTSKEFQQWKQMYLDLFLDICQNTTSNDPLSISSEVDVITSSLAHTHSYIETHV

SEQ ID NO: 25027 - protein, 727 aa, Homo sapiens
MIDSVKLRRDSAADFFSHYEYLCALQNSVPLPAVRACLREGVLDFNADRLRGVDWAPLLSTLKINKDLPLVSIKSFFQPWLGDTGSDMNKFCRSRVPAIRYKDVTFQLCKALKGCLSISSVLKNLELNGLILRERDLTILAKGLNKSASLVHLSLANCPIGDGGLEIICQGIKSSITLKTVNFTGCNLTWQGADHMAKILKYQTMRRHEETWAESLRYRRPDLDCMAGLRRITLNCNTLIGDLGACAFADSLSEDLWLRALDLQQCGLTNEGAKALLEALETNTTLVVLDIRKNPLIDHSMMKAVIKKVLQNGRSAKSEYQWITSPSVKEPSKTAKQKRRTIILGSGHKGKATIRIVIWRHRGLATKKPVSSGRKHSLGKEYYAPAPLPPGVSGFLPWRTAERAKRHRGFPLIKTRDICNQLQQPGFPVTVTVESPSSSEVEEVDDSSESVHEVPEKTSIEQEALQEKLEECLKQLKEERVIRLKVDKRVSELEHENAQLRNINFSLSEALHAQSLTNMILDDEGVLGSIENSFQKFHAFLDLLKDAGLGQLATMAGIDQSDFQLLGHPQMTSTVSNPPKEEKKALEDEKPEPKQNALGQMQNIQVSICMQSAYNEGTLMKFQKITGDARIPLPLDSFPVPVSTPEGLGTSSNNLGVPATEQRQESFEGFIARMCSPSPDATSGTGSQRKEEELSRNSRSSSEKKTKTGEYTKKHSDKQHPGKDLHS

SEQ ID NO: 25028 - protein, 1616 aa, Homo sapiens
MFPLIGKTIIFDNFPDPSDTWEITETIGKGTYGKVFKVLNKKNGQKAAVKILDPIHDIDEEIEAEYNILKALSDHPNVVRFYGIYFKKDKVNGDKLWLVLELCSGGSVTDLVKGFLKRGERMSEPLIAYILHEALMGLQHLHNNKTIHRDVKGNNILLTTEGGVKLVDFGVSAQLTSTRHRRNTSVGTPFWMAPEVIACEQQLDTTYDARCDTWSLGITAIELGDGDPPLADLHPMRALFKIPRNPPPKLRQPELWSAEFNDFISKCLTKDYEKRPTVSELLQHKFITQIEGKDVMLQKQLTEFIGIHQCMGGTEKARRERIHTKKGNFNRPLISNLKDVDDLATLEILDENTVSEQLEKCYSRDQIYVYVGDILIALNPFQSLGLYSTKHSKLYIGSKRTASPPHIFAMADLGYQSMITYNSDQCIVISGESGAGKTENAHLLVQQLTVLGKANNRTLQEKILQVNNLVEAFGNACTIINDNSSRFGKYLEMKFTSSGAVVGAQISEYLLEKSRVIHQAIGEKNFHIFYYIYAGLAEKKKLAHYKLPENKPPRYLQNDHLRTVQDIMNNSFYKSQYELIEQCFKVIGFTMEQLGSIYSILAAILNVGNIEFSSVATEHQIDKSHISNHTALENCASLLCIRADELQEALTSHCVVTRGETIIRPNTVEKATDVRDAMAKTLYGRLFSWIVNCINSLLKHDSSPSGNGDELSIGILDIFGFENFKKNSFEQLCINIANEQIQYYYNQHVFAWEQNEYLNEDVDARVIEYEDNWPLLDMFLQKPMGLLSLLDEESRFPKATDQTLVEKFEGNLKSQYFWRPKRMELSFGIHHYAGKVLYNASGFLAKNRDTLPTDIVLLLRSSDNSVIRQLVNHPLTKTGNLPHSKTKNVINYQMRTSEKLINLAKGDTGEATRHARETTNMKTQTVASYFRYSLMDLLSKMVVGQPHFVRCIKPNSERQARKYDKEKVLLQLRYTGILETARIRRLGFSHRILFANFIKRYYLLCYKSSEEPRMSPDTCATILEKAGLDNWALGKTKVFLKYYHVEQLNLMRKEAIDKLILIQACVRAFLCSRRYQKIQEKRKESAIIIQSAARGHLVRKQRKEIVDMKNTAVTTIQTSDQEFDYKKNFENTRESFVKKQAENAISANERFISAPNNKGSVSVVKTSTFKPEEETTNAVESNNRVYQTPKKMNNVYEEEVKQEFYLVGPEVSPKQKSVKDLEENSNLRKVEKEEAMIQSYYQRYTEERNCEESKAAYLERKAISERPSYPVPWLAENETSFKKTLEPTLSQRSIYQNANSMEKEKKTSVVTQRAPICSQEEGRGRLRHETVKERQVEPVTQAQEEEDKAAVFIQSKYRGYKRRQQLRKDKMSSFKHQRIVTTPTEVARNTHNLYSYPTKHEEINNIKKKDNKDSKATSEREACGLAIFSKQISKLSEEYFILQKKLNEMILSQQLKSLYLGVSHHKPINRRVSSQQCLSGVCKGEEPKILRPPRRPRKPKTLNNPEDSTYYYLLHKSIQEEKRRPRKDSQGKLLDLEDFYYKEFLPSRSGPKEHSPSLRERRPQQELQNQCIKANERCWAAESPEKEEEREPAANPYDFRRLLRKTSQRRRLVQQS

SEQ ID NO: 25029 - protein, 659 aa, Homo sapiens
MYRERLRTLLVIAVVMSLLNALSTSGGSISWNDFVHEMLAKGEVQRVQVVPESDVVEVYLHPGAVVFGRPRLALMYRMQVANIDKFEEKLRAAEDELNIEAKDRIPVSYKRTGFFGNALYSVGMTAVGLAILWYVFRLAGMTGREGGFSAFNQLKMARFTIVDGKMGKGVSFKDVAGMHEAKLEVREFVDYLKSPERFLQLGAKVPKGALLLGPPGCGKTLLAKAVATEAQVPFLAMAGPEFVEVIGGLGAARVRSLFKEARARAPCIVYIDEIDAVGKKRSTTMSGFSNTEEEQTLNQLLVEMDGMGTTDHVIVLASTNRADILDGALMRPGRLDRHVFIDLPTLQERREIFEQHLKSLKLTQSSTFYSQRLAELTPGFSGADIANICNEAALHAAREGHTSVHTLNFEYAVERVLAGTAKKSKILSKEEQKVVAFHESGHALVGWMLEHTEAVMKVSITPRTNAALGFAQMLPRDQHLFTKEQLFERMCMALGGRASEALSFNEVTSGAQDDLRKVTRIAYSMVKQFGMAPGIGPISFPEAQEGLMGIGRRPFSQGLQQMMDHEARLLVAKAYRHTEKVLQDNLDKLQALANALLEKEVINYEDIEALIGPPPHGPKKMIAPQRWIDAQREKQDLGEEETEETQQPPLGGEEPTWPK

SEQ ID NO: 25030 - protein, 909 aa, Homo sapiens
TSQSSKQPPPSIRLPSAQTPNGTDYVASGKSIQTPQSHGTLTAELWDNKVAPPAVLNDISKKCPISPPQPPSVSAWNKPLTSFGSAPSSEGAKNGQESGLEIGTDTIQFGAPASNGNENEVVPVLSEKSADKIPEPKEQRQKQPRAGPIKAQKLPDLSPVENKEHKPGPIGKERSLKNRKVKDAQQVEPEGQEKPSPATVRSTDPVTTKETKAVSEMSTEIGTMISVSSAEYGTNAKESVTDYTTPSSSLPNTVATNNTKMEDTLVNNVPLPNTLPLPKRETIQQSSSLTSVPPTTFSLTFKMESARKAWENSPNVREKGSPVTSTAPPIATGVSSSASGPSTANYNSFSSASMPQIPVASVTPTASLSGAGTYTTSSLSTKSTTTSDPPNICKVKPQQLQTSSLPSASHFSQLSCMPSLIAQQQQNPQVYVSQSAAAQIPAFYMDTSHLFNTQHARLAPPSLAQQQGFQPGLSQPTSVQQIPIPIYAPLQGQHQAQLSLGAGPAVSQAQELFSSSLQPYRSQPAFMQSSLSQPSVVLSGTAIHNFPTVQHQELAKAQSGLAFQQTSNTQPIPILYEHQLGQASGLGGSQLIDTHLLQARANLTQASNLYSGQVQQPGQTNFYNTAQSPSALQQVNYGMVTVPLPASQLSLPNFGSTGQPLIALPQTLQPPLQHTTPQAQAQSLSRPAQVSQPFRGLIPAGTQHSMIATTGKMSEMELKAFGSGIDIKPGTPPIAGRSTTPTSSPFRATSTSPNSQSSKMNSIVYQKQFQSAPATVRMTQPFPTQFAPQILSQPNLVPPLVRAPHTNTFPAPVQRPPMALASQMPPPLTTGLMSHARLPHVARGPCGSLSGVRGNQAQAALKAEQDMKKRAVGRGLSHKTFGPRCWQSREQRFFSPRNGSSLNSNRANR

SEQ ID NO: 25031 - protein, 711 aa, Homo sapiens
MDEPMGEEEINPQTEEVSIKEIAITHHVKEGHEKADPSQFELLKVLGQGSFGKVFLVKKISGSDARQLYAMKVLKKATLKVRDRVRTKMERDILVEVNHPFIVKLHYAFQTEGKLYLILDFLRGGDLFTRLSKEVMFTEEDVKFYLAELALALDHLHSLGIIYRDLKPENILLDEEGHIKLTDFGLSKESIDHEKKAYSFCGTVEYMAPEVVNRRGHTQSADWWSFGVLMFEMLTGTLPFQGKDRKETMTMILKAKLGMPQFLSPEAQSLLRMLFKRNPANRLGAGPDGVEEIKRHSFFSTIDWNKLYRREIHPPFKPATGRPEDTFYFDPEFTAKTPKDSPGIPPSANAHQLFRGFSFVAITSDDESQAMQTVGVHSIVQLHRNSIQFTDGYEVKEDIGVGSYSVCKRCIHKATNMEFAVKIIDKSKRDPTEEIEILLRYGQHPNIITLKDVYDDGKYVYVVTELMKGGELLDKILRQKFFSEREASAVLFTITKTVEYLHAQGVVHRDLKPSNILYVDESGNPESIRICDFGFAKQLRAENGLLMTPCYTANFVAPEVLKRQGYDAACDIWSLGVLLYTMLTGYTPFANGPDDTPEEILARIGSGKFSLSGGYWNSVSDTAKDLVSKMLHVDPHQRLTAALVLRHPWIVHWDQLPQYQLNRQDAPHLVKGAMAATYSALNRNQSPVLEPVGRSTLAQRRGIKKITSTAL

SEQ ID NO: 25032 - protein, 1977 aa, Homo sapiens
MAMLPPPGPQSFVHFTKQSLALIEQRIAERKSKEPKEEKKDDDEEAPKPSSDLEAGKQLPFIYGDIPPGMVSEPLEDLDPYYADKKTFIVLNKGKTIFRFNATPALYMLSPFSPLRRISIKILVHSLFSMLIMCTILTNCIFMTMNNPPDWTKNVEYTFTGIYTFESLVKILARGFCVGEFTFLRDPWNWLDFVVIVFAYVTEFVDLGNVSALRTFRVLRALKTISVIPGLKTIVGALIQSVKKLSDVMILTVFCLSVFALIGLQLFMGNLKHKCFRNSLENNETLESIMNTLESEEDFRKYFYYLEGSKDALLCGFSTDSGQCPEGYTCVKIGRNPDYGYTSFDTFSWAFLALFRLMTQDYWENLYQQTLRAAGKTYMIFFVVVIFLGSFYLINLILAVVAMAYEEQNQANIEEAKQKELEFQQMLDRLKKEQEEAEAIAAAAAEYTSIRRSRIMGLSESSSETSKLSSKSAKERRNRRKKKNQKKLSSGEEKGDAEKLSKSESEDSIRRKSFHLGVEGHRRAHEKRLSTPNQSPLSIRGSLFSARRSSRTSLFSFKGRGRDIGSETEFADDEHSIFGDNESRRGSLFVPHRPQERRSSNISQASRSPPMLPVNGKMHSAVDCNGVVSLVDGRSALMLPNGQLLPEGTTNQIHKKRRCSSYLLSEDMLNDPNLRQRAMSRASILTNTVEELEESRQKCPPWWYRFAHKFLIWNCSPYWIKFKKCIYFIVMDPFVDLAITICIVLNTLFMAMEHHPMTEEFKNVLAIGNLVFTGIFAAEMVLKLIAMDPYEYFQVGWNIFDSLIVTLSLVELFLADVEGLSVLRSFRLLRVFKLAKSWPTLNMLIKIIGNSVGALGNLTLVLAIIVFIFAVVGMQLFGKSYKECVCKINDDCTLPRWHMNDFFHSFLIVFRVLCGEWIETMWDCMEVAGQAMCLIVYMMVMVIGNLVVLNLFLALLLSSFSSDNLTAIEEDPDANNLQIAVTRIKKGINYVKQTLREFILKAFSKKPKISREIRQAEDLNTKKENYISNHTLAEMSKGHNFLKEKDKISGFGSSVDKHLMEDSDGQSFIHNPSLTVTVPIAPGESDLENMNAEELSSDSDSEYSKVRLNRSSSSECSTVDNPLPGEGEEAEAEPMNSDEPEACFTDGCVWRFSCCQVNIESGKGKIWWNIRKTCYKIVEHSWFESFIVLMILLSSGALAFEDIYIERKKTIKIILEYADKIFTYIFILEMLLKWIAYGYKTYFTNAWCWLDFLIVDVSLVTLVANTLGYSDLGPIKSLRTLRALRPLRALSRFEGMRVVVNALIGAIPSIMNVLLVCLIFWLIFSIMGVNLFAGKFYECINTTDGSRFPASQVPNRSECFALMNVSQNVRWKNLKVNFDNVGLGYLSLLQVATFKGWTIIMYAAVDSVNVDKQPKYEYSLYMYIYFVVFIIFGSFFTLNLFIGVIIDNFNQQKKKLGGQDIFMTEEQKKYYNAMKKLGSKKPQKPIPRPGNKIQGCIFDLVTNQAFDISIMVLICLNMVTMMVEKEGQSQHMTEVLYWINVVFIILFTGECVLKLISLRHYYFTVGWNIFDFVVVIISIVGMFLADLIETYFVSPTLFRVIRLARIGRILRLVKGAKGIRTLLFALMMSLPALFNIGLLLFLVMFIYAIFGMSNFAYVKKEDGINDMFNFETFGNSMICLFQITTSAGWDGLLAPILNSKPPDCDPKKVHPGSSVEGDCGNPSVGIFYFVSYIIISFLVVVNMYIAVILENFSVATEESTEPLSEDDFEMFYEVWEKFDPDATQFIEFSKLSDFAAALDPPLLIAKPNKVQLIAMDLPMVSGDRIHCLDILFAFTKRVLGESGEMDSLRSQMEERFMSANPSKVSYEPITTTLKRKQEDVSATVIQRAYRRYRLRQNVKNISSIYIKDGDRDDDLLNKKDMAFDNVNENSSPEKTDATSSTTSPPSYDSVTKPDKEKYEQDRTEKEDKGKDSKESKK

SEQ ID NO: 25033 - protein, 1013 aa, Homo sapiens
MCSQEAFQAQRSQLVELLVSGSLEGFESVLDWLLSWEVLSWEDYEGFHLLGQPLSHLARRLLDTVWNKGTWACQKLIAAAQEAQADSQSPKLHGCWDPHSLHPARDLQSHRPAIVRRLHSHVENMLDLAWERGFVSQYECDEIRLPIFTPSQRARRLLDLATVKANGLAAFLLQHVQELPVPLALPLEAATCKKYMAKLRTTVSAQSRFLSTYDGAETLCLEDIYTENVLEVWADVGMAGPPQKSPATLGLEELFSTPGHLNDDADTVLVVGEAGSGKSTLLQRLHLLWAAGQDFQEFLFVFPFSCRQLQCMAKPLSVRTLLFEHCCWPDVGQEDIFQLLLDHPDRVLLTFDGFDEFKFRFTDRERHCSPTDPTSVQTLLFNLLQGNLLKNARKVVTSRPAAVSAFLRKYIRTEFNLKGFSEQGIELYLRKRHHEPGVADRLIRLLQETSALHGLCHLPVFSWMVSKCHQELLLQEGGSPKTTTDMYLLILQHFLLHATPPDSASQGLGPSLLRGRLPTLLHLGRLALWGLGMCCYVFSAQQLQAAQVSPDDISLGFLVRAKGVVPGSTAPLEFLHITFQCFFAAFYLALSADVPPALLRHLFNCGRPGNSPMARLLPTMCIQASEGKDSSVAALLQKAEPHNLQITAAFLAGLLSREHWGLLAECQTSEKALLRRQACARWCLARSLRKHFHSIPPAAPGEAKSVHAMPGFIWLIRSLYEMQEERLARKAARGLNVGHLKLTFCSVGPTECAALAFVLQHLRRPVALQLDYNSVGDIGVEQLLPCLGVCKALYLRDNNISDRGICKLIECALHCEQLQKLALFNNKLTDGCAHSMAKLLACRQNFLALRLGNNYITAAGAQVLAEGLRGNTSLQFLGFWGNRVGDEGAQALAEALGDHQSLRWLSLVGNNIGSVGAQALALMLAKNVMLEELCLEENHLQDEGVCSLAEGLKKNSSLKILKLSNNCITYLGAEALLQALERNDTILEVWLRGNTFSLEEVDKLGCRDTRLLL

SEQ ID NO: 25034 - protein, 478 aa, Homo sapiens
MQLPRWWELGDPCAWTGQGRGTRRMSPATTGTFLLTVYSIFSKVHSDRNVYPSAGVLFVHVLEREYFKGEFPPYPKPGEISNDPITFNTNLMGYPDRPGWLRYIQRTPYSDGVLYGSPTAENVGKPTIIEITAYNRRTFETARHNLIINIMSAEDGVLLSSPRLECNGTISANCNLRLLGSDFPLPYQAEFFIKNMNVEEMLASEVLGDFLGAVKNVWQPERLNAINITSALDRGGRVPLPINDLKEGVYVMVGADVPFSSCLREVENPQNQLRCSQEMEPVITCDKKFRTQFYIDWCKISLVDKTKQVSTYQEVIRGEGILPDGGEYKPPSDSLKSRDYYTDFLITLAVPSAVALVLFLILAYIMCCRREGVIQLVHHSAIQKSTKELRDMSKNREIAWPLSTLPVFHPVTGEIIPPLHTDNYDSTNMPLMQTQQNLPHQTQIPQQQTTGDFRLTTFQRFEVNGIPEERKLTEAMNL

SEQ ID NO: 25035 - protein, 165 aa, Homo sapiens
MDDDIAALVVDNGSGMCKAGFAGDDAPRAVFPSIVGRPRHQGVMVGMGQKDSYVGDEAQSKRGILTLKYPIEHGIVTNWDDMEKIWHHTFYNELRVAPEEHPVLLTEAPLNPKANREKMTQIMFETFNTPAMYVAIQAVLSLYASGRTTGIVMDSGDGVTHTVPI

SEQ ID NO: 25036 - protein, 361 aa, Homo sapiens
MATAASNPYSILSSTSLVHADSAGMQQGSPFRNPQKLLQSDYLQGVPSNGHPLGHHWVTSLSDGGPWSSTLATSPLDQQDVKPGREDLQLGAIIHHRSPHVAHHSPHTNHPNAWGASPAPNPSITSSGQPLNVYSQPGFTVSGMLEHGGLTPPPAAASAQSLHPVLREPPDHGELGSHHCQDHSDEETPTSDELEQFAKQFKQRRIKLGFTQADVGLALGTLYGNVFSQTTICRFEALQLSFKNMCKLKPLLNKWLEEADSSTGSPTSIDKIAAQGRKRKKRTSIEVSVKGVLETHFLKCPKPAAQEISSLADSLQLEKEVVRVWFCNRRQKEKRMTPPGDQQPHEVYSHTVKTDTSCHDL

SEQ ID NO: 25037 - protein, 680 aa, Homo sapiens
DKSKGKAPEEDEEERRRRERDDQMYRERLRTLLVIAVVMSLLNALSTSGGSISWNDFVHEMLAKGEVQRVQVVPESDVVEVYLHPGAVVFGRPRLALMYRMQVANIDKFEEKLRAAEDELNIEAKDRIPVSYKRTGFFGNALYSVGMTAVGLAILWYVFRLAGMTGREGGFSAFLKMARFTIVDGKMGKGVSFKDVAGMHEAKLEVREFVDYLKSPERFLQLGAKVPKGALLLGPPGCGKTLLAKAVATEAQVPFLAMAGPEFVEVIGGLGAARVRSLFKEARARAPCIVYIDEIDAVGKKRSTTMSGFSNTEEEQTLNQLLVEMDGMGTTDHVIVLASTNRADILDGALMRPGRLDRHVFIDLPTLQERREIFEQHLKSLKLTQSSTFYSQRLAELTPGFSGADIANICNEAALHAAREGHTSVHTLNFEYAVERVLAGTAKKSKILSKEEQKVVAFHESGHALVGWMLEHTEAVMKVSITPRTNAALGFAQMLPRDQHLFTKEQLFERMCMALGGRASEALSFNEVTSGAQDDLRKVTRIAYSMVKQFGMAPGIGPISFPEAQEGLMGIGRRPFSQGLQQMMDHEARLLVAKAYRHTEKVLQDNLDKLQALANALLEKEVINYEDIEALIGPPPHGPKKMIAPQRWIDAQREKQDLGEEETEETQQPPLGGEEPTWPK

SEQ ID NO: 25038 - protein, 1454 aa, Homo sapiens
PDHLQMAVQGKRPMPGMQQQMPTLPPPSVSATGPGPGPGPGPGPGPGPAPPNYSRPHGMGGPNMPPPGPSGVPPGMPGQPPGGPPKPWPEGPMANAAAPTSTPQKLIPPQPTGRPSPAPPAVPPAASPVMPPQTQSPGQPAQPAPMVPLHQKQSRITPIQKPRGLDPVEILQEREYRLQARIAHRIQELENLPGSLAGDLRTKATIELKALRLLNFQRQLRQEVVVCMRRDTALETALNAKAYKRSKRQSLREARITEKLEKQQKIEQERKRRQKHQEYLNSILQHAKDFKEYHRSVTGKIQKLTKAVATYHANTEREQKKENERIEKERMRRLMAEDEEGYRKLIDQKKDKRLAYLLQQTDEYVANLTELVRQHKAAQVAKEKKKKKKKKKAENAEGQTPAIGPDGEPLDETSQMSDLPVKVIHVESGKILTGTDAPKAGQLEAWLEMNPGYEVAPRSDSEESGSEEEEEEEEEEQPQAAQPPTLPVEEKKKIPDPDSDDVSEVDARHIIENAKQDVDDEYGVSQALARGLQSYYAVAHAVTERVDKQSALMVNGVLKQYQIKGLEWLVSLYNNNLNGILADEMGLGKTIQTIALITYLMEHKRINGPFLIIVPLSTLSNWAYEFDKWAPSVVKVSYKGSPAARRAFVPQLRSGKFNVLLTTYEYIIKDKHILAKIRWKYMIVDEGHRMKNHHCKLTQVLNTHYVAPRRLLLTGTPLQNKLPELWALLNFLLPTIFKSCSTFEQWFNAPFAMTGEKVDLNEEETILIIRRLHKVLRPFLLRRLKKEVEAQLPEKVEYVIKCDMSALQRVLYRHMQAKGVLLTDGSEKDKKGKGGTKTLMNTIMQLRKICNHPYMFQHIEESFSEHLGFTGGIVQGLDLYRASGKFELLDRILPKLRATNHKVLLFCQMTSLMTIMEDYFAYRGFKYLRLDGTTKAEDRGMLLKTFNEPGSEYFIFLLSTRAGGLGLNLQSADTVIIFDSDWNPHQDLQAQDRAHRIGQQNEVRVLRLCTVNSVEEKILAAAKYKLNVDQKVIQAGMFDQKSSSHERRAFLQAILEHEEQDESRHCSTGSGSASFAHTAPPPAGVNPDLEEPPLKEEDEVPDDETVNQMIARHEEEFDLFMRMDLDRRREEARNPKRKPRLMEEDELPSWIIKDDAEVERLTCEEEEEKMFGRGSRHRKEVDYSDSLTEKQWLKTLKAIEEGTLEEIEEEVRQKKSSRKRKRDSDAGSSTPTTSTRSRDKDDESKKQKKRGRPPAEKLSPNPPNLTKKMKKIVDAVIKYKDSSSGRQLSEVFIQLPSRKELPEYYELIRKPVDFKKIKERIRNHKYRSLNDLEKDVMLLCQNAQTFNLEGSLIYEDSIVLQSVFTSVRQKIEKEDDSEGEESEEEEEGEEEGSESESRSVKVKIKLGRKEKAQDRLKGGRRRPSRGSRAKPVVSDDDSEEEQEEDRSGSGSEED

SEQ ID NO: 25039 - protein, 464 aa, Homo sapiens
MGVSKLDILYRRLLLTKLFIRGWGRPEDLKRLFEFRKMIGNRERCQNLVSSDYPVHIDKIEEQSDCKILDGHFVSPMAHYVPDIMPIESVIARFQFIVPKEWNSKYRPVCIHLAGTGDHHYWRRRTLMARPMIKEARMASLLLENPYYGCRKPKDQVRSSLKNVSDLFVMGGALVLESAALLHWLEREGYGPLGMTGISMGGHMASLAVSNWPKPMPLIPCLSWSTASGVFTTGVLSKSINWRELEKQYYTQTVYEEEIIHMLEYCGTDSFKMGQEFVKHFTSSADKLTNLNLVSRTLNLDISNQVVSQKPADCHNSSKTSVSATSEGLLLQDTSKMKRFNQTLSTNKSGYTSRNPQSYHLLSKEQSRNSLRKESLIFMKGVMDECTHVANFSVPVDPSLIIVVQAKEDAYIPRTGVRSLQEIWPGCEIRYLEGGHISAYLFKQGLFRQAIYDAFDRFLHKYAN

SEQ ID NO: 25040 - protein, 744 aa, Homo sapiens
MATQADLMELDMAMEPDRKAAVSHWQQQSYLDSGIHSGATTTAPSLSGKGNPEEEDVDTSQVLYEWEQGFSQSFTQEQVADIDGQYAMTRAQRMLKHAVVNLINYQDDAELATRAIPELTKLLNDEDQVVVNKAAVMVHQLSKKEASRHAIMRSPQMVSAIVRTMQNTNDVETARCTAGTLHNLSHHREGLLAIFKSGGIPALVKMLGSPVDSVLFYAITTLHNLLLHQEGAKMAVRLAGGLQKMVALLNKTNVKFLAITTDCLQILAYGNQESKLIILASGGPQALVNIMRTYTYEKLLWTTSRVLKVLSVCSSNKPAIVEAGGMQALGLHLTDPSQRLVQNCLWTLRNLSDAATKQEGMEGLLGTLVQLLGSDDINVVTCAAGILSNLTCNNYKNKMMVCQVGGIEALVRTVLRAGDREDITEPAICALRHLTSRHQEAEMAQNAVRLHYGLPVVVKLLHPPSHWPLIKATVGLIRNLALCPANHAPLREQGAIPRLVQLLVRAHQDTQRRTSMGGTQQQFVEGVRMEEIVEGCTGALHILARDVHNRIVIRGLNTIPLFVQLLYSPIENIQRVAAGVLCELAQDKEAAEAIEAEGATAPLTELLHSRNEGVATYAAAVLFRMSEDKPQDYKKRLSVELTSSLFRTEPMAWNETADLGLDIGAQGEPLGYRQDDPSYRSFHSGGYGQDALGMDPMMEHEMGGHHPGADYPVDGLPDLGHAQDLMDGLPPGDSNQLAWFDTDL

SEQ ID NO: 25041 - protein, 228 aa, Homo sapiens
GAFFMEFVRSPRTASSAFYPQVSVDQTATPMLDGTSLGICTGQSMDRGNSQTFGNSQNIGEQGYSSTNSSDSSSQQLVASSLTSSSTLTEILEAMKHPSTGVQLLSEQKGLSPYCFISAEVVHWLVNHVEGIQTQAMAIDIMQSMTEGCPFKMPLCRNFRVSMSLLENAGRAAHHTCIWRSLADLHLRLLFLQDSNGQRARPSGHAAARHHLAHSRSGRLRQLPAQVV

SEQ ID NO: 25042 - protein, 157 aa, Homo sapiens
MRFMLLFSRQGKLRLQKWYLATSDKERKKMVRELMQVVLARKPKMCSFLEWRDLKVVYKRYASLYFCCAIEGQDNELITLELIHRYVELLDKYFGSVCELDIIFNFEKAYFILDEFLMGGDVQDTSKKSVLKAIEQADLLQEEDESPRSVLEEMGLA

SEQ ID NO: 25043 - protein, 2308 aa, Homo sapiens
MNIVRKLNLMIPWSIFLLHVLLFSLQEYICASSILMGTSKNGFNENRQKRALLAAQFEATSPRYFFHDAINWGESKIKGSCPYECLNGAFCSKTGTCDCQIFQALGTRCQIIPNMGNGRDGICKTWGQYHFETFDGIYYYFPGNCSYIFAKDCGDLEPRYTVWVHNSPKCLGSVYSCYRSISLFFSNQEEIRIYGHEIKKNGISLTLPQTIGQIFIEKLADYILVKTTFGFSLAWDGISGIYLKLSEDHKGKSCGLCGNYNDIQSDDFIILQEDYTEDIAMFANSWSVQTPDDTKCVLTPSDFPNPCSSGMPAFEAIFFKCQILLQFPFLSCHEYIDPYLYIASCVNDLCKTDDDETYCRAATEYARACSHAGYPIQDWRDDFPACTDKCDDSFVHRDCISCCPPTCTFEKQCLGSNLHCLDGCYCPDGLVMDNGTCISLENCPCGFHGLAYSVGSKIEQECTECVCVGGVWNCTEQDCPVQCSVVGDSHFTTFDGRHYSFIGMCQYILVKGTGKDKFTITLQKAPCEQNLGLVCLQSITLILEDDFNKQVTLGRGGQILTSPNQGFNLNGIVEIQTLSSLFILLKTTFGLKILFAIDGERIYIQLTSAWKRRTLGLCGTFNGNIRDDFLSPSGMIEGTPQLHANAWRVSSTCFAPVHVPVVDPCNINQQNIGYAAHCDVIHQELFAPCHIYISPGLYYQLCRHDACKCGSSCLCNALAHYAYLCGQHGVPIDFRTQISFCAVVCQKGMLYHHCSSFCLHSCISLSSPEQCSDDCAEGCNCPEGKFYEDTLNFCVPIFHCRCHYRGSVYQPGELIPTPSGLCQCSNGTVKCDELATPSAVHICPEGKEYFDCRFPDPELPAGGVNCETTCANLAMNFTCTPSSPCISGCVCAPGMAEHRGKCYVPESCPCIWKDWEYLSGEVIATPCYTCVCRRGMFNCTYYPCPAVCTIYGDRHYYSFDGLEYDYISDCQVFLIKKQSGFFLENKSTYQLWKAGYYIVVYFPEKDITILWDRKTTIHIKVGPQWKNKLSGLCGNFDKCTSNDMTTSNNLEVRNARVFGDSWALGQCESPDETIKPCEAHQNKFPYAKKECSILYSDIFASCRNVIDVTSFAKNCHEDTCNCNLGGDCECLCTSIAAYAYKCCQEGISIHWRSSTVCSLDCEYYNEGLGEGPYMLASYGQSGLVLGANMTSRSVFCLPRSSVHTSLFFYFMITPGLFKEKVSSLALVSLESAERPNYFLYVHDNDTLSLELWEANSAFHRRATFFHHQGLWIPGYSAFELYSKKGFFIIFTDSSVKASKYDDSEEFKHSSSFSIEEIQAAVPYRKMCEWRYEPCATPCFKTCSDPEALACKFLPPVEGCLPYCPKNMILDEVTLKCVYPRDCIPVIPTEPTLMPPAKPTVPMFTVWEMITPSDITVFDMLTPTTGLECEPQKFDPVYDCSQYICLNMEWQLYNWSLNCPKDVEMPDCGFRGRPVQVNSDICCPEWECPCRCSMLSELSIITFDGNNAALYSMASYILVRIPGEIIVAHIEKCSMNQNGNSLKKLAPSGRISGLCFKKLNVTTPIHKIIVNRLARKVEVDSIVVPLPFSSQELSIEDSGSMYVITTPAGLIIKWSHLTGIIDIHFGFRFNLSSYTEGLCGICNEDPDDDLRMQNGTIITNMEDIGLFIESWEIEKSFEVTMRRPVRNCTEHDCSQCIDLLNRRIFIPCHDKVSPEDFCEKMWINYTYFWNYECDALSAYVALCNKFDICIQWRTPDYCSLSCPEGKEYQPCVRPCEARTCLNQWFYGHTSCLNLREDCVCKVGTILHRPHSAQCIPEKECACTDSEDQPRTAGEIWNGGIDECTLYKCLENGSIIPIEPDCDEEPTPVCEREAEVVMGIIDKWTCCSKEVCGCDTTLCETSIPTCTNSQKLIVGHSPLSCCPQYKCECDPLKCPSISTPECREDQFMIQVRQEEPCCFSPFCVCESCTKPVPLCHDGEFLTVDLNSTHFCCPQYYCVCEPNLCPMPLLNCAEDMNLVKENVSGQCCPTWHCECNCENLIMPTCEVGEFTAIDHNFQSDCGCIQYLCEKDDVCVFQEVSVLNPGQSMIKYLEEDFCYAIECLEEKDNHTGFHTLNFTLVNCSKKCDVHQVYTPSPSDYGCCGTCKNVSCKFHMENGTSVVYAVGSTWHYNCTTYECVKTDEGAIILNYTMVCPPFNETECKMNEGIVKLYNEGCCKICKREERICQKVIIKSVIRKQDCMSQSPINVASCDGKCPSATIYNINIESHLRFCKCCRENGVRNLSVPLYCSGNGTEIMYTLQEPIDCTCQWN

SEQ ID NO: 25044 - protein, 495 aa, Homo sapiens
MENEIFTPLLEQFMTSPLVTWVKTFGPLAAGNGTNLDEYVALVDGVFLNQVMLQINPKLESQRVNKKVNNDASLRMHNLSILVRQIKFYYQETLQQLIMMSLPNVLIIGKNPFSEQGTEEVKKLLLLLLGCAVQCQKKEEFIERIQGLDFDTKAAVAAHIQEVTHNQENVFDLQWMEVTDMSQEDIEPLLKNMALHLKRLIDERDEHSENMNLLSDARSARMYRDELDALREKAVRVDKLESEVSRYKERLHDIEFYKARVEELKEDNQVLLETKTMLEDQLEGTRARSDKLHELEKENLQLKAKLHDMEMERDMDRKKIEELMEENMTLEMAQKQSMDESLHLGWELEQISRTSELSEAPQKSLGHEVNELTSSRLLKLEMENQSLTKTVEELRTTVDSVEGNASKILKMEKENQRLSKKVEILENEIVQEKQSLQNCQNLSKDLMKEKAQLEKTIETLRENSERQIKILEQENEHLNQTVSSLRQRSQISAEA

SEQ ID NO: 25045 - protein, 450 aa, Homo sapiens
MQLPRWWELGDPCAWTGQGRGTRRMSPATTGTFLLTVYSIFSKVHSDRNVYPSAGVLFVHVLEREYFKGEFPPYPKPGEISNDPITFNTNLMGYPDRPGWLRYIQRTPYSDGVLYGSPTAENVGKPTIIEITAYNRRTFETARHNLIINIMSAEDFPLPYQAEFFIKNMNVEEMLASEVLGDFLGAVKNVWQPERLNAINITSALDRGGRVPLPINDLKEGVYVMVGADVPFSSCLREVENPQNQLRCSQEMEPVITCDKKFRTQFYIDWCKISLVDKTKQVSTYQEVIRGEGILPDGGEYKPPSDSLKSRDYYTDFLITLAVPSAVALVLFLILAYIMCCRREGVIQLVHHSAIQKSTKELRDMSKNREIAWPLSTLPVFHPVTGEIIPPLHTDNYDSTNMPLMQTQQNLPHQTQIPQQQTTDFRLTTFQRFEVNGIPEERKLTEAMNL

SEQ ID NO: 25046 - protein, 616 aa, Homo sapiens
RRERDDQMYRERLRTLLVIAVVMSLLNALSTSGGSISWNDFVHEMLAKGEVQRVQVVPESDVVEVYLHPGAVVFGRPRLALMYRMQVANIDKFEEKLRAAEDELNIEAKDRIPVSYKRTGFFGNALYSVGMTAVGLAILWYVFRLAGMTGREGGFSAFNQLKMARFTIVDGKMGKGVSFKDVAGMHEAKLEVREFVDYLKSPERFLQLGAKVPKGALLLGPPGCGKTLLAKAVATEAQVPFLAMAGPEFVEVIGGLGAARVRSLFKEARARAPCIVYIDEIDAVGKKRSTTMSGFSNTEEEQTLNQLLVEMDGMGTTDHVIVLASTNRADILDGALMRPGRLDRHVFIDLPTLQERREIFEQHLKSLKLTQSSTFYSQRLAELTPGFSGADIANICNEAALHAAREGHTSVHTLNFEYAVERVLAGTAKKSKILSKEEQKVVAFHESGHALVGWMLEHTEAVMKVSITPRTNAALGFAQMLPRDQHLFTKEQLFERMCMALGGRASEALSFNEVTSGAQDDLRKVTRIAYSMVKQFGMAPGIGPISFPEAQEGLMGIGRRPFSQGLQQMMDHFPPLTGSKTAGGQGLQTHREGAAGQPGQVAGAGKRPSGKGSDKL

SEQ ID NO: 25047 - protein, 728 aa, Homo sapiens
MVAERTHKAAATGARGPGELGAPGTVALVAARAERGARLPSPGSCGLLTLALCSLALSLLAHFRTAELQARVLRLEAERGEQQMETAILGRVNQLLDEKWKLHSRRRREAPKTSPGCNCPPGPPGPTGRPGLPGDKGAIGMPGRVGVKGQPGEKGSPGDAGLSIIGPRGPPGQPGTRGFPGFPGPIGLDGKPGHPGPKGDMGLTGPPGQPGPQGQKGEKGQCGEYPHRLLPLLNSVRLAPPPVIKRRTFQGEQSQASIQGPPGPPGPPGPSGPLGHPGLPGPMGPPGLPGPPGPKGDPGIQGYHGRKGERGMPGMPGKHGAKGAPGIAVAGMKGEPGIPGTKGDPGAEGKPGPPGLLGKRGQRGEKGAEGSPGLPGLLGQKGEKGDAGNSIGGGRGEPGPPGLPGPPGPKGEAGVDGQVGPPGQPGDKGERGAAGEQGPDGPKGSKGEPGKGEMVDYNGNINEALQEIRTLALMGPPGLPGQIGPPGAPGIPGQKGEIGLPGPPGHDGEKGPRGKPGDMGPPGPQGPPGKDGPPGVKGENGHPGSPGEKGEKGETGQAGSPGEKGEAGEKGNPGAEVPGLPGPEGPPGPPGLQGVPGPKGEAGLDGAKGEKGFQGEKGDRGPLGLPGASGLDGRPGPPGTPGPIGVPGPAGPKGERGSKGDPGMTGPTGAAGLPGLHGPPGDKGNRGERGKKGSRGPKGDKGDQGAPGLDAPCPLGEDGLPVQGCWNK

SEQ ID NO: 25048 - protein, 343 aa, Homo sapiens
EDSNSVVLSFDSAGQTLGSEYDRLGFLLNLDSKLPAELATKYANFSEGACKPGYASALMTAIFPRFSKPAPMFLDDSFRKWARIREFVPPFGIKGQDNLIKAILSVTKEYRLTPALDSLRCRRCIIVGNGGVLANKSLGSRIDDYDIVVRLNSAPVKGFEKDVGSKTTLRITYPEGAMQRPEQYERDSLFVLAGFKWQDFKWLKYIVYKERVSASDGFWKSVATRVPKEPPEIRILNPYFIQEAAFTLIGLPFNNGLMGRGNIPTLGSVAVTMALHGCDEVAVAGFGYDMSTPNAPLHYYETVRMAAIKEVRGWSWTHNIQREKEFLRKLVKARVITDLSSGI

SEQ ID NO: 25049 - protein, 1158 aa, Homo sapiens
MSLKPQQQQQQQQQQQQQQQQQQQQQQQPPPAAANVRKPGGSGLLASPAAAPSPSSSSVSSSSATAPSSVVAATSGGGRPGLGRGRNSNKGLPQSTISFDGIYANMRMVHILTSVVGSKCEVQVKNGGIYEGVFKTYSPKCDLVLDAAHEKSTESSSGPKREEIMESILFKCSDFVVVQFKDMDSSYAKRDAFTDSAISAKVNGEHKEKDLEPWDAGELTANEELEALENDVSNGWDPNDMFRYNEENYGVVSTYDSSLSSYTVPLERDNSEEFLKREARANQLAEEIESSAQYKARVALENDDRSEEEKYTAVQRNSSEREGHSINTRENKYIPPGQRNREVISWGSGRQNSPRMGQPGSGSMPSRSTSHTSDFNPNSGSDQRVVNGGVPWPSPCPSPSSRPPSRYQSGPNSLPPRAATPTRPPSRPPSRPSRPPSHPSAHGSPAPVSTMPKRMSSEGPPRMSPKAQRHPRNHRVSAGRGSISSGLEFVSHNPPSEAATPPVARTSPSGGTWSSVVSGVPRLSPKTHRPRSPRQNSIGNTPSGPVLASPQAGIIPTEAVAMPIPAASPTPASPASNRAVTPSSEAKDSRLQDQRQNSPAGNKENIKPNETSPSFSKAENKGISPVVSEHRKQIDDLKKFKNDFRLQPSSTSESMDQLLNKNREGEKSRDLIKDKIEPSAKDSFIENSSSNCTSGSSKPNSPSISPSILSNTEHKRGPEVTSQGVQTSSPACKQEKDDKEEKKDAAEQVRKSTLNPNAKEFNPRSFSQPKPSTTPTSPRPQAQPSPSMVGHQQPTPVYTQPVCFAPNMMYPVPVSPGVQPLYPIPMTPMPVNQAKTYRAGKVPNMPQQRQDQHHQSAMMHPASAAGPPIAATPPAYSTQYVAYSPQQFPNQPLVQHVPHYQSQHPHVYSPVIQGNARMMAPPTHAQPGLVSSSATQYGAHEQTHAMYACPKLPYNKETSPSFYFAISTGSLAQQYAHPNATLHPHTPHPQPSATPTGQQQSQHGGSHPAPSPVQHHQHQAAQALHLASPQQQSAIYHAGLAPTPPSMTPASNTQSPQNSFPAAQQTVFTIHPSHVQPAYTNPPHMAHVPQAHVQSGMVPSHPTAHAPMMLMTTQPPGGPQAALAQSALQPIPVSTTAHFPYMTHPSVLVQGISRKRQD

SEQ ID NO: 25050 - protein, 381 aa, Homo sapiens
MAQQANVGELLAMLDSPMLGVRDDVTAVFKENLNSDRGPMLVNTLVDYYLETSSQPALHILTTLQEPHDKHLLDRINEYVGKAATRLSILSLLGHVIRLQPSWKHKLSQAPLLPSLLKCLKMDTDVVVLTTGVLVLITMLPMIPQSGKQHLLDFFDIFGRLSSWCLKKPGHVAEVYLVHLHASVYALFHRLYGMYPCNFVSFLRSHYSMKENLETFEEVVKPMMEHVRIHPELVTGSKDHELDPRRWKRLETHDVVIECAKISLDPTEASYEDGYSVSHQISARFPHRSADVTTSPYADTQNSYGCATSTPYSTSRLMLLNMPGQLPQTLSSPSTRLITEPPQVWCQLVCLLSPLLSGYSLEPIYGLWYDHSSNFSWKCPT

SEQ ID NO: 25051 - protein, 553 aa, Homo sapiens
MPLAFCGSENHSAAYRVDQGVLNNGCFVDALNVVPHVFLLFITFPILFIGWGSQSSKVHIHHSTWLHFPGHNLRWILTFMLLFVLVCEIAEGILSDGVTESHHLHLYMPAGMAFMAAVTSVVYYHNIETSNFPKLLIALLVYWTLAFITKTIKFVKFLDHAIGFSQLRFCLTGLLVILYGMLLLVERYIFFKTPREVKPPEDLQDLGVRFLQPFVNLLSKGTYWWMNAFIKTAHKKPIDLRAIGKLPIAMRALTNYQRLCEAFDAQRKDIQGTQGARAIWQALSHAFGRRLVLSSTFRILADLLGFAGPLCIFGIVDHLGKENDVFQPKTQFLGVYFVSSQEFLANAYVLAVLLFLALLLQRTFLQASYYVAIETGINLRGAIQTKIYNKIMHLSTSNLSMGEMTAGQICNLVAIDTNQLMWFFFLCPNLWAMPVQIIVGVILLYYILGVSALIGAAVIILLAPVQYFVATKLSQAQRSTLEYSNERLKQTNEMLRGIKLLKLYAWENIFRTRVETTRRKEMTSLRAFAIYTSISSWPHWTALPPSHPGHLHV

SEQ ID NO: 25052 - protein, 1165 aa, Homo sapiens
HAKDFKEYHRSVTGKIQKLTKAVATYHANTEREQKKENERIEKERMRRLMAEDEEGYRKLIDQKKDKRLAYLLQQTDEYVANLTELVRQHKAAQVAKEKKKKKKKKKAENAEGQTPAIGPDGEPLDETSQMSDLPVKVIHVESGKILTGTDAPKAGQLEAWLEMNPGYEVAPRSDSEESGSEEEEEEEEEEQPQAAQPPTLPVEEKKKIPDPDSDDVSEVDARHIIENAKQDVDDEYGVSQALARGLQSYYAVAHAVTERVDKQSALMVNGVLKQYQIKGLEWLVSLYNNNLNGILADEMGLGKTIQTIALITYLMEHKRINGPFLIIVPLSTLSNWAYEFDKWAPSVVKVSYKGSPAARRAFVPQLRSGKFNVLLTTYEYIIKDKHILAKIRWKYMIVDEGHRMKNHHCKLTQVLNTHYVAPRRLLLTGTPLQNKLPELWALLNFLLPTIFKSCSTFEQWFNAPFAMTGEKVDLNEEETILIIRRLHKVLRPFLLRRLKKEVEAQLPEKVEYVIKCDMSALQRVLYRHMQAKGVLLTDGSEKDKKGKGGTKTLMNTIMQLRKICNHPYMFQHIEESFSEHLGFTGGIVQGLDLYRASGKFELLDRILPKLRATNHKVLLFCQMTSLMTIMEDYFAYRGFKYLRLDGTTKAEDRGMLLKTFNEPGSEYFIFLLSTRAGGLGLNLQSADTVIIFDSDWNPHQDLQAQDRAHRIGQQNEVRVLRLCTVNSVEEKILAAAKYKLNVDQKVIQAGMFDQKSSSHERRAFLQAILEHEEQDESRHCSTGSGSASFAHTAPPPAGVNPDLEEPPLKEEDEVPDDETVNQMIARHEEEFDLFMRMDLDRRREEARNPKRKPRLMEEDELPSWIIKDDAEVERLTCEEEEEKMFGRGSRHRKEVDYSDSLTEKQWLKAIEEGTLEEIEEEVRQKKSSRKRKRDSDAGSSTPTTSTRSRDKDDESKKQKKRGRPPAEKLSPNPPNLTKKMKKIVDAVIKYKDSSGRQLSEVFIQLPSRKELPEYYELIRKPVDFKKIKERIRNHKYRSLNDLEKDVMLLCQNAQTFNLEGSLIYEDSIVLQSVFTSVRQKIEKEDDSEGEESEEEEEGEEEGSESESRSVKVKIKLGRKEKAQDRLKGGRRRPSRGSRAKPVVSDDDSEEEQEEDRSGSGSEED

SEQ ID NO: 25053 - protein, 309 aa, Homo sapiens
GQVAEGGVLDASAKKTVVPKAQKETVKAEVKKEDEPPEQAEPEPTEAWKVEKTHIEVTVPTSNGDQTQDLDKSQEEIKKHHASISELKKNFMESVPEPRPSEWDKRLSTHSPFRTLNINGQIPTGEGSINGIRTEEVAVVTKGPSTNPDSEWEGPKHSVVPSKSQMTTSSESLQSFAFGSLSISSKETEEKEEGAAGYLDIKEMPRGPTGGCIGVEEQASALKFSVTPASCQLQPGVKKAESSEEHVTPGEPPGKQNGSFLDFHVGNQFPTLIRSFQPPLVKTQTVTISDNANAVKSEIPTKDVPIVHT

SEQ ID NO: 25054 - protein, 762 aa, Homo sapiens
MDGKRRPGPGPGVPPKRARGGLWDDDDAPRPSQFEEDLALMEEMEAEHRLQEQEEEELQSVLEGVADGQVPPSAIDPRWLRPTPPALDPQTEPLIFQQLEIDHYVGPAQPVPGGPPPSRGSVPVLRAFGVTDEGFSVCCHIHGFAPYFYTPAPPGFGPEHMGDLQRELNLAISRDSRGGRELTGPAVLAVELCSRESMFGYHGHGPSPFLRITVALPRLVAPARRLLEQGIRVAGLGTPSFAPYEANVDFEIRFMVDTDIVGCNWLELPAGKYALRLKEKATQCQLEADVLWSDVVSHPPEGPWQRIAPLRVLSFDIECAGRKGIFPEPERDPVIQICSLGLRWGEPEPFLRLALTLRPCAPILGAKVQSYEKEEDLLQAWSTFIRIMDPDVITGYNIQNFDLPYLISRAQTLKVQTFPFLGRVAGLCSNIRDSSFQSKQTGRRDTKVVSMVGRVQMDMLQVLLREYKLRSYTLNAVSFHFLGEQKEDVQHSIITDLQNGNDQTRRRLAVYCLKDAYLPLRLLERLMVLVNAVEMARVTGVPLSYLLSRGQQVKVVSQLLRQAMHEGLLMPVVKSEGGEDYTGATVIEPLKGYYDVPIATLDFSSLYPSIMMAHNLCYTTLLRPGTAQKLGLTEDQFIRTPTGDEFVKTSVRKGLLPQILENLLSARKRAKAELAKETDPLRRQVLDGRQLALKVSANSVYGFTGAQVGKLPCLEISQSLTLSPRLERSGTIVAHCSLNLRDSERHGVRTSDDRENQAAGGV

SEQ ID NO: 25055 - protein, 194 aa, Homo sapiens
VFTGIFAAEMVLKLIAMDPYEYFQVGWNIFDSLIVTLSLVELFLADVEGLSVLRSFRLLRVFKLAKSWPTLNMLIKIIGNSVGALGNLTLVLAIIVFIFAVVGMQLFGKSYKECVCKINDDCTLPRWHMNDFFHSFLIVFRVLCGEWIETMWDCMEVAGQAMCLIVYMMVMVIGNLVVCNQMFMHFNFSVEIIL

SEQ ID NO: 25056 - protein, 856 aa, Homo sapiens
MALIMEPVSKWSPSQVVDWMKGLDDCLQQYIKNFEREKISGDQLLRITHQELEDLGVSRIGHQELILEAVDLLCALNYGLETENLKTLSHKLNASAKNLQNFITGRRRSGHYDGRTSRKLPNDFLTSVVDLIGAAKSLLAWLDRSPFAAVTDYSVTRNNVIQLCLELTTIVQQDCTVYETENKILHVCKTLSGVCDHIISLSSDPLVSQSAHLEVIQLANIKPSEGLGMYIKSTYDGLHVITGTTENSPADRCKKIHAGDEVIQVNHQTVPLIPRSPTSSVATPSSTISTPTKRDSSALQDLYIPPPPAEPYIPRDEKGNLPCEDLRGHMVGKPVHKGSESPNSFLDQEYRKRFNIVEEDTVLYCYEYEKGRSSSQGRRESTPTYGKLRPISMPVEYNWVGDYEDPNKMKRDSRRENSLLRYMSNEKIAQEEYMFQRNSKKDTGKKSKKKGDKSNSPTHYSLLPSLQMDALRQDIMGTPVPETTLYHTFQQSSLQHKSKKKNKGPIAGKSKRRISCKDLGRGDCEGWLWKKKDAKSYFSQKWKKYWFVLKDASLYWYINEEDEKAEGFISLPEFKIDRASECRKKYAFKACHPKIKSFYFAAEHLDDMNRWLNRINMLTAGYAERERIKQEQDYWSESDKEEADTPSTPKQDSPPPPYDTYPRPPSMSCASPYVEAKHSRLSSTETSQSQSSHEEFRQEVTGSSAVSPIRKTASQRRSWQDLIETPLTSSGLHYLQTLPLEDSVFSDSAAISPEHRRQSTLPTQKCHLQDHYGPYPLAESERMQVLNGNGGKPRSFTLPRDSGFNHCCLNAPVSACDPQDDVQPPEVEEEEEEEEEEGEAAGENIGEKRWNCDLGI

SEQ ID NO: 25057 - protein, 589 aa, Homo sapiens
MTSSASGIYGNFGQANYSAAKLGLLGLANSLAIEGRKSNIHCNTIAPNAGSRMTQTVMPEDLVEALKPEYVAPLVLWLCHESCEENGGLFEVGAGWIGKLRWERTLGAIVRQKNHPMTPEAVKANWKKICDFENASKPQSIQESTGSIIEVLSKIDSEGGVSANHTSRATSTATSGFAGAIGQKLPPFSYAYTELEAIMYALGVGASIKDPKDLKFIYEGSSDFSCLPTFGVIIGQKSMMGGGLAEIPGLSINFAKVLHGEQYLELYKPLPRAGKLKCEAVVADVLDKGSGVVIIMDVYSYSEKELICHNQFSLFLVGSGGFGGKRTSDKVKVAVAIPNRPPDAVLTDTTSLNQAALYRLSGDWNPLHIDPNFASLAGFDKPILHGLCTFGFSARRVLQQFADNDVSRFKAIKARFAKPVYPGQTLQTEMWKEGNRIHFQTKVQETGDIVISNAYVDLAPTSGTSAKTPSEGGKLQSTFVFEEIGRRLKDIGPEVVKKVNAVFEWHITKGGNIGAKWTIDLKSGSGKVYQGPAKGAADTTIILSDEDFMEVVLGKLDPQKAFFSGRLKARGNIMLSQKLQMILKDYAKL

SEQ ID NO: 25058 - protein, 186 aa, Homo sapiens
MTPNSMTENGLTAWDKPKHCPDREHDWKLVGMSEACLHRKSHSERRSTLKNEQSSPHLIQTTWTSSIFHLDHDDVNDQSVSSAQTFQTEEKKCKGYIPSYLDKDELCVVCGDKATGYHYRCITCEGCKGFFRRTIQKNLHPSYSCKYEGKCVIDKVTRNQCQECRFKKCIYVGMATDCHTFIKKWP

SEQ ID NO: 25059 - protein, 604 aa, Homo sapiens
MSDCCSAPGISWEAGVGRPAVPGLELQIRRGAMSEETIKFSPVAKKLFVVTAVSAISVIFLAHHFKRKRGKKKGKILPWEPEHLILEYTKRAASDKGSSCSSSRQNLTLSLSSTKDKGSQVCNYANGGLFSKYSGSAQSLASVQSVNSCHSCACGNSNSWDKADEDDIKLVNIPVTTPENLYLMGMELFEEALRRWEQALTFRNRQAEDEACGSIKLGAGDAIAEENVDDIISTEFIHKLEALLQRAYRLQEEFEATLGASDPNSLADDIDKDTDITMKGNVEDFGLRDTLSIASTDSFASAAELAEHREVRHTYSLESLCHCPFYEEAMHLVEEGKIYSRVLRTEMLECLGDSDFLAKLHCIRQAFQVILSESANRIFLAESGRKILSALIVKARKNPKKFEDVFDEMIYFLEQTDHWGSTEMELAARGVKNLNFYDVVLDFILMDSFEDLENPPTSIQNVVNNRWLNSSFKETAVASSCWSVLKQKRQQMKIPDGFFAHFYAICEHISPVLAWGFLGPRNSLYDLCCFFKNQVLLFLKDIFDFEKVRYSSTETLAEDLMQLLIRRTELLMAYLEADALRHTSSCLSSHGHVMSTGLLEAKVQ

SEQ ID NO: 25060 - protein, 309 aa, Homo sapiens
MDDDIAALVVDNGSGMCKAGFAGDDAPRAVFPSIVGRPRHQGVMVGMGQKDSYVGDEAQSKRGILTLKYPIEHGIVTNWDDMEKIWHHTFYNELRVAPEEHPVLLTEAPLNPKANREKMTQAVLSLYASGRTTGIVMDSGDGVTHTVPIYEGYALPHAILRLDLAGRDLTDYLMKILTERGYSFTTTAEREIVRDIKEKLCYVALDFEQEMATAASSSSLEKSYELPDGQVITIGNERFRCPEALFQPSFLGMESCGIHETTFNSIMKCDVDIRKDLYANTVLSGGTTMYPGIADRMQKEITALAPSTM

SEQ ID NO: 25061 - protein, 634 aa, Homo sapiens; identical to SEQ ID NO: 19984

SEQ ID NO: 25062 - protein, 1956 aa, Homo sapiens
MEFPIGSLETNNFRRFTPESLVEIEKQIAAKQGTKKAREKHREQKDQEEKPRPQLDLKACNQLPKFYGELPAELIGEPLEDLDPFYSTHRTFMVLNKGRTISRFSATRALWLFSPFNLIRRTAIKVSVHSWFSLFITVTILVNCVCMTRTDLPEKIEYVFTVIYTFEALIKILARGFCLNEFTYLRDPWNWLDFSVITLAYVGTAIDLRGISGLRTFRVLRALKTVSVIPGLKVIVGALIHSVKKLADVTILTIFCLSVFALVGLQLFKGNLKNKCVKNDMAVNETTNYSSHRKPDIYINKRGTSDPLLCGNGSDSGHCPDGYICLKTSDNPDFNYTSFDSFAWAFLSLFRLMTQDSWERLYQQTLRTSGKIYMIFFVLVIFLGSFYLVNLILAVVTMAYEEQNQATTDEIEAKEKKFQEALEMLRKEQEVLAALGIDTTSLHSHNGSPLTSKNASERRHRIKPRVSEGSTEDNKSPRSDPYNQRRMSFLGLASGKRRASHGSVFHFRSPGRDISLPEGVTDDGVFPGDHESHRGSLLLGGGAGQQGPLPRSPLPQPSNPDSRHGEDEHQPPPTSELAPGAVDVSAFDAGQKKTFLSAEYLDEPFRAQRAMSVVSIITSVLEELEESEQKCPPCLTSLSQKYLIWDCCPMWVKLKTILFGLVTDPFAELTITLCIVVNTIFMAMEHHGMSPTFEAMLQIGNIVFTIFFTAEMVFKIIAFDPYYYFQKKWNIFDCIIVTVSLLELGVAKKGSLSVLRSFRLLRVFKLAKSWPTLNTLIKIIGNSVGALGNLTIILAIIVFVFALVGKQLLGENYRNNRKNISAPHEDWPRWHMHDFFHSFLIVFRILCGEWIENMWACMEVGQKSICLILFLTVMVLGNLVVLNLFIALLLNSFSADNLTAPEDDGEVNNLQVALARIQVFGHRTKQALCSFFSRSCPFPQPKAEPELVVKLPLSSSKAENHIAANTARGSSGGLQAPRGPRDEHSDFIANPTVWVSVPIAEGESDLDDLEDDGGEDAQSFQQEVIPKGQQEQLQQVERCGDHLTPRSPGTGTSSEDLAPSLGETWKDESVPQVPAEGVDDTSSSEGSTVDCLDPEEILRKIPELADDLEEPDDCFTEGCIRHCPCCKLDTTKSPWDVGWQVRKTCYRIVEHSWFESFIIFMILLSSGSLAFEDYYLDQKPTVKALLEYTDRVFTFIFVFEMLLKWVAYGFKKYFTNAWCWLDFLIVNISLISLTAKILEYSEVAPIKALRTLRALRPLRALSRFEGMRVVVDALVGAIPSIMNVLLVCLIFWLIFSIMGVNLFAGKFWRCINYTDGEFSLVPLSIVNNKSDCKIQNSTGSFFWVNVKVNFDNVAMGYLALLQVATFKGWMDIMYAAVDSREVNMQPKWEDNVYMYLYFVIFIIFGGFFTLNLFVGVIIDNFNQQKKKIRGQDIFMTEEQKKYYNAMKKLGSKKPQKPIPRPLNKFQGFVFDIVTRQAFDITIMVLICLNMITMMVETDDQSEEKTKILGKINQFFVAVFTGECVMKMFALRQYYFTNGWNVFDFIVVVLSIASLIFSAILKSLQSYFSPTLFRVIRLARIGRILRLIRAAKGIRTLLFALMMSLPALFNIGLLLFLVMFIYSIFGMSSFPHVRWEAGIDDMFNFQTFANSMLCLFQITTSAGWDGLLSPILNTGPPYCDPNLPNSNGTRGDCGSPAVGIIFFTTYIIISFLIMVNMYIAVILENFNVATEESTEPLSEDDFDMFYETWEKFDPEATQFITFSALSDFADTLSGPLRIPKPNRNILIQMDLPLVPGDKIHCLDILFAFTKNVLGESGELDSLKANMEEKFMATNLSKSSYEPIATTLRWKQEDISATVIQKAYRSYVLHRSMALSNTPCVPRAEEEAASLPDEGFVAFTANENCVLPDKSETASATSFPPSYESVTRGLSDRVNMRTSSSIQNEDEATSMELIAPGP

SEQ ID NO: 25063 - protein, 402 aa, Homo sapiens
SGPTSVSRQRVESLRKKRPQLLLAFISFSLLFPLQLPMSKSFFPWFGLDIGGTLVKLVYFEPKDITAEEEEEEVESLKSIRKYLTSNVAYGSTGIRDVHLELKDLTLCGRKGNLHFIRFPTHDMPAFIQMGRDKNFSSLHTVFCATGGGAYKFEQDFLTIGDLQLCKLDELDCLIKGILYIDSVGFNGRSQCYYFENPADSEKCQKLPFDLKNPYPLLLVNIGSGVSILAVYSKDNYKRVTGTSLGGGTFFGLCCLLTGCTTFEEALEMASRGDSTKVDKLVRDIYGGDYERFGLPGWAVASSFGNMMSKEKREAVSKEDLARATLITITNNIGSIARMCALNENINQVVFVGNFLRINTIAMRLLAYALDYWSKGQLKALFSEHEGYFGAVGALLELLKIP

SEQ ID NO: 25064 - protein, 155 aa, Homo sapiens
MDFRTACEETKTGICLLQDGNQEPFKVRLHLAKDILMIQEQDVICVSGEPFYSGERTVTIRRQTVGGFGLSIKGGAEHNIPVVVSKISKEQRAELSGLLFIGDAILQINGINVRKCRHEEVVQVLRNAGEEVTLTVSFLKRAPAFLKLPLNEDCA

SEQ ID NO: 25065 - protein, 534 aa, Homo sapiens
MPKPINVRVTTMDAELEFAIQPNTTGKQLFDQVVKTVGLREVWFFGLQYVDSKGYSTWLKLNKKVTQQDVKKENPLQFKFRAKFFPEDVSEELIQEITQRLFFLQVKEAILNDEIYCPPETAVLLASYAVQAKYGDYNKEIHKPGYLANDRLLPQRVLEQHKLTKEQWEERIQNWHEEHRGMLREDSMMEYLKIAQDLEMYGVNYFEIKNKKGTELWLGVDALGLNIYEHDDKLTPKIGFPWSEIRNISFNDKKFVIKPIDKKAPDFVFYAPRLRINKRILALCMGNHELYMRRRKPDTIEVQQMKAQAREEKHQKQLERAQLENEKKKREIAEKEKERIEREKEELMERLKQIEEQTIKAQKELEEQTRKALELDQERKRAKEEAERLEKERRAAEEAKSAIAKQAADQMKNQEQLAAELAEFTAKIALLEEAKKKKEEEATEWQHKAFAAQEDLEKTKEELKTVMSAPPPPPPPPVIPPTENEHDEHDENNAEASAELSNEGVMNHRSEEERVTETQKNERVKKQLQGYKEC

SEQ ID NO: 25066 - protein, 671 aa, Homo sapiens
MPLAFCGSENHSAAYRVDQGVLNNGCFVDALNVVPHVFLLFITFPILFIGWGSQSSKVHIHHSTWLHFPGHNLRWILTFMLLFVLVCEIAEGILSDGVTESHHLHLYMPAGMAFMAAVTSVVYYHNIETSNFPKLLIALLVYWTLAFITKTIKFVKFLDHAIGFSQLRFCLTGLLVILYGMLLLVEVNVIRVRRYIFFKTPREVKPPEDLQDLGVRFLQPFVNLLSKGTYWWMNAFIKTAHKKPIDLRAIGKLPIAMRALTNYQRLCEAFDAQVRKDIQGTQGARAIWQALSHAFGRRLVLSSTFRILADLLGFAGPLCIFGIVDHLGKENDVFQPKTQFLGVYFVSSQEFLANAYVLAVLLFLALLLQRTFLQASYYVAIETGINLRGAIQTKIYNKIMHLSTSNLSMGEMTAGQICNLVAIDTNQLMWFFFLCPNLWAMPVQIIVGVILLYYILGVSALIGAAVIILLAPVQYFVATKLSQAQRSTLEYSNERLKQTNEMLRGIKLLKLYAWENIFRTRVETTRRKEMTSLRAFAIYTSISIFMNTAIPIAAVLITFVGHVSFFKEADFSPSVAFASLSLFHILVTPLFLLSSVVRSTVKALVSVQKLSEFLSSAEIREEQCAPHEPTPQGPASKYQAVGCEPQASSPGGLSGPHRPTAEPGPQCRWRC

SEQ ID NO: 25067 - protein, 224 aa, Homo sapiens
MAQQANVGELLAMLDSPMLGVRDDVTAVFKENLNSDRGPMLVNTLVDYYLETSSQPALHILTTLQEPHDKHLLDRINEYVGKAATRLSILSLLGHVIRLQPSWKHKLSQAPLLPSLLKCLKMDTDVVVLTTGVLVLITMLPMIPQSGKQHLLDFFDIFGRLSSWCLKKPGHVAEVYLVHLHASVYALFHRLYGMYPCNFVSFLRSHYSMKENLETFEEVVKPMM

SEQ ID NO: 25068 - protein, 673 aa, Homo sapiens
MADPAAGPPPSEGEESTVRFARKGALRQKNVHEVKNHKFTARFFKQPTFCSHCTDFIWGFGKQGFQCQVCCFVVHKRCHEFVTFSCPGADKGPASDDPRSKHKFKIHTYSSPTFCDHCGSLLYGLIHQGMKCDTCMMNVHKRCVMNVPSLCGTDHTERRGRIYIQAHIDRDVLIVLVRDAKNLVPMDPNGLSDPYVKLKLIPDPKSESKQKTKTIKCSLNPEWNETFRFQLKESDKDRRLSVEIWDWDLTSRNDFMGSLSFGISELQKASVDGWFKLLSQEEGEYFNVPVPPEGSEANEELRQKFERAKISQGTKVPEEKTTNTVSKFDNNGNRDRMKLTDFNFLMVLGKGSFGKVMLSERKGTDELYAVKILKKDVVIQDDDVECTMVEKRVLALPGKPPFLTQLHSCFQTMDRLYFVMEYVNGGDLMYHIQQVGRFKEPHAVFYAAEIAIGLFFLQSKGIIYRDLKLDNVMLDSEGHIKIADFGMCKENIWDGVTTKTFCGTPDYIAPEIIAYQPYGKSVDWWAFGVLLYEMLAGQAPFEGEDEDELFQSIMEHNVAYPKSMSKEAVAICKGLMTKHPGKRLGCGPEGERDIKEHAFFRYIDWEKLERKEIQPPYKPKACGRNAENFDRFFTRHPPVLTPPDQEVIRNIDQSEFEGFSFVNSEFLKPEVKS

SEQ ID NO: 25069 - protein, 402 aa, Homo sapiens
MDFRTACEETKTGICLLQDGNQEPFKVRLHLAKDILMIQEQDVICVSGEPFYSGERTVTIRRQTVGGFGLSIKGGAEHNIPVVVSKISKEQRAELSGLLFIGDAILQINGINVRKCRHEEVVQVLRNAGEEVTLTVSFLKRAPAFLKLPLNEDCACAPSDQSSGTSSPLCDSGLHLNYHPNNTDTLSCSSWPTSPGLRWEKRWCDLRLIPLLHSRFSQYVPGTDLSRQNAFQVIAVDGVCTGIIQCLSAEDCVDWLQAIATNISNLTKHNIKKINRNFPVNQQIVYMGWCEAREQDPLQDRVYSPTFLALRGSCLYKFLAPPVTTWDWTRAEKTFSVYEIMCKILKDSDLLDRRKQCFTVQSESGEDLYFSVELESDLAQWERAFQTATFLEVERIQYPYLL

SEQ ID NO: 25070 - protein, 1604 aa, Homo sapiens
MENEIFTPLLEQFMTSPLVTWVKTFGPLAAGNGTNLDEYVALVDGVFLNQVMLQMEEKTEQLLDCKQELEQMEIELKRLQQENMNLLSDARSARMYRDELDALREKAVRVDKLESEVSRYKERLHDIEFYKARVEELKEDNQVLLETKTMLEDQLEGTRARSDKLHELEKENLQLKAKLHDMEMERDMDRKKIEELMEENMTLEMAQKQSMDESLHLGWELEQISRTSELSEAPQKSLGHEVNELTSSRLLKLEMENQSLTKTVEELRTTVDSVEGNASKILKMEKENQRLSKKVEILENEIVQEKQSLQNCQNLSKDLMKEKAQLEKTIETLRENSERQIKILEQENEHLNQTVSSLRQRSQISAEARVKDIEKENKILHESIKETSSKLSKIEFEKRQIKKELEHYKEKGERAEELENELHHLEKENELLQKKITNLKITCEKIEALEQENSELERENRKLKKTLDSFKNLTFQLESLEKENSQLDEENLELRRNVESLKCASMKMAQLQLENKELESEKEQLKKGLELLKASFKKTERLEVSYQGLDIENQRLQKTLENSNKKIQQLESELQDLEMENQTLQKNLEELKISSKRLEQLEKENKSLEQETSQLEKDKKQLEKENKRLRQQAEIKDTTLEENNVKIGNLEKENKTLSKEIGIYKESCVRLKELEKENKELVKRATIDIKTLVTLREDLVSEKLKTQQMNNDLEKLTHELEKIGLNKERLLHDEQSTDDSRYKLLESKLESTLKKSLEIKEEKIAALEARLEESTNYNQQLRQELKTVKKNYEALKQRQDEERMVQSSPPISGEDNKWERESQETTRELLKVKDRLIEVERNNATLQAEKQALKTQLKQLETQNNNLQAQILALQRQTVSLQEQNTTLQTQNAKLQVENSTLNSQSTSLMNQNAQLLIQQSSLENENESVIKEREDLKSLYDSLIKDHEKLELLHERQASEYESLISKHGTLKSAHKNLEVEHRDLEDRYNQLLKQKGQLEDLEKMLKVEQEKMLLENKNHETVAAEYKKLCGENDRLNHTYSQLLKETEVLQTDHKNLKSLLNNSKLEQTRLEAEFSKLKEQYQQLDITSTKLNNQCELLSQLKGNLEEENRHLLDQIQTLMLQNRTLLEQNMESKDLFHVEQRQYIDKLNELRRQKEKLEEKIMDQYKFYDPSPPRRRGNWITLKMRKLIKSKKDINRERQKSLTLTPTRSDSSEGFLQLPHQDSQDSSSVGSNSLEDGQTLGTKKSSTMNDLVQSMVLAGQWTGSTENLEVPDDISTGKRRKELGAMAFSTTAINFSTVNSSAGFRSKQLVNNKDTTSFEDISPQGVSDDSSTGSRVHAGAVNNQSRPQSHSSGEFSLLHDHEAWSSSGSSPIQYLKRQTRSSPVLQHKISETLESRHHKIKTGSPGSEVVTLQQFLEESNKLTSVQIKSSSQENLLDEVMKSLSVSSDFLGKDKPVSCGLARSVSGKTPGDFYDRRTTKPEFLRPGPRKTEDTYFISSAGKPTPGTQGKIKLVKESSLSRQSKDSNPYATLPRASSVISTAEGTTRRTSIHDFLTKDSRLPISVDSPPAAADSNTTAASNVDKVQESRNSKSRSREQQSS

SEQ ID NO: 25071 - protein, 497 aa, Homo sapiens [sequence omitted]

SEQ ID NO: 25072 - protein, 600 aa, Homo sapiens
MRTTKVYKLVIHKKGFGGSDDELVVNPKVFPHIKLGDIVEIAHPNDEYSPLLLQVKSLKEDLQKETISVDQTVTQVFRLRPYQDVYVNVVDPKVSTCAYITQKVEFAGIRAQAGELWVKNEKVMCGYISEDTRVVFRSTSAMVYIFIQMSCEMWDFDIYGDLYFEKAVNGFLADLFTKWKEKNCSHEVTVVLFSRTFYDAKSVDEFPEINRASIRQDHKGRFYEDFYKVVVQNERREEWTSLLVTIKKLFIQYPVLVRLEQAEGFPQGDNSTSAQGNYLEAINLSFNVFDKHYINRNFDRTGQMSVVITPGVGVFEVDRLLMILTKQRMIDNGIGVDLVCMGEQPLHAVPLFKLHNRSAPRDSRLGDDYNIPHWINHSFYTSKSQLFCNSFTPRIKLAGKKPASEKAKNGRDTSLGSPKESENALPIQVDYDAYDAQVFRLPGPSRAQCLTTCRSVRERESHSRKSASSCDVSSSPSLPSRTLPTEEVRSQASDDSSLGKSANILMIPHPHLHQYEVSSSLGYTSTRDVLENMMEPPQRDSSAPGRFHVGSAESMLHVRPGGYTPQRALINPFAPSRMPMKLTSNRRRWMHTFPVGDRAE

SEQ ID NO: 25073 - protein, 1905 aa, Homo sapiens
MASGLGSPSPCSAGSEEEDMDALLNNSLPPPHPENEEDPEEDLSETETPKLKKKKKPKKPRDPKIPKSKRQKKELGDSSGEGPEFVEEEEEVALRSDSEGSDYTPGKKKKKKLGPKKEKKSKSKRKEEEEEEDDDDDSKEPKSSAQLLEDWGMEDIDHVFSEEDYRTLTNYKAFSQFVRPLIAAKNPKIAVSKMMMVLGAKWREFSTNNPFKGSSGASVAAAAAAAVAVVESMVTATEVAPPPPPVEVPIRKAKTKEGKGPNARRKPKGSPRVPDAKKPKPKKVAPLKIKLGGFGSKRKRSSSEDDDLDVESDFDDASINSYSVSDGSTSRSSRSRKKLRTTKKKKKGEEEVTAVDGYETDHQDYCEVCQQGGEIILCDTCPRAYHMVCLDPDMEKAPEGKWSCPHCEKEGIQWEAKEDNSEGEEILEEVGGDLEEEDDHHMEFCRVCKDGGELLCCDTCPSSYHIHCLNPPLPEIPNGEWLCPRCTCPALKGKVQKILIWKWGQPPSPTPVPRPPDADPNTPSPKPLEGRPERQFFVKWQGMSYWHCSWVSELQLELHCQVMFRNYQRKNDMDEPPSGDFGGDEEKSRKRKNKDPKFAEMEERFYRYGIKPEWMMIHRILNHSVDKKGHVHYLIKWRDLPYDQASWESEDVEIQDYDLFKQSYWNHRELMRGEEGRPGKKLKKVKLRKLERPPETPTVDPTVKYERQPEYLDATGGTLHPYQMEGLNWLRFSWAQGTDTILADEMGLGKTVQTAVFLYSLYKEGHSKGPFLVSAPLSTIINWEREFEMWAPDMYVVTYVGDKDSRAIIRENEFSFEDNAIRGGKKASRMKKEASVKFHVLLTSYELITIDMAILGSIDWACLIVDEAHRLKNNQSKFFRVLNGYSLQHKLLLTGTPLQNNLEELFHLLNFLTPERFHNLEGFLEEFADIAKEDQIKKLHDMLGPHMLRRLKADVFKNMPSKTELIVRVELSPMQKKYYKYILTRNFEALNARGGGNQVSLLNVVMDLKKCCNHPYLFPVAAMEAPKMPNGMYDGSALIRASGKLLLLQKMLKNLKEGGHRVLIFSQMTKMLDLLEDFLEHEGYKYERIDGGITGNMRQEAIDRFNAPGAQQFCFLLSTRAGGLGINLATADTVIIYDSDWNPHNDIQAFSRAHRIGQNKKVMIYRFVTRASVEERITQVAKKKMMLTHLVVRPGLGSKTGSMSKQELDDILKFGTEELFKDEATDGGGDNKEGEDSSVIHYDDKAIERLLDRNQDETEDTELQGMNEYLSSFKVAQYVVREEEMGEEEEVEREIIKQEESVDPDYWEKLLRHHYEQQQEDLARNLGKGKRIRKQVNYNDGSQEDRDWQDDQSDNQSDYSVASEEGDEDFDERSEAPRRPSRKGLRNDKDKPLPPLLARVGGNIEVLGFNARQRKAFLNAIMRYGMPPQDAFTTQWLVRDLRGKSEKEFKAYVSLFMRHLCEPGADGAETFADGVPREGLSRQHVLTRIGVMSLIRKKVQEFEHVNGRWSMPELAEVEENKKMSQPGSPSPKTPTPSTPGDTQPNTPAPVPPAEDGIKIEENSLKEEESIEGEKEVKSTAPETAIECTQAPAPASEDEKVVVEPPEGEEKVEKAEVKERTEEPMETEPKGAADVEKVEEKSAIDLTPIVVEDKEEKKEEEEKKEVMLQNGETPKDLNDEKQKKNIKQRFMFNIADGGFTELHSLWQNEERAATVTKKTYEIWHRRHDYWLLAGIINHGYARWQDIQNDPRYAILNEPFKGEMNRGNFLEIKNKFLARRFKLLEQALVIEEQLRRAAYLNMSEDPSHPSMALNTRFAEVECLAESHQHLSKESMAGNKPANAVLHKVLKQLEELLSDMKADVTRLPATIARIPPVAVRLQMSERNILSRLANRAPEPTPQQVAQQQ

SEQ ID NO: 25074 - protein, 835 aa, Homo sapiens
MSRRKQGKPQHLSKREFSPEPLEAILTDDEPDHGPLGAPEGDHDLLTCGQCQMNFPLGDILIFIEHKRKQCNGSLCLEKAVDKPPSPSPIEMKKASNPVEVGIQVTPEDDDCLSTSSRGICPKQEHIADKLLHWRGLSSPRSAHGALIPTPGMSAEYAPQGICKDEPSSYTCTTCKQPFTSAWFLLQHAQNTHGLRIYLESEHGSPLTPRVGIPSGLGAECPSQPPLHGIHIADNNPFNLLRIPGSVSREASGLAEGRFPPTPPLFSPPPRHHLDPHRIERLGAEEMALATHHPSAFDRVLRLNPMAMEPPAMDFSRRLRELAGNTSSPPLSPGRPSPMQRLLQPFQPGSKPPFLATPPLPPLQSAPPPSQPPVKSKSCEFCGKTFKFQSNLVVHRRSHTGEKPYKCNLCDHACTQASKLKRHMKTHMHKSSPMTVKSDDGLSTASSPEPGTSDLVGSASSALKSVVAKFKSENDPNLIPENGDEEEEEDDEEEEEEEEEEEEELTESERVDYGFGLSLEAARHHENSSRGAVVGVGDESRALPDVMQGMVLSSMQHFSEAFHQVLGEKHKRGHLAEAEGHRDTCDEDSVAGESDRIDDGTVNGRGCSPGESASGGLSKKLLLGSPSSLSPFSKRIKLEKEFDLPPAAMPNTENVYSQWLAGYAASRQLKDPFLSFGDSRQSPFASSSEHSSENGSLRFSTPPGELDGGISGRSGTGSGGSTPHISGPGPGRPSSKEGRRSDTCEYCGKVFKNCSNLTVHRRSHTGERPYKCELCNYACAQSSKLTRHMKTHGQVGKDVYKCEICKMPFSVYSTLEKHMKKWHSDRVLNNDIKTE

SEQ ID NO: 25075 - protein, 1065 aa, Homo sapiens
RLAYLLQQTDEYVANLTELVRQHKAAQVAKEKKKKKKKKAENAEGQTPAIGPDGEPLDETSQMSDLPVKVIHVESGKILTGTDAPKAGQLEAWLEMNPGYEVAPRSDSEESGSEEEEEEEEEEQPQAAQPPTLPVEEKKKIPDPDSDDVSEVDARHIIENAKQDVDDEYGVSQALARGLQSYYAVAHAVTERVDKQSALMVNGVLKQYQIKGLEWLVSLYNNNLNGILADEMGLGKTIQTIALITYLMEHKRINGPFLIIVPLSTLSNWAYEFDKWAPSVVKVSYKGSPAARRAFVPQLRSGKFNVLLTTYEYIIKDKHILAKIRWKYMIVDEGHRMKNHHCKLTQVLNTHYVAPRRLLLTGTPLQNKLPELWALLNFLLPTIFKSCSTFEQWFNAPFAMTGEKVDLNEEETILIIRRLHKVLRPFLLRRLKKEVEAQLPEKVEYVIKCDMSALQRVLYRHMQAKGVLLTDGSEKDKKGKGGTKTLMNTIMQLRKICNHPYMFQHIEESFSEHLGFTGGIVQGLDLYRASGKFELLDRILPKLRATNHKVLLFCQMTSLMTIMEDYFAYRGFKYLRLDGTTKAEDRGMLLKTFNEPGSEYFIFLLSTRAGGLGLNLQSADTVIIFDSDWNPHQDLQAQDRAHRIGQQNEVRVLRLCTVNSVEEKILAAAKYKLNVDQKVIQAGMFDQKSSSHERRAFLQAILEHEEQDEEEDEVPDDETVNQMIARHEEEFDLFMRMDLDRRREEARNPKRKPRLMEEDELPSWIIKDDAEVERLTCEEEEEKMFGRGSRHRKEVDYSDSLTEKQWLKAIEEGTLEEIEEEVRQKKSSRKRKRDSDAGSSTPTTSTRSRDKDDESKKQKKRGRPPAEKLSPNPPNLTKKMKKIVDAVIKYKDSSSGRQLSEVFIQLPSRKELPEYYELIRKPVDFKKIKERIRNHKYRSLNDLEKDVMLLCQNAQTFNLEGSLIYEDSIVLQSVFTSVRQKIEKEDDSEGEESEEEEEGEEEGSESESRSVKVKIKLGRKEKAQDRLKGGRRRPSRGSRAKPVVSDDDSEEEQEEDRSGSGSEED

SEQ ID NO: 25076 - protein, 3628 aa, Homo sapiens
MVLESVVADLLNRFLGDYVENLNKSQLKLGIWGGNVALDNLQIKENALSELDVPFKVKAGQIDKLTLKIPWKNLYGEAVVATLEGLYLLVVPGASIKYDAVKEEKSLQDVKQKELSRIEEALQKAAEKGTHSGEFIYGLENFVYKDIKPGRKRKKHKKHFKKPFKGLDRSKDKPKEAKKDTFVEKLATQVIKNVQVKITDIHIKYEDDVTDPKRPLSFGVTLGELSLLTANEHWTPCILNEADKIIYKLIRLDSLSAYWNVNCSMSYQRSREQILDQLKNEILTSGNIPPNYQYIFQPISASAKLYMNPYAESELKTPKLDCNIEIQNIAIELTKPQYLSMIDLLESVDYMVRNAPYRKYKPYLPLHTNGRRWWKYAIDSVLEVHIRRYTQMWSWSNIKKHRQLLKSYKIAYKNKLTQSKVSEEIQKEIQDLEKTLDVFNIILARQQAQVEVIRSGQKLRKKSADTGEKRGGWFSGLWGKKESKKKDEESLIPETIDDLMTPEEKDKLFTAIGYSESTHNLTLPKQYVAHIMTLKLVSTSVTIRENKNIPEILKIQIIGLGTQVSQRPGAQALKVEAKLEHWYITGLRQQDIVPSLVASIGDTTSSLLKIKFETNPEDSPADQTLIVQSQPVEVIYDAKTVNAVVEFFQSNKGLDLEQITSATLMKLEEIKERTATGLTHIIETRKVLDLRINLKPSYLVVPQTGFHHEKSDLLILDFGTFQLNSKDQGLQKTTNSSLEEIMDKAYDKFDVEIKNVQLLFARAEETWKKCRFQHPSTMHILQPMDIHVELAKAMVEKDIRMARFKVSGGLPLMHVRISDQKMKDVLYLMNSIPLPQKSSAQSPERQVSSIPIISGGTKGLLGTSLLLDTVESESDDEYFDAEDGEPQTCKSMKGSELKKAAEVPNEELINLLLKFEIKEVILEFTKQQKEEDTILVFNVTQLGTEATMRTFDLTVVSYLKKISLDYHEIEGSKRKPLHLISSSDKPGLDLLKVEYIKADKNGPSFQTAFGKTEQTVKVAFSSLNLLLQTQALVASINYLTTIIPSDDQSISVAKEVQISTEKQQKNSTLPKAIVSSRDSDIIDFRLFAKLNAFCVIVCNEKNNIAEIKIQGLDSSLSLQSRKQSLFARLENIIVTDVDPKTVHKKAVSIMGNEVFRFNLDLYPDATEGDLYTDMSKVDGVLSLNVGCIQIVYLHKFLMSLLNFLNNFQTAKESLSAATAQAAERAATSVKDLAQRSFRVSINIDLKAPVIVIPQSSISTNAVVVDLGLIRVHNQFSLVSDEDYLNPPVIDRMDVQLTKLTLYRTVIQPGIYHPDIQLLHPINLEFLVNRNLAASWYHKVPVVEIKGHLDSMNVSLNQEDLNLLFRILTENLCEGTEDLDKVKPRVQETGEIKEPLEISISQDVHDSKNTLTTGVEEIRSVDIINMLLNFEIKEVVVTLMKKSEKKGRPLHELNVLQLGMEAKVKTYDMTAKAYLKKISMQCFDFTDSKGEPLHIINSSNVTDEPLLKMLLTKADSDGPEFKTIHDSTKQRLKVSFASLDLVLHLEALLSFMDFLSSAAPFSEPSSSEKESELKPLVGESRSIAVKAVSSNISQKDVFDLKITAELNAFNVFVCDQKCNIADIKIHGMDASISVKPKQTDVFARLKDIIVMNVDLQSIHKKAVSILGDEVFRFQLTLYPDATEGEAYADMSKVDGKLSFKVGCIQIVYVHKFFMSLLNFLNNFQTAKEALSTATVQAAERAASSMKDLAQKSFRLLMDINLKAPVIIIPQSSVSPNAVIADLGLIRVENKFSLVPMEHYSLPPVIDKMNIELTQLKLSRTILQASLPQNDIEILKPVNMLLSIQRNLAAAWYVQIPGMEIKGKLKPMQVALSEDDLTVLMKILLENLGEASSQPSPTQSVQETVRVRKVDVSSVPDHLKEQEDWTDSKLSMNQIVSLQFDFHFESLSIILYNNDINQESGVAFHNDSFQLGELRLHLMASSGKMFKDGSMNVSVKLKTCTLDDLREGIERATSRMIDRKNDQDNNSSMIDISYKQDKNGSQIDAVLDKLYVCASVEFLMTVADFFIKAVPQSPENVAKETQILPRQTATGKVKIEKDDSVRPNMTLKAMITDPEVVFVASLTKADAPALTASFQCNLSLSTSKLEQMMEASVRDLKVLACPFLREKRGKNITTVLQPCSLFMEKCTWASGKQNINIMVKEFIIKISPIILNTVLTIMAALSPKTKEDGSKDTSKEMENLWGIKSINDYNTWFLGVDTATEITESFKGIEHSLIEENCGVVVESIQVTLECGLGHRTVPLLLAESKFSGNIKNWTSLMAAVADVTLQVHYYNEIHAVWEPLIERVEGKRQWNLRLDVKKNPVQDKSLLPGDDFIPEPQMAIHISSGNTMNITISKSCLNVFNNLAKGFSEGTASTFDYSLKDRAPFTVKNAVGVPIKVKPNCNLRVMGFPEKSDIFDVDAGQNLELEYASMVPSSQGNLSILSRQESSFFTLTIVPHGYTEVANIPVARPGRRLYNVRNPNASHSDSVLVQIDATEGNKVITLRSPLQIKNHFSIAFIIYKFVKNVKLLERIGIARPEEEFHVPLDSYRCQLFIQPAGILEHQYKESTTYISWKEELHRSREVRCMLQCPSVEVSFLPLIVNTVALPDELSYICTHGEDWDVAYIIHLYPSLTLRNLLPYSLRYLLEGTAETHELAEGSTADVLHSRISGEIMELVLVKYQGKNWNGHFRIRDTLPEFFPVCFSSDSTEVTTVDLSVHVRRIGSRMVLSVFSPYWLINKTTRVLQYRSEDIHVKHPADFRDIILFSFKKKNIFTKNKVQLKISTSAWSSSFSLDTVGSYGCVKCPANNMEYLVGVSIKMSSFNLSRIVTLTPFCTIANKSSLELEVGEIASDGSMPTNKWNYIASSECLPFWPESLSGKLCVRVVGCEGSSKPFFYNRQDNGTLLSLEDLNGGILVDVNTAEHSTVITFSDYHEGSAPALIMNHTPWDILTYKQSGSPEEMVLLPRQARLFAWADPTGTRKLTWTYAANVGEHDLLKDGCGQFPYDANIQIHWVSFLDGRQRVLLFTDDVALVSKALQAEEMEQADYEITLSLHSLGLSLVNNESKQEVSYIGITSSGVVWEVKPKQKWKPFSQKQIILLEQSYQKHQISRDHGWIKLDNNFEVNFDKDPMEMRLPIRSPIKRDFLSGIQIEFKQSSHQRSLRARLYWLQVDNQLPGAMFPVVFHPVAPPKSIALDSEPKPFIDVSVITRFNEYSKVLQFKYFMVLIQEMALKIDQGFLGAIIALFTPTTDPEAERRRTKLIQQDIDALNAELMETSMTDMSILSFFEHFHISPVKLHLSLSLGSGGEESDKEKQEMFAVHSVNLLLKSIGATLTDVDDLIFKLAYYEIRYQFYKRDQLIWSVVRHYSEQFLKQMYVLVLGLDVLGNPFGLIRGLSEGVEALFYEPFQGAVQGPEEFAEGLVIGVRSLFGHTVGGAAGVVSRITGSVGKGLAAITMDKEYQQKRREELSRQPRDFGDSLARGGKGFLRGVVGGVTGIITKPVEGAKKEGAAGFFKGIGKGLVGAVARPTGGIVDMASSTFQGIQRAAESTEEVSSLRPPRLIHEDGIIRPYDRQESEGSDLLEQELEIQE

SEQ ID NO: 25077 - protein, 2965 aa, Homo sapiens [sequence omitted]

SEQ ID NO: 25078 - protein, 680 aa, Homo sapiens
MALIMEPVSKWSPSQVVDWMKGLDDCLQQYIKNFEREKISGDQLLRITHQELEDLGVSRIGHQELILEAVDLLCALNYGLETENLKTLSHKLNASAKNLQNFITGRRRSGHYDGRTSRKLPNDFLTSVVDLIGAAKSLLAWLDRSPFAAVTDYSVTRNNVIQLCLELTTIVQQDCTVYETENKILHVCKTLSGVCDHIISLSSDPLVSQSAHLEVIQLANIKPSEGLGMYIKSTYDGLHVITGTTENSPADRCKKIHAGDEVIQVNHQTVPLIPRSPTSSVATPSSTISTPTKRDSSALQDLYIPPPPAEPYIPRDEKGNLPCEDLRGHMVGKPVHKGSESPNSFLDQEYRKRFNIVEEDTVLYCYEYEKGRSSSQGRRESTPTYGKLRPISMPVEYNWVGDYEDPNKMKRDSRRENSLLRYMSNEKIAQEEYMFQRNSKKDTGKKSKKKGDKSNSPTHYSLLPSLQMDALRQDIMGTPVPETTLYHTFQQSSLQHKSKKKNKGPIAGKSKRRISCKDLGRGDCEGWLWKKKDAKSYFSQKWKKYWFVLKDASLYWYINEEDEKAEGFISLPEFKIDRASECRKKYAFKACHPKIKSFYFAAEHLDDMNRWLNRINMLTAGYAERERIKQEQDYWSESDKEEADTPSTPKQDSPPPPYDTYPRPPSDLDNFFKISIKEEE

SEQ ID NO: 25079 - protein, 915 aa, Homo sapiens
IVGKESKSAATKEESVSLKEKTKPLTPSIGAKEKEQHVALVTSTLPPLPLPPMLPEDKEADSLRGNISVKAVKKEVEKKLRCLLADLPLPPELPGGDDLSKSPEEKKTATQLHSKRRPKICGPRYGETKEKDIDWGKRCVDKFDIIGIIGEGTYGQVYKARDKDTGEMVALKKVRLDNEKEGFPITAIREIKILRQLTHQSIINMKEIVTDKEDALDFKKDKGAFYLVFEYMDHDLMGLLESGLVHFNENHIKSFMRQLMEGLDYCHKKNFLHRDIKCSNILLNNRGQIKLADFGLARLYSSEESRPYTNKVITLWYRPPELLLGEERYTPAIDVWSCGCILGELFTKKPIFQANQELAQLELIRASLCCQAGVQWRNLGSLQPLPPRFNRICGSPCPAVWPDVIKLPYFNTMKPKKQYRRKLREEFVFIPAAALDLFDYMLALDPSKRCTAEQALQCEFLRDVEPSKMPPPDLPLWQDCHELWSKKRRRQKQMGMTDDVSTIKAPRKDLSLGLDDSRTNTPQGVLPSSQLKSQGSSNVAPGEKQTDPSTPQQESSKPLGGIQPSSQTIQPKVETDAAQAAVQSAFAVLLTQLIKAQQSKQKDVLLEERENGSGHEASLQLRPPPEPSTPVSGQDDLIQHQDMRILELTPEPDRPRILPPDQRPPEPPEPPPVTEEDLDYRTENQHVPTTSSSLTDPHAGVKAALLQLLAQHQPQDDPKREGGIDYQAGDTYVSTSDYKDNFGSSSFSSAPYVSNDGLGSSSAPPLERRSFIGNSDIQSLDNYSTASSHSGGPPQPSAFSESFPSSVAGYGDIYLNAGPMLFSGDKDHRFEYSHGPIAVLANSSDPSTGPESTHPLPAKMHNYNYGGNLQENPSGPSLMHGQTWTSPAQGPGYSQGYRGHISTSTGRGRGRGLPY

SEQ ID NO: 25080 - protein, 585 aa, Homo sapiens
MEDPRGINGQSVQTSQASSDVAVSSSCRSMEMQDLTSPHSRLSGSSESPSGPKLGNSHINSNSMTPNGTEVKTEPMSSSETASTTADGSLNNFSGSAIGSSSFSPRPTHQFSPPQIYPSKPYPHILPTPSSQTMAAYGQTQFTTGMQQATAYATYPQPGQPYGISSYGIKTEGGLSQSQSPGQTGFLSYGTSFSTPQPGQAPYSYQMQGSSFTTSSGIYTGNNSLTNSSGFNSSQQDYPSYPSFGQGQYAQYYNSSPYPAHYMTSSNTSPTTPSTNATYQLQEPPSGITSQAVTDPTAEYSTIHSPSTPIKDSDSDRLRRGSDGKSRGRGRRNNNPSPPPDSDLERVFIWDLDETIIVFHSLLTGSYANRYGRECDQVHIDDVSSDDNGQDLSTYNFGTDGFPAAATSANLCLATGVRGGVDWMRKLAFRYRRVKEIYNTYKNNVGGLLGPAKREAWLQLRAEIEALTDSWLTLALKALSLIHSRTNCVNILVTTTQLIPALAKVLLYGLGIVFPIENIYSATKIGKESCFERIIQRFGRKVVYVVIGDGVEEEQGAKKHAMPFWRISSHSDLMALHHALELEYL

SEQ ID NO: 25081 - protein, 111 aa, Homo sapiens
MVHLTPEEKSAVTALWGKVNVDEVGGEALGRLLVVYPWTQRFFESFGDLSTPDAVMGNPKVKAHGKKVLGAFSDGLAHLDNLKGTFATLSELHCDKLHVDPENFRVSLWDA

SEQ ID NO: 25082 - protein, 282 aa, Homo sapiens
MDSLVVLVLCLSCLLLLSLWRQSSGRGKLPPGPTPLPVIGNILQIGIKDISKSLTNLSKVYGPVFTLYFGLKPIVVLHGYEAVKEALIDLGEEFSGRGIFPLAERANRGFGIVFSNGKKWKEIRRFSLMTLRNFGMGKRSIEDRVQEEARCLVEELRKTKASPCDPTFILGCAPCNVICSIIFHKRFDYKDQQFLNLMEKLNENIKILSSPWIQICNNFSPIIDYFPGTHNKLLKNVAFMKSYILEKVKEHQESMDMNNPQDFIDCFLMKMEKLKSRKRLNV

SEQ ID NO: 25083 - protein, 608 aa, Homo sapiens
MNQGSGLDLLKISYGKGARRKNRFKGSDGSTSSDTTSNSFVRQGSADSYTSRPSDSDVSLEEDREAVRREAERQAQAQLEKAKTKPVAFAVRTNVSYSAAHEDDVPVPGMAISFEAKDFLHVKEKFNNDWWIGRLVKEGCEIGFIPSPVKLENMRLQHEQRAKQGKFYSSKSGGNSSSSLGDIVPSSRKSTPPSSGAKSADEQDQWKTAGLFWRFTTEHTPPYDVVPSMRPVVLVGPSLKGYEVTDMMQKALFDFLKHRFEGRISITRVTADISLAKRSVLNNPSKHAIIERSNTRSSLAEVQSEIERIFELARTLQLVVLDADTINHPAQLSKTSLAPIIVYVKISSPKVLQRLIKSRGKSQAKHLNVQMVAADKLAQCPPELFDVILDENQLEDACEHLADYLEAYWKATHPPSSSLPNPLLSRTLATSSLPLSPTLASNSQGSQGDQRTDRSAPIRSASQAEEEPSVEPVKKSQHRSSSSAPHHNHRSGTSRGLSRQETFDSETQESRDSAYVEPKEDYSHDHVDHYASHRDHNHRDETHGSSDHRHRESRHRSRDVDREQDHNECNKQRSRHKSKDRYCEKDGEVISKKRNEAGEWNRDVYIRQ

SEQ ID NO: 25084 - protein, 1207 aa, Homo sapiens
MEVDTEEKRHRTRSKGVRVPVEPAIQELFSCPTPGCDGSGHVSGKYARHRSVYGCPLAKKRKTQDKQPQEPAPKRKPFAVKADSSSVDECDDSDGTEDMDEKEEDEGEEYSEDNDEPGDEDEEDEEGDREEEEEIEEEDEDDDEDGEDVEDEEEEEEEEEEEEEEEENEDHQMNCHNTRIMQDTEKDDNNNDEYDNYDELVAKSLLNLGKIAEDAAYRARTESEMNSNTSNSLEDDSDKNENLGRKSELSLDLDSDVVRETVDSLKLLAQGHGVVLSENMNDRNYADSMSQQDSRNMNYVMLGKPMNNGLMEKMVEESDEEVCLSSLECLRNQCFDLARKLSETNPQERNPQQNMNIRQHVRPEEDFPGRTPDRNYSDMLNLMRLEEQLSPRSRVFASCAKEDGCHERDDDTTSVNSDRSEEVFDMTKGNLTLLEKAIALETERAKAMREKMAMEAGRRDNMRSYEDQSPRQLPGEDRKPKSSDSHVKKPYYGKDPSRTEKKESKCPTPGCDGTGHVTGLYPHHRSLSGCPHKDRVPPEILAMHESVLKCPTPGCTGRGHVNSNRNSHRSLSGCPIAAAEKLAKAQEKHQSCDVSKSSQASDRVLRPMCFVKQLEIPQYGYRNNVPTTTPRSNLAKELEKYSKTSFEYNSYDNHTYGKRAIAPKVQTRDISPKGYDDAKRYCKDPSPSSSSTSSYAPSSSSNLSCGGGSSASSTCSKSSFDYTHDMEAAHMAATAILNLSTRCREMPQNLSTKPQDLCATRNPDMEVDENGTLDLSMNKQRPRDSCCPILTPLEPMSPQQQAVMNNRCFQLGEGDCWDLPVDYTKMKPRRIDEDESKDITPEDLDPFQEALEERRYPGEVTIPSPKPKYPQCKESKKDLITCPTPGCDGSGHVTGNYASHRSLSGCPLADKSIRSMLATSSQELKCPTPGCDGSGHITGNYASHRSLSGCPRAKKSGIRIAQSKEDKEDQEPIRCPVPGCDGQGHITGKYASHRSASGCPLAAKRQKDGYLNGSQFSWKSVKTEGMSCPTPGCDGSGHVSGSFLTHRSLSGCPRATSAMKKAKLSGEQMLTIKQRASNGIENDEEIKQLDEEIKELNESNSQMEADMIKLRTQITTMESNLKTIEEENKVIEQQNESLLHELANLSQSLIHSLANIQLPHMDPINEQNFDAYVTTLTEMYTNQDRYQSPENKALLENIKQAVRGIQV

SEQ ID NO: 25085 - protein, 852 aa, Homo sapiens
MAAATRRVFHLQPCENSPTMSQNGYFEDSSYYKCDTDDTFEAREEILGDEAFDTANSSIVSGESIRFFVNVNLEMQATNTENEATSGGCVLLHTSRKASIVLNETATSLDNVLRTMLRRFARDPDNNEPNCNLDLLMAMLFTDAGAPMRGKVHLLSDTIQGVTATVTGVRYQQSWLCIICTMKALQKRHVCISRLVRPQNWGENSCEVRFVILVLAPPKMKSTKTAMEVARTFATMFSDIAFRQKLLETRTEEEFKEALVHQRQLLTMVSHGPVAPRTKERSTVSLPAHRHPEPPKCKDFVPFGKGIREDIARRFPLYPLDFTDGIIGKNKAVGKYITTTLFLYFACLLPTIAFGSLNDENTDGAIDVQKTIAGQSIGGLLYALFSGQPLVILLTTAPLALYIQVIRVICDDYDLDFNSFYAWTGLWNSFFLALYAFFNLSLVMSLFKRSTEEIIALFISITFVLDAVKGTVKIFWKYYYGHYLDDYHTKRTSSLVSLSGLGASLNASLHTALNASFLASPTELPSATHSGQATAVLSLLIMLGTLWLGYTLYQFKKSPYLHPCVREILSDCALPIAVLAFSLISSHGFREIEMSKFRYNPSESPFAMAQIQSLSLRAVSGAMGLGFLLSMLFFIEQNLVAALVNAPENRLVKGTAYHWDLLLLAIINTGLSLFGLPWIHAAYPHSPLHVRALALVEERVENGHIYDTIVNVKETRLTSLGASVLVGLSLLLLPVPLQWIPKPVLYGLFLYIALTSLDGNQLVQRVALLLKEQTAYPPTHYIRRVPQRKIHYFTGLQVLQLLLLCAFGMSSLPYMKMIFPLIMIAMIPIRYILLPRIIEAKYLDVMDAEHRP

SEQ ID NO: 25086 - protein, 251 aa, Homo sapiens
MSIAAALELTGRSQFLQTHGRITWHDGSGSLHDIQLSLPSSPEPEDGDKVYKNEDLLNEIKQLKDEIKKKDEKIQLLELQLATQHICHQKCKEEKCTYADKYTQTPWRRIPPQVLQPSSSLPRPTDHTQGKLIKPQRIEARSECSIQDMHQGGAHPEESFTHVLHQESNYGLEEQPFSSGPQLTMDVAKSTPSEANLNITVNAQEPYHLANNQISDMQFIPTSLQTPPESSTVDQAKRVGRNQSPPVGYMS

SEQ ID NO: 25087 - protein, 161 aa, Homo sapiens
MWVTKLLPALLLQHVLLHLLLLPIAIPYAEGQRKRRNTIHEFKKSAKTTLIKIDPALKIKTKKVNTADQCANRCTRNKGLPFTCKAFVFDKARKQCLWFPFNSMSSGVKKEFGHEFDLYENKDYIRNCIIGKGRSYKGTVSITKSGIKCQPWSSMIPHEHR

SEQ ID NO: 25088 - protein, 641 aa, Homo sapiens
MSHVAVENALGLDQQFAGLDLNSSDNQSGGSTASKGRYIPPHLRNREATKGFYDKDSSGWSSSKDKDAYSSFGSRSDSRGKSSFFSDRGSGSRGRFDDRGRSDYDGIGSRGDRSGFGKFERGGNSRWCDKSDEDDWSKPLPPSERLEQELFSGGNTGINFEKYDDIPVEATGNNCPPHIESFSDVEMGEIIMGNIELTRYTRPTPVQKHAIPIIKEKRDLMACAQTGSGKTAAFLLPILSQIYSDGPGEALRAMKENGRYGRRKQYPISLVLAPTRELAVQIYEEARKFSYRSRVRPCVVYGGADIGQQIRDLERGCHLLVATPGRLVDMMERGKIGLDFCKYLVLDEADRMLDMGFEPQIRRIVEQDTMPPKGVRHTMMFSATFPKEIQMLARDFLDEYIFLAVGRVGSTSENITQKVVWVEESDKRSFLLDLLNATGKDSLTLVFVETKKGADSLEDFLYHEGYACTSIHGDRSQRDREEALHQFRSGKSPILVATAVAARGLDISNVKHVINFDLPSDIEEYVHRIGRTGRVGNLGLATSFFNERNINITKDLLDLLVEAKQEVPSWLENMAYEHHYKGSSRGRSKSSRFSGGFGARDYRQSSGASSSSFSSSRASSSRSGGGGHGSSRGFGGGSVNL

SEQ ID NO: 25089 - protein, 1164 aa, Homo sapiens
GPSPGPPSAGHPIPTQGPGGYPQDNMHQMHKPMESMHEKGMSDDPRYNQMKGMGMRSGGHAGMGPPPSPMDQHSQGYPSPLGGSEHASSPVPASGPSSGPQMSSGPGGAPLDGADPQALGQQNRGPTPFNQNQLHQLRAQIMAYKMLARGQPLPDHLQMAVQGKRPMPGMQQQMPTLPPPSVSATGPGPGPGPGPGPGPGPAPPNYSRPHGMGGPNMPPPGPSGVPPGMPGQPPGGPPKPWPEGPMANAAAPTSTPQKLIPPQPTGRPSPAPPAVPPAASPVMPPQTQSPGQPAQPAPMVPLHQKQSRITPIQKPRGLDPVEILQEREYRLQARIAHRIQELENLPGSLAGDLRTKATIELKALRLLNFQRQLRQEVVVCMRRDTALETALNAKAYKRSKRQSLREARITEKLEKQQKIEQERKRRQKHQEYLNSILQHAKDFKEYHRSVTGKIQKLTKAVATYHANTEREQKKENERIEKERMRRLMAEDEEGYRKLIDQKKDKRLAYLLQQTDEYVANLTELVRQHKAAQVAKEKKKKKKKKKAENAEGQTPAIGPDGEPLDETSQMSDLPVKVIHVESGKILTGTDAPKAGQLEAWLEMNPGYEVAPRSDSEESGSEEEEEEEEEEQPQAAQPPTLPVEEKKKIPDPDSDDVSEVDARHIIENAKQDVDDEYGVSQALARGLQSYYAVAHAVTERVDKQSALMVNGVLKQYQIKGLEWLVSLYNNNLNGILADEMGLGKTIQTIALITYLMEHKRINGPFLIIVPLSTLSNWAYEFDKWAPSVVKVSYKGSPAARRAFVPQLRSGKFNVLLTTYEYIIKDKHILAKIRWKYMIVDEGHRMKNHHCKLTQVLNTHYVAPRRLLLTGTPLQNKLPELWALLNFLLPTIFKSCSTFEQWFNAPFAMTGEKVDLNEEETILIIRRLHKVLRPFLLRRLKKEVEAQLPEKVEYVIKCDMSALQRVLYRHMQAKGVLLTDGSEKDKKGKGGTKTLMNTIMQLRKICNHPYMFQHIEESFSEHLGFTGGIVQGLDLYRASGKFELLDRILPKLRATNHKVLLFCQMTSLMTIMEDYFAYRGFKYLRLDGTTKAEDRGMLLKTFNEPGSEYFIFLLSTRAGGLGLNLQSADTVIIFDSDWNPHQVKAGRAPGRGEGRGCLQNLEETALA

SEQ ID NO: 25090 - protein, 559 aa, Homo sapiens
DDQSDNQSDYSVASEEGDEDFDERSEAPRRPSRKGLRNDKDKPLPPLLARVGGNIEVLGFNARQRKAFLNAIMRYGMPPQDAFTTQWLVRDLRGKSEKEFKAYVSLFMRHLCEPGADGAETFADGVPREGLSRQHVLTRIGVMSLIRKKVQEFEHVNGRWSMPELAEVEENKKMSQPGSPSPKTPTPSTPGDTQPNTPAPVPPAEDGIKIEENSLKEEESIEGEKEVKSTAPETAIECTQAPAPASEDEKVVVEPPEGEEKVEKAEVKERTEEPMETEPKGAADVEKVEEKSAIDLTPIVVEDKEEKKEEEEKKEVMLQNGETPKDLNDEKQKKNIKQRFMFNIADGGFTELHSLWQNEERAATVTKKTYEIWHRRHDYWLLAGIINHGYARWQDIQNDPRYAILNEPFKGEMNRGNFLEIKNKFLARRFKLLEQALVIEEQLRRAAYLNMSEDPSHPSMALNTRFAEVECLAESHQHLSKESMAGNKPANAVLHKVLKQLEELLSDMKADVTRLPATIARIPPVAVRLQMSERNILSRLANRAPEPTPQQPSSSEDAD

SEQ ID NO: 25091 - protein, 451 aa, Homo sapiens
MQLPRWWELGDPCAWTGQGRGTRRMSPATTGTFLLTVYSIFSKVHSDRNVYPSAGVLFVHVLEREYFKGEFPPYPKPGEISNDPITFNTNLMGYPDRPGWLRYIQRTPYSDGVLYGSPTAENVGKPTIIEITAYNRRTFETARHNLIINIMSAEDFPLPYQAEFFIKNMNVEEMLASEVLGDFLGAVKNVWQPERLNAINITSALDRGGRVPLPINDLKEGVYVMVGADVPFSSCLREVENPQNQLRCSQEMEPVITCDKKFRTQFYIDWCKISLVDKTKQVSTYQEVIRGEGILPDGGEYKPPSDSLKSRDYYTDFLITLAVPSAVALVLFLILAYIMCCRREGVIQLVHHSAIQKSTKELRDMSKNREIAWPLSTLPVFHPVTGEIIPPLHTDNYDSTNMPLMQTQQNLPHQTQIPQQQTTGDFRLTTFQRFEVNGIPEERKLTEAMNL

SEQ ID NO: 25092 - protein, 137 aa, Homo sapiens
MEERGDSEPTPGCSGLGPGGVRGFGDGGGAPSWAPEDAWMGTHPKYLEMMELDIGDATQVYVAFLVYLDLMESKSWHEVNCVGLPELQLICLVGTEIEGEGLQTVVPTPITASLSHNRYWRATFEEGKYLATLKDLH

SEQ ID NO: 25093 - protein, 1589 aa, Homo sapiens
MRTTKVYKLVIHKKGFGGSDDELVVNPKVFPHIKLGDIVEIAHPNDEYSPLLLQVKSLKEDLQKETISVDQTVTQVFRLRPYQDVYVNVVDPKDVTLDLVELTFKDQYIGRGDMWRLKKSLVSTCAYITQKVEFAGIRAQAGELWVKNEKVMCGYISEDTRVVFRSTSAMVYIFIQMSCEMWDFDIYGDLYFEKAVNGFLADLFTKWKEKNCSHEVTVVLFSRTFYDAKSVDEFPEINRASIRQDHKGRFYEDFYKVVVQNERREEWTSLLVTIKKLFIQYPVLVRLEQAEGFPQGDNSTSAQGNYLEAINLSFNVFDKHYINRNFDRTGQMSVVITPGVGVFEVDRLLMILTKQRMIDNGIGVDLVCMGEQPLHAVPLFKLHNRSAPRDSRLGDDYNIPHWINHSFYTSKSQLFCNSFTPRIKLAGKKPASEKAKNGRDTSLGSPKESENALPIQVDYDAYDAQVFRLPGPSRAQCLTTCRFSARFTWGSVRERESHSRKSASSCDVSSSPSLPSRTLPTEEVRSQASDDSSLGKSANILMIPHPHLHQYEVSSSLGYTSTRDVLENMMEPPQRDSSAPGRFHVGSAESMLHVRPGGYTPQRALINPFAPSRMPMKLTSNRRRWMHTFPVGPSGEAIQIHHQTRQNMAELQGSGQRDPTHSSAELLELAYHEAAGRHSNSRQPGDGMSFLNFSGTEELSVGLLSNSGAGMNPRTQNKDSLEDSVSTSPDPILTLSAPPVVPGFCCTVGVDWKSLTTPACLPLTTDYFPDRQGLQNDYTEGCYDLLPEADIDRRDEDGVQMTAQQVFEEFICQRLMQGYQIIVQPKTQKPNPAVPPPLSSSPLYSRGLVSRNRPEEEDQYWLSMGRTFHKVTLKDKMITVTRYLPKYPYESAQIHYTYSLCPSHSDSEFVSCWVEFSHERLEEYKWNYLDQYICSAGSEDFSLIESLKFWRTRFLLLPACVTATKRITEGEAHCDIYGDRPRADEDEWQLLDGFVRFVEGLNRIRRRHRSDRMMRKGTAMKGLQMTGPISTHSLESTAPPVGKKGTSALSALLEMEASQKCLGEQQAAVHGGKSSAQSAESSSVAMTPTYMDSPRKVSVDQTATPMLDGTSLGICTGQSMDRGNSQTFGNSQNIGEQGYSSTNSSDSSSQQLVASSLTSSSTLTEILEAMKHPSTGVQLLSEQKGLSPYCFISAEVVHWLVNHVEGIQTQAMAIDIMQKMLEEQLITHASGEAWRTFIYGFYFYKIVTDKEPDRVAMQQPATTWHTAGVDDFASFQRKWFEVAFVAEELVHSEIPAFLLPWLPSRPASYASRHSSFSRSFGGRSQAAALLAATVPEQRTVTLDVDVNNRTDRLEWCSCYYHGNFSLNAAFEIKLHWMAVTAAVLFEMVQGWHRKATSCGFLLVPVLEGPFALPSYLYGDPLRAQLFIPLNISCLLKEGSEHLFDSFEPETYWDRMHLFQEAIAHRFGFVQDKYSASAFNFPAENKPQYIHVTGTVFLQLPYSKRKFSGQQRRRRNSTSSTNQNMFCEERVGYNWAYNTMLTKTWRSSATGDEKFADRLLKDFTDFCINRDNRLVTFWTSCLEKMHASAP

SEQ ID NO: 25094 - protein, 940 aa, Homo sapiens
PEGSAVPDSWETLPGTQVTRKEPGALRPCSLRDCLMQDITVLIQQVEVDPSFPEDCLQSSEPLEAGAGKEGKKDDKPTLGAGAPDCSEVGEGHAQVGLGALQLVPDDNRGKEGNDDQDDWSTQEIEACLQDFDNMTWEIECTSEMLKKLSSKVMTKVIKKKIILAIQQLGNGEWTQGLQKRLKHLKGSIQLFEAKLDKGARMLWELAIDFSPRCSENPEKIIATEQNTCAMEKSGRIYTEIIRIWDIVLDHCKLADSIKAICNAYNRGLSCVLRKKLKGINKGQVSANMKIQKRIPRCYVEDTEAEKGREHVNPEYFPPASAVETEYNIMKFHSFSTNMAFNILNDTTATVEYPFRVGELEYAVIDLNPRPLEPIILIGRSGTGKTTCCLYRLWKKFHVYWEKAEQAGSPLLAKQVWLKRRLEVEPGKESPGGEEEEEEEDEEEEDSIEVETVESIDEQEYEACAGGAGVEPAGDGQAAEVCAPEHPHQLEHLHQIFVTKNHVLCQEVQRNFIELSKSTKATSHYKPLDPNIHKLQDLRDENFPLFVTSKQLLLLLDASLPKPFFLRNEDGSLKRTIIGWSAQEESTIPSWQEDEEEAEVDGDYSEEDKAVEMRTGDSDPRVYVTFEVFKNEIWPKMTKGRTAYNPALIWKEIKSFLKGSFEALSCPHGRLTEEVYKKLGRKRCPNFKEDRSEIYSLFSLYQQIRSQKGYFDEEDVLYNISRRLSKLRVLPWSIHELYGDEIQDFTQAELALLMKCINDPNSMFLTGDTAQSIMKGVAFRFSDLRSLFHYASRNTIDKQCAVRKPKKIHQLYQNYRSHSGILNLASGVVDLLQFYFPESFDRLPRDSGLFDGPKPTVLESCSVSDLAILLRGNKRKTQPIEFGAHQVILVANETAKEKIPEELGLALVLTIYEAKGLEFDDVLLYNFFTDSEGCPSWSKL

SEQ ID NO: 25095 - protein, 353 aa, Homo sapiens
NKFTAGFQNIVDAYGVGSYREINPAPYTIITFPFLFAVMFGDCGHGTVMLLAALWMILNERRLLSQKTDNEIWNTFFHGRYLILLMGIFSIYTGLIYNDCFSKSLNIFGSSWSVQPMFRNGTWNTHVMEESLYLQLDPAIPGVYFGNPYPFGIDPIWNLASNKLTFLNSYKMKMSVILGIVQMVFGVILSLFNHIYFRRTLNIILQFIPEMIFILCLFGYLVFMIIFKWCCFDVHVSQHAPSILIHFINMFLFNYSDSSNAPLYKHQQEVQSFFVVMALISVPWMLLIKPFILRASHRKSQLQASRIQEDATENIEGDSSSPSSRSGQRTSADTHGALDDHGEENCLKCSGLW

SEQ ID NO: 25096 - protein, 1764 aa, Homo sapiens
MAKPTSKDSGLKEKFKILLGLGTPRPNPRSAEGKQTEFIITAEILRELSMECGLNNRIRMIGQICEVAKTKKFEEHAVEALWKAVADLLQPERPLEARHAVLALLKAIVQGQGERLGVLRALFFKVIKDYPSNEDLHERLEVFKALTDNGRHITYLEEELADFVLQWMDVGLSSEFLLVLVNLVKFNSCYLDEYIARMVQMICLLCVRTASSVDIEVSLQVLDAVVCYNCLPAESLPLFIVTLCRTINVKELCEPCWKLMRNLLGTHLGHSAIYNMCHLMEDRAYMEDAPLLRGAVFFVGMALWGAHRLYSLRNSPTSVLPSFYQAMACPNEVVSYEIVLSITRLIKKYRKELQVVAWDILLNIIERLLQQLQTLDSPELRTIVHDLLTTVEELCDQNEFHGSQERYFELVERCADQRPESSLLNLISYRAQSIHPAKDGWIQNLQALMERFFRSESRGAVRIKVLDVLSFVLLINRQFYEEELINSVVISQLSHIPEDKDHQVRKLATQLLVDLAEGCHTHHFNSLLDIIEKVMARSLSPPPELEERDVAAYSASLEDVKTAVLGLLVILQTKLYTLPASHATRVYEMLVSHIQLHYKHSYTLPIASSIRLQAFDFLLLLRADSLHRLGLPNKDGVVRFSPYCVCDYMEPERGSEKKTSGPLSPPTGPPGPAPAGPAVRLGSVPYSLLFRVLLQCLKQESDWKVLKLVLGRLPESLRYKVLIFTSPCSVDQLCSALCSMLSGPKTLERLRGAPEGFSRTDLHLAVVPVLTALISYHNYLDKTKQREMVYCLEQGLIHRCASQCVVALSICSVEMPDIIIKALPVLVVKLTHISATASMAVPLLEFLSTLARLPHLYRNFAAEQYASVFAISLPYTNPSKFNQYIVCLAHHVIAMWFIRCRLPFRKDFVPFITKGLRSNVLLSFDDTPEKDSFRARSTSLNERPKSRIQTSLTSASLGSADENSVAQADDSLKNLHLELTETCLDMMARYVFSNFTAVPKRSPVGEFLLAGGRTKTWLVGNKLVTVTTSVGTGTRSLLGLDSGELQSGPESSSSPGVHVRQTKEAPAKLESQAGQQVSRGARDRVRSMSGGHGLRVGALDVPASQFLGSATSPGPRTAPAAKPEKASAGTRVPVQEKTNLAAYVPLLTQGWAEILVRRPTGNTSWLMSLENPLSPFSSDINNMPLQELSNALMAAERFKEHRDTALYKSLSVPAASTAKPPPLPRSNTVASFSSLYQSSCQGQLHRSVSWADSAVVMEEGSPGEVPVLVEPPGLEDVEAALGMDRRTDAYSRSSSVSSQEEKSLHAEELVGRGIPIERVVSSEGGRPSVDLSFQPSQPLSKSSSSPELQTLQDILGDPGDKADVGRLSPEVKARSQSGTLDGESAAWSASGEDSRGQPEGPLPSSSPRSPSGLRPRGYTISDSAPSRRGKRVERDALKSRATASNAEKVPGINPSFVFLQLYHSPFFGDESNKPILLPNESQSFERSVQLLDQIPSYDTHKIAVLYVGEGQSNSELAILSNEHGSYRYTEFLTGLGRLIELKDCQPDKVYLGGLDVCGEDGQFTYCWHDDIMQAVFHIATLMPTKDVDKHRCDKKRHLGNDFVSIVYNDSGEDFKLGTIKGQFNFVHVIVTPLDYECNLVSLQCRKDMEGLVDTSVAKIVSDRNLPFVARQMALHANMASQVHHSRSNPTDIYPSKWIARLRHIKRLRQRICEEAAYSNPSLPLVHPPSHSKAPAQTPAEPTPGYEVGQRKRLISSVEDFTEFV

SEQ ID NO: 25097 - protein, 473 aa, Homo sapiens
MQLPRWWELGDPCAWTGQGRGTRRMSPATTGTFLLTAFLLSCADGINGTVNWKTRQANNFIISRKMAAGMKDVYSIFSKVHSDRNVYPSAGVLFVHVLEREYFKGEFPPYPKPGEISNDPITFNTNLMGYPDRPGWLRYIQRTPYSDGVLYGSPTAENVGKPTIIEITAYNRRTFETARHNLIINIMSAEDFPLPYQAEFFIKNMNVEEMLASEVLGDFLGAVKNVWQPERLNAINITSALDRGGRVPLPINDLKEGVYVMVGADVPFSSCLREVENPQNQLRCSQEMEPVITCDKKFRTQFYIDWCKISLVDKTKQVSTYQEVIRGEGILPDGGEYKPPSDSLKSRDYYTDFLITLAVPSAVALVLFLILAYIMCCRREGVEKRNMQTPDIQLVHHSAIQKSTKELRDMSKNREIAWPLSTLPVFHPVTGEIIPPLHTDNYDSTNMPLMQTQQNLPHQTQIPQQQTTGKWYP

SEQ ID NO: 25098 - protein, 1328 aa, Homo sapiens
DSELLKFYRSRSRCGIINDPSNSSFLECHGVVNVTAYYRTCLFRLCQSGGNESELCDSVARYASACKNADVEVGPWRTYDFCPLECPENSHFEECITCTETCETLTLGPICVDSCSEGCQCDEGYALLGSQCVTRSECGCNFEGHQLATNETFWVDLDCQIFCYCSGTDNRVHCETIPCKDDEYCMEEGGLYYCQARTDASCIVSGYGHYLTFDGFPFDFQTSCPLILCTTGSRPSSDSFPKFVVTAKNEDRDPSLALWVKQVDVTVFGYSIVIHRAYKHTVLVNSERLYLPLKLGQGKINIFSFGFHVVVETDFGLKVVYDWKTFLSITVPRSMQNSTYGLCGRYNGNPDDDLEMPMGLLASSVNEFGQSWVKRDTFCQVGCGDRCPSCAKVEGFSKVQQLCSLIPNQNAAFSKCHSKVNPTFFYKNCLFDSCIDGGAVQTACSWLQNYASTCQTQGITVTGWRNYTSCTVTCPPNSHYESCVSVCQPRCAAIRLKSDCSHYCVEGCHCDAGYVLNGKSCILPHSCGCYSDGKYYEPKQLFWNSDCTRRCRCFRRNVIQCDPRQCKSDEECALRNGVRGCFSTKTSYCLAAGGGVFRTFDGAFLRFPANCAFVLSTICQKLPDISFQLIINFDKWSAPNLTIISPVYFYINEEQILINDRNTVKVNGTQVNVPFITGLATKIYSSEGFLVIDTSPDIQIYYNGFNVIKISISERLQNKVCGLCGNFNGDLTDDYVTLRGKPVVSSVVLAQSWKTNGMQKSCNELQFSQYAAMCDNVHIQKMQGDGYCLKLTDMKGFFQPCYGLLDPLPFYESCYLDGCYSHKKFQLCGSLAAYGEACRSFGILSTEWIEKENCSGVVEDPCVGADCPNRTCELGNGRELCGCIEPPPYGNNSHDIIDAEVTCKAAQMEVSISKCKLFQLGFEREGVRINDRQCTGIEGEDFISFQINNTKGNCGNIVQSNGTHIMYKNTLWIESANNTGNIITRDRTINVEFSCAYELDIKISLDSVVKPMLSVINLTVPTQEGSFITKMALYKNASYKHPYRQGEVVLTTRDVLYVGVFVVGADATHLILTLNKCYATPTRDSNDKLRYFIIEGGCQNLKDNTIGIEENAVSLTCRFHVTVFKFIGDYDEVHLHCAVSLCDSEKYSCKITCPHNSRIATDYTKEPKEQIISVGPIRRKRLDWCEDNGGCEQICTSRVDGPLCSCVTGTLQEDGKSCRGRHSSTLGQAAGRHGRFFTTRRRNSDLKATRSATLPRKLQKLRRKDGEHAQGILGPLNKQTNNNNKKTLLFHLKYKASNSSMELQVWTLLLIMIQISLWHFVYKSGTTS

SEQ ID NO: 25099 - protein, 957 aa, Homo sapiens
MSLKPQQQQQQQQQQQQQQQQQQQQQQQPPPAAANVRKPGGSGLLASPAAAPSPSSSSVSSSSATAPSSVVAATSGGGRPGLGRGRNSNKGLPQSTISFDGIYANMRMVHILTSVVGSKCEVQVKNGGIYEGVFKTYSPKCDLVLDAAHEKSTESSSGPKREEIMESILFKCSDFVVVQFKDMDSSYAKRDAFTDSAISAKVNGEHKEKDLEPWDAGELTANEELEALENDVSNGWDPNDMFRYNEENYGVVSTYDSSLSSYTVPLERDNSEEFLKREARANQLAEEIESSAQYKARVALENDDRSEEEKYTAVQRNSSEREGHSINTRENKYIPPGQRNREVISWGSGRQNSPRMGQPGSGSMPSRSTSHTSDFNPNSGSDQRVVNGGVPWPSPCPSPSSRPPSRYQSGPNSLPPRAATPTRPPSRPPSRPSRPPSHPSAHGSPAPVSTMPKRMSSEGPPRMSPKAQRHPRNHRVSAGRGSISSGLEFVSHNPPSEAATPPVARTSPSGGTWSSVVSGVPRLSPKTHRPRSPRQNSIGNTPSGPVLASPQAGIIPTEAVAMPIPAASPTPASPASNRAVTPSSEAKDSRLQDQRQNSPAGNKENIKPNETSPSFSKAENKGISPVVSEHRKQIDDLKKFKNDFRLQPSSTSESMDQLLNKNREGEKSRDLIKDKIEPSAKDSFIENSSSNCTSGSSKPNSPSISPSILSNTEHKRGPEVTSQGVQTSSPACKQEKDDKEEKKDAAEQVRKSTLNPNAKEFNPRSFSQPKPSTTPTSPRPQAQPSPSMVGHQQPTPVYTQPVCFAPNMMYPVPVSPGVQPLYPIPMTPMPVNQAKTYRAVPNMPQQRQDQHHQSAMMHPASAAGPPIAATPPAYSTQYVAYSPQQFPNQPLVQHVPHYQSQHPHVYSPVIQGNARMMAPPTHAQPGLVSSSATQYGAHEQTHAMYGRKHFVCLFQCV

SEQ ID NO: 25100 - protein, 748 aa, Homo sapiens
MRTTKVYKLVIHKKGFGGSDDELVVNPKVFPHIKLGDIVEIAHPNDEYSPLLLQVKSLKEDLQKETISVDQTVTQVFRLRPYQDVYVNVVDPKDVTLDLVELTFKDQYIGRGDMWRLKKSLVSTCAYITQKVEFAGIRAQAGELWVKNEKVMCGYISEDTRVVFRSTSAMVYIFIQMSCEMWDFDIYGDLYFEKAVNGFLADLFTKWKEKNCSHEVTVVLFSRTFYDAKSVDEFPEINRASIRQDHKGRFYEDFYKVVVQNERREEWTSLLVTIKKLFIQYPVLVRLEQAEGFPQGDNSTSAQGNYLEAINLSFNVFDKHYINRNFDRTGQMSVVITPGVGVFEVDRLLMILTKQRMIDNGIGVDLVCMGEQPLHAVPLFKLHNRSAPRDSRLGDDYNIPHWINHSFYTSKSQLFCNSFTPRIKLAGKKPASEKAKNGRDTSLGSPKESENALPIQVDYDAYDAQVFRLPGPSRAQCLTTCRSVRERESHSRKSASSCDVSSSPSLPSRTLPTEEVRSQASDDSSLGKSANILMIPHPHLHQYEVSSSLGYTSTRDVLENMMEPPQRDSSAPGRFHVGSAESMLHVRPGGYTPQRALINPFAPSRMPMKLTSNRRRWMHTFPVGMNPRTQNKDSLEDSVSTSPDPILTLSAPPVVPGFCCTVGVDWKSLTTPACLPLTTDYFPDRQGLQNDYTEGCYDLLPEADIDRSVSEKKALGLVGEGFGYIPHMHQNTGFVLASATHILKLERY

SEQ ID NO: 25101 - protein, 680 aa, Homo sapiens
IPIAAVLITFVGHVSFFKEADFSPSVAFASLSLFHILVTPLFLLSSVVRSTVKALVSVQKLSEFLSSAEIREEQCAPHEPTPQGPASKYQAVPLRVVNRKRPAREDCRGLTGPLQSLVPSADGDADNCCVQIMGGYFTWTPDGIPTLSNITIRIPRGQLTMIVGQVGCGKSSLLLAALGEMQKVSGAVFWSSSLPDSEIGEDPSPERETATDLDIRKRGPVAYASQKPWLLNATVEENIIFESPFNKQRYKMVIEACSLQPDIDILPHGDQTQIGERGINLSGGQRQRISVARALYQHANVVFLDDPFSALDIHLSDHLMQAGILELLRDDKRTVVLVTHKLQYLPHADWIIAMKDGTIQREGTLKDFQRSECQLFEHWKTLMNRQDQELEKETVTERKATEPPQGLSRAMSSRDGLLQDEEEEEEEAAESEEDDNLSSMLHQRAEIPWRACAKYLSSAGILLLSLLVFSQLLKHMVLVAIDYWLAKWTDSALTLTPAARNCSLSQECTLDQTVYAMVFTVLCSLGIVLCLVTSVTVEWTGLKVAKRLHRSLLNRIILAPMRFFETTPLGSILNRFSSDCNTIDQHIPSTLECLSRSTLLCVSALAVISYVTPVFLVALLPLAIVCYFIQKYFRVASRDLQQLDDTTQLPLLSHFAETVEGLTTIRAFRDRIPPCWPGWS

SEQ ID NO: 25102 - protein, 604 aa, Homo sapiens
DPDYWEKLLRHHYEQQQEDLARNLGKGKRIRKQVNYNDGSQEDRDWQDDQSDNQSDYSVASEEGDEDFDERSEAPRRPSRKGLRNDKDKPLPPLLARVGGNIEVLGFNARQRKAFLNAIMRYGMPPQDAFTTQWLVRDLRGKSEKEFKAYVSLFMRHLCEPGADGAETFADGVPREGLSRQHVLTRIGVMSLIRKKVQEFEHVNGRWSMPELAEVEENKKMSQPGSPSPKTPTPSTPGDTQPNTPAPVPPADGIKIEENSLKEEESIEGEKEVKSTAPETAIECTQAPAPASEDEKVVVEPPEGEEKVEKAEVKERTEEPMETEPKGKGAADVEKVEEKSAIDLTPIVVEDKEEKKEEEEKKEVMLQNGETPKDLNDEKQKKNIKQRFMFNIADGGFTELHSLWQNEERAATVTKKTYEIWHRRHDYWLLAGIINHGYARWQDIQNDPRYAILNEPFKGEMNRGNFLEIKNKFLARRFKLLEQALVIEEQLRRAAYLNMSEDPSHPSMALNTRFAEVECLAESHQHLSKESMAGNKPANAVLHKVLKQLEELLSDMKADVTRLPATIARIPPVAVRLQMSERNILSRLANRAPEPTPQQVAQQQ

SEQ ID NO: 25103 - protein, 530 aa, Homo sapiens
MPLRSPSPSPWPGPLHAEMHVLLALSGRGCLVLRHVVMGSHSPCAHTPCAPPAPTGAKRTLAASGSQSSNGPEPGGQQLKTRTLSGMASKTTTTIIPKRIAHSPSLQSLKKPIIPKEFGGKVPTVIRQRYLNLFIEECLKFCTSNQEAIEKALNEEKVAYDRSPSKNIYLNVAVNTLKKLRGLAPSAVPGLSKTSGRRVVSHEVVLGGRLAAKTSFSLSRPSSPRVEDLKGAALYSRLREYLLTQDQLKENGYPFPHPERPGGAIIFTAEEKRPKDSSCRTCCRCGTEYLVSSSGRCIRDEECYYHWGRLRRNRVAGGWETQYMCCSAAAGSVGCQVAKQHVQDGRKERLEGFVKTFEKELSGDTHPGIYALDCEMSYTTYGLELTRVTVVDTDVHVVYDTFVKPDNEIVDYNTRFSGVTEADLADTSVTLRDVQAVLLSMFSADTILIGHSLESDLLALKVIHSTVVDTSVLFPHRLGLPYKRSLRNLMADYLRQIIQDNVDGHSSSEDAGACMHLVIWKVREDAKTKR

SEQ ID NO: 25104 - protein, 618 aa, Homo sapiens
AFCGSENHSAAYRVDQGVLNNGCFVDALNVVPHVFLLFITFPILFIGWGSQSSKVHIHHSTWLHFPGHNLRWILTFMLLFVLVCEIAEGILSDGVTESHHLHLYMPAGMAFMAAVTSVVYYHNIETSNFPKLLIGIQLLLSTSVSDNRLSTQHCRTGLCKKPLGLVLGALLIPCVTLHKTSKLSEPRIPHLGRKTLLVYWTLAFITKTIKFVKFLDHAIGFSQLRFCLTGLLVILYGMLLLVEVNVIRVRRYIFFKTPREVKPPEDLQDLGVRFLQPFVNLLSKGTYWWMNAFIKTAHKKPIDLRAIGKLPIAMRALTNYQRLCEAFDAQVRKDIQGTQGARAIWQALSHAFGRRLVLSSTFRILADLLGFAGPLCIFGIVDHLGKENDVFQPKTQFLGVYFVSSQEFLANAYVLAVLLFLALLLQRTFLQASYYVAIETGINLRGAIQTKIYNKIMHLSTSNLSMGEMTAGQICNLVAIDTNQLMWFFFLCPNLWAMPVQIIVGVILLYYILGVSALIGAAVIILLAPVQYFVATKLSQAQRSTLEYSNERLKQTNEMLRGIKLLKLYAWENIFRTRVETTRRKEMTSLRAFAIYTSISSWPHWTALPPSHPGHLHV

SEQ ID NO: 25105 - protein, 973 aa, Homo sapiens
EFIERIQGLDFDTKAAVAAHIQEVTHNQENVFDLQWMEVTDMSQEDIEPLLKNMALHLKRLIDERDEHSETIIELSEERDGLHFLPHASSSAQSPCGSPGMKRTESRQHLSVELADAKAKIRRLRQELEEKTEQLLDCKQELEQMEIELKRLQQENMNLLSDARSARMYRDELDALREKAVRVDKLESEVSRYKERLHDIEFYKARVEELKEDNQVLLETKTMLEDQLEGTRARSDKLHELEKENLQLKAKLHDMEMERDMDRKKIEELMEENMTLEMAQKQSMDESLHLGWELEQISRTSELSEAPQKSLGHEVNELTSSRLLKLEMENQSLTKTVEELRTTVDSVEGNASKILKMEKENQRLSKKVEILENEIVQEKQSLQNCQNLSKDLMKEKAQLEKTIETLRENSERQIKILEQENEHLNQTVSSLRQRSQISAEARVKDIEKENKILHESIKETSSKLSKIEFEKRQIKKELEHYKEKGERAEELENELHHLEKENELLQKKITNLKITCEKIEALEQENSELERENRKLKKTLDSFKNLTFQLESLEKENSQLDEENLELRRNVESLKCASMKMAQLQLENKELESEKEQLKKGLELLKASFKKTERLEVSYQGLDIENQRLQKTLENSNKKIQQLESELQDLEMENQTLQKNLEELKISSKRLEQLEKENKSLEQETSQLEKDKKQLEKENKRLRQQAEIKDTTLEENNVKIGNLEKENKTLSKEIGIYKESCVRLKELEKENKELVKRATIDIKTLVTLREDLVSEKLKTQQMNNDLEKLTHELEKIGLNKERLLHDEQSTDDRYKLLESKLESTLKKSLEIKEEKIAALEARLEESTNYNQQLRQELKTVKKNYEALKQRQDEERMVQSSPPISGEDNKWERESQETTRELLKVKDRLIEVERNNATLQAEKQALKTQLKQLETQNNNLQAQILALQRQTVSLQEQNTTLQTQNAKLQAESYL

SEQ ID NO: 25106 - protein, 1739 aa, Homo sapiens
MAKPTSKDSGLKEKFKILLGLGTPRPNPRSAEGKQTEFIITAEILRELSMECGLNNRIRMIGQICEVAKTKKFEEHAVEALWKAVADLLQPERPLEARHAVLALLKAIVQGQGERLGVLRALFFKVIKDYPSNEDLHERLEVFKALTDNGRHITYLEEELADFVLQWMDVGLSSEFLLVLVNLVKFNSCYLDEYIARMVQMICLLCVRTASSVDIEVSLQVLDAVVCYNCLPAESLPLFIVTLCRTINVKELCEPCWKLMRNLLGTHLGHSAIYNMCHLMEDRAYMEDAPLLRGAVFFVGMALWGAHRLYSLRNSPTSVLPSFYQAMACPNEVVSYEIVLSITRLIKKYRKELQVVAWDILLNIIERLLQQLQTLDSPELRTIVHDLLTTVEELCDQNEFHGSQERYFELVERCADQRPESSLLNLISYRAQSIHPAKDGWIQNLQALMERFFRSESRGAVRIKVLDVLSFVLLINRQFYEEELINSVVISQLSHIPEDKDHQVRKLATQLLVDLAEGCHTHHFNSLLDIIEKVMARSLSPPPELEERDVAAYSASLEDVKTAVLGLLVILQTKLYTLPASHATRVYEMLVSHIQLHYKHSYTLPIASSIRLQAFDFLLLLRADSLHRLGLPNKDGVVRFSPYCVCDYMEPERGSEKKTSGPLSPPTGPPGPAPAGPAVRLGSVPYSLLFRVLLQCLKQESDWKVLKLVLGRLPESLRYKVLIFTSPCSVDQLCSALCSMLSGPKTLERLRGAPEGFSRTDLHLAVVPVLTALISYHNYLDKTKQREMVYCLEQGLIHRCASQCVVALSICSVEMPDIIIKALPVLVVKLTHISATASMAVPLLEFLSTLARLPHLYRNFAAEQYASVFAISLPYTNPSKFNQYIVCLAHHVIAMWFIRCRLPFRKDFVPFITKGLRSNVLLSFDDTPEKDSFRARSTSLNERPKSRIQTSLTSASLGSADENSVAQADDSLKNLHLELTETCLDMMARYVFSNFTAVPKRSPVGEFLLAGGRTKTWLVGNKLVTVTTSVGTGTRSLLGLDSGELQSGPESSSSPGVHVRQTKEAPAKLESQAGQQVSRGARDRVRSMSGGHGLRVGALDVPASQFLGSATSPGPRTAPAAKPEKASAGTRVPVQEKTNLAAYVPLLTQGWAEILVRRPTGNTSWLMSLENPLSPFSSDINNMPLQELSNALMAAERFKEHRDTALYKSLSVPAASTAKPPPLPRSNTDSAVVMEEGSPGEVPVLVEPPGLEDVEAALGMDRRTDAYSRSSSVSSQEEKSLHAEELVGRGIPIERVVSSEGGRPSVDLSFQPSQPLSKSSSSPELQTLQDILGDPGDKADVGRLSPEVKARSQSGTLDGESAAWSASGEDSRGQPEGPLPSSSPRSPSGLRPRGYTISDSAPSRRGKRVERDALKSRATASNAEKVPGINPSFVFLQLYHSPFFGDESNKPILLPNESFERSVQLLDQIPSYDTHKIAVLYVGEGQSNSELAILSNEHGSYRYTEFLTGLGRLIELKDCQPDKVYLGGLDVCGEDGQFTYCWHDDIMQAVFHIATLMPTKDVDKHRCDKKRHLGNDFVSIVYNDSGEDFKLGTIKGQFNFVHVIVTPLDYECNLVSLQCRKDMEGLVDTSVAKIVSDRNLPFVARQMALHANMASQVHHSRSNPTDIYPSKWIARLRHIKRLRQRICEEAAYSNPSLPLVHPPSHSKAPAQTPAEPTPGYEVGQRKRLISSVEDFTEFV

SEQ ID NO: 25107 - protein, 273 aa, Homo sapiens
MNRFDRPDRNVRQPQEGFWKRPPQRWSGQEHYHLSHPDHYHHHGKSDLSRGSPYRESPLGHFESYGGMPFFQAQKMFVDVPENTVILDEMTLRHMVQDCTAVKTQLLKLKRLLHQHDGSGSLHDIQLSLPSSPEPEDGDKVYKNEDLLNEIKQLKDEIKKKDEKIQLLELQLATQHICHQKCKEEKCTYADKYTQTPWRRIPPQVLQPSSSLPRPTDHTQGKLIKPQRIEARSECSIQDMHQGGAHPEESFTHVLHQESNYGLEEQPFSSGPQ

SEQ ID NO: 25108 - protein, 601 aa, Homo sapiens
MHCKVSLLDDTVYECVVEKHAKGQDLLKRVCEHLNLLEEDYFGLAIWDNATSKTWLDSAKEIKKQVRGVPWNFTFNVKFYPPDPAQLTEDITRYYLCLQLRQDIVAGRLPCSFATLALLGSYTIQSELGDYDPELHGVDYVSDFKLAPNQTKELEEKVMELHKSYRSMTPAQADLEFLENAKKLSMYGVDLHKAKDLEGVDIILGVCSSGLLVYKDKLRINRFPWPKVLKISYKRSSFFIKIRPGEQEQYESTIGFKLPSYRAAKKLWKVCVEHHTFFRLTSTDTIPKSKFLALGSKFRYSGRTQAQTRQASALIDRPAPHFERTASKRASRSLDGAAAVDSADRSPRPTSAPAITQGQVAEGGVLDASAKKTVVPKAQKETVKAEVKKEDEPPEQAEPEPTEAWKDLDKSQEEIKKHHASISELKKNFMESVPEPRPSEWDKRLSTHSPFRTLNINGQIPTGEGPPLVKTQTVTISDNANAVKSEIPTKDVPIVHTETKTITYEAAQTDDNSGDLDPGVLLTAQTITSETPSSTTTTQITKTVKGGISETRIEKRIVITGDADIDHDQVLVQAIKEAKEQHPDMSVTKVVVHQETEIADE

SEQ ID NO: 25109 - protein, 1223 aa, Homo sapiens
GGHGSGSPSQPDADSHFEQLMVSMLEERDRLLDTLRETQETLALTQGKLHEVGHERDSLQRQLNTALPQEFAALTKELNVCREQLLEREEEIAELKAERNNTRLLLEHLECLVSRHERSLRMTVVKRQAQSPAGVSSEVEVLKALKSLFEHHKALDEKVRERLRVALERCSLLEEELGATHKELMILKEQNNQKKTLTDGVLDINHEQENTPSTSGKRSSDGSLSHEEDLAKVIELQEIISKQSREQSQMKERLASLSSHVTELEEDLDTARKDLIKSEEMNTKLQRDVREAMAQKEDMEERITTLEKRYLAAQREATSVHDLNDKLENEIANKDSMHRQTEDKNRQLQERLELAEQKLQQTLRKAETLPEVEAELAQRVAALSKAEERHGNIEERLRQMEAQLEEKNQELQRARQREKMNEEHNKRLSDTVDKLLSESNERLQLHLKERMAALEDKNSLLREVESAKKQLEETQHDKDQLVLNIEALRAELDHMRLRGASLHHGRPHLGSVPDFRFPMADGHTDSYSTSAVLRRPQKGRLAALRDEPSKVQTLNEQDWERAQQASVLANVAQAFESDADVSDGEDDRDTLLSSVDLLSPSGQADAHTLAMMLQEQLDAINKEIRLIQEEKENTEQRAEEIESRVGSGSLDNLGRFRSMSSIPPYPASSLASSSPPGSGRSTPRRIPHSPAREVDRLGVMTLPSDLRKHRRKLPPSREEVRDDKTTIKCETSPPSSPRALRLDRLHKGALHTVSHEDIRDIRNSTGSQDGPVSNPSSSNSSQDSLHKAPKKKGIKSSIGRLFGKKEKGRPGQTGKEALGQAGVSETDNSSQDALGLSKLGGQAEKNRKLQKKHELLEEARRQGLPFAQWDGPTVVVWLELWVGMPAWYVAACRANVKSGAIMSALSDTEIQREIGISNPLHRLKLRLAIQEIMSLTSPSAPPTSRTTTGNVWLTHEEMETLAATPQTEDEEGSWAQTLAYGDMNHEWIGNEWLPSLGLPQYRSYFMECLVDARMLDHLTKKDLRGQLKMVDSFHRNSFQCGIMCLRRLNYDRKELERKREESQSEIKDVLVWSNDRVIRWILSIGLKEYANNLIESGVHGALLALDETFDFSALALLLQIPTQNTQARAVLEREFNNLLVMGTDRRFDEDDDKSFRRAPSWRKKFRPKDIRGLAAGSAETLPANFRVTSSMSSPSMQPKKMQMDGNVSGTQRLDSATVRTYSC

SEQ ID NO: 25110 - protein, 212 aa, Homo sapiens
FENTTCSTLTIRQSLDLFLPDKTASGLNKSQILEMNQKKSDTSMLSPLNAARCQDEKAHLPTMKSFGTHRRVTHKPNLLGSKWFIKILKRHFSSVSTETFVPKQDFPQVKRPLKASRTRQPSRTNLPVLSVNEDLMHCTAFATADEYHLGNLSQDLASHGYVEVTSLPRDAANILVMGVENSAKEGDPGTIFFFSCFFYFFKSGKELLCFGM

SEQ ID NO: 25111 - protein, 441 aa, Homo sapiens
MDFRTACEETKTGICLLQDGNQEPFKVRLHLAKDILMIQEQDVICVSGEPFYSGERTVTIRRQTVGGFGLSIKGGAEHNIPVVVSKISKEQRAELSGLLFIGDAILQINGINVRKCRHEEVVQVLRNAGEEVTLTVSFLKRAPAFLKLPLNEDCACAPSDQSSGTSSPLCDSGLHLNYHPNNTDTLSCSSWPTSPGLRWEKRWCDLRLIPLLHSRFSQYVPGTDLSRQNAFQVIAVDGVCTGIIQCLSAEDCVDWLQAIATNISNLTKHNDSDLLDRRKQCFTVQSESGEDLYFSVELESDLAQWERAFQTATFLEVERIQCKTYACVLESHLMGLTIDFSTGFICFDAATKAVLWRYKFSQLKGSSDDGKSKIKFLFQNPDTKQIEAKELEFSNLFAVLHCIHSFFAAKVACLDPLFLGNQATASTAASSATTSKAKYTT

SEQ ID NO: 25112 - protein, 1080 aa, Homo sapiens
LVRQHKAAQVAKEKKKKKKKKAENAEGQTPAIGPDGEPLDETSQMSDLPVKVIHVESGKILTGTDAPKAGQLEAWLEMNPGYEVAPRSDSEESGSEEEEEEEEEEQPQAAQPPTLPVEEKKKIPDPDSDDVSEVDARHIIENAKQDVDDEYGVSQALARGLQSYYAVAHAVTERVDKQSALMVNGVLKQYQIKGLEWLVSLYNNNLNGILADEMGLGKTIQTIALITYLMEHKRINGPFLIIVPLSTLSNWAYEFDKWAPSVVKVSYKGSPAARRAFVPQLRSGKFNVLLTTYEYIIKDKHILAKIRWKYMIVDEGHRMKNHHCKLTQVLNTHYVAPRRLLLTGTPLQNKLPELWALLNFLLPTIFKSCSTFEQWFNAPFAMTGEKVDLNEEETILIIRRLHKVLRPFLLRRLKKEVEAQLPEKVEYVIKCDMSALQRVLYRHMQAKGVLLTDGSEKDKKGKGGTKTLMNTIMQLRKICNHPYMFQHIEESFSEHLGFTGGIVQGLDLYRASGKFELLDRILPKLRATNHKVLLFCQMTSLMTIMEDYFAYRGFKYLRLDGTTKAEDRGMLLKTFNEPGSEYFIFLLSTRAGGLGLNLQSADTVIIFDSDWNPHQDLQAQDRAHRIGQQNEVRVLRLCTVNSVEEKILAAAKYKLNVDQKVIQAGMFDQKSSSHERRAFLQAILEHEEQDESRHCSTGSGSASFAHTAPPPAGVNPDLEEPPLKEEDEVPDDETVNQMIARHEEEFDLFMRMDLDRRREEARNPKRKPRLMEEDELPSWIIKDDAEVERLTCEEEEEKMFGRGSRHRKEVDYSDSLTEKQWLKAIEEGTLEEIEEEVRQKKSSRKRKRDSDAGSSTPTTSTRSRDKDDESKKQKKRGRPPAEKLSPNPPNLTKKMKKIVDAVIKYKDSSSGRQLSEVFIQLPSRKELPEYYELIRKPVDFKKIKERIRNHKYRSLNDLEKDVMLLCQNAQTFNLEGSLIYEDSIVLQSVFTSVRQKIEKEDDSEGEESEEEEEGEEEGSESESRSVKVKIKLGRKEKAQDRLKGGRRRPSRGSRAKPVVSDDDSEEEQEEDRSGSGSEED

SEQ ID NO: 25113 - protein, 270 aa, Homo sapiens
MAQEKMKLGFKSLPSSTTADGNILRRVNSAPLINGLGFNSQVLQADMLRIRTNRTTFRNRRSLLLPPPPFHGSISRLHQIKQEEAMDLINRETMSEWKLQSEIQISHSWEEGLKLNDNGLQKSSSLKCIDLTPVSSMASSIKKTGKQCFSPSLQTCVSCTGSPSSPIPSPMQQYIIRSQNPTNIIRPSILGPLKRKGEMAFQYQPKKIFQGTTNMLSSDTSQLSENNVYLLPATFDGNDSNAGSSGNSSAEIGTVTNSPVSPSDTGSHLF

SEQ ID NO: 25114 - protein, 2273 aa, Homo sapiens
MMPQKKRRRKKDIDFLALYEAELLNYASEDDEGELEHEYYKARVYEVVTATGDVRGAGTDANVFITLFGENGLSPKLQLTSKSKSAFEKGNVDVFRVRTNNVGLIYKVRIEHDNTGLNASWYLDHVIVTDMKRPHLRYYFNCNNWLSKVEGDRQWCRDLLASFNPMDMPRGNKYEVKVYTGDVIGAGTDADVFINIFGEYGDTGERRLENEKDNFEKGAEDRFILDAPDLGQLMKINVGHNNKGGSAGWFLSQIVIEDIGNKRKYDFPLNRWLALDEDDGKIQRDILVGGAETTAITYIVTVFTGDVRGAGTKSKIYLVMYGARGNKNSGKIFLEGGVFDRGRTDIFHIELAVLLSPLSRVSVGHGNVGVNRGWFCEKVVILCPFTGIQQTFPCSNWLDEKKADGLIERQLYEMVSLRKKRLKKFPWSLWVWTTDLKKAGTNSPIFIQIYGQKGRTDEILLNPNNKWFKPGIIEKFRIELPDLGRFYKIRVWHDKRSSGSGWHLERMTLMNTLNKDKYNFNCNRWLDANEDDNEIVREMTAEGPTVRRIMGMARYHVTVCTGELEGAGTDANVYLCLFGDVGDTGERLLYNCRNNTDLFEKGNADEFTIESVTMRNVRRVRIRHDGKGSGSGWYLDRVLVREEGQPESDNVEFPCLRWLDKDKDDGQLVRELLPSDSSATLKNFRYHISLKTGDVSGASTDSRVYIKLYGDKSDTIKQVLLVSDNNLKDYFERGRVDEFTLETLNIGNINRLVIGHDSTGMHASWFLGSVQIRVPRQGKQYTFPANRWLDKNQADGRLEVELYPSEVVEIQKLVHYEVEIWTGDVGGAGTSARVYMQIYGEKGKTEVLFLSSRSKVFERASKDTFQLEAADVGEVYKLRLGHTGEGFGPSWFVDTVWLRHLVVREVDLTPEEEARKKKEKDKLRQLLKKERLKAKLQRKKKKRKGSDEEDEGEEEESSSSEESSSEEEEMEEEEEEEEFGPGMQEVIEQHKFEAHRWLARGKEDNELVVELVPAGKPGPERNTYEVQVVTGNVPKAGTDANVYLTIYGEEYGDTGERPLKKSDKSNKFEQGQTDTFTIYAIDLGALTKIRIRHDNTGNRAGWFLDRIDITDMNNEITYYFPCQRWLAVEEDDGQLSRELLPVDESYVLPQSEEGRGGGDNNPLDNLALEQKDKSTTFSVTIKTGVKKNAGTDANVFITLFGTQDDTGMTLLKSSKTNSDKFERDSIEIFTVETLDLGDLWKVRLGHDNTGKAPGWFVDWVEVDAPSLGKCMTFPCGRWLAKNEDDGSIIRDLFHAELQTRLYTPFVPYEITLYTSDVFAAGTDANIFIIIYGCDAVCTQQKYLCTNKREQKQFFERKSASRFIVELEDVGEIIEKIRIGHNNTGMNPGWHCSHVDIRRLLPDKDGAETLTFPCDRWLATSEDDKKTIRELVPYDIFTEKYMKDGSLRQVYKEVEEPLDIVLYSVQIFTGNIPGAGTDAKVYITIYGDLGDTGERYLGKSENRTNKFERGTADTFIIEAADLGVIYKIKLRHDNSKWCADWYVEKVEIWNDTNEDEFLFLCGRWLSLKKEDGRLERLFYEKEYTGDRSSNCSSPADFWEIALSSKMADVDISTVTGPMADYVQEGPIIPYYVSVTTGKHKDAATDSRAFIFLIGEDDERSKRIWLDYPRGKRGFSRGSVEEFYVAGLDVGIIKKIELGHDGASPESCWLVEELCLAVPTQGTKYMLNCNCWLAKDRGDGITSRVFDLLDAMVVNIGVKVLYEMTVWTGDVVGGGTDSNIFMTLYGINGSTEEMQLDKKKARFEREQNDTFIMEILDIAPFTKMRIRIDGLGSRPEWFLERILLKNMNTGDLTMFYYGDWLSQRKGKKTLVCEMCAVIDEEEMMEWTSYTVAVKTSDILGAGTDANVFIIIFGENGDSGTLALKQSANWNKFERNNTDTFNFPDMLSLGHLCKLRVWHDNKGIFPGWHLSYVDVKDNSRDETFHFQCDCWLSKSEGDGQTVRDFACANNKICDELEETTYEIVIETGNGGETRENVWLILEGRKNRSKEFLMENSSRQRAFRKGTTDTFEFDSIYLGDIASLCVGHLAREDRFIPKRELAWHVKTITITEMEYGNVYFFNCDCLIPLKRKRKYFKVFEVTKTTESFASKVQSLVPVKYEVIVTTGYEPGAGTDANVFVTIFGANGDTGKRELKQKMRNLFERGSTDRFFLETLELGELRKVRLEHDSSGYCSGWLVEKVEVTNTSTGVATIFNCGRWLDKKRGDGLTWRDLFPSV

SEQ ID NO: 25115 - protein, 453 aa, Homo sapiens
MGLLVFVRNLLLALCLFLVLGFLYYSAWKLHLLQWEEDSNSVVLSFDSAGQTLGSEYDRLGFLLNLDSKLPAELATKYANFSEGACKPGYASALMTAIFPRFSKPAPMFLDDSFRKWARIREFVPPFGIKGQDNLIKAILSVTKEYRLTPALDSLRCRRCIIVGNGGVLANKSLGSRIDDYDIVVRLNSAPVKGFEKDVGSKTTLRITYPEGAMQRPEQYERDSLFVLAGFKWQDFKWLKYIVYKERVSASDGFWKSVATRVPKEPPEIRILNPYFIQEAAFTLIGLPFNNGLMGRGNIPTLGSVAVTMALHGCDEVAVAGFGYDMSTPNAPLHYYETVRMAAIKEPRPHVENLNPSELRLPHFCFDHQPSTDPSLKPGNLGPVLQQLLCCYIWVMGGCWREPPICADSCFCKSGGSGLSPHSCLSVFLSILLHHPPPLFQSLPCPKSSSLFQ

SEQ ID NO: 25116 - protein, 558 aa, Homo sapiens
MAVQPKETLQLESAAEVGFVRFFQGMPEKPTTTVRLFDRGDFYTAHGEDALLAAREVFKTQGVIKYMGPAGAKNLQSVVLSKMNFESFVKDLLLVRQYRVEVYKNRAGNKASKENDWYLAYKASPGNLSQFEDILFGNNDMSASIGVVGVKMSAVDGQRQVGVGYVDSIQRKLGLCEFPDNDQFSNLEALLIQIGPKECVLPGGETAGDMGKLRQIIQRGGILITERKKADFSTKDIYQDLNRLLKGKKGEQMNSAVLPEMENQVAVSSLSAVIKFLELLSDDSNFGQFELTTFDFSQYMKLDIAAVRALNLFQGSVEDTTGSQSLAALLNKCKTPQGQRLVNQWIKQPLMDKNRIEERLNLVEAFVEDAELRQTLQEDLLRRFPDLNRLAKKFQRQAANLQDCYRLYQGINQLPNVIQALEKHEGKHQKLLLAVFVTPLTDLRSDFSKFQEMIETTLDMDQVENHEFLVKPSFDPNLSELREIMNDLEKKMQSTLISAARDLGLDPGKQIKLDSSAQFGYYFRVTCKEEKVLRNNKNFSTVDIQKNGVKFTNRVYQK

SEQ ID NO: 25117 - protein, 879 aa, Homo sapiens
MALAPGPDAHAHLPPLIELKFQMANSMNGRNPGGRGGNPRKGRILGIIDAIQDAVGPPKQAAADRRTVEKTWKLMDKVVRLCQNPKLQLKNSPPYILDILPDTYQHLRLILSKYDDNQKLAQLSENEYFKIYIDSLMKKSKRAIRLFKEGKERMYEEQSQDRRNLTKLSLIFSHMLAEIKAIFPNGQFQGDNFRITKADAAEFWRKFFGDKTIVPWKVFRQCLHEVHQISSGLEAMALKSTIDLTCNDYISVFEFDIFTRLFQPWGSILRNWNFLAVTHPGYMAFLTYDEVKARLQKYSTKPGSYIFRLSCTRLGQWAIGYVTGDGNILQTIPHNKPLFQALIDGSREGFYLYPDGRSYNPDLTGLCEPTPHDHIKVTQEQYELYCEMGSTFQLCKICAENDKDVKIEPCGHLMCTSCLTAWQESDGQGCPFCRCEIKGTEPIIVDPFDPRDEGSRCCSIIDPFGMPMLDLDDDDDREESLMMNRLANVRKCTDRQNSPVTSPGSSPLAQRRKPQPDPLQIPHLSLPPVPPRLDLIQKGIVRSPCGSPTGSPKSSPCMVRKQDKPLPAPPPPLRDPPPPPPERPPPIPPDNRLSRHIHHVESVPSRDPPMPLEAWCPRDVFGTNQLVGCRLLGEGSPKPGITASSNVNGRHSRVGSDPVLMRKHRRHDLPLEGAKVFSNGHLGSEEYDVPPRLSPPPPVTTLLPSIKCTGPLANSLSEKTRDPVEEDDDEYKIPSSHPVSLNSQPSHCHNVKPPVRSCDNGHCMLNGTHGPSSEKKSNIPDLSIYLKGDVFDSASDPVPLPPARPPTRDNPKHGSSLNRTPSDYDLLIPPLGEDAFDALPPSLPPPPPPARHSLIEHSKPPGSSSRPSSGQDLFLLPSA

SEQ ID NO: 25118 - protein, 1903 aa, Homo sapiens
MASGLGSPSPCSAGSEEEDMDALLNNSLPPPHPENEEDPEEDLSETETPKLKKKKKPKKPRDPKIPKSKRQKKELGDSSGEGPEFVEEEEEVALRSDSEGSDYTPGKKKKKKLGPKKEKKSKSKRKEEEEEEDDDDDSKEPKSSAQLLEDWGMEDIDHVFSEEDYRTLTNYKAFSQFVRPLIAAKNPKIAVSKMMMVLGAKWREFSTNNPFKGSSGASVAAAAAAAVAVVESMVTATEVAPPPPPVEVPIRKAKTKEGKGPNARRKPKGSPRVPDAKKPKPKKVAPLKIKLGGFGSKRKRSSSEDDDLDVESDFDDASINSYSVSDGSTSRSSRSRKKLRTTKKKKKGEEEVTAVDGYETDHQDYCEVCQQGGEIILCDTCPRAYHMVCLDPDMEKAPEGKWSCPHCEKEGIQWEAKEDNSEGEEILEEVGGDLEEEDDHHMEFCRVCKDGGELLCCDTCPSSYHIHCLNPPLPEIPNGEWLCPRCTCPALKGKVQKILIWKWGQPPSPTPVPRPPDADPNTPSPKPLEGRPERQFFVKWQGMSYWHCSWVSELQLELHCQVMFRNYQRKNDMDEPPSGDFGGDEEKSRKRKNKDPKFAEMEERFYRYGIKPEWMMIHRILNHSVDKKGHVHYLIKWRDLPYDQASWESEDVEIQDYDLFKQSYWNHRELMRGEEGRPGKKLKKVKLRKLERPPETPTVDPTVKYERQPEYLDATGGTLHPYQMEGLNWLRFSWAQGTDTILADEMGLGKTVQTAVFLYSLYKEGHSKGPFLVSAPLSTIINWEREFEMWAPDMYVVTYVGDKDSRAIIRENEFSFEDNAIRGGKKASRMKKEASVKFHVLLTSYELITIDMAILGSIDWACLIVDEAHRLKNNQSKFFRVLNGYSLQHKLLLTGTPLQNNLEELFHLLNFLTPERFHNLEGFLEEFADIAKEDQIKKLHDMLGPHMLRRLKADVFKNMPSKTELIVRVELSPMQKKYYKYILTRNFEALNARGGGNQVSLLNVVMDLKKCCNHPYLFPVAAMEAPKMPNGMYDGSALIRASGKLLLLQKMLKNLKEGGHRVLIFSQMTKMLDLLEDFLEHEGYKYERIDGGITGNMRQEAIDRFNAPGAQQFCFLLSTRAGGLGINLATADTVIIYDSDWNPHNDIQAFSRAHRIGQNKKVMIYRFVTRASVEERITQVAKKKMMLTHLVVRPGLGSKTGSMSKQELDDILKFGTEELFKDEATDGGGDNKEGEDSSVIHYDDKAIERLLDRNQDETEDTELQGMNEYLSSFKVAQYVVREEEMGEEEVEREIIKQEESVDPDYWEKLLRHHYEQQQEDLARNLGKGKRIRKQVNYNDGSQEDRDWQDDQSDNQSDYSVASEEGDEDFDERSEAPRRPSRKGLRNDKDKPLPPLLARVGGNIEVLGFNARQRKAFLNAIMRYGMPPQDAFTTQWLVRDLRGKSEKEFKAYVSLFMRHLCEPGADGAETFADGVPREGLSRQHVLTRIGVMSLIRKKVQEFEHVNGRWSMPELAEVEENKKMSQPGSPSPKTPTPSTPGDTQPNTPAPVPPADGIKIEENSLKEEESIEGEKEVKSTAPETAIECTQAPAPASEDEKVVVEPPEGEEKVEKAEVKERTEEPMETEPKGAADVEKVEEKSAIDLTPIVVEDKEEKKEEEEKKEVMLQNGETPKDLNDEKQKKNIKQRFMFNIADGGFTELHSLWQNEERAATVTKKTYEIWHRRHDYWLLAGIINHGYARWQDIQNDPRYAILNEPFKGEMNRGNFLEIKNKFLARRFKLLEQALVIEEQLRRAAYLNMSEDPSHPSMALNTRFAEVECLAESHQHLSKESMAGNKPANAVLHKVLKQLEELLSDMKADVTRLPATIARIPPVAVRLQMSERNILSRLANRAPEPTPQQVAQQQ

SEQ ID NO: 25119 - protein, 3069 aa, Homo sapiens
MVFESVVVDVLNRFLGDYVVDLDTSQLSLGIWKGAVALKNLQIKENALSQLDVPFKVKVGHIGNLKLIIPWKNLYTQPVEAVLEEIYLLIVPSSRIKYDPLKEEKQLMEAKQQELKRIEEAKQKVVDQEQHLPEKQDTFAEKLVTQIIKNLQVKISSIHIRYEDDITNRDKPLSFGISLQNLSMQTTDQYWVPCLHDETEKLVRKLIRLDNLFAYWNVKSQMFYLSDYDNSLDDLKNGIVNENIVPEGYDFVFRPISANAKLVMNRRSDFDFSAPKINLEIELHNIAIEFNKPQYFSIMELLESVDMMAQNLPYRKFKPDVPLHHHAREWWAYAIHGVLEVNVCPRLWMWSWKHIRKHRQKVKQYKELYKKKLTSKKPPGELLVSLEELEKTLDVFNITIARQTAEVEVKKAGYKIYKEGVKDPEDNKGWFSWLWSWSEQNTNEQQPDVQPETLEEMLTPEEKALLYEAIGYSETAVDPTLLKTFEALKFFVHLKSMSIVLRENHQKPELVDIVIEEFSTLIVQRPGAQAIKFETKIDSFHITGLPDNSEKPRLLSSLDDAMSLFQITFEINPLDETVSQRCIIEAEPLEIIYDARTVNSIVEFFRPPKEVHLAQLTAATLTKLEEFRSKTATGLLYIIETQKVLDLKINLKASYIIVPQDGIFSPTSNLLLLDLGHLKVTSKSRSELPDVKQGEANLKEIMDRAYDSFDIQLTSVQLLYSRVGDNWREARKLSVSTQHILVPMHFNLELSKAMVFMDVRMPKFKIYGKLPLISLRISDKKLQGIMELIESIPKPEPVTEVSAPVKSFQIQTSTSLGTSQISQKIIPLLELPSVSEDDSEEEFFDAPCSPLEEPLQFPTGVKSIRTRKLQKQDCSVNMTTFKIRFEVPKVLIEFYHLVGDCELSVVEILVLGLGAEIEIRTYDLKANAFLKEFCLKCPEYLDENKKPVYLVTTLDNTMEDLLTLEYVKAEKNVPDLKSTYNNVLQLIKVNFSSLDIHLHTEALLNTINYLHNILPQSEEKSAPVSTTETEDKGDVIKKLALKLSTNEDIITLQILAELSCLQIFIQDQKCNISEIKIEGLDSEMIMRPSETEINAKLRNIIVLDSDITAIYKKAVYITGKEVFSFKMVSYMDATAGSAYTDMNVVDIQVNLIVGCIEVVFVTKFLYSILAFIDNFQAAKQALAEATVQAAGMAATGVKELAQRSSRMALDINIKAPVVVIPQSPVSENVFVADFGLITMTNTFHMITESQSSPPPVIDLITIKLSEMRLYRSRFINDAYQEVLDLLLPLNLEVVVERNLCWEWYQEVPCFNVNAQLKPMEFILSQEDITTIFKTLHGNIWYEKDGSASPAVTKDQYSATSGVTTNASHHSGGATVVTAAVVEVHSRALLVKTTLNISFKTDDLTMVLYSPGPKQASFTDVRDPSLKLAEFKLENIISTLKMYTDGSTFSSFSLKNCILDDKRPHVKKATPRMIGLTVGFDKKDMMDIKYRKVRDGCVTDAVFQEMYICASVEFLQTVANVFLEAYTTGTAVETSVQTWTAKEEVPTQESVKWEINVIIKNPEIVFVADMTKNDAPALVITTQCEICYKGNLENSTMTAAIKDLQVRACPFLPVKRKGKITTVLQPCDLFYQTTQKGTDPQVIDMSVKSLTLKVSPVIINTMITITSALYTTKETIPEETASSTAHLWEKKDTKTLKMWFLEESNETEKIAPTTELVPKGEMIKMNIDSIFIVLEAGIGHRTVPMLLAKSRFSGEGKNWSSLINLHCQLELEVHYYNEMFGVWEPLLEPLEIDQTEDFRPWNLGIKMKKKAKMAIVESDPEEENYKVPEYKTVISFHSKDQLNITLSKCGLVMLNNLVKAFTEAATGSSADFVKDLAPFMILNSLGLTISVSPSDSFSVLNIPMAKSYVLKNGESLSMDYIRTKDNDHFNAMTSLSSKLFFILLTPVNHSTADKIPLTKVGRRLYTVRHRESGVERSIVCQIDTVEGSKKVTIRSPVQIRNHFSVPLSVYEGDTLLGTASPENEFNIPLGSYRSFIFLKPEDENYQMCEGIDFEEIIKNDGALLKKKCRSKNPSKESFLINIVPEKDNLTSLSVYSEDGWDLPYIMHLWPPILLRNLLPYKIAYYIEGIENSVFTLSEGHSAQICTAQLGKARLHLKLLDYLNHDWKSEYHIKPNQQDISFVSFTCVTEMEKTDLDIAVHMTYNTGQTVVAFHSPYWMVNKTGRMLQYKADGIHRKHPPNYKKPVLFSFQPNHFFNNNKVQLMVTDSELSNQFSIDTVGSHGAVKCKGLKMDYQVGVTIDLSSFNITRIVTFTPFYMIKNKSKYHISVAEEGNDKWLSLDLEQCIPFWPEYASSKLLIQVERSEDPPKRIYFNKQENCILLRLDNELGGIIAEVNLAEHSTVITFLDYHDGAATFLLINHTKNELVQYNQSSLSEIEDSLPPGKAVFYTWADPVGSRRLKWRCRKSHGEVTQKDDMMMPIDLGEKTIYLVSFFEGLQRIILFTEDPRVFKVTYESEKAELAEQEIAVALQDVGISLVNNYTKQEVAYIGITSSDVVWETKPKKKARWKPMSVKHTEKLEREFKEYTESSPSEDKVIQLDTNVPVRLTPTGHNMKILQPHVIALRRNYLPALKVEYNTSAHQSSFRIQIYRIQIQNQIHGAVFPFVFYPVKPPKSVTMDSAPKPFTDVSIVMRSAGHSQISRIKYFKVLIQEMDLRLDLGFIYALTDLMTEAEVTENTEVELFHKDIEAFKEEYKTASLVDQSQVSLYEYFHISPIKLHLSVSLSSGREEAKDSKQNGGLIPVHSLNLLLKSIGATLTDVQDVVFKLAFFELNYQFHTTSDLQSEVIRHYSKQAIKQMYVLILGLDVLGNPFGLIREFSEGVEAFFYEPYQGAIQGPEEFVEGMALGLKALVGGAVGGLAGAASKITGAMAKGVAAMTMDEDYQQKRREAMNKQPAGFREGITRGGKGLVSGFVSGITGIVTKPIKGAQKGGAAGFFKGVGKGLVGAVARPTGGIIDMASSTFQGIKRATETSEVESLRPPRFFNEDGVIRPYRLRDGTGNQMLQASKSLI

SEQ ID NO: 25120 - protein, 964 aa, Homo sapiens
MKGYGSAVWSLMWKYCISVRTLSVEGEAPSSETGTSLDSPSAYPQGPLVPGSSLSPDHYEHTSVGAYGLYSGPPGQQQRTRRPKLQHSTSILRKQAEEEAIKRSRSLSESYELSSDLQDKQVEMLERKYGGRLVTRHAARTIQTAFRQYQMNKNFERLRSSMSENRMSRRIVLSNMRMQFSFEGPEKVHSSYFEGKQVSVTNDGSQLGALVSPECGDLSEPTTLKSPAPSSDFADAITELEDAFSRQVKSLAESIDDALNCRSLHTEEAPALDAARARDTEPQTALHGMDHRKLDEMTASYSDVTLYIDEEELSPPLPLSQAGDRPSSTESDLRLRAGGAAPDYWALAHKEDKADTDTSCRSTPSLERQEQRLRVEHLPLLTIEPPSDSSVDLSDRSERGSLKRQSAYERSLGGQQGSPKHGPHSGAPKSLPREEPELRPRPPRPLDSHLAINGSANRQSKSESDYSDGDNDSINSTSNSNDTINCSSESSSRDSLREQTLSKQTYHKEARNSWDSPAFSNDVIRKRHYRIGLNLFNKKPEKGVQYLIERGFVPDTPVGVAHFLLQRKGLSRQMIGEFLGNRQKQFNRDVLDCVVDEMDFSTMELDEALRKFQAHIRVQGEAQKVERLIEAFSQRYCICNPGVVRQFRNPDTIFILAFAIILLNTDMYSPNVKPERKMKLEDFIKNLRGVDDGEDIPREMLMGIYERIRKRELKTNEDHVSQVQKVEKLIVGKKPIGSLHPGLGCVLSLPHRRLVCYCRLFEVPDPNKPQKLGLHQREIFLFNDLLVVTKIFQKKKNSVTYSFRQSFSLYGMQVLLFENQYYPNGIRLTSSVPGADIKVLINFNAPNPQDRKKFTDDLRESIAEVQEMEKHRIESELEKQKGVVRPSMSQCSSLKKESGNGTLSRACLDDSYASGEGLKRSALSSSLRDLSEAGKRGRRSSAGSLESNVEFQPFEPLQPSVLCS

SEQ ID NO: 25121 - protein, 399 aa, Homo sapiens
GRADPEEELSLTFALRQQNVERLSELVQAVSDPSSPQYGKYLTLENVADLVRPSPLTLHTVQKWLLAAGAQKCHSVITQDFLTCWLSIRQAELLLPGAEFHHYVGGPTETHVVRSPHPYQLPQALAPHVDFGRHEGQEPFLQWLMLLSNESALPHVHTVSYGDDEDSLSSAYIQRVNTELMKAAARGLTLLFASGDSGAGCWSVSGRHQFRPTFPASSPYVTTVGGTSFQEPFLITNEIVDYISGGGFSNVFPRPSYQEEAVTKFLSSSPHLPPSSYFNASGRAYPDVAALSDGYWVVSNRVPIPWVSGTSASTPVFGGILSLINEHRILSGRPPLGFLNPRLYQQHGAGLFDVTRGCHESCLDEEVEGQGFCSGPGWDPVTGWGTPNFPALLKTLLNP

SEQ ID NO: 25122 - protein, 610 aa, Homo sapiens
MAAESGELIGACEFMKDRLYFATLRNRPKSTVNTHYFSIDEELVYENFYADFGPLNLAMVYRYCCKLNKKLKSYSLSRKKIVHYTCFDQRKRANAAFLIGAYAVIYLKKTPEEAYRALLSGSNPPYLPFRDASFGNCTYNLTILDCLQGIRKGLQHGFFDFETFDVDEYEHYERVENGDFNWIVPGKFLAFSGPHPKSKIENGYPLHAPEAYFPYFKKHNVTAVVRLNKKIYEAKRFTDAGFEHYDLFFIDGSTPSDNIVRRFLNICENTEGAIAVHCKAGLGRTGTLIACYVMKHYRFTHAEIIAWIRICRPGSIIGPQQHFLEEKQASLWVQGDIFRSKLKNRPSSEGSINKILSGLDDMSIGGNLSKTQNMERFGEDNLEDDDVEMKNGITQGDKLRALKSQRQPRTSPSCAFRSDDTKGHPRAVSQPFRLSSSLQGSAVTLKTSKMALSPSATAKRINRTSLSSGATVRSFSINSRLASSLGNLNAATDDPENKKTSSSSKAGFTASPFTNLLNGSSQPTTRNYPELNNNQYNRSSNSNGGNLNSPPGPHSAKTEEHTTILRPSYTGLSSSSARFLSRSIPCSCLLLVFRKPFLGSPLLSLPISHL

SEQ ID NO: 25123 - protein, 1521 aa, Homo sapiens
MQPQNVQGLSKVSEEPSTSSDERASLIKKEIHGSLPHVAEPSVPYRGTVFAMDPRNGYMEPHYHPPHLFPAFHPPVPIDARHHEGRYHYDPSPIPPLHMTSALSSSPTYPDLPFIRISPHRNPTAASESPFSPPHPYINPYMDYIRSLHSSPSLSMISATRGLSPTDAPHAGVSPAEYYHQMALLTGQRSPYADIIPSAATAGTGAIHMEYLHAMDSTRFSSPRLSARPSRKRTLSISPLSDHSFDLQTMIRTSPNSLVTILNNSRSSSSASGSYGHLSASAISPALSFTYSSAPVSLHMHQQILSRQQSLGSAFGHSPPLIHPAPTFPTQRPIPGIPTVLNPVQVSSGPSESSQNKPTSESAVSSTGDPMHNKRSKIKPDEDLPSPGARGQQEQPEGTTLVKEEGDKDESKQEPEVIYETNCHWEGCAREFDTQEQLVHHINNDHIHGEKKEFVCRWLDCSREQKPFKAQYMLVVHMRRHTGEKPHKCTFEGCTKAYSRLENLKTHLRSHTGEKPYVCEHEGCNKAFSNASDRAKHQNRTHSNEKPYVCKIPGCTKRYTDPSSLRKHVKTVHGPEAHVTKKQRGDIHPRPPPPRDSGSHSQSRSPGRPTQGALGEQQDLSNTTSKREECLQVKTVKAEKPMTSQPSPGGQSSCSSQQSPISNYSNSGLELPLTDGGSIGDLSAIDETPIMDSTISTATTALALQARRNPAGTKWMEHVKLERLKQVNGMFPRLNPILPPKAPAVSPLIGNGTQSNNTCSLGGPMTLLPGRSDLSGVDVTMLNMLNRRDSSASTISSAYLSSRRSSGISPCFSSRRSSEASQAEGRPQNVSVADSYDPISTDASRRSSEASQSDGLPSLLSLTPAQQYRLKAKYAAATGGPPPTPLPNMERMSLKTRLALLGDALEPGVALPPVHAPRRCSDGGAHGYGRRHLQPHDAPGHGVRRASDPVRTGSEGLALPRVPRFSSLSSCNPPAMATSAEKRSLVLQNYTRPEGGQSRNFHSSPCPPSITENVTLESLTMDADANLNDEDFLPDDVVQYLNSQNQAGYEQHFPSALPDDSKVPHGPGDFDAPGLPDSHAGQQFHALEQPCPEGSKTDLPIQWNEVSSGSADLSSSKLKCGPRPAVPQTRAFGFCNGMVVHPQNPLRSGPAGGYQTLGENSNPYGGPEHLMLHNSPGSGTSGNAFHEQPCKAPQYGNCLNRQPVAPGALDGACGAGIQASKLKSTPMQGSGGQLNFGLPVAPNESAGSMVNGMQNQDPVGQGYLAHQLLGDSMQHPGAGRPGQQMLGQISATSHINIYQGPESCLPGAHGMGSQPSSLAVVRGYQPCASFGGSRRQAMPRDSLALQSGQLSDTSQTCRVNGIKMEMKGQPHPLCSNLQNYSGQFYDQTVGFSQQDTKAGSFSISDASCLLQGTSAKNSELLSPGANQVTSTVDSLDSHDLEGVQIDFDAIIDDGDHSSLMSGALSPSIIQNLSHSSSRLTTPRASLPFPALSMSTTNMAIGDMSSLLTSLAEESKFLAVMQ

SEQ ID NO: 25124 - protein, 985 aa, Homo sapiens
MSWFNASQLSSFAKQALSQAQKSIDRVLDIQEEEPSIWAETIPYGEPGISSPVSGGWDTSTWGLKSNTEPQSPPIASPKAITKPVRRTVVDESENFFSAFLSPTDVQTIQKSPVVSKPPAKSQRPEEEVKSSLHESLHIGQSRTPETTESQVKDSSLCVSGETLAAGTSSPKTEGKHEETVNKESDMKVPTVSLKVSESVIDVKTTMESISNTSTQSLTAETKDIALEPKEQKHEDRQSNTPSPPVSTFSSGTSTTSDIEVLDHESVISESSASSRQETTDSKSSLHLMQTSFQLLSASACPEYNRLDDFQKLTESCCSSDAFERIDSFSVQSLDSRSVSEINSDDELSGKGYALVPIIVNSSTPKSKTVESAEGKSEEVNETLVIPTEEAEMEESGRSATPVNCEQPDILVSSTPINEGQTVLDKVAEQCEPAESQPEALSEKEDVCKTVEFLNEKLEKREAQLLSLSKEKALLEEAFDNLKDEMFRVKEESSSISSLKDEFTQRIAEAEKKVQLACKERDAAKKEIKNIKEELATRLNSSETADLLKEKDEQIRGLMEEGEKLSKQQLHNSNIIKKLRAKDKENENMVAKLNKKVKELEEELQHLKQVGDLRLALQRTEQAAARKEDYLRHEIGELQQRLQEAENRNQELSQSVSSTTRPLLRQIENLQATLGSQTSSWEKLEKNLSDRLGESQTLLAAAVERERAATEELLANKIQMSSMESQNSLLRQENSRFQAQLESEKNRLCKLEDENNRYQVELENLKDEYVRTLEETRKEKTLLNSQLEMERMKVEQERKKAIFTQETIKEKERKPFSVSSTPTMSRSSSISGVDMAGLQTSFLSQDESHDHSFGPMPISANGSNLYDAVRMGAGSSIIENLQSQLKLREGEITHLQLEIGNLEKTRSIMAEELVKLTNQNDELEEKVKEIPKLRTQLRDLDQRYNTILQMYGEKAEEAEELRLDLEDVKNMYKTQIDELLRQSLS

SEQ ID NO: 25125 - protein, 696 aa, Homo sapiens
MIDSVKLRRDSAADFFSHYEYLCALQNSVPLPAVRACLREGVLDFNADRLRGVDWAPLLSTLKINKDLPLVSIKSFFQPWLGDTGSDMNKFCRSRVPAIRYKDVTFQLCKALKGCLSISSVLKNLELNGLILRERDLTILAKGLNKSASLVHLSLANCPIGDGGLEIICQGIKSSITLKTVNFTGCNLTWQGADHMAKILKYQTMRRHEETWAESLRYRRPDLDCMAGLRRITLNCNTLIGDLGACAFADSLSEDLWLRALDLQQCGLTNEGAKALLEALETNTTLVVLDIRKNPLIDHSMMKAVIKKVLQNGRSAKSEYQWITSPSVKEPSKTAKQKRRTIILGSGHKGKATIRIVIWRHRVGLATKKPVSSGRKHSLGKEYYAPAPLPPGVSGFLPWRTAERAKRHRGFPLIKTRDICNQLQQPGFPVTVTVESPSSSEVEEVDDSSESVHEVPEKTSIEQEALQEKLEECLKQLKEERVIRLKVDKRVSELEHENAQLRNINFSLSEALHAQSLTNMILDDEGVLGSIENSFQKFHAFLDLLKDAGLGQLATMAGIDQSDFQLLGHPQMTSTVSNPPKEEKKALEDEKPEPKQNALGQMQNIQFQKITGDARIPLPLDSFPVPVSTPEGLGTSSNNLGVPATEQRQESFEGFIARMCSPSPDATSGTGSQRKEEELSRNSRSSSEKKTKTESH

SEQ ID NO: 25126 - protein, 2365 aa, Homo sapiens
MEEVPGDALCEHFEANILTQNRCQNCFHPEEAHGARYQELRSPSGAEVPYCDLPRCPPAPEDPLSASTSGCQSVVDPGLRPGPKRGPSPSAGLPEEGPTAAPRSRSRELEAVPYLEGLTTSLCGSCNEDPGSDPTSSPDSATPDDTSNSSSVDWDTVERQEEEAPSWDELAVMIPRRPREGPRADSSQRAPSLLTRSPVGGDAAGQKKEDTGGGGRSAGQHWARLRGESGLSLERHRSTLTQASSMTPHSGPRSTTSQASPAQRDTAQAASTREIPRASSPHRITQRDTSRASSTQQEISRASSTQQETSRASSTQEDTPRASSTQEDTPRASSTQWNTPRASSPSRSTQLDNPRTSSTQQDNPQTSFPTCTPQRENPRTPCVQQDDPRASSPNRTTQRENSRTSCAQRDNPKASRTSSPNRATRDNPRTSCAQRDNPRASSPSRATRDNPTTSCAQRDNPRASRTSSPNRATRDNPRTSCAQRDNPRASSPSRATRDNPTTSCAQRDNPRASRTSSPNRATRDNPRTSCAQRDNPRASSPNRAARDNPTTSCAQRDNPRASRTSSPNRATRDNPRTSCAQRDNPRASSPNRATRDNPTTSCAQRDNPRASRTSSPNRATRDNPRTSCAQRDNPRASSPNRTTQQDSPRTSCARRDDPRASSPNRTIQQENPRTSCALRDNPRASSPSRTIQQENPRTSCAQRDDPRASSPNRTTQQENPRTSCARRDNPRASSRNRTIQRDNPRTSCAQRDNPRASSPNRTIQQENLRTSCTRQDNPRTSSPNRATRDNPRTSCAQRDNLRASSPIRATQQDNPRTCIQQNIPRSSSTQQDNPKTSCTKRDNLRPTCTQRDRTQSFSFQRDNPGTSSSQCCTQKENLRPSSPHRSTQWNNPRNSSPHRTNKDIPWASFPLRPTQSDGPRTSSPSRSKQSEVPWASIALRPTQGDRPQTSSPSRPAQHDPPQSSFGPTQYNLPSRATSSSHNPGHQSTSRTSSPVYPAAYGAPLTSPEPSQPPCAVCIGHRDAPRASSPPRYLQHDPFPFFPEPRAPESEPPHHEPPYIPPAVCIGHRDAPRASSPPRHTQFDPFPFLPDTSDAEHQCQSPQHEPLQLPAPVCIGYRDAPRASSPPRQAPEPSLLFQDLPRASTESLVPSMDSLHECPHIPTPVCIGHRDAPSFSSPPRQAPEPSLFFQDPPGTSMESLAPSTDSLHGSPVLIPQVCIGHRDAPRASSPPRHPPSDLAFLAPSPSPGSSGGSRGSAPPGETRHNLEREEYTVLADLPPPRRLAQRQPGPQAQCSSGGRTHSPGRAEVERLFGQERRKSEAAGAFQAQDEGRSQQPSQGQSQLLRRQSSPAPSRQVTMLPAKQAELTRRSQAEPPHPWSPEKRPEGDRQLQGSPLPPRTSARTPERELRTQRPLESGQAGPRQPLGVWQSQEEPPGSQGPHRHLERSWSSQEGGLGPGGWWGCGEPSLGAAKAPEGAWGGTSREYKESWGQPEAWEEKPTHELPRELGKRSPLTSPPENWGGPAESSQSWHSGTPTAVGWGAEGACPYPRGSERRPELDWRDLLGLLRAPGEGVWARVPSLDWEGLLELLQARLPRKDPAGHRDDLARALGPELGPPGTNDVPEQESHSQPEGWAEATPVNGHSPALQSQSPVQLPSPACTSTQWPKIKVTRGPATATLAGLEQTGPLGSRSTAKGPSLPELQFQPEEPEESEPSRGQDPLTDQKQADSADKRPAEGKAGSPLKGRLVTSWRMPGDRPTLFNPFLLSLGVLRWRRPDLLNFKKGWMSILDEPGEPPSPSLTTTSTSQWKKHWFVLTDSSLKYYRDSTAEEADELDGEIDLRSCTDVTEYAVQRNYGFQIHTKDAVYTLSAMTSGIRRNWIEALRKTVRPTSAPDVTKLSDSNKENALHSYSTQKGPLKAGEQRAGSEVISRGGPRKADGQRQALDYVELSPLTQASPQRARTPARTPDRLAKQEELERDLAQRSEERRKWFEATDSRTPEVPAGEGPRRGLGAPLTEDQQNRLSEEIEKKWQELEKLPLRENKRVPLTALLNQSRGERRGPPSDGHEALEKEVQALRAQLEAWRLQGEAPQSALRSQEDGHIPPGYISQEACERSLAEMESSHQQVMEELQRHHERELQRLQQEKEWLLAEETAATASAIEAMKKAYQEELSRELSKTRSLQQGPDGLRKQHQSDVEALKRELQVLSEQYSQKCLEIGALMRQAEEREHTLRRCQQEGQELLRHNQELHGRLSEEIDQLRGFIASQGMGNGCGRSNERSSCELEVLLRVKENELQYLKKEVQCLRDELQMMQKDKRFTSGKYQDVYVELSHIKTRSEREIEQLKEHLRLAMAALQEKESMRNSLAE

SEQ ID NO: 25127 - protein, 829 aa, Homo sapiens
MRTTKVYKLVIHKKGFGGSDDELVVNPKVFPHIKLGDIVEIAHPNDEYSPLLLQVKSLKEDLQKETISVDQTVTQVFRLRPYQDVYVNVVDPKDVTLDLVELTFKDQYIGRGDMWRLKKSLVSTCAYITQKVEFAGIRAQAGELWVKNEKVMCGYISEDTRVVFRSTSAMVYIFIQMSCEMWDFDIYGDLYFEKAVNGFLADLFTKWKEKNCSHEVTVVLFSRTFYDAKSVDEFPEINRASIRQDHKGRFYEDFYKVVVQNERREEWTSLLVTIKKLFIQYPVLVRLEQAEGFPQGDNSTSAQGNYLEAINLSFNVFDKHYINRNFDRTGQMSVVITPGVGVFEVDRLLMILTKQRMIDNGIGVDLVCMGEQPLHAVPLFKLHNRSAPRDSRLGDDYNIPHWINHSFYTSKSQLFCNSFTPRIKLAGKKPASEKAKNGRDTSLGSPKESENALPIQVDYDAYDAQVFRLPGPSRAQCLTTCRSVRERESHSRKSASSCDVSSSPSLPSRTLPTEEVRSQASDDSSLGKSANILMIPHPHLHQYEVSSSLGYTSTRDVLENMMEPPQRDSSAPGRFHVGSAESMLHVRPGGYTPQRALINPFAPSRMPMKLTSNRRRWMHTFPVGPSGEAIQIHHQTRQNMAELQGSGQRDPTHSSAELLELAYHEAAGRHSNSRQPGDGMSFLNFSGTEELSVGLLSNSGAGMNPRTQNKDSLEDSVSTSPDPILTLSAPPVVPGFCCTVGVDWKSLTTPACLPLTTDYFPDRQGLQNDYTEGCYDLLPEADIDRSVSEKKALGLVGEGFGYIPHMHQNTGFVLASATHILKLERYRGD

SEQ ID NO: 25128 - protein, 346 aa, Homo sapiens
MAQQANVGELLAMLDSPMLGVRDDVTAVFKENLNSDRGPMLVNTLVDYYLETSSQPALHILTTLQEPHDKMDTDVVVLTTGVLVLITMLPMIPQSGKQHLLDFFDIFGRLSSWCLKKPGHVAEVYLVHLHASVYALFHRLYGMYPCNFVSFLRSHYSMKENLETFEEVVKPMMEHVRIHPELVTGSKDHELDPRRWKRLETHDVVIECAKISLDPTEASYEDGYSVSHQISARFPHRSADVTTSPYADTQNSYGCATSTPYSTSRLMLLNMPGQLPQTLSSPSTRLITEPPQEERMDSARPCLHRQHHLLNDRGSEEPPGSKGSVTLSDLPGFLGDLASEEDSIEK

SEQ ID NO: 25129 - protein, 705 aa, Homo sapiens
MIDSVKLRRDSAADFFSHYEYLCALQNSVPLPAVRACLREGVLDFNADRLRGVDWAPLLSTLKINKDLPLVSIKSFFQPWLGDTGSDMNKFCRSRVPAIRYKDVTFQLCKALKGCLSISSVLKNLELNGLILRERDLTILAKGLNKSASLVHLSLANCPIGDGGLEIICQGIKSSITLKTVNFTGCNLTWQGADHMAKILKYQTMRRHEETWAESLRYRRPDLDCMAGLRRITLNCNTLIGDLGACAFADSLSEDLWLRALDLQQCGLTNEGAKALLEALETNTTLVVLDIRKNPLIDHSMMKAVIKKVLQNGRSAKSEYQWITSPSVKEPSKTAKQKRRTIILGSGHKGKATIRIGLATKKPVSSGRKHSLGKEYYAPAPLPPGVSGFLPWRTAERAKRHRGFPLIKTRDICNQLQQPGFPVTVTVESPSSSEVEEVDDSSESVHEVPEKTSIEQEALQEKLEECLKQLKEERVIRLKVDKRVSELEHENAQLRNINFSLSEALHAQSLTNMILDDEGVLGSIENSFQKFHAFLDLLKDAGLGQLATMAGIDQSDFQLLGHPQMTSTVSNPPKEEKKALEDEKPEPKQNALGQMQNIQVSICMQSAYNEGTLMKFQKITGDARIPLPLDSFPVPVSTPEGLGTSSNNLGVPATEQRQESFEGFIARMCSPSPDATSGTGSQRKEEELSRNSRSSSEKKTKTESH

SEQ ID NO: 25130 - protein, 566 aa, Homo sapiens
MQYSAMDEFHPFIEALLPHVRAIAYTWFNLQARKRKYFKKHEKRMSKDEERAVKDELLSEKPEIKQKWASRLLAKLRKDIRQEYREDFVLTVTGKKHPCCVLSNPDQKGKIRRIDCLRQADKVWRLDLVMVILFKGIPLESTDGERLMKSPHCTNPALCVQPHHITVSVKELDLFLAYYVQEQDSGQSGSPSHNDPAKNPPGYLEDSFVKSGVFNVSELVRVSRTPITQGTGVNFPIGEIPSQPYYHDMNSGVNLQRSLSSPPSSKRPKTISIDENMEPSPTGDFYPSPSSPAAGSRTWHERDQDMSSPTTMKKPEKPLFSSASPQDSSPRLSTFPQHHHPGIPGVAHSVISTRTPPPPSPLPFPTQAILPPAPSSYFSHPTIRYPPHLNPQDTLKNYVPSYDPSSPQTSQPNGSGQVVGKVPGHFTPVLAPSPHPSAVRPVTLSMTDTKPITTSTEGEAASPTATTYTASGTSQANRYVGLSPRDPSFLHQQQLRICDWTMNQNGRHLYPSTSEDTLGITWQSPGTWASLVPFQVSNRTPILPANVQNYGLNIIGEPFLQAETSN

SEQ ID NO: 25131 - protein, 379 aa, Homo sapiens
MREPEELMPDSGAVFTFGKSKFAENNPGKFWFKNDVPVHLSCGDEHSAVVTALKPEKVKLAACGRNHTLVSTEGGNVYATGGNNEGQLGLGDTEERNTFHVISFFTSEHKIKQLSAGSNTSAALTEDGRLFMWGDNSEGQIGLKNVSNVCVPQQVTIGKPVSWISCGYYHSAFVTTDGELYVFGEPENGKLGLPNQLLGNHRTPQLVSEIPEKVIQVACGGEHTVVLTENAVYTFGLGQFGQLGLGTFLFETSEPKVIENIRDQTISYISCGENHTALITDIGLMYTFGDGRHGKLGLGLENFTNHFIPTLCSNFLRFIVKLVACGGCHMVVFAAPHRGVAKEIEFDEINDTCLSVATFLPYSSLTSGNVLQRTLSARM

SEQ ID NO: 25132 - protein, 414 aa, Homo sapiens
RLLTPTFEGINGLLLKQHLVQNPVRLWQLLGGTFYFNTSRLKQKNKEKDKSKGKAPEEDEGMGTTDHVIVLASTNRADILDGALMRPGRLDRHVFIDLPTLQERREIFEQHLKSLKLTQSSTFYSQRLAELTPGFSGADIANICNEAALHAAREGHTSVHTLNFEYAVERVLAGTAKKSKILSKEEQKVVAFHESGHALVGWMLEHTEAVMKVSITPRTNAALGFAQMLPRDQHLFTKEQLFERMCMALGGRASEALSFNEVTSGAQDDLRKVTRIAYSMVKQFGMAPGIGPISFPEAQEGLMGIGRRPFSQGLQQMMDHEARLLVAKAYRHTEKVLQDNLDKLQALANALLEKEVINYEDIEALIGPPPHGPKKMIAPQRWIDAQREKQDLGEEETEETQQPPLGGEEPTWPK

SEQ ID NO: 25133 - protein, 334 aa, Homo sapiens
MLKPSLPFTSLLFLQLPLLGVGLNTTILTPNGNEDTTADFFLTTMPTDSLSVSTLPLPEVQCFVFNVEYMNCTWNSSSEPQPTNLTLHYWYKNSDNDKVQKCSHYLFSEEITSGCQLQKKEIHLYQTFVVQLQDPREPRRQATQMLKLQNLVIPWAPENLTLHKLSESQLELNWNNRFLNHCLEHLVQYRTDWDHSWTEQSVDYRHKFSLPSVDGQKRYTFRVRSRFNPLCGSAQHWSEWSHPIHWGSNTSKENPFLFALEAVVISVGSMGLIISLLCVYFWLERTMPRIPTLKNLEDLVTEYHGNFSAWSGVSKGLAESLQPDYSERLCLGTL

SEQ ID NO: 25134 - protein, 353 aa, Homo sapiens
MGSLYSEYLNPNKVQEHYNYTKETLETQETTSRQVASAFIVILCCAIVVENLLVLIAVARNSKFHSAMYLFLGNLAASDLLAGVAFVANTLLSGSVTLRLTPVQWFAREGSAFITLSASVFSLLAIAIERHVAIAKVKLYGSDKSCRMLLLIGASWLISLVLGGLPILGWNCLGHLEACSTVLPLYAKHYVLCVVTIFSIILLAIVALYVRIYCVVRSSHADMAAPQTLALLKTVTIVLGVFIVCWLPAFSILLLDYACPVHSCPILYKAHYFFAVSTLNSLLNPVIYTWRSRDLRREVLRPLQCWRPGVGVQGRRRGGTPGHHLLPLRSSSSLERGMHMPTSPTFLEGNTVV

SEQ ID NO: 25135 - protein, 1098 aa, Homo sapiens
SRHSSYERGGDVSPSPYSSSSWRRSRSPYSPVLRRSGKSRSRSPYSSRHSRSRSRHRLSRSRSRHSSISPSTLTLKSSLAAELNKNKKARAAEAARAAEAAKAAEATKAAEAAAKAAKASNTSTPTKGNTETSASASQTNHVKDVKKIKIEHAPSPSSGGTLKNDKAKTKPPLQVTKVENNLIVDKATKKAVIVGKESKSAATKEESVSLKEKTKPLTPSIGAKEKEQHVALVTSTLPPLPLPPMLPEDKEADSLRGNISVKAVKKEVEKKLRCLLADLPLPPELPGGDDLSKSPEEKKTATQLHSKRRPKICGPRYGETKEKDIDWGKRCVDKFDIIGIIGEGTYGQVYKARDKDTGEMVALKKVRLDNEKEGFPITAIREIKILRQLTHQSIINMKEIVTDKEDALDFKKDKGAFYLVFEYMDHDLMGLLESGLVHFNENHIKSFMRQLMEGLDYCHKKNFLHRDIKCSNILLNNRGQIKLADFGLARLYSSEESRPYTNKVITLWYRPPELLLGEERYTPAIDVWSCGCILGELFTKKPIFQANQELAQLELISRICGSPCPAVWPDVIKLPYFNTMKPKKQYRRKLREEFVFIPAAALDLFDYMLALDPSKRCTAEQALQCEFLRDVEPSKMPPPERFLHAEAMHHSKMAESLPLWQDCHELWSKKRRRQKQMGMTDDVSTIKAPRKDLSLGLDDSRTNTPQGVLPSSQLKSQGSSNVAPGEKQTDPSTPQQESSKPLGGIQPSSQTIQPKVETDAAQAAVQSAFAVLLTQLIKAQQSKQKDVLLEERENGSGHEASLQLRPPPEPSTPVSGQDDLIQHQDMRILELTPEPDRPRILPPDQRPPEPPEPPPVTEEDLDYRTENQHVPTTSSSLTDPHAGVKAALLQLLAQHQPQDDPKREGGIDYQAGDTYVSTSDYKDNFGSSSFSSAPYVSNDGLGSSSAPPLERRSFIGNSDIQSLDNYSTASSHSGGPPQPSAFSESFPSSVAGYGDIYLNAGPMLFSGDKDHRFEYSHGPIAVLANSSDPSTGPESTHPLPAKMHNYNYGGNLQENPSGPSLMHGQTWTSPAQGPGYSQGYRGHISTSTGRGRGRGLPY

SEQ ID NO: 25136 - protein, 918 aa, Homo sapiens
MAVQPKETLQLESAAEVGFVRFFQGMPEKPTTTVRLFDRGDFYTAHGEDALLAAREVFKTQGVIKYMGPAGAKNLQSVVLSKMNFESFVKDLLLVRQYRVEVYKNRAGNKASKENDWYLAYKASPGNLSQFEDILFGNNDMSASIGVVGVKMSAVDGQRQVGVGYVDSIQRKLGLCEFPDNDQFSNLEALLIQIGPKECVLPGGETAGDMGKLRQIIQRGGILITERKKADFSTKDIYQDLNRLLKGKKGEQMNSAVLPEMENQVAVSSLSAVIKFLELLSDDSNFGQFELTTFDFSQYMKLDIAAVRALNLFQGSVEDTTGSQSLAALLNKCKTPQGQRLVNQWIKQPLMDKNRIEERLNLVEAFVEDAELRQTLQEDLLRRFPDLNRLAKKFQRQAANLQDCYRLYQGINQLPNVIQALEKHEGKHQKLLLAVFVTPLTDLRSDFSKFQEMIETTLDMDQVENHEFLVKPSFDPNLSELREIMNDLEKKMQSTLISAARDLGLDPGKQIKLDSSAQFGYYFRVTCKEEKVLRNNKNFSTVDIQKNGVKFTNSKLTSLNEEYTKNKTEYEEAQDAIVKEIVNISSGYVEPMQTLNDVLAQLDAVVSFAHVSNGAPVPYVRPAILEKGQGRIILKASRHACVEVQDEIAFIPNDVYFEKDKQMFHIITGPNMGGKSTYIRQTGVIVLMAQIGCFVPCESAEVSIVDCILARVGAGDSQLKGVSTFMAEMLETASILRSATKDSLIIIDELGRGTSTYDGFGLAWAISEYIATKIGAFCMFATHFHELTALANQIPTVNNLHVTALTTEETLTMLYQVKKGVCDQSFGIHVAELANFPKHVIECAKQKALELEEFQYIGESQGYDIMEPAAKKCYLERENLRVTEPKDQCLILLTWKRKLRGGKRSACSRPERQNQGSG

SEQ ID NO: 25137 - protein, 540 aa, Homo sapiens
MREPEELMPDSGAVFTFGKSKFAENNPGKFWFKNDVPVHLSCGDEHSAVVTGNNKLYMFGSNNWGQLGLGSKSAISKPTCVKALKPEKVKLAACGRNHTLVSTEGGNVYATGGNNEGQLGLGDTEERNTFHVISFFTSEHKIKQLSAGSNTSAALTEDGRLFMWGDNSEGQIGLKNVSNVCVPQQVTIGKPVSWISCGYYHSAFVTTDGELYVFGEPENGKLGLPNQLLGNHRTPQLVSEIPEKVIQVACGGEHTVVLTENAVYTFGLGQFGQLGLGTFLFETSEPKVIENIRDQTISYISCGENHTALITDIGLMYTFGDGRHGKLGLGLENFTNHFIPTLCSNFLRFIVKLVACGGCHMVVFAAPHRGVAKEIEFDEINDTCLSVATFLPYSSLTSGNVLQRTLSARMRRRERERSPDSFSMRRTLPPIEGTLGLSACFLPNSVFPRCSERNLQESVLSEQDLMQPEEPDYLLDEMTKEAEIDNSSTVESLGETTDILNMTHIMSLNSNEKSLKLSPVQKQKRSQRRRKEQRIQKEME

SEQ ID NO: 25138 - protein, 622 aa, Homo sapiens
MSLAAYCVICCRRIGTSTSPPKSGTHWRDIRNIIKFTGSLILGGSLFLTYEVLALKKAVTLDTQVVEREKMKSYIYVHTVSLDKGENHGIAWQARKELHKAVRKVLATSAKILRNPFADPFSTVDIEDHECAVWLLLRKSKSDDKTTRLEAVREMSETHHWHDYQYRIIAQACDPKTLIGLARSEESDLRFFLLPPPLPSLKEDSSTEEELRQLLASLPQTELDECIQYFTSLALSESSQSLAAQKGGLWCFGGNGLPYAESFGEVPSATVEMFCLEAIVKHSEISTHCDKIEANGGLQLLQRLYRLHKDCPKVQRNIMRVIGNMALNEHLHSSIVRSGWVSIMAEAMKSPHIMESSHAARILANLDRETVQEKYQDGVYVLHPQYRTSQPIKADVLFIHGLMGAAFKTWRQQDSEQAVIEKPMEDEDRYTTCWPKTWLAKDCPALRIISVEYDTSLSDWRARCPMERKSIAFRSNELLRKLRAAGVGDRPVVWISHSMGGLLVKKMLLEASTKPEMSTVINNTRGIIFYSVPHHGSRLAEYSVNIRYLLFPSLEVKELSKDSPALKTLQDDFLEFAKDKNFQVLNFVETLPTYIGSMIKLHVVPVESAGIHSFETCWLLDA

SEQ ID NO: 25139 - protein, 2645 aa, Homo sapiens
MSIYDINREQDYVKNSEGILGENELRPPSQLHSLLEKIETGSLSEKIFETVSLSSDSLFQRAVSLLHTSYLDSSSEHGFQYSQVTLVKNDIFLNEYKTFYQQKKASSYTQEELQDTYGFLLFDTEKQAKLVCQCGLRVGSSAVTTLGDPAKGVYISKYSDCLHSRPWYHGKSGYVVIFNIIKYYFYELSGNTVIERPRQICPYVIVAFRYRESKTMAPPAHKSILERSENVLMSPWKGKLIVQDRMLCDIALWSTYGAMIPTQLPQELDFKYVMKVSSLKKRLPEAAFRKQNYLEEKVCFQDLCFNLYEVELSNRQGENIDKLTECIKNKQLAIIKCLEDRGFFILLTSSALLSEPDFGGKQMGLHGLHLFRSPLSTGVKDLKVEDDISMKVIPILSTLNCALLETKKSLPEERIHPNTLVKRHFQELYKADRSPSLSVAPQDRMKDPTFLGKLPSGFDLIPPAEKCPSESLTQLNSYFSDPSAYILEVSTALDLLAEHPQSPCVSDGICDAGFSLVMTPDPEFLVSEAEVRKETETKKDSEEMLKAKKRVFPLSPASNLRVQPKRKASMPHMVQSKKVNLCRPFPKRTASRADNSSDSPTTLKLVKGQFPQKRKRGAEVLTAQFVQKTKLDRKNQEAPISKDVPVPTNAKRARKQEKSPVKTVPRAKPPVKKSPQKQRVNIVKGNENPRNRKQLQPVKGETASKLQSEISRGCQEDGISINSVQPENTTAAHNDLPENSIVNYDSQALNMLADLALSSATSSTPVSEARNLHCSSELPQNDVLLSKENSLRGTSDHEYHRGVKTQKGELLPNPSSDRKSNSGSDLTVSQDEESLVPCSQAPAKAQSALTEEMLESSDASQSSSVSVEHSYALLLTEHSKKHLQEREILSPLFPRNGTKSPEAATPVGKVMPFRHQPGLLLQQKPPDDPVVKPKDRPPSARVKKSSCSRIVLSCDDSVKITFKCETEYAFSLDSKYTNNPLEKTVVRALHGPWNTDLPDNVEEVKLLLHMWVALFYSNQNKIIRSSRKVVEHSNPAKYVSINSTLESCELREIEESLGLEKCSADSLLETNEISRAHAAEVSFRDPNCLLPFIKTPLTQGLELCVQNEQKKTFARECDPDTQEDQNFICSYNNEVTGEEAKQESLETSNLVLSGIGSTQTNGPSVPSEEEIVQPLDSTRVASYSGTVTQATFTRTYDGPGSQPVICQSSVYGTLENKVDILDAAVQTKTGTLQDLIQHGSPINNECHPSLERKDDNMGCAVINPEPITLTFEKNAHVPIQTEGVNTADERTTFKKELIKQVSPAASLRHPVSTSENARTQGLRDIPSLVVAGQKGTKYLCASSVGGETLDKAVCSLQKETPLPVSLPSDKTMVMEALSLAKSSSHLSPSEEVRCTQDFLSQTQSLLGLSSEGLLELTQVEVDSSSASTTLGRQCSLNCISSGCHTSGDSLELRKNHKNGPNTENMNLEAFDSVFIKQTSLSVSREVSLELSEEDSDIDLALTISPPTSPREEMPAGEIEQFEEAPFSNLELQDVAEEIGEPEEVALTESREVSSADNVSVYPSVSEEPVENKERKGDNLQPVTLILSKENCTLEIAEEINVTSDFPFDSVIEEVSPASSPEPPVPVKETRPYQAVTPCILKLHGTQCEKSNQISQCESEDLGITEKENVFVGPTHPVGQDNFTQVQQMQVSAEMPLILTDHPGRTGRPTLPGKVTEEIVSSEHDEGLSFSGKVQCYGRELNQPASAAKCTGDFSPSPEKLVKSGNPLQPVSIENRNLDLKHLVLESSEPPFGPRNVIENKSLSDTLVSTTAPSGIVNVSVKQQTSPKSSQNHLFPGDLKTDEGIYLQVKSLTAASVDGAYSTQGCMCSVVPTLCSSSDNATLTHYVRPINAEPVFQAQEIPAGRMASLLKNGEPEAELHKETTGPGTAGPQSNTTSSLKGERKAIHTLQDVSTCETKELLNVGVSSLCAGPYQNTADTKENLSKEPLASFVSESFDTSVCGIATEHVEIENSGEGLRAEAGSETLGRDGEVGVNSDMHYELSGDSDLDLLGDCRNPRLDLEDSYTLRGSYTRKKDVPTDGYESSLNFHNNNQEDWGCSSWVPGMETSLPPGHWTAAVKKEEKCVPPYVQIRDLHGILRTYANFSITKELKDTMRTSHGLRRHPSFSANCGLPSSWTSTWQVADDLTQNTLDLEYLRFAHKLKQTIKNGDSQHSASSANVFPKESPTQISIGAFPSTKISEAPFLHPAPRSRSPLLVTVVESDPRPQGQPRRGYTASSLDSSSSWRERCSHNRDLRNSQRNHTVSFHLNKLKYNSTVKESRNDISLILNEYAEFNKVMKNSNQFIFQDKELNDVSGEATAQEMYLPFPGRSASYEDIIIDVCTNLHVKLRSVVKEACKSTFLFYLVETEDKSFFVRTKNLLRKGGHTEIEPQHFCQAFHRENDTLIIIIRNEDISSHLHQIPSLLKLKHFPSVIFAGVDSPGDVLDHTYQELFRAGGFVISDDKILEAVTLVQLKEIIKILEKLNGNGRWKWLLHYRENKKLKEDERVDSTAHKKNIMLKSFQSANIIELLHYHQCDSRSSTKAEILKCLLNLQIQHIDARFAVLLTDKPTIPREVFENSGILVTDVNNFIENIEKIAAPFRSSYW

SEQ ID NO: 25140 - protein, 470 aa, Homo sapiens
MCGSIVQSLVPTPTNVTIESYNMNPIVYWEYQIMPQVPVFTVEVKNYGVKNSEWIDACINISHHYCNISDHVGDPSNSLWVRVKARVGQKESAYAKSEEFAVCRDGKIGPPKLDIRKEEKQIMIDIFHPSVFVNGDEQEVDYDPETTCYIRVYNVYVRMNGSEIQYKILTQKEDDCDEIQCQLAIPVSSLNSQYCVSAEGVLHVWGVTTEKSKEVCITIFNSSIKGSLWIPVVAALLLFLVLSLVFICFYIKKINPLKEKSIILPKSLISVVRSATLETKPESKYVSLITSYQPFSLEKEVVCEEPLSPATVPGMHTEDNPGKVEHTEELSSITEVVTTEENIPDVVPGSHLTPIERESSSPLSSNQSEPGSIALNSYHSRNCSESDHSRNGFDTDSSCLESHSSLSDSEFPPNNKGEIKTEGQELITVIKAPTSFGYDKPHVLVDLLVDDSGKESLIGYRPTEDSKEFS

SEQ ID NO: 25141 - protein, 168 aa, Homo sapiens
MGHFTEEDKATITSLWGKVNVEDAGGETLGRLLVVYPWTQRFFDSFGNLSSASAIMGNPKVKAHGKKVLTSLGDAIKHLDDLKGTFAQLSELHCDKLHVDPENFKLLGNVLVTVLAIHFGKEFTPELLGNVLVTVLAIHFGKEFTPEVQASWQKMVTAVASALSSRYH

SEQ ID NO: 25142 - protein, 421 aa, Homo sapiens
MPKGGCPKAPQQEELPLSSDMVEKQTGKKDKDKVSLTKTPKLERGDGGKEVRERASKRKLPFTAGANGEQKDSDTEKQGPERKRIKKEPVTRKAGLLFGMGLSGIRAGYPLSERQQVALLMQMTAEESANSPVDTTPKHPSQSTVCQKGTPNSASKTKDKVNKRNERGETRLHRAAIRGDARRIKELISEGADVNVKDFAGWTALHEACNRGYYDVAKQLLAAGAEVNTKGLDDDTPLHDAANNGHYKIAPPPSLAEPLKELFRQQEAVRGKLRLQHSIEREKLIVSCEQEILRVHCRAARTIANQAVPFSACTMLLDSEVYNMPLESQGDENKSVRDRFNARQFISWLQDVDDKYDRMKTCLLMRQQHEAAALNAVQRMEWQLKVQELDPAGHKSLCVNEVPSFYVPMVDVNDDFVLLPA

SEQ ID NO: 25143 - protein, 775 aa, Homo sapiens
MASAGHIITLLLWGYLLELWTGGHTADTTHPRLRLSHKELLNLNRTSIFHSPFGFLDLHTMLLDEYQERLFVGGRDLVYSLSLERISDGYKEIHWPSTALKMEECIMKGKDAGECANYVRVLHHYNRTHLLTCGTGAFDPVCAFIRVGYHLEDPLFHLESPRSERGRGRCPFDPSSSFISTLIGSELFAGLYSDYWSRDAAIFRSMGRLAHIRTEHDDERLLKEPKFVGSYMIPDNEDRDDNKVYFFFTEKALEAENNAHAIYTRVGRLCVNDVGGQRILVNKWSTFLKARLVCSVPGMNGIDTYFDELEDVFLLPTRDHKNPVIFGLFNTTSNIFRGHAICVYHMSSIRAAFNGPYAHKEGPEYHWSVYEGKVPYPRPGSCASKVNGGRYGTTKDYPDDAIRFARSHPLMYQAIKPAHKKPILVKTDGKYNLKQIAVDRVEAEDGQYDVLFIGTDNGIVLKVITIYNQEMESMEEVILEELQIFKDPVPIISMEISSKRQQLYIGSASAVAQVRFHHCDMYGSACADCCLARDPYCAWDGISCSRYYPTGTHAKRRFRRQDVRHGNAAQQCFGQQFVGDALDKTEEHLAYGIENNSTLLECTPRSLQAKVIWFVQKGRETRKEEVKTDDRVVKMDLGLLFLRLHKSDAGTYFCQTVEHSFVHTVRKITLEVVEEEKVEDMFNKDDEEDRHHRMPCPAQSSISQGAKPWYKEFLQLIGYSNFQRVEEYCEKVWCTDRKRKKLKMSPSKWKYANPQEKKLRSKPEHYRLPRHTLDS

SEQ ID NO: 25144 - protein, 583 aa, Homo sapiens
MPKPINVRVTTMDAELEFAIQPNTTGKQLFDQVVKTVGLREVWFFGLQYVDSKGYSTWLKLNKKVTQQDVKKENPLQFKFRAKFFPEDVSEELIQEITQRLFFLQVKEAILNDEIYCPPETAVLLASYAVQAKYGDYNKEIHKPGYLANDRLLPQRVLEQHKLTKEQWEERIQNWHEEHRGMLREDSMMEYLKIAQDLEMYGVNYFEIKNKKGTELWLGVDALGLNIYEHDDKLTPKIGFPWSEIRNISFNDKKFVIKPIDKKAPDFVFYAPRLRINKRILALCMGNHELYMRRRKPDTIEVQQMKAQAREEKHQKQLERAQLENEKKKREIAEKEKERIEREKEELMERLKQIEEQTIKAQKELEEQTRKALELDQERKRAKEEAERLEKERRAAEEAKSAIAKQAADQMKNQEQLAAELAEFTAKIALLEEAKKKKEEEATEWQHKAFAAQEDLEKTKEELKTVMSAPPPPPPPPVIPPTENEHDEHDENNAEASAELSNEGVMNHRSEEERVTETQKNERVKKQLQALSSELAQARDETKKTQNDVLHAENVKAGRDKYKTLRQIRQGNTKQRIDEFEAM

SEQ ID NO: 25145 - protein, 780 aa, Homo sapiens
MATQADLMELDMAMEPDRKAAVSHWQQQSYLDSGIHSGATTTAPSLSGKGNPEEEDVDTSQVLYEWEQGFSQSFTQEQVADIDGQYAMTRAQRVRAAMFPETLDEGMQIPSTQFDAAHPTNVQRLAEPSQMLKHAVVNLINYQDDAELATRAIPELTKLLNDEDQVVVNKAAVMVHQLSKKEASRHAIMRSPQMVSAIVRTMQNTNDVETARCTAGTLHNLSHHREGLLAIFKSGGIPALVKMLGSPVDSVLFYAITTLHNLLLHQEGAKMAVRLAGGLQKMVALLNKTNVKFLAITTDCLQILAYGNQESKLIILASGGPQALVNIMRTYTYEKLLWTTSRVLKVLSVCSSNKPAIVEAGGMQALGLHLTDPSQRLVQNCLWTLRNLSDAATKQEGMEGLLGTLVQLLGSDDINVVTCAAGILSNLTCNNYKNKMMVCQVGGIEALVRTVLRAGDREDITEPAICALRHLTSRHQEAEMAQNAVRLHYGLPVVVKLLHPPSHWPLIKATVGLIRNLALCPANHAPLREQGAIPRLVQLLVRAHQDTQRRTSMGGTQQQFVGVRMEEIVEGCTGALHILARDVHNRIVIRGLNTIPLFVQLLYSPIENIQRVAAGVLCELAQDKEAAEAIEAEGATAPLTELLHSRNEGVATYAAAVLFRMSEDKPQDYKKRLSVELTSSLFRTEPMAWNETADLGLDIGAQGEPLGYRQDDPSYRSFHSGGYGQDALGMDPMMEHEMGGHHPGADYPVDGLPDLGHAQDLMDGLPPGDSNQLAWFDTDL

SEQ ID NO: 25146 - protein, 1344 aa, Homo sapiens
NVINLADSHDRAAFAMVTHVKQEPRERENSESKEEDVEIDIELAPGDQTSTPKTKELSEKDIGNQLHMLTNRHDKFLDTLREVKTGALLSAFVQLCHISTTLAEKTWVQLFPRLWKILSDRQQHALAGEISPFLCSGSHQVQRDCQPSALNCFVEAMSQCVPPIPIRPCVLKYLGKTHNLWFRSTLMLEHQAFEKGLSLQIKPKQTTEFYEQESITPPQQEILDSLAELYSLLQEEDMWAGLWQKRCKYSETATAIAYEQHGFFEQAQESYEKAMDKAKKEHERSNASPAIFPEYQLWEDHWIRCSKELNQWEALTEYGQSKGHINPYLVLECAWRVSNWTAMKEALVQVEVSCPKEMAWKVNMYRGYLAICHPEEQQLSFIERLVEMASSLAIREWRRLPHVVSHVHTPLLQAAQQIIELQEAAQINAGLQPTNLGRNNSLHDMKTVVKTWRNRLPIVSDDLSHWSSIFMWRQHHYQAIVTAYENSSQHDPSSNNAMLGVHASASAIIQYGKIARKQGLVNVALDILSRIHTIPTVPIVDCFQKIRQQVKCYLQLAGVMGKNECMQGLEVIESTNLKYFTKEMTAEFYALKGMFLAQINKSEEANKAFSAAVQMHDVLVKAWAMWGDYLENIFVKERQLHLGVSAITCYLHACRHQNESKSRKYLAKVLWLLSFDDDKNTLADAVDKYCIGVPPIQWLAWIPQLLTCLVGSEGKLLLNLISQVGRVYPQAVYFPIRTLYLTLKIEQRERYKSDSGQQQPSSVGNQSHSASDPGPIRATAPMWRCSRIMHMQRELHPTLLSSLEGIVDQMVWFRENWHEEVLRQLQQGLAKCYSVAFEKSGAVSDAKITPHTLNFVKKLVSTFGVGLENVSNVSTMFSSAASESLARRAQATAQDPVFQKLKGQFTTDFDFSVPGSMKLHNLISKLKKWIKILEAKTKQLPKFFLIEEKCRFLSNFSAQTAEVEIPGEFLMPKPTHYYIKIARFMPRVEIVQKHNTAARRLYIRGHNGKIYPYLVMNDACLTESRREERVLQLLRLLNPCLEKRKETTKRHLFFTVPRVVAVSPQMRLVEDNPSSLSLVEIYKQRCAKKGIEHDNPISRYYDRLATVQARGTQASHQVLRDILKEVQSNMVPRSMLKEWALHTFPNATDYWTFRKMFTIQLALIGFAEFVLHLNRLNPEMLQIAQDTGKLNVAYFRFDINDATGDLDANRPVPFRLTPNISEFLTTIGVSGPLTASMIAVARCFAQPNFKVDGILKTVLRDEIIAWHKKTQEDTSSPLSAAGQPENMDSQQLVSLVQKAVTAIMTRLHNLAQFEGGESKVNTLVAAANSLDNLCRMDPAWHPWL

SEQ ID NO: 25147 - protein, 334 aa, Homo sapiens
MRIPVDPSTSRRFSPPSSSLQPGKMSDVSPVVAAQQQQQQQQQQQQQQQQQQQQQQQEAAAAAAAAAAAAAAAAAVPRLRPPHDNRTMVEIIADHPAELVRTDSPNFLCSVLPSHWRCNKTLPVAFKVVALGEVPDGTVVTVMAGNDENYSAELRNASAVMKNQVARFNDLRFVGRSGRGKSFTLTITVFTNPPQVATYHRAIKVTVDGPREPRRHRQKLDDSKPSLFSDRLSDLGRIPHPSMRVGVPPQNPRPSLNSAPSPFNPQGQSQITDPRQAQSSPPWSYDQSYPSYLSQMTSPSIHSTTPLSSTRGTGLPAITDVPRRISARSRYSLR

SEQ ID NO: 25148 - protein, 236 aa, Homo sapiens
MDFRTACEETKTGICLLQDGNQEPFKVRLHLAKDILMIQEQDVICVSGEPFYSGERTVTIRRQTVGGFGLSIKGGAEHNIPVVVSKISKEQRAELSGLLFIGDAILQINGINVRKCRHEEVVQVLRNAGEEVTLTVSFLKRAPAFLKLPLNEDCACAPSDQSSGTSSPLCDSGLHLNYHPNNTDTLSCSSWPTSPGLRWEKRWCDLRLIPLLHSRFSQYVPGTDLSRLKKSTETFL

SEQ ID NO: 25149 - protein, 757 aa, Homo sapiens
MALLAMHSWRWAAAAAAFEKRRHSAILIRPLVSVSGSGPQWRPHQLGALGTARAYQQIPESLKSITWQRLGKGNSGQFLDAAKMNKKALQVWPLIEKRTCWHGHAGGGLHTDPKEGLKDVDTRKIIKAMLSYVWPKDRPDLRARVAISLGFLGGAKAMNIVVPFMFKYAVDSLNQMSGNMLNLSDAPNTVATMATAVLIGYGVSRAGAAFFNEVRNAVFGKVAQNSIRRIAKNVFLHLHNLDLGFHLSRQTGALSKAIDRGTRGISFVLSALVFNLLPIMFEVMLVSGVLYYKCGAQFALVTLGTLGTYTAFTVAVTRWRTRFRIEMNKADNDAGNAAIDSLLNYETVKYFNNERYEAQRYDGFLKTYETASLKSTSTLAMLNFGQSAIFSVGLTAIMVLASQGIVAGTLTVGDLVMVNGLLFQLSLPLNFLGTVYRETRQALIDMNTLFTLLKVDTQIKDKVMASPLQITPQTATVAFDNVHFEYIEGQKVLSGISFEVPAGKKVAIVGGSGSGKSTIVRLLFRFYEPQKGSIYLAGQNIQDVSLESLRRAVGVVPQDAVLFHNTIYYNLLYGNISASPEEVYAVAKLAGLHDAILRMPHGYDTQVGERGLKLSGGEKQRVAIARAILKDPPVILYDEATSSLDSITEETILGAMKDVVKHRTSIFIAHRLSTVVDADEIIVLDQGKVAERGTHHGLLANPHSIYSEMWHTQSSRVQNHDNPKWEAKKENISKEEERKKLQEEIVNSVKGCGNCSC

SEQ ID NO: 25150 - protein, 744 aa, Homo sapiens
MYAFYSLLIYIFYSLFRRDGGAAAAAEPGDPAQRARKPRGRRRPDLPAPELWTELTGLAASSEPEDGSEGAAEGRAAAVSLEEALLRLAEFLSVQLGAEESCGGPADLGQSGEVPSLLTVTSQLLALLAWLRSPRGRQALLQGTQPAPRVRPPSPDGSTSQEESPSHFTAVPGEPLGDETQGQQPLQLEEDQRAWQRLEQLILGQLEELKQQLEQQEEELGRLRLGVGATDSEKRVQHLTLENEALKQSLSLMRDLLLHWGPGPPIRAPQEEAEALLELQGRLQEAQDTTEALRAQLQQETEQNCRRELQQMHGQLAGLRARMASLRQGCGDLRGLVSTFTQSCQGSLSEARGQVSWALGALSSGGPGTQLPEGQQGPPAGCPGRLPELKGNIRVLCRLRPGTSSSLVSVEPGPGGTVTTCYRGRHRRFRLDWVFPPDASQEEVFRELEPAVLSCLRGYSVCIFTYGQTGTGKTYSMEGPPEDPGIVPRALQSLFREMGAGRQHRVTLSMVEIYNEAVRDLLAPGPPERLAVRQGPEGQGGIQVAGLTHWDVPNLETLHQMLKLGRSNRATAATAMNQRSSRSHALVTLTLRAASPPRAPGTAGTLHLVDLAGSERARKAGAAGPPRGDPDGARRLREAQTINRSLLALGGVMAALRAHRPHVPFRDSQLTRLLQPALGPGTTAVLLLQISTRPEDLGETVCSLKFADRVGQVELGPARRRRVPRSSGTPSSLSTDTPLTGTPC

SEQ ID NO: 25151 - protein, 1899 aa, Homo sapiens
MASGLGSPSPCSAGSEEEDMDALLNNSLPPPHPENEEDPEEDLSETETPKLKKKKKPKKPRDPKIPKSKRQKKERMLLCRQLGDSSGEGPEFVEEEEEVALRSDSEGSDYTPGKKKKKKLGPKKEKKSKSKRKEEEEEEDDDDDSKEPKSSAQLLEDWGMEDIDHVFSEEDYRTLTNYKAFSQFVRPLIAAKNPKIAVSKMMMVLGAKWREFSTNNPFKGSSGASVAAAAAAAVAVVESMVTATEVAPPPPPVEVPIRKAKTKEGKGPNARRKPKGSPRVPDAKKPKPKKVAPLKIKLGGFGSKRKRSSSEDDDLDVESDFDDASINSYSVSDGSTSRSSRSRKKLRTTKKKKKDHQDYCEVCQQGGEIILCDTCPRAYHMVCLDPDMEKAPEGKWSCPHCEKEGIQWEAKEDNSEGEEILEEVGGDLEEEDDHHMEFCRVCKDGGELLCCDTCPSSYHIHCLNPPLPEIPNGEWLCPRCTCPALKGKVQKILIWKWGQPPSPTPVPRPPDADPNTPSPKPLEGRPERQFFVKWQGMSYWHCSWVSELQLELHCQVMFRNYQRKNDMDEPPSGDFGGDEEKSRKRKNKDPKFAEMEERFYRYGIKPEWMMIHRILNHSVDKKGHVHYLIKWRDLPYDQASWESEDVEIQDYDLFKQSYWNHRELMRGEEGRPGKKLKKVKLRKLERPPETPTVDPTVKYERQPEYLDATGGTLHPYQMEGLNWLRFSWAQGTDTILADEMGLGKTVQTAVFLYSLYKEGHSKGPFLVSAPLSTIINWEREFEMWAPDMYVVTYVGDKDSRAIIRENEFSFEDNAIRGGKKASRMKKEASVKFHVLLTSYELITIDMAILGSIDWACLIVDEAHRLKNNQSKFFRVLNGYSLQHKLLLTGTPLQNNLEELFHLLNFLTPERFHNLEGFLEEFADIAKEDQIKKLHDMLGPHMLRRLKADVFKNMPSKTELIVRVELSPMQKKYYKYILTRNFEALNARGGGNQVSLLNVVMDLKKCCNHPYLFPVAAMEAPKMPNGMYDGSALIRASGKLLLLQKMLKNLKEGGHRVLIFSQMTKMLDLLEDFLEHEGYKYERIDGGITGNMRQEAIDRFNAPGAQQFCFLLSTRAGGLGINLATADTVIIYDSDWNPHNDIQAFSRAHRIGQNKKVMIYRFVTRASVEERITQVAKKKMMLTHLVVRPGLGSKTGSMSKQELDDILKFGTEELFKDEATDGGGDNKEGEDSSVIHYDDKAIERLLDRNQDETEDTELQGMNEYLSSFKVAQYVVREEEMGEEEEVEREIIKQEESVDPDYWEKLLRHHYEQQQEDLARNLGKGKRIRKQVNYNDGSQEDRDWQDDQSDNQSDYSVASEEGDEDFDERSEAPRRPSRKGLRNDKDKPLPPLLARVGGNIEVLGFNARQRKAFLNAIMRYGMPPQDAFTTQWLVRDLRGKSEKEFKAYVSLFMRHLCEPGADGAETFADGVPREGLSRQHVLTRIGVMSLIRKKVQEFEHVNGRWSMPELAEVEENKKMSQPGSPSPKTPTPSTPGDTQPNTPAPVPPAEDGIKIEENSLKEEESIEGEKEVKSTAPETAIECTQAPAPASEDEKVVVEPPEGEEKVEKAEVKERTEEPMETEPKGAADVEKVEEKSAIDLTPIVVEDKEEKKEEEEKKEVMLQNGETPKDLNDEKQKKNIKQRFMFNIADGGFTELHSLWQNEERAATVTKKTYEIWHRRHDYWLLAGIINHGYARWQDIQNDPRYAILNEPFKGEMNRGNFLEIKNKFLARRFKLLEQALVIEEQLRRAAYLNMSEDPSHPSMALNTRFAEVECLAESHQHLSKESMAGNKPANAVLHKVLKQLEELLSDMKADVTRLPATIARIPPVAVRLQMSERNILSRLANRAPEPTPQQVAQQQ

SEQ ID NO: 25152 - protein, 298 aa, Homo sapiens
SQLKGNLEEENRHLLDQIQTLMLQNRTLLEQNMESKDLFHVEQRQYIDKLNELRRQKEKLEEKIMDQYKFYDPSPPRRRGNWITLKMRKLIKSKKDINRERQKSLTLTPTRSDSSEGFLQLPHQDSQDSSSVGSNSLEDGQTLGTKKSSMVALKRLPFLRNRPKDKDKMKACYRRSMSMNDLVQSMVLAGQWTGSTENLEVPDDISTGKRRKELGAMAFSTTAINFSTVNSSAGFRSKQLVNNKDTTSFEDISPQGVSDDSSTGSRVHASRPASLDSGRTSTSNSNNNASLHEVKGML

SEQ ID NO: 25153 - protein, 458 aa, Homo sapiens
MQLPRWWELGDPCAWTGQGRGTRRMSPATTGTFLLTVYSIFSKVHSDRNVYPSAGVLFVHVLEREYFKGEFPPYPKPGEISNDPITFNTNLMGYPDRPGWLRYIQRTPYSDGVLYGSPTAENVGKPTIIEITAYNRRTFETARHNLIINIMSAEDFPLPYQAEFFIKNMNVEEMLASEVLGDFLGAVKNVWQPERLNAINITSALDRGGRVPLPINDLKEGVYVMVGADVPFSSCLREVENPQNQLRCSQEMEPVITCDKKFRTQFYIDWCKISLVDKTKQVSTYQEVIRGEGILPDGGEYKPPSDSLKSRDYYTDFLITLAVPSAVALVLFLILAYIMCCRREGVIQLVHHSAIQKSTKELRDMSKNREIAWPLSTLPVFHPVTGEIIPPLHTDNYDSTNMPLMQTQQNLPHQTQIPQQQTTGDFRLTTFQRFEASIMKLFIRFQLQDVYQNFSLQF

SEQ ID NO: 25154 - protein, 658 aa, Homo sapiens
HLLFGKVNNIPSQSTRHSTVATECLSKNTEENLLSLKNSLNDCSNQVILAKASQEHHLSEETKCSASLFSSQCSELEDLTANTNTQDPFLIGSSKQMRHQSESQGVGLSDKELVSDDEERGTGLEENNQEEQSMDSNLGEAASGCESETSVSEDCSGLSSQSDILTTQQRDTMQHNLIKLQQEMAELEAVLEQHGSQPSNSYPSIISDSSALEDLRNPEQSTSEKDSHIHGQRNNSMFSKRPREHISAVLTSQKSSEYPISQNPEGLSADKFEVSADSSTSKNKEPGVERSSPSKCPSLDDRWYMHSCSGSLQNRNYPSQEELIKVVDVEEQQLEESGPHDLTETSYLPRQDLEGTPYLESGISLFSDDPESDPSEDRAPESARVGNIPSSTSALKVPQLKVAESAQSPAAAHTTDTAGYNAMEESVSREKPELTASTERVNKRMSMVVSGLTPEEFMLVYKFARKHHITLTNLITEETTHVVMKTDAEFVCERTLKYFLGIAGGKWVVSYFWVTQSIKERKMLNEHDFEVRGDVVNGRNHQGPKRARESQDRKIFRGLEICCYGPFTNMPTDQLEWMVQLCGASVVKELSSFTLGTGVHPIVVVQPDAWTEDNGFHAIGQMCEAPVVTREWVLDSVALYQCQELDTYLIPQIPHSHY

SEQ ID NO: 25155 - protein, 681 aa, Homo sapiens
MALIMEPVSKWSPSQVVDWMKGLDDCLQQYIKNFEREKISGDQLLRITHQELEDLGVSRIGHQELILEAVDLLCALNYGLETENLKTLSHKLNASAKNLQNFITGRRRSGHYDGRTSRKLPNDFLTSVVDLIGAAKSLLAWLDRSPFAAVTDYSVTRNNVIQLCLELTTIVQQDCTVYETENKILHVCKTLSGVCDHIISLSSDPLVSQSAHLEVIQLANIKPSEGLGMYIKSTYDGLHVITGTTENSPADRCKKIHAGDEVIQVNHQTVVGWQLKNLVNALREDPSGVILTLKKRPQSMLTSAPALLKNMRWKPLALQTFQQSSLQHKSKKKNKGPIAGKSKRRISCKDLGRGDCEGWLWKKKDAKSYFSQKWKKYWFVLKDASLYWYINEEDEKAEGFISLPEFKIDRASECRKKYAFKACHPKIKSFYFAAEHLDDMNRWLNRINMLTAGYAERERIKQEQDYWSESDKEEADTPSTPKQDSPPPPYDTYPRPPSMSCASPYVEAKHSRLSSTETSQSQSSHEEFRQEVTGSSAVSPIRKTASQRRSWQDLIETPLTSSGLHYLQTLPLEDSVFSDSAAISPEHRRQSTLPTQKCHLQDHYGPYPLAESERMQVLNGNGGKPRSFTLPRDSGFNHCCLNAPVSACDPQDDVQPPEVEEEEEEEEEEGEAAGENIGEKS

SEQ ID NO: 25156 - protein, 1112 aa, Homo sapiens
GLDIENQRLQKTLENSNKKIQQLESELQDLEMENQTLQKNLEELKISSKRLEQLEKENKSLEQETSQLEKDKKQLEKENKRLRQQAEIKDTTLEENNVKIGNLEKENKTLSKEIGIYKESCVRLKELEKENKELVKRATIDIKTLVTLREDLVSEKLKTQQMNNDLEKLTHELEKIGLNKERLLHDEQSTDDSRYKLLESKLESTLKKSLEIKEEKIAALEARLEESTNYNQQLRQELKTVKKNYEALKQRQDEERMVQSSPPISGEDNKWERESQETTRELLKVKDRLIEVERNNATLQAEKQALKTQLKQLETQNNNLQAQILALQRQTVSLQEQNTTLQTQNAKLQVENSTLNSQSTSLMNQNAQLLIQQSSLENENESVIKEREDLKSLYDSLIKDHEKLELLHERQASEYESLISKHGTLKSAHKNLEVEHRDLEDRYNQLLKQKGQLEDLEKMLKVEQEKMLLENKNHETVAAEYKKLCGENDRLNHTYSQLLKETEVLQTDHKNLKSLLNNSKLEQTRLEAEFSKLKEQYQQLDITSTKLNNQCELLSQLKGNLEEENRHLLDQIQTLMLQNRTLLEQNMESKDLFHVEQRQYIDKLNELRRQKEKLEEKIMDQYKFYDPSPPRRRGNWITLKMRKLIKSKKDINRERQKSLTLTPTRSDSSEGFLQLPHQDSQDSSSVGSNSLEDGQTLGTKKSSMVALKRLPFLRNRPKDKDKMKACYRRSMSMNDLVQSMVLAGQWTGSTENLEVPDDISTGKRRKELGAMAFSTTAINFSTVNSSAGFRSKQLVNNKDTTSFEDISPQGVSDDSSTGSRVHASRPASLDSGRTSTSNSNNNASLHEVKAGAVNNQSRPQSHSSGEFSLLHDHEAWSSSGSSPIQYLKRQTRSSPVLQHKISETLESRHHKIKTGSPGSEVVTLQQFLEESNKLTSVQIKSSSQENLLDEVMKSLSVSSDFLGKDKPVSCGLARSVSGKTPGDFYDRRTTKPEFLRPGPRKTEDTYFISSAGKPTPGTQGKIKLVKESSLSRQSKDSNPYATLPRASSVISTAEGTTRRTSIHDFLTKDSRLPISVDSPPAAADSNTTAASNVDKVQESRNSKSRSREQQSS

SEQ ID NO: 25157 - protein, 186 aa, Homo sapiens
LSDAATKQEGMEGLLGTLVQLLGSDDINVVTCAAGILSNLTCNNYKNKMMVCQVGGIEALVRTVLRAGDREDITEPAICALRHLTSRHQEAEMAQNAVRLHYGLPVVVKLLHPPSHWPLIKATVGLIRNLALCPANHAPLREQGAIPRLVQLLVRAHQDTQRRTSMGGTQQQFVLLYSPIENIQRV

SEQ ID NO: 25158 - protein, 1134 aa, Homo sapiens
ESLKCASMKMAQLQLENKELESEKEQLKKGLELLKASFKKTERLEVSYQGLDIENQRLQKTLENSNKKIQQLESELQDLEMENQTLQKNLEELKISSKRLEQLEKENKSLEQETSQLEKDKKQLEKENKRLRQQAEIKDTTLEENNVKIGNLEKENKTLSKEIGIYKESCVRLKELEKENKELVKRATIDIKTLVTLREDLVSEKLKTQQMNNDLEKLTHELEKIGLNKERLLHDEQSTDDSRYKLLESKLESTLKKSLEIKEEKIAALEARLEESTNYNQQLRQELKTVKKNYEALKQRQDEERMVQSSPPISGEDNKWERESQETTRELLKVKDRLIEVERNNATLQAEKQALKTQLKQLETQNNNLQAQILALQRQTVSLQEQNTTLQTQNAKLQVENSTLNSQSTSLMNQNAQLLIQQSSLENENESVIKEREDLKSLYDSLIKDHEKLELLHERQASEYESLISKHGTLKSAHKNLEVEHRDLEDRYNQLLKQKGQLEDLEKMLKVEQEKMLLENKNHETVAAEYKKLCGENDRLNHTYSQLLKETEVLQTDHKNLKSLLNNSKLEQTRLEAEFSKLKEQYQQLDITSTKLNNQCELLSQLKGNLEEENRHLLDQIQTLMLQNRTLLEQNMESKDLFHVEQRQYIDKLNELRRQKEKLEEKIMDQYKFYDPSPPRRRGNWITLKMRKLIKSKKDINRERQKSLTLTPTRSDSSEGFLQLPHQDSQDSSSVGSNSLEDGQTLGTKKSSMVALKRLPFLRNRPKDKDKMKACYRRSMSMNDLVQSMVLAGQWTGSTENLEVPDDISTGKRRKELGAMAFSTTAINFSTVNSSAGFRSKQLVNNKDTTSFEDISPQGVSDDSSTGSRVHAGAVNNQSRPQSHSSGEFSLLHDHEAWSSSGSSPIQYLKRQTRSSPVLQHKISETLESRHHKIKTGSPGSEVVTLQQFLEESNKLTSVQIKSSSQENLLDEVMKSLSVSSDFLGKDKPVSCGLARSVSGKTPGDFYDRRTTKPEFLRPGPRKTEDTYFISSAGKPTPGTQGKIKLVKESSLSRQSKDSNPYATLPRASSVISTAEGTTRRTSIHDFLTKDSRLPISVDSPPAAADSNTTAASNVDKVQESRNSKSRSREQQSS

SEQ ID NO: 25159 - protein, 1104 aa, Homo sapiens
MSLHAWEWEEDPASIEPISSITSFYQSTSECDVEEHLKAKARAQESDSDRPCSSIESSSEPASTFSSDVPHVVPCKFTISLAFPVNMGQKGKYASLIEKYKKHPKTDSSVTKMRRFYHIEYFLLPDDEEPKKVDILLFPMVAKVFLESGVKTVKPWHEGDKAWVSWEQTFNITVTKELLKKINFHKITLRLWNTKDKMSRKVRYYRLKTAGFTDDVGAFHKSEVRHLVLNQRKLSEQGIENTNIVREESNQEHPPGKQEKTEKHPKSLQGSHQAEPETSSKNSEEYEKSLKMDDSSTIQWSVSRTPTISLAGASMMEIKELIESESLSSLTNILDRQRSQIKGKDSEGRRKIQRRHKKPLAEEEADPTLTGPRKQSAFSIQLAVMPLLAGWQTVVSRGSEKSANILDCLLTLKTEVPIMTEEQKQDLNPLTIKIKCASCLPSQPVPIQELERLCMPVYCKYQFHKTPVHKTKGEPHGTHVYFQDINVIFLGALHPSDLREYLEGPPMVVEVHDRDRKSEECSQKPVLFGEDPLDSYLNFQALISPRETENNPFESQNKMWYPYGIAQVSFADLLLGHKYLNLAVPIHSCEVQPTHCGQDSRRRKVVGLGVPRDGHQHGPMPRGNYLEADSQLKLRVDIAVPLRAGARAADPDLGGSQFGRIIFVFDFKKVSLLHSLLQDITMINAKALGLDSYPVRTLQQILSAFKVRVRVQEQQHLDVLTGFHLLDGKTHLFILEGLADQGLRQLWENHQSWIPRSEHRKYKVLYNSQLLFRSRLYGDLEAILYHVHLFQPTELLLQQAVFFLRDTERRRVFQALARIHDICYNSTTLWDVTVRDLLPSSAMIKDLSQEFGMPLSQEELTDEKLFALPPQPAPNLEDYHSRNSTLTLEIHAHQEKYLQWRSAMLMKNKDKKHSFIQKNITEAYQVSKKPPKSVAKVIKISAPANKAVYNYSTQTMNSTELAKKELYQEIAKEPRKRFTYSQDYLSAMVEPLDLKEEEKKAQKKSRQAWLTARGFQVTGLQSDTESSFQDLKLPPIKELNEEWKENSLFANVLEPVLDRDRWSWDRHHVDFDLYKKPPPFLELLPSPAPKPVTVRKKKGNSPIS

SEQ ID NO: 25160 - protein, 854 aa, Homo sapiens
MALEQALQAARQGELDVLRSLHAAGLLGPSLRDPLDALPVHHAARAGKLHCLRFLVEEAALPAAARARNGATPAHDASATGHLACLQWLLSQGGCRVQDKDNSGATVLHLAARFGHPEVVNWLLHHGGGDPTAATDMGALPIHYAAAKGDFPSLRLLVEHYPEGVNAQTKNGATPLYLACQEGHLEVTQYLVQECGADPHARAHDGMTPLHAAAQMGHSPVIVWLVSCTDVSLSEQDKDGATAMHFAASRGHTKVLSWLLLHGGEISADLWGGTPLHDAAENGELECCQILVVNGAELDVRDRDGYTAADLSDFNGHSHCTRYLRTVENLSVEHRVLSRDPSAELEAKQPDSGMSSPNTTVSVQPLNFDLSSPTSTLSNYDSCSSSHSSIKGQHPPCGLSSARAADIQSYMDMLNPELGLPRGTIGKPTPPPPPPSFPPPPPPPGTQLPPPPPGYPAPKPPVGPQAADIYMQTKNKLRHVETEALKKELSSCDGHDGLRRQDSSRKPRAFSKQPSTGDYYRQLGRCPGETLAARPGMAHSEEVRARQPARAGCPRLGPAARGSLEGPSAPPQAALLPGNHVPNGCAADPKASRELPPPPPPPPPPLPEAASSPPPAPPLPLESAGPGCGQRRSSSSTGSTKSFNMMSPTGDNSELLAEIKAGKSLKPTPQSKGLTTVFSGIGQPAFQPDSPLPSVSPALSPVRSPTPPAAGFQPLLNGSLVPVPPTTPAPGVQLDVEALIPTHDEQGRPIPEWKRQVMVRKMQLKMQEEEEQRRKEEEEEARLASMPAWRRDLLRKKLEEEREQKRKEEERQKQEELRREKEQSEKLRTLGYDESKLAPWQRQVILKKGDIAKY

SEQ ID NO: 25161 - protein, 883 aa, Homo sapiens
MHKDEFHLKFFMCVIQSRQLVRTPQRTAGEASTSSMLIPKPPPKTDILKSLDTMDDPDTVGSIPVFKTECAEVEIQVSKRKRAVVKARGDPTVETMKQREEWIMTHEEHHAAKTLGIGKAIAVLTSGGDAQGMNAAVRAVVRVGIFTGARVFFVHEGYQGLVDGGDHIKEATWESVSMMLQLGGTVIGSARCKDFREREGRLRAAYNLVKRGITNLCVIGGDGSLTGADTFRSEWSDLLSDLQKAGKITDEEATKSSYLNIVGLVGSIDNDFCGTDMTIGTDSALHRIMEIVDAITTTAQSHQRTFVLEVMGRHCGYLALVTSLSCGADWVFIPECPPDDDWEEHLCRRLSETRTRGSRLNIIIVAEGAIDKNGKPITSEDIKNLVVKRLGYDTRVTVLGHVQRGGTPSAFDRILGSRMGVEAVMALLEGTPDTPACVVSLSGNQAVRLPLMECVQVTKDVTKAMDEKKFDEALKLRGRSFMNNWEVYKLLAHVRPPVSKSGSHTVAVMNVGAPAAGMNAAVRSTVRIGLIQGNRVLVVHDGFEGLAKGQIEEAGWSYVGGWTGQGGSKLGTKRTLPKKSFEQISANITKFNIQGLVIIGGFEAYTGGLELMEGRKQFDELCIPFVVIPATVSNNVPGSDFSVGADTALNTICTTCDRIKQSAAGTKRRVFIIETMGGYCGYLATMAGLAAGADAAYIFEEPFTIRDLQANVEHLVQKMKTTVKRGLVLRNEKCNENYTTDFIFNLYSEEGKGIFDSRKNVLGHMQQGGSPTPFDRNFATKMGAKAMNWMSGKIKESYRNGRIFANTPDSGCVLGMRKRALVFQPVAELKDQTDFEHRIPKEQWWLKLRPILKILAKYEIDLDTSDHAHLEHITRKRSGEAAV

SEQ ID NO: 25162 - protein, 811 aa, Homo sapiens
MREAAERRQQLQLEHDQALAVLSAKQQEIDLLQKAQVEAKKEHEGAVRLLENTLDSMQSKVRELEEKCRTQSEQFNLLSRDLEKFRQHAGKIDLLGGSAVAPLDISTAPSKPFPQFMNGLATSLGKGQESAIGGSSAIGEYIRPLPQPGDRPEPLSAKPTFLSRSGSARCRSESDMENERNSNTSKQRYSGKVHLCVARYSYNPFDGPNENPEAELPLTAGKYLYVYGDMDEDGFYEGELLDGQRGLVPSNFVDFVQDNESRLASTLGNEQDQNFINHSGIGLEGEHILDLHSPTHIDAGITDNSAGTLDVNIDDIGEDIVPYPRKITLIKQLAKSVIVGWEPPAVPPGWGTVSSYNVLVDKETRMNLTLGSRTKALIEKLNMAACTYRISVQCVTSRGSSDELQCTLLVGKDVVVAPSHLRVDNITQISAQLSWLPTNSNYSHVIFLNEEEFDIVKAARYKYQFFNLRPNMAYKVKVLAKPHQMPWQLPLEQREKKEAFVEFSTLPAGPPAPPQDVTVQAGVTPATIRVSWRPPVLTPTGLSNGANVTGYGVYAKGQRVAEVIFPTADSTAVELVRLRSLEAKGVTVRTLSAQGESVDSAVAAVPPELLVPPTPHPRPAPQSKPLASSGVPETKDEHLGPHARMDEAWEQSRAPGPVHGHMLEPPVGPGRRSPSPSRILPQPQGTPVSTTVAKAMAREAAQRVAESSRLEKRSVFLERSSAGQYAASDEEDAYDSPDFKRRGASVDDFLKGSELGKQPHCCHGDEYHTESSRGSDLSDIMEEDEEELYSEMQLEDGGRRRPSGTSHNALK

SEQ ID NO: 25163 - protein, 1769 aa, Homo sapiens
MAKPTSKDSGLKEKFKILLGLGTPRPNPRSAEGKQTEFIITAEILRELSMECGLNNRIRMIGQICEVAKTKKFEEHAVEALWKAVADLLQPERPLEARHAVLALLKAIVQGQGERLGVLRALFFKVIKDYPSNEDLHERLEVFKALTDNGRHITYLEEELADFVLQWMDVGLSSEFLLVLVNLVKFNSCYLDEYIARMVQMICLLCVRTASSVDIEVSLQVLDAVVCYNCLPAESLPLFIVTLCRTINVKELCEPCWKLMRNLLGTHLGHSAIYNMCHLMEDRAYMEDAPLLRGAVFFVGMALWGAHRLYSLRNSPTSVLPSFYQAMACPNEVVSYEIVLSITRLIKKYRKELQVVAWDILLNIIERLLQQLQTLDSPELRTIVHDLLTTVEELCDQNEFHGSQERYFELVERCADQRPESSLLNLISYRAQSIHPAKDGWIQNLQALMERFFRSESRGAVRIKVLDVLSFVLLINRQFYEEELINSVVISQLSHIPEDKDHQVRKLATQLLVDLAEGCHTHHFNSLLDIIEKVMARSLSPPPELEERDVAAYSASLEDVKTAVLGLLVILQTKLYTLPASHATRVYEMLVSHIQLHYKHSYTLPIASSIRLQAFDFLLLLRADSLHRLGLPNKDGVVRFSPYCVCDYMEPERGSEKKTSGPLSPPTGPPGPAPAGPAVRLGSVPYSLLFRVLLQCLKQESDWKVLKLVLGRLPESLRYKVLIFTSPCSVDQLCSALCSMLSGPKTLERLRGAPEGFSRTDLHLAVVPVLTALISYHNYLDKTKQREMVYCLEQGLIHRCASQCVVALSICSVEMPDIIIKALPVLVVKLTHISATASMAVPLLEFLSTLARLPHLYRNFAAEQYASVFAISLPYTNPSKFNQYIVCLAHHVIAMWFIRCRLPFRKDFVPFITKGLRSNVLLSFDDTPEKDSFRARSTSLNERPKRIQTSLTSASLGSADENSVAQADDSLKNLHLELTETCLDMMARYVFSNFTAVPKRSPVGEFLLAGGRTKTWLVGNKLVTVTTSVGTGTRSLLGLDSGELQSGPESSSSPGVHVRQTKEAPAKLESQAGQQVSRGARDRVRSMSGGHGLRVGALDVPASQFLGSATSPGPRTAPAAKPEKASAGTRVPVQEKTNLAAYVPLLTQGWAEILVRRPTGNTSWLMSLENPLSPFSSDINNMPLQELSNALMAAERFKEHRDTALYKSLSVPAASTAKPPPLPRSNTDSAVVMEEGSPGEVPVLVEPPGLEDVEAALGMDRRTDAYSRSSSVSSQEEKSLHAEELVGRGIPIERVVSSEGGRPSVDLSFQPSQPLSKSSSSPELQTLQDILGDPGDKADVGRLSPEVKARSQSGTLDGESAAWSASGEDSRGQPEGPLPSSSPRSPSGLRPRGYTISDSAPSRRGKRVERDALKSRATASNAEKVPGINPSFVFLQLYHSPFFGDESNKPILLPNESQSFERSVQLLDQIPSYDTHKIAVLYVGEGQSNSELAILSNEHGSYRYTEFLTGLGRLIELKDCQPDKVYLGGLDVCGEDGQFTYCWHDDIMQAVFHIATLMPTKDVDKHRCDKKRHLGNDFVSIVYNDSGEDFKLGTIKGQFNFVHVIVTPLDYECNLVSLQCRKDMEGLVDTSVAKIVSDRNLPFVARQMALHANVSGGGSRRELVGQAQVPPDSELTPCLRPQMASQVHHSRSNPTDIYPSKWIARLRHIKRLRQRICEEAAYSNPSLPLVHPPSHSKAPAQTPAEPTPGYEVGQRKRLISSVEDFTEFV

SEQ ID NO: 25164 - protein, 495 aa, Homo sapiens
MLLLGLLLLLPLLAGARLLWNWWKLRSLHLPPLAPGFLHLLQPDLPIYLLGLTQKFGPIYRLHLGLQDVVVLNSKRTIEEAMVKKWADFAGRPEPLTYKLVSRNYPDLSLGDYSLLWKAHKKLTRSALLLGIRDSMEPVVEQLTQEFCERMRAQPGTPVAIEEEFSLLTCSIICYLTFGDKIKDDNLMPAYYKCIQEVLKTWSHWSIQIVDVIPFLRFFPNPGLRRLKQAIEKRDHIVEMQLRQHKESLVAGQWRDMMDYMLQGVAQPSMEEGSGQLLEGHVHMAAVDLLIGGTETTANTLSWAVVFLLHHPEIQQRLQEELDHELGPGASSSRVPYKDRARLPLLNATIAEVLRLRPVVPLALPHRTTRPSSISGYDIPEGTVIIPNLQGAHLDETVWERPHEFWPDRFLEPGKNSRALAFGCGARVCLGEPLARLELFVVLTRLLQAFTLLPSGDALPSLQPLPHCSVILKMQPFQVRLQPRGMGAHSPGQSQ

SEQ ID NO: 25165 - protein, 1056 aa, Homo sapiens
MAVLKLTDQPPLVQAIFSGDPEEIRMLIHKTEDVNTLDSEKRTPLHVAAFLGDAEIIELLILSGARVNAKDNMWLTPLHRAVASRSEEAVQVLIKHSADVNARDKNWQTPLHVAAANKAVKCAEVIIPLLSSVNVSDRGGRTALHHAALNGHVEMVNLLLAKGANINAFDKKDRRALHWAAYMGHLDVVALLINHGAEVTCKDKKGYTPLHAAASNGQINVVKHLLNLGVEIDEINVYGNTALHIACYNGQDAVVNELIDYGANVNQPNNNGFTPLHFAAASTHGALCLELLVNNGADVNIQSKDGKSPLHMTAVHGRFTRSQTLIQNGGEIDCVDKDGNTPLHVAARYGHELLINTLITSGADTAKCGIHSMFPLHLAALNAHSDCCRKLLSSGFEIDTPDKFGRTCLHAAAAGGNVECIKLLQSSGADFHKKDKCGRTPLHYAAANCHFHCIETLVTTGANVNETDDWGRTALHYAAASDMDRNKTILGNAHDNSEELERARELKEKEATLCLEFLLQNDANPSIRDKEGYNSIHYAAAYGHRQCLELLLERTNSGFEESDSGATKSPLHLAAYNGHHQALEVLLQSLVDLDIRDEKGRTALDLAAFKGHTECVEALINQGASIFVKDNVTKRTPLHASVINGHTLCLRLLLEIADNPEAVDVKDAKGQTPLMLAVAYGHIDAVSLLLEKEANVDTVDILGCTALHRGIMTGHEECVQMLLEQEVSILCKDSRGRTPLHYAAARGHATWLSELLQMALSEEDCCFKDNQGYTPLHWACYNGNENCIEVLLEQKCFRKFIGNPFTPLHCAIINDHGNCASLLLGAIDSSIVSCRDDKGRTPLHAAAFADHVECLQLLLRHSAPVNAVDNSGKTALMMAAENGQAGAVDILVNSAQADLTVKDKDLNTPLHLACSKGHEKCALLILDKIQDESLINEKNNALQTPLHVAARNGLKVVVEELLAKGACVLAVDENGHTPALACAPNKDVADCLALILATMMPFSPSSTMMAVNFVCLKKDNLSRTTLSNLGSMVSLCSNNVGSEDGYNENDSDSETF

SEQ ID NO: 25166 - protein, 264 aa, Homo sapiens
DFELGISSKQKRKKTKTVKMIGVLTLFRYSDWQDKLFMSLGTIMAIAHGSGLPLMMIVFGEMTDKFVDTAGNFSFPVNFSLSLLNPGKILEEEMTRYAYYYSGLGAGVLVAAYIQVSFWTLAAGRQIRKIRQKFFHAILRQEIGWFDINDTTELNTRLTDDISKISEGIGDKVGMFFQAVATFFAGFIVGFIRGWKLTLVIMAISPILGLSAAVWAKILSAFSDKELAAYAKAGAVAEEALGAIRTVIAFGGQNKELESPHRPH

SEQ ID NO: 25167 - protein, 1207 aa, Homo sapiens
MRTTKVYKLVIHKKGFGGSDDELVVNPKVFPHIKLGDIVEIAHPNDEYSPLLLQVKSLKEDLQKETISVDQTVTQVFRLRPYQDVYVNVVDPKDVTLDLVELTFKDQYIGRGDMWRLKKSLVSTCAYITQKVEFAGIRAQAGELWVKNEKVMCGYISEDTRVVFRSTSAMVYIFIQMSCEMWDFDIYGDLYFEKAVNGFLADLFTKWKEKNCSHEVTVVLFSRTFYDAKSVDEFPEINRASIRQDHKGRFYEDFYKVVVQNERREEWTSLLVTIKKLFIQYPVLVRLEQAEGFPQGDNSTSAQGNYLEAINLSFNVFDKHYINRNFDRTGQMSVVITPGVGVFEVDRLLMILTKQRMIDNGIGVDLVCMGEQPLHAVPLFKLHNRSAPRDSRLGDDYNIPHWINHSFYTSKSQLFCNSFTPRIKLAGKKPASEKAKNGRDTSLGSPKESENALPIQVDYDAYDAQVFRLPGPSRAQCLTTCRSVRERESHSRKSASSCDVSSSPSLPSRTLPTEEVRSQASDDSSLGKSANILMIPHPHLHQYEVSSSLGYTSTRDVLENMMEPPQRDSSAPGRFHVGSAESMLHVRPGGYTPQRALINPFAPSRMPMKLTSNRRRWMHTFPVGMNPRTQNKDSLEDSVSTSPDPILTLSAPPVVPGFCCTVGVDWKSLTTPACLPLTTDYFPDRQGLQNDYTEGCYDLLPEADIDRRDEDGVQMTAQQVFEEFICQRLMQGYQIIVQPKTQKPNPAVPPPLSSSPLYSRGLVSRNRPEEEDQYWLSMGRTFHKVTLKDKMITVTRYLPKYPYESAQIHYTYSLCPSHSDSEFVSCWVEFSHERLEEYKWNYLDQYICSAGSEDFSLIESLKFWRTRFLLLPACVTATKRITEGEAHCDIYGDRPRADEDEWQLLDGFVRFVEGLNRIRRRHRSDRMMRKGTAMKGLQMTGPISTHSLESTAPPVGKKGTSALSALLEMEASQKCLGEQQAAVHGGKSSAQSAESSSVAMTPTYMDSPRKVSVDQTATPMLDGTSLGICTGQSMDRGNSQTFGNSQNIGEQGYSSTNSSDSSSQQLVASSLTSSSTLTEILEAMKHPSTGVQLLSEQKGLSPYCFISAEVVHWLVNHVEGIQTQAMAIDIMQWPCSSPPPPGTQQEWTTSPASSASGLRWPLWQKSSCTLRFLPFSCPGCLAGQPPMQVGTAPLAEVLEDGARRQHF

SEQ ID NO: 25168 - protein, 385 aa, Homo sapiens
MADVLSVLRQYNIQKKEIVVKGDEVIFGEFSWPKNVKTNYVVWGTGKEGQPREYYTLDSILFLLNNVHLSHPVYVRRAATENIPVVRRPDRKDLLGYLNGEASTSASIDRSAPLEIGLQRSTQVKRAADEVLAEAKKPRIEDEECVRLDKERLAARLEGHKEGIVQTEQIRSLSEAMSVEKIAAIKAKIMAKKRSTIKTDLDDDITALKQRSFVDAEVDVTRDIVSRERVWRTRTTILQSTGKNFSKNIFAILQSVKAREEGRAPEQRPAPNAAPVDPTLRTKQPIPAAYNRYDQERFKGKEETEGFKIDTMGTYHGMTLKSVTVFFLMDVSFSVVLLVFPASHVPLRVHLPGRLRLLQPSQYQDQFLKQDLPQIRRKDLEHPLS

SEQ ID NO: 25169 - protein, 1940 aa, Homo sapiens
MASGLGSPSPCSAGSEEEDMDALLNNSLPPPHPENEEDPEEDLSETETPKLKKKKKPKKPRDPKIPKSKRQKKERMLLCRQLGDSSGEGPEFVEEEEEVALRSDSEGSDYTPGKKKKKKLGPKKEKKSKSKRKEEEEEEDDDDDSKEPKSSAQLLEDWGMEDIDHVFSEEDYRTLTNYKAFSQFVRPLIAAKNPKIAVSKMMMVLGAKWREFSTNNPFKGSSGASVAAAAAAAVAVVESMVTATEVAPPPPPVEVPIRKAKTKEGKGPNARRKPKGSPRVPDAKKPKPKKVAPLKIKLGGFGSKRKRSSSEDDDLDVESDFDDASINSYSVSDGSTSRSSRSRKKLRTTKKKKKGEEEVTAVDGYETDHQDYCEVCQQGGEIILCDTCPRAYHMVCLDPDMEKAPEGKWSCPHCEKEGIQWEAKEDNSEGEEILEEVGGDLEEEDDHHMEFCRVCKDGGELLCCDTCPSSYHIHCLNPPLPEIPNGEWLCPRCTCPALKGKVQKILIWKWGQPPSPTPVPRPPDADPNTPSPKPLEGRPERQFFVKWQGMSYWHCSWVSELQLELHCQVMFRNYQRKNDMDEPPSGDFGGDEEKSRKRKNKDPKFAEMEERFYRYGIKPEWMMIHRILNHSVDKKGHVHYLIKWRDLPYDQASWESEDVEIQDYDLFKQSYWNHRELMRGEEGRPGKKLKKVKLRKLERPPETPTVDPTVKYERQPEYLDATGGTLHPYQMEGLNWLRFSWAQGTDTILADEMGLGKTVQTAVFLYSLYKEGHSKGPFLVSAPLSTIINWEREFEMWAPDMYVVTYVGDKDSRAIIRENEFSFEDNAIRGGKKASRMKKEASVKFHVLLTSYELITIDMAILGSIDWACLIVDEAHRLKNNQSKFFRVLNGYSLQHKLLLTGTPLQNNLEELFHLLNFLTPERFHNLEGFLEEFADIAKEDQIKKLHDMLGPHMLRRLKADVFKNMPSKTELIVRVELSPMQKKYYKYILTRNFEALNARGGGNQVSLLNVVMDLKKCCNHPYLFPVAAMEAPKMPNGMYDGSALIRASGKLLLLQKMLKNLKEGGHRVLIFSQMTKMLDLLEDFLEHEGYKYERIDGGITGNMRQEAIDRFNAPGAQQFCFLLSTRAGGLGINLATADTVIIYDSDWNPHNDIQAFSRAHRIGQNKKVMIYRFVTRASVEERITQVAKKKMMLTHLVVRPGLGSKTGSMSKQELDDILKFGTEELFKDEATDGGGDNKEGEDSSVIHYDDKAIERLLDRNQDETEDTELQGMNEYLSSFKVAQYVVREEEMGEEEEVEREIIKQEESVDPDYWEKLLRHHYEQQQEDLARNLGKGKRIRKQVNYNDGSQEDRGVCGRPRPPPMGRSTRAVGPAHLPSLPPDWQDDQSDNQSDYSVASEEGDEDFDERSEAPRRPSRKGLRNDKDKPLPPLLARVGGNIEVLGFNARQRKAFLNAIMRYGMPPQDAFTTQWLVRDLRGKSEKEFKAYVSLFMRHLCEPGADGAETFADGVPREGLSRQHVLTRIGVMSLIRKKVQEFEHVNGRWSMPELAEVEENKKMSQPGSPSPKTPTPSTPGDTQPNTPAPVPPAEDGIKIEENSLKEEESIEGEKEVKSTAPETAIECTQAPAPASEDEKVVVEPPEGEEKVEKAEVKERTEEPMETEPKGAADVEKVEEKSAIDLTPIVVEDKEEKKEEEEKKEVMLQNGETPKDLNDEKQKKNIKQRFMFNIADGGFTELHSLWQNEERAATVTKKTYEIWHRRHDYWLLAGIINHGYARWQDIQNDPRYAILNEPFKGEMNRGNFLEIKNKFLARRFKLLEQALVIEEQLRRAAYLNMSEDPSHPSMALNTRFAEVECLAESHQHLSKESMAGNKPANAVLHKVLKQLEELLSDMKADVTRLPATIARIPPVAVRLQMSERNILSRLANRAPEPTPQQVAQQQ

SEQ ID NO: 25170 - protein, 702 aa, Homo sapiens
MATQADLMELDMAMEPDRKAAVSHWQQQSYLDSGIHSGATTTAPSLSGKGNPEEEDVDTSQVLYEWEQGFSQSFTQEQVADIDGQYAMTRAQRVRAAMFPETLDEGMQIPSTQFDAAHPTNVQRLAEPSQMLKHAVVNLINYQDDAELATRAIPELTKLLNDEDQVVVNKAAVMVHQLSKKEASRHAIMRSPQMVSAIVRTMQNTNDVETARCTAGTLHNLSHHREGLLAIFKSGGIPALVKMLGSPVDSVLFYAITTLHNLLLHQEGAKMAVRLAGGLQKMVALLNKTNVKFLAITTDCLQILAYGNQESKLIILASGGPQALVNIMRTYTYEKLLWTTSRVLKVLSVCSSNKPAIVEAGGMQALGLHLTDPSQRLVQNCLWTLRNLSDAATKQEGMEGLLGTLVQLLGSDDINVVTCAAGILSNLTCNNYKNKMMVCQVGGIEALVRTVLRAGDREDITEPAICALRHLTSRHQEAEMAQNAVRLHYGLPVVVKLLHPPSHWPLIKATVGLIRNLALCPANHAPLREQGAIPRLVQLLVRAHQDTQRRTSMGGTQQQFVEGVRMEEIVEGCTGALHILARDVHNRIVIRGLNTIPLFVQLLYSPIENIQRVAAGVLCELAQDKEAAEAIEAEGATAPLTELLHSRNEGVATYAAAVLFRMSEDKPQDYKKRLSVELTSSLFRTEPMAWNEVGKCEQLFIW

SEQ ID NO: 25171 - protein, 1460 aa, Homo sapiens
MAANVGSMFQYWKRFDLQQLQRELDATATVLANRQDESEQSRKRLIEQSREFKKNTPEDLRKQVAPLLKSFQGEIDALSKRSKEAEAAFLNVYKRLIDVPDPVPALDLGQQLQLKVQRLHDIETENQKLRETLEEYNKEFAEVKNQEVTIKALKEKIREYEQTLKNQAETIALEKEQKLQNDFAEKERKLQETQMSTTSKLEEAEHKVQSLQTALEKTRTELFDLKTKYDEETTAKADEIEMIMTDLERANQRAEVAQREAETLREQLSSANHSLQLASQIQKAPDVEQAIEVLTRSSLEVELAAKEREIAQLVEDVQRLQASLTKLRENSASQISQLEQQLSAKNSTLKQLEEKLKGQADYEEVKKELNILKSMEFAPSEGAGTQDAAKPLEVLLLEKNRSLQSENAALRISNSDLSGSARRKGKDQPESRRPGSLPAPPPSQLPRNPGEQASNTNGTHQFSPAGLSQDFFSSSLASPSLPLASTGKFALNSLLQRQLMQSFYSKAMQEAGSTSMIFSTGPYSTNSISSQSPLQQSPDVNGMAPSPSQSESAGSVSEGEEMDTAEIARQVKEQLIKHNIGQRIFGHYVLGLSQGSVSEILARPKPWNKLTVRGKEPFHKMKQFLSDEQNILALRSIQGRQRAEPAQPSSASGSGNSDDAIRSILQQARREMEAQQAALDPALKQAPLSQSDITILTPKLLSTSPMPTVSSYPPLAISLKKPSAAPEAGASALPNPPALKKEAQDAPGLDPQGAADCAQGVLRQVKNEVGRSGAWKDHWWSAVQPERRNAASSEEAKAEETGGGKEKGSGGSGGGSQPRAERSQLQGPSSSEYWKEWPSAESPYSQSSELSLTGASRSETPQNSPLPSSPIVPMSKPTKPSVPPLTPEQYEVYMYQEVDTIELTRQVKEKLAKNGICQRIFGEKVLGLSQGSVSDMLSRPKPWSKLTQKGREPFIRMQLWLNGELGQGVLPVQGQQQGPVLHSVTSLQDPLQQGCVSSESTPKTSASCSPAPESPMSSSESVKSLTELVQQPCPPIEASKDSKPPEPSDPPASDSQPTTPLPLSGHSALSIQELVAMSPELDTYGITKRVKEVLTDNNLGQRLFGETILGLTQGSVSDLLARPKPWHKLSLKGREPFVRMQLWLNDPNNVEKLMDMKRMEKKAYMKRRHSSVSDSQPCEPPSVGTEYSQGASPQPQHQLKKPRVVLAPEEKEALKRAYQQKPYPSPKTIEDLATQLNLKTSTVINWFHNYRSRIRRELFIEEIQAGSQGQAGASDSPSARSGRAAPSSEGDSCDGVEATEGPGSADTEEPKSQGEAEREEVPRPAEQTEPPPSGTPGPDDARDDDHEGGPVEGPGPLPSPASATATAAPAAPEDAATSAAAAPGEGPAAPSSAPPPSNSSSSSAPRRPSSLQSLFGLPEAAGARDSRDNPLRKKKAANLNSIIHRLEKAASREEPIEWEF

SEQ ID NO: 25172 - protein, 1147 aa, Homo sapiens
MASGLGSPSPCSAGSEEEDMDALLNNSLPPPHPENEEDPEEDLSETETPKLKKKKKPKKPRDPKIPKSKRQKKELGDSSGEGPEFVEEEEEVALRSDSEGSDYTPGKKKKKKLGPKKEKKSKSKRKEEEEEEDDDDDSKEPKSSAQLLEDWGMEDIDHVFSEEDYRTLTNYKAFSQFVRPLIAAKNPKIAVSKMMMVLGAKWREFSTNNPFKGSSGASVAAAAAAAVAVVESMVTATEVAPPPPPVEVPIRKAKTKEGKGPNARRKPKGSPRVPDAKKPKPKKVAPLKIKLGGFGSKRKRSSSEDDDLDVESDFDDASINSYSVSDGSTSRSSRSRKKLRTTKKKKKGEEEVTAVDGYETDHQDYCEVCQQGGEIILCDTCPRAYHMVCLDPDMEKAPEGKWSCPHCEKEGIQWEAKEDNSEGEEILEEVGGDLEEEDDHHMEFCRVCKDGGELLCCDTCPSSYHIHCLNPPLPEIPNGEWLCPRCTCPALKGKVQKILIWKWGQPPSPTPVPRPPDADPNTPSPKPLEGRPERQFFVKWQGMSYWHCSWVSELQLELHCQVMFRNYQRKNDMDEPPSGDFGGDEEKSRKRKNKDPKFAEMEERFYRYGIKPEWMMIHRILNHSVDKKGHVHYLIKWRDLPYDQASWESEDVEIQDYDLFKQSYWNHRELMRGEEGRPGKKLKKVKLRKLERPPETPTVDPTVKYERQPEYLDATGGTLHPYQMEGLNWLRFSWAQGTDTILADEMGLGKTVQTAVFLYSLYKEGHSKGPFLVSAPLSTIINWEREFEMWAPDMYVVTYVGDKDSRAIIRENEFSFEDNAIRGGKKASRMKKEASVKFHVLLTSYELITIDMAILGSIDWACLIVDEAHRLKNNQSKFFRVLNGYSLQHKLLLTGTPLQNNLEELFHLLNFLTPERFHNLEGFLEEFADIAKEDQIKKLHDMLGPHMLRRLKADVFKNMPSKTELIVRVELSPMQKKYYKYILTRNFEALNARGGGNQVSLLNVVMDLKKCCNHPYLFPVAAMEAPKMPNGMYDGSALIRASGKLLLLQKMLKNLKEGGHRVLIFSQMTKMLDLLEDFLEHEGYKYERIDGGITGNMRQEAIDRFNDFFSSSGWSLTLLPRLECSGAILTHCNLCLLGSSNTPVSAS

SEQ ID NO: 25173 - protein, 660 aa, Homo sapiens
MSHVAVENALGLDQQFAGLDLNSSDNQSGGSTASRRYIPPHLRNREATKGFYDKDSSGWSSSKDKDAYSSFGSRSDSRGKSSFFSDRGSGSRGRFDDRGRSDYDGIGSRGDRSGFGKFERGGNSRWCDKSDEDDWSKPLPPSERLEQELFSGGNTGINFEKYDDIPVEATGNNCPPHIESFSDVEMGEIIMGNIELTRYTRPTPVQKHAIPIIKEKRDLMACAQTGSGKTAAFLLPILSQIYSDGPGEALRAMKENGRYGRRKQYPISLVLAPTRELAVQIYEEARKFSYRSRVRPCVVYGGADIGQQIRDLERGCHLLVATPGRLVDMMERGKIGLDFCKYLVLDEADRMLDMGFEPQIRRIVEQDTMPPKGVRHTMMFSATFPKEIQMLARDFLDEYIFLAVGRVGSTSENITQKVVWVEESDKRSFLLDLLNATGKDSLTLVFVETKKGADSLEDFLYHEGYACTSIHGDRSQRDREEALHQFRSGKSPILVATAVAARGLDISNVKHVINFDLPSDIEEYVHRIGRTGRVGNLGLATSFFNERNINITKDLLDLLVEAKQEVPSWLENMAYEHHYKGSSRGRSKSRFSGGFGARDYRQSSGASSSSFSSSRASSSRSGGGGHGSSRGFGGGGYGGFYNSDGYGGNYNSQGVDWWGN

SEQ ID NO: 25174 - protein, 1437 aa, Homo sapiens
MKKSQREDIFKKMSEEMDNITAEEIIDKHLQKDLDAEENQNVAKTLRGKVREKLKISKINKGEKSSTEQLIDSEIHQRSKLSPQTEVSLDESLSFFILSGEEGSALGKSSEQRPVNRSYPKCFSLGVNLQNVAESEEEEFMKEFILTDILKVKAADYEDDQEQIKKQKANIFVPSSSPVVNQRKLPKDMMPRILEDEGFYIQRKPEIYKKTCNKMENRLLKLEEGKCWFGESGEIMSLPTPIKQSWNFRLNVRKEPLNPLLKTIYRKAVKYDLGSSFMNKMEGSREIYQLDLNIVGLQFSHHHLFNQEQVLCARLLQLYECFQDRQQQNVSQLLYEKLKALTDATKLSNENSEINQLTRKSLQDYYWQISNTKQMYDLERGKDLSLLHSILRTWKQIKSLRHGQGFTSTPIKLQVQRIKMNKCDEQEQISEMSETEKKNEGKELKNGKKLESLSYLASDETEIERIKPITLRPQLSFTAELTSLSKCSLHEQKRRAKIQKLKYFIKIFYNNKQVSCTSVSPLQFDFKVMFQQIFNIQLMYWPEVICLEVYEKSKRTSLLAKLYIPLPNYTELKGKTALQYVEFSSDKLVMPADGEVGSNVPFLLEGNGTEELCLLTSGKLSYSLSWSLDENGLPLIPMPQSLRSSYCSMLRNVDARSVPGIPWLMNEQKLFEWANEVRIDPNNPEYSDLMESVTYMRLKGQDIPKYFRLEQLQDEFNFVSEEEMAKSKRFQLLQLRNAGQLDNFLLQQMPLHDTEIPDLVFQEYESQKEKEVSVSDVNSITAQRINSANFLKKVRRLIMKRIVKISKCNLSDIVNDYEEIVSTSQLTDAVCKFVEPRRKLKPQRKERKKVTAQAISDGDIKILVRIVRAYNIPTRKTTINGSLDMPTCLKSSISCLRHRETIKSVASDETLHEDTVHPFVEVSFQHTVYKTNTASGSHPCWNEEIKVDFVSPGHDYSFSSLSKIKDNIYINIFDEMMTEKHEDHCLKSCSGHSYIRKNWLGCIVFPFSALLQQSEISGTFQVTIPPVLLGYTWSNTYVFPKEDSNEQNLKECTFLNIFATIEPQISYVTCNPTLDKFLDQTEVLQRAQIFKKNCKAMFPNRRIVTTVFNDEGIQFLVTRYIKALNPPQQLLDIFLHNSNATFDLIARFVSLIPFVPNTPDENDGSDIWMTSEHCISLAIGNKEEHAILLCNFFLYFGKKALVLLGTSVLEGHVAYVVTQETNEYLLWNPSTGQCYKQFDPFCPLKSVDCLFDDRNVWFNIQQNNTPMAVFFDYSKESFWKQLLPKNVQGTKIQSIQPEEIIYFETDKSMVEDLRNRIERTLKSKVMEWRPKHPTHWNRQCTFILRQILPKLEFGIGSFVSSEGDNEFERILQFYWVTGFPIQMPYIDVQSIIDAVYQTGIHSAEFPQTEFALAVYIHPYPNNILSVWVYLASLVQHQ

SEQ ID NO: 25175 - protein, 418 aa, Homo sapiens
MQLPRWWELGDPCAWTGQGRGTRRMSPATTGTFLLTVYSIFSKVHSDRNVYPSAGVLFVHVLEREYFKGEFPPYPKPGEISNDPITFNTNLMGYPDRPGWLRYIQRTPYSDGVLYGSPTAENVGKPTIIEITAYNRRTFETARHNLIINIMSAEDFPLPYQAEFFIKNMNVEEMLASEVLGDFLGAVKNVWQPERLNAINITSALDRGGRVPLPINDLKEGVYVMVGADVPFSSCLREVENPQNQLRCSQEMEPVITCDKKFRTQFYIDWCKISLVDKTKQVSTYQEVIRGEGILPDGGEYKPPSDSLKSRDYYTDFLITLAVPSAVALVLFLILAYIMCCRREGVEKRNMQTPDIQLVHHSAIQKSTKELRDMSKNREIAWPLSTLPVFHPVTGEIIPPLHTDNYDSTNMPLMQTQQ

SEQ ID NO: 25176 - protein, 1335 aa, Homo sapiens
MLQLLVLKIEDPGCFWVIIKGCSPFLDHDVDYQKLNSAMNDFYNSTCQDIEIKPLTLEEGQVCVVYCEELKCWCRAIVKSITSSADQYLAECFLVDFAKNIPVKSKNIRVVVESFMQLPYRAKKFSLYCTKPVTLHIDFCRDSTDIVPAKKWDNAAIQYFQNLLKATTQVEARLCAVEEDTFEVYLYVTIKDEKVCVNDDLVAKNYACYMSPTKNKNLDYLEKPRLNIKSAPSFNKLNPALTLWPMFLQGKDVQGMEDSHGVNFPAQSLQHTWCKGIVGDLRPTATAQDKAVKCNMDSLRDSPKDKSEKKHHCISLKDTNKRVESSVYWPAKRGITIYADPDVPEASALSQKSNEKPLRLTEKKEYDEKNSCVKLLQFLNPDPLRADGISDLQQLQKLKGLQPPVVVLRNKIKPCLTIDSSPLSADLKKALQRNKFPGPSHTESYSWPPIARGCDVVVISHCESNPLLYLLPVLTVLQTGACYKSLPSRNGPLAVIVCPGWKKAQFIFELLGEYSMSSRPLHPVLLTIGLHKEEAKNTKLPRGCDVIVTTPYSLLRLLACQSLLFLRLCHLILDEVEVLFLEANEQMFAILDNFKKNIEVEERESAPHQIVAVGVHWNKHIEHLIKEFMNDPYIVITAMEEAALYGNVQQVVHLCLECEKTSSLLQALDFIPSQAQKTLIFTCSVAETEIVCKVVESSSIFCLKMHKEMIFNLQNVLEQWKKKLSSGSQIILALTDDCVPLLAITDATCVIHFSFPASPKVFGGRLYCMSDHFHAEQGSPAEQGDKKAKSVLLLTEKDASHAVGVLRYLERADAKVPAELYEFTAGVLEAKEDKKAGRPLCPYLKAFGFCNHFIFRDKRICPDRHRINPETDLPRKLSSQALPSFGYIKIIPFYILNATNYFGRIVDKHMDLYATLNAEMNEYFKDSNKTTVEKVEKFGLYGLAEKTLFHRVQVLEVNQKEDAWALDDILVEFIDEGRTGLVTRDQLLHLPEHFHTLPPQAVEFIVCRVKPADNEIEWNPKVTRYIHHKIVGKLHDAKVILALGNTVWIDPMVHITNLSSLKTSVIDYNVRAEILSMGMGIDNPEHIEQLKKLREDAKIPACEESLSQTPPRVTGTSPAQDQDHPSEEQGGQGTPPAEDAACLQSPQPEDTGAEGGAESKTSSENQKPETLSGNTEGAFISRTAQPPLKSFHPQIKWFQKEDVVILKIRIRNVKDYKCQYLRDRVVFSAWVGDKFYLADLELRGNIRKDDCQCVIRNDEPVITLAKERREAWCHLLRQRNPNVAFDFDHWEDCEEDSHFPKVVNSKNLPYTVTEVVEDSSSTSEDDDSESEREGE

SEQ ID NO: 25177 - protein, 508 aa, Homo sapiens
MKGKGKHLAFTAMDCYRTSLSSSWIYPTVILCLFGFFSMMRPSEPFLIPYLSGPDKNLTSAEITNEIFPVWTYSYLVLLLPVFVLTDYVRYKPVIILQGISFIITWLLLLFGQGVKTMQVVEFFYGMVTAAEVAYYAYIYSVVSPEHYQRVSGYCRSVTLAAYTAGSVLAQLLVSLANMSYFYLNVISLASVSVAFLFSLFLPMPKKSMFFHAKPSREIKKSSSVNPVLEETHEGEAPGCEEQKPTSEILSTSGKLNKGQLNSLKPSNVTVDVFVQWFQDLKECYSSKRLFYWSLWWAFATAGFNQVLNYVQILWDYKAPSQDSSIYNGAVEAIATFGGAVAAFAVGYVKVNWDLLGELALVVFSVVNAGSLFLMHYTANIWACYAGYLIFKSSYMLLITIAVFQIAVNLNVERYALVFGINTFIALVIQTIMTVIVVDQRGLNLPVSIQFLVYGSYFAVIAGIFLMRSMYITYSTKSQKDVQSPAPSENPDVSHPEEESNIIMSTKL

SEQ ID NO: 25178 - protein, 1669 aa, Homo sapiens
LGSPSPCSAGSEEEDMDALLNNSLPPPHPENEEDPEEDLSETETPKLKKKKKPKKPRDPKIPKSKRQKKELGDSSGEGPEFVEEEEEVALRSDSEGSDYTPGKKKKKKLGPKKEKKSKSKRKEEEEEEDDDDDSKEPKSSAQLLEDWGMEDIDHVFSEEDYRTLTNYKAFSQFVRPLIAAKNPKIAVSKMMMVLGAKWREFSTNNPFKGSSGASVAAAAAAAVAVVESMVTATEVAPPPPPVEVPIRKAKTKEGKGPNARRKPKGSPRVPDAKKPKPKKVAPLKIKLGGFGSKRKRSSSEDDDLDVESDFDDASINSYSVSDGSTSRSSRSRKKLRTTKKKKKGEEEVTAVDGYETDHQDYCEVCQQGGEIILCDTCPRAYHMVCLDPDMEKAPEGKWSCPHCEKEGIQWEAKEDNSEGEEILEEVGGDLEEEDDHHMEFCRVCKDGGELLCCDTCPSSYHIHCLNPPLPEIPNGEWLCPRCTCPALKGKVQKILIWKWGQPPSPTPVPRPPDADPNTPSPKPLEGRPERQFFVKWQGMSYWHCSWVSELQLELHCQVMFRNYQRKNDMDEPPSGDFGGDEEKSRKRKNKDPKFAEMEERFYRYGIKPEWMMIHRILNHSVDKKGHVHYLIKWRDLPYDQASWESEDVEIQDYDLFKQSYWNHRELMRGEEGRPGKKLKKVKLRKLERPPETPTVDPTVKYERQPEYLDATGGTLHPYQMEGLNWLRFSWAQGTDTILADEMGLGKTVQTAVFLYSLYKEGHSKGPFLVSAPLSTIINWEREFEMWAPDMYVVTYVGDKDSRAIIRENEFSFEDNAIRGGKKASRMKKEASVKFHVLLTSYELITIDMAILGSIDWACLIVDEAHRLKNNQSKFFRVLNGYSLQHKLLLTGTPLQNNLEELFHLLNFLTPERFHNLEGFLEEFADIAKEDQIKKLHDMLGPHMLRRLKADVFKNMPSKTELIVRVELSPMQKKYYKYILTRNFEALNARGGGNQVSLLNVVMDLKKCCNHPYLFPVAAMEAPKMPNGMYDGSALIRASGKLLLLQKMLKNLKEGGHRVLIFSQMTKMLDLLEDFLEHEGYKYERIDGGITGNMRQEAIDRFNAPGAQQFCFLLSTRAGGLGINLATADTVIIYDSDWNPHNDIQAFSRAHRIGQNKKVMIYRFVTRASVEERITQVAKKKMMLTHLVVRPGLGSKTGSMSKQELDDILKFGTEELFKDEATDGGGDNKEGEDSSVIHYDDKAIERLLDRNQDETEDTELQGMNEYLSSFKVAQYVVREEEMGEEEEVEREIIKQEESVDPDYWEKLLRHHYEQQQEDLARNLGKGKRIRKQVNYNDGSQEDRGVCGRPRPPPMGRSTRAVGPAHLPSLPPDWQDDQSDNQSDYSVASEEGDEDFDERSEAPRRPSRKGLRNDKDKPLPPLLARVGGNIEVLGFNARQRKAFLNAIMRYGMPPQDAFTTQWLVRDLRGKSEKEFKAYVSLFMRHLCEPGADGAETFADGVPREGLSRQHVLTRIGVMSLIRKKVQEFEHVNGRWSMPELAEVEENKKMSQPGSPSPKTPTPSTPGDTQPNTPAPVPPAEDGIKIEENSLKEEESIEGEKEVKSTAPETAIECTQAPAPASEDEKVVVEPPEGEEKVEKAEVKERTEEPMETEPKGAADVEKVEEKSAIDL

SEQ ID NO: 25179 - protein, 898 aa, Homo sapiens
MALIMEPVSKWSPSQVVDWMKGLDDCLQQYIKNFEREKISGDQLLRITHQELEDLGVSRIGHQELILEAVDLLCALNYGLETENLKTLSHKLNASAKNLQNFITGRRRSGHYDGRTSRKLPNDFLTSVVDLIGAAKSLLAWLDRSPFAAVTDYSVTRNNVIQLCLELTTIVQQDCTVYETENKILHVCKTLSGVCDHIISLSSDPLVSQSAHLEVIQLANIKPSEGLGMYIKSTYDGLHVITGTTENSPADRCKKIHAGDEVIQVNHQTVVGWQLKNLVNALREDPSGVILTLKKRPQSMLTSAPALLKNMRWKPLALQPLIPRSPTSSVATPSSTISTPTKRDSSALQDLYIPPPPAEPYIPRDEKGNLPCEDLRGHMVGKPVHKGSESPNSFLDQEYRKRFNIVEEDTVLYCYEYEKGRSSSQGRRESTPTYGKLRPISMPVEYNWVGDYEDPNKMKRDSRRENSLLRYMSNEKIAQEEYMFQRNSKKDTGKKSKKKGDKSNSPTHYSLLPSLQMDALRQDIMGTPVPETTLYHTFQQSSLQHKSKKKNKGPIAGKSKRRISCKDLGRGDCEGWLWKKKDAKSYFSQKWKKYWFVLKDASLYWYINEEDEKAEGFISLPEFKIDRASECRKKYAFKACHPKIKSFYFAAEHLDDMNRWLNRINMLTAGYAERERIKQEQDYWSESDKEEADTPSTPKQDSPPPPYDTYPRPPSMSCASPYVEAKHSRLSSTETSQSQSSHEEFRQEVTGSSAVSPIRKTASQRRSWQDLIETPLTSSGLHYLQTLPLEDSVFSDSAAISPEHRRQSTLPTQKCHLQDHYGPYPLAESERMQVLNGNGGKPRSFTLPRDSGFNHCCLNAPVSACDPQDDVQPPEVEEEEEEEEEEGEAAGENIGEKS

SEQ ID NO: 25180 - protein, 932 aa, Homo sapiens
VPLRVVNRKRPAREDCRGLTGPLQSLVPSADGDADNCCVQIMGGYFTWTPDGIPTLSNITIRIPRGQLTMIVGQVGCGKSSLLLAALGEMQKVSGAVFWSSSLPDSEIGEDPSPERETATDLDIRKRGPVAYASQKPWLLNATVEENIIFESPFNKQRYKMVIEACSLQPDIDILPHGDQTQIGERGINLSGGQRQRISVARALYQHANVVFLDDPFSALDIHLSDHLMQAGILELLRDDKRTVVLVTHKLQYLPHADWIIAMKDGTIQREGTLKDFQRSECQLFEHWKTLMNRQDQELEKETVTERKATEPPQGLSRAMSSRDGLLQDEEEEEEEAAESEEDDNLSSMLHQRAEIPWRACAKYLSSAGILLLSLLVFSQLLKHMVLVAIDYWLAKWTDSALTLTPAARNCSLSQECTLDQTVYAMVFTVLCSLGIVLCLVTSVTVEWTGLKVAKRLHRSLLNRIILAPMRFFETTPLGSILNRFSSDCNTIDQHIPSTLECLSRSTLLCVSALAVISYVTPVFLVALLPLAIVCYFIQKYFRVASRDLQQLDDTTQLPLLSHFAETVEGLTTIRAFRYEARFQQKLLEYTDSNNIASLFLTAANRWLEVRMEYIGACVVLIAAVTSISNSLHRELSAGLVGLGLTYALMVSNYLNWMVRNLADMELQLGAVKRIHGLLKTEAESYEGLLDQGKIQIQNLSVRYDSSLKPVLKHVNALIAPGQKIGICGRTGSGKSSFSLAFFRMVDTFEGHIIIDGIDIAKLPLHTLRSRLSIILQDPVLFSGTIRFNLDPERKCSDSTLWEALEIAQLKLVVKALPGGLDAIITEGGENFSQGQRQLFCLARAFVRKTSIFIMDEATASIDMATENILQKVVMTAFADRTVVTIAHRVHTILSADLVIVLKRGAILEFDKPEKLLSRKDSVFASFVRADK

SEQ ID NO: 25181 - protein, 1759 aa, Homo sapiens
MSCVHYKFSSKLNYDTVTFDGLHISLCDLKKQIMGREKLKAADCDLQITNAQTKEEYTDDNALIPKNSSVIVRRIPIGGVKSTSKTYVISRTEPAMATTKAIDDSSASISLAQLTKTANLAEANASEEDKIKAMMSQSGHEYDPINYMKKPLGPPPPSYTCFRCGKPGHYIKNCPTNGDKNFESGPRIKKSTGIPRSFMMEVKDPNMKGAMLTNTGKYAIPTIDAGRLLFHKLGTMGHKQIDTYFWNRGDVYGATATQITHLREAYAIGKKEKPPFLPEEPSSSSEEDDPIPDELLCLICKDIMTDAVVIPCCGNSYCDECIRTALLESDEHTCPTCHQNDVSPDALIANKFLRQAVNNFKNETGYTKRLRKQLPPPPPPIPPPRPLIQRNLQPLMRSPISRQQDPLMIPVTSSSTHPAPSISSLTSNQSSLAPPVSGNPSSAPAPVPDITATVSISVHSEKSDGPFRDSDNKILPAAALASEHSKGTSSIAITALMEEKGYQVPVLGTPSLLGQSLLHGQLIPTTGPVRINTARPGGGRPGWEHSNKLGYLVSPPQQIRRGERSCYRSINRGRHHSERSQRTQGPSLPATPVFVPVPPPPLYPPPPHTLPLPPGVPPPQFSPQFPPGQPPPAGYSVPPPGFPPAPANLSTPWVSSGVQTAHSNTIPTTQAPPLSREEFYREQRRLKEEEKKKSKLDEFTNDFAKELMEYKKIQKERRRSFSRSKSPYSGSSYSRSSYTYSKSRSGSTRSRSYSRSFSRSHSRSYSRSPPYPRRGRGKSRNYRSRSRSHGYHRSRSRSPPYRRYHSRSRSPQAFRGQSPNKRNVPQGETEREYFNRYREVPPPYDMKAYYGRSVDFRDPFEKERYREWERKYREWYEKYYKGYAAGAQPRPSANRENFSPERFLPLNIRNSPFTRGRREDYVGGQSHRSRNIGSNYPEKLSARDGHNQKDNTKSKEKESENAPGDGKGNKHKKHRKRRKGEESEGFLNPELLETSRKSREPTGVEENKTDSLFVLPSRDDATPVRDEPMDAESITFKSVSEKDKRERDKPKAKGDKTKRKNDGSAVSKKENIVKPAKGPQEKVDGERERSPRSEPPIKKAKEETPKTDNTKSSSSSQKDEKITGTPRKAHSKSAKEHQETKPVKEEKVKKDYSKDVKSEKLTTKEEKAKKPNEKNKPLDNKGEKRKRKTEEKGVDKDFESSSMKISKLEVTEIVKPSPKRKMEPDTEKMDRTPEKDKISLSAPAKKIKLNRETGKKIGSTENISNTKEPSEKLESTSSKVKQEKVKGKVRRKVTGTEGSSSTLVDYTSTSSTGGSPVRKSEEKTDTKRTVIKTMEEYNNDNTAPAEDVIIMIQVPQSKWDKDDFESEEEDVKSTQPISSVGKPASVIKNVSTKPSNIVKYPEKESEPSEKIQKFTKDVSHEIIQHEVKSSKNSASSEKGKTKDRDYSVLEKENPEKRKNSTQPEKESNLDRLNEQGNFKSLSQSSKEARTSDKHDSTRASSNKDFTPNRDKKTDYDTREYSSSKRRDEKNELTRRKDSPSRNKDSASGQKNKPREERDLPKKGTGDSKKSNSSPSRDRKPHDHKATYDTKRPNEETKSVDKNPCKDREKHVLEARNNKESSGNKLLYILNPPETQVEKEQITGQIDKSTVKPKPQLSHSSRLSSDLTRETDEAAFEPDYNESDSESNVSVKEEESSGNISKDLKDKIVEKAKESLDTAAVVQVGISRNQSHSSPSVSPSRSHSPSGSQTRSHSSSASSA

SEQ ID NO: 25182 - protein, 1258 aa, Homo sapiens
MDGPTRGHGLRKKRRSRSQRDRERRSRGGLGAGAAGGGGAGRTRALSLASSSGSDKEDNGKPPSSAPSRPRPPRRKRRESTSAEEDIIDGFAMTSFVTFEALEKDVALKPQERVEKRQTPLTKKKREALTNGLSFHSKKSRLSHPHHYSSDRENDRNLCQHLGKRKKMPKALRQLKPGQNSCRDSDSESASGESKGFHRSSSRERLSDSSAPSSLGTGYFCDSDSDQEEKASDASSEKLFNTVIVNKDPELGVGTLPEHDSQDAGPIVPKISGLERSQEKSQDCCKEPIFEPVVLKDPCPQVAQPIPQPQTEPQLRAPSPDPDLVQRTEAPPQPPPLSTQPPQGPPEAQLQPAPQPQVQRPPRPQSPTQLLHQNLPPVQAHPSAQSLSQPLSAYNSSSLSLNSLSSRSSTPAKTQPAPPHISHHPSASPFPLSLPNHSPLHSFTPTLQPPAHSHHPNMFAPPTALPPPPPLTSGSLQVAGHPAGSTYSEQDILRQELNTRFLASQSADRGASLGPPPYLRTEFHQHQHQHQHTHQHTHQHTFTPFPHAIPPTAIMPTPAPPMFDKYPTKVDPFYRHSLFHSYPPAVSGIPPMIPPTGPFGSLQGAFQPKTSNPIDVAARPGTVPHTLLQKDPRLTDPFRPMLRKPGKWCAMHVHIAWQIYHHQQKVKKQMQSDPHKLDFGLKPEFLSRPPGPSLFGAIHHPHDLARPSTLFSAAGAAHPTGTPFGPPPHHSNFLNPAAHLEPFNRPSTFTGLAAVGGNAFGGLGNPSVTPNSMFGHKDGPSVQNFSNPHEPWNRLHRTPPSFPTPPPWLKPGELERSASAAAHDRDRDVDKRDSSVSKDDKERESVEKRHSSHPSPAPVLPVNALGHTRSSTEQIRAHLNTEAREKDKPKERERDHSESRKDLAADEHKAKEGHLPEKDGHGHEGRAAGEEAKQLARVPSPYVRTPVVESARPNSTSSREAEPRKGEPAYENPKKSSEVKVKEERKEDHDLPPEAPQTHRASEPPPPNSSSSVHPGPLASMPMTVGVTGIHPMNSISSLDRTRMMTPFMGISPLPGGERFPYPSFHWDPIRDPLRDPYRELDIHRRDPLGRDFLLRNDPLHRLSTPRLYEADRSFRDREPHDYSHHHHHHHHPLSVDPRREHERGGHLDERERLHMLREDYEHTRLHSVHPASLDGHLPHPSLITPGLPSMHYPRISPTAGNQNGLLNKTPPTAALSAPPPLISTLGGRPVSPRRTTPLSAEIRERPPSHTLKDIEAR

SEQ ID NO: 25183 - protein, 642 aa, Homo sapiens
MREPEELMPDSGAVFTFGKSKFAENNPGKFWFKNDVPVHLSCGDEHSAVVTGNNKLYMFGSNNWGQLGLGSKSAISKPTCVKALKPEKVKLAACGRNHTLVSTEGGNVYATGGNNEGQLGLGDTEERNTFHVISFFTSEHKIKQLSAGSNTSAALTEDGRLFMWGDNSEGQIGLKNVSNVCVPQQVTIGKPVSWISCGYYHSAFVTTDGELYVFGEPENGKLGLPNQLLGNHRTPQLVSEIPEKVIQVACGGEHTVVLTENAVYTFGLGQFGQLGLGTFLFETSEPKVIENIRDQTISYISCGENHTALITDIGLMYTFGDGRHGKLGLGLENFTNHFIPTLCSNFLRFIVKLERSPDSFSMRRTLPPIEGTLGLSACFLPNSVFPRCSERNLQESVLSEQDLMQPEEPDYLLDEMTKEAEIDNSSTVESLGETTDILNMTHIMSLNSNEKSLKLSPVQKQKDHEFSKTEELKLEDVDEEINAENVESKKKTVGDDESVPTGYHSKTEGAERTNDDSSAETIEKKEKANLEERAICEYNENPKGYMLDDADSSSLEILENSETTPSKDMKKTKKIFLFKRVPSINQKIVKNNNEPLPEIKSIGDQIILKSDNKDADQNHMSQNHQNIPPTNTERRSKSCTIL

SEQ ID NO: 25184 - protein, 1995 aa, Homo sapiens
MKMADPIMDLFDDPNLFGLDSLTDDSFNQVTQDPIEEALGLPSSLDSLDQMNQDGGGGDVGNSSASELVPPPEETAPTELSKESTAPAPESITLHDYTTQPASQEQPAQPVLQTSTPTSGLLQVSKSQEILSQGNPFMGVSATAVSSSSAGGQPPQSAPKIVILKAPPSSSVTGAHVAQIQAQGITSTAQPLVAGTANGGKVTFTKVLTGTPLRPGVSIVSGNTVLAAKVPGNQAAVQRIVQPSRPVKQLVLQPVKGSAPAGNPGATGPPLKPAVTLTSTPTQGESKRITLVLQQPQSGGPQGHRHVVLGSLPGKIVLQGNQLAALTQAKNAQGQPAKVVTIQLQVQQPQQKIQIVPQPPSSQPQPQQPPSTQPVTLSSVQQAQIMGPGQSPGQRLSVPVKVVLQPQAGSSQGASSGLSVVKVLSASEVAALSSPASSAPHSGGKTGMEENRRLEHQKKQEKANRIVAEAIARARARGEQNIPRVLNEDELPSVRPEEEGEKKRRKKSAGERLKEEKPKKSKTSGASKTKGKSKLNTITPVVGKKRKRNTSSDNSDVEVMPAQSPREDEESSIQKRRSNRQVKRKKYTEDLDIKITDDEEEEEVDVTGPIKPEPILPEPVQEPDGETLPSMQFFVENPSEEDAAIVDKVLSMRIVKKELPSGQYTEAEEFFVKYKNYSYLHCEWATISQLEKDKRIHQKLKRFKTKMAQMRHFFHEDEEPFNPDYVEVDRILDESHSIDKDNGEPVIYYLVKWCSLPYEDSTWELKEDVDEGKIREFKRIQSRHPELKRVNRPQASAWKKLELSHEYKNRNQLREYQLEGVNWLLFNWYNRQNCILADEMGLGKTIQSIAFLQEVYNVGIHGPFLVIAPLSTITNWEREFNTWTEMNTIVYHGSLASRQMIQQYEMYCKDSRGRLIPGAYKFDALITTFEMILSDCPELREIEWRCVIIDEAHRLKNRNCKLLDSLKHMDLEHKVLLTGTPLQNTVEELFSLLHFLEPSQFPSESEFLKDFGDLKTEEQVQKLQAILKPMMLRRLKEDVEKNLAPKQETIIEVELTNIQKKYYRAILEKNFSFLSKGAGHTNMPNLLNTMMELRKCCNHPYLINGAEEKILTEFREACHIIPHDFHLQAMVRSAGKLVLIDKLLPKLKAGGHKVLIFSQMVRCLDILEDYLIQRRYLYERIDGRVRGNLRQAAIDRFSKPDSDRFVFLLCTRAGGLGINLTAADTCIIFDSDWNPQNDLQAQARCHRIGQSKAVKVYRLITRNSYEREMFDKASLKLGLDKAVLQSMSGRDGNITGIQQFSKKEIEDLLRKGAYAAIMEEDDEGSKFCEEDIDQILLRRTTTITIESEGKGSTFAKASFVASENRTDISLDDPNFWQKWAKKADLDMDLLNSKNNLVIDTPRVRKQTRHFSTLKDDDLVEFSDLESEDDERPRSRRHDRHHAYGRTDCFRVEKHLLVYGWGRWRDILSHGRFKRRMTERDVETICRAILVYCLLHYRGDENIKGFIWDLISPAENGKTKELQNHSGLSIPVPRGRKGKKVKSQSTFDIHKADWIRKYNPDTLFQDESYKKHLKHQCNKVLLRVRMLYYLRQEVIGDQAEKVLGGAIASEIDIWFPVVDQLEVPTTWWDSEADKSLLIGVFKHGYEKYNTMRADPALCFLEKAGRPDDKAIAAEHRVLDNFSDIVEGVDFDKDCEDPEYKPLQGPPKDQDDEGDPLMMMDEEISVIDGDEAQVTQQPGHLFWPPGSALTARLRRLVTAYQRSYKREQMKIEAAERGDRRRRRCEAAFKLKEIARREKQQRWTRREQTDFYRVVSTFGVEYDPDTMQFHWDRFRTFARLDKKTDESLTKYFHGFVAMCRQVCRLPPAAGDEPPDPNLFIEPITEERASRTLYRIELLRRLREQVLCHPLLEDRLALCQPPGPELPKWWEPVRHDGELLRGAARHGVSQTDCNIMQDPDFSFLAARMNYMQNHQAGAPAPSLSRCSTPLLHQQYTSRT

SEQ ID NO: 25185 - protein, 654 aa, Homo sapiens
MSLAAYCVICCRRIGTSTSPPKSGTHWRDIRNIIKFTGSLILGGSLFLTYEVLALKKAVTLDTQVVEREKMKSYIYVHTVSLDKGENHGIAWQARKELHKAVRKVLATSAKILRNPFADPFSTVDIEDHECAVWLLLRKSKSDDKTTRLEAVREMSETHHWHDYQYRIIAQACDPKTLIGLARSEESDLRFFLLPPPLPSLKEDSSTEEELRQLLASLPQTELDECIQYFTSLALSESSQSLAAQKGGLWCFGGNGLPYAESFGEVPSATVEMFCLEAIVKHSEISTHCDKIEANGGLQLLQRLYRLHKDCPKVQRNIMRVIGNMALNEHLHSSIVRSGWVSIMAEAMKSPHIMESSHAARILANLDRETVQEKYQDGVYVLHPQYRTSQPIKADVLFIHGLMGAAFKTWRQQDSEQAVIEKPMEDEDRYTTCWPKTWLAKDCPALRIISVEYDTSLSDWRARCPMERKSIAFRSNELLRKLRAAGVGDRPVVWISHSMGGLLVKKMLLEASTKPEMSTVINNTRGIIFYSVPHHGSRLAEYSVNIRYLLFPSLEVKELSKDSPALKTLQDDFLEFAKDKNFQVLNFVETLPTYIGSMIKLHVVPVESADLGIGDLIPVDVNHLNICKPKKKDAFLYQRTLQFIREALAKDLEN

SEQ ID NO: 25186 - protein, 574 aa, Homo sapiens
MEPTENPCQGPLGQKAGEKPLAAGPGEEELLRGSAPHAQDTQSEELPPSCTISGEKKPPAVSGEATGADAGRLCPPPRSRAPHKDRTLARSRPQTQGEDCSLPVGEVKIGKRSYSPAPGKQKKPNAMGLAPTSSPGAPNSARATHNPVPCGSGRGPCHLANLLSTLAQSNQNRDHKQGPPEVTCQIRKKTRTLYRSDQLEELEKIFQEDHYPDSDKRREIAQTVGVTPQRIMVWFQNRRAKWRKMEKLNGKESKDNPAAPGPASSQCSSAAEILPAVPMEPKPDPFPQESPLDTFPEPPMLLTSDQTLAPTQPSEGAQRVVTPPLFSPPPVRRADLPFPLGPVHTPQLMPLLMDVAGSDSSHKDGPCGSWGTSITLPPPCSYLEELEPQDYQQSNQPGPFQFSQAPQPPLFQSPQPKLPYLPTFPFSMPSSLTLPPPEDSLFMFPCGPSGGTSQGYCPGASSGQILMQPPAGNIGTASWSDPCLPELPFPGPFCPQALGHPPGGDGYFPDLFPTPCPQALGRQPSSALSWMPEGARPGTGPLLSKAKEEPPAASLDQPSALEEARGDDKNSHVP

SEQ ID NO: 25187 - protein, 611 aa, Homo sapiens
MKFHSFSTNMAFNILNDTTATVEYPFRVGELEYAVIDLNPRPLEPIILIGRSGTGKTTCCLYRLWKKFHVYWEKAEQAGSPLLAKQVWLKRRLEVEPGKESPGGEEEEEEEDEEEEDSIEVETVESIDEQEYEACAGGAGVEPAGDGQAAEVCAPEHPHQLEHLHQIFVTKNHVLCQEVQRNFIELSKSTKATSHYKPLDPNIHKLQDLRDENFPLFVTSKQLLLLLDASLPKPFFLRNEDGSLKRTIIGWSAQEESTIPSWQEDEEEAEVDGDYSEEDKAVEMRTGDSDPRVYVTFEVFKNEIWPKMTKGRTAYNPALIWKEIKSFLKGSFEALSCPHGRLTEEVYKKLGRKRCPNFKEDRSEIYSLFSLYQQIRSQKGYFDEEDVLYNISRRLSKLRVLPWSIHELYGDEIQDFTQAELALLMKCINDPNSMFLTGDTAQSIMKGVAFRFSDLRSLFHYASRNTIDKQCAVRKPKKIHQLYQNYRSHSGILNLASGVVDLLQFYFPESFDRLPRDSGLFDGPKPTVLESCSVSDLAILLRGNKRKTQPIEFGAHQVILVANETAKEKIPEELGLALVLTIYEAKGLEFDDVLLYNFFTDSEGCPSWSKL

SEQ ID NO: 25188 - protein, 524 aa, Homo sapiens
PHVFLLFITFPILFIGWGSQSSKVHIHHSTWLHFPGHNLRWILTFMLLFVLVCEIAEGILSDGVTESHHLHLYMPAGMAFMAAVTSVVYYHNIETSNFPKLLIALLVYWTLAFITKTIKFVKFLDHAIGFSQLRFCLTGLLVILYGMLLLVEVNVIRVRRYIFFKTPREVKPPEDLQDLGVRFLQPFVNLLSKGTYWWMNAFIKTAHKKPIDLRAIGKLPIAMRALTNYQRLCEAFDAQVRKDIQGTQGARAIWQALSHAFGRRLVLSSTFRILADLLGFAGPLCIFGIVDHLGKENDVFQPKTQFLGVYFVSSQEFLANAYVLAVLLFLALLLQRTFLQASYYVAIETGINLRGAIQTKIYNKIMHLSTSNLSMGEMTAGQICNLVAIDTNQLMWFFFLCPNLWAMPVQIIVGVILLYYILGVSALIGAAVIILLAPVQYFVATKLSQAQRSTLEYSNERLKQTNEMLRGIKLLKLYAWENIFRTRVETTRRKEMTSLRAFAIYTSISIFMNTAIPIAAVLIC

SEQ ID NO: 25189 - protein, 561 aa, Homo sapiens
MAQGFAVGFDPLGLGDLSSGSLSSLSSRGHLGSDSGSTATRYLLRKQQRLLNGPPRGIRASSPMGRVILINSPIEANSDESDIIHSVRVEKSPAGRLGFSVRGGSEHGLGIFVSKVEEGSSAERAGLCVGDKITEVNGLSLESTTMGSAVKVLTSSSRLHMMVRRMGRVPGIKFSKEKTTWVDVVNRRLVVEKCGSTPSDTSSEDGVRRIVHLYTTSDDFCLGFNIRGGKEFGLGIYVSKVDHGGLAEENGIKVGDQVLAANGVRFDDISHSQAVEVLKGQTHIMLTIKETGRYPAYKEMVSEYCWLDRLSNGVLQQLSPASESSSSVSSCASSAPYSSGSLPSDRMDICLGQEEPGSRGPGWGRADTAMQTEPDAGGRVETWCSVRPTVILRDTAIRSDGPHPGRRLDSALSESPKTALLLALSRPRPPITRSQSYLTLWEEKQQRKKEKSGSPGEKGALQRSKTLMNLFFKGGRQGRLARDGRREAWTLDSGSLAKTYPRLDIEKVCARGRHRGPGEAPAGHPRQAGEAATAAGHQECGGPHRPGPLRQHGDACGAGGF

SEQ ID NO: 25190 - protein, 869 aa, Homo sapiens
MANSMNGRNPGGRGGNPRKGRILGIIDAIQDAVGPPKQAAADRRTVEKTWKLMDKVVRLCQNPKLQLKNSPPYILDILPDTYQHLRLILSKYDDNQKLAQLSENEYFKIYIDSLMKKSKRAIRLFKEGKERMYEEQSQDRRNLTKLSLIFSHMLAEIKAIFPNGQFQGDNFRITKADAAEFWRKFFGDKTIVPWKVFRQCLHEVHQISSGLEAMALKSTIDLTCNDYISVFEFDIFTRLFQPWGSILRNWNFLAVTHPGYMAFLTYDEVKARLQKYSTKPGSYIFRLSCTRLGQWAIGYVTGDGNILQTIPHNKPLFQALIDGSREGFYLYPDGRSYNPDLTGLCEPTPHDHIKVTQEQYELYCEMGSTFQLCKICAENDKDVKIEPCGHLMCTSCLTAWQESDGQGCPFCRCEIKGTEPIIVDPFDPRDEGSRCCSIIDPFGMPMLDLDDDDDREESLMMNRLANVRKCTDRQNSPVTSPGSSPLAQRRKPQPDPLQIPHLSLPPVPPRLDLIQKGIVRSPCGSPTGSPKSSPCMVRKQDKPLPAPPPPLRDPPPPPPERPPPIPPDNRLSRHIHHVESVPSRDPPMPLEAWCPRDVFGTNQLVGCRLLGEGSPKPGITASSNVNGRHSRVGSDPVLMRKHRRHDLPLEGAKVFSNGHLGSEEYDVPPRLSPPPPVTTLLPSIKCTGPLANSLSEKTRDPVEEDDDEYKIPSSHPVSLNSQPSHCHNVKPPVRSCDNGHCMLNGTHGPSSEKKSNIPDLSIYLKGDVFDSASDPVPLPPARPPTRDNPKHGSSLNRTPSDYDLLIPPLGEDAFDALPPSLPPPPPPARHSLIEHSKPPGSSSRPSSGQDLFLLPSDAPSLTAKIPLLI

SEQ ID NO: 25191 - protein, 1629 aa, Homo sapiens
MDLTAYAELLKESGNQVLKNGNFSLAIRKYDEAIQILLQLYQWGVPPRDLAVLLCNKSNAFFSLGKWNEAFVAAKECLQWDPTYVKGYYRAGYSLLRLHQPYEAARMFFEGLRLVQRSQDQAPVADFLVGVFTTMSSDSIVLQSFLPCFDHIFTTGFPTEVWQSVIEKLAKKGLWHSFLLLSAKKDRLPRNIHVPELSLKSLFEKYVFIGLYEKMEQVPKLVQWLISIGASVETIGPYPLHALMRLCIQARENHLFRWLMDHKPEWKGRINQKDGDGCTVLHVVAAHSPGYLVKRQTEDVQMLLRFGADPTLLDRQSRSVVDVLKRNKNFKAIEKINSHLEKLATCSKDLSGFSNGDGPTSENDIFRKVLEQLVKYMNSGNRLLHKNFLKQEVVQRFLRLLSTLQEIPPDLVCDINQDCATTVFKFLLEKQRWPEVLLLLTRKVSGEPPLGDCLIKDCNFSDLDICTIIPHLSTWDQRKKQLLGCLIDSGALPDGLQESQERPVVTCLKHEDFELAFLLLTKGADPRAISLTEGDTPLHAALHIFLEIKADIGFSFLSHLLDLFWSNPTEFDYLNPNVQDSNGNTLMHILFQKGMLKRVKKLLDLLVKFDINFNLKNKEGKDARHRIKKNDSLLLAWNKALMENRRRSRQDSAAHLGKLSKSTAPGHTSQLKSQGSFKSVPCGATARTLPEGSAVPDSWETLPGTQVTRKEPGALRPCSLRDCLMQDITVLIQQVEVDPSFPEDCLQSSEPLEAGAGKEGKKDDKPTLGAGAPDCSEVGEGHAQVGLGALQLVPDDNRGKEGNDDQDDWSTQEIEACLQDFDNMTWEIECTSEMLKKLSSKVMTKVIKKKIILAIQQLGNGEWTQGLQKRLKHLKGSIQLFEAKLDKGARMLWELAIDFSPRCSENPEKIIATEQNTCAMEKSGRIYTEIIRIWDIVLDHCKLADSIKAICNAYNRGLSCVLRKKLKGINKGQVSANMKIQKRIPRCYVEDTEAEKGREHVNPEYFPPASAVETEYNIMKFHSFSTNMAFNILNDTTATVEYPFRVGELEYAVIDLNPRPLEPIILIGRSGTGKTTCCLYRLWKKFHVYWEKAEQAGSPLLAKQVWLKRRLEVEPGKESPGGEEEEEEEDEEEEDSIEVETVESIDEQEYEACAGGAGVEPAGDGQAAEVCAPEHPHQLEHLHQIFVTKNHVLCQEVQRNFIELSKSTKATSHYKPLDPNIHKLQDLRDENFPLFVTSKQLLLLLDASLPKPFFLRNEDGSLKRTIIGWSAQEESTIPSWQEDEEEAEVDGDYSEEDKAVEMRTGDSDPRVYVTFEVFKNEIWPKMTKGRTAYNPALIWKEIKSFLKGSFEALSCPHGRLTEEVYKKLGRKRCPNFKEDRSEIYSLFSLYQQIRSQKGYFDEEDVLYNISRRLSKLRVLPWSIHELYGDEIQDFTQAELALLMKCINDPNSMFLTGDTAQSIMKGVAFRFSDLRSLFHYASRNTIDKQCAVRKPKKIHQLYQNYRSHSGILNLASGVVDLLQFYFPESFDRLPRDSGLFDGPKPTVLESCSVSDLAILLRGNKRKTQPIEFGAHQVILVANETAKEKIPEELGLALVLTIYEAKGLEFDDVLLYNFFTDSEGCPSWSKL

SEQ ID NO: 25192 - protein, 1158 aa, Homo sapiens
MAQQANVGELLAMLDSPMLGVRDDVTAVFKENLNSDRGPMLVNTLVDYYLETSSQPALHILTTLQEPHDKHLLDRINEYVGKAATRLSILSLLGHVIRLQPSWKHKLSQAPLLPSLLKCLKMDTDVVVLTTGVLVLITMLPMIPQSGKQHLLDFFDIFGRLSSWCLKKPGHVAEVYLVHLHASVYALFHRLYGMYPCNFVSFLRSHYSMKENLETFEEVVKPMMEHVRIHPELVTGSKDHELDPRRWKRLETHDVVIECAKISLDPTEASYEDGYSVSHQISARFPHRSADVTTSPYADTQNSYGCATSTPYSTSRLMLLNMPGQLPQTLSSPSTRLITEPPQATLWSPSMVCGMTTPPTSPGNVPPDLSHPYSKVFGTTGGKGTPLGTPATSPPPAPLCHSDDYVHISLPQATVTPPRKEERMDSARPCLHRQHHLLNDRGSEEPPGSKGSVTLSDLPGFLGDLASEEDSIEKDKEEAAISRELSEITTAEAEPVVPRGGFDSPFYRDSLPGSQRKTHSAASSSQGASVNPEPLHSSLDKLGPDTPKQAFTPIDLPCGSADESPAGDRECQTSLETSIFTPSPCKIPPPTRVGFGSGQPPPYDHLFEVALPKTAHHFVIRKTEELLKKAKGNTEEDGVPSTSPMEVLDRLIQQGADAHSKELNKLPLPSKSVDWTHFGDEIRTLRDQLLLLHNQLLYERFKRQQHALRNRRLLRKVIKAAALEEHNAAMKDQLKLQEKDIQMWKVSLQKEQARYNQLQEQRDTMVTKLHSQIRQLQHDREEFYNQSQELQTKLEDCRNMIAELRIELKKANNKVCHTELLLSQVSQKLSNSESVQQQMEFLNRQLLVLGEVNELYLEQLQNKHSDTTKEVEMMKAAYRKELEKNRSHVLQQTQRLDTSQKRILELESHLAKKDHLLLEQKKYLEDVKLQARGQLQAAESRYEAQKRITQVFELEILDLYGRLEKDGLLKKLEEEKAEAAEAAEERLDCCNDGCSDSMVGHNEEASGHNGETKTPRPSSARGSSGSRGGGGSSSSSSELSTPEKPPHQRAGPFSSRWETTMGEASASIPTTVGSLPSSKSFLGMKARELFRNKSESQCDEDGMTSSLSESLKTELGKDLGVEAKIPLNLDGPHPSPPTPDSVGQLHIMDYNETHHEHS

SEQ ID NO: 25193 - protein, 807 aa, Homo sapiens
MAALSGGGGGGAEPGQALFNGDMEPEAGAGAGAAASSAADPAIPEEVWNIKQMIKLTQEHIEALLDKFGGEHNPPSIYLEAYEEYTSKLDALQQREQQLLESLGNGTDFSVSSSASMDTVTSSSSSSLSVLPSSLSVFQNPTDVARSNPKSPQKPIVRVFLPNKQRTVVPARCGVTVRDSLKKALMMRGLIPECCAVYRIQDGEKKPIGWDTDISWLTGEELHVEVLENVPLTTHNFVRKTFFTLAFCDFCRKLLFQGFRCQTCGYKFHQRCSTEVPLMCVNYDQLDLLFVSKFFEHHPIPQEEASLAETALTSGSSPSAPASDSIGPQILTSPSPSKSIPIPQPFRPADEDHRNQFGQRDRSSSAPNVHINTIEPVNIDDLIRDQGFRGDGAPLNQLMRCLRKYQSRTPSPLLHSVPSEIVFDFEPGPVFRGSTTGLSATPPASLPGSLTNVKALQKSPGPQRERKSSSSSEDRNRMKTLGRRDSSDDWEIPDGQITVGQRIGSGSFGTVYKGKWHGDVAVKMLNVTAPTPQQLQAFKNEVGVLRKTRHVNILLFMGYSTKPQLAIVTQWCEGSSLYHHLHIIETKFEMIKLIDIARQTAQGMDYLHAKSIIHRDLKSNNIFLHEDLTVKIGDFGLATVKSRWSGSHQFEQLSGSILWMAPEVIRMQDKNPYSFQSDVYAFGIVLYELMTGQLPYSNINNRDQIIFMVGRGYLSPDLSKVRSNCPKAMKRLMAECLKKKRDERPLFPQILASIELLARSLPKIHRSASEPSLNRAGFQTEDFSLYACASPKTPIQAGGYGEFAAFK

SEQ ID NO: 25194 - protein, 840 aa, Homo sapiens
MAGPGSTGGQIGAAALAGGARSKVAPSVDFDHSCSDSVEYLTLNFGPFETVHRWRRLPPCDEFVGARRSKHTVVAYKDAIYVFGGDNGKTMLNDLLRFDVKDCSWCRAFTTGTPPAPRYHHSAVVYGSSMFVFGGYTGDIYSNSNLKNKNDLFEYKFATGQWTEWKIEGRLPVARSAHGATVYSDKLWIFAGYDGNARLNDMWTIGLQDRELTCWEEVAQSGEIPPSCCNFPVAVCRDKMFVFSGQSGAKITNNLFQFEFKDKTWTRIPTEHLLRGSPPPPQRRYGHTMVAFDRHLYVFGGAADNTLPNELHCYDVDFQTWEVVQPSSDSEVGGAEVPERACASEEVPTLTYEERVGFKKSRDVFGLDFGTTSAKQPTQPASELPSGRLFHAAAVISDAMYIFGGTVDNNIRSGEMYRFQFSCYPKCTLHEDYGRLWESRQFCDVEFVLGEKEECVQGHVAIVTARSRWLRRKITQARERLAQKLEQEAAPVPREAPGVAAGGARPPLLHVAIREAEARPFEVLMQFLYTDKIKYPRKGHVEDVLLIMDVYKLALSFQLCRLEQLCRQYIEASVDLQNVLVVCESAARLQLSQLKEHCLNFVVKESHFNQVIMMKEFERLSSPLIVEIVRRKQQPPPRTPLDQPVDIGTSLIQDMKAYLEGAGAEFCDITLLLDGHPRPAHKAILAARSSYFEAMFRSFMPEDGQVNISIGEMVPSRQAFESMLRYIYYGEVNMPPEDSLYLFAAPYYYGFYNNRLQAYCKQNLEMNVTVQNVLQILEAADKTQALDMKRHCLHIIVHQFTKVSKLPTLRSLSQQLLLDIIDSLASHISDKQCAELGADI

SEQ ID NO: 25195 - protein, 668 aa, Homo sapiens
PSRTEKKESKCPTPGCDGTGHVTGLYPHHRSLSGCPHKDRVPPEILAMHESVLKCPTPGCTGRGHVNSNRNSHRSLSGCPIAAAEKLAKAQEKHQSCDVSKSSQASDRVLRPMCFVKQLEIPQYGYRNNVPTTTPRSNLAKELEKYSKTSFEYNSYDNHTYGKRAIAPKVQTRDISPKGYDDAKRYCKDPSPSSSSTSSYAPSSSSNLSCGGGSSASSTCSKSSFDYTHDMEAAHMAATAILNLSTRCREMPQNLSTKPQDLCATRNPDMEVDENGTLDLSMNKQRPRDSCCPILTPLEPMSPQQQAVMNNRCFQLGEGDCWDLPVDYTKMKPRRIDEDESKDITPEDLDPFQEALEERRYPGEVTIPSPKPKYPQCKESKKDLITCPTPGCDGSGHITGNYASHRSLSGCPRAKKSGIRIAQSKEDKEDQEPIRCPVPGCDGQGHITGKYASHRSASGCPLAAKRQKDGYLNGSQFSWKSVKTEGMSCPTPGCDGSGHVSGSFLTHRSLSGCPRATSAMKKAKLSGEQMLTIKQRASNGIENDEEIKQLDEEIKELNESNSQMEADMIKLRTQITTMESNLKTIEEENKVIEQQNESLLHELANLSQSLIHSLANIQLPHMDPINEQNFDAYVTTLTEMYTNQDRYQSPENKALLENIKQAVRGIQV

SEQ ID NO: 25196 - protein, 216 aa, Homo sapiens
MYLNRDIWKPAPCQICVCDNGAILCDKIECQDVLDCADPVTPPGECCPVCSQTPGGGNTNFGRGRKGQKGEPGLVPVVTGIRGRPGPAGPPGSQGPRGERGPKGRPGPRGPQGIDGEPGVPGQPGAPGPPGHPSHPGPDGLSRPFSAQMAGLDEKSGLGSQVGLMPGSVGPVGPRGPQGLQGQQGGAGPTGPPGEPGDPGPMGPIGSRGPEGPPGK

SEQ ID NO: 25197 - protein, 422 aa, Homo sapiens
MTVFFKTLRNHWKKTTAGLCLLTWGGHWLYGKHCDNLLRRAACQEAQVFGNQLIPPNAQVKKATVFLNPAACKGKARTLFEKNAAPILHLSGMDVTIVKTDYEGQAKKLLELMENTDVIIVAGGDGTLQEVVTGVLRRTDEATFSKIPIGFIPLGETSSLSHTLFAESGNKVQHITDATLAIVKGETVPLDVLQIKGEKEQPVFAMTGLRWGSFRDAGVKVSKYWYLGPLKIKAAHFFSTLKEWPQTHQASISYTGPTERPPNEPEETPVQRPSLYRRILRRLASYWAQPQDALSQEVSPEVWKDVQLSTIELSITTRNNQLDPTSKEDFLNICIEPDTISKGDFITIGSRKVRNPKLHVEGTECLQASQCTLLIPEGAGGSFSIDSEEYEAMPVEVKLLPRKLQFFCDPRKREQMLTSPTQ

SEQ ID NO: 25198 - protein, 1128 aa, Homo sapiens
MEELIWEQYTVTLQKDSKRGFGIAVSGGRDNPHFENGETSIVISDVLPGGPADGLLQENDRVVMVNGTPMEDVLHSFAVQQLRKSGKVAAIVVKRPRKVQVAALQASPPLDQDDRAFEVMDEFDGRSFRSGYSERSRLNSHGGRSRSWEDSPERGRPHERARSRERDLSRDRSRGRSLERGLDQDHARTRDRSRGRSLERGLDHDFGPSRDRDRDRSRGRSIDQDYERAYHRAYDPDYERAYSPEYRRGARHDARSRGPRSRSREHPHSRSPSPEPRGRPGPIGVLLMKSRANEEYGLRLGSQIFVKEMTRTGLATKDGNLHEGDIILKINGTVTENMSLTDARKLIEKSRGKLQLVVLRDSQQTLINIPSLNDSDSEIEDISEIESNRSFSPEERRHQYSDYDYHSSSEKLKERPSSREDTPSRLSRMGATPTPFKSTGDIAGTVVPETNKEPRYQEDPPAPQPKAAPRTFLRPSPEDEAIYGPNTKMVRFKKGDSVGLRLAGGNDVGIFVAGIQEGTSAEQEGLQEGDQILKVNTQDFRGLVREDAVLYLLEIPKGEMVTILAQSRADVYRDILACGRGDSFFIRSHFECEKETPQSLAFTRGEVFRVVDTLYDGKLGNWLAVRIGNELEKGLIPNKSRAEQMASVQNAQRDNAGDRADFWRMRGQRSGVKKNLRKSREDLTAVVSVSTKFPAYERVLLREAGFKRPVVLFGPIADIAMEKLANELPDWFQTAKTEPKDAGSEKSTGVVRLNTVRQIIEQDKHALLDVTPKAVDLLNYTQWFPIVIFFNPDSRQGVKTMRQRLNPTSNKSSRKLFDQANKLKKTCAHLFTATINLNSANDSWFGSLKDTIQHQQGEAVWVSEGKMEGMDDDPEDRMSYLTAMGADYLSCDSRLISDFEDTDGEGGAYTDNELDEPAEEPLVSSITRSSEPVQHEESIRKPSPEPRAQMRRAASSDQLRDNSPPPAFKPEPPKAKTQNKEESYDFSKSYEYKSNPSAVAGNETPGASTKGYPPPVAAKPTFGRSILKPSTPIPPQEGEEVGESSEEQDNAPKSVLGKVKIFEKMDHKARLQRMQELQEAQNARIEIAQKHPDIYAVPIKTHKPDPGTPQHTSKPRKKDWMCMSCRRP

SEQ ID NO: 25199 - protein, 684 aa, Homo sapiens
MAGPRACAPLLLLLLLGELLAAAGAQRVGLPGPPGPPGPPGKPGQDGIDGEAGPPGLPGPPGPKGAPGKPGKPGEAGLPGLPGVDGLTGRDGPPGPKGAPGERGSLGPPGPPGLGGKGLPGPPGEAGVSGPPGGIGLRGPPGPSGLPGLPGPPGPPGPPGHPGVLPEGATDLQCPSICPPGPPGPPGMPGFKGPTGYKGEQGEVGKDGEKGDPGPPGPAGLPGSVGLQGPRGLRGLPGPLGPPGDRGPIGFRGPPGIPGAPGKAGDRGERGPEGFRGPKGDLGRPGPKGTPGVAGPSGEPGMPGKDGQNGVPGLDGQKGEAGRNGAPGEKGPNGLPGLPGRAGSKGEKGERGRAGELGEAGPSGEPGVPGDAGMPGERGEAGHRGSAGALGPQGPPGAPGVRGFQGQKGSMGDPGLPGPQGLRGDVGDRGPGGAAGPKGDQGIAGSDGLPGDKGELGPSGLVGPKGESGSRGELGPKGTQGPNGTSGVQGVPGPPGPLGLQGVPGVPGITGKPGVPGKEASEQRIRELCGGMISEQIAQLAAHLRKPLAPGSIGRPGPAGPPGPPGPPGSIGHPGARGPPGYRGPTGELGDPGPRGNQGDRGDKGAAGAGLDGPEGDQGPQGPQGVPGTSKDGQDGAPGEPGPPGDPGLPGAIGAQGTPGICDTSACQGAVLGGVGEKSGSRSS

SEQ ID NO: 25200 - protein, 915 aa, Homo sapiens
MVKLANPLYTEWILEAIQKIKKQKQRPSEERICHAVSTSHGLDKKTVSEQLELSVQDGSVLKVTNKGLASYKDPDNPGRFSSVKPGTFPKSAKGSRGSCNDLRNVDWNKLLRRAIEGLEEPNGSSLKNIEKYLRSQSDLTSTTNNPAFQQRLRLGAKRAVNNGRLLKDGPQYRVNYGSLDGKGAPQYPSAFPSSLPPVSLLPHEKDQPRADPIPICSFCLGTKESNREKKPEELLSCADCGSSGHPSCLKFCPELTTNVKALRWQCIECKTCSACRVQGRNADNMLFCDSCDRGFHMECCDPPLSRMPKGMWICQVCRPKKKGRKLLHEKAAQIKRRYAKPIGRPKNKLKQRLLSVTSDEGSMNAFTGRGSPGRGQKTKVCTTPSSGHAASGKDSSSRLAVTDPTRPGATTKITTTSTYISASTLKVNKKTKGLIDGLTKFFTPSPDGRRSRGEIIDFSKHYRPRKKVSQKQSCTSHVLATGTTQKLKPPPSSLPPPTPISGQSPSSQKSSTATSSPSPQSSSSQCSVPSLSSLTTNSQLKALFDGLSHIYTTQGQSRKKGHPSYAPPKRMRRKTELSSTAKSKAHFFGKRDIRSRFISHSSSSSWGMARGSIFKAIAHFKRTTFLKKHRMLGRLKYKVTPQMGTPSPGKGSLTDGRIKPDQDDDTEIKINIKQESADVNVIGNKDVVTEEDLDVFKQAQELSWEKIECESGVEDCGRYPSVIEFGKYEIQTWYSSPYPQEYARLPKLYLCEFCLKYMKSKNILLRHSKKCGWFHPPANEIYRRKDLSVFEVDGNMSKIYCQNLCLLAKLFLDHKTLYYDVEPFLFYVLTKNDEKGCHLVGYFSKAICFLEEKAKQGLLKSLSPIWAVSPTWHIGRASSWSISTTTMRGTSASRQLAERRACAHMTLPPLCSTST

SEQ ID NO: 25201 - protein, 714 aa, Homo sapiens
RDGRGGGPRSTAGGVALAVVVLSLALGMSGRWVLAWYRARRAVTLHSAPPVLPADSSSPAVAPDLFWGTYRPHVYFGMKTRSPKPLLTDGKEVLLPEVGAKGQLKFISGHTSELGDFRFTLLPPTSPGDTAPKYGSYNVFWTSNPGLPLLTEMVKSRLNSWFQHRPPGAPPERYLGLPGSLKWEDRGPSGQGQGQFLIQQVTLKIPISIEFVFESGSAQAGGNQALPRLAGSLLTQALESHAEGFRERFEKTFQLKEKGLSSGEQVLGQAALSGLLGGIGYFYGQGLVLPDIGVEGSEQKVDPALFPPVPLFTAVPSRSFFPRGFLWDEGFHQLVVQRWDPSLTREALGHWLGLLNADGWIGREQILGDEARARVPPEFLVQRAVHANPPTLLLPVAHMLEVGDPDDLAFLRKALPRLHAWFSWLHQSQAGPLPLSYRWRGRDPALPTLLNPKTLPSGLDDYPRASHPSVTERHLDLRCWVALGARVLTRLAEHLGEAEVAAELGPLAASLEAAESLDELHWAPELGVFADFGNHTKAVQLKPRPPQGLVRVVGRPQPQLQYVDALGYVSLFPLLLRLLDPTSSRLGPLLDILADSRHLWSPFGLRSLAASSSFYGQRNSEHDPPYWRGAVWLNVNYLALGALHHYGHLEGPHQARAAKLHGELRANVVGNVWRQYQATGFLWEQYSDRDGRGMGCRPFHGWTSLVLLAMAEDY

SEQ ID NO: 25202 - protein, 162 aa, Homo sapiens
MPNWGGGAKCGACEKTVYHAEEIQCNGRSFHKTCFHCMACRKALDSTTVAAHESEIYCKVCYGRRYGPKGIGYGQGAGCLSTDTGEHLGLQFQHLGTRPVSAVPSVGRVWSPQMSLTKMGNFIAKFAMPKILAPRVLGLEALHNKWKRKNEEVRRFSDFLRA

SEQ ID NO: 25203 - protein, 326 aa, Homo sapiens
MMTDLKQSHSVRLNDGPFMPVLGFGTYAPDHTPKSQAAEATKVAIDVGFRHIDSAYLYQNEEEVGQAIWEKIADGTVKREEIFYTIKLWATFFRAELVHPALERSLKKLGPDYVDLFIIHVPFAMKPGKELLPKDASGEIILETVELCDTWEALEKCKEAGLTRSIGVSNFNHKLLELILNKPGLKYKPTCNQVECHPYLNQSKLLEFCKSKDIVLVAYSALGSQRDPQWVDPDCPHLLEEPILKSIAKKHSGSPGQVALRYQLQRGVVVLAKSFSQERIKENFQIFDFELTPEDMKAIDGLNRNLRYDKLQFAANHPYFPFSEEY

SEQ ID NO: 25204 - protein, 410 aa, Homo sapiens [sequence omitted]

SEQ ID NO: 25205 - protein, 184 aa, Homo sapiens
MDRKHGKYILNVEHSENQPPITHPNDQEAHSSICWCLPSNDITSDVSPNLTGVCVNPGILAHSRCLQSESCNTQVKEYCRNDWSMWKVFLACLLACVIMTAIGVLIICLVNNKGSANSSIVIQLSTNDGECVTVKPGTPSPACPPTMTTTSTVPASTATESTTSTATAATTSTEPITVAPTDHL

SEQ ID NO: 25206 - protein, 373 aa, Homo sapiens
MEEPEEPADSGQSLVPVYIYSPEYVSMCDSLAKIPKRASMVHSLIEAYALHKQMRIVKPKVASMEEMATFHTDAYLQHLQKVSQEGDDDHPDSIEYGLGYDCPATEGIFDYAAAIGGATITAAQCLIDGMCKVAINWSGGWHHAKKDEASGFCYLNDAVLGILRLRRKFERILYVDLDLHHGDGVEDAFSFTSKVMTVSLHKFSPGFFPGTGDVSDVGLGKGRYYSVNVPIQDGIQDEKYYQICESVLKEVYQAFNPKAVVLQLGADTIAGDPMCSFNMTPVGIGKCLKYILQWQLATLILGGGGYNLANTARCWTYLTGVILGKTLSSEIPDHEFFTAYGPDYVLEITPSCRPDRNEPHRIQQILNYIKAIY

SEQ ID NO: 25207 - protein, 986 aa, Homo sapiens
MSNGYSTDENFRYLISCFRARVKMYIQVEPVLDYLTFLPAEVKEQIQRTVATSGNMQAVELLLSTLEKGVWHLGWTREFVEALRRTGSPLAARYMNPELTDLPSPSFENAHDEYLQLLNLLQPTLVDKLLVRDVLDKCMEEELLTIEDRNRIAAAENNGNESGVRELLKRIVQKENWFSAFLNVLRQTGNNELVQELTGSDCSESNAEIENLSQVDGPQVEEQLLSTTVQPNLEKEVWGMENNSSESSFADSSVVSESDTSLAEGSVSCLDESLGHNSNMGSDSGTMGSDSDEENVAARASPEPELQLRPYQMEVAQPALEGKNIIICLPTGSGKTRVAVYIAKDHLDKKKKASEPGKVIVLVNKVLLVEQLFRKEFQPFLKKWYRVIGLSGDTQLKISFPEVVKSCDIIISTAQILENSLLNLENGEDAGVQLSDFSLIIIDECHHTNKEAVYNNIMRHYLMQKLKNNRLKKENKPVIPLPQILGLTASPGVGGATKQAKAEEHILKDPFKEKLLEIMTRIQTYCQMSPMSDFGTQPYEQWAIQMEKKAAKEGNRKERVCAEHLRKYNEALQINDTIRMIDAYTHLETFYNEEKDKKFAVIEDDSDEGGDDEYCDGDEDEDDLKKPLKLDETDRFLMTLFFENNKMLKRLAENPEYENEKLTKLRNTIMEQYTRTEESARGIIFTKTRQSAYALSQWITENEKFAEVGVKAHHLIGAGHSSEFKPMTQNEQKEVISKFRTGKINLLIATTVAEEGLDIKECNIVIRYGLVTNEIAMVQARGRARADESTYVLVAHSGSGVIEHETVNDFREKMMYKAIHCVQNMKPEEYAHKILELQMQSIMEKKMKTKRNIAKHYKNNPSLITFLCKNCSVLACSGEDIHVIEKMHHVNMTPEFKELYIVRENKALQKKCADYQINGEIICKCGQAWGTMMVHKGLDLPCLKIRNFVVVFKNNSTKKQYKKWVELPITFPNLDYSECCLFSDED

SEQ ID NO: 25208 - protein, 351 aa, Homo sapiens
MDQFGDILEGEVDHSFFDSDFEEGKKCETNSVFDKQNDDPKERIDKDTKNVNSNTGMQTTENYLTEKGNERNVKFPPEHPVENDVTQTVSSFSLPASSRSKKLCDVTTGLKIHVSIPNRIPKIVKEGEDDYYTDGEESSDDGKKYHVKSKSAKPSTNVKKSIRKKYCKVSSSSSSSLSSSSSGSGTDCLDAGSDSHLSDSSPSSKSSKKHVSGITLLSPKHKYKSGIKSTETQPSSTTPKCGHYPEESEDTVTDVSPLSTPDISPLQSFELGIANDQKVKIKKQENVSQEIYEDVEDLKNNSKYLKAAKKGKEKHEPDVSSKSSSVLDSSLDHRHKQKVLHDTMDLNHLLK

SEQ ID NO: 25209 - protein, 556 aa, Homo sapiens
MRVLGGRCGALLACLLLVLPVSEANFLSKQQASQVLVRKRRANSLLEETKQGNLERECIEELCNKEEAREVFENDPETDYFYPKYLVCLRSFQTGLFTAARQSTNAYPDLRSCVNAIPDQCSPLPCNEDGYMSCKDGKASFTCTCKPGWQGEKCEFDINECKDPSNINGGCSQICDNTPGSYHCSCKNGFVMLSNKKDCKDVDECSLKPSICGTAVCKNIPGDFECECPEGYRYNLKSKSCEDIDECSENMCAQLCVNYPGGYTCYCDGKKGFKLAQDQKSCEVVSVCLPLNLDTKYELLYLAEQFAGVVLYLKFRLPEISRFSAEFDFRTYDSEGVILYAESIDHSAWLLIALRGGKIEVQLKNEHTSKITTGGDVINNGLWNMVSVEELEHSISIKIAKEAVMDINKPGPLFKPENGLLETKVYFAGFPRKVESELIKPINPRLDGCIRSWNLMKQGASGIKEIIQEKQNKHCLVTVEKGSYYPGSGIAQFHIDYNNVSSAEGWHVNVTLNIRPSTGTGVMLALVSGNNTVPFAVSLVDSTSEKSQMFHSVPHQ

SEQ ID NO: 25210 - protein, 193 aa, Homo sapiens
MEEPEEPADSGQSLVPVYIYSPEYVSMCDSLAKIPKRASMVHSLIEAYALHKQMRIVKPKVASMEEMATFHTDAYLQHLQKVSQEGDDDHPDSIEYGLGYDCPATEGIFDYAAAIGGATITAAQCLIDGMCKVAINWSGGWHHAKKDEASGFCYLNDAVLGILRLRRKFERILYVDLDLHHGDGIFFFSDKLT

SEQ ID NO: 25211 - protein, 1143 aa, Homo sapiens
MEVDTEEKRHRTRSKGVRVPVEPAIQELFSCPTPGCDGSGHVSGKYARHRSVYGCPLAKKRKTQDKQPQEPAPKRKPFAVKADSSSVDECDDSDGTEDMDEKEEDEGEEYSEDNDEPGDEDEEDEEGDREEEEEIEEEDEDDDEDGEDVEDEEEEEEEEEEEEEEEENEDHQMNCHNTRIMQDTEKDDNNNDEYDNYDELVAKSLLNLGKIAEDAAYRARTESEMNSNTSNSLEDDSDKNENLGRKSELSLDLDSDVVRETVDSLKLLAQGHGVVLSENMNDRNYADSMSQQDSRNMNYVMLGKPMNNGLMEKMVEESDEEVCLSSLECLRNQCFDLARKLSETNPQERNPQQNMNIRQHVRPEEDFPGRTPDRNYSDMLNLMRLEEQLSPRSRVFASCAKEDGCHERDDDTTSVNSDRSEEVFDMTKGNLTLLEKAIALETERAKAMREKMAMEAGRRDNMRSYEDQSPRQLPGEDRKPKSSDSHVKKPYYDPSRTEKKESKCPTPGCDGTGHVTGLYPHHRSLSGCPHKDRVPPEILAMHESVLKCPTPGCTGRGHVNSNRNSHRSLSGCPIAAAEKLAKAQEKHQSCDVSKSSQASDRVLRPMCFVKQLEIPQYGYRNNVPTTTPRSNLAKELEKYSKTSFEYNSYDNHTYGKRAIAPKVQTRDISPKGYDDAKRYCKDPSPSSSSTSSYAPSSSSNLSCGGGSSASSTCSKSSFDYTHDMEAAHMAATAILNLSTRCREMPQNLSTKPQDLCATRNPDMEVDENGTLDLSMNKQRPRDSCCPILTPLEPMSPQQQAVMNNRCFQLGEGDCWDLPVDYTKMKPRRIDEDESKDITPEDLDPFQEALEERRYPGEVTIPSPKPKYPQCKESKKDLITLSGCPLADKSIRSMLATSSQELKCPTPGCDGSGHITGNYASHRSLSGCPRAKKSGIRIAQSKEDKEDQEPIRCPVPGCDGQGHITGKYASHRSASGCPLAAKRQKDGYLNGSQFSWKSVKTEGMSCPTPGCDGSGHVSGSFLTHRSLSGCPRATSAMKKAKLSGEQMLTIKQRASNGIENDEEIKQLDEEIKELNESNSQMEADMIKLRTQVTITTMESNLKTIEEENKVIEQQNESLLHELANLSQSLIHSLANIQLPHMVSD

SEQ ID NO: 25212 - protein, 577 aa, Homo sapiens
MMTPQVITPQQMQQILQQQVLSPQQLQVLLQQQQALMLQQQQLQEFYKKQQEQLQLQLLQQQHAGKQPKEQQQVATQQLAFQQQLLQMQQLQQQHLLSLQRQGLLTIQPGQPALPLQPLAQGMIPTELQQLWKEVTSAHTAEETTGNNHSSLDLTTTCVSSSAPSKTSLIMNPHASTNGQLSVHTPKRESLSHEEHPHSHPLYGHGVCKWPGCEAVCEDFQSFLKHLNSEHALDDRSTAQCRVQMQVVQQLELQLAKDKERLQAMMTHLHVKSTEPKAAPQPLNLVSSVTLSKSASEASPQSLPHTPTTPTAPLTPVTQGPSVITTTSMHTVGPIRRRYSDKYNVPISSADIAQNQEFYKNAEVRPPFTYASLIRQAILESPEKQLTLNEIYNWFTRMFAYFRRNAATWKNAVRHNLSLHKCFVRVENVKGAVWTVDEVEFQKRRPQKISGNPSLIKNMQSSHAYCTPLNAALQASMAENSIPLYTTASMGNPTLGNLASAIREELNGAMEHTNSNESDSSPGRSPMQAVHPVHVKEEPLDPEEAEGPLSLVTTANHSPDFDHDRDYEDEPVNEDME

SEQ ID NO: 25213 - protein, 1070 aa, Homo sapiens
MELFQAKDHYILQQGERALWCSRRDGGLQLRPATDLLLAWNPICLGLVEGVIGKIQLHSDLPWWLILIRQKALVGKLPGDHEVCKVTKIAVLSLSEMEPQDLELEVKESKEKEKLERRLLEELLKMFMDSESFYYSLTYDLTNSVQRQSTGERDGRPLWQKTPDVDFWIIPMIQGFVQIEELVVNYTESSDDEKSSPETPPQESTCVDDIHPRFLVALISRRSRHRAGMRYKRRGVDKNGNVANYVETEQLIHVHNHTLSFVQTRGSVPVFWSQVGYRYNPRPRLDRSEKETVAYFCAHFEEQLNIYKKQVIINLVDQAGREKIIGDAYLKQVLLFNNSHLTYVSFDFHEHCRGMKFENVQTLTDAIYDIILDMKWCWVDEAGVICKQEGIFRVNCMDCLDRTNVVQAAIARVVMEQQLKKLGVMPPEQPLPVKCNRIYQIMWANNGDSISRQYAGTAALKGDFTRTGERKLAGVMKDGVNSANRYYLNRFKDAYRQAVIDLMQGIPVTEDLYSIFTKEKEHEALHKENQRSHQELISQLLQSYMKLLLPDDEKFHGGWALIDCDPSLIDATHRDVDVLLLLSNSAYYVAYYDDEVDKVNQYQRLSLENLEKIEIGPEPTLFGKPKFSCMRLHYRYKEASGYFHTLRAVMRNPEEDGKDTLQCIAEMLQITKQAMGSDLPIIEKKLERKSSKPHEDIIGIRSQNQGSLAQGKNFLMSKFSSLNQKVKQTKSNVNIGNLRKLGNFTKPEMKVNFLKPNLKVNLWKSDSSLETMENTGVMDKVQAESDGDMSSDNDSYHSDEFLTNSKSDEDRQLANSLESVGPIDYVLPSCGIIASAPRLGSRSQSLSSTDSSVHAPSEITVAHGSGLGKGQESPLKKSPSAGDVHILTGFAKPMDIYCHRFVQDAQNKVTHLSETRSVSQQASQERNQMTNQVSNETQSESTEQTPSRPSQLDVSLSATGPQFLSVEPAHSVASQKTPTSASSMLELETGLHVTPSPSESSSSRAVSPFAKIRSSMVQVASITQAGLTHGINFAVSKVQKSPPEPEIINQVQQNELKKMFIQCQTRIIQI

SEQ ID NO: 25214 - protein, 215 aa, Homo sapiens
MLEKFCNSTFWNSSFLDSPEADLPLCFEQTVLVWIPLGYLWLLAPWQLLHVYKSRTKRSSTTKLYLAKQVFVGFLLILAAIELALVLTEDSGQATVPAVRYTNPSLYLGTWLLVLLIQYSRQWCVQKNSWFLSLFWILSILCGTFQFQTLIRTLLQGDNSNLAYSCLFFISYGFQILILIFSAFSENNESSNNPSSIASFLSSITYSWYDSYLGG

SEQ ID NO: 25215 - protein, 1433 aa, Homo sapiens
MYQPEDDNNSDVTSDDDMTRNRRESSPPHSVHSFSGDRDWDRRGRSRDMEPRDRWSHTRNPRSRMPPRDLSLPVVAKTSFEMDREDDRDSRAYESRSQDAESYQNVVDLAEDRKPHNTIQDNMENYRKLLSLGLKTMPEAKKSTHRRGICEDESSHGVIMEKFIKDVSRSSKSGRARESSDRSQRFPRMSDDNWKDISLNKRESVIQQRVYEGNAFRGGFRFNSTLVSRKRVLERKRRYHFDTDGKGSIHDQKGCPRKKPFECGSEMRKAMSVSSLSSLSSPSFTESQPIDFGAMPYVCDECGRSFSVISEFVEHQIMHTRENLYEYGESFIHSVAVSEVQKSQVGGKRFECKDCGETFNKSAALAEHRKIHARGYLVECKNQECEEAFMPSPTFSELQKIYGKDKFYECRVCKETFLHSSALIEHQKIHFGDDKDNEREHERERERERGETFRPSPALNEFQKMYGKEKMYECKVCGETFLHSSSLKEHQKIHTRGNPFENKGKVCEETFIPGQSLKRRQKTYNKEKLCDFTDGRDAFMQSSELSEHQKIHSRKNLFEGRGYEKSVIHSGPFTESQKSHTITRPLESDEDEKAFTISSNPYENQKIPTKENVYEAKSYERSVIHSLASVEAQKSHSVAGPSKPKVMAESTIQSFDAINHQRVRAGGNTSEGREYSRSVIHSLVASKPPRSHNGNELVESNEKGESSIYISDLNDKRQKIPARENPCEGGSKNRNYEDSVIQSVFRAKPQKSVPGEGSGEFKKDGEFSVPSSNVREYQKARAKKKYIEHRSNETSVIHSLPFGEQTFRPRGMLYECQECGECFAHSSDLTEHQKIHDREKPSGSRNYEWSVIRSLAPTDPQTSYAQEQYAKEQARNKCKDFRQFFATSEDLNTNQKIYDQEKSHGEESQGENTDGEETHSEETHGQETIEDPVIQGSDMEDPQKDDPDDKIYECEDCGLGFVDLTDLTDHQKVHSRKCLVDSREYTHSVIHTHSISEYQRDYTGEQLYECPKCGESFIHSSFLFEHQRIHEQDQLYSMKGCDDGFIALLPMKPRRNRAAERNPALAGSAIRCLLCGQGFIHSSALNEHMRLHREDDLLEQSQMAEEAIIPGLALTEFQRSQTEERLFECAVCGESFVNPAELADHVTVHKNEPYEYGSSYTHTSFLTEPLKGAIPFYECKDCGKSFIHSTVLTKHKELHLEEEEEDEAAAAAAAAAQEVEANVHVPQVVLRIQGLNVEAAEPEVEAAEPEVEAAEPEVEAAEPNGEAEGPDGEAAEPIGEAGQPNGEAEQPNGDADEPDGAGIEDPEERAEEPEGKAEEPEGDADEPDGVGIEDPEEGEDQEIQVEEPYYDCHECTETFTSSTAFSEHLKTHASMIIFEPANAFGECSGYIERASTSTGGANQADEKYFKCDVCGQLFNDRLSLARHQNTHTG

SEQ ID NO: 25216 - protein, 517 aa, Homo sapiens
MCVCLNKEVTCKREKCPVLSRDCALAIKQRGACCEQCKGCTYEGNTYNSSFKWQSPAEPCVLRQCQEGVVTESGVRCVVHCKNPLEHLGMCCPTCPGCVFEGVQYQEGEEFQPEGSKCTKCSCTGGRTQCVREVCPILSCPQHLSHIPPGQCCPKCLGQRKVFDLPFGSCLFRSDVYDNGSSFLYDNCTACTCRDSTVVCKRKCSHPGGCDQGQEGCCEECLLRVPPEDIKVCKFGNKIFQDGEMWSSINCTICACVKGRTECRNKQCIPISSCPQGKILNRKGCCPICTEKPGVCTVFGDPHYNTFDGRTFNFQGTCQYVLTKDCSSPASPFQVLVKNDARRTRSFSWTKSVELVLGESRVSLQQHLTVRWNGSRIALPCRAPHFHIDLDGYLLKVTTKAGLEISWDGDSFVEVMAAPHLKGKLCGLCGNYNGHKRDDLIGGDGNFKFDVDDFAESWRVESNEFCNRPQRKPVPELCQGTVKVKLRAHRECQKLKSWEFQTCHSTVDYATFYRHPV

SEQ ID NO: 25217 - protein, 159 aa, Homo sapiens
GAWLLGVPVCGAAELCVNSLEKFHFKSWMSKHRKTYSTEEYHHRLQTFASNWRKINAHNNGNHTFKMALNQFSDMSFAEIKHKYLWSEPQNCSATKSNYLRGTGPYPPSVDWRKKGNFVSPVKNQGACGSCWTFSTTGALESAIAIATGKMLSLPQLSS

SEQ ID NO: 25218 - protein, 838 aa, Homo sapiens
MQKRQGYCSYCRVQYNNLEQHLFSAQHRSLTRQSRRQICTSSLMERFLQDVLQHHPYHCQESSSTQDETHVNTGSSSEVVHLDDAFSEEEEEDEDKVEDEDATEERPSEVSEPIEELHSRPHKSQEGTQEVSVRPSVIQKLEKGQQQPLEFVHKIGASVRKCNLVDIGQATNNRSNLVRPPVICNAPASCLPESSNDRPVTANTTSLPPAAHLDSVSKCDPNKVEKYLEQPDGASRNPVPSSHVETTSFSYQKHKESNRKSLRMNSDKLVLWKDVKSQGKTLSAGLKFHERMGTKGSLRVKSPSKLAVNPNKTDMPSNKGIFEDTIAKNHEEFFSNMDCTQEEKHLVFNKTAFWEQKCSVSSEMKFDCISLQSASDQPQETAQDLSLWKEEQIDQEDNYESRGSEMSFDCSSSFHSLTDQSKVSAKEVNLSKEVRTDVQYKNNKSYVSKISSDCDDILHLVTNQSQMIVKEISLQNARHISLVDQSYESSSSETNFDCDASPQSTSDYPQQSVTEVNLPKEVHIGLVDKNYGSSSSEVSADSVFPLQSVVDRPPVAVTETKLRKKAHTSLVDNYGSSCSETSFDCDVSLESVVDHPQLTVKGRNLKGRQVHLKHKKRKPSSAKAHLDCDVSLGTVADESQRAVEKINLLKEKNADLMDMNCESHGPEMGFQADAQLADQSQVAEIERQKVDVDLENKSVQSSRSSLSSDSPASLYHSAHDEPQEALDEVNLKELNIDMEVRSYDCSSSELTFDSDPPLLSVTEQSHLDAEGKERHIDLEDESCESDSSEITFDSDIPLYSVIDQPEVAVYEEETVDLESKSNESCVSEITFDSDIPLH

SEQ ID NO: 25219 - protein, 350 aa, Homo sapiens
MEEPEEPADSGQSLVPVYIYSPEYVSMCDSLAKIPKRASMVHSLIEAYALHKQMRIVKPKVASMEEMATFHTDAYLQHLQKVSQEGDDDHPDSIEYGLGYDCPATEGIFDYAAAIGGATITAAQCLIDGMCKVAINWSGGWHHAKKDEASGFCYLNDAVLGILRLRRKFERILYVDLDLHHGDGVEDAFSFTSKVMTVSLHKFSPGFFPGTGDVSDVGLGKGRYYSVNVPIQDGIQDEKYYQICESVLKEVYQAFNPKAVVLQLGADTIAGDPMCSFNMTPVGIGKCLKYILQWQLATLILGGGGYNLANTARCWTYLTGVILGKTLSSEIPDHEVSKALTSPLFFKGKS

SEQ ID NO: 25220 - protein, 4655 aa, Homo sapiens
MDRGPAAVACTLLLALVACLAPASGQECDSAHFRCGSGHCIPADWRCDGTKDCSDDADEIGCAVVTCQQGYFKCQSEGQCIPNSWVCDQDQDCDDGSDERQDCSQSTCSSHQITCSNGQCIPSEYRCDHVRDCPDGADENDCQYPTCEQLTCDNGACYNTSQKCDWKVDCRDSSDEINCTEICLHNEFSCGNGECIPRAYVCDHDNDCQDGSDEHACNYPTCGGYQFTCPSGRCIYQNWVCDGEDDCKDNGDEDGCESGPHDVHKCSPREWSCPESGRCISIYKVCDGILDCPGREDENNTSTGKYCSMTLCSALNCQYQCHETPYGGACFCPPGYIINHNDSRTCVEFDDCQIWGICDQKCESRPGRHLCHCEEGYILERGQYCKANDSFGEASIIFSNGRDLLIGDIHGRSFRILVESQNRGVAVGVAFHYHLQRVFWTDTVQNKVFSVDINGLNIQEVLNVSVETPENLAVDWVNNKIYLVETKVNRIDMVNLDGSYRVTLITENLGHPRGIAVDPTVGYLFFSDWESLSGEPKLERAFMDGSNRKDLVKTKLGWPAGVTLDMISKRVYWVDSRFDYIETVTYDGIQRKTVVHGGSLIPHPFGVSLFEGQVFFTDWTKMAVLKANKFTETNPQVYYQASLRPYGVTVYHSLRQPYATNPCKDNNGGCEQVCVLSHRTDNDGLGFRCKCTFGFQLDTDERHCIAVQNFLIFSSQVAIRGIPFTLSTQEDVMVPVSGNPSFFVGIDFDAQDSTIFFSDMSKHMIFKQKIDGTGREILAANRVENVESLAFDWISKNLYWTDSHYKSISVMRLADKTRRTVVQYLNNPRSVVVHPFAGYLFFTDWFRPAKIMRAWSDGSHLLPVINTTLGWPNGLAIDWAASRLYWVDAYFDKIEHSTFDGLDRRRLGHIEQMTHPFGLAIFGEHLFFTDWRLGAIIRVRKADGGEMTVIRSGIAYILHLKSYDVNIQTGSNACNQPTHPNGDCSHFCFPVPNFQRVCGCPYGMRLASNHLTCEGDPTNEPPTEQCGLFSFPCKNGRCVPNYYLCDGVDDCHDNSDEQLCGTLNNTCSSSAFTCGHGECIPAHWRCDKRNDCVDGSDEHNCPTHAPASCLDTQYTCDNHQCISKNWVCDTDNDCGDGSDEKNCNSTETCQPSQFNCPNHRCIDLSFVCDGDKDCVDGSDEVGCVLNCTASQFKCASGDKCIGVTNRCDGVFDCSDNSDEAGCPTRPPGMCHSDEFQCQEDGICIPNFWECDGHPDCLYGSDEHNACVPKTCPSSYFHCDNGNCIHRAWLCDRDNDCGDMSDEKDCPTQPFRCPSWQWQCLGHNICVNLSVVCDGIFDCPNGTDESPLCNGNSCSDFNGGCTHECVQEPFGAKCLCPLGFLLANDSKTCEDIDECDILGSCSQHCYNMRGSFRCSCDTGYMLESDGRTCKVTASESLLLLVASQNKIIADSVTSQVHNIYSLVENGSYIVAVDFDSISGRIFWSDATQGKTWSAFQNGTDRRVVFDSSIILTETIAIDWVGRNLYWTDYALETIEVSKIDGSHRTVLISKNLTNPRGLALDPRMNEHLLFWSDWGHHPRIERASMDGSMRTVIVQDKIFWPCGLTIDYPNRLLYFMDSYLDYMDFCDYNGHHRRQVIASDLIIRHPYALTLFEDSVYWTDRATRRVMRANKWHGGNQSVVMYNIQWPLGIVAVHPSKQPNSVNPCAFSRCSHLCLLSSQGPHFYSCVCPSGWSLSPDLLNCLRDDQPFLITVRQHIIFGISLNPEVKSNDAMVPIAGIQNGLDVEFDDAEQYIYWVENPGEIHRVKTDGTNRTVFASISMVGPSMNLALDWISRNLYSTNPRTQSIEVLTLHGDIRYRKTLIANDGTALGVGFPIGITVDPARGKLYWSDQGTDSGVPAKIASANMDGTSVKTLFTGNLEHLECVTLDIEEQKLYWAVTGRGVIERGNVDGTDRMILVHQLSHPWGIAVHDSFLYYTDEQYEVIERVDKATGANKIVLRDNVPNLRGLQVYHRRNAAESSNGCSNNMNACQQICLPVPGGLFSCACATGFKLNPDNRSCSPYNSFIVVSMLSAIRGFSLELSDHSETMVPVAGQGRNALHVDVDVSSGFIYWCDFSSSVASDNAIRRIKPDGSSLMNIVTHGIGENGVRGIAVDWVAGNLYFTNAFVSETLIEVLRINTTYRRVLLKVTVDMPRHIVVDPKNRYLFWADYGQRPKIERSFLDCTNRTVLVSEGIVTPRGLAVDRSDGYVYWVDDSLDIIARIRINGENSEVIRYGSRYPTPYGITVFENSIIWVDRNLKKIFQASKEPENTEPPTVIRDNINWLRDVTIFDKQVQPRSPAEVNNNPCLENNGGCSHLCFALPGLHTPKCDCAFGTLQSDGKNCAISTENFLIFALSNSLRSLHLDPENHSPPFQTINVERTVMSLDYDSVSDRIYFTQNLASGVGQISYATLSSGIHTPTVIASGIGTADGIAFDWITRRIYYSDYLNQMINSMAEDGSNRTVIARVPKPRAIVLDPCQGYLYWADWDTHAKIERATLGGNFRVPIVNSSLVMPSGLTLDYEEDLLYWVDASLQRIERSTLTGVDREVIVNAAVHAFGLTLYGQYIYWTDLYTQRIYRANKYDGSGQIAMTTNLLSQPRGINTVVKNQKQQCNNPCEQFNGGCSHICAPGPNGAECQCPHEGNWYLANNRKHCIVDNGERCGASSFTCSNGRCISEEWKCDNDNDCGDGSDEMESVCALHTCSPTAFTCANGRCVQYSYRCDYYNDCGDGSDEAGCLFRDCNATTEFMCNNRRCIPREFICNGVDNCHDNNTSDEKNCPDRTCQSGYTKCHNSNICIPRVYLCDGDNDCGDNSDENPTYCTTHTCSSSEFQCASGRCIPQHWYCDQETDCFDASDEPASCGHSERTCLADEFKCDGGRCIPSEWICDGDNDCGDMSDEDKRHQCQNQNCSDSEFLCVNDRPPDRRCIPQSWVCDGDVDCTDGYDENQNCTRRTCSENEFTCGYGLCIPKIFRCDRHNDCGDYSDERGCLYQTCQQNQFTCQNGRCISKTFVCDEDNDCGDGSDELMHLCHTPEPTCPPHEFKCDNGRCIEMMKLCNHLDDCLDNSDEKGCGINECHDPSISGCDHNCTDTLTSFYCSCRPGYKLMSDKRTCVDIDECTEMPFVCSQKCENVIGSYICKCAPGYLREPDGKTCRQNSNIEPYLIFSNRYYLRNLTIDGYFYSLILEGLDNVVALDFDRVEKRLYWIDTQRQVIERMFLNKTNKETIINHRLPAAESLAVDWVSRKLYWLDARLDGLFVSDLNGGHRRMLAQHCVDANNTFCFDNPRGLALHPQYGYLYWADWGHRAYIGRVGMDGTNKSVIISTKLEWPNGITIDYTNDLLYWADAHLGYIEYSDLEGHHRHTVYDGALPHPFAITIFEDTIYWTDWNTRTVEKGNKYDGSNRQTLVNTTHRPFDIHVYHPYRQPIVSNPCGTNNGGCSHLCLIKPGGKGFTCECPDDFRTLQLSGSTYCMPMCSSTQFLCANNEKCIPIWWKCDGQKDCSDGSDELALCPQRFCRLGQFQCSDGNCTSPQTLCNAHQNCPDGSDEDRLLCENHHCDSNEWQCANKRCIPESWQCDTFNDCEDNSDEDSSHCASRTCRPGQFRCANGRCIPQAWKCDVDNDCGDHSDEPIEECMSSAHLCDNFTEFSCKTNYRCIPKWAVCNGVDDCRDNSDEQGCEERTCHPVGDFRCKNHHCIPLRWQCDGQNDCGDNSDEENCAPRECTESEFRCVNQQCIPSRWICDHYNDCGDNSDERDCEMRTCHPEYFQCTSGHCVHSELKCDGSADCLDASDEADCPTRFPDGAYCQATMFECKNHVCIPPYWKCDGDDDCGDGSDEELHLCLDVPCNSPNRFRCDNNRCIYSHEVCNGVDDCGDGTDETEEHCRKPTPKPCTEYEYKCGNGHCIPHDNVCDDADDCGDWSDELGCNKGKERTCAENICEQNCTQLNEGGFICSCTAGFETNVFDRTSCLDINECEQFGTCPQHCRNTKGSYECVCADGFTSMSDRPGKRCAAEGSSPLLLLPDNVRIRKYNLSSERFSEYLQDEEYIQAVDYDWDPKDIGLSVVYYTVRGEGSRFGAIKRAYIPNFESGRNNLVQEVDLKLKYVMQPDGIAVDWVGRHIYWSDVKNKRIEVAKLDGRYRKWLISTDLDQPAAIAVNPKLGLMFWTDWGKEPKIESAWMNGEDRNILVFEDLGWPTGLSIDYLNNDRIYWSDFKEDVIETIKYDGTDRRVIAKEAMNPYSLDIFEDQLYWISKEKGEVWKQNKFGQGKKEKTLVVNPWLTQVRIFHQLRYNKSVPNLCKQICSHLCLLRPGGYSCACPQGSSFIEGSTTECDAAIELPINLPPPCRCMHGGNCYFDETDLPKCKCPSGYTGKYCEMAFSKGISPGTTAVAVLLTILLIVVIGALAIAGFFHYRRTGSLLPALPKLPSLSSLVKPSENGNGVTFRSGADLNMDIGVSGFGPETAIDRSMAMSEDFVMEMGKQPIIFENPMYSARDSAVKVVQPIQVTVSENVDNKNYGSPINPSEIVPETNPTSPAADGTQVTKWNLFKRKSKQTTNFENPIYAQMENEQKESVAATPPPSPSLPAKPKPPSRRDPTPTYSATEDTFKDTANLVKEDSEV

SEQ ID NO: 25221 - protein, 851 aa, Homo sapiens
MEELIWEQYTVTLQKDSKRGFGIAVSGGRDNPHFENGETSIVISDVLPGGPADGLLQENDRVVMVNGTPMEDVLHSFAVQQLRKSGKVAAIVVKRPRKVQVAALQASPPLDQDDRAFEVMDEFDGRSFRSGYSERSRLNSHGGRSRSWEDSPERGRPHERARSRERDLSRDRSRGRSLERGLDQDHARTRDRSRGRSLERGLDHDFGPSRDRDRDRSRGRSIDQDYERAYHRAYDPDYERAYSPEYRRGARHDARSRGPRSRSREHPHSRSPSPEPRGRPGPIGVLLMKSRANEEYGLRLGSQIFVKEMTRTGLATKDGNLHEGDIILKINGTVTENMSLTDARKLIEKSRGKLQLVVLRDSQQTLINIPSLNDSDSEIEDISEIESNRSFSPEERRHQYSDYDYHSSSEKLKERPSSREDTPSRLSRMGATPTPFKSTGDIAGTVVPETNKEPRYQEDPPAPQPKAAPRTFLRPSPEDEAIYGPNTKMVRFKKGDSVGLRLAGGNDVGIFVAGIQEGTSAEQEGLQEGDQILKVNTQDFRGLVREDAVLYLLEIPKGEMVTILAQSRADVYRDILACGRGDSFFIRSHFECEKETPQSLAFTRGEVFRVVDTLYDGKLGNWLAVRIGNELEKGLIPNKSRAEQMASVQNAQRDNAGDRADFWRMRGQRSGVKKNLRKSREDLTAVVSVSTKFPAYERVLLREAGFKRPVVLFGPIADIAMEKLANELPDWFQTAKTEPKDAGSEKSTGVVRLNTVRQIIEQDKHALLDVTPKAVDLLNYTQWFPIVIFFNPDSRQGVKTMRQRLNPTSNKSSRKLFDQANKLKKTCAHLFTATINLNSANDSWFGSLKDT

SEQ ID NO: 25222 - protein, 1117 aa, Homo sapiens
MVLAGPLAVSLLLPSLTLLVSHLSSSQDVSSEPSSEQQLCALSKHPTVAFEDLQPWVSNFTYPGARDFSQLALDPSGNQLIVGARNYLFRLSLANVSLLQATEWASSEDTRRSCQSKGKTEWCEREISSIAPGELCCLLLSFLPQEECQNYVRVLIVAGRKVFMCGTNAFSPMCTSRQVGNLSRTIEKINGVARCPYDPRHNSTAVISSQGELYAATVIDFSGRDPAIYRSLGSGPPLRTAQYNSKWLNEPNFVAAYDIGLFAYFFLRENAVEHDCGRTVYSRVARVCKNDVGGRFLLEDTWTTFMKARLNCSRPGEVPFYYNELQSAFHLPEQDLIYGVFTTNVNSIAASAVCAFNLSAISQAFNGPFRYQENPRAAWLPIANPIPNFQCGTLPETGPNENLTERSLQDAQRLFLMSEAVQPVTPEPCVTQDSVRFSHLVVDLVQAKDTLYHVLYIGTESGTILKALSTASRSLHGCYLEELHVLPPGRREPLRSLRILHSARALFVGLRDGVLRVPLERCAAYRSQGACLGARDPYCGWDGKQQRCSTLEDSSNMSLWTQNITACPVRNVTRDGGFGPWSPWQPCEHLDGDNSGSCLCRARSCDSPRPRCGGLDCLGPAIHIANCSRNGAWTPWSSWALCSTSCGIGFQVRQRSCSNPAPRHGGRICVGKSREERFCNENTPCPVPIFWASWGSWSKCSSNCGGGMQSRRRACENGNSCLGCGVEFKTCNPEGCPEVRRNTPWTPWLPVNVTQGGARQEQRFRFTCRAPLADPHGLQFGRRRTETRTCPADGSGSCDTDALVEVLLRSGSTSPHTVSGGWAAWGPWSSCSRDCELGFRVRKRTCTNPEPRNGGLPCVGDAAEYQDCNPQACPVRGAWSCWTSWSPCSASCGGGHYQRTRSCTSPAPSPGEDICLGLHTEEALCATQACPEGWSPWSEWSKCTDDGAQSRSRHCEELLPGSSACAGNSSQSRPCPYSEIPVILPASSMEEATDCAGFNLIHLVATGISCFLGSGLLTLAVYLSCQHCQRQSQESTLVHPATPNHLHYKGGGTPKNEKYTPMEFKTLNKNNLIPDDRANFYPLQQTNVYTTTYYPSPLNKHSFRPEASPGQRCFPNS

SEQ ID NO: 25223 - protein, 979 aa, Homo sapiens
MGFVRQIQLLLWKNWTLRKRQKIRFVVELVWPLSLFLVLIWLRNANPLYSHHECHFPNKAMPSAGMLPWLQGIFCNVNNPCFQSPTPGESPGIVSNYNNSILARVYRDFQELLMNAPESQHLGRIWTELHILSQFMDTLRTHPERIAGRGIRIRDILKDEETLTLFLIKNIGLSDSVVYLLINSQVRPEQFAHGVPDLALKDIACSEALLERFIIFSQRRGAKTVRYALCSLSQGTLQWIEDTLYANVDFFKLFRVLPTLLDSRSQGINLRSWGGILSDMSPRIQEFIHRPSMQDLLWVTRPLMQNGGPETFTKLMGILSDLLCGYPEGGGSRVLSFNWYEDNNYKAFLGIDSTRKDPIYSYDRRTTSFCNALIQSLESNPLTKIAWRAAKPLLMGKILYTPDSPAARRILKNANSTFEELEHVRKLVKAWEEVGPQIWYFFDNSTQMNMIRDTLGNPTVKDFLNRQLGEEGITAEAILNFLYKGPRESQADDMANFDWRDIFNITDRTLRLVNQYLECLVLDKFESYNDETQLTQRALSLLEENMFWAGVVFPDMYPWTSSLPPHVKYKIRMDIDVVEKTNKIKDRYWDSGPRADPVEDFRYIWGGFAYLQDMVEQGITRSQVQAEAPVGIYLQQMPYPCFVDDSFMIILNRCFPIFMVLAWIYSVSMTVKSIVLEKELRLKETLKNQGVSNAVIWCTWFLDSFSIMSMSIFLLTIFIMSLLSPVAFGFGTEYLVRFEEQGLGLQWSNIGNSPTEGDEFSFLLSMQMMLLDAAVYGLLAWYLDQVFPGDYGTPLPWYFLLQESYWLGGEGCSTREERALEKTEPLTEETEDPEHPEGIHDSFFEREHPGWVPGVCVKNLVKIFEPCGRPAVDRLNITFYENQITAFLGHNGAGKTTTFSAGAPLSSKGPERHLLRGEHGPPWFPKEQQTRTSQGAANPRDTVFKSFGEPQEGTTACTPCDGMFSRAVQCEWNVGPVPF

SEQ ID NO: 25224 - protein, 771 aa, Homo sapiens
MVDLESEVPPLPPRYRFRDLLLGDQGWQNDDRVQVEFYMNENTFKERLKLFFIKNQRSSLRIRLFNFSLKLLSCLLYIIRVLLENPSQGNEWSHIFWVNRSLPLWGLQVSVALISLFETILLGYLSYKGNIWEQILRIPFILEIINAVPFIISIFWPSLRNLFVPVFLNCWLAKHALENMINDLHRAIQRTQSAMFNQVLILISTLLCLIFTCICGIQHLERIGKKLNLFDSLYFCIVTFSTVGFGDVTPETWSSKLFVVAMICVALVVLPIQFEQLAYLWMERQKSGGNYSRHRAQTEKHVVLCVSSLKIDLLMDFLNEFYAHPRLQDYYVVILCPTEMDVQVRRVLQIPMWSQRVIYLQGSALKDQDLLRAKMDDAEACFILSSRCEVDRTSSDHQTILRAWAVKDFAPNCPLYVQILKPENKFHIKFADHVVCEEEFKYAMLALNCICPATSTLITLLVHTSRGQEGQQSPEQWQKMYGRCSGNEVYHIVLEESTFFAEYEGKSFTYASFHAHKKFGVCLIGVRREDNKNILLNPGPRYIMNSTDICFYINITKEENSAFKNQDQQRKSNVSRSFYHGPSRLPVHSIIASMGTVAIDLQDTSCRSASGPTLSLPTEGSKEIRRPSIAPVLEVADTSSIQTCDLLSDQSEDETTPDEEMSSNLEYAKGYPPYSPYIGSSPTFCHLLHEKVPFCCLRLDKSCQHNYYEDAKAYGFKNKLIIVAAETAGNGLYNFIVPLRAYYRPKKELNPIVLLLDNPFSHKISATDHCS

SEQ ID NO: 25225 - protein, 438 aa, Homo sapiens
DNDCGDHSDEPIEECMSSAHLCDNFTEFSCKTNYRCIPKWAVCNGVDDCRDNSDEQGCEERTCHPVGDFRCKNHHCIPLRWQCDGQNDCGDNSDEENCAPRECTESEFRCVNQQCIPSRWICDHYNDCGDNSDERDCEMRTCHPEYFQCTSGHCVHSELKCDGSADCLDASDEADCPTRFPDGAYCQATMFECKNHVCIPPYWKCDGDDDCGDGSDEELHLCLDVPCNSPNRFRCDNNRCIYSHEVCNGVDDCGDGTDETEEHCRKPTPKPCTEYEYKCGNGHCIPHDNVCDDADDCGDWSDELGCNKGKERTCAENICEQNCTQLNEGGFICSCTAGFETNVFDRTSCLDINECEQFGTCPQHCRNTKGSYECVCADGFTSMSDRPGKRCAAEALLCCYCLTMSEFENIISHLRGSQSIFKMRNISKLLIMIGIPRT

SEQ ID NO: 25226 - protein, 1547 aa, Homo sapiens
VLELLQIPYEKAEDTKMQEIMRLAHEFLQNFCAGNQQNQALLHKHINLFLNPGILEAVTMQHIFMNNFQLCSEINERVVQHFVHCIETHGRNVQYIKFLQTIVKAEGKFIKKCQDMVMAELVNSGEDVLVFYNDRASFQTLIQMMRSERDRMDENSPLMYHIHLVELLAVCTEGKNVYTEIKCNSLLPLDDIVRVVTHEDCIPEVKIAYINFLNHCYVDTEVEMKEIYTSNHMWKLFENFLVDICRACNNTSDRKHADSILEKYVTEIVMSIVTTFFSSPFSDQSTTLQTRQPVFVQLLQGVFRVYHCNWLMPSQKASVESCIRVLSDVAKSRAIAIPVDLDSQVNNLFLKSHSIVQKTAMNWRLSARNAARRDSVLAASRDYRNIIERLQDIVSALEDRLRPLVQAELSVLVDVLHRPELLFPENTDARRKCESGGFICKLIKHTKQLLEENEEKLCIKVLQTLREMMTKDRGYGEKLISIDELDNAELPPAPDSENATEQELEPSPPLRQLEDHKRGEALRQVLVNRYYGNVRPSGRRESLTSFGNGPLSAGGPGKPGGGGGGSGSSSMSRGEMSLAEVQCHLDKEGASNLVIDLIMNASSDRVFHESILLAIALLEGGNTTIQHSFFCRLTEDKKSEKFFKVFYDRMKVAQQEIKATVTVNTSDLGNKKKDDEVDRDAPSRKKAKEPTTQITEEVRDQLLEASAATRKAFTTFRREADPDDHYQPGEGTQATADKAKDDLEMSAVITIMQPILRFLQLLCENHNRDLQNFLRCQNNKTNYNLVCETLQFLDCICGSTTGGLGLLGLYINEKNVALINQTLESLTEYCQGPCHENQNCIATHESNGIDIITALILNDINPLGKKRMDLVLELKNNASKLLLAIMESRHDSENAERILYNMRPKELVEVIKKAYMQGEVEFEDGENGEDGAASPRNVGHNIYILAHQLARHNKELQSMLKPGGQVDGDEALEFYAKHTAQIEIVRLDRTMEQIVFPVPSICEFLTKESKLRIYYTTERDEQGSKINDFFLRSEDLFNEMNWQKKLRAQPVLYWCARNMSFWSSISFNLAVLMNLLVAFFYPFKGVRGALPFEGFQKGRGTLEPHWSGLLWTAMLISLAIVIALPKPHGIRALIASTILRLIFSVGLQPTLFLLGAFNVCNKIIFLMSFVGNCGTFTRGYRAMVLDVEFLYHLLYLVICAMGLFVHEFFYSLLLFDLVYREETLLNVIKSVTRNGRSIILTAVLALILVYLFSIVGYLFFKDDFILEVDRLPNETAVPETGESLASEFLFSDVCRVESGENCSSPAPREELVPAEETEQDKEHTCETLLMCIVTVLSHGLRSGGGVGDVLRKPSKEEPLFAARVIYDLLFFFMVIIIVLNLIFGVIIDTFADLRSEKQKKEEILKTTCFICGLERDKFDNKTVTFEEHIKEEHNMWHYLCFIVLVKVKDSTEYTGPESYVAEMIKERNLDWFPRMRAMSLVSSDSEGEQNELRNLQEKLESTMKLVTNLSGQLSELKDQMTEQRKQKQRIGLLGHPPHMNVNPQQPA

SEQ ID NO: 25227 - protein, 1157 aa, Homo sapiens
LRYQQPGPGSSPSSFLLKQIEFLKGQLPEAPVIGKQTPSLPPSLPGLRPRFPVLLASSTRGRQVDIRGVPRGVHLRSQGLQRGFQHPSPRGRSLPQRGVDCLSSHFQELSIYQDQEQRILKFLEELGEGKATTAHDLSGKLGTPKKEINRVLYSLAKKGKLQKEAGTPPLWKIAVSTQAWNQHSGVVRPDGHSQGAPNSDPSLEPEDRNSTSVSEDLLEPFIAVSAQAWNQHSGVVRPDSHSQGSPNSDPGLEPEDSNSTSALEDPLEFLDMAEIKEKICDYLFNVSDSSALNLAKNIGLTKARDINAVLIDMERQGDVYRQGTTPPIWHLTDKKRERMQIKRNTNSVPETAPAAIPETKRNAEFLTCNIPTSNASNNMVTTEKVENGQEPVIKLENRQEARPEPARLKPPVHYNGPSKAGYVDFENGQWATDDIPDDLNSIRAAPGEFRAIMEMPSFYSHGLPRCSPYKKLTECQLKNPISGLLEYAQFASQTCEFNMIEQSGPPHEPRFKFQVVINGREFPPAEAGSKKVAKQDAAMKAMTILLEEAKAKDSGKSEESSHYSTEKESEKTAESQTPTPSATSFFSGKSPVTTLLECMHKLGNSCEFRLLSKEGPAHEPKFQYCVAVGAQTFPSVSAPSKKVAKQMAAEEAMKALHGEATNSMASDNQVRKIGELVRYLNTNPVGGLLEYARSHGFAAEFKLVDQSGPPHEPKFVYQAKVGGRWFPAVCAHSKKQGKQEAADAALRVLIGENEKAERMGFTELPLTGSTFHDQIAMLSHRCFNTLTNSFQPSLLGRKILAAIIMKKDSEDMGVVVSLGTGNRCVKGDSLSLKGETVNDCHAEIISRRGFIRFLYSELMKYNSQTAKDSIFEPAKGGEKLQIKKTVSFHLYISTAPCGDGALFDKSCSDRAMESTESRHYPVFENPKQGKLRTKVENGEGTIPVESSDIVPTWDGIRLGERLRTMSCSDKILRWNVLGLQGALLTHFLQPIYLKSVTLGYLFSQGHLTRAICCRVTRDGSAFEDGLRHPFIVNHPKVGRVSIYDSKRQSGKTKETSVNWCLADGYDLEILDGTRGTVDGPRNELSRVSKKNIFLLFKKLCSFRYRRDLLRLSYGEAKKAARDYETAKNYFKKGLKDMGYGNWISKPQEEKNFYLCPV

SEQ ID NO: 25228 - protein, 1864 aa, Homo sapiens
MDRNYATSGFTEPPPPPPPAPPAAPVPASAAAQPPAPAWAYEPRAAAAAASSSCSSGSCSSGSSPSLKASLSYEEGHPSHSETDLLQRQSFAASHQLPGYAPTPQPTGLSGIFDTSVNSASSNTKESSVMNFLSTAESRTAQAAASGTTLLPQFRAPSWQTGMHSSAATELFATGPLPSTGTLPPSLSAYQHPTTFSNRNFATTSPLVLQDSTFNTTSNGILSHHDPLLQIKTSQGTVPTALAFERLGSSVLSNSIPPQSSTYRSAQESAPHLLQPQFSLLPSALGGSQQTPQAYSSTLFTSSTASIERALLRECSVIKHHQRPSGTQSIQAQLTGSQHSLHSYLSNSSVVNFQETTRQSSLSCSPIGDSTQVSNGGLQQKTSQVSVELAQSYSSAIPSSGYPPSTTKIKSCSTEQPLTSTKTPKPQSIIPPVQTLSYSKPLHNQSSVISGQAQIYSTAQLPSLLSVSQSQNYGLVQPHNVPSIVHSQVYRSSKVEKLPPLYKTLTFSGSSQTVTPENQTLNYSSNQQEVLSSVTNENYPAQTRDLSSVSQSQSYSSGHSQGLSPVSQTQVSYSSQSQVLSVVSLSESYASGESLTLTAPSLSYSSASRAQNLPDSSPTQNYISMHSSQNVQTQESSSPQSQKFLPAVQSSSFASSTHCQTLQNNITSPDPKSYAERKLDSDVYPSSKQEDGFPMQELQVLQPQASLESSTQRLSDGEINAQESTYKVSKADDRYSQSVIRSNSRLEDQVIGVALQASKKEESVVGSVTQLNQQIGQVNNAATLDLKNSTNLIQTPQIRLNTKDLKQQHPLILKVHESKVQEQHDQIINASSQIQIPNHALGHGHQASLPNTQVLLDSACDLQILQQSILQAGLGQVKASLQAQRVQSPQQIVHPFLQMEGHVIQSNGDHSQQQLHPQNSEVMKMDLSESSKPLQQHLTTKGHFSETNQHDSKNQFVSLGSMCFPEAVLLSDERNILSNVDDILAATAAACGVTPTDFSKSTSNETMQAVEDGDSKSHFQQSLDVRHVTSDFNSMTATVGKPQNINDTSLNGNQVTVNLSPVPALQSKMTLDQQHIETPGQNIPTKVTSAVVGPSHEVQEQSSGPFKKQSATNLESEEDSEAPVDSTLNNNRNQEFVSSSRSISGENATSESEFTLGGDDSGVSMNPARSALALLAMAQSGDAVSVKIEEENQDLMHFNLQKKRAKGKGQVKEEDNSNQKQLKRPAQGKRQNPRGTDIYLPYTPPSSESCHDGYQHQEKMRQKIKEVEEKQPEVKTGFIASFLDFLKSGPKQQFSTLAVRMPNRTRRPGTQMVRTFCPPPLPKPSSTTPTPLVSETGGNSPSDKVDNELKNLEHLSSFSSDEDDPGYSQDAYKSVSTPLTTLDATSDKKKKTEALQVATTSPTANTTGTATTSSTTVGAVKQEPLHSTSYAVNILENISSSESSKPIELDGLPSDQFAKGQDTVAIEGFTDEEDTESGGEGQYRERDEFVVKIEDIETFKEALKTGKEPPAIWKVQKALLQKFVPEIRDGQREFAATNSYLGYFGDAKSKYKRIYVKFIENANKKEYVRVCSKKPRNKPSQTIRTVQAKPSSSSKTSDPLASKTTTTKAPSVKPKVKQPKVKAEPPPKKRKKWKEEFSSSQSDSSPEIHTSSSDDEEFEPPAPFVTRFLNTRAMKETFKSYMELLVSIALDPDTMQALEKSNDELLLPHMKKIDGMLNDNRKRLLLNLHLDQSFKNALESFPELTIITRDSKAKSGGTAISKIKMNGKAYNKKTLRTSKTTTKSAQEFAVDPEKIQLYSLYHSLHHYKYHVYLICKDEISSVQKKNEDLGQEEIVQLCMKNVKWVEDLFEKFGELLNHVQQKCS

SEQ ID NO: 25229 - protein, 1041 aa, Homo sapiens
MEAKVRPSRRSRAQRDRGRRREAARDARAQSPSSGDEPEPSPGKENAGLRGAPPRGAAPAPRTARPPRRRRRESSSQEEEVIDGFAIASFSTLEALEKDMALKPHERKEKWERRLIKKPRESETCPPAEPSENRRPLEAGSPGQDLEPACDGARKVPLQPSKQMKVTVSKGGDRDSDDDSVLEATSSRDPLSDSSAHAVSGRGYSCDSESGPDDKASVGSEKLFAPGTDKGPALEKSEAKAGPVPKVSGLERSRELSAESFLPTASPAPHAAPCPGPPPGSRANPLVKKEPPAPHRHTPQPPPPQPRGLLPTHVPASLGAFAGHSQAAANGLHGLSRSSSAPLGLGKHVSLSPHGPGPHLSTSHLALRSQAQHQLHAAMFAAPPTLPPPPALPASSLVLPGHPADASLAVSFSQPIMYCQPHSGILIDHELLRQELNTRFLVQSAERPGASLGPGALLRAEFHQHQHTHQHTHQHTHQHQHTFAPFPAGLPPTPPAAPPPFDKYAPKLDSPYFRHSSFFPSFPPAIPGLPTLLPHPGPFGSLQGAFQPKTSSPIEVARRAGAVHTLLQKAPGVSDPYRAVVKKPGRWCAVHVQIAWQIYRHQQKIKEMQLDPHKLEVGAKLDLFGRPPAPGVFAGFHYPQDLARPLFPSTGAAHPASNPFGPSAHPGSFLPTGPLTDPFSRPSTFGGLGSLSSHAFGGLGSHALAPGGSIFAPKEGSSVHGLPSPHEAWNRLHRAPPSFPAPPPWPKSVDAERVSALTNHDREPDNGKEEQERDLLEKTRLLSRASPATPAGHPVSGLLLRAQSELGRSGAPAEREAEPRVKESRSPAKEEAAKMPARASPPHSKAAPGDVKVKEERGEDEASEPPAGGLHPAPLQLGLGRERLGAPGFAWEPFRGLELPRRAFPAAAPAPGSAALLEPPERPYRDREPHGYSPERLRGELERARAPHLPPAAPALDGALLPSLGALHFPRLSPAALHNGLLARTPPAAAALGAPPPLVTAAGPPTPPGPPRSRTTPLGGLGPGEARDYSPSRNPPEVEAR

SEQ ID NO: 25230 - protein, 256 aa, Homo sapiens
MEEEGKKGKKPGIVSPFKRVFLKGEKSRDKKAHEKVTERRPLHTVVLSLPERVEPDRLLSDYIEKEVKYLGQLTSIPGYLNPSSRTEILHFIDNAKRAHQLPGHLTQEHDAVLSLSAYNVKLAWRDGEDIILRVPIHDIAAVSYVRDDAAHLVVLKTAQDPGISPSQSLCAESSRGLSAGSLSESAVGPVEACCLVILAAESKVAAEELCCLLGQVFQVVYTESTIDFLDRAIFDGASTPTHHLSLHSDFAVHISP

SEQ ID NO: 25231 - protein, 1366 aa, Homo sapiens
MKSGSGGGSPTSLWGLLFLSAALSLWPTSGEICGPGIDIRNDYQQLKRLENCTVIEGYLHILLISKAEDYRSYRFPKLTVITEYLLLFRVAGLESLGDLFPNLTVIRGWKLFYNYALVIFEMTNLKDIGLYNLRNITRGAIRIEKNADLCYLSTVDWSLILDAVSNNYIVGNKPPKECGDLCPGTMEEKPMCEKTTINNEYNYRCWTTNRCQKMCPSTCGKRACTENNECCHPECLGSCSAPDNDTACVACRHYYYAGVCVPACPPNTYRFEGWRCVDRDFCANILSAESSDSEGFVIHDGECMQECPSGFIRNGSQSMYCIPCEGPCPKVCEEEKKTKTIDSVTSAQMLQGCTIFKGNLLINIRRGNNIASELENFMGLIEVVTGYVKIRHSHALVSLSFLKNLRLILGEEQLEGNYSFYVLDNQNLQQLWDWDHRNLTIKAGKMYFAFNPKLCVSEIYRMEEVTGTKGRQSKGDINTRNNGERASCESDVLHFTSTTTSKNRIIITWHRYRPPDYRDLISFTVYYKEAPFKNVTEYDGQDACGSNSWNMVDVDLPPNKDVEPGILLHGLKPWTQYAVYVKAVTLTMVENDHIRGAKSEILYIRTNASVPSIPLDVLSASNSSSQLIVKWNPPSLPNGNLSYYIVRWQRQPQDGYLYRHNYCSKDKIPIRKYADGTIDIEEVTENPKTEVCGGEKGPCCACPKTEAEKQAEKEEAEYRKVFENFLHNSIFVPRPERKRRDVMQVANTTMSSRSRNTTAADTYNITDPEELETEYPFFESRVDNKERTVISNLRPFTLYRIDIHSCNHEAEKLGCSASNFVFARTMPAEGADDIPGPVTWEPRPENSIFLKWPEPENPNGLILMYEIKYGSQVEDQRECVSRQEYRKYGGAKLNRLNPGNYTARIQATSLSGNGSWTDPVFFYVQAKRYENFIHLIIALPVAVLLIVGGLVIMLYVFHRKRNNSRLGNGVLYASVNPEYFSAADVYVPDEWEVAREKITMSRELGQGSFGMVYEGVAKGVVKDEPETRVAIKTVNEAASMRERIEFLNEASVMKEFNCHHVVRLLGVVSQGQPTLVIMELMTRGDLKSYLRSLRPEMENNPVLAPPSLSKMIQMAGEIADGMAYLNANKFVHRDLAARNCMVAEDFTVKIGDFGMTRDIYETDYYRKGGKGLLPVRWMSPESLKDGVFTTYSDVWSFGVVLWEIATLAEQPYQGLSNEQVLRFVMEGGLLDKPDNCPDMLFELMRMCWQYNPKMRPSFLEIISSIKEEMEPGFREVSFYYSEENKLPEPEELDLEPENMESVPLDPSASSSSLPLPDRHSGHKAENGPGPGVLVLRASFDERQPYAHMNGGRKNERALPLPQSSTC

SEQ ID NO: 25232 - protein, 1146 aa, Homo sapiens
MEVDTEEKRHRTRSKGVRVPVEPAIQELFSCPTPGCDGSGHVSGKYARHRSVYGCPLAKKRKTQDKQPQEPAPKRKPFAVKADSSSVDECDDSDGTEDMDEKEEDEGEEYSEDNDEPGDEDEEDEEGDREEEEEIEEEDEDDDEDGEDVEDEEEEEEEEEEEEEEEENEDHQMNCHNTRIMQDTEKDDNNNDEYDNYDELVAKSLLNLGKIAEDAAYRARTESEMNSNTSNSLEDDSDKNENLGRKSELSLDLDSDVVRETVDSLKLLAQGHGVVLSENMNDRNYADSMSQQDSRNMNYVMLGKPMNNGLMEKMVEESDEEVCLSSLECLRNQCFDLARKLSETNPQERNPQQNMNIRQHVRPEEDFPGRTPDRNYSDMLNLMRLEEQLSPRSRVFASCAKEDGCHERDDDTTSVNSDRSEEVFDMTKGNLTLLEKAIALETERAKAMREKMAMEAGRRDNMRSYEDQSPRQLPGEDRKPKSSDSHVKKPYYDPSRTEKKESKCPTPGCDGTGHVTGLYPHHRSLSGCPHKDRVPPEILAMHESVLKCPTPGCTGRGHVNSNRNSHRSLSGCPIAAAEKLAKAQEKHQSCDVSKSSQASDRVLRPMCFVKQLEIPQYGYRNNVPTTTPRSNLAKELEKYSKTSFEYNSYDNHTYGKRAIAPKVQTRDISPKGYDDAKRYCKDPSPSSSSTSSYAPSSSSNLSCGGGSSASSTCSKSSFDYTHDMEAAHMAATAILNLSTRCREMPQNLSTKPQDLCATRNPDMEVDENGTLDLSMNKQRPRDSCCPILTPLEPMSPQQQAVMNNRCFQLGEGDCWDLPVDYTKMKPRRIDEDESKDITPEDLDPFQEALEERRYPGEVTIPSPKPKYPQCKESKKDLITLSGCPLADKSIRSMLATSSQELKCPTPGCDGSGHITGNYASHRSLSGCPRAKKSGIRIAQSKEDKEDQEPIRCPVPGCDGQGHITGKYASHRSASGCPLAAKRQKDGYLNGSQFSWKSVKTEGMSCPTPGCDGSGHVSGSFLTHRSLSGCPRATSAMKKAKLSGEQMLTIKQRASNGIENDEEIKQLDEEIKELNESNSQMEADMIKLRTQITTMESNLKTIEEENKVIEQQNESLLHELANLSQSLIHSLANIQLPHMEDGVWWGQ

SEQ ID NO: 25233 - protein, 3931 aa, Homo sapiens
MAHSCRWRFPARPGTTGGGGGGGRRGLGGAPRQRVPALLLPPGPPVGGGGPGAPPSPPAVAAAAAAAGSSGAGVPGGAAAASAASSSSASSSSSSSSSASSGPALLRVGPGFDAALQVSAAIGTNLRRFRAVFGESGGGGGSGEDEQFLGFGSDEEVRVRSPTRSPSVKTSPRKPRGRPRSGSDRNSAILSDPSVFSPLNKSETKSGDKIKKKDSKSIEKKRGRPPTFPGVKIKITHGKDISELPKGNKEDSLKKIKRTPSATFQQATKIKKLRAGKLSPLKSKFKTGKLQIGRKGVQIVRRRGRPPSTERIKTPSGLLINSELEKPQKVRKDKEGTPPLTKEDKTVVRQSPRRIKPVRIIPSSKRTDATIAKQLLQRAKKGAQKKIEKEAAQLQGRKVKTQVKNIRQFIMPVVSAISSRIIKTPRRFIEDEDYDPPIKIARLESTPNSRFSAPSCGSSEKSSAASQHSSQMSSDSSRSSSPSVDTSTDSQASEEIQVLPEERSDTPEVHPPLPISQSPENESNDRRSRRYSVSERSFGSRTTKKLSTLQSAPQQQTSSSPPPPLLTPPPPLQPASSISDHTPWLMPPTIPLASPFLPASTAPMQGKRKSILREPTFRWTSLKHSRSEPQYFSSAKYAKEGLIRKPIFDNFRPPPLTPEDVGFASGFSASGTAASARLFSPLHSGTRFDMHKRSPLLRAPRFTPSEAHSRIFESVTLPSNRTSAGTSSSGVSNRKRKRKVFSPIRSEPRSPSHSMRTRSGRLSSSELSPLTPPSSVSSSLSISVSPLATSALNPTFTFPSHSLTQSGESAEKNQRPRKQTSAPAEPFSSSSPTPLFPWFTPGSQTERGRNKDKAPEELSKDRDADKSVEKDKSRERDREREKENKRESRKEKRKKGSEIQSSSALYPVGRVSKEKVVGEDVATSSSAKKATGRKKSSSHDSGTDITSVTLGDTTAVKTKILIKKGRGNLEKTNLDLGPTAPSLEKEKTLCLSTPSSSTVKHSTSSIGSMLAQADKLPMTDKRVASLLKKAKAQLCKIEKSKSLKQTDQPKAQGQESDSSETSVRGPRIKHVCRRAAVALGRKRAVFPDDMPTLSALPWEEREKILSSMGNDDKSSIAGSEDAEPLAPPIKPIKPVTRNKAPQEPPVKKGRRSRRCGQCPGCQVPEDCGVCTNCLDKPKFGGRNIKKQCCKMRKCQNLQWMPSKAYLQKQAKAVKKKEKKSKTSEKKDSKESSVVKNVVDSSQKPTPSAREDPAPKKSSSEPPPRKPVEEKSEEGNVSAPGPESKQATTPASRKSSKQVSQPALVIPPQPPTTGPPRKEVPKTTPSEPKKKQPPPPESGPEQSKQKKVAPRPSIPVKQKPKEKEKPPPVNKQENAGTLNILSTLSNGNSSKQKIPADGVHRIRVDFKFVYCQVCCEPFHKFCLEENERPLEDQLENWCCRRCKFCHVCGRQHQATKQLLECNKCRNSYHPECLGPNYPTKPTKKKKVWICTKCVRCKSCGSTTPGKGWDAQWSHDFSLCHDCAKLFAKGNFCPLCDKCYDDDDYESKMMQCGKCDRWVHSKCENLSDEMYEILSNLPESVAYTCVNCTERHPAEWRLALEKELQISLKQVLTALLNSRTTSHLLRYRQAAKPPDLNPETEESIPSRSSPEGPDPPVLTEVSKQDDQQPLDLEGVKRKMDQGNYTSVLEFSDDIVKIIQAAINSDGGQPEIKKANSMVKSFFIRQMERVFPWFSVKKSRFWEPNKVSSNSGMLPNAVLPPSLDHNYAQWQEREENSHTEQPPLMKKIIPAPKPKGPGEPDSPTPLHPPTPPILSTDRSREDSPELNPPPGIEDNRQCALCLTYGDDSANDAGRLLYIGQNEWTHVNCALWSAEVFEDDDGSLKNVHMAVIRGKQLRCEFCQKPGATVGCCLTSCTSNYHFMCSRAKNCVFLDDKKVYCQRHRDLIKGEVVPENGFEVFRRVFVDFEGISLRRKFLNGLEPENIHMMIGSMTIDCLGILNDLSDCEDKLFPIGYQCSRVYWSTTDARKRCVYTCKIVECRPPVVEPDINSTVEHDENRTIAHSPTSFTESSSKESQNTAEIISPPSPDRPPHSQTSGSCYYHVISKVPRIRTPSYSPTQRSPGCRPLPSAGSPTPTTHEIVTVGDPLLSSGLRSIGSRRHSTSSLSPQRSKLRIMSPMRTGNTYSRNNVSSVSTTGTATDLESSAKVVDHVLGPLNSSTSLGQNTSTSSNLQRTVVTVGNKNSHLDGSSSSEMKQSSASDLVSKSSSLKGEKTKVLSSKSSEGSAHNVAYPGIPKLAPQVHNTTSRELNVSKIGSFAEPSSVSFSSKEALSFPHLHLRGQRNDRDQHTDSTQSANSSPDEDTEVKTLKLSGMSNRSSIINEHMGSSSRDRRQKGKKSCKETFKEKHSSKSFLEPGQVTTGEEGNLKPEFMDEVLTPEYMGQRPCNNVSSDKIGDKGLSMPGVPKAPPMQVEGSAKELQAPRKRTVKVTLTPLKMENESQSKNALKESSPASPLQIESTSPTEPISASENPGDGPVAQPSPNNTSCQDSQSNNYQNLPVQDRNLMLPDGPKPQEDGSFKRRYPRRSARARSNMFFGLTPLYGVRSYGEEDIPFYSSSTGKKRGKRSAEGQVDGADDLSTSDEDDLYYYNFTRTVISSGGEERLASHNLFREEEQCDLPKISQLDGVDDGTESDTSVTATTRKSSQIPKRNGKENGTENLKIDRPEDAGEKEHVTKSSVGHKNEPKMDNCHSVSRVKTQGQDSLEAQLSSLESSRRVHTSTPSDKNLLDTYNTELLKSDSDNNNSDDCGNILPSDIMDFVLKNTPSMQALGESPESSSSELLNLGEGLGLDSNREKDMGLFEVFSQQLPTTEPVDSSVSSSISAEEQFELPLELPSDLSVLTTRSPTVPSQNPSRLAVISDSGEKRVTITEKSVASSESDPALLSPGVDPTPEGHMTPDHFIQGHMDADHISSPPCGSVEQGHGNNQDLTRNSSTPGLQVPVSPTVPIQNQKYVPNSTDSPGPSQISNAAVQTTPPHLKPATEKLIVVNQNMQPLYVLQTLPNGVTQKIQLTSSVSSTPSVMETNTSVLGPMGGGLTLTTGLNPSLPTSQSLFPSASKGLLPMSHHQHLHSFPAATQSSFPPNISNPPSGLLIGVQPPPDPQLLVSESSQRTDLSTTVATPSSGLKKRPISRLQTRKNKKLAPSSTPSNIAPSDVVSNMTLINFTPSQLPNHPSLLDLGSLNTSSHRTVPNIIKRSKSSIMYFEPAPLLPQSVGGTAATAAGTSTISQDTSHLTSGSVSGLASSSSVLNVVSMQTTTTPTSSASVPGHVTLTNPRLLGTPDIGSISNLLIKASQQSLGIQDQPVALPPSSGMFPQLGTSQTPSTAAITAASSICVLPSTQTTGITAASPSGEADEHYQLQHVNQLLASKTGIHSSQRDLDSASGPQVSNFTQTVDAPNSMGLEQNKALSSAVQASPTSPGGSPSSPSSGQRSASPSVPGPTKPKPKTKRFQLPLDKGNGKKHKVSHLRTSSSEAHIPDQETTSLTSGTGTPGAEAEQQDTASVEQSSQKECGQPAGQVAVLPEVQVTQNPANEQESAEPKTVEEEESNFSSPLMLWLQQEQKRKESITEKKPKKGLVFEISSDDGFQICAESIEDAWKSLTDKVQEARSNARLKQLSFAGVNGLRMLGILHDAVVFLIEQLSGAKHCRNYKFRFHKPEEANEPPLNPHGSARAEVHLRKSAFDMFNFLASKHRQPPEYNPNDEEEEEVQLKSARRATSMDLPMPMRFRHLKKTSKEAVGVYRSPIHGRGLFCKRNIDAGEMVIEYAGNVIRSIQTDKREKYYDSKGIGCYMFRIDDSEVVDATMHGNAARFINHSCEPNCYSRVINIDGQKHIVIFAMRKIYRGEELTYDYKFPIEDASNKLPCNCGAKKCRKFLN

SEQ ID NO: 25234 - protein, 322 aa, Homo sapiens
MSKTLGSGACGEVKLAFERKTCKKVAIKIISKRKFAIGSAREADPALNVETEIEILKKLNHPCIIKIKNFFDAEDYYIVLELMEGGELFDKVVGNKRLKEATCKLYFYQMLLAVQYLHENGIIHRDLKPENVLLSSQEEDCLIKITDFGHSKILGETSLMRTLCGTPTYLAPEVLVSVGTAGYNRAVDCWSLGVILFICLSGYPPFSEHRTQVSLKDQITSGKYNFIPEVWAEVSEKALDLVKKLLVVDPKARFTTEEALRHPWLQDEDMKRKFQDLLSEENESTALPQVLAQPSTSRKRPREGEAEGAETTKRPAVCAAVL

SEQ ID NO: 25235 - protein, 482 aa, Homo sapiens
MADVLSVLRQYNIQKKEIVVKGDEVIFGEFSWPKNVKTNYVVWGTGKEGQPREYYTLDSILFLLNNVHLSHPVYVRRAATENIPVVRRPDRKDLLGYLNGEASTSASIDRSAPLEIGLQRSTQVKRAADEVLAEAKKPRIEDEECVRLDKERLAARLEGHKEGIVQTEQIRSLSEAMSVEKIAAIKAKIMAKKRSTIKTDLDDDITALKQRSFVDAEVDVTRDIVSRERVWRTRTTILQSTGKNFSKNIFAILQSVKAREEGRAPEQRPAPNAAPVDPTLRTKQPIPAAYNRYDQERFKGKEETEGFKIDTMGTYHGMTLKSVTEGASARKTQTPAAQPVPRPVSQARPPPNQKKGSRTPIIIIPAATTSLITMLNAKDLLQDLKFVPSDEKKKQGCQRENETLIQRRKDQMQPGGTAISVTVPYRVVDQPLKLMPQDWDRVVAVFVQGPAWQFKGWPWLLPDGSPVDIFAKNAGMSGLRLL

SEQ ID NO: 25236 - protein, 512 aa, Homo sapiens
DWKEQEWDPEKPNAYAGIFHFHFWRFGEWVDVVIDDRLPTVNNQLIYCHSNSRNEFWCALVEKAYAKLAGCYQALDGGNTADALVDFTGGVSEPIDLTEGDFANDETKRNQLFERMLKVHSRGGLISASIKAVTAADMEARLACGLVKGHAYAVTDVRKVRLGHGLLAFFKSEKLDMIRLRNPWGEREWNGPWSDTMTFEDVCRYFTDIIKCRVINTSHLSIHKTWEEARLHGAWTLHEDPRQNRGGGCINHKDTFFQNPQYIFEVKKPEDEVLICIQQRPKRSTRREGKGENLAIGFDIYKVEENRQYRMHSLQHKAASSIYINSRSVFLRTDQPEGRYVIIPTTFEPGHTGEFLLRVFTDVPSNCRELRLDEPPHTCWSSLCGYPQLVTQVHVLGAAGLKDSPTGANSYVIIKCEGDKVRSAVQKGTSTPEYNVKGIFYRKKLSQPITVQVWNHRVLKDEFLGQVHLKADPDNLQALHTLHLRDRNSRQPSNLPGTVAVHILSSTSLMAV

SEQ ID NO: 25237 - protein, 675 aa, Homo sapiens
MMQESGTETKSNGSAIQNGSGGSNHLLECGGLREGRSNGETPAVDIGAADLAHAQQQQQQALQVARQLLLQQQQQQQVSGLKSPKRNDKQPALQVPVSVAMMTPQVITPQQMQQILQQQVLSPQQLQVLLQQQQALMLQQQLQEFYKKQQEQLQLQLLQQQHAGKQPKEQQQVATQQLAFQQQLLQMQQLQQQHLLSLQRQGLLTIQPGQPALPLQPLAQGMIPTELQQLWKEVTSAHTAEETTGNNHSSLDLTTTCVSSSAPSKTSLIMNPHASTNGQLSVHTPKRESLSHEEHPHSHPLYGHGVCKWPGCEAVCEDFQSFLKHLNSEHALDDRSTAQCRVQMQVVQQLELQLAKDKERLQAMMTHLHVKSTEPKAAPQPLNLVSSVTLSKSASEASPQSLPHTPTTPTAPLTPVTQGPSVITTTSMHTVGPIRRRYSDKYNVPISSDIAQNQEFYKNAEVRPPFTYASLIRQAILESPEKQLTLNEIYNWFTRMFAYFRRNAATWKNAVRHNLSLHKCFVRVENVKGAVWTVDEVEFQKRRPQKISGNPSLIKNMQSSHAYCTPLNAALQASMAENSIPLYTTASMGNPTLGNLASAIREELNGAMEHTNSNESDSSPGRSPMQAVHPVHVKEEPLDPEEAEGPLSLVTTANHSPDFDHDRDYEDEPVNEDME

SEQ ID NO: 25238 - protein, 497 aa, Homo sapiens
DEVVPYSDDETEDELDDQGSAVEPEQNRVNREAEENREPFRKECTWQVKANDRKYHEQPHFMNTKFLCIKESKYAAVPQISTLAWYTTLVPLLVVLGVTAIKDLVDDVARHKMDKEINNRTCEVIKDGRFKVAKWKEIQVGDVIRLKKNDFVPADILLLSSSEPNSLCYVETAELDGETNLKFKMSLEITDQYLQREDTLATFDGFIECEEPNNRLDKFTGTLFWRNTSFPLDADKILLRGCVIRNTDFCHGLVIFAGADTKIMKNSGKTRFKRTKIDYLMNYMVYTIFVVLILLSAGLAIGHAYWEAQVGNSSWYLYDGEDDTPSYRGFLIFWGYIIVLNTMVPISLYVSVEVIRLGQSHFINWDLQMYYAEKDTPAKARTTTLNEQLGQIHYIFSDKTGTLTQNIMTFKKCCINGQIYGDHRDASQHNHNKIEQVDFSWNTYADGKLAFYDHYLIEQIQSGKEPEVRQFFFLLAVCHTVMVDRTDAFLGFLSLPC

SEQ ID NO: 25239 - protein, 1454 aa, Homo sapiens
GKQLKRCHSSQPGMLLDSWSRMVKSLNVSSSVNQASRLIDGSEPCWQSSGSQGKHWIRLEIFPDVLVHRLKMIVDPADSSYMPSLVVVSGGNSLNNLIELKTININPSDTTVPLLNDCTEYHRYIEIAIKQCRSSGIDCKIHGLILLGRIRAEEEDLAAVPFLASDNEEEEDEKGNSGSLIRKKAAGLESAATIRTKVFVWGLNDKDQLGGLKGSKIKVPSFSETLSALNVVQVAGGSKSLFAVTVEGKVYACGEATNGRLGLGISSGTVPIPRQITALSSYVVKKVAVHSGGRHATALTVDGKVFSWGEGDDGKLGHFSRMNCDKPRLIEALKTKRIRDIACGSSHSAALTSSGELYTWGLGEYGRLGHGDNTTQLKPKMVKVLLGHRVIQVACGSRDAQTLALTDEGLVFSWGDGDFGKLGRGGSEGCNIPQNIERLNGQGVCQIECGAQFSLALTKSGVVWTWGKGDYFRLGHGSDVHVRKPQVVEGLRGKKIVHVAVGALHCLAVTDSGQVYAWGDNDHGQQGNGTTTVNRKPTLVQGLEGQKITRVACGSSHSVAWTTVDVATPSVHEPVLFQTARDPLGASYLGVPSDADSSAASNKISGASNSKPNRPSLAKILLSLDGNLAKQQALSHILTALQIMYARDAVVGALMPAAMIAPVECPSFSSAAPSDASAMASPMNGEECMLAVDIEDRLSPNPWQEKREIVSSEDAVTPSAVTPSAPSASARPFIPVTDDLGAASIIAETMTKTKEDVESQNKAAGPEPQALDEFTSLLIADDTRVVVDLLKLSVCSRAGDRGRDVLSAVLSGMGTAYPQVADMLLELCVTELEDVATDSQSGRLSSQPVVVESSHPYTDDTSTSGTVKIPGAEGLRVEFDRQCSTERRHDPLTVMDGVNRIVSVRSGREWSDWSSELRIPGDELKWKFISDGSVNGWGWRFTVYPIMPAAGPKELLSDRCVLSCPSMDLVTCLLDFRLNLASNRSIVPRLAASLAACAQLSALAASHRMWALQRLRKLLTTEFGQSININRLLGENDGETRALSFTGSALAALVKGLPEALQRQFEYEDPIVRGGKQLLHSPFFKVLVALACDLELDTLPCCAETHKWAWFRRYCMASRVAVALDKRTPLPRLFLDEVAKKIRELMADSENMDVLHESHDIFKREQDEQLVQWMNRRPDDWTLSAGGSGTIYGWGHNHRGQLGGIEGAKVKVPTPCEALATLRPVQLIGGEQTLFAVTADGKLYATGYGAGGRLGIGGTESVSTPTLLESIQHVFIKKVAVNSGGKHCLALSSEGEVYSWGEAEDGKLGHGNRSPCDRPRVIESLRGIEVVDVAAGGAHSACVTAAGDLYTWGKGRYGRLGHSDSEDQLKPKLVEALQGHRVVDIACGSGDAQTLCLTDDDTVWSWGDGDYGKLGRGGSDGCKVPMKVRFIHGATMMRDNWETEPPMPSRGLGW

SEQ ID NO: 25240 - protein, 498 aa, Homo sapiens
MAGCRGSLCCCCRWCCCCGERETRTPEELTILGETQEEEDEILPRKDYESLDYDRCINDPYLEVLETMDNKKGRRYEAVKWMVVFAIGVCTGLVGLFVDFFVRLFTQLKFGVVQTSVEECSQKGCLALSLLELLGFNLTFVFLASLLVLIEPVAAGSGIPEVKCYLNGVKVPGIVRLRTLLCKVLGVLFSVAGGLFVEKEGPMIHSGSVVGAGLPQFQSISLRKIQFNFPYFRSDRDKRDFVSAGAAAGVAAAFGAPIGGTLFSLEEGSSFWNQGLTWKVLFCSMSATFTLNFFRSGIQFGSWGSFQLPGLLNFGEFKCSDSDKKCHLWTAMDLGFFVVMGVIGGLLGATFNCLNKRLAKYRMRNVHPKPKLVRVLESLLVSLVTTVVVFVASMVLGECRQMSSSSQIGNDSFQLQVTEDVNSSIKTFFCPNDTYNDMATLFFNPQESAILQLFHQDAPSLWPCSSFSISCLHVGLTAFLFQVAFLCLLCCVELLLDV

SEQ ID NO: 25241 - protein, 427 aa, Homo sapiens
MGGDLVLGLGALRRRKRLLEQEKSLAGWALVLAGTGIGLMVLHAEMLWFGGCSWALYLFLVKCTISISTFLLLCLIVAFHAKEVQLFMTDNGLRDWRVALTGRQAAQIVLELVVCGLHPAPVRGPPCVQDLGAPLTSPQPWPGFLGQGEALLSLAMLLRLYLVPRAVLLRSGVLLNASYRSIGALNQVRFRHWFVAKLYMNTHPGRLLLGLTLGLWLTTAWVLSVAERQAVNATGHLSDTLWLIPITFLTIGYGDVVPGTMWGKIVCLCTGVMGVCCTALLVAVVARKLEFNKAEKHVHNFMMDIQYTKEMKESAARVLQEAWMFYKHTRRKESHAARRHQRKLLAAINAFRQVRLKHRKLREQVNSMVDISKMHMILYDLQQNLSSSHRALEKQIDTLAGKLDALTELLSTALGPRQLPEPSQQSK

SEQ ID NO: 25242 - protein, 562 aa, Homo sapiens
MVKSRLNSWFQHRPPGAPPERYLGLPGSLKWEDRGPSGQGQGQFLIQQVTLKIPISIEFVFESGSAQAGGNQALPRLAGSLLTQALESHAEGFRERFEKTFQLKEKGLSSGEQVLGQAALSGLLGGIGYFYGQGLVLPDIGVEGSEQKVDPALFPPVPLFTAVPSRSFFPRGFLWDEGFHQLVVQRWDPSLTREALGHWLGLLNADGWIGREQILGDEARARVPPEFLVQRAVHANPPTLLLPVAHMLEVGDPDDLAFLRKALPRLHAWFSWLHQSQAGPLPLSYRWRGRDPALPTLLNPKTLPSGLDDYPRASHPSVTERHLDLRCWVALGARVLTRLAEHLGEAEVAAELGPLAASLEAAESLDELHWAPELGVFADFGNHTKAVQLKPRPPQGLVRVVGRPQPQLQYVDALGYVSLFPLLLRLLDPTSSRLGPLLDILADSRHLWSPFGLRSLAASSSFYGQRNSEHDPPYWRGAVWLNVNYLALGALHHYGHLEGPHQARAAKLHGELRANVVGNVWRQYQATGFLWEQYSDRDGRGMGCRPFHGWTSLVLLAMAEDY

SEQ ID NO: 25243 - protein, 1063 aa, Homo sapiens
MALQVELVPTGEIIRVVHPHRPCKLALGSDGVRVTMESALTARDRVGVQDFVLLENFTSEAAFIENLRRRFRENLIYTYIGPVLVSVNPYRDLQIYSRQHMERYRGVSFYEVPPHLFAVADTVYRALRTERRDQAVMISGESGAGKTEATKRLLQFYAETCPAPERGGAVRDRLLQSNPVLEAFGNAKTLRNDNSSRFGKYMDVQFDFKGAPVGGHILSYLLEKSRVVHQNHGERNFHIFYQLLEGGEEETLRRLGLERNPQSYLYLVKGQCAKVSSINDKSDWKVVRKALTVIDFTEDEVEDLLSIVASVLHLGNIHFAANEESNAQVTTENQLKYLTRLLSVEGSTLREALTHRKIIAKGEELLSPLNLEQAAYARDALAKAVYSRTFTWLVGKINRSLASKDVESPSWRSTTVLGLLDIYGFEVFQHNSFEQFCINYCNEKLQQLFIELTLKSEQEEYEAEGIAWEPVQYFNNKIICDLVEEKFKGIISILDEECLRPGEATDLTFLEKLEDTVKHHPHFLTHKLADQRTRKSLGRGEFRLLHYAGEVTYSVTGFLDKNNDLLFRNLKETMCSSKNPIMSQCFDRSELSDKKRPETVATQFKMSLLQLVEILQSKEPAYVRCIKPNDAKQPGRFDEVLIRHQVKYLGLLENLRVRRAGFAYRRKYEAFLQRYKSLCPETWPTWAGRPQDGVAVLVRHLGYKPEEYKMGRTKIFIRFPKTLFATEDALEVRRQSLATKIQAAWRGFHWRQKFLRVKRSAICIQSWWRGTLGRRKAAKRKWAAQTIRRLIRGFVLRHAPRCPENAFFLDHVRTSFLLNLRRQLPQNVLDTSWPTPPPALREASELLRELCIKNMVWKYCRSISPEWKQQLQQKAVASEIFKGKKDNYPQSVPRLFISTRLGTDEISPRVLQALGSEPIQYAVPVVKYDRKGYKPRSRQLLLTPNAVVIVEDAKVKQRIDYANLTGISVSSLSDSLFVLHVQRADNKQKGDVVLQSDHVIETLTKTALSANRVNSININQGSITFAGGPGRDGTIDFTPGSELLITKAKNGHLAVVAPRLNSR

SEQ ID NO: 25244 - protein, 1153 aa, Homo sapiens
MALRVLLLTALTLCHGFNLDTENAMTFQENARGFGQSVVQLQGSRVVVGAPQEIVAANQRGSLYQCDYSTGSCEPIRLQVPVEAVNMSLGLSLAATTSPPQLLACGPTVHQTCSENTYVKGLCFLFGSNLRQQPQKFPEALRGCPQEDSDIAFLIDGSGSIIPHDFRRMKEFVSTVMEQLKKSKTLFSLMQYSEEFRIHFTFKEFQNNPNPRSLVKPITQLLGRTHTATGIRKVVRELFNITNGARKNAFKILVVITDGEKFGDPLGYEDVIPEADREGVIRYVIGVGDAFRSEKSRQELNTIASKPPRDHVFQVNNFEALKTIQNQLREKIFAIEGTQTGSSSSFEHEMSQEGFSAAITSNGPLLSTVGSYDWAGGVFLYTSKEKSTFINMTRVDSDMNDAYLGYAAAIILRNRVQSLVLGAPRYQHIGLVAMFRQNTGMWESNANVKGTQIGAYFGASLCSVDVDSNGSTDLVLIGAPHYYEQTRGGQVSVCPLPRGQRARWQCDAVLYGEQGQPWGRFGAALTVLGDVNGDKLTDVAIGAPGEEDNRGAVYLFHGTSGSGISPSHSQRIAGSKLSPRLQYFGQSLSGGQDLTMDGLVDLTVGAQGHVLLLRSQPVLRVKAIMEFNPREVARNVFECNDQVVKGKEAGEVRVCLHVQKSTRDRLREGQIQSVVTYDLALDSGRPHSRAVFNETKNSTRRQTQVLGLTQTCETLKLQLPNCIEDPVSPIVLRLNFSLVGTPLSAFGNLRPVLAEDAQRLFTALFPFEKNCGNDNICQDDLSITFSFMSLDCLVVGGPREFNVTVTVRNDGEDSYRTQVTFFFPLDLSYRKVSTLQNQRSQRSWRLACESASSTEVSGALKSTSCSINHPIFPENSEVTFNITFDVDSKASLGNKLLLKANVTSENNMPRTNKTEFQLELPVKYAVYMVVTSHGVSTKYLNFTASENTSRVMQHQYQVSNLGQRSLPISLVFLVPVRLNQTVIWDRPQVTFSENLSSTCHTKERLPSHSDFLAELRKAPVVNCSIAVCQRIQCDIPFFGIQEEFNATLKGNLSFDWYIKTSHNHLLIVSTAEILFNDSVFTLLPGQGAFVRSQTETKVEPFEVPNPLPLIVGSSVGGLLLLALITAALYKLGFFKRQYKDMMSEGGPPGAEPQ

SEQ ID NO: 25245 - protein, 527 aa, Homo sapiens
MAMSLPGSRRTSAGSRSGGTLGRSGLAVFAQCPQLPASQNEHLPLLPASRRTSPPVSVRDAYGTSSLSSSSNSGSYKGSDSSPTPRRSMKYTLCSDNHGIKPPTPEQYLTPLQQKEVCIRHLKARLKDTQDRLQDRDTEIDDLKTQLSRMQEDWIEEECHRVEAQLALKEARKEIKQLKQVIDTVKNNLIDKDKGLQKYFVDINIQNKKLETLLHSMEVAQNGMAKEDGTGESAGGSPARSLTRSSTYTKLSDPAVCGDRQPGDPSSGSAEDGADSGFAAADDTLSRTDALEASSLLSSGVDCGTEETSLHSSFGLGPRFPASNTYEKLLCGMEAGVQASCMQERAIQTDFVQYQPDLDTILEKVTQAQVCGTDPESGDRCPELDAHPSGPRDPNSAVVVTVGDELEAPEPITRGPTPQRPGANPNPGQSVSVVCPMEEEEEAAVAEKEPKSYWSRHYIVDLLAVVVPAVPTVAWLCRSQRRQGQPIYNISSLLRGCCTVALHSIRRISCRSLSQPSPSPAGGGSQL

SEQ ID NO: 25246 - protein, 806 aa, Homo sapiens
LAQGHGVVLSENMNDRNYADSMSQQDSRNMNYVMLGKPMNNGLMEKMVEESDEEVCLSSLECLRNQCFDLARKLSETNPQERNPQQNMNIRQHVRPEEDFPGRTPDRNYSDMLNLMRLEEQLSPRSRVFASCAKEDGCHERDDDTTSVNSDRSEEVFDMTKGNLTLLEKAIALETERAKAMREKMAMEAGRRDNMRSYEDQSPRQLPGEDRKPKSSDSHVKKPYYDPSRTEKKESKCPTPGCDGTGHVTGLYPHHRSLSGCPHKDRVPPEILAMHESVLKCPTPGCTGRGHVNSNRNSHRSLSGCPIAAAEKLAKAQEKHQSCDVSKSSQASDRVLRPMCFVKQLEIPQYGYRNNVPTTTPRSNLAKELEKYSKTSFEYNSYDNHTYGKRAIAPKVQTRDISPKGYDDAKRYCKDPSPSSSSTSSYAPSSSSNLSCGGGSSASSTCSKSSFDYTHDMEAAHMAATAILNLSTRCREMPQNLSTKPQDLCATRNPDMEVDENGTLDLSMNKQRPRDSCCPILTPLEPMSPQQQAVMNNRCFQLGEGDCWDLPVDYTKMKPRRIDEDESKDITPEDLDPFQEALEERRYPGEVTIPSPKPKYPQCKESKKDLITCPTPGCDGSGHVTGNYASHRSLSGCPLADKSIRSMLATSSQELKCPTPGCDGSGHITGNYASHRSLSGCPRAKKSGIRIAQSKEDKEDQEPIRCPVPGCDGQGHITGKYASHRSASGCPLAAKRQKDGYLNGSQFSWKSVKTEGMSCPTPGCDGSGHVSGSFLTHRSLSGCPRATSAMKKAKLSGEQMLTIKQR

SEQ ID NO: 25247 - protein, 195 aa, Homo sapiens
MLEKFCNSTFWNSSFLDSPEADLPLCFEQTVLVWIPLGYLWLLAPWQLLHVYKSRTKRSSTTKLYLAKQVFVGFLLILAAIELALVLTEDSGQATVPAVRYTNPSLYLGTWLLVLLIQYSRQWCVQKNSWFLSLFWILSILCGTFQFQTLIRTLLQGDNSNLAYSCLFFISYGFQILILIFSAFSENNESSNVRF

SEQ ID NO: 25248 - protein, 429 aa, Homo sapiens
MMSHPCVSLLGVPVLNPALVPHLAQGQVLLVSDPSPNTDPAKYSESTSATRHQMKGEDAQPQEMASTSFPRASGPSPEFRQHGDSDGKRGSPQNLPIEHHFACKECGDTFRLKVLLVQHQRVHSEEKGWECGDCGKVFRGVAEFNEHRKSHVAAEPQPGPSRALENAAEKREQMEREAKPFECEECGKRFKKNAGLSQHLRVHSREKPFDCEECGRSFKVNTHLFRHQKLHTSEKPFACKACSRDFLDRQELLKHQRMHTGHLPFDCDDCGKSFRGVNGLAEHQRIHSGAKPYGCPHCGKLFRRSSELTKHRRIHTGEKPYACGQCGKAFRQSSSLLEHARIHSGERPYACGECGKAFRGPSDLIKHRRIHSGLKPYECDKCGKAFRRSSGLSRHRRIHSGARRCECSQCGRVFKRRSALQKHQPTHHE

SEQ ID NO: 25249 - protein, 109 aa, Homo sapiens
MCCNYYGNSCGYGSSYGCGYGSGYGCGYGSSYGCGYGSGYGCGYGSSYGCGYGSGYSCGYGSGSGCGYGTGYGCGYGCGYGTGYGCGCGSGSGYCGYRPFCFRRCYSSC

SEQ ID NO: 25250 - protein, 2222 aa, Homo sapiens
MTAAANWVANGASLEDCHSNLFSLAELTGIKWRRYNFGGHGDCGPIISAPAQDDPILLSFIRCLQANLLCVWRRDVKPDCKELWIFWWGDEPNLVGVIHHELQVVEEGLWENGLSYECRTLLFKAIHNLLERCLMDKNFVRIGKWFVRPYEKDEKPVNKSEHLSCAFTFFLHGESNVCTSVEIAQHQPIYLINEEHIHMAQSSPAPFQVLVSPYGLNGTLTGQAYKMSDPATRKLIEEWQYFYPMVLKKKEESKEEDELGYDDDFPVAVEVIVGGVRMVYPSAFVLISQNDIPVPQSVASAGGHIAVGQQGLGSVKDPSNCGMPLTPPTSPEQAILGESGGMQSAASHLVSQDGGMITMHSPKRSGKIPPKLHNHMVHRVWKECILNRTQSKRSQMSTPTLEEEPASNPATWDFVDPTQRVSCSCSRHKLLKRCAVGPNRPPTVSQPGFSAGPSSSSSLPPPASSKHKTAERQEKGDKLQKRPLIPFHHRPSVAEELCMEQDTPGQKLGLAGIDSSLEVSSSRKYDKQMAVPSRNTSKQMNLNPMDSPHSPISPLPPTLSPQPRGQETESLDPPSVPVNPALYGNGLELQQLSTLDDRTVLVGQRLPLMAEVSETALYCGIRPSNPESSEKWWHSYRLPPSDDAEFRPPELQGERCDAKMEVNSESTALQRLLAQPNKRFKIWQDKQPQLQPLHFLDPLPLSQQPGDSLGEVNDPYTFEDGDIKYIFTANKKCKQGTEKDSLKKNKSEDGFGTKDVTTPGHSTPVPDGKNAMSIFSSATKTDVRQDNAAGRAGSSSLTQVTDLAPSLHDLDNIFDNSDDDELGAVSPALRSSKMPAVGTEDRPLGKDGRAAVPYPPTVADLQRMFPTPPSLEQHPAFSPVMNYKDGISSETVTALGMMESPMVSMVSTQLTEFKMEVEDGLGSPKPEEIKDFSYVHKVPSFQPFVGSSMFAPLKMLPSHCLLPLKIPDACLFRPSWAIPPKIEQLPMPPAATFIRDGYNNVPSVGSLADPDYLNTPQMNTPVTLNSAAPASNSGAGVLPSPATPRFSVPTPRTPRTPRTPRGGGTASGQGSVKYDSTDQGSPASTPSTTRPLNSVEPATMQPIPEAHSLYVTLILSDSVMNIFKDRNFDSCCICACNMNIKGADVGLYIPDSSNEDQYRCTCGFSAIMNRKLGYNSGLFLEDELDIFGKNSDIGQAAERRLMMCQSTFLPQVEGTKKPQEPPISLLLLLQNQHTQPFASLNFLDYISSNNRQTLPCVSWSYDRVQADNNDYWTECFNALEQGRQYVDNPTGGKVDEALVRSATVHSWPHSNVLDISMLSSQDVVRMLLSLQPFLQDAIQKKRTGRTWENIQHVQGPLTWQQFHKMAGRGTYGSEESPEPLPIPTLLVGYDKDFLTISPFSLPFWERLLLDPYGGHRDVAYIVVCPENEALLEGAKTFFRDLSAVYEMCRLGQHKPICKVLRDGIMRVGKTVAQKLTDELVSEWFNQPWSGEENDNHSRLKLYAQVCRHHLAPYLATLQLDSSLLIPPKYQTPPAAAQGQATPGNAGPLAPNGSAAPPAGSAFNPTSNSSSTNPAASSSASGSSVPPVSSSASAPGISQISTTSSSGFSGSVGGQNPSTGGISADRTQGNIGCGGDTDPGQSSSQPSQDGQESVTERERIGIPTEPDSADSHAHPPAVVIYMVDPFTYAAEEDSTSGNFWLLSLMRCYTEMLDNLPEHMRNSFILQIVPCQYMLQTMKDEQVFYIQYLKSMAFSVYCQCRRPLPTQIHIKSLTGFGPAASIEMTLKNPERPSPIQLYSPPFILAPIKDKQTELGETFGEASQKYNVLFVGYCLSHDQRWLLASCTDLHGELLETCVVNIALPNRDPFPFPISLFVRSRRSKVSARKIGLQKLWEWCIGIVQMTSLPWRVVIGRLGRLGHGELKDWSILLGECSLQTISKKLKDVCRMCGISAADSPSILSACLVAMEPQGSFVVMPDAVTMGSVFGRSTALNMQSSQLNTPQDASCTHILVFPTSSTIQVAPANYPNEDGFSPNNDDMFVDLPFPDDMDNDIGILMTGNLHSSPNSSPVPSPGSPSGIGVGSHFQHSRSQGERLLSREAPEELKQQPLALGYFVSTAKAENLPQWFWSSCPQAQNQCPLFLKASLHHHISVAQTDELLPARNSQRVPHPLDSKTTSDVLRFVLEQYNALSWLTCNPATQDRTSCLPVHFVVLTQLYNAIMNIL

SEQ ID NO: 25251 - protein, 738 aa, Homo sapiens
MRKIRDQNSFEKLKRHHSYPLGRMAADESSQNTLRLQFKAMQEMQHKRLQKQMEKKREKELSLKSRADDQEEPLEVSDGLSLLHAGEPNSKNSFEKRVLEDEIEHLRNELRETVDENGRLYKLLKERDFEIKHLKKKIEEDRFAFTGTAGVAGDVVATKIVELSKKNRLLMAESEGAKTRVKQLTNRIQELERELQTALTRLSAKGATDAGAKPPRAQMGDRALLETPEVKALQDRLVATNLKMSDLRNQIQSVKQELRMAQKVLAREVGEDINVQQLLSSPGTWRGRAQQILVLQSKVQELEKQLGQARSQSAGTASDELSVYPDPRKLSAQEKNLLRIRSLEREKQEGLEKLASERDVLQRELEELKKKFEGMRSRNKLLSSEMKTLKSQMGTLVEKGRHDDELIDALMDQLKQLQEILGSLSLQEEKTRVSQHHLDQQLNSEAQRSNSLVAQLQAMVAEREAKVRQLEMEIGQLNVHYLRNKGVGEGSSGREVSPAYTQFLEDPGLTKSPASAGDHVGRLGSSRSVTSLGHTLVESALTRPSLPSPHRTSPRFSDSPEQKGWQAQVSEIKALWQAAEVERDRLTEFVTVLQKRVEESNSKLLESERKLQEERHRTVVLEQHLEKIRLEPGKASASQRAAPRTKTGLPTSNNRHNPTGSEKKDPSFAQLSDVPVESQMEELTTRLAIQVEENEMLKAALGSALRGKEEDFRMYHEILGQVKSVFLQALRQQKTGKQ

SEQ ID NO: 25252 - protein, 1054 aa, Homo sapiens
MKEDAKPSKDNEDAFYNSQKFEVLYCGKVTVTHKKAPSSLIDDCMEKFSLHEQQRLKIQGEQRGPDPGEDLADLEVVVPGSPGDCLPEEADGTDTHLGLPAGASQPALTSSRVCFPERILEDSGFDEQQEFRSRCSSVTGVQRRVHEGSQKSQPRRRHASAPSHVQPSDSEKNRTMLFQVGRFEINLISPDTKSVVLEKNFKDISSCSQGIKHVDHFGFICRESPEPGLSQYICYVFQCASESLVDEVMLTLKQAFSTAAALQSAKTQIKLCEACPMHSLHKLCERIEGLYPPRAKLVIQRHLSSLTDNEQADIFERVQKMKPVSDQEENELVILHLRQLCEAKQKTHVHIGEGPSTISNSTIPENATSSGRFKLDILKNKAKRSLTSSLENIFSRGANRMRGRLGSVDSFERSNSLASEKDYSPGDSPPGTPPASPPSSAWQTFPEEDSDSPQFRRRAHTFSHPPSSTKRKLNLQDGRAQGVRSPLLRQSSSEQCSDGEGRKRTSSTCSNESLSVGGTSVTPRRISWRQRIFLRVASPMNKSPSAMQQQDGLDRNELLPLSPLSPTMEEEPLVVFLSGEDDPEKIEERKKSKELRSLWRKAIHQQILLLRMEKENQKLEASRDELQSRKVKLDYEEVGACQKEVLITWDKKLLNCRAKIRCDMEDIHTLLKEGVPKSRRGEIWQFLALQYRLRHRLPNKQQPPDISYKELLKQLTAQQHAILVDLGRTFPTHPYFSVQLGPGQLSLFNLLKAYSLLDKEVGYCQGISFVAGVLLLHMSEEQAFEMLKFLMYDLGFRKQYRPDMMSLQIQMYQLSRLLHDYHRDLYNHLEENEISPSLYAAPWFLTLFASQFSLGFVARVFDIIFLQGTEVIFKVALSLLSSQETLIMECESFENIVEFLKNTLPDMNTSEMEKIITQVFEMDISKQLHAYEVEYHVLQDELQESSYSCEDSETLEKLERANSQLKRQNMDLLEKLQVAHTKIQALESNLENLLTRETKMKSLIRTLEQEKMAYQKTVEQLRKLLPADALVNCDLLLRDLNCNPNNKAKIGNKP

SEQ ID NO: 25253 - protein, 361 aa, Homo sapiens
MGSFQLEDFAAGWIGGAASVIVGHPLDTVKTRLQAGVGYGNTLSCIRVVYRRESMFGFFKGMSFPLASIAVYNSVVFGVFSNTQRFLSQHRCGEPEASPPRTLSDLLLASMVAGVVSVGLGGPVDLIKIRLQMQTQPFRDANLGLKSRAVAPAEQPAYQGPVHCITTIVRNEGLAGLYRGASAMLLRDVPGYCLYFIPYVFLSEWITPEACTGPSPCAVWLAGGMAGAISWGTATPMDVVKSRLQADGVYLNKYKGVLDCISQSYQKEGLKRHHCERGAGLPHECGHVPWVRAVAAGYPRGPRSDEPISARSLLRLSPLPDILFSLLSYLSLASPALCHPGCRSLLLQDAGLLSQLGVSSH

SEQ ID NO: 25254 - protein, 254 aa, Homo sapiens
MEEPEEPADSGQSLVPVYIYSPEYVSMCDSLAKIPKRASMVHSLIEAYALHKQMRIVKPKVASMEEMATFHTDAYLQHLQKVSQEGDDDHPDSIEYGLGYDCPATEGIFDYAAAIGGATITAAQCLIDGMCKVAINWSGGWHHAKKDEASGFCYLNDAVLGILRLRRKFERILYVDLDLHHGDEDAFSFTSKVMTVSLHKFSPGFFPGTGDVSDVGLGKGRYYSVNVPIQDGIQDEKYYQICERYEPPAPNPGL

SEQ ID NO: 25255 - protein, 686 aa, Homo sapiens
GTSFGLPQTRRISLASPRQLFKASNMTQRWQHREISNFEYLMFLNTIAGRSYNDLNQYPVFPWVITNYESEELDLTLPTNFRDLSKPIGALNPKRAAFFAERYESWEDDQVPKFHYGTHYSTASFVLAWLLRIEPFTTYFLNLQGGKFDHADRTFSSISRAWRNSQRDTSDIKELIPEFYYLPEMFVNFNNYNLGVMDDGTVVSDVELPPWAKTSEEFVHINRLALESEFVSCQLHQWIDLIFGYKQQGPEAVRALNVFYYLTYEGAVNLNSITDPVLREAVEAQIRSFGQTPSQLLIEPHPPRGSAMQVYLLLQSPLMFTDKAQQDVIMVLKFPSNSPVTHVAANTQPGLATPAVITVTANRLFAVNKWHNLPAHQGAVQDQPYQLPVEIDPLIASNTGMHRRQITDLLDQSIQVHSQCFVITSDNRYILVCGFWDKSFRVYSTDTGRLIQVVFGHWDVVTCLARSESYIGGNCYILSGSRDATLLLWYWNGKCSGIGDNPGSETAAPRAILTGHDYEVTCAAVCAELGLVLSGSQEGPCLIHSMNGDLLRTLEGPENCLKPKLIQASREGHCVIFYENGLFCTFSVNGKLQATMETDDNIRAIQLSRDGQYLLTGGDRGVVVVRQVSDLKQLFAYPGCDAGIRAMALSYDQRRPRSLQKFLSSVISVHHFWHGFRKHCAILQRL

SEQ ID NO: 25256 - protein, 418 aa, Homo sapiens
MPMLLPHPHQHFLKGLLRAPFRCYHFIFHSSTHLGSGIPCAQPFNSLGLHCTKWMLLSDGLKRKLCVQTTLKDHTEGLSDKEQRFVDKLYTGLIQGQRACLAEAITLVESTHSRKKELAQVLLQKVLLYHREQEQSNKGKPLAFRVGLSGPPGAGKSTFIEYFGKMLTERGHKLSVLAVDPSSCTSGGSLLGDKTRMTELSRDMNAYIRPSPTRGTLGGVTRTTNEAILLCEGAGYDIILIETVGVGQSEFAVADMVDMFVLLLPPAGGDELQGIKRGIIEMADLVAVTKSDGDLIVPARRIQAEYVSALKLLRKRSQVWKPKVIRISARSGEGISEMWDKMKDFQDLMLASGELTAKRRKQQKVWMWNLIQESVLEHFRTHPTVREQIPLLEQKVLIGALSPGLAADFLLKAFKSRD

SEQ ID NO: 25257 - protein, 242 aa, Homo sapiens
PKVQTRDISPKGYDDAKRYCKDPSPSSSSTSSYAPSSSSNLSCGGGSSASSTCSKSSFDYTHDMEAAHMAATAILNLSTRCREMPQNLSTKPQDLCATRNPDMEVDENGTLDLSMNKQRPRDSCCPILTPLEPMSPQQQAVMNNRCFQLGEGDCWDLPVDYTKMKPRRIDEDESKDITPEDLDPFQEALEERRYPGEVTIPSPKPKYPQCKESKKDLITLSGCPLADKSIRSMLATSSQELK

SEQ ID NO: 25258 - protein, 734 aa, Homo sapiens
MTKFQEAVTFKDVAVAFTEEELGLLDSAQRKLYRDVMLENFRNLVSVGHQSFKPDMISQLEREEKLWMKELQTQRGDRNQNEMATLHKAGLRCFSLGELSCWQIKRHIASKLARSQDSMINIEGKSSQFPKHHDSPCQVGAGESIQASVDDNCLVNHIGDHSSIIENQEFPTGKVPNSWSKIYLNETQNYQRSCKQTQMKNKLCIFAPYVDIFSCISHHHDDNIVHKRDKVHSNSDCGKDTLKVSPLTQRSIHTGQKTYQGNECEEAFNDSSSLELHKQVHLGKKSPACSTHEKDTSYSSGIPVQQSVRTGKKRYWCHECGKGFSQSSNLQTHQRVHTGEKPYTCHECGKSFNQSSHLYAHLPIHTGEKPYRCDSCGKGFSRSTDLNIHCRVHTGEKPYKCEVCGKGFTQRSHLQAHERIHTGEKPYKCGDCGKRFSCSSNLHTHQRVHTEEKPYKCDECGKCFSLSFNLHSHQRVHTGEKPYKCEECGKGFSSASSFQSHQRVHTGEKPFRCNVCGKGFSQSSYFQAHQRVHTGEKPYKCEVCGKRFNWSLNLHNHQRVHTGEKPYKCEECGKGFSQASNLQAHQSVHTGEKPFKCDACQKRFSQASHLQAHQRVHTGEKPYKCDTCGKAFSQRSNLQVHQIIHTGEKPFKCEECGKEFSWSAGLSAHQRVHTGEKPYTCQQCGKGFSQASHFHTHQRVHTGERPYICDVCCKGFSQRSHLIYHQRVHTGGNL

SEQ ID NO: 25259 - protein, 1127 aa, Homo sapiens
MEVDTEEKRHRTRSKGVRVPVEPAIQELFSVYGCPLAKKRKTQDKQPQEPAPKRKPFAVKADSSSVDECDDSDGTEDMDEKEEDEGEEYSEDNDEPGDEDEEDEEGDREEEEEIEEEDEDDDEDGEDVEDEEEEEEEEEEEEEEEENEDHQMNCHNTRIMQDTEKDDNNNDEYDNYDELVAKSLLNLGKIAEDAAYRARTESEMNSNTSNSLEDDSDKNENLGRKSELSLDLDSDVVRETVDSLKLLAQGHGVVLSENMNDRNYADSMSQQDSRNMNYVMLGKPMNNGLMEKMVEESDEEVCLSSLECLRNQCFDLARKLSETNPQERNPQQNMNIRQHVRPEEDFPGRTPDRNYSDMLNLMRLEEQLSPRSRVFASCAKEDGCHERDDDTTSVNSDRSEEVFDMTKGNLTLLEKAIALETERAKAMREKMAMEAGRRDNMRSYEDQSPRQLPGEDRKPKSSDSHVKKPYYGKDPSRTEKKESKCPTPGCDGTGHVTGLYPHHRSLSGCPHKDRVPPEILAMHESVLKCPTPGCTGRGHVNSNRNSHRSLSGCPIAAAEKLAKAQEKHQSCDVSKSSQASDRVLRPMCFVKQLEIPQYGYRNNVPTTTPRSNLAKELEKYSKTSFEYNSYDNHTYGKRAIAPKVQTRDISPKGYDDAKRYCKDPSPSSSSTSSYAPSSSSNLSCGGGSSASSTCSKSSFDYTHDMEAAHMAATAILNLSTRCREMPQNLSTKPQDLCATRNPDMEVDENGTLDLSMNKQRPRDSCCPILTPLEPMSPQQQAVMNNRCFQLGEGDCWDLPVDYTKMKPRRIDEDESKDITPEDLDPFQEALEERRYPGEVTIPSPKPKYPQCKESKKDLITLSGCPLADKSIRSMLATSSQELKCPTPGCDGSGHITGNYASHRSLSGCPRAKKSGIRIAQSKEDKEDQEPIRCPVPGCDGQGHITGKYASHRSASGCPLAAKRQKDGYLNGSQFSWKSVKTEGMSCPTPGCDGSGHVSGSFLTHRSLSGCPRATSAMKKAKLSGEQMLTIKQRASNGIENDEEIKQLDEEIKELNESNSQMEADMIKLRTQITTMESNLKTIEEENKVIEQQNESLLHELANLSQSLIHSLANIQLPHMEDGVWWGQ

SEQ ID NO: 25260 - protein, 2734 aa, Homo sapiens
MSDKMSSFLHIGDICSLYAEGSTNGFISTLGLVDDRCVVQPETGDLNNPPKKFRDCLFKLCPMNRYSAQKQFWKAAKPGANSTTDAVLLNKLHHAADLEKKQNETENRKLLGTVIQYGNVIQLLHLKSNKYLTVNKRLPALLEKNAMRVTLDEAGNEGSWFYIQPFYKLRSIGDSVVIGDKVVLNPVNAGQPLHASSHQLVDNPGCNEVNSVNCNTSWKIVLFMKWSDNKDDILKGGDVVRLFHAEQEKFLTCDEHRKKQHVFLRTTGRQSATSATSSKALWEVEVVQHDPCRGGAGYWNSLFRFKHLATGHYLAAEVDPDQDASRSRLRNAQEKMVYSLVSVPEGNDISSIFELDPTTLRGGDSLVPRNSYVRLRHLCTNTWVHSTNIPIDKEEEKPVMLKIGTSPVKEDKEAFAIVPVSPAEVRDLDFANDASKVLGSIAGKLEKGTITQNERRSVTKLLEDLVYFVTGGTNSGQDVLEVVFSKPNRERQKLMREQNILKQIFKLLQAPFTDCGDGPMLRLEELGDQRHAPFRHICRLCYRVLRHSQQDYRKNQEYIAKQFGFMQKQIGYDVLAEDTITALLHNNRKLLEKHITAAEIDTFVSLVRKNREPRFLDYLSDLCVSMNKSIPVTQELICKAVLNPTNADILIETKLVLSRFEFEGVSSTGENALEAGEDEEEVWLFWRDSNKEIRSKSVRELAQDAKEGQKEDRDVLSYYRYQLNLFARMCLDRQYLAINEISGQLDVDLILRCMSDENLPYDLRASFCRLMLHMHVDRDPQEQVTPVKYARLWSEIPSEIAIDDYDSSGASKDEIKERFAQTMEFVEEYLRDVVCQRFPFSDKEKNKLTFEVVNLARNLIYFGFYNFSDLLRLTKILLAILDCVHVTTIFPISKMAKGEENKGSNVMRSIHGVGELMTQVVLRGGGFLPMTPMAAAPEGNVKQAEPEKEDIMVMDTKLKIIEILQFILNVRLDYRISCLLCIFKREFDESNSQTSETSSGNSSQEGPSNVPGALDFEHIEEQAEGIFGGSEENTPLDLDDHGGRTFLRVLLHLTMHDYPPLVSGALQLLFRHFSQRQEVLQAFKQVQLLVTSQDVDNYKQIKQDLDQLRSIVEKSELWVYKGQGPDETMDGASGENEHKKTEEGNNKPQKHESTSSYNYRVVKEILIRLSKLCVQESASVRKSRKQQQRLLRNMGAHAVVLELLQIPYEKAEDTKMQEIMRLAHEFLQNFCAGNQQNQALLHKHINLFLNPGILEAVTMQHIFMNNFQLCSEINERVVQHFVHCIETHGRNVQYIKFLQTIVKAEGKFIKKCQDMVMAELVNSGEDVLVFYNDRASFQTLIQMMRSERDRMDENSPLMYHIHLVELLAVCTEGKNVYTEIKCNSLLPLDDIVRVVTHEDCIPEVKIAYINFLNHCYVDTEVEMKEIYTSNHMWKLFENFLVDICRACNNTSDRKHADSILEKYVTEIVMSIVTTFFSSPFSDQSTTLQTRQPVFVQLLQGVFRVYHCNWLMPSQKASVESCIRVLSDVAKSRAIAIPVDLDSQVNNLFLKSHSIVQKTAMNWRLSARNAARRDSVLAASRDYRNIIERLQDIVSALEDRLRPLVQAELSVLVDVLHRPELLFPENTDARRKCESGGFICKLIKHTKQLLEENEEKLCIKVLQTLREMMTKDRGYGEKLISIDELDNAELPPAPDSENATEELEPSPPLRQLEDHKRGEALRQVLVNRYYGNVRPSGRRESLTSFGNGPLSAGGPGKPGGGGGGSGSSSMSRGEMSLAEVQCHLDKEGASNLVIDLIMNASSDRVFHESILLAIALLEGGNTTIQHSFFCRLTEDKKSEKFFKVFYDRMKVAQQEIKATVTVNTSDLGNKKKDDEVDRDAPSRKKAKEPTTQITEEVRDQLLEASAATRKAFTTFRREADPDDHYQPGEGTQATADKAKDDLEMSAVITIMQPILRFLQLLCENHNRDLQNFLRCQNNKTNYNLVCETLQFLDCICGSTTGGLGLLGLYINEKNVALINQTLESLTEYCQGPCHENQNCIATHESNGIDIITALILNDINPLGKKRMDLVLELKNNASKLLLAIMESRHDSENAERILYNMRPKELVEVIKKAYMQGEVEFEDGENGEDGAASPRNVGHNIYILAHQLARHNKELQSMLKPGGQVDGDEALEFYAKHTAQIEIVRLDRTMEQIVFPVPSICEFLTKESKLRIYYTTERDEQGSKINDFFLRSEDLFNEMNWQKKLRAQPVLYWCARNMSFWSSISFNLAVLMNLLVAFFYPFKGVRGGTLEPHWSGLLWTAMLISLAIVIALPKPHGIRALIASTILRLIFSVGLQPTLFLLGAFNVCNKIIFLMSFVGNCGTFTRGYRAMVLDVEFLYHLLYLVICAMGLFVHEFFYSLLLFDLVYREETLLNVIKSVTRNGRSIILTAVLALILVYLFSIVGYLFFKDDFILEVDRLPNETAVPETGESLASEFLFSDVCRVESGENCSSPAPREELVPAEETEQDKEHTCETLLMCIVTVLSHGLRSGGGVGDVLRKPSKEEPLFAARVIYDLLFFFMVIIIVLNLIFGVIIDTFADLRSEKQKKEEILKTTCFICGLERDKFDNKTVTFEEHIKEEHNMWHYLCFIVLVKVKDSTEYTGPESYVAEMIKERNLDWFPRMRAMSLVSSDSEGEQNELRNLQEKLESTMKLVTNLSGQLSELKDQMTEQRKQKQRIGLLGHPPHMNVNPQQPA

SEQ ID NO: 25261 - protein, 1222 aa, Homo sapiens
MASAAEPPGQAAEYLQELTRIVAAQQELLARRRRRIEELERQVARLSRENAGLLERHRRHLAACARRPDPGPGPGPQPLGAIPELGGRRDKSEGESSRSVRSSLDTGSSLSTDRYSVEGEAPSSETGTSLDSPSAYPQGPLVPGSSLSPDHYEHTSVGAYGLYSGPPGQQQRTRRPKLQHSTSILRKQAEEEAIKRSRSLSESYELSSDLQDKQVEMLERKYGGRLVTRHAARTIQTAFRQYQMNKNFERLRSSMSENRMSRRIVLSNMRMQFSFEGPEKVHSSYFEGKQVSVTNDGSQLGALVSPECGDLSEPTTLKSPAPSSDFADAITELEDAFSRQVKSLAESIDDALNCRSLHTEEAPALDAARARDTEPQTALHGMDHRKLDEMTASYSDVTLYIDEEELSPPLPLSQAGDRPSSTESDLRLRAGGAAPDYWALAHKEDKADTDTSCRSTPSLERQEQRLRVEHLPLLTIEPPSDSSVDLSDRSERGSLKRQSAYERSLGGQQGSPKHGPHSGAPKSLPREEPELRPRPPRPLDSHLAINGSANRQSKSESDYSDGDNDSINSTSNSNDTINCSSESSSRDSLREQTLSKQTYHKEARNSWDSPAFSNDVIRKRHYRIGLNLFNKKPEKGVQYLIERGFVPDTPVGVAHFLLQRKGLSRQMIGEFLGNRQKQFNRDVLDCVVDEMDFSTMELDEALRKFQAHIRVQGEAQKVERLIEAFSQRYCICNPGVVRQFRNPDTIFILAFAIILLNTDMYSPNVKPERKMKLEDFIKNLRGVDDGEDIPREMLMGIYERIRKRELKTNEDHVSQVQKVEKLIVGKKPIGSLHPGLGCVLSLPHRRLVCYCRLFEVPDPNKPQKLGLHQREIFLFNDLLVVTKIFQKKKNSVTYSFRQSFSLYGMQVLLFENQYYPNGIRLTSSVPGADIKVLINFNAPNPQDRKKFTDDLRESIAEVQEMEKHRIESELEKQKGVVRPSMSQCSSLKKESGNGTLSRACLDDSYASGEGLKRSALSSSLRDLSEAGKRGRRSSAGSLESNVEGSIISSPHMRRRATSTRECPSRPHQTMPNSSSLLGSLFGSKRGKPPPQAHLPSAPALPPPHPPVVLPHLQHSVAGHHLGPPEGLPQAAMHGHHTQYCHMQNPPPYHHHHHHHPPQHIQHAHQYHHGPHGGHPAYGAHAHGHPPLPSAHVGHTVHHHGQPPAPPPPTSSKAKPSGISTIV

SEQ ID NO: 25262 - protein, 1690 aa, Homo sapiens
MAGASVKVAVRVRPFNSREMSRDSKCIIQMSGSTTTIVNPKQPKETPKSFSFDYSYWSHTSPEDINYASQKQVYRDIGEEMLQHAFEGYNVCIFAYGQTGAGKSYTMMGKQEKDQQGIIPQLCEDLFSRINDTTNDNMSYSVEVSYMEIYCERVRDLLNPKNKGNLRVREHPLLGPYVEDLSKLAVTSYNDIQDLMDSGNKARTVAATNMNETSSRSHAVFNIIFTQKRHDAETNITTEKVSKISLVDLAGSERADSTGAKGTRLKEGANINKSLTTLGKVISALAEMDSGPNKNKKKKKTDFIPYRDSVLTWLLRENLGGNSRTAMVAALSPADINYDETLSTLRYADRAKQIRCNAVINEDPNNKLIRELKDEVTRLRDLLYAQGLGDITDMTNALVGMSPSSSLSALSSRAASVSSLHERILFAPGSEEAIERLKETEKIIAELNETWEEKLRRTEAIRMEREALLAEMGVAMREDGGTLGVFSPKKTPHLVNLNEDPLMSECLLYYIKDGITRVGREDGERRQDIVLSGHFIKEEHCVFRSDSRGGSEAVVTLEPCEGADTYVNGKKVTEPSILRSGNRIIMGKSHVFRFNHPEQARQERERTPCAETPAEPVDWAFAQRELLEKQGIDMKQEMEQRLQELEDQYRREREEATYLLEQQRLDYESKLEALQKQMDSRYYPEVNEEEEEPEDEVQWTERECELALWAFRKWKWYQFTSLRDLLWGNAIFLKEANAISVELKKKVQFQFVLLTDTLYSPLPPDLLPPEAAKDRETRPFPRTIVAVEVQDQKNGATHYWTLEKLRQRLDLMREMYDRAAEVPSSVIEDCDNVVTGGDPFYDRFPWFRLVGRAFVYLSNLLYPVPLVHRVAIVSEKGEVKGFLRVAVQAISADEEAPDYGSGVRQSGTAKISFDDQHFEKFQSESCPVVGMSRSGTSQEELRIVEGQGQGADVGPSADEVNNNTCSAVPPEGLLLDSSEKAALDGPLDAALDHLRLGNTFTFRVTVLQASSISAEYADIFCQFNFIHRHDEAFSTEPLKNTGRGPPLGFYHVQNIAVEVTKSFIEYIKSQPIVFEVFGHYQQHPFPPLCKDVLSPLRPSRRHFPRVMPLSKPVPATKLSTLTRPCPGPCHCKYDLLVYFEICELEANGDYIPAVVDHRGGMPCMGTFLLHQGIQRRITVTLLHETGSHIRWKEVRELVVGRIRNTPETDESLIDPNILSLNILSSGYIHPAQDDRTFYQFEAAWDSSMHNSLLLNRVTPYREKIYMTLSAYIEMENCTQPAVVTKDFCMVFYSRDAKLPASRSIRNLFGSGSLRASESNRVTGVYELSLCHVADAGSPGMQRRRRRVLDTSVAYVRGEENLAGWRPRSDSLILDHQWELEKLSLLQEVEKTRHYLLLREKLETAQRPVPEALSPAFSEDSESHGSSSASSPLSAEGRPSPLEAPNERQRELAVKCLRLLTHTFNREYTHSHVCVSASESKLSEMSVTLLRDPSMSPLGVATLTPSSTCPSLVEGRYGATDLRTPQPCSRPASPEPELLPEADSKKLPSPARATETDKEPQRLLVPDIQEIRVSPIVSKKGYLHFLEPHTSGWARRFVVVRRPYAYMYNSDKDTVERFVLNLATAQVEYSEDQQAMLKTPNTFAVCTEHRGILLQAASDKDMHDWLYAFNPLLAGTIRSKLSRRRSAQMRV

SEQ ID NO: 25263 - protein, 146 aa, Homo sapiens
MTVFFKTLRNHWKKTTAGLCLLTWGGHWLYGKHCDNLLRRAACQEAQVFGNQLIPPNAQVKKATVFLNPAACKGKARTLFEKNAAPILHLSGMDVTIVKTDYEGQAKKLLELMENTDVIIVAGGDGTLQEVVTGVLRRTDEVSIKE

SEQ ID NO: 25264 - protein, 519 aa, Homo sapiens
MAEDEPSGALLKPLVFRVDETTPAVVQSVLLERGWNKFDKQEQNAEDWNLYWRTSSFRMTEHNSVKPWQQLNHHPGTTKLTRKDCLAKHLKHMRRMYGTSLYQFIPLTFVMPNDYTKFVAEYFQERQMLGTKHSYWICKPAELSRGRGILIFSDFKDFIFDDMYIVQKYISNPLLIGRYKCDLRIYVCVTGFKPLTIYVYQEGLVRFATEKFDLSNLQNNYAHLTNSSINKSGASYEKIKEVIGHGCKWTLSRFFSYLRSWDVDDLLLWKKIHRMVILTILAIAPSVPFAANCFELFGFDILIDDNLKPWLLEVNYSPALTLDCSTDVLVKRKLVHDIIDLIYLNGLRNEGREASNATHGNSNIDAAKSDRGGLDAPDCLPYDSLSFTSRMYNEDDSVVEKAVSVRPEAAPASQLEGEMSGQDFHLSTREMPQSKPKLRSRHTPHKTLMPYASLFQSHSCKTKTSPCVLSDRGKAPDPQAGNFVLVFPFNEATLGASRNGLNVKRIIQELQKLMNKQHS

SEQ ID NO: 25265 - protein, 297 aa, Homo sapiens
LMYHIHLVELLAVCTEGKNVYTEIKCNSLLPLDDIVRVVTHEDCIPEVKIAYINFLNHCYVDTEVEMKEIYTSNHMWKLFENFLVDICRACNNTSDRKHADSILEKYVTEIVMSIVTTFFSSPFSDQSTTLQTRQPVFVQLLQGVFRVYHCNWLMPSQKASVESCIRVLSDVAKSRAIAIPVDLDSQVNNLFLKSHSIVQKTAMNWRLSARNAARRDSVLAASRDYRNIIERLQLCVLHLKTIMLSGTSSPRWRTVSGPWCRQSYLCSWMFSTDPSCFSQRTQTPEGNVKVAVSFAS

SEQ ID NO: 25266 - protein, 452 aa, Homo sapiens
MNSGILQVFQRELICPICMNYFIDPVTIDCGHSFCRPCFYLNWQDMAVLAQCSKCKKTTRQRNLKTNICLKNMASIARKASLRQFLSSEEQICGTHRETKEMFCEVDKSLLCLLCSNSQEHRNHRHCPTEWAAEERREELLRKMQSLWRKMCENHRNLNMATNRIRCWKDYVSLRIEAIRAEYHKMVAFFHEEEQRHLERLQKEGEDIFQQLNESKARMEHSRELLRGMYEDLRQMCHKAVVELFQSFGDILQRYESLLLQVSEPVNPEFSAGPIIGLMDRLKGFRVYLTLQHARASSHIFLHGDLRSMKVGCDPQHDPNITDKSECFLQWGADFFISGKFYWEFNMGHSWNWAFGVCNNYWKEKRQNDMIDGEVGLFLLGCVKEDTHCSLFTTSPLVMQYVPRPTDTVGLFLDCEGRTVSFVDVDRSSLIYTIPNCSFSPPLWPIICCSHF

SEQ ID NO: 25267 - protein, 651 aa, Homo sapiens
SEKLKERPSSREDTPSRLSRMGATPTPFKSTGDIAGTVVPETNKEPRYQEDPPAPQPKAAPRTFLRPSPEDEAIYGPNTKMVRFKKGDSVGLRLAGGNDVGIFVAGIQEGTSAEQEGLQEGDQILKVNTQDFRGLVREDAVLYLLEIPKGEMVTILAQSRADVYRDILACGRGDSFFIRSHFECEKETPQSLAFTRGEVFRVVDTLYDGKLGNWLAVRIGNELEKGLIPNKSRAEQMASVQNAQRDNAGDRADFWRMRGQRSGVKKNLRKSREDLTAVVSVSTKFPAYERVLLREAGFKRPVVLFGPIADIAMEKLANELPDWFQTAKTEPKDAGSEKSTGVVRLNTVRQIIEQDKHALLDVTPKAVDLLNYTQWFPIVIFFNPDSRQGVKTMRQRLNPTSNKSSRKLFDQANKLKKTCAHLFTATINLNSANDSWFGSLKDTIQHQQGEAVWVSEGKAKTQNKEESYDFSKSYEYKSNPSAVAGNETPGASTKGYPPPVAAKPTFGRSILKPSTPIPPQEGEEVGESSEEQDNAPKSVLGKVKIFEKMDHKARLQRMQELQEAQNARIEIAQKHPDIYAVPIKTHKPDPGTPQHTSSRPPEPQKAPSRPYQDTRGSYGSDAEEEEYRQQLSEHSKRGYYGQSARYRDTEL

SEQ ID NO: 25268 - protein, 366 aa, Homo sapiens
MGSFQLEDFAAGWIGGAASVIVGHPLDTVKTRLQAGVGYGNTLSCIRVVYRRESMFGFFKGMSFPLASIAVYNSVVFGVFSNTQRFLSQHRCGEPEASPPRTLSDLLLASMVAGVVSVGLGGPVDLIKIRLQMQTQPFRDANLGLKSRAVAPAEQPAYQGPVHCITTIVRNEGLAGLYRGASAMLLRDVPGYCLYFIPYVFLSEWITPEACTGPSPCAVWLAGGMAGAISWGTATPMDVVKSRLQADGVYLNKYKGVLDCISQSYQKEGLKRHHCERGAGLPHECGHVPWVRAVAAGYPRGPRSDEPISARSLLRLSPLPDILFSLLSYLSLASPALCHPGCRSLLLQDAGLLSQLGKTDFQGKKT

SEQ ID NO: 25269 - protein, 2266 aa, Homo sapiens
MRDLRAQVTSGLLPFPEVTLQALGEDEITLESVLRGKFAAGKNGLACLACGPQLEVVNSITGERLSAYRFSGVNEQPPVVLAVKEFSWQKRTGLLIGLEETEGSVLCLYDLGISKVVKAVVLPGRVTAIEPIINHGGASASTQHLHPSLRWLFGVAAVVTDVGQILLVDLCLDDLSCNQNEVEASDLEVLTGIPAEVPHIRESVMRQGRHLCFQLVSPTGTAVSTLSYISRTNQLAVGFSDGYLALWNMKSMKREYYIQLESGQVPVYAVTFQEPENDPRNCCYLWAVQSTQDSEGDVLSLHLLQLAFGNRKCLASGQILYEGLEYCEERYTLDLTGGMFPLRGQTSNTKLLGCQSIEKFRSHGDREEGVNEALSPDTSVSVFTWQVNIYGQGKPSVYLGLFDINRWYHAQMPDSLRSGEYLHNCSYFALWSLESVVSRTSPHGILDILVHERSLNRGVPPSYPPPEQFFNPSTYNFDATCLLNSGVVHLTCTGFQKETLTFLKKSGPSLNELIPDGYNRCLVAGLLSPRFVDVQPSSLSQEEQLEAILSAAIQTSSLGLLTGYIRRWITEEQPNSATNLRFVLEWTWNKVVLTKEEFDRLCVPLFDGSCHFMDPQTIQSIQQCYLLLSNLNIVLSCFASEAREITERGLIDLSNKFVVSHLICQYAQVVLWFSHSGLLPEGIDDSVQLSRLCYNYPVIQNYYTSRRQKFERLSRGKWNPDCLMIDGLVSQLGERIEKLWKRDEGGTGKYPPASLHAVLDMYLLDGVTEAAKHSITIYLLLDIMYSFPNKTDTPIESFPTVFAISWGQVKLIQGFWLIDHNDYESGLDLLFHPATAKPLSWQHSKIIQAFMSQGEHRQALRYIQTMKPTVSSGNDVILHLTVLLFNRCMVEAWNFLRQHCNRLNIEELLKHMYEVCQEMGLMEDLLKLPFTDTEQECLVKFLQSSASVQNHEFLLVHHLQRANYVPALKLNQTLKINVMNDRDPRLRERSLARNSILDQYGKILPRVHRKLAIERAKPYHLSTSSVFRLVSRPKPLSAVPKQVVTGTVLTRSVFINNVLSKIGEVWASKEPINSTTPFNSSKIEEPSPIVYSLPAPELPEAFFGTPISKASQKISRLLDLVVQPVPRPSQCSEFIQQSSMKSPLYLVSRSLPSSSQLKGSPQAISRASELHLLETPLVVKKAKSLAMSVTTSGFSEFTPQSILRSTLRSTPLASPSPSPGRSPQRLKETRISFVEEDVHPKWIPGAADDSKLEVFTTPKKCAVPVETEWLKSKDRTTSFFLNSPEKEHQEMDEGSQSLEKLDVSKGNSSVSITSDETTLEYQDAPSPEDLEETVFTASKPKSSSTALTTNVTEQTEKDGDKDVFASEVTPSDLQKQMGNLEDAETKDLLVAAEAFSELNHLSPVQGTEASLCAPSVYEGKIFTQKSKVPVLDEGLTSVETYTPAIRANDNKSMADVLGDGGNSSLTISEGPIVSERRLNQEVALNLKEDHEVEVGVLKESVDLPEEKLPISDSPPDTQEIHVIEQEKLEAQDSGEEARNLSFNELYPSGTLKLQYNFDTIDQQFCDLADNKDTAECDIAEVDGELFVAQSNFTLILEGEEGEVEPGDFASSDVLPKAANTATEEKLVCSGENDNHGQIANLPSAVTSDQKSQKVDTLPYVPEPIKVAIAENLLDVIKDTRSKEITSDTMEQSIHETIPLVSQNIMCPTKLVKSAFKTAQETSTMTMNVSQVDDVVSSKTRTRGQRIQNVNVKSAQQEASADVATPKMPGQSVRKKTRKAKEISEASENIYSDVRGLSQNQQIPQNSVTPRRGRRKKEVNQDILENTSSVEQELQITTGRESKRLKSSQLLEPAVEETTKKEVKVSSVTKRTPRRIKRSVENQESVEIINDLKVSTVTSPSRMIRKLRSTNLDASENTGNKQDDKSSDKQLRIKHVRRVRGREVSPSDVREDSNLESSQLTVQAEFDMSAIPRKRGRPRKINPSEDVGSKAVKEERSPKKKEAPSIRRRSTRNTPAKSENVDVGKPALGKSILVPNEELSMVMSSKKKLTKKTESQSQKRSLHSVSEERTDEMTHKETNEQEERLLATASFTKSSRSSRTRSSKAILLPDLSEPNNEPLFSPASEVPRKAKAKKIEVPAQLKELVSDLSSQFVISPPALRSRQKNTSNKNKLEDELKDDAQSVETLGKPKAKRIRTSKTKQASKNTEKESAWSPPPIEIRLISPLASPADGVKSKPRKTTEVTGTGLGRNRKKLSSYPKQILRRKML

SEQ ID NO: 25270 - protein, 772 aa, Homo sapiens
MEGEQGLTDEKVKAYLSLHPQVLDEFVSESVSAETVEKWLKRKNNKSEDESAPKEVSRYQDTNMQGVVYELNSYIEQRLDTGGDNQLLLYELSSIIKIATKADGFALYFLGECNNSLCIFTPPGIKEGKPRLIPAGPITQGTTVSAYVAKSRKTLLVEDILGDERFPRGTGLESGTRIQSVLCLPIVTAIGDLIGILELYRHWGKEAFCLSHQEVATANLAWASVAIHQVQVCRGLAKQTELNDFLLDVSKTYFDNIVAIDSLLEHIMIYAKNLVNADRCALFQVDHKNKELYSDLFDIGEEKEGKPVFKKTKEIRFSIEKGIAGQVARTGEVLNIPDAYADPRFNREVDLYTGYTTRNILCMPIVSRGSVIGVVQMVNKISGSAFSKTDENNFKMFAVFCALALHCANMYHRIRHSECIYRVTMEKLSYHSICTSEEWQGLMQFTLPVRLCKEIELFHFDIGPFENMWPGIFVYMVHRSCGTSCFELEKLCRFIMSVKKNYRRVPYHNWKHAVTVAHCMYAILQNNHTLFTDLERKGLLIACLCHDLDHRGFSNSYLQKFDHPLAALYSTSTMEQHHFSQTVSILQLEGHNIFSTLSSSEYEQVLEIIRKAIIATDLALYFGNRKQLEEMYQTGSLNLNNQSHRDRVIGLMMTACDLCSVTKLWPVTKLTANDIYAEFWAEGDEMKKLGIQPIPMMDRDKKDEVPQGQLGFYNAVAIPCYTTLTQILPPTEPLLKACRDNLSQWEKVIRGEETATWISSPSVAQKAAASED

SEQ ID NO: 25271 - protein, 1604 aa, Homo sapiens
LPLMAEVSETALYCGIRPSNPESSEKWWHSYRLPPSDDAEFRPPELQGERCDAKMEVNSESTALQRLLAQPNKRFKIWQDKQPQLQPLHFLDPLPLSQQPGDSLGEVNDPYTFEDGDIKYIFTANKKCKQGTEKDSLKKNKSEDGFGTKDVTTPGHSTPVPDGKNAMSIFSSATKTDVRQDNAAGRAGSSSLTQVTDLAPSLHDLDNIFDNSDDDELGAVSPALRSSKMPAVGTEDRPLGKDGRAAVPYPPIADLQRMFPTPPSLEQHPAFSPVMNYKDGISSETVTALGMMESPMVSMVSTQLTEFKMEVEDGLGSPKPEEIKDFSYVHKVPSFQPFVGSSMFAPLKMLPSHCLLPLKIPDACLFRPSWAIPPKIEQLPMPPAATFIRDGYNNVPSVGSLADPDYLNTPQMNTPVTLNSAAPASNSGAGVLPSPATPRFSVPTPRTPRTPRTPRGGGTASGQGSVKYDSTDQGSPASTPSTTRPLNSVEPATMQPIPEAHSLYVTLILSDSVMNIFKDRNFDSCCICACNMNIKGADVGLYIPDSSNEDQYRCTCGFSAIMNRKLGYNSGLFLEDELDIFGKNSDIGQAAERRLMMCQSTFLPQVEGTKKPQEPPISLLLLLQNQHTQPFASLNFLDYISSNNRQTLPCVSWSYDRVQADNNDYWTECFNALEQGRQYVDNPTGGKVDEALVRSATVHSWPHSNVLDISMLSSQDVVRMLLSLQPFLQDAIQKKRTGRTWENIQHVQGPLTWQQFHKMAGRGTYGSEESPEPLPIPTLLVGYDKDFLTISPFSLPFWERLLLDPYGGHRDVAYIVVCPENEALLEGAKTFFRDLSAVYEMCRLGQHKPICKVLRDGIMRVGKTVAQKLTDELVSEWFNQPWSGEENDNHSRLKLYAQVCRHHLAPYLATLQLDSSLLIPPKYQTPPAAAQGQATPGNAGPLAPNGSAAPPAGSAFNPTSNSSSTNPAASSSASGSSVPPVSSSASAPGISQISTTSSSGFSGSVGGQNPSTGGISADRTQGNIGCGGDTDPGQSSSQPSQDGQESVTERERIGIPTEPDSADSHAHPPAVVIYMVDPFTYAAEEDSTSGNFWLLSLMRCYTEMLDNLPEHMRNSFILQIVPCQYMLQTMKDEQVFYIQYLKSMAFSVYCQCRRPLPTQIHIKSLTGFGPAASIEMTLKNPERPSPIQLYSPPFILAPIKDKQTELGETFGEASQKYNVLFVGYCLSHDQRWLLASCTDLHGELLETCVVNIALPNRSRRSKVSARKIGLQKLWEWCIGIVQMTSLPWRVVIGRLGRLGHGELKDWSILLGECSLQTISKKLKDVCRMCGISAADSPSILSACLVAMEPQGSFVVMPDAVTMGSVFGRSTALNMQSSQLNTPQDASCTHILVFPTSSTIQVAPANYPNEDGFSPNNDDMFVDLPFPDDMDNDIGILMTGNLHSSPNSSPVPSPGSPSGIGVGSHFQHSRSQGERLLSREAPEELKQQPLALGYFVSTAKAENLPQWFWSSCPQAQNQCPLFLKASLHHHISVAQTDELLPARNSQRVPHPLDSKTTSDVLRFVLEQYNALSWLTCNPATQDRTSCLPVHFVVLTQLYNAIMNIL

SEQ ID NO: 25272 - protein, 1186 aa, Homo sapiens
MEVDTEEKRHRTRSKGVRVPVEPAIQELFSCPTPGCDGSGHVSGKYARHRSVYGCPLAKKRKTQDKQPQEPAPKRKPFAVKADSSSVDECDDSDGTEDMDEKEEDEGEEYSEDNDEPGDEDEEDEEGDREEEEEIEEEDEDDDEDGEDVEDEEEEEEEEEEEEEEEENEDHQMNCHNTRIMQDTEKDDNNNDEYDNYDELVAKSLLNLGKIAEDAAYRARTESEMNSNTSNSLEDDSDKNENLGRKSELSLDLDSDVVRETVDSLKLLAQGHGVVLSENMNDRNYADSMSQQDSRNMNYVMLGKPMNNGLMEKMVEESDEEVCLSSLECLRNQCFDLARKLSETNPQERNPQQNMNIRQHVRPEEDFPGRTPDRNYSDMLNLMRLEEQLSPRSRVFASCAKEDGCHERDDDTTSVNSDRSEEVFDMTKGNLTLLEKAIALETERAKAMREKMAMEAGRRDNMRSYEDQSPRQLPGEDRKPKSSDSHVKKPYYDPSRTEKKESKCPTPGCDGTGHVTGLYPHHRSLSGCPHKDRVPPEILAMHESVLKCPTPGCTGRGHVNSNRNSHRSLSGCPIAAAEKLAKAQEKHQSCDVSKSSQASDRVLRPMCFVKQLEIPQYGYRNNVPTTTPRSNLAKELEKYSKTSFEYNSYDNHTYGKRAIAPKVQTRDISPKGYDDAKRYCKDPSPSSSSTSSYAPSSSSNLSCGGGSSASSTCSKSSFDYTHDMEAAHMAATAILNLSTRCREMPQNLSTKPQDLCATRNPDMEVDENGTLDLSMNKQRPRDSCCPILTPLEPMSPQQQAVMNNRCFQLGEGDCWDLPVDYTKMKPRRIDEDESKDITPEDLDPFQEALEERRYPGEVTIPSPKPKYPQCKESKKDLITLSGCPLADKSIRSMLATSSQELKCPTPGCDGSGHITGNYASHRSLSGCPRAKKSGIRIAQSKEDKEDQEPIRCPVPGCDGQGHITGKYASHRSASGCPLAAKRQKDGYLNGSQFSWKSVKTEGMSCPTPGCDGSGHVSGSFLTHRSLSGCPRATSAMKKAKLSGEQMLTIKQRASNGIENDEEIKQLDEEIKELNESNSQMEADMIKLRTQVTITTMESNLKTIEEENKVIEQQNESLLHELANLSQSLIHSLANIQLPHMDPINEQNFDAYVTTLTEMYTNQDRYQSPENKALLENIKQAVRGIQV

SEQ ID NO: 25273 - protein, 1367 aa, Homo sapiens
MKSGSGGGSPTSLWGLLFLSAALSLWPTSGEICGPGIDIRNDYQQLKRLENCTVIEGYLHILLISKAEDYRSYRFPKLTVITEYLLLFRVAGLESLGDLFPNLTVIRGWKLFYNYALVIFEMTNLKDIGLYNLRNITRGAIRIEKNADLCYLSTVDWSLILDAVSNNYIVGNKPPKECGDLCPGTMEEKPMCEKTTINNEYNYRCWTTNRCQKMCPSTCGKRACTENNECCHPECLGSCSAPDNDTACVACRHYYYAGVCVPACPPNTYRFEGWRCVDRDFCANILSAESSDSEGFVIHDGECMQECPSGFIRNGSQSMYCIPCEGPCPKVCEEEKKTKTIDSVTSAQMLQGCTIFKGNLLINIRRGNNIASELENFMGLIEVVTGYVKIRHSHALVSLSFLKNLRLILGEEQLEGNYSFYVLDNQNLQQLWDWDHRNLTIKAGKMYFAFNPKLCVSEIYRMEEVTGTKGRQSKGDINTRNNGERASCESDVLHFTSTTTSKNRIIITWHRYRPPDYRDLISFTVYYKEAPFKNVTEYDGQDACGSNSWNMVDVDLPPNKDVEPGILLHGLKPWTQYAVYVKAVTLTMVENDHIRGAKSEILYIRTNASVPSIPLDVLSASNSSSQLIVKWNPPSLPNGNLSYYIVRWQRQPQDGYLYRHNYCSKDKIPIRKYADGTIDIEEVTENPKTEVCGGEKGPCCACPKTEAEKQAEKEEAEYRKVFENFLHNSIFVPRPERKRRDVMQVANTTMSSRSRNTTAADTYNITDPEELETEYPFFESRVDNKERTVISNLRPFTLYRIDIHSCNHEAEKLGCSASNFVFARTMPAEGADDIPGPVTWEPRPENSIFLKWPEPENPNGLILMYEIKYGSQVEDQRECVSRQEYRKYGGAKLNRLNPGNYTARIQATSLSGNGSWTDPVFFYVQAKTGYENFIHLIIALPVAVLLIVGGLVIMLYVFHRKRNNSRLGNGVLYASVNPEYFSAADVYVPDEWEVAREKITMSRELGQGSFGMVYEGVAKGVVKDEPETRVAIKTVNEAASMRERIEFLNEASVMKEFNCHHVVRLLGVVSQGQPTLVIMELMTRGDLKSYLRSLRPEMENNPVLAPPSLSKMIQMAGEIADGMAYLNANKFVHRDLAARNCMVAEDFTVKIGDFGMTRDIYETDYYRKGGKGLLPVRWMSPESLKDGVFTTYSDVWSFGVVLWEIATLAEQPYQGLSNEQVLRFVMEGGLLDKPDNCPDMLFELMRMCWQYNPKMRPSFLEIISSIKEEMEPGFREVSFYYSEENKLPEPEELDLEPENMESVPLDPSASSSSLPLPDRHSGHKAENGPGPGVLVLRASFDERQPYAHMNGGRKNERALPLPQSSTC

SEQ ID NO: 25274 - protein, 556 aa, Homo sapiens
MEEPEEPADSGQSLVPVYIYSPEYVSMCDSLAKIPKRASMVHSLIEAYALHKQMRIVKPKVASMEEMATFHTDAYLQHLQKVSQEGDDDHPDSIEYGLGYDCPATEGIFDYAAAIGGATITAAQCLIDGMCKVAINWSGGWHHAKKDEASGFCYLNDAVLGILRLRRKFERILYVDLDLHHGDGVEDAFSFTSKVMTVSLHKFSPGFFPGTGDVSDVGLGKGRYYSVNVPIQDGIQDEKYYQICESVLKEVYQAFNPKAVVLQLGADTIAGDPMCSFNMTPVGIGKCLKYILQWQLATLILGGGGYNLANTARCWTYLTGVILGKTLSSEIPDHEFFTAYGPDYVLEITPSCRPDRNEPHRIQQILNYIKAQQLQLAASLPANLSNFCQGSEMPTTSRPALDVKGGTSPAKEDANQEMSSVAYSNLAVKDRKAVAILHYPGVASNGTKASGAPTSSSGSPIGSPTTTPPTKPPSFNLHPAPHLLASMHLQKLNSQYQGMAAATPGQPGEAGPLQNWDFGAQAGGAESLSPSAGAQSPAIIDSDPVDEEVLMSLVVE

SEQ ID NO: 25275 - protein, 1358 aa, Homo sapiens
MAEARKRRELLPLIYHHLLRAGYVRAAREVKEQSGQKCFLAQPVTLLDIYTHWQQTSELGRKRKAEEDAALQAKKTRVSDPISTSESSEEEEEAEAETAKATPRLASTNSSVLGADLPSSMKEKAKAETEKAGKTGNSMPHPATGKTVANLLSGKSPRKSAEPSANTTLVSETEEEGSVPAFGAAAKPGMVSAGQADSSSEDTSSSSDETDVEVKASEKILQVRAASAPAKGTPGKGATPAPPGKAGAVASQTKAGKPEEDSESSSEESSDSEEETPAAKALLQAKASGKTSQVGAASAPAKESPRKGAAPAPPGKTGPAVAKAQAGKREEDSQSSSEESDSEEEAPAQAKPSGKAPQVRAASAPAKESPRKGAAPAPPRKTGPAAAQVQVGKQEEDSRSSSEESDSDREALAAMNAAQVKPLGKSPQVKPASTMGMGPLGKGAGPVPPGKVGPATPSAQVGKWEEDSESSSEESSDSSDGEVPTAVAPAQEKSLGNILQAKPTSSPAKGPPQKAGPVAVQVKAEKPMDNSESSEESSDSADSEEAPAAMTAAQAKPALKIPQTKACPKKTNTTASAKVAPVRVGTQAPRKAGTATSPAGSSPAVAGGTQRPAEDSSSSEESDSEEEKTGLAVTVGQAKSVGKGLQVKAASVPVKGSLGQGTAPVLPGKTGPTVTQVKAEKQEDSESSEEESDSEEAAASPAQVKTSVKKTQAKANPAAARAPSAKGTISAPGKVVTAAAQAKQRSPSKVKPPVRNPQNSTVLARGPASVPSVGKAVATAAQAQTGPEEDSGSSEEESDSEEEAETLAQVKPSGKTHQIRAALAPAKESPRKGAAPTPPGKTGPSAAQAGKQDDSGSSSEESDSDGEAPAAVTSAQVIKPPLIFVDPNRSPAGPAATPAQAQAASTPRKARASESTARSSSSESEDEDVIPATQCLTPGIRTNVVTMPTAHPRIAPKASMAGASSSKESSRISDGKKQEGPATQVDSAVGTLPATSPQSTSVQAKGTNKLRKPKLPEVQQATKAPESSDDSEDSSDSSSGSEEDGEGPQGAKSAHTLVGPTPSRTETLVEETAAESSEDDVVAPSQSLLSGYMTPGLTPANSQASKATPKLDSSPSVSSTLAAKDDPDGKQEAKPQQAAGMLSPKTGGKEAASGTTPQKSRKPKKGAGNPQASTLALQSNITQCLLGQPWPLNEAQVQASVVKVLTELLEQERKKVVDTTKESSRKGWESRKRKLSGDQPAARTPRSKKKKKLGAGEGGEASVSPEKTSTTSKGKAKRDKASGDVKEKKGKGSLGSQGAKDEPEEELQKGMGTVEGGDQSNPKSKKEKKKSDKRKKDKEKKEKKKKAKKASTKDSESP

SEQ ID NO: 25276 - protein, 576 aa, Homo sapiens
MMTPQVITPQQMQQILQQQVLSPQQLQVLLQQQQALMLQQQQLQEFYKKQQEQLQLQLLQQQHAGKQPKEQQQVATQQLAFQQQLLQMQQLQQQHLLSLQRQGLLTIQPGQPALPLQPLAQGMIPTELQQLWKEVTSAHTAEETTGNNHSSLDLTTTCVSSSAPSKTSLIMNPHASTNGQLSVHTPKRESLSHEEHPHSHPLYGHGVCKWPGCEAVCEDFQSFLKHLNSEHALDDRSTAQCRVQMQVVQQLELQLAKDKERLQAMMTHLHVKSTEPKAAPQPLNLVSSVTLSKSASEASPQSLPHTPTTPTAPLTPVTQGPSVITTTSMHTVGPIRRRYSDKYNVPISSDIAQNQEFYKNAEVRPPFTYASLIRQAILESPEKQLTLNEIYNWFTRMFAYFRRNAATWKNAVRHNLSLHKCFVRVENVKGAVWTVDEVEFQKRRPQKISGNPSLIKNMQSSHAYCTPLNAALQASMAENSIPLYTTASMGNPTLGNLASAIREELNGAMEHTNSNESDSSPGRSPMQAVHPVHVKEEPLDPEEAEGPLSLVTTANHSPDFDHDRDYEDEPVNEDME

SEQ ID NO: 25277 - protein, 384 aa, Homo sapiens
MGAFLDKPKTEKHNAHGAGNGLRYGLSSMQGWRVEMEDAHTAVVGIPHGLEDWSFFAVYDGHAGSRVANYCSTHLLEHITTNEDFRAAGKSGSALELSVENVKNGIRTGFLKIDEYMRNFSDLRNGMDRSGSTAVGVMISPKHIYFINCGDSRAVLYRNGQVCFSTQDHKPCNPREKERIQNAGGSVMIQRVNGSLAVSRALGDYDYKCVDGKGPTEQLVSPEPEVYEILRAEEDEFIILACDGIWDVMSNEELCEYVKSRLEVSDDLENVCNWVVDTCLHKGSRDNMSIVLVCFSNAPKVSDEAVKKDSELDKHLESRVEEIMEKSGEEGMPDLAHVMRILSAENIPNLPPGGGLAGKRNVIEAVYSRLNPHRESDGEGTPKT

SEQ ID NO: 25278 - protein, 1677 aa, Homo sapiens
MVKLANPLYTEWILEAIKKVKKQKQRPSEERICNAVSSSHGLDRKTVLEQLELSVKDGTILKVSNKGLNSYKDPDNPGRIALPKPRNHGKLDNKQNVDWNKLIKRAVEGLAESGGSTLKSIERFLKGQKDVSALFGGSAASGFHQQLRLAIKRAIGHGRLLKDGPLYRLNTKATNVDGKESCESLSCLPPVSLLPHEKDKPVAEPIPICSFCLGTKEQNREKKPEELISCADCGNSGHPSCLKFSPELTVRVKALRWQCIECKTCSSCRDQGKNADNMLFCDSCDRGFHMECCDPPLTRMPKGMWICQICRPRKKGRKLLQKKAAQIKRRYTNPIGRPKNRLKKQNTVSKGPFSKVRTGPGRGRKRKITLSSQSASSSSEEGYLERIDGLDFCRDSNVSLKFNKKTKGLIDGLTKFFTPSPDGRKARGEVVDYSEQYRIRKRGNRKSSTSDWPTDNQDGWDGKQENEERLFGSQEIMTEKDMELFRDIQEQALQKVGVTGPPDPQVRCPSVIEFGKYEIHTWYSSPYPQEYSRLPKLYLCEFCLKYMKSRTILQQHMKKCGWFHPPANEIYRKNNISVFEVDGNVSTIYCQNLCLLAKLFLDHKTLYYDVEPFLFYVLTQNDVKGCHLVGYFSKEKHCQQKYNVSCIMILPQYQRKGYGRFLIDFSYLLSKREGQAGSPEKPLSDLGRLSYMAYWKSVILECLYHQNDKQISIKKLSKLTGICPQDITSTLHHLRMLDFRSDQFVIIRREKLIQDHMAKLQLNLRPVDVDPECLRWTPVIVSNSVVSEEEEEEAEEGENEEPQCQERELEISVGKSVSHENKEQDSYSVESEKKPEVMAPVSSTRLSKQVLPHDSLPANSQPSRRGRWGRKNRKTQERFGDKDSKLLLEETSSAPQEQYGECGEKSEATQEQYTESEEQLVASEEQPSQDGKPDLPKRRLSEGVEPWRGQLKKSPEALKCRLTEGSERLPRRYSEGDRAVLRGFSESSEEEEEPESPRSSSPPILTKPTLKRKKPFLHRRRRVRKRKHHNSSVVTETISETTEVLDEPFEDSDSERPMPRLEPTFEIDEEEEEEDENELFPREYFRRLSSQDVLRCQSSSKRKSKDEEEDEESDDADDTPILKPVSLLRKRDVKNSPLEPDTSTPLKKKKGWPKGKSRKPIHWKKRPGRKPGFKLSREIMPVSTQACVIEPIVSIPKAGRKPKIQESEETVEPKEDMPLPEERKEEEEMQAEAEEAEEGEEEDAASSEVPAASPADSSNSPETETKEPEVEEEEEKPRVSEEQRQSEEEQQELEEPEPEEEEDAAAETAQNDDHDADDEDDGHLESTKKKELEEQPTREDVKEEPGVQESFLDANMQKSREKIKDKEETELDSEEEQPSHDTSVVSEQMAGSEDDHEEDSHTKEELIELKEEEEIPHSELDLETVQAVQSLTQEESSEHEGAYQDCEETLAACQTLQSYTQADEDPQMSMVEDCHASEHNSPISSVQSHPSQSVRSVSSPNVPALESGYTQISPEQGSLSAPSMQNMETSPMMDVPSVSDHSQQVVDSGFSDLGSIESTTENYENPSSYDSTMGGSICGNSSSQSSCSYGGLSSSSSLTQSSCVVTQQMASMGSSCSMMQQSSVQPAANCSIKSPQSCVVERPPSNQQQQPPPPPPQQPQPPPPQPQPAPQPPPPQQ

SEQ ID NO: 25279 - protein, 408 aa, Homo sapiens
DRKHADSILEKYVTEIVMSIVTTFFSSPFSDQSTTLQTRQPVFVQLLQGVFRVYHCNWLMPSQKASVESCIRVLSDVAKSRAIAIPVDLDSQVNNLFLKSHSIVQKTAMNWRLSARNAARRDSVLAASRDYRNIIERLQDIVSALEDRLRPLVQAELSVLVDVLHRPELLFPENTDARRKCESGGFICKLIKHTKQLLEENEEKLCIKVLQTLREMMTKDRGYGEKLISIDELDNAELPPAPDSENATEELEPSPPLRQLEDHKRGEALRQVLVNRYYGNVRPSGRRESLTSFGNGPLSAGGPGKPGGGGGGSGSSSMSRGEMSLAEVQCHLDKEGASNLVIDLIMNASSDRVFHESILLAIALLEGGNTTIQLYQFEKSQNLSPQEIEPLTRIRGCAHTMLCLKDDI

SEQ ID NO: 25280 - protein, 223 aa, Homo sapiens
MACLGFQRHKAQLNLATRTWPCTLLFFLLFIPVFCKAMHVAQPAVVLASSRGIASFVCEYASPGKATEVRVTVLRQADSQVTEVCAATYMMGNELTFLDDSICTGTSSGNQVNLTIQGLRAMDTGLYICKVELMYPPPYYLGIGNGTQIYVIDPEPCPDSDFLLWILAAVSSGLFFYSFLLTAVSLSKMLKKRSPLTTGVYVKMPPTEPECEKQFQPYFIPIN

SEQ ID NO: 25281 - protein, 701 aa, Homo sapiens
MMKRQLHRMRQLAQTGSLGRTPETAEFLGEDLLQVEQRLEPAKRAAHNIHKRLQACLQGQSGADMDKRVKKLPLMALSTTMAESFKELDPDSSMGKALEMSCAIQNQLARILAEFEMTLERDVLQPLSRLSEEELPAILKHKKSLQKLVSDWNTLKSRLSQATKNSGSSQGLGGSPGSHSHTTMANKVETLKEEEEELKRKVEQCRDEYLADLYHFVTKEDSYANYFIRLLEIQADYHRRSLSSLDTALAELRENHGQADHSPSMTATHFPRVYGVSLATHLQELGREIALPIEACVMMLLSEGMKEEGLFRLAAGASVLKRLKQTMASDPHSLEEFCSDPHAVAGALKSYLRELPEPLMTFDLYDDWMRAASLKEPGARLQALQEVCSRLPPENLSNLRYLMKFLARLAEEQEVNKMTPSNIAIVLGPNLLWPPEKEGDQAQLDAASVSSIQVVGVVEALIQSADTLFPGDINFNVSGLFSAVTLQDTVSDRLASEELPSTAVPTPATTPAPAPAPAPAPAPALASAATKERTESEVPPRPASPKVTRSPPETAAPVEDMARRTKRPAPARPTMPPPQVSGSRSSPPAPPLPPGSGSPGTPQALPRRLVGSSLRAPTVPPPLPPTPPQPARRQSRRSPASPSPASPGPASPSPVSLSNPAQVDLGAATAEGGAPEAISGVPTPPAIPPQPRPRSLASETN

SEQ ID NO: 25282 - protein, 413 aa, Homo sapiens
MQASPIRIPTVSNDIDWDFCFHMSQQTEIPAHQQTDELYPTGGCGESEEETKAKEKEKAIDCMSHPKEKLAQSQKKVAQLIKEKMNTQANKELIRCVILSRIIFGDHHWKCARALANLAYGYLTLRGLPVQAKKHATSAKNTLLTWKANTTSNKEKEEILEALVKLYYTLGVAWLLQNRGREAYFNLQKAERNMKELKELYKGGVCELQVSENDLTLALGRASLAIHRLNLALAYFEKAIGDVIAAKGDRTSDLISLYEEAAQIEQLRRNHNQAIQYLQQAHSVCVSLFTEVSPKTAEMSALLAKAYAMSGEAQHRDAVEIYFIRSINAYRATLGSEDFETLSTTEEFCKWLVQNGEKQCLMIQIFVYGGEHSRSRETKSLLTLWQRTSSSSSRWRREAIPGRRNSTYKGTEA

SEQ ID NO: 25283 - protein, 1539 aa, Homo sapiens
MEAATTLHPGPRPALPLGGPGPLGEFLPPPECPVFEPSWEEFADPFAFIHKIRPIAEQTGICKDWQPPFACDVDKLHFTPRIQRLNELEAQTRVKLNFLDQIAKYWELQGSTLKIPHVERKILDLFQLNKLVAEEGGFAVVCKDRKWTKIATKMGFAPGKAVGSHIRGHYERILNPYNLFLSGDSLRCLQKPNLTTDTKDKEYKPHDIPQRQSVQPSETCPPARRAKRMRAEAMNIKIEPEETTEARTHNLRRRMGCPTPKCENEKEMKSSIKQEPIERKDYIVENEKEKPKSRSKKATNAVDLYVCLLCGSGNDEDRLLLCDGCDDSYHTFCLIPPLHDVPKGDWRCPKCLAQECSKPQEAFGFEQAARDYTLRTFGEMADAFKSDYFNMPVHMVPTELVEKEFWRLVSTIEEDVTVEYGADIASKEFGSGFPVRDGKIKLSPEEEEYLDSGWNLNNMPVMEQSVLAHITADICGMKLPWLYVGMCFSSFCWHIEDHWSYSINYLHWGEPKTWYGVPGYAAEQLENVMKKLAPELFVSQPDLLHQLVTIMNPNTLMTHEVPVYRTNQCAGEFVITFPRAYHSGFNQGFNFAEAVNFCTVDWLPLGRQCVEHYRLLHRYCVFSHDEMICKMASKADVLDVVVASTVQKDMAIMIEDEKALRETVRKLGVIDSERMDFELLPDDERQCVKCKTTCFMSAISCSCKPGLLVCLHHVKELCSCPPYKYKLRYRYTLDDLYPMMNALKLRAESYNEWALNVNEALEAKINKKKSLVSFKALIEESEMKKFPDNDLLRHLRLVTQDAEKCASVAQQLLNGKRQTRYRSGGGKSQNQLTVNELRQFVTQLYALPCVLSQTPLLKDLLNRVEDFQQHSQKLLSEETPSAAELQDLLDVSFEFDVELPQLAEMRIRLEQARWLEEVQQACLDPSSLTLDDMRRLIDLGVGLAPYSAVEKAMARLQELLTVSEHWDDKAKSLLKARPRHSLNSLATAVKEIEEIPAYLPNGAALKDSVQRARDWLQDVEGLQAGGRVPVLDTLIELVTRGRSIPVHLNSLPRLETLVAEVQAWKECAVNTFLTENSPYSLLEVLCPRCDIGLLGLKRKQRKLKEPLPNGKKKSTKLESLSDLERALTESKETASAMATLGEARLREMEALQSLRLANEGKLLSPLQDVDIKICLCQKAPAAPMIQCELCRDAFHTSCVAVPSISQGLRIWLCPHCRRSEKPPLEKILPLLASLQRIRVRLPEGDALRYMIERTVNWQHRAQQLLSSGNLKFVQDRVGSGLLYSRWQASAGQVSDTNKVSQPPGTTSFSLPDDWDNRTSYLHSPFSTGRSCIPLHGVSPEVNELLMEAQLLQVSLPEIQELYQTLLAKPSPAQQTDRSSPVRPSSEKNDCCRGKRDGINSLERKLKRRLEREGLSSERWERVKKMRTPKKKKIKLSHPKDMNNFKLERERSYELVRSAETHSLPSDTSYSEQEDSEDEDAICPAVSCLQPEGDEVDWVQCDGSCNQWFHQVCVGVSPEMAEKEDYICVRCTVKDAPSRK

SEQ ID NO: 25284 - protein, 1148 aa, Homo sapiens
MEVDTEEKRHRTRSKGVRVPVEPAIQELFSCPTPGCDGSGHVSGKYARHRSVYGCPLAKKRKTQDKQPQEPAPKRKPFAVKADSSSVDECDDSDGTEDMDEKEEDEGEEYSEDNDEPGDEDEEDEEGDREEEEEIEEEDEDDDEDGEDVEDEEEEEEEEEEEEEEEENEDHQMNCHNTRIMQDTEKDDNNNDEYDNYDELVAKSLLNLGKIAEDAAYRARTESEMNSNTSNSLEDDSDKNENLGRKSELSLDLDSDVVRETVDSLKLLAQGHGVVLSENMNDRNYADSMSQQDSRNMNYVMLGKPMNNGLMEKMVEESDEEVCLSSLECLRNQCFDLARKLSETNPQERNPQQNMNIRQHVRPEEDFPGRTPDRNYSDMLNLMRLEEQLSPRSRVFASCAKEDGCHERDDDTTSVNSDRSEEVFDMTKGNLTLLEKAIALETERAKAMREKMAMEAGRRDNMRSYEDQSPRQLPGEDRKPKSSDSHVKKPYYDPSRTEKKESKCPTPGCDGTGHVTGLYPHHRSLSGCPHKDRVPPEILAMHESVLKCPTPGCTGRGHVNSNRNSHRSLSGCPIAAAEKLAKAQEKHQSCDVSKSSQASDRVLRPMCFVKQLEIPQYGYRNNVPTTTPRSNLAKELEKYSKTSFEYNSYDNHTYGKRAIAPKVQTRDISPKGYDDAKRYCKDPSPSSSSTSSYAPSSSSNLSCGGGSSASSTCSKSSFDYTHDMEAAHMAATAILNLSTRCREMPQNLSTKPQDLCATRNPDMEVDENGTLDLSMNKQRPRDSCCPILTPLEPMSPQQQAVMNNRCFQLGEGDCWDLPVDYTKMKPRRIDEDESKDITPEDLDPFQEALEERRYPGEVTIPSPKPKYPQCKESKKDLITLSGCPLADKSIRSMLATSSQELKCPTPGCDGSGHITGNYASHRSLSGCPRAKKSGIRIAQSKEDKEDQEPIRCPVPGCDGQGHITGKYASHRSASGCPLAAKRQKDGYLNGSQFSWKSVKTEGMSCPTPGCDGSGHVSGSFLTHRSLSGCPRATSAMKKAKLSGEQMLTIKQRASNGIENDEEIKQLDEEIKELNESNSQMEADMIKLRTQVTITTMESNLKTIEEENKVIEQQNESLLHELANLSQSLIHSLANIQLPHMEDGVWWGQ

SEQ ID NO: 25285 - protein, 246 aa, Homo sapiens
ATGSSVEYRCNEYYLLRGSKISRCEQGKWSSPPVCLEPCTVNVDYMNRNNIEMKWKYEGKVLHGDLIDFVCKQGYDLSPLTPLSELSVQCNRGEVKYPLCTRKESKGMCTSPPLIKHGVIISSTVDTYENGSSVEYRCFDHHFLEGSREAYCLDGMWTTPPLCLEPCTLSFTEMEKNNLLLKWDFDNRPHILHGEYIEFICRGDTYPAELYITGSILRMQCDRGQLKYPRCIPRQSTLSYQEPLRT

SEQ ID NO: 25286 - protein, 1038 aa, Homo sapiens
MSCQKAVLELNIGSQLGPKSPERTEGVTAFEDYGTGLLENQLSVGDFVKIQKAFESPQPRKIICMSREDFTQKMTEIVGWGTKEEYGELFDKVDVAQDGFINWDKLTSFILLELYEQDERAKATVVPQWKDLEFLPVKHKDTIQKVIFLKNSSHYLTISKEGLLAIWGEHLKLQETFPITSDATKLKHLWVTSLVSLENVNKIAVAFTSKEVCFYDLLSKEEFACQYKLQGLKGTPICMDYWYDPLDANESILSFGDITGKVQAIAFTAALISLFERPASACEDGEATMTINWAELLSGCHKCCHILEHKLHQGDWVRQVTYNASLDAIISSTTSNTNSVVMAWREKSKKRLNMTSFNIAQGIHAFDYHSRLNLIATAGINNKVCLWNPYVVSKPVGVLWGHSASVIAVQFFVERKQLFSFSKDKVLRLWDIQHQLSIQRIACSFPKSQDFRCLFHFDEAHGRLFISFNNQLALLAMKSEASKRVKSHEKAVTCVLYNSILKQVISSDTGSTVSFWMIDTGQKIKQFTGCHGNAEISTMALDANETRLLTGSTDGTVKIWDFNGYCHHTLNVGQDGAVDISQILILKKKILVTGWERAITVFRPQNFNQFFIQPEEWKGGIQHHDDILCAAFLPPQTLVTGSYDGEIVLWNNSTENAHHVLHPDYQRLLKSKLDTKPQKLLSAGRSQPSHPMADHSTTGVRNFEIDTEGKNAVMRLCFLKARKNTAVTGGANLVSCGGSGYVRFWDIYKKQLLAEFLAHSGVGSIIMSTDKMNRYLTTGDLDGWLKIWNIEEYCLNSSKNKITKAPTLIRSFQPHEDRISSLEMCEPGGQLLIISSSADCSICVTGVCNAPVWIFGQAKHWHIENCLFLPKRDTNLVESEIQKEISLFSKEESCLDPTEHSLLNKKNKDDSTYNVRPSEDINLDIKYKERSTCMKETQKPYYGEVIKKSFSTFRSLNIGALEELPEVNKPAFLLDPEKYFRKEPEEERPQILEAPSLFKTLKAVFDEKNLFPKEILHHERKAKQLCQEKSCEVKKNKK

SEQ ID NO: 25287 - protein, 497 aa, Homo sapiens
MKLEGIDPQHPSMYFILTVAEVCGYRLRLHFDGYSECHDFWVNANSPDIHPAGWFEKTGHKLQPPKGYKEEEFSWSQYLRSTRAQAAPKHLFVSQSHSPPPLGFQVGMKLEAVDRMNPSLVCVASVTDVVDSRFLVHFDNWDDTYDYWCDPSSPYIHPVGWCQKQGKPLTPPQDYPDPDNFCWEKYLEETGASAVPTWAFKVRPPHSFLVNMKLEAVDRRNPALIRVASVEDVEDHRIKIHFDGWSHGYDFWIDADHPDIHPAGWCSKTGHPLQPPLGPREPSSASPGGCPPLSYRSLPHTRTSKYSFHHRKCPTPGCDGSGHVTGKFTAHHCLSGCPLAERNQSRLKAELSDSEASARKKNLSGFSPRKKPRHHGRIGRPPKYRKIPQEDFQTLTPDVVHQSLFMSALSAHPDRSLSVCWEQHCKLLPGVAGISASTVAKWTIDEVFGFVQTLTGCEDQARLFKDEVRCKCRVGDRAGVTVLKTAGSRCPPQRHFC

SEQ ID NO: 25288 - protein, 335 aa, Homo sapiens
EDYTQKKWKGLALSQRALHWNMMLENDRSMASLAGRNMMESSELTPKQEIFKGSESSNSTSGGLFGVVPGGTETGDVCEDTFKELEGQPSNEEGSRLESDFLEIIDEDKKKSTKDRYEEYKEVEEHPPLSSSPVEHEGVLKGQKSYRCDECGKAFYWSSHLIGHRRIHTGEKPYECNECGKTFRQTSQLIVHLRTHTGEKPYECSECGKAYRHSSHLIQHQRLHNGEKPYKCNECAKAFNQSSKLFDHQRTHTGEKPYECKECGAAFSRSKNLVRHQFLHTGLPLLLRLECSDVTIGHLSLELLGSRDAPASTSPIVRNTGMCHHARLSFYFYFL

SEQ ID NO: 25289 - protein, 290 aa, Homo sapiens
MRTQTHGGHSSYGHAAPGTDAGKAFCMFYAVLGIPLTLVMFQSLGERMNTFVRYLLKRIKKCCGMRNTDVSMENMVTVGFFSCMGTLCIGAAAFSQCEEWSFFHAYYYCFITLTTIGFGDYVALQTKGALQKKPLYVAFSFMYILVGLTVIGAFLNLVVLRFLTMNSEDERRDAEERASLAGNRNSMVIHIPEEPRPSRPRYKADVPDLQSVCSCTCYRSQDYGGRSVAPQNSFSAKLAPHYFHSISYKIEEISPSTLKNSLFPSPISSISPGLHSFTDHQRLMKRRKSV

SEQ ID NO: 25290 - protein, 437 aa, Homo sapiens
MQLPRWWELGDPCAWTGQGRGTRRMSPATTGTFLLTVYSIFSKVHSDRNVYPSAGVLFVHVLEREYFKGEFPPYPKPGEISNDPITFNTNLMGYPDRPGWLRYIQRTPYSDGVLYGSPTAENVGKPTIIEITAYNRRTFETARHNLIINIMSAEDFPLPYQAEFFIKNMNVEEMLASEVLGDFLGAVKNVWQPERLNAINITSALDRGGRVPLPINDLKEGVYVMVGADVPFSSCLREVENPQNQLRCSQEMEPVITCDKKFRTQFYIDWCKISLVDKTKQVSTYQEVIRGEGILPDGGEYKPPSDSLKSRDYYTDFLITLAVPSAVALVLFLILAYIMCCRREGVEKRNMQTPDIQLVHHSAIQKSTKELRDMSKNREIAWPLSTLPVFHPVTGEIIPPLHTDNYDSTNMPLMQTQQNLPHQTQIPQQQTTGKWYP

SEQ ID NO: 25291 - protein, 250 aa, Homo sapiens
MHVDRDPQEQVTPVKYARLWSEIPSEIAIDDYDSSGASKDEIKERFAQTMEFVEEYLRDVVCQRFPFSDKEKNKLTFEVVNLARNLIYFGFYNFSDLLRLTKILLAILDCVHVTTIFPISKMAKGEENKGNNDVEKLKSEYLRVPIHLRDALQPFLLCSCHTLYVMPHPFFVHSFPTFHREHFQILCKEKRKEQYDGVPRTHDFESTVIHVLLNFILYLCVFMCILFCIYVFMYESCVYFVEQFESYLTL

SEQ ID NO: 25292 - protein, 428 aa, Homo sapiens
MARGERRRRAVPAEGVRTAERAARGGPGRRDGRGGGPRSTAGGVALAVVVLSLALGMSGRWVLAWYRARRAVTLHSAPPVLPADSSSPAVAPDLFWGTYRPHVYFGMKTRSPKPLLTGLMWAQQGTTPGTPKLRHTYGKEVLLPEVGAKGQLKFISGHTSELGDFRFTLLPPTSPGDTAPKYGSYNVFWTSNPGLPLLTEMVKSRLNSWFQHRPPGAPPERYLGLPGSLKWEDRGPSGQGQGQFLIQQVTLKIPISIEFVFESGSAQAGGNQALPRLAGSLLTQALESHAEGFRERFEKTFQLKEKGLSSGEQVLGQAALSGLLGGIGYFYGQGLVLPDIGVEGSEQKVDPALFPPVPLFTAVPSRSFFPRGFLWDEGFHQLVVQRWDPSLTREALGHWLGLLNADGWIGREQILGDEARARVPPEFL

SEQ ID NO: 25293 - protein, 1429 aa, Homo sapiens
MTLSTLARKRKAPLACTCSLGGPDMIPYFSANAVISQNAINQLISESFLTVKGAALFLPRGNGSSTPRISHRRNKHAGDLQQHLQAMFILLRPEDNIRLAVRLESTYQNRTRYMVVVSTNGRQDTEESIVLGMDFSSNDSTCTMGLVLPLWSDTLIHLDGDGGFSVSTDNRVHIFKPVSVQAMWSALQSLHKACEVARAHNYYPGSLFLTWVSYYESHINSDQSSVNEWNAMQDVQSHRPDSPALFTDIPTERERTERLIKTKLREIMMQKDLENITSKEIRTELEMQMVCNLREFKEFIDNEMIVILGQMDSPTQIFEHVFLGSEWNASNLEDLQNRGVRYILNVTREIDNFFPGVFEYHNIRVYDEEATDLLAYWNDTYKFISKAKKHGSKCLVHCKMGVSRSASTVIAYAMKEYGWNLDRAYDYVKERRTVTKPNPSFMRQLEEYQGILLASKQRHNKLWRSHSDSDLSDHHEPICKPGLELNKKDITTSADQIAEVKTMESHPPIPPVFVEHMVPQDANQKGLCTKERMICLEFTSREFHAGQIEDELNLNDINGCSSGCCLNESKFPLDNCHASKALIQPGHVPEMANKFPDLTVEDLETDALKADMNVHLLPMEELTSPLKDPPMSPDPESPSPQPSCQTEISDFSTDRIDFFSALEKFVELSQETRSRSFSHSRMEELGGGRNESCRLSVVEVAPSKVTADDQRSSSLSNTPHASEESSMDEEQSKAISELVSPDIFMQSHSENAISVKEIVTEIESISQGVGQIQLKGDILPNPCHTPKKNSIHELLLERAQTPENKPGHMEQDEDSCTAQPELAKDSGMCNPEGCLTTHSSIADLEEGEPAEGEQELQGSGMHPGAKWYPGSVRRATLEFEERLRQEQEHHGAAPTCTSLSTRKNSKNDSSVADLAPKGKSDEAPPEHSFVLKEPEMSKGKGKYSGSEAGSLSHSEQNATVPAPRVLEFDHLPDPQEGPGSDTGTQQEGVLKDLRTVIPYQESETQAVPLPLPKRVEIIEYTHIVTSPNHTGPGSEIATSEKSGEQGLRKVNMEKSVTVLCTLDENLNRTLDPNQVSLHPQVLPLPHSSSPEHNRPTDHPTSILSSPEDRGSSLSTALETAAPFVSHTTHLLSASLDYLHPQTMVHLEGFTEQSSTTDEPSAEQVSWEESQESPLSSGSEVPYKDSQLSSADLSLISKLGDNTGELQEKMDPLPVACRLPHSSSSENIKSLSHSPGVVKERAKEIESRVVFQAGLTKPSQMRRSASLAKLGYLDLCKDCLPEREPASCESPHLKLLQPFLRTDSGMHAMEDQESLENPGAPHNPEPTKSFVEQLTTTECIVQSKPVERPLVQYAKEFGSSQQYLLPRAGLELTSSEGGLPVLQTQGLQCACPAPGLAVAPRQQHGRTHPLRRLKKANDKKRTTNPFYNTM

SEQ ID NO: 25294 - protein, 1055 aa, Homo sapiens
MALDYLLLLLLASAVAAMEETLMDTRTATAELGWTANPASGWEEVSGYDENLNTIRTYQVCNVFEPNQNNWLLTTFINRRGAHRIYTEMRFTVRDCSSLPNVPGSCKETFNLYYYETDSVIATKKSAFWSEAPYLKVDTIAADESFSQVDFGGRLMKVNTEVRSFGPLTRNGFYLAFQDYGACMSLLSVRVFFKKCPSIVQNFAVFPETMTGAESTSLVIARGTCIPNAEEVDVPIKLYCNGDGEWMVPIGRCTCKPGYEPENSVACKACPAGTFKASQEAEGCSHCPSNSRSPAEASPICTCRTGYYRADFDPPEVACTSVPSGPRNVISIVNETSIILEWHPPRETGGRDDVTYNIICKKCRADRRSCSRCDDNVEFVPRQLGLTECRVSISSLWAHTPYTFDIQAINGVSSKSPFPPQHVSVNITTNQAAPSTVPIMHQVSATMRSITLSWPQPEQPNGIILDYEIRYYEKEHNEFNSSMARSQTNTARIDGLRPGMVYVVQVRARTVAGYGKFSGKMCFQTLTDDDYKSELREQLPLIAGSAAAGVVFVVSLVAISIVCSRKRAYSKEAVYSDKLQHYSTGRGSPGMKIYIDPFTYEDPNEAVREFAKEIDVSFVKIEEVIGAGEFGEVYKGRLKLPGKREIYVAIKTLKAGYSEKQRRDFLSEASIMGQFDHPNIIRLEGVVTKSRPVMIITEFMENGALDSFLRQNDGQFTVIQLVGMLRGIAAGMKYLAEMNYVHRDLAARNILVNSNLVCKVSDFGLSRYLQDDTSDPTYTSSLGGKIPVRWTAPEAIAYRKFTSASDVWSYGIVMWEVMSFGERPYWDMSNQDVINAIEQDYRLPPPMDCPAALHQLMLDCWQKDRNSRPRFAEIVNTLDKMIRNPASLKTVATITAVPSQPLLDRSIPDFTAFTTVDDWLSAIKMVQYRDSFLTAGFTSLQLVTQMTSEHHLGRPSEEDPEQHSFYEGPDKSVTNGNGMRTLVSWGRRGGKRTRVKGDQRLTTVECTGETGFSAEECISISEESTGPVASRQSPFLSDRSMFEMPWETKYIIIKI

SEQ ID NO: 25295 - protein, 780 aa, Homo sapiens
GQKQRVAIARALIRNPKILLLDMATSALDNESEAMVQEVLSKIQHGHTIISVAHRLSTVRAADTIIGFEHGTAVERGTHEELLERKGVYFTLVTLQSQGNQALNEEDIKDATEDDMLARTFSRGSYQDSLRASIRQRSKSQLSYLVHEPPLAVVDHKSTYEEDRKDKDIPVQEEVEPAPVRRILKFSAPEWPYMLVGSVGAAVNGTVTPLYAFLFSQILGTFSIPDKEEQRSQINGVCLLFVAMGCVSLFTQFLQGYAFAKSGELLTKRLRKFGFRAMLGQDIAWFDDLRNSPGALTTRLATDASQVQGAAGSQIGMIVNSFTNVTVAMIIAFSFSWKLSLVILCFFPFLALSGATQTRMLTGFASRDKQALEMVGQITNEALSNIRTVAGIGKERRFIEALETELEKPFKTAIQKANIYGFCFAFAQCIMFIANSASYRYGGYLISNEGLHFSYVFRVISAVVLSATALGRAFSYTPSYAKAKISAARFFQLLDRQPPISVYNTAGEKWDNFQGKIDFVDCKFTYPSRPDSQVLNGLSVSISPGQTLAFVGSSGCGKSTSIQLLERFYDPDQGKVAISSLISVTRNVCLLNSHHPMIDGHDSKKVNVQFLRSNIGIVSQEPVLFACSIMDNIKYGDNTKEIPMERVIAAAKQAQLHDFVMSLPEKYETNVGSQGSQLSRGEKQRIAIARAIVRDPKILLLDEATSALDTESEKTVQVALDKAREGRTCIVIAHRLSTIQNADIIAVMAQGVVIEKGTHEELMAQKGAYYKLVTTGSPIS

SEQ ID NO: 25296 - protein, 4314 aa, Homo sapiens
MANGTADVRKLFIFTTTQNYFGLMSELWDQPLLCNCLEINNFLDDGNQMLLRVQRSDAGISFSNTIEFGDTKDKVLVFFKLRPEVITDENLHDNILVSSMLESPISSLYQAVRQVFAPMLLKDQEWSRNFDPKLQNLLSELEAGLGIVLRRSDTNLTKLKFKEDDTRGILTPSDEFQFWIEQAHRGNKQISKERANYFKELFETIAREFYNLDSLSLLEVVDLVETTQDVVDDVWRQTEHDHYPESRMLHLLDIIGGSFGRFVQKKLGTLNLWEDPYYLVKESLKAGISICEQWVIVCNHLTGQVWQRYVPHPWKNEKYFPETLDKLGKRLEEVLAIRTIHEKFLYFLPASEEKIICLTRVFEPFTGLNPVQYNPYTEPLWKAAVSQYEKIIAPAEQKIAGKLKNYISEIQDSPQQLLQAFLKYKELVKRPTISKELMLERETLLARLVDSIKDFRLDFENRCRGIPGDASGPLSGKNLSEVVNSIVWVRQLELKVDDTIKIAEALLSDLPGFRCFHQSAKDLLDQLKLYEQEQFDDWSRDIQSGLSDSRSGLCIEASSRIMELDSNDGLLKVHYSDRLVILLREVRQLSALGFVIPAKIQQVANIAQKFCKQAIILKQVAHFYNSIDQQMIQSQRPMMLQSALAFEQIIKNSKAGSGGKSQITWDNPKELEGYIQKLQNAAERLATENRKLRKWHTTFCEKVVVLMNIDLLRQQQRWKDGLQELRTGLATVEAQGFQASDMHAWKQHWNHQLYKALEHQYQMGLEALNENLPEINIDLTYKQGRLQFRPPFEEIRAKYYREMKRFIGIPNQFKGVGEAGDESIFSIMIDRNASGFLTIFSKAEDLFRRLSAVLHQHKEWIVIGQVDMEALVEKHLFTVHDWEKNFKALKIKGKEVERLPSAVKVDCLNINCNPVKTVIDDLIQKLFDLLVLSLKKSIQAHLHEIDTFVTEAMEVLTIMPQSVEEIGDANLQYSKLQERKPEILPLFQEAEDKNRLLRTVAGGGLETISNLKAKWDKFELMMESHQLMIKDQIEVMKGNVKSRLQIYYQELEKFKARWDQLKPGDDVIETGQHNTLDKSAKLIKEKKIEFDDLEVTRKKLVDDCHHFRLEEPNFSLASSISKDIESCAQIWAFYEEFQQGFQEMANEDWITFRTKTYLFEEFLMNWHDRLRKVEEHSVMTVKLQSEVDKYKIVIPILKYVRGEHLSPDHWLDLFRLLGLPRGTSLEKLLFGDLLRVADTIVAKAADLKDLNSRAQGEVTIREALRELDLWGVGAVFTLIDYEDSQSRTMKLIKDWKDIVNQVGDNRCLLQSLKDSPYYKGFEDKVSIWERKLAELDEYLQNLNHIQRKWVYLEPIFGRGALPKEQTRFNRVDEDFRSIMTDIKKDNRVTTLTTHAGIRNSLLTILDQLQRCQKSLNEFLEEKRSAFPRFYFIGDDDLLEILGQSTNPSVIQSHLKKLFAGINSVCFDEKSKHITAMKSLEGEVVPFKNKVPLSNNVETWLNDLALEMKKTLEQLLKECVTTGRSSQGAVDPSLFPSQILCLAEQIKFTEDVENAIKDHSLHQIETQLVNKLEQYTNIDTSSEDPGNTESGILELKLKALILDIIHNIDVVKQLNQIQVHTTEDWAWKKQLRFYMKSDHTCCVQMVDSEFQYTYEYQGNASKLVYTPLTDKCYLTLTQAMKMGLGGNPYGPAGTGKTESVKALGGLLGRQVLVFNCDEGIDVKSMGRIFVGLVKCGAWGCFDEFNRLEESVLSAVSMQIQTIQDALKNHRTVCELLGKEVEVNSNSGIFITMNPAGKGYGGRQKLPDNLKQLFRPVAMSHPDNELIAEVILYSEGFKDAKVLSRKLVAIFNLSRELLTPQQHYDWGLRALKTVLRGSGNLLRQLNKSGTTQNANESHIVVQALRLNTMSKFTFTDCTRFDALIKDVFPGIELKEVEYDELSAALKQVFEEANYEIIPNQIKKALELYEQLCQRMGVVIVGPSGAGKSTLWRMLRAALCKTGKVVKQYTMNPKAMPRYQLLGHIDMDTREWSDGVLTNSARQVVREPQDVSSWIICDGDIDPEWIESLNSVLDDNRLLTMPSGERIQFGPNVNFVFETHDLSCASPATISRMGMIFLSDEETDLNSLIKSWLRNQPAEYRNNLENWIGDYFEKALQWVLKQNDYVVETSLVGTVMNGLSHLHGCRDHDEFIINLIRGLGGNLNMKSRLEFTKEVFHWARESPPDFHKPMDTYYDSTRGRLATYVLKKPEDLTADDFSNGLTLPVIQTPDMQRGLDYFKPWLSSDTKQPFILVGPEGCGKGMLLRYAFSQLRSTQIATVHCSAQTTSRHLLQKLSQTCMVISTNTGRVYRPKDCERLVLYLKDINLPKLDKWGTSTLVAFLQQVLTYQGFYDENLEWVGLENIQIVASMSAGGRLGRHKLTTRFTSIVRLCSIDYPEREQLQTIYGAYLEPVLHKNLKNHSIWGSSSKIYLLAGSMVQVYEQVRAKFTVDDYSHYFFTPCILTQWVLGLFRYDLEGGSSNHPLDYVLEIVAYEARRLFRDKIVGAKELHLFDIILTSVFQGDWGSDILDNMSDSFYVTWGARHNSGARAAPGQPLPPHGKPLGKLNSTDLKDVIKKGLIHYGRDNQNLDILLFHEVLEYMSRIDRVLSFPGGSLLLAGRSGVGRRTITSLVSHMHGAVLFSPKISRGYELKQFKNDLKHVLQLAGIEAQQVVLLLEDYQFVHPTFLEMINSLLSSGEVPGLYTLEELEPLLLPLKDQASQDGFFGPVFNYFTYRIQQNLHIVLIMDSANSNFMINCESNPALHKKCQVLWMEGWSNSSMKKIPEMLFSETGGGEKYNDKKRKEEKKKNSVDPDFLKSFLLIHESCKAYGATPSRYMTFLHVYSAISSSKKKELLKRQSHLQAGVSKLNEAKALVDELNRKAGEQSVLLKTKQDEADAALQMITVSMQDASEQKTELERLKHRIAEEVVKIEERKNKIDDELKEVQPLVNEAKLAVGNIKPESLSEIRSLRMPPDVIRDILEGVLRLMGIFDTSWVSMKSFLAKRGVREDIATFDARNISKEIRESVEELLFKNKGSFDPKNAKRASTAAAPLAAWVKANIQYSHVLERIHPLETEQAGLESNLKKTEDRKRKLEELLNSVGQKVSELKEKFQSRTSEAAKLEAEVSKAQETIKAAEVLINQLDREHKRWNAQVVEITEELATLPKRAQLAAAFITYLSAAPESLRKTCLEEWTKSAGLEKFDLRRFLCTESEQLIWKSEGLPSDDLSIENALVILQIIGLKSWSRVCPFLIDPSSQATEWLKTHLKDSRLEVINQQDSNFITALELAVRFGKTLIIQEMDGVEPVLYPLLRRDLVAQGPRYVVQIGDKIIDYNEEFRLFLSTRNPNPFIPPDAASIVTEVNFTTTRSGLRGQLLALTIQHEKPDLEEQKTKLLQQEEDKKIQLAKLEESLLETLATSQGNILENKDLIESLNQTKASSALIQESLKESYKLQISLDQERDAYLPLAESASKMYFIISDLSKINNMYRFSLAAFLRLFQRALQNKQDSENTEQRIQSLISSLQHMVYEYICRCLFKADQLMFALHFVRGMHPELFQENEWDTFTGVVVGDMLRKADSQQKIRDQLPSWIDQERSWAVATLKIALPSLYQTLCFEDAALWRTYYNNSMCEQEFPSILAKKVSLFQQILVVQALRPDRLQSAMALFACKTLGLKEVSPLPLNLKRLYKETLEIEPILIIISPGADPSQELQELANAERSGECYHQVAMGQGQADLAIQMLKECARNGDWLCLKNLHLVVSWLPVLEKELNTLQPKDTFRLWLTAEVHPNFTPILLQSSLKITYESPPGLKKNLMRTYESWTPEQISKKDNTHRAHALFSLAWFHAACQERRNYIPQGWTKFYEFSLSDLRAGYNIIDRLFDGAKDVQWEFVHGLLENAIYGGRIDNYFDLRVLQSYLKQFFNSSVIDVFNQRNKKSIFPYSVSLPQSCSILDYRAVIEKIPEDDKPSFFGLPANIARSSQRMISSQVISQLRILGRSITAGSKFDREIWSNELSPVLNLWKKLNQNSNLIHQKVPPPNDRQGSPILSFIILEQFNAIRLVQSVHQSLAALSKVIRGTTLLSSEVQKLASALLNQKCPLAWQSKWEGPEDPLQYLRGLVARALAIQNWVDKAEKQALLSETLDLSELFHPDTFLNALRQETARAVGRSVDSLKFVASWKGRLQEAKLQIKISGLLLEGCSFDGNQLSENQLDSPSVSSVLPCFMGWIPQDACGPYSPDECISLPVYTSAERDRVVTNIDVPCGGNQDQWIQCGAALFLKNQ

SEQ ID NO: 25297 - protein, 526 aa, Homo sapiens
MGSSSSRVLGQPRRALAQQEQGARARGSARRPDTGDDAASYGFCYCPGSHKRKRSSGACRYCDPDSHREEHEEEGDKQQPLLNTPARKKLRSTSKYIYQTLFLNGENSDIKICALGEEWRLHKIYLCQSGYFSSMFSGSWKESSMNIIELEIPDQNIDVDALQVAFGSLYRDDVLIKPSRVVAILAAACMLQLDGLIQQCGETMKETINVKTVCGYYTSVEIYGLDSVKKKCLEWLLNNLMTHQNVKLFKELGINVMKQLIGSSNLFVMQVEMDVYTTLKKWMFLQLVPSWNGSLKQLLTETDVWFSKQRKDFEGMAFLETEPGKPFVSVFRHLRLQYIISDLASARIIEQDGIVPSEWLSSVYKQQWFAMLRAEQDREVGPQEINKEDLEGNSMRCGRKLAKDGEYYWCWTGFNFGFDLLVIYTNGYIIFKRNTLNQPRSGSVSLRPRRSIAFRLRLASFDSSGKLVCSRTTGYQILILKKDQEQVVMNLDSRFLTFPLYICCNFLYISPEKGIENNRHPENPEN

SEQ ID NO: 25298 - protein, 403 aa, Homo sapiens
MEEPEEPADSGQSLVPVYIYSPEYVSMCDSLAKIPKRASMVHSLIEAYALHKQMRIVKPKVASMEEMATFHTDAYLQHLQKVSQEGDDDHPDSIEYGLGYDCPATEGIFDYAAAIGGATITAAQCLIDGMCKVAINWSGGWHHAKKDEASGFCYLNDAVLGILRLRRKFERILYVDLDLHHGDGVEDAFSFTSKVMTVSLHKFSPGFFPGTGDVSDVGLGKGRYYSVNVPIQDGIQDEKYYQICESVLKEVYQAFNPKAVVLQLGADTIAGDPMCSFNMTPVGIGKCLKYILQWQLATLILGGGGYNLANTARCWTYLTGVILGKTLSSEIPDHEFFTAYGPDYVLEITPSCRPDRNEPHRIQQILNYIKEKWPVGFGAQCFYLGKCGKAKTTEGQRNLKHVV

SEQ ID NO: 25299 - protein, 1115 aa, Homo sapiens
MSTRAPMPAAHSREDPPAVTAERESLLAAANRPAEQPPPPECEGKEAAREERAAAATSAGARGEPSPALVLGRSVPQAAVPVRPLALHLAHKARGPGGPFGGEPPPPPPPPSPLPPLLRDPPAEDAREEVAAGPAEKRQPPLLPPKGNPWTKKPPQHLSPDTTGPPPPPLETLEAEFGSLKIIKAGKLKTKKSNKASDFSDMENWPTPSELVNTGFQSVLSQGNKKPQNRKEKEEKVEKRSNSDSKENRETKLNGPGENVSEDEAQSSNQRKRANKHKWVPLHLDVVRSESQERPGSRNSSRCQPEANKPTHNNRRNDTRSWKRDREKRDDQDDVSSVRSEGGNIRGSFRGRGRGRGRGRGRGRGNPRLNFDYSYGYQEHGERTDQPFQTELNTSMMYYYDDGTGVQVYPVEEALLKEYIKRQIEYYFSVENLERDFFLRGKMDEQGFLPISLIAGFQRVQALTTNLNLILEALKDSTEVEIVDEKMRKKIEPEKWPIPGPPPRSVPPTDFSQLIDCPEFVPGQAFCSHTESAPNSPRIGSPLSPKKNSETSILQAMSRGLSTSLPDLDSEPWIEVKKRHQPAPVKLRESVSVPEGSLNQLCSSEEPEQEELDFLFDEEIEQIGRKNTFTDWSDNDSDYEIDDQDLNKILIVTQTPPYVKKHPGGDRTGTHMSRAKITSELAKVINDGLYYYEQDLWMEEDENKHTAIKQEVENFKKLNLISKEQFENLTPELPFEPNQEVPVAPSQSRQGGVQGVLHIPKKDLTDELAQKLFDVSEITSAAMVHSLPTAVPESPRIHPTRTPKTPRTPRLQDPNKTPRFYPVVKEPKAIDVKSPRKRKTRHSTNPPLECHVGWVMDSRDRGPGTSSVSTSNASPSEGAPLAGSYGCTPHSFPKFQHPSHELLKENGFTQQVYHKYRRRCLSERKRLGIGQSQEMNTLFRFWSFFLRDHFNKKMYEEFRQLAWEDAKENYRYGLECLFRFYSYGLEKKFRREIFQDFQEETKKDYESGQLYGLEKFWAYLKYSQSKTQSIDPKLQEYLCSFKRLEDFRVDPPISDEFGRKRHSSTSGEESNRHRLPPNSSTKPPNAAKPTSTSELQVPINSPRRNISPESSDNSH

SEQ ID NO: 25300 - protein, 923 aa, Homo sapiens
MPPKTPRKTAATAAAAAAEPPAPPPPPPPEEDPEQDSGPEDLPLVRLEFEETEEPDFTALCQKLKIPDHVRERAWLTWEKVSSVDGVLGGYIQKKKELWGICIFIAAVDLDEMSFTFTELQKNIEISVHKFFNLLKEIDTSTKVDNAMSRLLKKYDVLFALFSKLERTCELIYLTQPSSSISTEINSALVLKVSWITFLLAKGEVLQMEDDLVISFQLMLCVLDYFIKLSPPMLLKEPYKTAVIPINGSPRTPRRGQNRSARIAKQLENDTRIIEVLCKEHECNIDEVKNVYFKNFIPFMNSLGLVTSNGLPEVENLSKRYEEIYLKNKDLDARLFLDHDKTLQTDSIDSFETQRTPRKSNLDEEVNVIPPHTPVRTVMNTIQQLMMILNSASDQPSENLISYFNNCTVNPKESILKRVKDIGYIFKEKFAKAVGQGCVEIGSQRYKLGVRLYYRVMESMLKSEEERLSIQNFSKLLNDNIFHMSLLACALEVVMATYSRSTSQNLDSGTDLSFPWILNVLNLKAFDFYKVIESFIKAEGNLTREMIKHLERCEHRIMESLAWLSDSPLFDLIKQSKDREGPTDHLESACPLNLPLQNNHTAADMYLSPVRSPKKKGSTTRVNSTANAETQATSAFQTQKPLKSTSLSLFYKKVYRLAYLRLNTLCERLLSEHPELEHIIWTLFQHTLQNEYELMRDRHLDQIMMCSMYGICKVKNIDLKFKIIVTAYKDLPHAVQETFKRVLIKEEEYDSIIVFYNSVFMQRLKTNILQYASTRPPTLSPIPHIPRSPYKFPSSPLRIPGGNIYISPLKSPYKISEGLPTPTKMTPRSRILVSIGESFGTSEKFQKINQMVCNSDRVLKRSAEGSNPPKPLKKLRFDIEGSDEADGSKHLPGESKFQQKLAEMILHPFSSFYSNTNAKAENE

SEQ ID NO: 25301 - protein, 796 aa, Homo sapiens
MVKLANPLYTEWILEAIQKIKKQKQRPSEERICHAVSTSHGLDKKTVSEQLELSVQDGSVLKVTNKGLASYKDPDNPGRFSSVKPGTFPKSAKGSRGSCNDLRNVDWNKLLRRAIEGLEEPNGSSLKNIEKYLRSQSDLTSTTNNPAFQQRLRLGAKRAVNNGRLLKDGPQYRVNYGSLDGKGAPQYPSAFPSSLPPVSLLPHEKDQPRADPIPICSFCLGTKESNREKKPEELLSCADCGSSGHPSCLKFCPELTTNVKALRWQCIECKTCSACRVQGRNADNMLFCDSCDRGFHMECCDPPLSRMPKGMWICQVCRPKKKGRKLLHEKAAQIKRRYAKPIGRPKNKLKQRLLSVTSDEGSMNAFTGRGSPDTEIKINIKQESADVNVIGNKDVVTEEDLDVFKQAQELSWEKIECESGVEDCGRYPSVIEFGKYEIQTWYSSPYPQEYARLPKLYLCEFCLKYMKSKNILLRHSKKCGWFHPPANEIYRRKDLSVFEVDGNMSKIYCQNLCLLAKLFLDHKTLYYDVEPFLFYVLTKNDEKGCHLVGYFSKEKLCQQKYNVSCIMIMPQHQRQGFGRFLIDFSYLLSRREGQAGSPEKPLSDLGRLSYLAYWKSVILEYLYHHHERHISIKAISRATGMCPHDIATTLQHLHMIDKRDGRFVIIRREKLILSHMEKLKTCSRANELDPDSLRWTPILISNAAVSEEEREAEKEAERLMEQASCWEKEEQEILSTRANSRQSPAKVQSKNKYLHSPESRPVTGERGQLLELSKESSEEEEEEEDEEEEEEEEEEE

SEQ ID NO: 25302 - protein, 800 aa, Homo sapiens
MVKLANPLYTEWILEAIQKIKKQKQRPSEERICHAVSTSHGLDKKTVSEQLELSVQDGSVLKVTNKGLASYKDPDNPGRFSSVKPGTFPKSAKGSRGSCNDLRNVDWNKLLRRAIEGLEEPNGSSLKNIEKYLRSQSDLTSTTNNPAFQQRLRLGAKRAVNNGRLLKDGPQYRVNYGSLDGKGAPQYPSAFPSSLPPVSLLPHEKDQPRADPIPICSFCLGTKESNREKKPEELLSCADCGSSGHPSCLKFCPELTTNVKALRWQCIECKTCSACRVQGRNADNMLFCDSCDRGFHMECCDPPLSRMPKGMWICQVCRPKKKGRKLLHEKAAQIKRRYAKPIGRPKNKLKQRLLSVTSDEGSMNAFTGRGSPDTEIKINIKQESADVNVIGNKDVVTEEDLDVFKQAQELSWEKIECESGVEDCGRYPSVIEFGKYEIQTWYSSPYPQEYARLPKLYLCEFCLKYMKSKNILLRHSKKCGWFHPPANEIYRRKDLSVFEVDGNMSKIYCQNLCLLAKLFLDHKTLYYDVEPFLFYVLTKNDEKGCHLVGYFSKEKLCQQKYNVSCIMIMPQHQRQGFGRFLIDFSYLLSRREGQAGSPEKPLSDLGRLSYLAYWKSVILEYLYHHHERHISIKAISRATGMCPHDIATTLQHLHMIDKRDGRFVIIRREKLILSHMEKLKTCSRANELDPDSLRWTPILISNAAVSEEEREAEKEAERLMEQASCWEKEEQEILSTRANSRQSPAKVQSKNKYLHSPESRPVTGERGQLLELSKESSEEEEEEEDEEEEEEEEEEEEDEE

SEQ ID NO: 25303 - protein, 1419 aa, Homo sapiens
MQRSPLEKASVVSKLFFSWTRPILRKGYRQRLELSDIYQIPSVDSADNLSEKLEREWDRELASKKNPKLINALRRCFFWRFMFYGIFLYLGEVTKAVQPLLLGRIIASYDPDNKEERSIAIYLGIGLCLLFIVRTLLLHPAIFGLHHIGMQMRIAMFSLIYKKTLKLSSRVLDKISIGQLVSLLSNNLNKFDEGLALAHFVWIAPLQVALLMGLIWELLQASAFCGLGFLIVLALFQAGLGRMMMKYRDQRAGKISERLVITSEMIENIQSVKAYCWEEAMEKMIENLRQTELKLTRKAAYVRYFNSSAFFFSGFFVVFLSVLPYALIKGIILRKIFTTISFCIVLRMAVTRQFPWAVQTWYDSLGAINKIQDFLQKQEYKTLEYNLTTTEVVMENVTAFWEETSLLMVIMGELEPSEGKIKHSGRISFCSQFSWIMPGTIKENIIFGVSYDEYRYRSVIKACQLEEDISKFAEKDNIVLGEGGITLSGGQRARISLARAVYKDADLYLLDSPFGYLDVLTEKEIFESCVCKLMANKTRILVTSKMEHLKKADKILILHEGSSYFYGTFSELQNLQPDFSSKLMGCDSFDQFSAERRNSILTETLHRFSLEGDAPVSWTETKKQSFKQTGEFGEKRKNSILNPINSIRKFSIVQKTPLQMNGIEEDSDEPLERRLSLVPDSEQGEAILPRISVISTGPTLQARRRQSVLNLMTHSVNQGQNIHRKTTASTRKVSLAPQANLTELDIYSRRLSQETGLEISEEINEEDLKECFFDDMESIPAVTTWNTYLRYITVHKSLIFVLIWCLVIFLAEVAASLVVLWLLGNTPLQDKGNSTHSRNNSYAVIITSTSSYYVFYIYVGVADTLLAMGFFRGLPLVHTLITVSKILHHKMLHSVLQAPMSTLNTLKAGGILNRFSKDIAILDDLLPLTIFDFIQLLLIVIGAIAVVAVLQPYIFVATVPVIVAFIMLRAYFLQTSQQLKQLESEGRSPIFTHLVTSLKGLWTLRAFGRQPYFETLFHKALNLHTANWFLYLSTLRWFQMRIEMIFVIFFIAVTFISILTTGEGEGRVGIILTLAMNIMSTLQWAVNSSIDVDSLMRSVSRVFKFIDMPTEGKPTKSTKPYKNGQLSKVMIIENSHVKKDDIWPSGGQMTVKDLTAKYTEGGNAILENISFSISPGQRVGLLGRTGSGKSTLLSAFLRLLNTEGEIQIDGVSWDSITLQQWRKAFGVIPQKVFIFSGTFRKNLDPYEQWSDQEIWKVADEVGLRSVIEQFPGKLDFVLVDGGCVLSHGHKQLMCLARSVLSKAKILLLDEPSAHLDPVTYQIIRRTLKQAFADCTVILCEHRIEAMLECQQFLVIEENKVRQYDSIQKLLNERSLFRQAISPSDRVKLFPHRNSSKCKSKPQIAALKEETEEEVQDTRL

SEQ ID NO: 25304 - protein, 888 aa, Homo sapiens
DSLKLLAQGHGVVLSENMNDRNYADSMSQQDSRNMNYVMLGKPMNNGLMEKMVEESDEEVCLSSLECLRNQCFDLARKLSETNPQERNPQQNMNIRQHVRPEEDFPGRTPDRNYSDMLNLMRLEEQLSPRSRVFASCAKEDGCHERDDDTTSVNSDRSEEVFDMTKGNLTLLEKAIALETERAKAMREKMAMEAGRRDNMRSYEDQSPRQLPGEDRKPKSSDSHVKKPYYGKDPSRTEKKESKCPTPGCDGTGHVTGLYPHHRSLSGCPHKDRVPPEILAMHESVLKCPTPGCTGRGHVNSNRNSHRSLSGCPIAAAEKLAKAQEKHQSCDVSKSSQASDRVLRPMCFVKQLEIPQYGYRNNVPTTTPRSNLAKELEKYSKTSFEYNSYDNHTYGKRAIAPKVQTRDISPKGYDDAKRYCKDPSPSSSSTSSYAPSSSSNLSCGGGSSASSTCSKSSFDYTHDMEAAHMAATAILNLSTRCREMPQNLSTKPQDLCATRNPDMEVDENGTLDLSMNKQRPRDSCCPILTPLEPMSPQQQAVMNNRCFQLGEGDCWDLPVDYTKMKPRRIDEDESKDITPEDLDPFQEALEERRYPGEVTIPSPKPKYPQCKESKKDLITLSGCPLADKSIRSMLATSSQELKCPTPGCDGSGHITGNYASHRSLSGCPRAKKSGIRIAQSKEDKEDQEPIRCPVPGCDGQGHITGKYASHRSASGCPLAAKRQKDGYLNGSQFSWKSVKTEGMSCPTPGCDGSGHVSGSFLTHRSLSGCPRATSAMKKAKLSGEQMLTIKQRASNGIENDEEIKQLDEEIKELNESNSQMEADMIKLRTQVTITTMESNLKTIEEENKVIEQQNESLLHELANLSQSLIHSLANIQLPHMEDGVWWGQ

SEQ ID NO: 25305 - protein, 705 aa, Homo sapiens
MQPTATMATAATTTTTTTATVALTTSWDNATGRPTAEPDPILDNYVLLVVVMSLFVGGTLVVLSGVLLLCKRCWDVHQRLNRAMEEAEKTTTTYLDNGTHPAQDPDFRGEDPECQDAETERFLSTSSTGRRVSFNEAALFEQSRKTQDKGRRYTLTEGDFHHLKNARLTHLHLPPLKIVTIHECDSGEASSATTPHPATSPKATLAIFQPPGKALTGRSVGPSSALPGDPYNSAAGATDFAEISPSASSDSGEGTSLDAGTRSTKAGGPGAAAGPGEAGPGSGAGTVLQFLTRLRRHASLDGASPYFKVKKWKLEPSQRAASLDTRGSPKRHHFQRQRAASESTEQEEGDAPQEDFIQYIARAGDAVAFPHPRPFLASPPPALGRLEAAEAAGGASPDSPPERGAGSAGPEQQQPPLEPDAERDAGPEQAQTSYRDLWSLRASLELHAAASDHSSSGNDRDSVRSGDSSGSGSGGAAPAFPPPSPPAPRPKDGEARRLLQMDSGYASIEGRGAGDDTEPPAAPARPRSPRAWPRRPRRDYSIDEKTDALFHEFLRHDPHFDDTPAAARHRARAHPHARKQWQRGRQHSDPGARAAPALAGTPAPPAGAARPARAPLRRGDSVDGPPDGRTLGGAGDDPAIPVIEEEPGGGGCPGSGLCVLPSGSVLDKLAAGLDERLFPPRLAEPVVATPALVAAAPTSPDHSPA

SEQ ID NO: 25306 - protein, 175 aa, Homo sapiens
MVIIIVLNLIFGVIIDTFADLRSEKQKKEEILKTTCFICGLERDKFDNKTVTFEEHIKEEHNMWHYLCFIVLVKVKDSTEYTGPESYVAEMIKERNLDWFPRMRAMSLVSSDSEGEQNELRNLQEKLESTMKLVTNLSGQLSELKDQMTEQRKQKQRIGLLGHPPHMNVNPQQPA

SEQ ID NO: 25307 - protein, 1204 aa, Homo sapiens
MLTKFETKSARVKGLSFHPKRPWILTSLHNGVIQLWDYRMCTLIDKFDEHDGPVRGIDFHKQQPLFVSGGDDYKIKVWNYKLRRCLFTLLGHLDYIRTTFFHHEYPWILSASDDQTIRVWNWQSRTCVCVLTGHNHYVMCAQFHPTEDLVVSASLDQTVRVWDISGLRKKNLSPGAVESDVRGITGVDLFGTTDAVVKHVLEGHDRGVNWAAFHPTMPLIVSGADDRQVKIWRMNESKAWEVDTCRGHYNNVSCAVFHPRQELILSNSEDKSIRVWDMSKRTGVQTFRRDHDRFWVLAAHPNLNLFAAGHDGGMIVFKLERERPAYAVHGNMLHYVKDRFLRQLDFNSSKDVAVMQLRSGSKFPVFNMSYNPAENAVLLCTRASNLENSTYDLYTIPKDADSQNPDAPEGKRSSGLTAVWVARNRFAVLDRMHSLLIKNLKNEITKKVQVPNCDEIFYAGTGNLLLRDADSITLFDVQQKRTLASVKISKVKYVIWSADMSHVALLAKHAIVICNRKLDALCNIHENIRVKSGAWDESGVFIYTTSNHIKYAVTTGDHGIIRTLDLPIYVTRVKGNNVYCLDRECRPRVLTIDPTEFKFKLALINRKYDEKKGYPEVALHFVKDEKTRFSLALECGNIEIALEAAKALDDKNCWEKLGEVALLQGNHQIVEMCYQRTKNFDKLSFLYLITGNLEKLRKMMKIAEIRKDMSGHYQNALYLGDVSERVRILKNCGQKSLAYLTAATHGLDEEAESLKETFDPEKETIPDIDPNAKLLQPPAPIMPLDTNWPLLTVSKGFFEGTIASKGKGGALAADIDIDTVGTEGWGEDAELQLDEDGFVEATEGLGDDALGKGQEEGGGWDVEEDLELPPELDISPGAAGGAEDGFFVPPTKGTSPTQIWCNNSQLPVDHILAGSFETAMRLLHDQVGVIQFGPYKQLFLQTYARGRTTYQALPCLPSMYGYPNRNWKDAGLKNGVPAVGLKLNDLIQRLQLCYQLTTVGKFEEAVEKFRSILLSVPLLVVDNKQEIAEAQQLITICREYIVGLSVETERKKLPKETLEQQKRICEMAAYFTHSNLQPVHMILVLRTALNLFFKLKNFKTAATFARRLLELGPKPEVAQQTRKILSACEKNPTDAYQLNYDMHNPFDICAASYRPIYRGKPVEKCPLSGACYSPEFKGQICRVTTVTEIGKDVIGLRISPLQFR

SEQ ID NO: 25308 - protein, 587 aa, Homo sapiens
MVTAAMLLQCCPVLARGPTSLLGKVVKTHQFLFGIGRCPILATQGPNCSQIHLKATKAGGDSPSWAKGHCPFMLSELQDGKSKIVQKAAPEVQEDVKAFKTDLPSSLVSVSLRKPFSGPQEQEQISGKVTHLIQNNMPGNYVFSYDQFFRDKIMEKKQDHTYRVFKTVNRWADAYPFAQHFSEASVASKDVSVWCSNDYLGMSRHPQVLQATQETLQRHGAGAGGTRNISGTSKFHVELEQELAELHQKDSALLFSSCFVANDSTLFTLAKILPGCEIYSDAGNHASMIQGIRNSGAAKFVFRHNDPDHLKKLLEKSNPKIPKIVAFETVHSMDGAICPLEELCDVSHQYGALTFVDEVHAVGLYGSRGAGIGERDGIMHKIDIISGTLGKAFGCVGGYIASTRDLVDMVRSYAAGFIFTTSLPPMVLSGALESVRLLKGEEGQALRRAHQRNVKHMRQLLMDRGLPVIPCPSHIIPIRVGNAALNSKLCDLLLSKHGIYVQAINYPTVPRGEELLRLAPSPHHSPQMMEDFVEKLLLAWTAVGLPLQDVSVAACNFCRRPVHFELMSEWERSYFGNMGPQYVTTYA

SEQ ID NO: 25309 - protein, 468 aa, Homo sapiens
MQQLQQQHLLSLQRQGLLTIQPGQPALPLQPLAQGMIPTELQQLWKEVTSAHTAEETTGNNHSSLDLTTTCVSSSAPSKTSLIMNPHASTNGQLSVHTPKRESLSHEEHPHSHPLYGHGVCKWPGCEAVCEDFQSFLKHLNSEHALDDRSTAQCRVQMQVVQQLELQLAKDKERLQAMMTHLHVKSTEPKAAPQPLNLVSSVTLSKSASEASPQSLPHTPTTPTAPLTPVTQGPSVITTTSMHTVGPIRRRYSDKYNVPISSADIAQNQEFYKNAEVRPPFTYASLIRQAILESPEKQLTLNEIYNWFTRMFAYFRRNAATWKNAVRHNLSLHKCFVRVENVKGAVWTVDEVEFQKRRPQKISGNPSLIKNMQSSHAYCTPLNAALQASMAENSIPLYTTASMGNPTLGNLASAIREELNGAMEHTNSNESDSSPGRSPMQAVHPVHVKEEPLDPEEAEGPLSLVTTA

SEQ ID NO: 25310 - protein, 505 aa, Homo sapiens
DRSEEVFDMTKGNLTLLEKAIALETERAKAMREKMAMEAGRRDNMRSYEDQSPRQLPGEDRKPKSSDSHVKKPYYDPSRTEKKESKCPTPGCDGTGHVTGLYPHHRSLSGCPHKDRVPPEILAMHESVLKCPTPGCTGRGHVNSNRNSHRSLSGCPIAAAEKLAKAQEKHQSCDVSKSSQASDRVLRPMCFVKQLEIPQYGYRNNVPTTTPRSNLAKELEKYSKTSFEYNSYDNHTYGKRAIAPKVQTRDISPKGYDDAKRYCKDPSPSSSSTSSYAPSSSSNLSCGGGSSASSTCSKSSFDYTHDMEAAHMAATAILNLSTRCREMPQNLSTKPQDLCATRNPDMEVDENGTLDLSMNKQRPRDSCCPILTPLEPMSPQQQAVMNNRCFQLGEGDCWDLPVDYTKMKPRRIDEDESKDITPEDLDPFQEALEERRYPGEVTIPSPKPKYPQCKESKKDLITLSGCPLADKSIRSMLATSSQELKIPVQGPRALDHLLMFSDFLN

SEQ ID NO: 25311 - protein, 217 aa, Homo sapiens
MLEKFCNSTFWNSSFLDSPEADLPLCFEQTVLVWIPLGYLWLLAPWQLLHVYKSRTKRSSTTKLYLAKQVFVGFLLILAAIELALVLTEDSGQATVPAVRYTNPSLYLGTWLLVLLIQYSRQWCVQKNSWFLSLFWILSILCGTFQFQTLIRTLLQGDNSNLAYSCLFFISYGFQILILIFSAFSENNESSNNPSSIASFLSSITYSWYDRRGGVCL

SEQ ID NO: 25312 - protein, 252 aa, Homo sapiens
MSQAAKASASATVAVNPGPDTKGKGAPPAGTSPSPGTTLAPTTVPITSAKAAELPPGNYRLVVFELENFQGRRAEFSGECSNLADRGFDRVRSIIVSAGPWVAFEQSNFRGEMFILEKGEYPRWNTWSSSYRSDRLMSFRPIKMDAQEHKISLFEGANFKGNTIEIQGDDAPSLWVYGFSDRVGSVKVSSGTWVGYQYPGYRGYQYLLEPGDFRHWNEWGAFQPQMQSLRRLRDKQWHLEGSFPVLATEPPK

SEQ ID NO: 25313 - protein, 224 aa, Homo sapiens
SSTSSYAPSSSSNLSCGGGSSASSTCSKSSFDYTHDMEAAHMAATAILNLSTRCREMPQNLSTKPQDLCATRNPDMEVDENGTLDLSMNKQRPRDSCCPILTPLEPMSPQQQAVMNNRCFQLGEGDCWDLPVDYTKMKPRRIDEDESKDITPEDLDPFQEALEERRYPGEVTIPSPKPKYPQCKESKKDLITLSGCPLADKSIRSMLATSSQELKFQRWTHFLS

SEQ ID NO: 25314 - protein, 1235 aa, Homo sapiens
MIQGTLEPDGPLWGWDWDSDNDWDSAVLALLALAVVAATALALHWFGSGHDQEAAEPVSTALGAQPHQAGGAELALQPKSKVSDGSEGQSPGQGKPEPPGRGQQSPVPAAAPGGGLAAMARLPLKTAVEEARREALGQQRGSATPAAPRAEGKEPPRPGTALLGRSEAGGMSAPLLIHFTPRSPGSEAEAETGGVRASSRQAAGPAGQQDTGPWQAGAGPSGSMGRGRGRRRRMDAGSGDRARRPRKLDPLRLGAAGSVWDAVDGAAALDAHARGLPTGPPLAQEPALPALPAPRALQPGSQTEGSGAKGGWSREASGVPAPGGGWPWVSREVPGTRSFGPAPDSTRPWLESPPQGRPLSSQGPGATGAYDAGEAGADSSRDNSPAADLGPTRPPEQAKPAAAGHSRAPSRSREPRPRSASPPAAPGPGFPPEALTLPSPSDFLPLEVTQDPSVGENLRAAPAPSSASAQVLTSAPASVLAPALASSPSSAPTSATTSTSSPTSAPAPAPTSAPTSTPAPAPSPAAAATPAPAPVPVPTLTPPSPALTPVPTPALSPAPTPALTPAASPALTPVPTPALSPAPTPAPTPAASPAPAPTSAPTPTPAASPAPADGSKPQESVALPRRYQEGQVSASWGNLIAMVLRSHPFPRQDRPQGSVPRAVPGSPVGPSTSTHSEDRHGPSSSVGTVIGTGTGGLVEAGGQPQPRSSETNGSPSPDPPPGLRGEGTREKSLDPLPQAAMPRGPAQPPAQRPPGPAASSSARRSQPVPQLRKRSRCEIAPSSEQEVRPAASGDPQGEAPGEGGSPAGRSGALTEKQEEARKLMVFLQRPGGWGVVEGPRKPSSRALEPATAAALRRRLDLGSCLDVLAFAQQHGEPGLAQETYALMSDNLLRVLGDPCLYRRLSAADRERILSLRTGRGRAVLGVLVLPSLYQGGRSGLPRGPRGEEPPAAAPVSLPLPAHLHVFNPRENTWRPLTQVPEEAPLRGCGLCTMHNYLFLAGGIRGSGAKAVCSNEVFCYNPLTNIWSQVRPMQQARAQLKLVALDGLLYAIGGECLYSMECYDPRTDAWTPRAPLPAGTFPVAHEAVACRGDIYVTGGHLFYRLLRYSPVKDAWDECPYSASHRRSSDIVALGGFLYRFDLLRGVGAAVMRYNTVTGSWSRAASLPLPAPAPLHCTTLGNTIYCLNPQVTATFTVSGGTAQFQAKELQPFPLGSTGVLSPFILTLPPEDRLQTSL

SEQ ID NO: 25315 - protein, 1024 aa, Homo sapiens
SASLDQTVRVWDISGLRKKNLSPGAVESDVRGITGVDLFGTTDAVVKHVLEGHDRGVNWAAFHPTMPLIVSGADDRQVKIWRMNESKAWEVDTCRGHYNNVSCAVFHPRQELILSNSEDKSIRVWDMSKRTGVQTFRRDHDRFWVLAAHPNLNLFAAGHDGGMIVFKLERERPAYAVHGNMLHYVKDRFLRQLDFNSSKDVAVMQLRSGSKFPVFNMSYNPAENAVLLCTRASNLENSTYDLYTIPKDADSQNPDAPEGKRSSGLTAVWVARNRFAVLDRMHSLLIKNLKNEITKKVQVPNCDEIFYAGTGNLLLRDADSITLFDVQQKRTLASVKISKVKYVIWSADMSHVALLAKHAIVICNRKLDALCNIHENIRVKSGAWDESGVFIYTTSNHIKYAVTTGDHGIIRTLDLPIYVTRVKGNNVYCLDRECRPRVLTIDPTEFKFKLALINRKYDEIALEAAKALDDKNCWEKLGEVALLQGNHQIVEMCYQRTKNFDKLSFLYLITGNLEKLRKMMKIAEIRKDMSGHYQNALYLGDVSERVRILKNCGQKSLAYLTAATHGLDEEAESLKETFDPEKETIPDIDPNAKLLQPPAPIMPLDTNWPLLTVSKGFFEGTIASKGKGGALAADIDIDTVGTEGWGEDAELQLDEDGFVEATEGLGDDALGKGQEEGGGWDVEEDLELPPELDISPGAAGGAEDGFFVPPTKGTSPTQIWCNNSQLPVDHILAGSFETAMRLLHDQVGVIQFGPYKQLFLQTYARGRTTYQALPCLPSMYGYPNRNWKDAGLKNGVPAVGLKLNDLIQRLQLCYQLTTVGKFEEAVEKFRSILLSVPLLVVDNKQEIAEAQQLITICREYIVGLSVETERKKLPKETLEQQKRICEMAAYFTHSNLQPVHMILVLRTALNLFFKLKNFKTAATFARRLLELGPKPEVAQQTRKILSACEKNPTDAYQLNYDMHNPFDICAASYRPIYRGKPVEKCPLSGACYSPEFKGQICRVTTVTEIGKDVIGLRISPLQFR

SEQ ID NO: 25316 - protein, 662 aa, Homo sapiens
MTTGTIHWGNSFLSKQQASQVLVRKRRANSLLEETKQGNLERECIEELCNKEEAREVFENDPETDYFYPKYLVCLRSFQTGLFTAARQSTNAYPDLRSCVNAIPDQCSPLPCNEDGYMSCKDGKASFTCTCKPGWQGEKCEFDINECKDPSNINGGCSQICDNTPGSYHCSCKNGFVMLSNKKDCKDVDECSLKPSICGTAVCKNIPGDFECECPEGYRYNLKSKSCEDIDECSENMCAQLCVNYPGGYTCYCDGKKGFKLAQDQKSCEVVSVCLPLNLDTKYELLYLAEQFAGVVLYLKFRLPEISRFSAEFDFRTYDSEGVILYAESIDHSAWLLIALRGGKIEVQLKNEHTSKITTGGDVINNGLWNMVSVEELEHSISIKIAKEAVMDINKPGPLFKPENGLLETKVYFAGFPRKVESELIKPINPRLDGCIRSWNLMKQGASGIKEIIQEKQNKHCLVTVEKGSYYPGSGIAQFHIDYNNVSSAEGWHVNVTLNIRPSTGTGVMLALVSGNNTVPFAVSLVDSTSEKSQDILLSVENTVIYRIQALSLCSDQQSHLEFRVNRNNLELSTPLKIETISHEDLQRQLAVLDKAMKAKVATYLGGLPDVPFSATPVNAFYNGCMEVNINGVQLDLDEAISKHNDIRAHSCPSVWKKTKNS

SEQ ID NO: 25317 - protein, 818 aa, Homo sapiens
MWSWKCLLFWAVLVTATLCTARPSPTLPEQAQPWGAPVEVESFLVHPGDLLQLRCRLRDDVQSINWLRDGVQLAESNRTRITGEEVEVQDSVPADSGLYACVTSSPSGSDTTYFSVNVSDALPSSEDDDDDDDSSSEEKETDNTKPNPVAPYWTSPEKMEKKLHAVPAAKTVKFKCPSSGTPNPTLRWLKNGKEFKPDHRIGGYKVRYATWSIIMDSVVPSDKGNYTCIVENEYGSINHTYQLDVVERSPHRPILQAGLPANKTVALGSNVEFMCKVYSDPQPHIQWLKHIEVNGSKIGPDNLPYVQILKTAGVNTTDKEMEVLHLRNVSFEDAGEYTCLAGNSIGLSHHSAWLTVLEALEERPAVMTSPLYLEIIIYCTGAFLISCMVGSVIVYKMKSGTKKSDFHSQMAVHKLAKSIPLRRQVSADSSASMNSGVLLVRPSRLSSSGTPMLAGVSEYELPEDPRWELPRDRLVLGKPLGEGCFGQVVLAEAIGLDKDKPNRVTKVAVKMLKSDATEKDLSDLISEMEMMKMIGKHKNIINLLGACTQDGPLYVIVEYASKGNLREYLQARRPPGLEYCYNPSHNPEEQLSSKDLVSCAYQVARGMEYLASKKCIHRDLAARNVLVTEDNVMKIADFGLARDIHHIDYYKKTTNGRLPVKWMAPEALFDRIYTHQSDVWSFGVLLWEIFTLGGSPYPGVPVEELFKLLKEGHRMDKPSNCTNELYMMMRDCWHAVPSQRPTFKQLVEDLDRIVALTSNQEYLDLSMPLDQYSPSFPDTRSSTCSSGEDSVFSHEPLPEEPCLPRHPAQLANGGLKRR

SEQ ID NO: 25318 - protein, 259 aa, Homo sapiens
MEEPEEPADSGQSLVPVYIYSPEYVSMCDSLAKIPKRASMVHSLIEAYALHKQMRDEASGFCYLNDAVLGILRLRRKFERILYVDLDLHHGDGVEDAFSFTSKVMTVSLHKFSPGFFPGTGDVSDVGLGKGRYYSVNVPIQDGIQDEKYYQICESVLKEVYQAFNPKAVVLQLGADTIAGDPMCSFNMTPVGIGKCLKYILQWQLATLILGGGGYNLANTARCWTYLTGVILGKTLSSEIPDHEVSKALTSPLFFKGKS

SEQ ID NO: 25319 - protein, 414 aa, Homo sapiens
MEEPEEPADSGQSLVPVYIYSPEYVSMCDSLAKIPKRASMVHSLIEAYALHKQMRIVKPKVASMEEMATFHTDAYLQHLQKVSQEGDDDHPDSIEYGLGYDCPATEGIFDYAAAIGGATITAAQCLIDGMCKVAINWSGGWHHAKKDEASGFCYLNDAVLGILRLRRKFERILYVDLDLHHGDGVEDAFSFTSKVMTVSLHKFSPGFFPGTGDVSDVGLGKGRYYSVNVPIQDGIQDEKYYQICESVLKEVYQAFNPKAVVLQLGADTIAGDPMCSFNMTPVGIGKCLKYILQWQLATLILGGGGYNLANTARCWTYLTGVILGKTLSSEIPDHEFFTAYGPDYVLEITPSCRPDRNEPHRIQQILNYIKEKWPVGFGAQCFYLGKCGKAKTTEGQSEQLFIPRAQSGNLKHVV

SEQ ID NO: 25320 - protein, 1025 aa, Homo sapiens
MSNGYSTDENFRYLISCFRARVKMYIQVEPVLDYLTFLPAEVKEQIQRTVATSGNMQAVELLLSTLEKGVWHLGWTREFVEALRRTGSPLAARYMNPELTDLPSPSFENAHDEYLQLLNLLQPTLVDKLLVRDVLDKCMEEELLTIEDRNRIAAAENNGNESGVRELLKRIVQKENWFSAFLNVLRQTGNNELVQELTGSDCSESNAEIENLSQVDGPQVEEQLLSTTVQPNLEKEVWGMENNSSESSFADSSVVSESDTSLAEGSVSCLDESLGHNSNMGSDSGTMGSDSDEENVAARASPEPELQLRPYQMEVAQPALEGKNIIICLPTGSGKTRVAVYIAKDHLDKKKKASEPGKVIVLVNKVLLVEQLFRKEFQPFLKKWYRVIGLSGDTQLKISFPEVVKSCDIIISTAQILENSLLNLENGEDAGVQLSDFSLIIIDECHHTNKEAVYNNIMRHYLMQKLKNNRLKKENKPVIPLPQILGLTASPGVGGATKQAKAEEHILKLCANLDAFTIKTVKENLDQLKNQIQEPCKKFAIADATREDPFKEKLLEIMTRIQTYCQMSPMSDFGTQPYEQWAIQMEKKAAKEGNRKERVCAEHLRKYNEALQINDTIRMIDAYTHLETFYNEEKDKKFAVIEDDSDEGGDDEYCDGDEDEDDLKKPLKLDETDRFLMTLFFENNKMLKRLAENPEYENEKLTKLRNTIMEQYTRTEESARGIIFTKTRQSAYALSQWITENEKFAEVGVKAHHLIGAGHSSEFKPMTQNEQKEVISKFRTGKINLLIATTVAEEGLDIKECNIVIRYGLVTNEIAMVQARGRARADESTYVLVAHSGSGVIEHETVNDFREKMMYKAIHCVQNMKPEEYAHKILELQMQSIMEKKMKTKRNIAKHYKNNPSLITFLCKNCSVLACSGEDIHVIEKMHHVNMTPEFKELYIVRENKALQKKCADYQINGEIICKCGQAWGTMMVHKGLDLPCLKIRNFVVVFKNNSTKKQYKKWVELPITFPNLDYSECCLFSDED

SEQ ID NO: 25321 - protein, 1143 aa, Homo sapiens
MEVDTEEKRHRTRSKGVRVPVEPAIQELFSCPTPGCDGSGHVSGKYARHRSVYGCPLAKKRKTQDKQPQEPAPKRKPFAVKADSSSVDECDDSDGTEDMDEKEEDEGEEYSEDNDEPGDEDEEDEEGDREEEEEIEEEDEDDDEDGEDVEDEEEEEEEEEEEEEEEENEDHQMNCHNTRIMQDTEKDDNNNDEYDNYDELVAKSLLNLGKIAEDAAYRARTESEMNSNTSNSLEDDSDKNENLGRKSELSLDLDSDVVRETVDSLKLLAQGHGVVLSENMNDRNYADSMSQQDSRNMNYVMLGKPMNNGLMEKMVEESDEEVCLSSLECLRNQCFDLARKLSETNPQERNPQQNMNIRQHVRPEEDFPGRTPDRNYSDMLNLMRLEEQLSPRSRVFASCAKEDGCHERDDDTTSVNSDRSEEVFDMTKGNLTLLEKAIALETERAKAMREKMAMEAGRRDNMRSYEDQSPRQLPGEDRKPKSSDSHVKKPYYGKDPSRTEKKESKCPTPGCDGTGHVTGLYPHHRSLSGCPHKDRVPPEILAMHESVLKCPTPGCTGRGHVNSNRNSHRSLSGCPIAAAEKLAKAQEKHQSCDVSKSSQASDRVLRPMCFVKQLEIPQYGYRNNVPTTTPRSNLAKELEKYSKTSFEYNSYDNHTYGKRAIAPKVQTRDISPKGYDDAKRYCKDPSPSSSSTSSYAPSSSSNLSCGGGSSASSTCSKSSFDYTHDMEAAHMAATAILNLSTRCREMPQNLSTKPQDLCATRNPDMEVDENGTLDLSMNKQRPRDSCCPILTPLEPMSPQQQAVMNNRCFQLGEGDCWDLPVDYTKMKPRRIDEDESKDITPEDLDPFQEALEERRYPGEVTIPSPKPKYPQCKESKKDLITLSGCPLADKSIRSMLATSSQELKCPTPGCDGSGHITGNYASHRSLSGCPRAKKSGIRIAQSKEDKEDQEPIRCPVPGCDGQGHITGKYASHRSASGCPLAAKRQKDGYLNGSQFSWKSVKTEGMSCPTPGCDGSGHVSGSFLTHRSLSGCPRATSAMKKAKLSGEQMLTIKQRASNGIENDEEIKQLDEEIKELNESNSQMEADMIKLRTQITTMESNLKTIEEENKVIEQQNESLLHELANLSQSLIHSLANIQLPHMVSD

SEQ ID NO: 25322 - protein, 1545 aa, Homo sapiens
MLEKFCNSTFWNSSFLDSPEADLPLCFEQTVLVWIPLGYLWLLAPWQLLHVYKSRTKRSSTTKLYLAKQVFVGFLLILAAIELALVLTEDSGQATVPAVRYTNPSLYLGTWLLVLLIQYSRQWCVQKNSWFLSLFWILSILCGTFQFQTLIRTLLQGDNSNLAYSCLFFISYGFQILILIFSAFSENNESSNNPSSIASFLSSITYSWYDSIILKGYKRPLTLEDVWEVDEEMKTKTLVSKFETHMKRELQKARRALQRRQEKSSQQNSGARLPGLNKNQSQSQDALVLEDVEKKKKKSGTKKDVPKSWLMKALFKTFYMVLLKSFLLKLVNDIFTFVSPQLLKLLISFASDRDTYLWIGYLCAILLFTAALIQSFCLQCYFQLCFKLGVKVRTAIMASVYKKALTLSNLARKEYTVGETVNLMSVDAQKLMDVTNFMHMLWSSVLQIVLSIFFLWRELGPSVLAGVGVMVLVIPINAILSTKSKTIQVKNMKNKDKRLKIMNEILSGIKILKYFAWEPSFRDQVQNLRKKELKNLLAFSQLQCVVIFVFQLTPVLVSVVTFSVYVLVDSNNILDAQKAFTSITLFNILRFPLSMLPMMISSMLQASVSTERLEKYLGGDDLDTSAIRHDCNFDKAMQFSEASFTWEHDSEATVRDVNLDIMAGQLVAVIGPVGSGKSSLISAMLGEMENVHGHITIKGTTAYVPQQSWIQNGTIKDNILFGTEFNEKRYQQVLEACALLPDLEMLPGGDLAEIGEKGINLSGGQKQRISLARATYQNLDIYLLDDPLSAVDAHVGKHIFNKVLGPNGLLKGKTRLLVTHSMHFLPQVDEIVVLGNGTIVEKGSYSALLAKKGEFAKNLKTFLRHTGPEEEATVHDGSEEEDDDYGLISSVEEIPEDAASITMRRENSFRRTLSRSSRSNGRHLKSLRNSLKTRNVNSLKEDEELVKGQKLIKKEFIETGKVKFSIYLEYLQAIGLFSIFFIILAFVMNSVAFIGSNLWLSAWTSDSKIFNSTDYPASQRDMRVGVYGALGLAQGIFVFIAHFWSAFGFVHASNILHKQLLNNILRAPMRFFDTTPTGRIVNRFAGDISTVDDTLPQSLRSWITCFLGIISTLVMICMATPVFTIIVIPLGIIYVSVQMFYVSTSRQLRRLDSVTRSPIYSHFSETVSGLPVIRAFEHQQRFLKHNEVRIDTNQKCVFSWITSNRWLAIRLELVGNLTVFFSALMMVIYRDTLSGDTVGFVLSNALNITQTLNWLVRMTSEIETNIVAVERITEYTKVENEAPWVTDKRPPPDWPSKGKIQFNNYQVRYRPELDLVLRGITCDIGSMEKIGVVGRTGAGKSSLTNCLFRILEAAGGQIIIDGVDIASIGLHDLREKLTIIPQDPILFSGSLRMNLDPFNNYSDEEIWKALELAHLKSFVASLQLGLSHEVTEAGGNLSIGQRQLLCLGRALLRKSKILVLDEATAAVDLETDNLIQTTIQNEFAHCTVITIAHRLHTIMDSDKVMVLDNGKIIECGSPEELLQIPGPFYFMAKEAGIENVNSTKF

SEQ ID NO: 25323 - protein, 791 aa, Homo sapiens
MEGSTAWSSEAEPQEGRSQMLQRAGLTDEKVKAYLSLHPQVLDEFVSESVSAETVEKWLKRKNNKSEDESAPKEVSRYQDTNMQGVVYELNSYIEQRLDTGGDNQLLLYELSSIIKIATKADGFALYFLGECNNSLCIFTPPGIKEGKPRLIPAGPITQGTTVSAYVAKSRKTLLVEDILGDERFPRGTGLESGTRIQSVLCLPIVTAIGDLIGILELYRHWGKEAFCLSHQEVATANLAWASVAIHQVQVCRGLAKQTELNDFLLDVSKTYFDNIVAIDSLLEHIMIYAKNLVNADRCALFQVDHKNKELYSDLFDIGEEKEGKPVFKKTKEIRFSIEKGIAGQVARTGEVLNIPDAYADPRFNREVDLYTGYTTRNILCMPIVSRGSVIGVVQMVNKISGSAFSKTDENNFKMFAVFCALALHCANMYHRIRHSECIYRVTMEKLSYHSICTSEEWQGLMQFTLPVRLCKEIELFHFDIGPFENMWPGIFVYMVHRSCGTSCFELEKLCRFIMSVKKNYRRVPYHNWKHAVTVAHCMYAILQNNHTLFTDLERKGLLIACLCHDLDHRGFSNSYLQKFDHPLAALYSTSTMEQHHFSQTVSILQLEGHNIFSTLSSSEYEQVLEIIRKAIIATDLALYFGNRKQLEEMYQTGSLNLNNQSHRDRVIGLMMTACDLCSVTKLWPVTKLTANDIYAEFWAEGDEMKKLGIQPIPMMDRDKKDEVPQGQLGFYNAVAIPCYTTLTQILPPTEPLLKACRDNLSQWEKVIRGEETATWISSPSVAQKAAASED

SEQ ID NO: 25324 - protein, 1140 aa, Homo sapiens
MMEFDGNFNTNVSRTISCDRLSTTVNSRAFNPGRDLNSVLADNLKSNPGIKWQYFSSEEGIFTVFPAHKFRCKGSYEHRSRPIYVSTVRPQSKHIVVILDHGASVTDTQLQIAKDAAQVILSAIDEHDKISVLTVADTVRTCSLDQCYKTFLSPATSETKRKMSTFVSSVKSSDSPTQHAVGFQKAFQLIRSTNNNTKFQANTDMVIIYLSAGITSKDSSEEDKKATLQVINEENSFLNNSVMILTYALMNDGVTGLKELAFLRDLAEQNSGKYGVPDRMALPVIKGSMMVLNQLSNLETTVGRFYTNLPNRMIDEAVFSLPFSDEMGDGLIMTVSKPCYFGNLLLGIVGVDVNLAYILEDVTYYQDSLASYTFLIDDKGYTLMHPSLTRPYLLSEPPLHTDIIHYENIPKFELVRQNILSLPLGSQIIAVPVNSSLSWHINKLRETGKEAYNVSYAWKMVQDTSFILCIVVIQPEIPVKQLKNLNTVPSSKLLYHRLDLLGQPSACLHFKQLATLESPTIMLSAGSFSSPYEHLSQPETKRMVEHYTAYLSDNTRLIANPGLKFSVRNEVMATSHVTDEWMTQMEMSSLNTYIVRRYIATPNGVLRIYPGSLMDKAFDPTRRQWYLHAVANPGLISLTGPYLDVGGAGYVVTISHTIHSSSTQLSSGHTVAVMGIDFTLRYFYKVLMDLLPVCNQDGGNKIRCFIMEDRGYLVAHPTLIDPKGHAPVEQQHITHKEPLVANDILNHPNFVKKNLCNSFSDRTVQRFYKFNTSLAGDLTNLVHGSHCSKYRLARIPGTNAFVGIVNETCDSLAFCACSMVDRLCLNCHRMEQNECECPCECPLEVNECTGNLTNAENRNPSCEVHQEPVTYTAIDPGLQDALHQCVNSRCSQRLESGDCFGVLDCEWCMVDSDGKTHLDKPYCAPQKECFGGIVGAKSPYVDDMGAIGDEVITLNMIKSAPVGPVAGGIMGCIMVLVLAVYAYRHQIHRRSHQHMSPLAAQEMSVRMSNLENDRDERDDDSHEDRGIISNTRFIAAVIERHAHSPERRRRYWGRSGTESDHGYSTMSPQEDSENPPCNNDPLSAGVDVGNHDEDLDLDTPPQTAALLSHKFHHYRSHHPTLHHSHHLQAAVTVHTVDAEC

SEQ ID NO: 25325 - protein, 867 aa, Homo sapiens
EKKMETSHNQCQELKARYERATSETKTKHEEILQNLQKTLLDTEDKLKGAREENSGLLQELEELRKQADKAKSLTYLLTSAKKEIELMSEELRGLKSEKQLLSQEGNDLKLENGSLLSKLVELEAKIALLQGDQQKLWSVNETLNLEKEKFLEEKQDAEKYYEQEHLNKEALAVEREKLLKEINVVQEELLKINVENDSLQASKVSMQALIEELQLSKDTLIAKTEKDQEEKDHLEDQIKKLITENFILAKDKDDIIQKLQRSYEELVKDQKALVQETEDLTAEKKSALEKLSNLDNTCIALKVERDNVLQNNRNLQLETDMLLQDQEKLNASLQAALQVKQLLRSEASGLRAQLDDASKALRKAELETVQLEAANTSLTKLLEEIKARRAVTDSECIQLLHEKETLAASERRLLAEKEELLSENRIITEKLHKCLEEAAHTEMSLNEKITYLTSEKEMASQKMTELKKQQDSLLKEKSSLETQNGALLAERENSIKAIGDLKRQCDQESANRSLVVQENMKLLGNIDALKKELQERKKENQELVASKCDLSLMLKEAQNTKKNLEKEHTHILQAKESLDAQLNTCCSEKNILLRDGLNLQEECHKLSKEIQEMQQSLILEQEARAKESESSLYENNQLHGRMVLLEQEVEELRVCIEELQSEKFVLLQEKSKSEQELAEIIEEKELLTAEAAQLAAHIKTLKSDFAALSKSKAELQELHSCLTKILDDLQRNHEVTLAEKAQVMQDNQNLLAEKSEMMLEKDELLKEKETLAESYFILQKEISQLAKTNSHISANLLESQNENRTLRKDKNKLTLKIRELETLQSFTAAQTAEDAMQIMEQMTKEKTETLASLEDTKQTNAKLQNE

SEQ ID NO: 25326 - protein, 456 aa, Homo sapiens
DGPTETLEELVLGLAAEVCDDFLVYCGDTHGSFVVRTLLQVLGGTILESERARPRGSQSSEAQKTPAQECKPADFEVPETFLNRLQDLSSSFLKDIAVFITDKISSFCLQVALQVLHRKLPQFCAHLCNAVIGYLSTRGSSVDGSPLLLFLRDQTSSRLLEQVLLVLEPPRLQSLFEEHLQGQLQTLAAHPIANFPLQRLLDAVTTPELLSPVFEELSPVLEAVLAQGHPGVVIALVGACRRVGAYQAKVLQLLLEAFHCAEPSSRQVACVPLFATLMAYEVYYGLTEEEGAVPAEHQVAMAAARALGDVTVLGSLLLQHLLHFSTPGLVLRSLGALTGPQLLSLAQSPAGSHVLDAILTSPSVTRKLRRRVLQNLKGQYVALACSRHGSRVLDAIWSGAALRARKEIAAELGEQNQELIRDPFGHHVARNVALTTFLKRREAWEQQQVFAVGRLE

SEQ ID NO: 25327 - protein, 1472 aa, Homo sapiens
MEAATTLHPGPRPALPLGGPGPLGEFLPPPECPVFEPSWEEFADPFAFIHKIRPIAEQTGICKVRPPPDWQPPFACDVDKLHFTPRIQRLNELELVAEEGGFAVVCKDRKWTKIATKMGFAPGKAVGSHIRGHYERILNPYNLFLSGDSLRCLQKPNLTTDTKDKEYKPHDIPQRQSVQPSETCPPARRAKRMRAEAMNIKIEPEETTEARTHNLRRRMGCPTPKCENEKEMKSSIKQEPIERKDYIVENEKEKPKSRSKKATNAVDLYVCLLCGSGNDEDRLLLCDGCDDSYHTFCLIPPLHDVPKGDWRCPKCLAQECSKPQEAFGFEQAARDYTLRTFGEMADAFKSDYFNMPVHMVPTELVEKEFWRLVSTIEEDVTVEYGADIASKEFGSGFPVRDGKIKLSPEEEEYLDSGWNLNNMPVMEQSVLAHITADICGMKLPWLYVGMCFSSFCWHIEDHWSYSINYLHWGEPKTWYGVPGYAAEQLENVMKKLAPELFVSQPDLLHQLVTIMNPNTLMTHEVPVYRTNQCAGEFVITFPRAYHSGFNQGFNFAEAVNFCTVDWLPLGRQCVEHYRLLHRYCVFSHDEMICKMASKADVLDVVVASTVQKDMAIMIEDEKALRETVRKLGVIDSERMDFELLPDDERQCVKCKTTCFMSAISCSCKPGLLVCLHHVKELCSCPPYKYKLRYRYTLDDLYPMMNALKLRAESYNEWALNVNEALEAKINKKKSLVSFKALIEESEMKKFPDNDLLRHLRLVTQDAEKCASVAQQLLNGKRQTRYRSGGGKSQNQLTVNELRQFVTQLYALPCVLSQTPLLKDLLNRVEDFQQHSQKLLSEETPSAAELQDLLDVSFEFDVELPQLAEMRIRLEQARWLEEVQQACLDPSSLTLDDMRRLIDLGVGLAPYSAVEKAMARLQELLTVSEHWDDKAKSLLKARPRHSLNSLATAVKEIEEIPAYLPNGAALKDSVQRARDWLQDVEGLQAGGRVPVLDTLIELVTRGRSIPVHLNSLPRLETLVAEVQAWKECAVNTFLTENSPYSLLEVLCPRCDIGLLGLKRKQRKLKEPLPNGKKKSTKLESLSDLERALTESKETASAMATLGEARLREMEALQSLRLANEGKLLSPLQDVDIKICLCQKAPAAPMIQCELCRDAFHTSCVAVPSISQGLRIWLCPHCRRSEKPPLEKILPLLASLQRIRVRLPEGDALRYMIERTVNWQHRAQQLLSSGNLKFVQDRVGSGLLYSRWQASAGQVSDTNKVSQPPGTTSFSLPDDWDNRTSYLHSPFSTGRSCIPLHGVSPEVNELLMEAQLLQVSLPEIQELYQTLLAKPSPAQQTDRSSPVRPSSEKNDCCRGKRDGINSLERKLKRRLEREGLSSERWERVKKMRTPKKKKIKLSHPKDMNNFKLERERSYELVRSAETHSLPSDTSYSEQEDSEDEDAICPAVSCLQPEGDERWQRKKTTSVCAVL

SEQ ID NO: 25328 - protein, 1782 aa, Homo sapiens
MAGASVKVAVRVRPFNSREMSRDSKCIIQMSGSTTTIVNPKQPKETPKSFSFDYSYWSHTSPEDINYASQKQVYRDIGEEMLQHAFEGYNVCIFAYGQTGAGKSYTMMGKQEKDQQGIIPQLCEDLFSRINDTTNDNMSYSVEVSYMEIYCERVRDLLNPKNKGNLRVREHPLLGPYVEDLSKLAVTSYNDIQDLMDSGNKARTVAATNMNETSSRSHAVFNIIFTQKRHDAETNITTEKVSKISLVDLAGSERADSTGAKGTRLKEGANINKSLTTLGKVISALAEMDSGPNKNKKKKKTDFIPYRDSVLTWLLRENLGGNSRTAMVAALSPADINYDETLSTLRYADRAKQIRCNAVINEDPNNKLIRELKDEVTRLRDLLYAQGLGDITDMTNALVGMSPSSSLSALSSRAASVSSLHERILFAPGSEEAIERLKETEKIIAELNETWEEKLRRTEAIRMEREALLAEMGVAMREDGGTLGVFSPKKTPHLVNLNEDPLMSECLLYYIKDGITRVGREDGERRQDIVLSGHFIKEEHCVFRSDSRGGSEAVVTLEPCEGADTYVNGKKVTEPSILRSGNRIIMGKSHVFRFNHPEQARQERERTPCAETPAEPVDWAFAQRELLEKQGIDMKQEMEQRLQELEDQYRREREEATYLLEQQRLDYESKLEALQKQMDSRYYPEVNEEEEEPEDEVQWTERECELALWAFRKWKWYQFTSLRDLLWGNAIFLKEANAISVELKKKVQFQFVLLTDTLYSPLPPDLLPPEAAKDRETRPFPRTIVAVEVQDQKNGATHYWTLEKLRQRLDLMREMYDRAAEVPSSVIEDCDNVVTGGDPFYDRFPWFRLVGSSAISGCNSYPLLNTCMSERMAALTPSPTFSSPDSDATEPAEEQSVGEEEEEEEEEEDEEEEDLEDDVFPEHALCDGRDPFYDRPPLFSLVGRAFVYLSNLLYPVPLVHRVAIVSEKGEVKGFLRVAVQAISADEEAPDYGSGVRQSGTAKISFDDQHFEKFQSESCPVVGMSRSGTSQEELRIVEGQGQGADVGPSADEVNNNTCSAVPPEGLLLDSSEKAALDGPLDAALDHLRLGNTFTFRVTVLQASSISAEYADIFCQFNFIHRHDEAFSTEPLKNTGRGPPLGFYHVQNIAVEVTKSFIEYIKSQPIVFEVFGHYQQHPFPPLCKDVLSPLRPSRRHFPRVMPLSKPVPATKLSTLTRPCPGPCHCKYDLLVYFEICELEANGDYIPAVVDHRGGMPCMGTFLLHQGIQRRITVTLLHETGSHIRWKEVRELVVGRIRNTPETDESLIDPNILSLNILSSGYIHPAQDDRTFYQFEAAWDSSMHNSLLLNRVTPYREKIYMTLSAYIEMENCTQPAVVTKDFCMVFYSRDAKLPASRSIRNLFGSGSLRASESNRVTGVYELSLCHVADAGSPGMQRRRRRVLDTSVAYVRGEENLAGWRPRSDSLILDHQWELEKLSLLQEVEKTRHYLLLREKLETAQRPVPEALSPAFSEDSESHGSSSASSPLSAEGRPSPLEAPNERQRELAVKCLRLLTHTFNREYTHSHVCVSASESKLSEMSVTLLRDPSMSPLGVATLTPSSTCPSLVEGRYGATDLRTPQPCSRPASPEPELLPEADSKKLPSPARATETDKEPQRLLVPDIQEIRVSPIVSKKGYLHFLEPHTSGWARRFVVVRRPYAYMYNSDKDTVERFVLNLATAQVEYSEDQQAMLKTPNTFAVCTEHRGILLQAASDKDMHDWLYAFNPLLAGTIRSKLSRRRSAQMRV

SEQ ID NO: 25329 - protein, 782 aa, Homo sapiens
MQKRQGYCSYCRVQYNNLEQHLFSAQHRSLTRQSRRQICTSSLMERFLQDVLQHHPYHCQESSSTQDETHVNTGSSSEVVHLDDAFSEEEEEDEDKVEDEDATEERPSEVSEPIEELHSRPHKSQEGTQEVSVRPSVIQKLEKGQQQPLEFVHKIGASVRKCNLVDIGQATNNRSNLVRPPVICNAPASCLPESSNDRPVTANTTSLPPAAHLDSVSKCDPNKVEKYLEQPDGASRNPVPSSHVETTSFSYQKHKESNRKSLRMNSDKLVLWKDVKSQGKTLSAGLKFHERMGTKGSLRVKSPSKLAVNPNKTDMPSNKGIFEDTIAKNHEEFFSNMDCTQEEKHLVFNKTAFWEQKCSVSSEMKFDCISLQSASDQPQETAQDLSLWKEEQIDQEDNYESRGSEMSFDCSSSFHSLTDQSKVSAKEVNLSKEVRTDVQYKNNKSYVSKISSDCDDILHLVTNQSQMIVKEISLQNARHISLVDQSYESSSSETNFDCDASPQSTSDYPQQSVTEVNLPKEVHIGLVDKNYGSSSSEVSADSVFPLQSVVDRPPVAVTETKLRKKAHTSLVDNYGSSCSETSFDCDVSLESVVDHPQLTVKGRNLKGRQVHLKHKKRKPSSAKAHLDCDVSLGTVADESQRAVEKINLLKEKNADLMDMNCESHGPEMGFQADAQLADQSQVAEIERQKVDVDLENKSVQSSRSSLSSDSPASLYHSAHDEPQEALDEVNLKELNIDMEVRSYDCSSSELTFDSDPPLLSVTEQSHLDAEGKERHIDLEDES

SEQ ID NO: 25330 - protein, 733 aa, Homo sapiens
MVKLANPLYTEWILEAIQKIKKQKQRPSEERICHAVSTSHGLDKKTVSEQLELSVQDGSVLKVTNKGLASYKDPDNPGRFSSVKPGTFPKSAKGSRGSCNDLRNVDWNKLLRRAIEGLEEPNGSSLKNIEKYLRSQSDLTSTTNNPAFQQRLRLGAKRAVNNGRLLKDGPQYRVNYGSLDGKGAPQYPSAFPSSLPPVSLLPHEKDQPRADPIPICSFCLGTKESNREKKPEELLSCADCGSSGHPSCLKFCPELTTNVKALRWQCIECKTCSACRVQGRNADNMLFCDSCDRGFHMECCDPPLSRMPKGMWICQVCRPKKKGRKLLHEKAAQIKRRYAKPIGRPKNKLKQRLLSVTSDEGSMNAFTGRGSPDTEIKINIKQESADVNVIGNKDVVTEEDLDVFKQAQELSWEKIECESGVEDCGRYPSVIEFGKYEIQTWYSSPYPQEYARLPKLYLCEFCLKYMKSKNILLRHSKKCGWFHPPANEIYRRKDLSVFEEKLCQQKYNVSCIMIMPQHQRQGFGRFLIDFSYLLSRREGQAGSPEKPLSDLGRLSYLAYWKSVILEYLYHHHERHISIKAISRATGMCPHDIATTLQHLHMIDKRDGRFVIIRREKLILSHMEKLKTCSRANELDPDSLRWTPILISNAAVSEEEREAEKEAERLMEQASCWEKEEQEILSTRANSRQSPAKVQSKNKYLHSPESRPVTGERGQLLELSKESSEEEEEEEDEE

SEQ ID NO: 25331 - protein, 824 aa, Homo sapiens
MEVDTEEKRHRTRSKGVRVPVEPAIQELFSCPTPGCDGSGHVSGKYARHRSVYGCPLAKKRKTQDKQPQEPAPKRKPFAVKADSSSVDECDDSDGTEDMDEKEEDEGEEYSEDNDEPGDEDEEDEEGDREEEEEIEEEDEDDDEDGEDVEDEEEEEEEEEEEEEEEENDPSRTEKKESKCPTPGCDGTGHVTGLYPHHRSLSGCPHKDRVPPEILAMHESVLKCPTPGCTGRGHVNSNRNSHRSLSGCPIAAAEKLAKAQEKHQSCDVSKSSQASDRVLRPMCFVKQLEIPQYGYRNNVPTTTPRSNLAKELEKYSKTSFEYNSYDNHTYGKRAIAPKVQTRDISPKGYDDAKRYCKDPSPSSSSTSSYAPSSSSNLSCGGGSSASSTCSKSSFDYTHDMEAAHMAATAILNLSTRCREMPQNLSTKPQDLCATRNPDMEVDENGTLDLSMNKQRPRDSCCPILTPLEPMSPQQQAVMNNRCFQLGEGDCWDLPVDYTKMKPRRIDEDESKDITPEDLDPFQEALEERRYPGEVTIPSPKPKYPQCKESKKDLITLSGCPLADKSIRSMLATSSQELKCPTPGCDGSGHITGNYASHRSLSGCPRAKKSGIRIAQSKEDKEDQEPIRCPVPGCDGQGHITGKYASHRSASGCPLAAKRQKDGYLNGSQFSWKSVKTEGMSCPTPGCDGSGHVSGSFLTHRSLSGCPRATSAMKKAKLSGEQMLTIKQRASNGIENDEEIKQLDEEIKELNESNSQMEADMIKLRTQVTITTMESNLKTIEEENKVIEQQNESLLHELANLSQSLIHSLANIQLPHMEDGVWWGQ

SEQ ID NO: 25332 - protein, 392 aa, Homo sapiens
MCVCLNKEVTCKREKCPVLSRDCALAIKQRGACCEQCKGCTYEGNTYNSSFKWQSPAEPCVLRQCQEGVVTESGVRCVVHCKNPLEHLGMCCPTCPGCVFEGVQYQEGEEFQPEGSKCTKCSCTGGRTQCVREVCPILSCPQHLSHIPPGQCCPKCLGQRKVFDLPFGSCLFRSDVYDNGSSFLYDNCTACTCRDSTVVCKRKCSHPGGCDQGQEGCCEECLLRVPPEDIKVCKFGNKIFQDGEMWSSINCTICACVKGRTECRNKQCIPISSCPQGKILNRKGCCPICTESAGEERRPPDTLLLVDQVGGAGAGREQGQPAAAPHRALERLAHRAPLPRATLPHRPGWLPLESDHQSRFGNILGWRQFCRSHGCAASQGQALWSLWQLQWT

SEQ ID NO: 25333 - protein, 263 aa, Homo sapiens
MFLTGDTSPAEDNREATLPQCSLPELYACIENFNKESKKSNLLKMHGISLNEAQEVLARNLNVMSFTRGADVRGDLQPVIRCTVVKKEKQASMIELLYRSLLASSLSPMERLSRSQQRLSQCGISPPKHTFPYEILTDHSNALAQVTVQKVPSPKILCSLGISSATPEKFISEDKLCRSFLVDPGKQFMNLRDLEWRYFKGLAKWRRTTAISFGDIKYNTEKRFVESQDMPDVIFPPIVRKSLVIYPQIDYQNEGSYSLKWNM

SEQ ID NO: 25334 - protein, 159 aa, Homo sapiens
MARGERRRRAVPAEGVRTAERAARGGPGRRDGRGGGPRSTAGGVALAVVVLSLALGMSGRWVLAWYRARRAVTLHSAPPVLPADSSSPAVAPDLFWGTYRPHVYFGMKTRSPKPLLTGLRYFCPPFGLPVLLCGDRWQGSPTTRGWGQGAVEVYQWAHQ

SEQ ID NO: 25335 - protein, 58 aa, Homo sapiens
MACLGFQRHKAQLNLATRTWPCTLLFFLLFIPVFCKAKEKKPSYNRGLCENAPNRARM

SEQ ID NO: 25336 - protein, 1387 aa, Homo sapiens
MVKLANPLYTEWILEAIQKIKKQKQRPSEERICHAVSTSHGLDKKTVSEQLELSVQDGSVLKVTNKGLASYKDPDNPGRFSSVKPGTFPKSAKGSRGSCNDLRNVDWNKLLRRAIEGLEEPNGSSLKNIEKYLRSQSDLTSTTNNPAFQQRLRLGAKRAVNNGRLLKDGPQYRVNYGSLDGKGAPQYPSAFPSSLPPVSLLPHEKDQPRADPIPICSFCLGTKESNREKKPEELLSCADCGSSGHPSCLKFCPELTTNVKALRWQCIECKTCSACRVQGRNADNMLFCDSCDRGFHMECCDPPLSRMPKGMWICQVCRPKKKGRKLLHEKAAQIKRRYAKPIGRPKNKLKQRLLSVTSDEGSMNAFTGRGSPGRGQKTKVCTTPSSGHAASGKDSSSRLAVTDPTRPGATTKITTTSTYISASTLKVNKKTKGLIDGLTKFFTPSPDGRRSRGEIIDFSKHYRPRKKVSQKQSCTSHVLATGTTQKLKPPPSSLPPPTPISGQSPSSQKSSTATSSPSPQSSSSQCSVPSLSSLTTNSQLKALFDGLSHIYTTQGQSRKKGHPSYAPPKRMRRKTELSSTAKSKAHFFGKRDIRSRFISHSSSSSWGMARGSIFKAIAHFKRTTFLKKHRMLGRLKYKVTPQMGTPSPGKGSLTDGRIKPDQDDDTEIKINIKQESADVNVIGNKDVVTEEDLDVFKQAQELSWEKIECESGVEDCGRYPSVIEFGKYEIQTWYSSPYPQEYARLPKLYLCEFCLKYMKSKNILLRHSKKCGWFHPPANEIYRRKDLSVFEVDGNMSKIYCQNLCLLAKLFLDHKTLYYDVEPFLFYVLTKNDEKGCHLVGYFSKEKLCQQKYNVSCIMIMPQHQRQGFGRFLIDFSYLLSRREGQAGSPEKPLSDLGRLSYLAYWKSVILEYLYHHHERHISIKAISRATGMCPHDIATTLQHLHMIDKRDGRFVIIRREKLILSHMEKLKTCSRANELDPDSLRWTPILISNAAVSEEEREAEKEAERLMEQASCWEKEEQEILSTRANSRQSPAKVQSKNKYLHSPESRPVTGERGQLLELSKESSEEEEEEEDEEEEEEEEEEEEDEEEEEEEEEEEEEENIQSSPPRLTKPQSVAIKRKRPFVLKKKRGRKRRRINSSVTTETISETTEVLNEPFDNSDEERPMPQLEPTCEIEVEEDGRKPVLRKAFQHQPGKKRQTEEEEGKDNHCFKNADPCRNNMNDDSSNLKEGSKDNPEPLKCKQVWPKGTKRGLSKWRQNKERKTGFKLNLYTPPETPMEPDEQVTVEEQKETSEGKTSPSPIRIEEEVKETGEALLPQEENRREETCAPVSPNTSPGEKPEDDLIKPEEEEEEEEEEEEEEEEEEGEEEEGGGNVEKDPDGAKS

SEQ ID NO: 25337 - protein, 989 aa, Homo sapiens
MPVRGDRGFPPRRELSGWLRAPGMEELIWEQYTVTLQKDSKRGFGIAVSGGRDNPHFENGETSIVISDVLPGGPADGLLQENDRVVMVNGTPMEDVLHSFAVQQLRKSGKVAAIVVKRPRKVQVAALQASPPLDQDDRAFEVMDEFDGRSFRSGYSERSRLNSHGGRSRSWEDSPERGRPHERARSRERDLSRDRSRGRSLERGLDQDHARTRDRSRGRSLERGLDHDFGPSRDRDRDRSRGRSIDQDYERAYHRAYDPDYERAYSPEYRRGARHDARSRGPRSRSREHPHSRSPSPEPRGRPGPIGVLLMKSRANEEYGLRLGSQIFVKEMTRTGLATKDGNLHEGDIILKINGTVTENMSLTDARKLIEKSRGKLQLVVLRDSQQTLINIPSLNDSDSEIEDISEIESNRSFSPEERRHQYSDYDYHSSSEKLKERPSSREDTPSRLSRMGATPTPFKSTGDIAGTVVPETNKEPRYQEDPPAPQPKAAPRTFLRPSPEDEAIYGPNTKMVRFKKGDSVGLRLAGGNDVGIFVAGIQEGTSAEQEGLQEGDQILKVNTQDFRGLVREDAVLYLLEIPKGEMVTILAQSRADVYRDILACGRGDSFFIRSHFECEKETPQSLAFTRGEVFRVVDTLYDGKLGNWLAVRIGNELEKGLIPNKSRAEQMASVQNAQRDNAGDRADFWRMRGQRSGVKKNLRKSREDLTAVVSVSTKFPAYERVLLREAGFKRPVVLFGPIADIAMEKLANELPDWFQTAKTEPKDAGSEKSTGVVRLNTVRQIIEQDKHALLDVTPKAVDLLNYTQWFPIVIFFNPDSRQGVKTMRQRLNPTSNKSSRKLFDQANKLKKTCAHLFTATINLNSANDSWFGSLKDTIQHQQGEAVWVSEGKMEGMDDDPEDRMSYLTAMGADYLSCDSRLISDFEDTDGEGGAYTDNELDEPAEEPLVSSITRSSEPVQHEEIEIAQKHPDIYAVPIKTHKPDPGTPQHTR

SEQ ID NO: 25338 - protein, 1255 aa, Homo sapiens
MANGTADVRKLFIFTTTQNYFGLMSELWDQPLLCNCLEINNFLDDGNQMLLRVQRSDAGISFSNTIEFGDTKDKVLVFFKLRPEVITDENLHDNILVSSMLESPISSLYQAVRQVFAPMLLKDQEWSRNFDPKLQNLLSELEAGLGIVLRRSDTNLTKLKFKEDDTRGILTPSDEFQFWIEQAHRGNKQISKERANYFKELFETIAREFYNLDSLSLLEVVDLVETTQDVVDDVWRQTEHDHYPESRMLHLLDIIGGSFGRFVQKKLGTLNLWEDPYYLVKESLKAGISICEQWVIVCNHLTGQVWQRYVPHPWKNEKYFPETLDKLGKRLEEVLAIRTIHEKFLYFLPASEEKIICLTRVFEPFTGLNPVQYNPYTEPLWKAAVSQYEKIIAPAEQKIAGKLKNYISEIQDSPQQLLQAFLKYKELVKRPTISKELMLERETLLARLVDSIKDFRLDFENRCRGIPGDASGPLSGKNLSEVVNSIVWVRQLELKVDDTIKIAEALLSDLPGFRCFHQSAKDLLDQLKLYEQEQFDDWSRDIQSGLSDSRSGLCIEASSRIMELDSNDGLLKVHYSDRLVILLREVRQLSALGFVIPAKIQQVANIAQKFCKQAIILKQVAHFYNSIDQQMIQSQRPMMLQSALAFEQIIKNSKAGSGGKSQITWDNPKELEGYIQKLQNAAERLATENRKLRKWHTTFCEKVVVLMNIDLLRQQQRWKDGLQELRTGLATVEAQGFQASDMHAWKQHWNHQLYKALEHQYQMGLEALNENLPEINIDLTYNYLFTFRQGRLQFRPPFEEIRAKYYREMKRFIGIPNQFKGVGEAGDESIFSIMIDRNASGFLTIFSKAEDLFRRLSAVLHQHKEWIVIGQVDMEALVEKHLFTVHDWEKNFKALKIKGKEVERLPSAVKVDCLNINCNPVKTVIDDLIQKLFDLLVLSLKKSIQAHLHEIDTFVTEAMEVLTIMPQSVEEIGDANLQYSKLQERKPEILPLFQEAEDKNRLLRTVAGGGLETISNLKAKWDKFELMMESHQLMIKDQIEVMKGNVKSRLQIYYQELEKFKARWDQLKPGDDVIETGQHNTLDKSAKLIKEKKIEFDDLEVTRKKLVDDCHHFRLEEPNFSLASSISKDIESCAQIWAFYEEFQQGFQEMANEDWITFRTKTYLFEEFLMNWHDRLRKVEEHSVMTVKLQSEVDKYKIVIPILKYVRGEHLSPDHWLDLFRLLGLPRGTSLEKLLFGDLLRVADTIVAKAADLKV

SEQ ID NO: 25339 - protein, 414 aa, Homo sapiens
QRPRDSCCPILTPLEPMSPQQQAVMNNRCFQLGEGDCWDLPVDYTKMKPRRIDEDESKDITPEDLDPFQEALEERRYPGEVTIPSPKPKYPQCKESKKDLITLSGCPLADKSIRSMLATSSQELKCPTPGCDGSGHITGNYASHRSLSGCPRAKKSGIRIAQSKEDKEDQEPIRCPVPGCDGQGHITGKYASHRSASGCPLAAKRQKDGYLNGSQFSWKSVKTEGMSCPTPGCDGSGHVSGSFLTHRSLSGCPRATSAMKKAKLSGEQMLTIKQRASNGIENDEEIKQLDEEIKELNESNSQMEADMIKLRTQITTMESNLKTIEEENKVIEQQNESLLHELANLSQSLIHSLANIQLPHMDPINEQNFDAYVTTLTEMYTNQDRYQSPENKALLENIKQAVRGIQEDGVWWGQ

SEQ ID NO: 25340 - protein, 1227 aa, Homo sapiens
MYQPEDDNNSDVTSDDDMTRNRRESSPPHSVHSFSGDRDWDRRGRSRDMEPRDRWSHTRNPRSRMPPRDLSLPVVAKTSFEMDREDDRDSRAYESRSQDAESYQNVVDLAEDRKPHNTIQDNMENYRKLLSLGVQLAEDDGHSHMTQGHSSRSKRSAYPSTSRGLKTMPEAKKSTHRRGICEDESSHGVIMEKFIKDVSRSSKSGRARESSDRSQRFPRMSDDNWKDISLNKRESVIQQRVYEGNAFRGGFRFNSTLVSRKRVLERKRRYHFDTDGKGSIHDQKGCPRKKPFECGSEMRKAMSVSSLSSLSSPSFTESQPIDFGAMPYVCDECGRSFSVISEFVEHQIMHTRENLYEYGESFIHSVAVSEVQKSQVGGKRFECKDCGETFNKSAALAEHRKIHARGYLVECKNQECEEAFMPSPTFSELQKIYGKDKFYECRVCKETFLHSSALIEHQKIHFGDDKDNEREHERERERERGETFRPSPALNEFQKMYGKEKMYECKVCGETFLHSSSLKEHQKIHTRGNPFENKGKVCEETFIPGQSLKRRQKTYNKEKLCDFTDGRDAFMQSSELSEHQKIHSRKNLFEGRGYEKSVIHSGPFTESQKSHTITRPLESDEDEKAFTISSNPYENQKIPTKENVYEAKSYERSVIHSLASVEAQKSHSVAGPSKPKVMAESTIQSFDAINHQRVRAGGNTSEGREYSRSVIHSLVASKPPRSHNGNELVESNEKGESSIYISDLNDKRQKIPARENPCEGGSKNRNYEDSVIQSVFRAKPQKSVPGEGSGEFKKDGEFSVPSSNVREYQKARAKKKYIEHRSNETSVIHSLPFGEQTFRPRGMLYECQECGECFAHSSDLTEHQKIHDREKPSGSRNYEWSVIRSLAPTDPQTSYAQEQYAKEQARNKCKDFRQFFATSEDLNTNQKIYDQEKSHGEESQGENTDGEETHSEETHGQETIEDPVIQGSDMEDPQKDDPDDKIYECEDCGLGFVDLTDLTDHQKVHSRKCLVDSREYTHSVIHTHSISEYQRDYTGEQLYECPKCGESFIHSSFLFEHQRIHEQDQLYSMKGCDDGFIALLPMKPRRNRAAERNPALAGSAIRCLLCGQGFIHSSALNEHMRLHREDDLLEQSQMAEEAIIPGLALTEFQRSQTEERLFECAVCGESFVNPAELADHVTVHKNEPYEYGSSYTHTSFLTEPLKGAIPFYECKDCGKSFIHSTVLTKHK

SEQ ID NO: 25341 - protein, 842 aa, Homo sapiens
MMSTYKRATLDEEDLVDSLSEGDAYPNGLQVNFHSPRSGQRCWAARTQVEKRLVVLVVLLAAGLVACLAALGIQYQTRSPSVCLSEACVSVTSSILSSMDPTVDPCHDFFSYACGGWIKANPVPDGHSRWGTFSNLWEHNQAIIKHLLENSTASVSEAERKAQVYYRACMNETRIEELRAKPLMELIERLGGWNITGPWAKDNFQDTLQVVTAHYRTSPFFSVYVSADSKNSNSNVIQVDQSGLGLPSRDYYLNKTENEKVLTGYLNYMVQLGKLLGGGDEEAIRPQMQQILDFETALANITIPQEKRRDEELIYHKVTAAELQTLAPAINWLPFLNTIFYPVEINESEPIVVYDKEYLEQISTLINTTDRCLLNNYMIWNLVRKTSSFLDQRFQDADEKFMEVMYGTKKTCLPRWKFCVSDTENNLGFALGPMFVKATFAEDSKSIATEIILEIKKAFEESLSTLKWMDEETRKSAKEKADAIYNMIGYPNFIMDPKELDKVFNDYTAVPDLYFENAMRFFNFSWRVTADQLRKAPNRDQWSMTPPMVNAYYSPTKNEIVFPAGILQAPFYTRSSPKALNFGGIGVVVGHELTHAFDDQGREYDKDGNLRPWWKNSSVEAFKRQTECMVEQYSNYSVNGEPVNGRHTLGENIADNGGLKAAYRAYQNWVKKNGAEHSLPTLGLTNNQLFFLGFAQVWCSVRTPESSHEGLITDPHSPSRFRVIGSLSNSKEFSEHFRCPPGSPMNPPHKCEVCSPGLLAQPCLDSALPSPGKLESSCPRGSRRHRDTPATLGSASKLVQGIESGFQMEVLVPARSSPGSSAEETGTREVAEAEASRSPLAT

SEQ ID NO: 25342 - protein, 351 aa, Homo sapiens
MNESKPGDSQNLACVFCRKHDDCPNKYGEKKTKEKWNLTVHYYCLLMSSGIWQRGKEEEGVYGFLIEDIRKEVNRASKLKCCVCKKNGASIGCVAPRCKRSYHFPCGLQRECIFQFTGNFASFCWDHRPVQIITSNNYRESLPCTICLEFIEPIPSYNILRSPCCKNAWFHRDCLQVQAINAGVFFFRCTICNNSDIFQKEMLRMGIHIPEKDASWELEENAYQELLQHYERCDVRRCRCKEGRDYNAPDSKWEIKRCQCCGSSGTHLACSSLRSWEQNWECLECRGIIYNSGEFQKAKKHVLPNSNNVGITDCLLEESSPKLPRQSPGSQSKDLLRNKVSLCYPGWSTVA

SEQ ID NO: 25343 - protein, 705 aa, Homo sapiens
MWLLYLLVPALFCRAGGSIPIPQKLFGEVTSPLFPKPYPNNFETTTVITVPTGYRVKLVFQQFDLEPSEGCFYDYVKISADKKSLGRFCGQLGSPLGNPPGKKEFMSQGNKMLLTFHTDFSNEENGTIMFYKGFLAYYQAVDLDECASRSKSGEEDPQPQCQHLCHNYVGGYFCSCRPGYELQEDRHSCQAECSSELYTEASGYISSLEYPRSYPPDLRCNYSIRVERGLTLHLKFLEPFDIDDHQQVHCPYDQLQIYANGKNIGEFCGKQRPPDLDTSSNAVDLLFFTDESGDSRGWKLRYTTEIIKCPQPKTLDEFTIIQNLQPQYQFRDYFIATCKQGYQLIEGNQVLHSFTAVCQDDGTWHRAMPRCKIKDCGQPRNLPNGDFRYTTTMGVNTYKARIQYYCHEPYYKMQTRAGSRESEQGVYTCTAQGIWKNEQKGEKIPRCLPVCGKPVNPVEQRQRIIGGQKAKMGNFPWQVFTNIHGRGGGALLGDRWILTAAHTLYPKEHEAQSNASLDVFLGHTNVEELMKLGNHPIRRVSVHPDYRQDESYNFEGDIALLELENSVTLGPNLLPICLPDNDTFYDLGLMGYVSGFGVMEEKIAHDLRFVRLPVANPQACENWLRGKNRMDVFSQNMFCAGHPSLKQDACQGDSGGVFAVRDPNTDRWVATGIVSWGIGCSRGYGFYTKVLNYVDWIKKEMEEED

SEQ ID NO: 25344 - protein, 680 aa, Homo sapiens
MGALTSRQHAGVEEVDIPSNSVYRYPPKSGSYFASHFIMGGEKFDSTHPEGYLFGENSDLNFLGNRPVVFPYAAPPPQEPVKTLRSLVNIRKDTLRLVKCAEEVKSPGEEASKAKVHYNVEFTFDTDARVAITIYYQATEEFQNGIASYIPKDNSLQSETVQYKRGVCQQFCLPSHTVDPSEWAEEELGFDLDREVYPLVVHAVVDEGDEYFGHCHVLLGTFEKHTDGTFCVKPLKQKQVVDGVSYLLQEIYGIENKYNTQDSKVAEDEVSDNSAECVVCLSDVRDTLILPCRHLCLCNTCADTLRYQANNCPICRLPFRALLQIRAMRKKLGPLSPTSFNPIISSQTSDSEEHPSSENIPPGYEVVSLLEALNGPLTPSPAVPPLHVLGDGHLSGMLPSYGSDGHLPPVRTISPLDRLSDSSSQGLKLKKSLSKSTSQNSSVLHEEEDEHSCSESETQLSQRPSVQHLGEECGVTPESENLTLSSSGAIDQSSCTGTPLSSTISSPEGPASSSLAQSVMSMASSQISTDTVSSMSGSYIAPGTEEEGEALSSPQPASRAPSEEGEGLPAESPDSNFAGLPAGEQDAEGNDVIEEEDGSPTQEGGQRTCAFLGMECDNNNDFDIASVKALDNKLCSEVCLPGAWQADDNAVSRNAQRRRLSSSSLEDSETRPCVWGPLAV

SEQ ID NO: 25345 - protein, 147 aa, Homo sapiens
HGVKGQKGERGLPGLQGVIGFPGMQGPEGPQGPPGQKGDTGEPGLPGTKGTRGPPGASGYPGNPGLPGIPGQDGPPGPPGIPGCNGTKGERGPLGPPGLPGFAGNPGPPGLPGMKGDPGEILGHVPGMLLKGERGFPGIPGTPVSIC

SEQ ID NO: 25346 - protein, 588 aa, Homo sapiens
MECLYYFLGFLLLAARLPLDAAKRFHDVLGNERPSAYMREHNQLNGWSSDENDWNEKLYPVWKRGDMRWKNSWKGGRVQAVLTSDSPALVGSNITFAVNLIFPRCQKEDANGNIVYEKNCRNEAGLSADPYVYNWTAWSEDSDGENGTGQSHHNVFPDGKPFPHHPGWRRWNFIYVFHTLGQYFQKLGRCSVRVSVNTANVTLGPQLMEVTVYRRHGRAYVPIAQVKDVYVVTDQIPVFVTMFQKNDRNSSDETFLKDLPIMFDVLIHDPSHFLNYSTINYKWSFGDNTGLFVSTNHTVNHTYVLNGTFSLNLTVKAAAPGPCPPPPPPPRPSKPTPSLGTWMKLETIILSKLSQGQKTKRRMFSFTGPAGDNPLELSRIPDENCQINRYGHFQATITIVEGILEVNIIQMTDVLMPVPWPESSLIDFVVTCQGSIPTEVCTIISDPTCEITQNTVCSPVDVDEMCLLTVRRTFNGSGTYCVNLTLGDDTSLALTSTLISVPDRDPASPLRMANSALISVGCLAIFVTVISLLVYKKHKEYNPIENSPGNVVRSKGLSVFLNRAKAVFFPGNQEKDPLLKNQEFKGVS

SEQ ID NO: 25347 - protein, 747 aa, Homo sapiens
MELFQAKDHYILQQGERALWCSRRDGGLQLRPATDLLLAWNPICLGLVEGVIGKIQLHSDLPWWLILIRQKALVGKLPGDHEVCKVTKIAVLSLSEMEPQDLELELCKKHHFGINKPEKIIPSPDDSKFLLKTFTHIKSNVSAPNKKKVKESKEKEKLERRLLEELLKMFMDSESFYYSLTYDLTNSVQRQSTGERDGRPLWQKVDDRFFWNKYMIQDLTEIGTPDVDFWIIPMIQGFVQIEELVVNYTESSDDEKSSPETPPQESTCVDDIHPRFLVALISRRSRHRAGMRYKRRGVDKNGNVANYVETEQLIHVHNHTLSFVQTRGSVPVFWSQVGYRYNPRPRLDRSEKETVAYFCAHFEEQLNIYKKQVIINLVDQAGREKIIGDAYLKQVLLFNNSHLTYVSFDFHEHCRGMKFENVQTLTDAIYDIILDMKWCWVDEAGVICKQEGIFRVNCMDCLDRTNVVQAAIARVVMEQQLKKLGVMPPEQPLPVKCNRIYQIMWANNGDSISRQYAGTAALKGDFTRTGERKLAGVMKDGVNSANRYYLNRFKDAYRQAVIDLMQGIPVTEDLYSIFTKEKEHEALHKENQRSHQELISQLLQSYMKLLLPDDEKFHGGWALIDCDPSLIDATHRDVDVLLLLSNSAYYVAYYDDEVDKVNQYQRLSLENLEKIEIGPEPTLFGKPKFSCMRLHYRYKEASGYFHTLRAVMRNPEEDGKGRAVNLTKTSLVSGLKTKVLWPRERIF

SEQ ID NO: 25348 - protein, 858 aa, Homo sapiens
DHQMNCHNTRIMQDTEKDDNNNDEYDNYDELVAKSLLNLGKIAEDAAYRARTESEMNSNTSNSLEDDSDKNENLGRKSELSLDLDSDVVRETVDSLKLLAQGHGVVLSENMNDRNYADSMSQQDSRNMNYVMLGKPMNNGLMEKMVEESDEEVCLSSLECLRNQCFDLARKLSETNPQERNPQQNMNIRQHVRPEEDFPGRTPDRNYSDMLNLMRLEEQLSPRSRVFASCAKEDGCHERDDDTTSVNSDRSEEVFDMTKGNLTLLEKAIALETERAKAMREKMAMEAGRRDNMRSYEDQSPRQLPGEDRKPKSSDSHVKKPYYGKDPSRTEKKESKCPTPGCDGTGHVTGLYPHHRSLSGCPHKDRVPPEILAMHESVLKCPTPGCTGRGHVNSNRNSHRSLSGCPIAAAEKLAKAQEKHQSCDVSKSSQASDRVLRPMCFVKQLEIPQYGYRNNVPTTTPRSNLAKELEKYSKTSFEYNSYDNHTYGKRAIAPKVQTRDISPKGYDDAKRYCKDPSPSSSSTSSYAPSSSSNLSCGGGSSASSTCSKSSFDYTHDMEAAHMAATAILNLSTRCREMPQNLSTKPQDLCATRNPDMEVDENGTLDLSMNKQRPRDSCCPILTPLEPMSPQQQAVMNNRCFQLGEGDCWDLPVDYTKMKPRRIDEDESKDITPEDLDPFQEALEERRYPGEVTIPSPKPKYPQCKESKKDLITLSGCPLADKSIRSMLATSSQELKCPTPGCDGSGHITGNYASHRSLSGCPRAKKSGIRIAQSKEDKEDQEPIRCPVPGCDGQGHITGKYASHRSASGCPLAAKRQKDGYLNGSQFSWKSVKTEGMSCPTPGCDGSGHVSGSFLTHRR

SEQ ID NO: 25349 - protein, 637 aa, Homo sapiens [sequence omitted]

SEQ ID NO: 25350 - protein, 708 aa, Homo sapiens
MRVLGGRCGALLACLLLVLPVSEANFCLYFRNDFIYNRACISVLVGLSGCNFFYSICFLSKQQASQVLVRKRRANSLLEETKQGNLERECIEELCNKEEAREVFENDPETDYFYPKYLVCLRSFQTGLFTAARQSTNAYPDLRSCVNAIPDQCSPLPCNEDGYMSCKDGKASFTCTCKPGWQGEKCEFDINECKDPSNINGGCSQICDNTPGSYHCSCKNGFVMLSNKKDCKDVDECSLKPSICGTAVCKNIPGDFECECPEGYRYNLKSKSCEDIDECSENMCAQLCVNYPGGYTCYCDGKKGFKLAQDQKSCEVVSVCLPLNLDTKYELLYLAEQFAGVVLYLKFRLPEISRFSAEFDFRTYDSEGVILYAESIDHSAWLLIALRGGKIEVQLKNEHTSKITTGGDVINNGLWNMVSVEELEHSISIKIAKEAVMDINKPGPLFKPENGLLETKVYFAGFPRKVESELIKPINPRLDGCIRSWNLMKQGASGIKEIIQEKQNKHCLVTVEKGSYYPGSGIAQFHIDYNNVSSAEGWHVNVTLNIRPSTGTGVMLALVSGNNTVPFAVSLVDSTSEKSQDILLSVENTVIYRIQALSLCSDQQSHLEFRVNRNNLELSTPLKIETISHEDLQRQLAVLDKAMKAKVATYLGGLPDVPFSATPVNAFYNGCMEVNINGVQLDLDEAISKHNDIRAHSCPSVWKKTKNS

SEQ ID NO: 25351 - protein, 397 aa, Homo sapiens
MPPKRNEKYKLPIPFPEGKVLDDMEGNQWVLGKKIGSGGFGLIYLAFPTNKPEKDARHVVKVEYQENGPLFSELKFYQRVAKKDCIKKWIERKQLDYLGIPLFYGSGLTEFKGRSYRFMVMERLGIDLQKISGQNGTFKKSTVLQLGIRMLDVLEYIHENEYVHGDIKAANLLLGYKNPDQVYLADYGLSYRYCPNGNHKQYQENPRKGHNGTIEFTSLDAHKGVALSRRSDVEILGYCMLRWLCGKLPWEQNLKDPVAVQTAKTNLLDELPQSVLKWAPSGSSCCEIAQFLVCAHSLAYDEKPNYQALKKILNPHGIPLGPLDFSTKGQSINVHTPNSQKVDSQKAATKQVNKAHNRLIEKKVHSERSAESCATWKVQKEEKLIGLMNNEAAQVEA

SEQ ID NO: 25352 - protein, 788 aa, Homo sapiens
MSQSGAVSCCPGATNGSLGRSDGVAKMSPKDLFEQRKKYSNSNVIMHETSQYHVQHLATFIMDKSEAITSVDDAIRKLVQLSSKEKIWTQEMLLQVNDQSLRLLDIESQEELEDFPLPTVQRSQTVLNQLRYPSVLLLVCQDSEQSKPDVHFFHCDEVEAELVHEDIESALADCRLGKKMRPQTLKGHQEKIRQRQSILPPPQGPAPIPFQHRGGDSPEAKNRVGPQVPLSEPGFRRRESQEEPRAVLAQKIEKETQILNCALDDIEWFVARLQKAAEAFKQLNQRKKGKKKGKKAPAEGVLTLRARPPSEGEFIDCFQKIKLAINLLAKLQKHIQNPSAAELVHFLFGPLDLIVNTCSGPDIARSVSCPLLSRDAVDFLRGHLVPKEMSLWESLGESWMRPRSEWPREPQVPLYVPKFHSGWEPPVDVLQEAPWEVEGLASAPIEEVSPVSRQSIRNSQKHSPTSEPTPPGDALPPVSSPHTHRGYQPTPAMAKYVKILYDFTARNANELSVLKDEVLEVLEDGRQWWKLRSRSGQAGYVPCNILGEARPEDAGAPFEQAGQKYWGPASPTHKLPPSFPGNKDELMQHMDEVNDELIRKISNIRAQPQRHFRVERSQPVSQPLTYESGPDEVRAWLEAKAFSPRIVENLGILTGPQLFSLNKEELKKVCGEEGVRVYSQLTMQKAFLEGELELQAGQAEPRTHAEFCSLRGAREGLQQEAVGAIRGKVGERHTLHLQGPTTQGTPCRLQTLPAPTLTGPGLELSLAKFQANDPRMVLGVLVCLGAWT

SEQ ID NO: 25353 - protein, 706 aa, Homo sapiens
MDPGWGQRDVGWAALLILFAASLLTVFAWLLQYARGLWLARARGDRGPGPALAGEPAGSLRELGVWRSLLRLRATRAGAAEEPGVRGLLASLFAFKSFRENWQRAWVRALNEQACRNGSSIQIAFEEVPQLPPRASISHVTCVDQSEHTMVLRCQLSAEEVRFPVSVTQQSPAAVSMETYHVTLTLPPTQLEVNLEEIPGEGLLISWAFTDRPDLSLTVLPKLQARERGEEQVELSTIEELIKDAIVSTQPAMMVNLRACSAPGGLVPSEKPPMMPQAQPAIPRPNRLFLRQLRASHLGNELEGTEELCCVAELDNPMQQKWTKPARAGSEVEWTEDLALDLGPQSRELTLKVLRSSSCGDTELLGQATLPVGSPSRPLSRRQLCPLTPGPGKALGPAATMAVELHYEEGSPRNLGTPTSSTPRPSITPTKKIELDRTIMPDGTIVTTVTTVQSRPRIDGKLDSPSRSPSKVEVTEKTTTVLSESSGPSNTSHSSSRDSHLSNGLDPVAETAIRQLTEPSGRVAKKTPTKRSTLIISGVSKVPIAQDELALSLGYAASLEASVQDDAGTSGGPSSPPSDPPAMSPGPLDALSSPTSVQEADETTRSDISERPSVDDIESETGSTGALETRSLKDHKVSFLRSGTKLIFRRRPRQKEAGLSQSHDDLSNATATPSVRKKAGSFSRRLIKRFSFKSKPKANGNPSPQL

SEQ ID NO: 25354 - protein, 709 aa, Homo sapiens
MQGVVYELNSYIEQRLDTGGDNQLLLYELSSIIKIATKADGFALYFLGECNNSLCIFTPPGIKEGKPRLIPAGPITQGTTVSAYVAKSRKTLLVEDILGDERFPRGTGLESGTRIQSVLCLPIVTAIGDLIGILELYRHWGKEAFCLSHQEVATANLAWASVAIHQVQVCRGLAKQTELNDFLLDVSKTYFDNIVAIDSLLEHIMIYAKNLVNADRCALFQVDHKNKELYSDLFDIGEEKEGKPVFKKTKEIRFSIEKGIAGQVARTGEVLNIPDAYADPRFNREVDLYTGYTTRNILCMPIVSRGSVIGVVQMVNKISGSAFSKTDENNFKMFAVFCALALHCANMYHRIRHSECIYRVTMEKLSYHSICTSEEWQGLMQFTLPVRLCKEIELFHFDIGPFENMWPGIFVYMVHRSCGTSCFELEKLCRFIMSVKKNYRRVPYHNWKHAVTVAHCMYAILQNNHTLFTDLERKGLLIACLCHDLDHRGFSNSYLQKFDHPLAALYSTSTMEQHHFSQTVSILQLEGHNIFSTLSSSEYEQVLEIIRKAIIATDLALYFGNRKQLEEMYQTGSLNLNNQSHRDRVIGLMMTACDLCSVTKLWPVTKLTANDIYAEFWAEGDEMKKLGIQPIPMMDRDKKDEVPQGQLGFYNAVAIPCYTTLTQILPPTEPLLKACRDNLSQWEKVIRGEETATWISSPSVAQKAAASED

SEQ ID NO: 25355 - protein, 1194 aa, Homo sapiens
MGKEQELLEAARTGHLPAVEKLLSGKRLSSGFGGGGGGGSGGGGGGSGGGGGGLGSSSHPLSSLLSMWRGPNVNCVDSTGYTPLHHAALNGHKDVVEVLLRNDALTNVADSKGCYPLHLAAWKGDAQIVRLLIHQGPSHTRVNEQNALEIKELKKYGPFDPYINAKNNDNETALHCAAQYGHTEVVKVLLEELTDPTMRNNKFETPLDLAALYGRLEVVKMLLNAHPNLLSCNTKKHTPLHLAARNGHKAVVQVLLDAGMDSNYQTEMGSALHEAALFGKTDVVQILLAAGTDVNIKDNHGLTALDTVRELPSQKSQQIAALIEDHMTGKRSTKEVDKTPPPQPPLISSMDSISQKSQGDVEKAVTELIIDFDANAEEEGPYEALYNAISCHSLDSMASGRSSDQDSTNKEAEAAGVKPAGVRPRERPPPPAKPPPDEEEEDHIDKKYFPLTASEVLSMRPRIHGSAAREEDEHPYELLLTAETKKVVLVDGKTKDHRRSSSSRSQDSAEGQDGQVPEQFSGLLHGSSPVCEVGQDPFQLLCTAGQSHPDGSPQQGACHKASMQLEETGVHAPGASQPSALDQSKRVGYLTGLPTTNSRSHPETLTHTASPHPGGAEEGDRSGARSRAPPTSKPKAELKLSRSLSKSDSDLLTCSPTEDATMGSRSESLSNCSIGKKRLEKSPSFASEWDEIEKIMSSIGEGIDFSQERQKISGLRTLEQSVGEWLESIGLQQYESKLLLNGFDDVHFLGSNVMEEQDLRDIGISDPQHRRKLLQAARSLPKVKALGYDGNSPPSVPSWLDSLGLQDYVHSFLSSGYSSIDTVKNLWELELVNVLKVQLLGHRKRIIASLADRPYEEPPQKPPRFSQLRCQDLLSQTSSPLSQNDSCTGRSADLLLPPGDTGRRRHDSLHDPAAPSRAERFRIQEEHREAKLTLRPPSLAAPYAPVQSWQHQPEKLIFESCGYEANYLGSMLIKDLRGTESTQDACAKMRKSTEHMKKIPTIILSITYKGVKFIDASNKNVIAEHEIRNISCAAQDPEDLCTFAYITKDLQTSHHYCHVFSTVDVNLTYEIILTLGQAFEVAYQLALQAQKSRATGASAAEMIETKSSKPVPKPRVGVRKSAVPLPPDSRCCYCHTCTTHRPSYLPLPSVSPGVKLEPPDMDQDAQSHASVSWVVDPKPDSKRSLSTKYETTIF

SEQ ID NO: 25356 - protein, 1596 aa, Homo sapiens
MESRETLSSSRQRGGESDFLPVSSAKPPAAPGCAGEPLLSTPGPGKGIPVGGERMEPEEEDELGSGRDVDSNSNADSEKWVAGDGLEEQEFSIKEANFTEGSLKLKIQTTKRAKKPPKNLENYICPPEIKITIKQSGDQKVSRAGKNSKATKEEERSHSKKKLLTASDLAASDLKGFQPQAYERPQKHSTLHYDTGLPQDFTGDTLKPKHQQKSSSQNHMDWSTNSDSGPVTQNCFISPESGRETASTSKIPALEPVASFAKAQGKKGSAGNTWSQLSNNNKDLLLGGVAPSPSSHSSPAPPSSSAECNGLQPLVDQDGGGTKEPPEPPTVGSKKKSSKKDVISQTIPNPDLDWVKNAQKAFDNTEGKREGYSADSAQEASPARQNVSSASNPENDSSHVRITIPIKAPSLDPTNHKRKKRQSIKAVVEKIMPEKALASGITMSSEVVNRILSNSEGNKKDPRVPKLSKMIENESPSVGLETGGNAEKVIPGGVSKPRKPPMVMTPPTCTDHSPSRKLPEIQHPKFAAKRRWTCSKPKPSTMLREAVMATSDKLMLEPPSAYPITPSSPLYTNTDSLTVITPVKKKRGRPKKQPLLTVETIHEGTSTSPVSPISREFPGTKKRKRRRNLAKLAQLVPGEDKPMSEMKFHKKVGKLGVLDKKTIKTINKMKTLKRKNILNQILSCSSSVALKAKAPPETSPGAAAIESKLGKQINVSKRGTIYIGKKRGRKPRAELPPPSEEPKTAIKHPRPVSSQPDVPAVPSNFQSLVASSPAAMHPLSTQLGGSNGNLSPASTETNFSELKTMPNLQPISALPTKTQKGIHSGTWKLSPPRLMANSPSHLCEIGSLKEITLSPVSESHSEETIPSDSGIGTDNNSTSDQAEKSSESRRRYSFDFCSLDNPEAIPSDTSTKNRHGHRQKHLIVDNFLAHESLKKPKHKRKRKSLQNRDDLQFLADLEELITKFQVFRISHRSYTFYHENPYPSIFRINFDHYYPVPYIQYDPLLYLRRTSDLKSKKKRGRPAKTNDTMTKVPFLQGFSYPIPSGSYYAPYGMPYTSMPMMNLGYYGQYPAPLYLSHTLGAASPFMRPTVPPPQFHTNSHVKMSGAAKHKAKHGVHLQGPVSMGLGDMQPSLNPPKVGSASLSSGRLHKRKHKHKHKHKEDRILGTHDNLSGLFAGKATGFSSHILSERLSSADKELPLVSEKNKHKEKQKHQHSEAGHKASKNNFEVDTLSTLSLSDAQHWTQAKEKGDLSSEPVDSCTKRYSGSGGDGGSTRSENLDVFSEMNPSNDKWDSDVSGSKRRSYEGFGTYREKDIQAFKMNRKERSSYDSSMSPGMPSPHLKVDQTAVHSKNEGSVPTMMTRKKPAAVDSVTIPPAPVLSLLAASAATSDAVGSSLKKRFKRREIEAIQCEVRKMCNYTKILSTKKNLDHVNKILKAKRLQRQSKTGNNFVKKRRGRPRKQPTQFDEDSRDQMPVLEKCIDLPSKRGQKPSLSPLVLEPAASQDTIMATIEAVIHMAREAPPLPPPPPPPLPPPPPPPLPPPPPLPKTPRGGKRKHKPQAPAQPPQQSPPQQPLPQEEEVKAKRQRKSRGSESEVLP

SEQ ID NO: 25357 - protein, 210 aa, Homo sapiens
MEEPRHSKRPRFLAPNQASGGPPTEPGCSGVDREDPVDPVQPAKPTAYVKPMRREPPARAQPAPPAGRGQRGGGSWRAGRGRGSGAGLLRALGERVGPGMYLVHLNDHGELGYQGQLEARQTPAFSFTEAALMPGIVQEGPGPHAAQPEVGLQEPPPAPGPVAVARQTMLAPSPSLSFRPPGGSSTLCIVQTSNSTIVQSVPVFPAHSAH

SEQ ID NO: 25358 - protein, 460 aa, Homo sapiens
MELFQAKDHYILQQGERALWCSRRDGGLQLRPATDLLLAWNPICLGLVEGVIGKIQLHSDLPWWLILIRQKALVGKLPGDHEVCKVTKIAVLSLSEMEPQDLELELCKKHHFGINKPEKIIPSPDDSKFLLKTFTHIKSNVSAPNKKKVKESKEKEKLERRLLEELLKMFMDSESFYYSLTYDLTNSVQRQSTGERDGRPLWQKVDDRFFWNKYMIQDLTEIGTPDVDFWIIPMIQGFVQIEELVVNYTESSDDEKSSPETPPQESTCVDDIHPRFLVALISRRSRHRAGMRYKRRGVDKNGNVANYVETEQLIHVHNHTLSFVQTRGSVPVFWSQVGYRYNPRPRLDRSEKETVAYFCAHFEEQLNIYKKQVIINLVDQAGREKIIGDAYLKQVLLFNNSHLTYVSFDFHEHCRGMKFENVQTLTDAIYDIILDMKWCCTHFLLWFPGPYTVNPPMCSF

SEQ ID NO: 25359 - protein, 723 aa, Homo sapiens
MLSSMAAAGSVKAALQVAEVLEAIVSCCVGPEGRQVLCTKPTGEVLLSRNGGRLLEALHLEHPIARMIVDCVSSHLKKTGDGAKTFIIFLCHLLRGLHAITDREKDPLMCENIQTHGRHWKNCSRWKFISQALLTFQTQILDGIMDQYLSRHFLSIFSSAKERTLCRSSLELLLEAYFCGRVGRNNHKFISQLMCDYFFKCMTCKSGIGVFELVDDHFVELNVGVTGLPVSDSRIIAGLVLQKDFSVYRPADGDMRMVIVTETIQPLFSTSGSEFILNSEAQFQTSQFWIMEKTKAIMKHLHSQNVKLLISSVKQPDLVSYYAGVNGISVVECLSSEEVSLIRRIIGLSPFVPPQAFSQCEIPNTALVKFCKPLILRSKRYVHLGLISTCAFIPHSIVLCGPVHGLIEQHEDALHGALKMLRQLFKDLDLNYMTQTNDQNGTSSLFIYKNSGESYQAPDPGNGSIQRPYQDTVAENKDALEKTQTYLKVHSNLVIPDVELETYIPYSTPTLTPTDTFQTVETLTCLSLERNRLTDYYEPLLKNNSTAYSTRGNRIEISYENLQVTNITRKGSMLPVSCKLPNMGTSQSYLSSSMPAGCVLPVGGNFEILLHYYLLNYAKKCHQSEETMVSMIIANALLGIPKVLYKSKTGKYSFPHTYIRAVHALQTNQPLVSSQTGLESVMGKYQLLTSVLQCLTKILTIDMVITVKRHPQKVHNQDSEDEL

SEQ ID NO: 25360 - protein, 612 aa, Homo sapiens
MGKIENNERVILNVGGTRHETYRSTLKTLPGTRLALLASSEPPGDCLTTAGDKLQPSPPPLSPPPRAPPLSPGPGGCFEGGAGNCSSRGGRASDHPGGGREFFFDRHPGVFAYVLNYYRTGKLHCPADVCGPLFEEELAFWGIDETDVEPCCWMTYRQHRDAEEALDIFETPDLIGGDPGDDEDLAAKRLGIEDAAGLGGPDGKSGRWRRLQPRMWALFEDPYSSRAARFIAFASLFFILVSITTFCLETHEAFNIVKNKTEPVINGTSVVLQYEIETDPALTYVEGVCVVWFTFEFLVRIVFSPNKLEFIKNLLNIIDFVAILPFYLEVGLSGLSSKAAKDVLGFLRVVRFVRILRIFKLTRHFVGLRVLGHTLRASTNEFLLLIIFLALGVLIFATMIYYAERVGAQPNDPSASEHTQFKNIPIGFWWAVVTMTTLGYGDMYPQTWSGMLVGALCALAGVLTIAMPVPVIVNNFGMYYSLAMAKQKLPRKRKKHIPPAPQASSPTFCKTELNMACNSTQSDTCLGKDNRLLEHNRSVLPLPHGAMHLNLIHKKQLFKKNGCLHFKGLNSKQCYQVTTVQEVSRHYHPQKGSPSDALVPETKTEEGKHVSY

SEQ ID NO: 25361 - protein, 209 aa, Homo sapiens
LLVSVILISRISSVGGEAMFCDFPKINHGILYDEEKYKPFSQVPTGEVFYYSCEYNFVSPSKSFWTRITCAEEGWSPTPKCLISAEKCGPPPPIDNGDITSFLLSVYAPGSSVEYQCQNLYQLEGNNQITCRNGQWSEPPKCLDPCVISQEIMEKYNIKLKWTNQQKLYSRTGDIVEFVCKSGYHPTKSHSFRAMCQNGKLVYPSCEEK

SEQ ID NO: 25362 - protein, 676 aa, Homo sapiens
MMQESGTETKSNGSAIQNGSGGSNHLLECGGLREGRSNGETPAVDIGAADLAHAQQQQQQALQVARQLLLQQQQQQQVSGLKSPKRNDKQPALQVPVSVAMMTPQVITPQQMQQILQQQVLSPQQLQVLLQQQQALMLQQQLQEFYKKQQEQLQLQLLQQQHAGKQPKEQQQVATQQLAFQQQLLQMQQLQQQHLLSLQRQGLLTIQPGQPALPLQPLAQGMIPTELQQLWKEVTSAHTAEETTGNNHSSLDLTTTCVSSSAPSKTSLIMNPHASTNGQLSVHTPKRESLSHEEHPHSHPLYGHGVCKWPGCEAVCEDFQSFLKHLNSEHALDDRSTAQCRVQMQVVQQLELQLAKDKERLQAMMTHLHVKSTEPKAAPQPLNLVSSVTLSKSASEASPQSLPHTPTTPTAPLTPVTQGPSVITTTSMHTVGPIRRRYSDKYNVPISSADIAQNQEFYKNAEVRPPFTYASLIRQAILESPEKQLTLNEIYNWFTRMFAYFRRNAATWKNAVRHNLSLHKCFVRVENVKGAVWTVDEVEFQKRRPQKISGNPSLIKNMQSSHAYCTPLNAALQASMAENSIPLYTTASMGNPTLGNLASAIREELNGAMEHTNSNESDSSPGRSPMQAVHPVHVKEEPLDPEEAEGPLSLVTTANHSPDFDHDRDYEDEPVNEDME

SEQ ID NO: 25363 - protein, 679 aa, Homo sapiens
MGKTANSPGSGARPDPVRSFNRWKKKHSHRQNKKKQLRKQLKKPEWQVERESISRLMQNYEKINVNEITRFSDFPLSKKTLKGLQEAQYRLVTEIQKQTIGLALQGKDVLGAAKTGSGKTLAFLVPVLEALYRLQWTSTDGLGVLIISPTRELAYQTFEVLRKVGKNHDFSAGLIIGGKDLKHEAERINNINILVCTPGRLLQHMDETVSFHATDLQMLVLDEADRILDMGFADTMNAVIENLPKKRQTLLFSATQTKSVKDLARLSLKNPEYVWVHEKAKYSTPATLEQNYIVCELQQKISVLYSFLRSHLKKKSIVFFSSCKEVQYLYRVFCRLRPGVSILALHGRQQQMRRMEVYNEFVRKRAAVLFATDIAARGLDFPAVNWVLQFDCPEDANTYIHRAGRTARYKEDGEALLILLPSEKAMVQQLLQKKVPVKEIKINPEKLIDVQKKLESILAQDQDLKERAQRCFVSYVRSVYLMKDKEVFDVSKLPIPEYALSLGLAVAPRVRFLQKMQKQPTKELVRSQADKVIEPRAPSLTNDEVEEFRAYFNEKMSILQKGGKRLEGTEHRQDNDTGNEEQEEEEDDEEEMEEKLAKAKGSQAPSLPNTSEAQKIKEVPTQFLDRDEEEEDADFLKVKRHNVFGLDLKDEKTLQSLSLSPRLECNGVIMARCSLDLMG

SEQ ID NO: 25364 - protein, 714 aa, Homo sapiens
MASEVQLMNASTQTDITFEHIMALAKLRPPTPPVPDICPFLLSDSCHSLHPMEHEFYEDNEYISSLPADADRTEDFEYEEVELCRVSSQEKLGLTVCYRTDDEEDTGIYVSEVDPNSIAAKDGRIREGDRILQINGEDVQNREEAVALLSNDECKRIVLLVARPEIQLDEGWLEDERNEFLEELNLEMLEEEHNEAMQPTANEVEQPKKQEEEEGTTDTATSSSNNHEKDSGVGRTDESLRNDESSEQENAAEDPNSTSLKSKRDLGQSQDTLGSVELQYNESLVSGEYIDSDCIGNPDEDCERFRQLLELKCKIRNHGEYDLYYSSSTIECNQGEQEGVEHELQLLNEELRNIELECQNIMQAHRLQKVTDQYGDIWTLHDGGFRNYNTSIDMQRGKLDDIMEHPEKSDKDSSSAYNTAESCRSTPLTVDRSPDSSLPRVINLTNKKNLRSTMAATQSSSGQSSKESTSTKAKTTEQGCSAESKEKVLEGSKLPDQEKAVSEHIPYLSPYHSSSYRYANIPAHARHYQSYMQLIQQKSAVEYAQSQLSLVSMCKESQKCSEPKMEWKVKIRSDGTRYITKRPVRDRILKERALKIKEERSGMTTDDDTMSEMKMGRYWSKEERKQHLVRAKEQRRRREFMMRSRLECLKESPQSGSEGKKEINIIELSHKKMMKKRNKKILDNWMTIQELMTHGAKSPDGTRVHNAFLSVTTV

SEQ ID NO: 25365 - protein, 758 aa, Homo sapiens
MLENSLGPFPLFLQQVQSDTAQNYTIYYSIRGPGVDQEPRNLFYVERDTGNLYCTRPVDREQYESFEIIAFATTPDGYTPELPLPLIIKIEDENDNYPIFTEETYTFTIFENCRVGTTVGQVCATDKDEPDTMHTRLKYSIIGQVPPSPTLFSMHPTTGVITTTSSQLDRELIDKYQLKIKVQDMDGQYFGLQTTSTCIINIDDVNDHLPTFTRTSYVTSVEENTVDVEILRVTVEDKDLVNTANWRANYTILKGNENGNFKIVTDAKTNEGVLCVVKPLNYEEKQQMILQIGVVNEAPFSREASPRSAMSTATVTVNVEDQDEGPECNPPIQTVRMKENAEVGTTSNGYKAYDPETRSSSGIRYKKLTDPTGWVTIDENTGSIKVFRSLDREAETIKNGIYNITVLASDQGGRTCTGTLGIILQDVNDNSPFIPKKTVIICKPTMSSAEIVAVDPDEPIHGPPFDFSLESSTSEVQRMWRLKAINDTAARLSYQNDPPFGSYVVPITVRDRLGMSSVTSLDVTLCDCITENDCTHRVDPRIGGGGVQLGKWAILAILLGIALLFCILFTLVCGASGTSKQPKVIPDDLAQQNLIVSNTEAPGDDKVYSANGFTTQTVGASAQGVCGTVGSGIKNGGQETIEMVKGGHQTSESCRGAGHHHTLDSCRGGHTEVDNCRYTYSEWHSFTQPRLGEKVYLCNQDENHKHAQDYVLTYNYEGRGSVAGSVGCCSERQEEDGLEFLDNLEPKFRTLAEACMKR

SEQ ID NO: 25366 - protein, 307 aa, Homo sapiens
MEEPEEPADSGQSLVPVYIYSPEYVSMCDSLAKIPKRASMVHSLIEAYALHKQMRIVKPKVASMEEMATFHTDAYLQHLQKVSQEGDDDHPDSIEYGLGYDCPATEGIFDYAAAIGGATITAAQCLIDGMCKVAINWSGGWHHAKKDEASGFCYLNDAVLGILRLRRKFERILYVDLDLHHGDGVEDAFSFTSKVMTVSLHKFSPGFFPGTGDVSDVGLGKGRYYSVNVPIQDGIQDEKYYQICESVLKEVYQAFNPKAVVLQLGADTIAGDPMCSFNMTPVGIGKCLKYILQWQLATLILGGDRRL

SEQ ID NO: 25367 - protein, 348 aa, Homo sapiens
MVKLANPLYTEWILEAIKKVKKQKQRPSEERICNAVSSSHGLDRKTVLEQLELSVKDGTILKVSNKGLNSYKDPDNPGRIALPKPRNHGKLDNKQNVDWNKLIKRAVEGLAESGGSTLKSIERFLKGQKDVSALFGGSAASGFHQQLRLAIKRAIGHGRLLKDGPLYRLNTKATNVDGKESCESLSCLPPVSLLPHEKDKPVAEPIPICSFCLGTKEQNREKKPEELISCADCGNSGHPSCLKFSPELTVRVKALRWQCIECKTCSSCRDQGKNADNMLFCDSCDRGFHMECCDPPLTRMPKGMWICQICRPRKKGRKLLQKKAAQIKRRYTNPIGRPKNRLKKQNTV

SEQ ID NO: 25368 - protein, 624 aa, Homo sapiens
MYFPSWLSQLYRGLSRPIRRTTQPIWGSLYRSLLQSSQRRIPEFSSFVVRTNTCGELRSSHLGQEVTLCGWIQYRRQNTFLVLRDFDGLVQVIIPQDESAASVKKILCEAPVESVVQVSGTVISRPAGQENPKMPTGEIEIKVKTAELLNACKKLPFEIKNFVKKTEALRLQYRYLDLRSFQMQYNLRLRSQMVMKMREYLCNLHGFVDIETPTLFKRTPGGAKEFLVPSREPGKFYSLPQSPQQFKQLLMVGGLDRYFQVARCYRDEGSRPDRQPEFTQIDIEMSFVDQTGIQSLIEGLLQYSWPNDKDPVVVPFPTMTFAEVLATYGTDKPDTRFGMKIIDISDVFRNTEIGFLQDALSKPHGTVKAICIPEGAEILPVFLNANRNWNSPVANFIMESQRLELIRLMETQEEDVVLLTAGEHNKACSLLGKLRLECADLLETRGVVLRDPTLFSFLWVVDFPLFLPKEENPRELESAHHPFTAPHPSDIHLLYTEPKKARSQHYDLVLNGNEIGGGSIRIHNAELQRYILATLLKEDVKMLSHLLQALDYGAPPHGGIALGLDRLICLVTGSPSIRDVIAFPKSFRGHDLMSNTPDSVPPEELKPYHIRVSKPTDSKAERAH

SEQ ID NO: 25369 - protein, 628 aa, Homo sapiens
MMQESGTETKSNGSAIQNGSGGSNHLLECGGLREGRSNGETPAVDIGAADLAHAQQQQQQALQVARQLLLQQQQQQQVSGLKSPKRNDKQPALQVPVSVAMMTPQVITPQQMQQILQQQVLSPQQLQVLLQQQQALMLQQQQLQEFYKKQQEQLQLQLLQQQHAGKQPKEQQQVATQQLAFQQQLLQMQQLQQQHLLSLQRQGLLTIQPGQPALPLQPLAQGMIPTELQQLWKEVTSAHTAEETTGNNHSSLDLTTTCVSSSAPSKTSLIMNPHASTNGQLSVHTPKRESLSHEEHPHSHPLYGHGVCKWPGCEAVCEDFQSFLKHLNSEHALDDRSTAQCRVQMQVVQQLELQLAKDKERLQAMMTHLHVKSTEPKAAPQPLNLVSSVTLSKSASEASPQSLPHTPTTPTAPLTPVTQGPSVITTTSMHTVGPIRRRYSDKYNVPISSADIAQNQEFYKNAEVRPPFTYASLIRQAILESPEKQLTLNEIYNWFTRMFAYFRRNAATWKNAVRHNLSLHKCFVRVENVKGAVWTVDEVEFQKRRPQKISGNPSLIKNMQSSHAYCTPLNAALQASMAENSIPLYTTASMGNPTLGNLASAIREELNGAMEHTNSNESDSSPGRSPMQ

SEQ ID NO: 25370 - protein, 350 aa, Homo sapiens
MTVFFKTLRNHWKKTTAGLCLLTWGGHWLYGKHCDNLLRRAACQEAQVFGNQLIPPNAQVKKATVFLNPAACKGKARTLFEKNAAPILHLSGMDVTIVKTDYEGQAKKLLELMENTDVIIVAGGDGTLQEVVTGVLRRTDEATFSKIPIGFIPLGETSSLSHTLFAESGNKVQHITDATLAIVKGETVPLDVLQIKGEKEQPVFAMTGLRWGSFRDAGVKVSKYWYLGPLKIKAAHFFSTLKEWPQTHQASISYTGPTERPPNEPEETPVQRPSLYRRILRRLASYWAQPQDALSQEVSPEVWKDVQLSTIELSITTRNNQLDPTSKEDFLNICIEPDTISKGDFITIGK

SEQ ID NO: 25371 - protein, 232 aa, Homo sapiens
MAFLVMNLRFFYSLFFPGLIVCGTLCVCLVIVLWGIRLLLQRKKKLVSTSKNGKNQMVIAFFHPYCNAGGGGERVLWCALRALQKKYPEAVYVVYTGDVNVNGQQILEGAFRRFNIRLIHPVQFVFLRKRYLVEDSLYPHFTLLGQSLGSIFLGWEALMQCVPDVYIDSMGYAFTLPLFKYIGGCQVGSYVHYPTISTDMLSVVKNQNIGFNNAAFITRNPFLSKVKLIYYY

SEQ ID NO: 25372 - protein, 1522 aa, Homo sapiens
MLKRKQSSRVEAQPVTDFGPDESLSDNADILWINKPWVHSLLRICAIISVISVCMNTPMTFEHYPPLQYVTFTLDTLLMFLYTAEMIAKMHIRGIVKGDSSYVKDRWCVFDGFMVFCLWVSLVLQVFEIADIVDQMSPWGMLRIPRPLIMIRAFRIYFRFELPRTRITNILKRSGEQIWSVSIFLLFFLLLYGILGVQMFGTFTYHCVVNDTKPGNVTWNSLAIPDTHCSPELEEGYQCPPGFKCMDLEDLGLSRQELGYSGFNEIGTSIFTVYEAASQEGWVFLMYRAIDSFPRWRSYFYFITLIFFLAWLVKNVFIAVIIETFAEIRVQFQQMWGSRSSTTSTATTQMFHEDAAGGWQLVAVDVNKPQGRAPACLQKMMRSSVFHMFILSMVTVDVIVAASNYYKGENFRRQYDEFYLAEVAFTVLFDLEALLKIWCLGFTGYISSSLHKFELLLVIGTTLHVYPDLYHSQFTYFQVLRVVRLIKISPALEDFVYKIFGPGKKLGSLVVFTASLLIVMSAISLQMFCFVEELDRFTTFPRAFMSMFQILTQEGWVDVMDQTLNAVGHMWAPVVAIYFILYHLFATLILLSLFVAVILDNLELDEDLKKLKQLKQSEANADTKEKLPLRLRIFEKFPNRPQMVKISKLPSDFTVPKIRESFMKQFIDRQQQDTCCLLRSLPTTSSSSCDHSKRSAIEDNKYIDQKLRKSVFSIRARNLLEKETAVTKILRACTRQRMLSGSFEGQPAKERSILSVQHHIRQERRSLRHGSNSQRISRGKSLETLTQDHSNTVRYRNAQREDSEIKMIQEKKEQAEMKRKVQEEELRENHPYFDKPLFIVGREHRFRNFCRVVVRARFNASKTDPVTGAVKNTKYHQLYDLLGLVTYLDWVMIIVTICSCISMMFESPFRRVMHAPTLQIAEYVFVIFMSIELNLKIMADGLFFTPTAVIRDFGGVMDIFIYLVSLIFLCWMPQNVPAESGAQLLMVLRCLRPLRIFKLVPQMRKVVRELFSGFKEIFLVSILLLTLMLVFASFGVQLFAGKLAKCNDPNIIRREDCNGIFRINVSVSKNLNLKLRPGEKKPGFWVPRVWANPRNFNFDNVGNAMLALFEVLSLKGWVEVRDVIIHRVGPIHGIYIHVFVFLGCMIGLTLFVGVVIANFNENKGTALLTVDQRRWEDLKSRLKIAQPLHLPPRPDNDGFRAKMYDITQHPFFKRTIALLVLAQSVLLSVKWDVEDPVTVPLATMSVVFTFIFVLEVTMKIIAMSPAGFWQSRRNRYDLLVTSLGVVWVVLHFALLNAYTYMMGACVIVFRFFSICGKHVTLKMLLLTVVVSMYKSFFIIVGMFLLLLCYAFAGVVLFGTVKYGENINRHANFSSAGKAITVLFRIVTGEDWNKIMHDCMVQPPFCTPDEFTYWATDCGNYAGALMYFCSFYVIIAYIMLNLLVAIIVENFSLFYSTEEDQLLSYNDLRHFQIIWNMVDDKRETFRRPAGKGSQRDSVGISLGLRPEKEVTLKLPKGQYITNS

SEQ ID NO: 25373 - protein, 890 aa, Homo sapiens
MSPVVKDPDCFTPMICHCKVACTNNTLSLMFGCKKYRYQDEDAPHDHSLPRLTHEVRGPELVHVSEKNLSQIENVHGYVLQSHISPLKASPAPIIVNTDTLDTIPYVNGTEIEYEFEEITLERGNSGLGFSIAGGTDNPHIGDDPGIFITKIIPGGAAAEDGRLRVNDCILRVNEVDVSEVSHSKAVEALKEAGSIVRLYVRRRRPILETVVEIKLFKGPKGLGFSIAGGVGNQHIPGDNSIYVTKIIDGGAAQKDGRLQVGDRLLMVNNYSLEEVTHEEAVAILKNTSEVVYLKVGKPTTIYMTDPYGPPDITHSYSPPMENHLLSGNNGTLEYKTSLPPISPGRYSPIPKHMLVDDDYTRPPEPVYSTVNKLCDKPASPRHYSPVECDKSFLLSAPYSHYHLGLLPDSEMTSHSQHSTATRQPSMTLQRAVSLEGEPRKVVLHKGSTGLGFNIVGGEDGEGIFVSFILAGGPADLSGELQRGDQILSVNGIDLRGASHEQAAAALKGAGQTVTIIAQYQPEDYARFEAKIHDLREQMMNHSMSSGSGSLRTNQKRSLYVRAMFDYDKSKDSGLPSQGLSFKYGDILHVINASDDEWWQARRVMLEGDSEEMGVIPSKRRVERKERARLKTVKFNAKPGVIDSKGSFNDKRKKSFIFSRKFPFYKNKEQSEQETSDPERGQEDLILSYEPVTRQEINYTRPVIILGPMKDRINDDLISEFPDKFGSCVPHTTRPKRDYEVDGRDYHFVISREQMEKDIQEHKFIEAGQYNDNLYGTSVQSVRFVAERGKHCILDVSGNAIKRLQVAQLYPIAIFIKPRSLEPLMEMNKRLTEEQAKKTYDRAIKLEQEFGEYFTAIVQGDTLEDIYNQCKLVIEEQSGPFIWIPSKEKL

SEQ ID NO: 25374 - protein, 385 aa, Homo sapiens
KGDPGFQGMPGIGGSPGITGSKGDMGPPGVPGFQGPKGLPGLQGIKGDQGDQGVPGAKGLPGPPGPPGPYDIIKGEPGLPGPEGPPGLKGLQGLPGPKGQQGVTGLVGIPGPPGIPGFDGAPGQKGEMGPAGPTGPRGFPGPPGPDGLPGSMGPPGTPSVDHGFLVTRHSQTIDDPQCPSGTKILYHGYSLLYVQGNERAHGQDLGTAGSCLRKFSTMPFLFCNINNVCNFASRNDYSYWLSTPEPMPMSMAPITGENIRPFISRCAVCEAPAMVMAVHSQTIQIPPCPSGWSSLWIGYSFVMHTSAGAEGSGQALASPGSCLEEFRSAPFIECHGRGTCNYYANAYSFWLATIERSEMKPTPSTLKAGELRTHVSRCQVCMRRT

SEQ ID NO: 25375 - protein, 1486 aa, Homo sapiens
MERSAPRVGVRASGRHHLHLPAILDKMPAPGALILLAAVSASGCLASPAHPDGFALGRAPLAPPYAVVLISCSGLLAFIFLLLTCLCCKRGDVGFKEFENPEGEDCSGEYTPPAEETSSSQSLPDVYILPLAEVSLPMPAPQPSHSDMTTPLGLSRQHLSYLQEIGSGWFGKVILGEIFSDYTPAQVVVKELRASAGPLEQRKFISEAQPYRSLQHPNVLQCLGLCVETLPFLLIMEFCQLGDLKRYLRAQRPPEGLSPELPPRDLRTLQRMGLEIARGLAHLHSHNYVHSDLALRNCLLTSDLTVRIGDYGLAHSNYKEDYYLTPERLWIPLRWAAPELLGELHGTFMVVDQSRESNIWSLGVTLWELFEFGAQPYRHLSDEEVLAFVVRQQHVKLARPRLKLPYADYWYDILQSCWRPPAQRPSASDLQLQLTYLLSERPPRPPPPPPPPRDGPFPWPWPPAHSAPRPGTLSSPFPLLDGFPGADPDDVLTVTESSRGLNLECLWEKARRGAGRGGGAPAWQPASAPPAPHANPSNPFYEALSTPSVLPVISARSPSVSSEYYIRLEEHGSPPEPLFPNDWDPLDPGVPAPQAPQAPSEVPQLVSETWASPLFPAPRPFPAQSSASGSFLLSGWDPEGRGAGETLAGDPAEVLGERGTAPWVEEEEEEEEGSSPGEDSSSLGGGPSRRGPLPCPLCSREGACSCLPLERGDAVAGWGGHPALGCPHPPEDDSSLRAERGSLADLPMAPPASAPPEFLDPLMGAAAPQYPGRGPPPAPPPPPPPPRAPADPAASPDPPSAVASPGSGLSSPGPKPGDSGYETETPFSPEGAFPGGGAAEEEGVPRPRAPPEPPDPGAPRPPPDPGPLPLPGPREKPTFVVQVSTEQLLMSLREDVTRNLLGEKGATARETGPRKAGRGPGNREKVPGLNRDPTVLGNGKQAPSLSLPVNGVTVLENGDQRAPGIEEKAAENGALGSPEREEKVLENGELTPPRREEKALENGELRSPEAGEKVLVNGGLTPPKSEDKVSENGGLRFPRNTERPPETGPWRAPGPWEKTPESWGPAPTIGEPAPETSLERAPAPSAVVSSRNGGETAPGPLGPAPKNGTLEPGTERRAPETGGAPRAPGAGRLDLGSGGRAPVGTGTAPGGGPGSGVDAKAGWVDNTRPQPPPPPLPPPPEAQPRRLEPAPPRARPEVAPEGEPGAPDSRAGGDTALSGDGDPPKPERKGPEMPRLFLDLGPPQGNSEQIKARLSRLSLALPPLTLTPFPGPGPRRPPWEGADAGAAGGEAGGAGAPGPAEEDGEDEDEDEEEDEEAAAPGAAAGPRGPGRARAAPVPVVVSSADADAARPLRGLLKSPRGADEPEDSELERKRKMVSFHGDVTVYLFDQETPTNELSVQAPPEGDTDPSTPPAPPTPPHPATPGDGFPSNDSGFGGSFEWAEDFPLLPPPGPPLCFSRFSVSPALETPGPPARAPDARPAGPVEN

SEQ ID NO: 25376 - protein, 1316 aa, Homo sapiens
LDGNSWLLCYGFLYLALYAQVSQSKPCERTGSCFSGRCVNSTCLCDPGWVGDQCQHCQGRFKLTEPSGYLTDGPINYKYKTKCTWLIEGYPNAVLRLRFNHFATECSWDHMYVYDGDSIYAPLIAVLSGLIVPEIRGNETVPEVVTTSGYALLHFFSDAAYNLTGFNIFYSINSCPNNCSGHGKCTTSVSVPSQVYCECDKYWKGEACDIPYCKANCGSPDHGYCDLTGEKLCVCNDSWQGPDCSLNVPSTESYWILPNVKPFSPSVGRASHKAVLHGKFMWVIGGYTFNYSSFQMVLNYNLESSIWNVGTPSRGPLQRYGHSLALYQENIFMYGGRIETNDGNVTDELWVFNIHSQSWSTKTPTVLGHGQQYAVEGHSAHIMELDSRDVVMIIIFGYSAIYGYTSSIQEYHISSNTWLVPETKGAIVQGGYGHTSVYDEITKSIYVHGGYKALPGNKYGLVDDLYKYEVNTKTWTILKESGFARYLHSAVLINGAMLIFGGNTHNDTSLSNGAKCFSADFLAYDIACDEWKILPKPNLHRDVNRFGHSAVVINGSMYIFGGFSSVLLNDILVYKPPNCKAFRDEELCKNAGPGIKCVWNKNHCESWESGNTNNILRAKCPPKTAASDDRCYRYADCASCTANTNGCQWCDDKKCISANSNCSMSVKNYTKCHVRNEQICNKLTSCKSCSLNLNCQWDQRQQECQALPAHLCGEGWSHIGDACLRVNSSRENYDNAKLYCYNLSGNLASLTTSKEVEFVLDEIQKYTQQKVSPWVGLRKINISYWGWEDMSPFTNTTLQWLPGEPNDSGFCAYLERAAVAGLKANPCTSMANGLVCEKPVVSPNQNARPCKKPCSLRTSCSNCTSNGMECMWCSSTKRCVDSNAYIISFPYGQCLEWQTATCSPQNCSGLRTCGQCLEQPGCGWCNDPSNTGRGHCIEGSSRGPMKLIGMHHSEMVLDTNLCPKEKNYEWSFIQCPACQCNGHSTCINNNVCEQCKNLTTGKQCQDCMPGYYGDPTNGGQCTACTCSGHANICHLHTGKCFCTTKGIKGDQCQLCDSENRYVGNPLRGTCYYSLLIDYQFTFSLLQEDDRHHTAINFIANPEQSNKNLDISINASNNFNLNITWSVGSTAGTISGEETSIVSKNNIKEYRDSFSYEKFNFRSNPNITFYVYVSNFSWPIKIQIAFSQHNTIMDLVQFFVTFFSCFLSLLLVAAVVWKIKQTCWASRRREQLLRERQQMASRPFASVDVALEVGAEQTEFLRGPLEGAPKPIAIEPCAGNRAAVLTVFLCLPRGSSGAPPPGQSEHSPEPTAQKILL

SEQ ID NO: 25377 - protein, 592 aa, Homo sapiens
MLWFSGVGALAERYCRRSPGITCCVLLLLNCSGVPMSLASSFLTGSVAKCENEGEVLQIPFITDNPCIMCVCLNKEVTCKREKCPVLSRDCALAIKQRGACCEQCKGCTYEGNTYNSSFKWQSPAEPCVLRQCQEGVVTESGVRCVVHCKNPLEHLGMCCPTCPGCVFEGVQYQEGEEFQPEGSKCTKCSCTGGRTQCVREVCPILSCPQHLSHIPPGQCCPKCLGQRKVFDLPFGSCLFRSDVYDNGSSFLYDNCTACTCRDSTVVCKRKCSHPGGCDQGQEGCCEECLLRVPPEDIKVCKFGNKIFQVLVKNDARRTRSFSWTKSVELVLGESRVSLQQHLTVRWNGSRIALPCRAPHFHIDLDGYLLKVTTKAGLEISWDGDSFVEVMAAPHLKGKLCGLCGNYNGHKRDDLIGGDGNFKFDVDDFAESWRVESNEFCNRPQRKPVPELCQGTVKVKLRAHRECQKLKSWEFQTCHSTVDYATFYRSCVTDMCECPVHKNCYCESFLAYTRACQREGIKVHWEPQQNCAATQCKHGAVYDTCGPGCIKTCDNWNEIGPCNKPCVAGCHCPANLVLHKGRCIKPVLCPQR

SEQ ID NO: 25378 - protein, 713 aa, Homo sapiens
MVKLANPLYTEWILEAIQKIKKQKQRPSEERICHAVSTSHGLDKKTVSEQLELSVQDGSVLKVTNKGLASYKDPDNPGRFSSVKPGTFPKSAKGSRGSCNDLRNVDWNKLLRRAIEGLEEPNGSSLKNIEKYLRSQSDLTSTTNNPAFQQRLRLGAKRAVNNGRLLKDGPQYRVNYGSLDGKGAPQYPSAFPSSLPPVSLLPHEKDQPRADPIPICSFCLGTKESNREKKPEELLSCADCGSSGHPSCLKFCPELTTNVKALRWQCIECKTCSACRVQGRNADNMLFCDSCDRGFHMECCDPPLSRMPKDTEIKINIKQESADVNVIGNKDVVTEEDLDVFKQAQELSWEKIECESGVEDCGRYPSVIEFGKYEIQTWYSSPYPQEYARLPKLYLCEFCLKYMKSKNILLRHSKKCGWFHPPANEIYRRKDLSVFEVDGNMSKIYCQNLCLLAKLFLDHKTLYYDVEPFLFYVLTKNDEKGCHLVGYFSKEKLCQQKYNVSCIMIMPQHQRQGFGRFLIDFSYLLSRREGQAGSPEKPLSDLGRLSYLAYWKSVILEYLYHHHERHISIKAISRATGMCPHDIATTLQHLHMIDKRDGRFVIIRREKLILSHMEKLKTCSRANELDPDSLRWTPILISNAAVSEEEREAEKEAERLMEQASCWEKEEQEILSTRANSRQSPAKVQSKNKYLHSPESRPVTGERGQLLELSKES

SEQ ID NO: 25379 - protein, 1204 aa, Homo sapiens
MLTKFETKSARVKGLSFHPKRPWILTSLHNGVIQLWDYRMCTLIDKFDEHDGPVRGIDFHKQQPLFVSGGDDYKIKVWNYKLRRCLFTLLGHLDYIRTTFFHHEYPWILSASDDQTIRVWNWQSRTCVCVLTGHNHYVMCAQFHPTEDLVVSASLDQTVRVWDISGLRKKNLSPGAVESDVRGITGVDLFGTTDAVVKHVLEGHDRGVNWAAFHPTMPLIVSGADDRQVKIWRMNESKAWEVDTCRGHYNNVSCAVFHPRQELILSNSEDKSIRVWDMSKRTGVQTFRRDHDRFWVLAAHPNLNLFAAGHDGGMIVFKLERERPAYAVHGNMLHYVKDRFLRQLDFNSSKDVAVMQLRSGSKFPVFNMSYNPAENAVLLCTRASNLENSTYDLYTIPKDADSQNPDAPEGKRSSGLTAVWVARNRFAVLDRMHSLLIKNLKNEITKKVQVPNCDEIFYAGTGNLLLRDADSITLFDVQQKRTLASVKISKVKYVIWSADMSHVALLAKHAIVICNRKLDALCNIHENIRVKSGAWDESGVFIYTTSNHIKYAVTTGDHGIIRTLDLPIYVTRVKGNNVYCLDRECRPRVLTIDPTEFKFKLALINRKYDEVLHMVRNAKLVGQSIIAYLQKKGYPEVALHFVKDEKTRFSLALECGNIEIALEAAKALDDKNCWEKLGEVALLQGNHQIVEMCYQRTKNFDKLSFLYLITGNLEKLRKMMKIAEIRKDMSGHYQNALYLGDVSERVRILKNCGQKSLAYLTAATHGLDEEAESLKETFDPEKETIPDIDPNAKLLQPPAPIMPLDTNWPLLTVSKGFFEGTIASKGKGGALAADIDIDTVGTEGWGEDAELQLDEDGFVEATEGLGDDALGKGQEEGGGWDVEEDLELPPELDISPGAAGGAEDGFFVPPTKGTSPTQIWCNNSQLPVDHILAGSFETAMRTYARGRTTYQALPCLPSMYGYPNRNWKDAGLKNGVPAVGLKLNDLIQRLQLCYQLTTVGKFEEAVEKFRSILLSVPLLVVDNKQEIAEAQQLITICREYIVGLSVETERKKLPKETLEQQKRICEMAAYFTHSNLQPVHMILVLRTALNLFFKLKNFKTAATFARRLLELGPKPEVAQQTRKILSACEKNPTDAYQLNYDMHNPFDICAASYRPIYRGKPVEKCPLSGACYSPEFKGQICRVTTVTEIGKDVIGLRISPLQFR

SEQ ID NO: 25380 - protein, 753 aa, Homo sapiens
MQKRQGYCSYCRVQYNNLEQDVLQHHPYHCQESSSTQDETHVNTGSSSEVVHLDDAFSEEEEEDEDKVEDEDATEERPSEVSEPIEELHSRPHKSQEGTQEVSVRPSVIQKLEKGQQQPLEFVHKIGASVRKCNLVDIGQATNNRSNLVRPPVICNAPASCLPESSNDRPVTANTTSLPPAAHLDSVSKCDPNKVEKYLEQPDGASRNPVPSSHVETTSFSYQKHKESNRKSLRMNSDKLVLWKDVKSQGKTLSAGLKFHERMGTKGSLRVKSPSKLAVNPNKTDMPSNKGIFEDTIAKNHEEFFSNMDCTQEEKHLVFNKTAFWEQKCSVSSEMKFDCISLQSASDQPQETAQDLSLWKEEQIDQEDNYESRGSEMSFDCSSSFHSLTDQSKVSAKEVNLSKEVRTDVQYKNNKSYVSKISSDCDDILHLVTNQSQMIVKEISLQNARHISLVDQSYESSSSETNFDCDASPQSTSDYPQQSVTEVNLPKEVHIGLVDKNYGSSSSEVSADSVFPLQSVVDRPPVAVTETKLRKKAHTSLVDNYGSSCSETSFDCDVSLESVVDHPQLTVKGRNLKGRQVHLKHKKRKPSSAKAHLDCDVSLGTVADESQRAVEKINLLKEKNADLMDMNCESHGPEMGFQADAQLADQSQVAEIERQKVDVDLENKSVQSSRSSLSSDSPASLYHSAHDEPQEALDEVNLKELNIDMEVRSYDCSSSELTFDSDPPLLSVTEQSHLDAEGKERHIDLEDES

SEQ ID NO: 25381 - protein, 2212 aa, Homo sapiens
MVANFFKSLILPYIHKLCKGMFTKKLGNTNKNKEYRQQKKDQDFPTAGQTKSPKFSYTFKSTVKKIAKCSSTHNLSTEEDEASKEFSLSPTFSYRVAIANGLQKNAKVTNSDNEDLLQELSSIESSYSESLNELRSSTENQAQSTHTMPVRRNRKSSSSLAPSEGSSDGERTLHGLKLGALRKLRKWKKSQECVSSDSELSTMKKSWGIRSKSLDRTVRNPKTNALEPGFSSSGCISQTHDVMEMIFKELQGISQIETELSELRGHVNALKHSIDEISSSVEVVQSEIEQLRTGFVQSRRETRDIHDYIKHLGHMGSKASLRFLNVTEERFEYVESVVYQILIDKMGFSDAPNAIKIEFAQRIGHQRDCPNAKPRPILVYFETPQQRDSVLKKSYKLKGTGIGISTDILTHDIRERKEKGIPSSQTYESMAIKLSTPEPKIKKNNWQSPDDSDEDLESDLNRNSYAVLSKSELLTKGSTSKPSSKSHSARSKNKTANSSRISNKSDYDKISSQLPESDILEKQTTTHYADATPLWHSQSDFFTAKLSRSESDFSKLCQSYSEDFSENQFFTRTNGSSLLSSSDRELWQRKQEGTATLYDSPKDQHLNGGVQGIQGQTETENTETVDSGMSNGMVCASGDRSHYSDSQLSLHEDLSPWKEWNQGADLGLDSSTQEGFDYETNSLFDQQLDVYNKDLEYLGKCHSDLQDDSESYDLTQDDNSSPCPGLDNEPQGQWVGQYDSYQGANSNELYQNQNQLSMMYRSQSELQSDDSEDAPPKSWHSRLSIDLSDKTFSFPKFGSTLQRAKSALEVVWNKSTQSLSGYEDSGSSLMGRFRTLSQSTANESSTTLDSDVYTEPYYYKAEDEEDYTEPVADNETDYVEVMEQVLAKLENRTSITETDEQMQAYDHLSYETPYETPQDEGYDGPADDMVSEEGLEPLNETSAEMEIREDENQNIPEQPVEITKPKRIRPSFKEAALRAYKKQMAELEEKILAGDSSSVDEKARIVSGNDLDASKFSALQVCGGAGGGLYGIDSMPDLRRKKTLPIVRDVTLAARKSGLSLAMVIRTSLNNEELKMHVFKKTLQALIYPMSSTIPHNFEVWTATTPTYCYECEGLLWGIARQGMKCLECGVKCHEKCQDLLNADCLQRAAEKSSKHGAEDKTQTIITAMKERMKIREKNRPEVFEVIQEMFQISKEDFVQFTKAAKQSVLDGTSKWSAKITITVVSAQGLQAKDKTGSSDPYVTVQVGKNKRRTKTIFGNLNPVWDEKFYFECHNSTDRIKVRVWDEDDDIKSRVKQHFKKESDDFLGQTIVEVRTLSGEMDVWYNLEKRTDKSAVSGAIRLKINVEIKGEEKVAPYHIQYTCLHENLFHYLTEVKSNGGVKIPEVKGDEAWKVFFDDASQEIVDEFAMRYGIESIYQAMTHFSCLSSKYMCPGVPAVMSTLLANINAFYAHTTVSTNIQVSASDRFAATNFGREKFIKLLDQLHNSLRIDLSKYRENFPASNTERLQDLKSTVDLLTSITFFRMKVLELQSPPKASMVVKDCVRACLDSTYKYIFDNCHELYSQLTDPSKKQDIPREDQGPTTKNLDFWPQLITLMVTIIDEDKTAYTPVLNQFPQELNMGKISAEIMWTLFALDMKYALEEHENQRLCKSTDYMNLHFKVKWFYNEYVRELPAFKDAVPEYSLWFEPFVMQWLDENEDVSMEFLHGALGRDKKDGFQQTSEHALFSCSVVDVFAQLNQSFEIIKKLECPNPEALSHLMRRFAKTINKVLLQYAAIVSSDFSSHCDKENVPCILMNNIQQLRVQLEKMFESMGGKELDSEASTILKELQVKLSGVLDELSVTYGESFQVIIEECIKQMSFELNQMRANGNTTSNKNSAAMDAEIVLRSLMDFLDKTLSLSAKICEKTVLKRVLKELWKLVLNKIEKQIVLPPLTDQTGPQMIFIAAKDLGQLSKLKEHMIREDARGLTPRQCAIMEVVLATIKQYFHAGGNGLKKNFLEKSPDLQSLRYALSLYTQTTDALIKKFIDTQTSQSRSSKDAVGQISVHVDITATPGTGDHKVTVKVIAINDLNWQTTAMFRPFVEVCILGPNLGDKKRKQGTKTKSNTWSPKYNETFQFILGKENRPGAYELHLSVKDYCFAREDRIIGMTVIQLQNIAEKGSYGAWYPLLKNISMDETGLTILRILSQRTSDDVAKEFVRLKSETRSTEESA

SEQ ID NO: 25382 - protein, 1132 aa, Homo sapiens
MELFQAKDHYILQQGERALWCSRRDGGLQLRPATDLLLAWNPICLGLVEGVIGKIQLHSDLPWWLILIRQKALVGKLPGDHEVCKVTKIAVLSLSEMEPQDLELELCKKHHFGINKPEKIIPSPDDSKFLLKTFTHIKSNVSAPNKKKVKESKEKEKLERRLLEELLKMFMDSESFYYSLTYDLTNSVQRQSTGERDGRPLWQKVDDRFFWNKYMIQDLTEIGTPDVDFWIIPMIQGFVQIEELVVNYTESSDDEKSSPETPPQESTCVDDIHPRFLVALISRRSRHRAGMRYKRRGVDKNGNVANYVETEQLIHVHNHTLSFVQTRGSVPVFWSQVGYRYNPRPRLDRSEKETVAYFCAHFEEQLNIYKKQVIINLVDQAGREKIIGDAYLKQVLLFNNSHLTYVSFDFHEHCRGMKFENVQTLTDAIYDIILDMKWCWVDEAGVICKQEGIFRVNCMDCLDRTNVVQAAIARVVMEQQLKKLGVMPPEQPLPVKCNRIYQIMWANNGDSISRQYAGTAALKGDFTRTGERKLAGVMKDGVNSANRYYLNRFKDAYRQAVIDLMQGIPVTEDLYSIFTKEKEHEALHKENQRSHQELISQLLQSYMKLLLPDDEKFHGGWALIDCDPSLIDATHRDVDVLLLLSNSAYYVAYYDDEVDKVNQYQRLSLENLEKIEIGPEPTLFGKPKFSCMRLHYRYKEASGYFHTLRAVMRNPEEDGKDTLQCIAEMLQITKQAMGSDLPIIEKKLERKSSKPHEDIIGIRSQNQGSLAQGKNFLMSKFSSLNQKVKQTKSNVNIGNLRKLGNFTKPEMKVNFLKPNLKVNLWKSDSSLETMENTGVMDKVQAESDGDMSSDNDSYHSDEFLTNSKSDEDRQLANSLESVGPIDYVLPSCGIIASAPRLGSRSQSLSSTDSSVHAPSEITVAHGSGLGKGQESPLKKSPSAGDVHILTGFAKPMDIYCHRFVQDAQNKVTHLSETRSVSQQASQERNQMTNQVSNETQSESTEQTPSRPSQLDVSLSATGPQFLSVEPAHSVASQKTPTSASSMLELETGLHVTPSPSESSSSRAVSPFAKIRSSMVQVASITQAGLTHGINFAVSKVQKSPPEPEIINQVQQNELKKMFIQCQTRIIQI

SEQ ID NO: 25383 - protein, 281 aa, Homo sapiens
MNSSPAGTPSPQPSRANGNINLGPSANPNAQPTDFDFLKVIGKGNYGKVLLAKRKSDGAFYAVKVLQKKSILKKKESHIMAERSVLLKNVRHPFLVGLRYSFQTPEKLYFVLDYVNGGELFFHLQRERRFLEPRARFYAAEVASAIGYLHSLNIIYRDLKPENILLDCQGHVVLTDFGLCKEGVEPEDTTSTFCGTPEYLAPEVLRKEPYDRAVDWWCLGAVLYEMLHGLPPFYSQDVSQMYENILHQPLQIPGGRTVAACDLLQSLLHKDQRQRLGSKAD

SEQ ID NO: 25384 - protein, 150 aa, Homo sapiens
MPNWGGGAKCGACEKTVYHAEEIQCNGRSFHKTCFHCSPQSRHAQLPPATLPNSLRSLESPRSALDVASQSMLLRRLWEVASLGTRPVSAVPSVGRVWSPQMSLTKMGNFIAKFAMPKILAPRVLGLEALHNKWKRKNEEVRRFSDFLRA

SEQ ID NO: 25385 - protein, 176 aa, Homo sapiens
HGVKGQKGERGLPGLQGVIGFPGMQGPEGPQGPPGQKGDTGEPGLPGTKGTRGPPGASGYPGNPGLPGIPGQDGPPGPPGIPGCNGTKGERGPLGPPGLPGFAGNPGPPGLPGMKGDPGEILGHVPGMLLKGERGFPGIPGTPGPPGLPGLQGPVGPPGFTGPPVSFGGCLSEAII

SEQ ID NO: 25386 - protein, 1099 aa, Homo sapiens
MPVRGDRGFPPRRELSGWLRAPGMEELIWEQYTVTLQKDSKRGFGIAVSGGRDNPHFENGETSIVISDVLPGGPADGLLQENDRVVMVNGTPMEDVLHSFAVQQLRKSGKVAAIVVKRPRKVQVAALQASPPLDQDDRAFEVMDEFDGRSFRSGYSERSRLNSHGGRSRSWEDSPERGRPHERARSRERDLSRDRSRGRSLERGLDQDHARTRDRSRGRSLERGLDHDFGPSRDRDRDRSRGRSIDQDYERAYHRAYDPDYERAYSPEYRRGARHDARSRGPRSRSREHPHSRSPSPEPRGRPGPIGVLLMKSRANEEYGLRLGSQIFVKEMTRTGLATKDGNLHEGDIILKINGTVTENMSLTDARKLIEKSRGKLQLVVLRDSQQTLINIPSLNDSDSEIEDISEIESNRSFSPEERRHQYSDYDYHSSSEKLKERPSSREDTPSRLSRMGATPTPFKSTGDIAGTVVPETNKEPRYQEDPPAPQPKAAPRTFLRPSPEDEAIYGPNTKMVRFKKGDSVGLRLAGGNDVGIFVAGIQEGTSAEQEGLQEGDQILKVNTQDFRGLVREDAVLYLLEIPKGEMVTILAQSRADVYRDILACGRGDSFFIRSHFECEKETPQSLAFTRGEVFRVVDTLYDGKLGNWLAVRIGNELEKGLIPNKSRAEQMASVQNAQRDNAGDRADFWRMRGQRSGVKKNLRKSREDLTAVVSVSTKFPAYERVLLREAGFKRPVVLFGPIADIAMEKLANELPDWFQTAKTEPKDAGSEKSTGVVRLNTVRQIIEQDKHALLDVTPKAVDLLNYTQWFPIVIFFNPDSRQGVKTMRQRLNPTSNKSSRKLFDQANKLKKTCAHLFTATINLNSANDSWFGSLKDTIQHQQGEAVWVSEGKMEGMDDDPEDRMSYLTAMGADYLSCDSRLISDFEDTDGEGGAYTDNELDEPAEEPLVSSITRSSEPVQHEEAKTQNKEESYDFSKSYEYKSNPSAVAGNETPGASTKGYPPPVAAKPTFGRSILKPSTPIPPQEGEEVGESSEEQDNAPKSVLGKVKIFEKMDHKARLQRMQELQEAQNARIEIAQKHPDIYAVPIKTHKPDPGTPQHTR

SEQ ID NO: 25387 - protein, 791 aa, Homo sapiens
MLCEEAAQKRKGKEPGMALPQGRLTFRDVAIEFSLAEWKCLNPSQRALYREVMLENYRNLEAVDISSKRMMKEVLSTGQGNTEVIHTGTLQRYQSYHIGDFCFQEIEKEIHDIEFQCQEDERNGHEAPMTKIKKLTGSTDQHDHRHAGNKPIKDQLGSSFYSHLPELHIIQIKGKIGNQFEKSTSDAPSVSTSQRISPRPQIHISNNYGNNSPNSSLLPQKQEVYMREKSFQCNESGKAFNCSSLLRKHQIPHLGDKQYKCDVCGKLFNHKQYLTCHCRCHTGEKPYKCNECGKSFSQVSSLTCHRRLHTAVKSHKCNECGKIFGQNSALVIHKAIHTGEKPYKCNECDKAFNQQSNLARHRRIHTGEKPYKCEECDKVFSRKSTLESHKRIHTGEKPYKCKVCDTAFTWNSQLARHKRIHTGEKTYKCNECGKTFSHKSSLVCHHRLHGGEKSYKCKVCDKAFAWNSHLVRHTRIHSGGKPYKCNECGKTFGQNSDLLIHKSIHTGEQPYKYEECEKVFSCGSTLETHKIIHTGEKPYKCKVCDKAFACHSYLAKHTRIHSGEKPYKCNECSKTFRLRSYLASHRRVHSGEKPYKCNECSKTFSQRSYLHCHRRLHSGEKPYKCNECGKTFSHKPSLVHHRRLHTGEKSYKCTVCDKAFVRNSYLARHTRIHTAEKPYKCNECGKAFNQQSQLSLHHRIHAGEKLYKCETCDKVFSRKSHLKRHRRIHPGKKPYKCKVCDKTFGSDSHLKQHTGLHTGEKPYKCNECGKAFSKQSTLIHHQAVHGVGKLD

SEQ ID NO: 25388 - protein, 293 aa, Homo sapiens
SLEALDPNVDEHLSTQILAPSVHSDNSQERIQARRLRIAARLEARRREALGEYLDGKKESEEDQSKSYKQKEESRLKLAKLLLCGTELVTNIQVAIDIREIHRRVEEEEIKRQRIEKLENEVKTSQDKFDEITSKWEEGKQKRIPQELWEMLNTQQLHCAGLLEDKNKLISELQQELKTKDDQYVKDLKKQSDDICLLLERMEEQVKNVMKTFREELYNIEKAFEVERQELLASNKKKWEQALQAHNAKELEYLNNRMKKVEDYEKQLNRQRIWDCEEYNMIKIKLEQDVQPA

SEQ ID NO: 25389 - protein, 757 aa, Homo sapiens
MPINGVNLAWKYRYQDEDTPPLEHSPAHLPNQVNAPELVHVAERNLSHLEAGHGVVGHAHLSPFKANSPPVIVNTDTLEAPGYELQVNGTEGEMEYEEITLERGNSGLGFSIAGGTDNPHIGDDPSIFITKIIPGGAAAQDGRLRVNDSILFVNEVDVREVTHSAAVEALKEAGSIVRLYVMRRKPPAEKVMEIKLIKGPKGLGFSIAGGVGNQHIPGDNSIYVTKIIEGGAAHKDGRLQIGDKILAVNSVGLEDVMHEDAVAALKNTYDVVYLKVAKPSNAYLSDSYAPPDITTSYSQHLDNEISHSSYLGTDYPTAMTPTSPRRYSPVAKDLLGEEDIPREPRRIVIHRGSTGLGFNIVGGEDGEGIFISFILAGGPADLSGELRKGDQILSVNGVDLRNASHEQAAIALKNAGQTVTIIAQYKPEEYSRFEAKIHDLREQLMNSSLGSGTASLRSNPKRGFYIRALFDYDKTKDCGFLSQALSFRFGDVLHVIDASDEEWWQARRVHSDSETDDIGFIPSKRRVERREWSRLKAKDWGSSSGSQGREDSVLSYETVTQMEVHYARPIIILGPTKDRANDDLLSEFPDKFGSCVPHTTRPKREYEIDGRDYHFVSSREKMEKDIQAHKFIEAGQYNSHLYGTSVQSVREVAEQGKHCILDVSANAVRRLQAAHLHPIAIFIRPRSLENVLEINKRITEEQARKAFDRATKLEQEFTECFSAIVEGDSFEEIYHKVKRVIEDLSGPYIWVPARERL

SEQ ID NO: 25390 - protein, 213 aa, Homo sapiens
MEIVILPTETTINIQKMEQENTAQGSEKPSVQSVKPWSDQEIRSFLQEWEFLEREVYRVKKKYHIVSKAIAQRLKQRGINKSWKECLQMLISLQDLYFTIQEANQRPRCQPLPCPYGEALHRILGYRWKISVFSGPPCADVVNLAPPEHPPQAYGVPIVFQEPMWAPTPVIYVENPQVPGWEPWNMNGHVPYMYPALPPAAPGPLTQWAISTD

SEQ ID NO: 25391 - protein, 375 aa, Homo sapiens
MEEPEEPADSGQSLVPVYIYSPEYVSMCDSLAKIPKRASMVHSLIEAYALHKQMRIVKPKVASMEEMATFHTDAYLQHLQKVSQEGDDDHPDSIEYGLGYDCPATEGIFDYAAAIGGATITAAQCLIDGMCKVAINWSGGWHHAKKDEASGFCYLNDAVLGILRLRRKFERILYVDLDLHHGDGVEDAFSFTSKVMTVSLHKFSPGFFPGTGDVSDVGLGKGRYYSVNVPIQDGIQDEKYYQICESVLKEVYQAFNPKAVVLQLGADTIAGDPMCSFNMTPVGIGKCLKYILQWQLATLILGGGGYNLANTARCWTYLTGVILGKTLSSEIPDHEFFTAYGPDYVLEITPSCRPDRNEPHRIQQILNYIKGSKSW

SEQ ID NO: 25392 - protein, 72 aa, Homo sapiens
MNGVLIPHTPIAVDFWSLRRAGTARLFFLSHMHSDHTVGLSSTWARPLYCSPITAHLLHRHLQVIFDTHHPC

SEQ ID NO: 25393 - protein, 38 aa, Homo sapiens
GYEINKVRAKRSSKMYLKTRSQMPYKGLKFPQIRPTPS

SEQ ID NO: 25394 - protein, 1517 aa, Homo sapiens
MEAATTLHPGPRPALPLGGPGPLGEFLPPPECPVFEPSWEEFADPFAFIHKIRPIAEQTGICKVRPPPDWQPPFACDVDKLHFTPRIQRLNELEAQTRVKLNFLDQIAKYWELQGSTLKIPHVERKILDLFQLNKLVAEEGGFAVVCKDRKWTKIATKMGFAPGKAVGSHIRGHYERILNPYNLFLSGDSLRCLQKPNLTTDTKDKEYKPHDIPQRQSVQPSETCPPARRAKRMRAEAMNIKIEPEETTEARTHNLRRRMGCPTPKCENEKEMKSSIKQEPIERKDYIVENEKEKPKSRSKKATNAVDLYVCLLCGSGNDEDRLLLCDGCDDSYHTFCLIPPLHDVPKGDWRCPKCLAQECSKPQEAFGFEQAARDYTLRTFGEMADAFKSDYFNMPVHMVPTELVEKEFWRLVSTIEEDVTVEYGADIASKEFGSGFPVRDGKIKLSPEEEEYLDSGWNLNNMPVMEQSVLAHITADICGMKLPWLYVGMCFSSFCWHIEDHWSYSINYLHWGEPKTWYGVPGYAAEQLENVMKKLAPELFVSQPDLLHQLVTIMNPNTLMTHEVPVYRTNQCAGEFVITFPRAYHSGFNQGFNFAEAVNFCTVDWLPLGRQCVEHYRLLHRYCVFSHDEMICKMASKADVLDVVVASTVQKDMAIMIEDEKALRETVRKLGVIDSERMDFELLPDDERQCVKCKTTCFMSAISCSCKPGLLVCLHHVKELCSCPPYKYKLRYRYTLDDLYPMMNALKLRAESYNEWALNVNEALEAKINKKKSLVSFKALIEESEMKKFPDNDLLRHLRLVTQDAEKCASVAQQLLNGKRQTRYRSGGGKSQNQLTVNELRQFVTQLYALPCVLSQTPLLKDLLNRVEDFQQHSQKLLSEETPSAAELQDLLDVSFEFDVELPQLAEMRIRLEQARWLEEVQQACLDPSSLTLDDMRRLIDLGVGLAPYSAVEKAMARLQELLTVSEHWDDKAKSLLKARPRHSLNSLATAVKEIEEIPAYLPNGAALKDSVQRARDWLQDVEGLQAGGRVPVLDTLIELVTRGRSIPVHLNSLPRLETLVAEVQAWKECAVNTFLTENSPYSLLEVLCPRCDIGLLGLKRKQRKLKEPLPNGKKKSTKLESLSDLERALTESKETASAMATLGEARLREMEALQSLRLANEGKLLSPLQDVDIKICLCQKAPAAPMIQCELCRDAFHTSCVAVPSISQGLRIWLCPHCRRSEKPPLEKILPLLASLQRIRVRLPEGDALRYMIERTVNWQHRAQQLLSSGNLKFVQDRVGSGLLYSRWQASAGQVSDTNKVSQPPGTTSFSLPDDWDNRTSYLHSPFSTGRSCIPLHGVSPEVNELLMEAQLLQVSLPEIQELYQTLLAKPSPAQQTDRSSPVRPSSEKNDCCRGKRDGINSLERKLKRRLEREGLSSERWERVKKMRTPKKKKIKLSHPKDMNNFKLERERSYELVRSAETHSLPSDTSYSEQEDSEDEDAICPAVSCLQPEGDEVSEVWAIEDVLSLNSETL

SEQ ID NO: 25395 - protein, 821 aa, Homo sapiens
MEGHAEMEMLRTLKGPSTGEVSMHLVAGDSPGSGPHLPATAFIIPASSATLGLPSSALDVSCFPREPIHVGAPEQVAGCEPVSATVLPQLSAGPASSSTSTVRLLEWTEAAAPPPGGGLRFRISEYKPLNMAGVEQPPSPELRQEGVTEYEDGGAPAGDGEAGPQQAEDHPQNPPEDPNQDPPEDDSTCQCQACGPHQAAGPDLGSSNDGCPQLFQERSVIVENSSGSTSASELLKPMKKRKRREYQSPSEEESEPEAMEKQEEGKDPEGQPTASTPESEEWSSSQPATGEKKECWSWESYLEEQKAITAPVSLFQDSQAVTHNKNGFKLGMKLEGIDPQHPSMYFILTVAEVCGYRLRLHFDGYSECHDFWVNANSPDIHPAGWFEKTGHKLQPPKGYKEEEFSWSQYLRSTRAQAAPKHLFVSQSHSPPPLGFQVGMKLEAVDRMNPSLVCVASVTDVVDSRFLVHFDNWDDTYDYWCDPSSPYIHPVGWCQKQGKPLTPPQDYPDPDNFCWEKYLEETGASAVPTWAFKVRPPHSFLVNMKLEAVDRRNPALIRVASVEDVEDHRIKIHFDGWSHGYDFWIDADHPDIHPAGWCSKTGHPLQPPLGPREPSSASPGGCPPLSYRSLPHTRTSKYSFHHRKCPTPGCDGSGHVTGKFTAHHCLSGCPLAERNQSRLKAELSDSEASARKKNLSGFSPRKKPRHHGRIGRPPKYRKIPQEDFQTLTPDVVHQSLFMSALSAHPDRSLSVCWEQHCKLLPGVAGISASTVAKWTIDEMIDGEAFLLLTQADIVKIMSVKLGPALKIYNAILMFKNADDTLK

SEQ ID NO: 25396 - protein, 312 aa, Homo sapiens
MEEPEEPADSGQSLVPVYIYSPEYVSMCDSLAKIPKRASMVHSLIEAYALHKQMRDEASGFCYLNDAVLGILRLRRKFERILYVDLDLHHGDGVEDAFSFTSKVMTVSLHKFSPGFFPGTGDVSDVGLGKGRYYSVNVPIQDGIQDEKYYQICESVLKEVYQAFNPKAVVLQLGADTIAGDPMCSFNMTPVGIGKCLKYILQWQLATLILGGGGYNLANTARCWTYLTGVILGKTLSSEIPDHEFFTAYGPDYVLEITPSCRPDRNEPHRIQQILNYIKEKWPVGFGAQCFYLGKCGKAKTTEGQRNLKHVV

SEQ ID NO: 25397 - protein, 645 aa, Homo sapiens
MYFPSWLSQLYRGLSRPIRRTTQPIWGSLYRSLLQSSQRRIPEFSSFVVRTNTCGELRSSHLGQEVTLCGWIQYRRQNTFLVLRDFDGLVQVIIPQDESAASVKKILCEAPVESVVQVSGTVISRPAGQENPKMPTGEIEIKVKTAELLNACKKLPFEIKNFVKKTEALRLQYRYLDLRSFQMQYNLRLRSQMVMKMREYLCNLHGFVDIETPTLFKRTPGGAKEFLVPSREPGKFYSLPQSPQQFKQLLMVGGLDRYFQVARCYRDEGSRPDRQPEFTQIDIEMSFVDQTGIQSLIEGLLQYSWPNDKDPVVVPFPTMTFAEVLATYGTDKPDTRFGMKIIDISDVFRNTEIGFLQDALSKPHGTVKAICIPEGAKYLKRKDIESIRNFAADHFNQEILPVFLNANRNWNSPVANFIMESQRLELIRLMETQEEDVVLLTAGEHNKACSLLGKLRLECADLLETRGVVLRDPTLFSFLWVVDFPLFLPKEENPRELESAHHPFTAPHPSDIHLLYTEPKKARSQHYDLVLNGNEIGGGSIRIHNAELQRYILATLLKEDVKMLSHLLQALDYGAPPHGGIALGLDRLICLVTGSPSIRDVIAFPKSFRGHDLMSNTPDSVPPEELKPYHIRVSKPTDSKAERAH

SEQ ID NO: 25398 - protein, 991 aa, Homo sapiens
MVKLANPLYTEWILEAIQKIKKQKQRPSEERICHAVSTSHGLDKKTVSEQLELSVQDGSVLKVTNKGLASYKDPDNPGRFSSVKPGTFPKSAKGSRGSCNDLRNVDWNKLLRRAIEGLEEPNGSSLKNIEKYLRSQSDLTSTTNNPAFQQRLRLGAKRAVNNGRLLKDGPQYRVNYGSLDGKGAPQYPSAFPSSLPPVSLLPHEKDQPRADPIPICSFCLGTKESNREKKPEELLSCADCGSSGHPSCLKFCPELTTNVKALRWQCIECKTCSACRVQGRNADNMLFCDSCDRGFHMECCDPPLSRMPKDTEIKINIKQESADVNVIGNKDVVTEEDLDVFKQAQELSWEKIECESGVEDCGRYPSVIEFGKYEIQTWYSSPYPQEYARLPKLYLCEFCLKYMKSKNILLRHSKKCGWFHPPANEIYRRKDLSVFEVDGNMSKIYCQNLCLLAKLFLDHKTLYYDVEPFLFYVLTKNDEKGCHLVGYFSKEKLCQQKYNVSCIMIMPQHQRQGFGRFLIDFSYLLSRREGQAGSPEKPLSDLGRLSYLAYWKSVILEYLYHHHERHISIKAISRATGMCPHDIATTLQHLHMIDKRDGRFVIIRREKLILSHMEKLKTCSRANELDPDSLRWTPILISNAAVSEEEREAEKEAERLMEQASCWEKEEQEILSTRANSRQSPAKVQSKNKYLHSPESRPVTGERGQLLELSKESSEEEEEEEDEEEEEEEEEEEEDEEEEEEEEEEEEEENIQSSPPRLTKPQSVAIKRKRPFVLKKKRGRKRRRINSSVTTETISETTEVLNEPFDNSDEERPMPQLEPTCEIEVEEDGRKPVLRKAFQHQPGKKRQTEEEEGKDNHCFKNADPCRNNMNDDSSNLKEGSKDNPEPLKCKQVWPKGTKRGLSKWRQNKERKTGFKLNLYTPPETPMEPDEQVTVEEQKETSEGKTSPSPIRIEEEVKETGEALLPQEENRREETCAPVSPNTSPGEKPEDD

SEQ ID NO: 25399 - protein, 562 aa, Homo sapiens
MATSGAASAELVIGWCIFGLLLLAILAFCWIYVRKYQSRRESEVVSTITAIFSLAIALITSALLPVDIFLVSYMKNQNGTFKDWANANVSRQIEDTVLYGYYTLYSVILFCVFFWIPFVYFYYEEKDDDDTSKCTQIKTALKYTLGFVVICALLLLVGSLVCKPELSGAGISKLFLKHRYAFVPLNVPNNKNSTEWEKVKSLFEELGSSHGLAALSFSISSLTLIGMLAAITYTAYGMSALPLNLIKGTRSAAYERLENTEDIEEVEQHIQTIKSKSKDGRPLPARDKRALKQFEERLRTLKKRERHLEFIENSWWTKFCGALRPLKIVWGIFFILVALLFVISLFLSNLDKALHSAGIDSGFIIFGANLSNPLNMLLPLLQTVFPLDYILITIIIMYFIFTSMAGIRNIGIWFFWIRLYKIRRGRTRPQALLFLCMILLLIVLHTSYMIYSLAPQYVMYGSQNYLIETNITSDNHKGNSTLSVPKRCDADAPEDQCTVTRTYLFLHKFWFFSAAYYFGNWAFLGVFLIGLIVSCCKGKKSVIEGVDEDSDISDDEPSVYSA

SEQ ID NO: 25400 - protein, 751 aa, Homo sapiens
MANGTADVRKLFIFTTTQNYFGLMSELWDQPLLCNCLEINNFLDDGNQMLLRVQRSDAGISFSNTIEFGDTKDKVLVFFKLRPEVITDENLHDNILVSSMLESPISSLYQAVRQVFAPMLLKDQEWSRNFDPKLQNLLSELEAGLGIVLRRSDTNLTKLKFKEDDTRGILTPSDEFQFWIEQAHRGNKQISKERANYFKELFETIAREFYNLDSLSLLEVVDLVETTQDVVDDVWRQTEHDHYPESRMLHLLDIIGGSFGRFVQKKLGTLNLWEDPYYLVKESLKAGISICEQWVIVCNHLTGQVWQRYVPHPWKNEKYFPETLDKLGKRLEEVLAIRTIHEKFLYFLPASEEKIICLTRVFEPFTGLNPVQYNPYTEPLWKAAVSQYEKIIAPAEQKIAGKLKNYISEIQDSPQQLLQAFLKYKELVKRPTISKELMLERETLLARLVDSIKDFRLDFENRCRGIPGDASGPLSGKNLSEVVNSIVWVRQLELKVDDTIKIAEALLSDLPGFRCFHQSAKDLLDQLKLYEQEQFDDWSRDIQSGLSDSRSGLCIEASSRIMELDSNDGLLKVHYSDRLVILLREVRQLSALGFVIPAKIQQVANIAQKFCKQAIILKQVAHFYNSIDQQMIQSQRPMMLQSALAFEQIIKNSKAGSGGKSQITWDNPKELEGYIQKLQNAAERLATENRKLRKWHTTFCEKVVVLMNIDLLRQQQRWKDGLQELRTGLATVEAQKCKWIFDDFQQSRRSV

SEQ ID NO: 25401 - protein, 1708 aa, Homo sapiens
MAGASVKVAVRVRPFNSREMSRDSKCIIQMSGSTTTIVNPKQPKETPKSFSFDYSYWSHTSPEDINYASQKQVYRDIGEEMLQHAFEGYNVCIFAYGQTGAGKSYTMMGKQEKDQQGIIPQLCEDLFSRINDTTNDNMSYSVEVSYMEIYCERVRDLLNPKNKGNLRVREHPLLGPYVEDLSKLAVTSYNDIQDLMDSGNKARTVAATNMNETSSRSHAVFNIIFTQKRHDAETNITTEKVSKISLVDLAGSERADSTGAKGTRLKEGANINKSLTTLGKVISALAEMDSGPNKNKKKKKTDFIPYRDSVLTWLLRENLGGNSRTAMVAALSPADINYDETLSTLRYADRAKQIRCNAVINEDPNNKLIRELKDEVTRLRDLLYAQGLGDITDTNTVPGGPKLTNALVGMSPSSSLSALSSRAASVSSLHERILFAPGSEEAIERLKETEKIIAELNETWEEKLRRTEAIRMEREALLAEMGVAMREDGGTLGVFSPKKTPHLVNLNEDPLMSECLLYYIKDGITRVGREDGERRQDIVLSGHFIKEEHCVFRSDSRGGSEAVVTLEPCEGADTYVNGKKVTEPSILRSGNRIIMGKSHVFRFNHPEQARQERERTPCAETPAEPVDWAFAQRELLEKQGIDMKQEMEQRLQELEDQYRREREEATYLLEQQRLDYESKLEALQKQMDSRYYPEVNEEEEEPEDEVQWTERECELALWAFRKWKWYQFTSLRDLLWGNAIFLKEANAISVELKKKVQFQFVLLTDTLYSPLPPDLLPPEAAKDRETRPFPRTIVAVEVQDQKNGATHYWTLEKLRQRLDLMREMYDRAAEVPSSVIEDCDNVVTGGDPFYDRFPWFRLVGRAFVYLSNLLYPVPLVHRVAIVSEKGEVKGFLRVAVQAISADEEAPDYGSGVRQSGTAKISFDDQHFEKFQSESCPVVGMSRSGTSQEELRIVEGQGQGADVGPSADEVNNNTCSAVPPEGLLLDSSEKAALDGPLDAALDHLRLGNTFTFRVTVLQASSISAEYADIFCQFNFIHRHDEAFSTEPLKNTGRGPPLGFYHVQNIAVEVTKSFIEYIKSQPIVFEVFGHYQQHPFPPLCKDVLSPLRPSRRHFPRVMPLSKPVPATKLSTLTRPCPGPCHCKYDLLVYFEICELEANGDYIPAVVDHRGGMPCMGTFLLHQGIQRRITVTLLHETGSHIRWKEVRELVVGRIRNTPETDESLIDPNILSLNILSSGYIHPAQDDRQFLDSDIPRTFYQFEAAWDSSMHNSLLLNRVTPYREKIYMTLSAYIEMENCTQPAVVTKDFCMVFYSRDAKLPASRSIRNLFGSGSLRASESNRVTGVYELSLCHVADAGSPGMQRRRRRVLDTSVAYVRGEENLAGWRPRSDSLILDHQWELEKLSLLQEVEKTRHYLLLREKLETAQRPVPEALSPAFSEDSESHGSSSASSPLSAEGRPSPLEAPNERQRELAVKCLRLLTHTFNREYTHSHVCVSASESKLSEMSVTLLRDPSMSPLGVATLTPSSTCPSLVEGRYGATDLRTPQPCSRPASPEPELLPEADSKKLPSPARATETDKEPQRLLVPDIQEIRVSPIVSKKGYLHFLEPHTSGWARRFVVVRRPYAYMYNSDKDTVERFVLNLATAQVEYSEDQQAMLKTPNTFAVCTEHRGILLQAASDKDMHDWLYAFNPLLAGTIRSKLSRRRSAQMRV

SEQ ID NO: 25402 - protein, 875 aa, Homo sapiens
MEKLHQCYWKSGEPQSDDIEASRMKRAAAKHLIERYYHQLTEGCGNEACTNEFCASCPTFLRMDNNAAAIKALELYKINAKLCDPHPSKKGASSAYLENSKGAPNNSCSEIKMNKKGARIDFKDVTYLTEEKVYEILELCREREDYSPLIRVIGRVFSSAEALVQSFRKVKQHTKEELKSLQAKDEDKDEDEKEKAACSAAAMEEDSEASSSRIGDSSQGDNNLQKLGPDDVSVDIDAIRRVYTRLLSNEKIETAFLNALVYLSPNVECDLTYHNVYSRDPNYLNLFIIVMENRNLHSPEYLEMALPLFCKAMSKLPLAAQGKLIRLWSKYNADQIRRMMETFQQLITYKVISNEFNSRNLVNDDDAIVAASKCLKMVYYANVVGGEVDTNHNEEDDEEPIPESSELTLQELLGEERRNKKGPRVDPLETELGVKTLDCRKPLIPFEEFINEPLNEVLEMDKDYTFFKVETENKFSFMTCPFILNAVTKNLGLYYDNRIRMYSERRITVLYSLVQGQQLNPYLRLKVRRDHIIDDALVRLEMIAMENPADLKKQLYVEFEGEQGVDEGGVSKEFFQLVVEEIFNPDIGMFTYDESTKLFWFNPSSFETEGQFTLIGIVLGLAIYNNCILDVHFPMVVYRKLMGKKGTFRDLGDSHPVLYQSLKDLLEYEGNVEDDMMITFQISQTDLFGNPMMYDLKENGDKIPITNENRKEFVNLYSDYILNKSVEKQFKAFRRGFHMVTNESPLKYLFRPEEIELLICGSRNLDFQALEETTEYDGGYTRDSVLIREFWEIVHSFTDEQKRLFLQFTTGTDRAPVGGLGKLKMIIAKNGPDTERLPTSHTCFNVLLLPEYSSKEKLKERLLKAITYAKGFGML

SEQ ID NO: 25403 - protein, 1092 aa, Homo sapiens
MVLAGPLAVSLLLPSLTLLVSHLSSSQDVSSEPSSEQQLCALSKHPTVAFEDLQPWVSNFTYPGARDFSQLALDPSGNQLIVGARNYLFRLSLANVSLLQATEWASSEDTRRSCQSKGKTEEECQNYVRVLIVAGRKVFMCGTNAFSPMCTSRQVGNLSRTIEKINGVARCPYDPRHNSTAVISSQGELYAATVIDFSGRDPAIYRSLGSGPPLRTAQYNSKWLNEPNFVAAYDIGLFAYFFLRENAVEHDCGRTVYSRVARVCKNDVGGRFLLEDTWTTFMKARLNCSRPGEVPFYYNELQSAFHLPEQDLIYGVFTTNVNSIAASAVCAFNLSAISQAFNGPFRYQENPRAAWLPIANPIPNFQCGTLPETGPNENLTERSLQDAQRLFLMSEAVQPVTPEPCVTQDSVRFSHLVVDLVQAKDTLYHVLYIGTESGTILKALSTASRSLHGCYLEELHVLPPGRREPLRSLRILHSARALFVGLRDGVLRVPLERCAAYRSQGACLGARDPYCGWDGKQQRCSTLEDSSNMSLWTQNITACPVRNVTRDGGFGPWSPWQPCEHLDGDNSGSCLCRARSCDSPRPRCGGLDCLGPAIHIANCSRNGAWTPWSSWALCSTSCGIGFQVRQRSCSNPAPRHGGRICVGKSREERFCNENTPCPVPIFWASWGSWSKCSSNCGGGMQSRRRACENGNSCLGCGEFKTCNPEGCPEVRRNTPWTPWLPVNVTQGGARQEQRFRFTCRAPLADPHGLQFGRRRTETRTCPADGSGSCDTDALVEVLLRSGSTSPHTVSGGWAAWGPWSSCSRDCELGFRVRKRTCTNPEPRNGGLPCVGDAAEYQDCNPQACPVRGAWSCWTSWSPCSASCGGGHYQRTRSCTSPAPSPGEDICLGLHTEEALCATQACPEGWSPWSEWSKCTDDGAQSRSRHCEELLPGSSACAGNSSQSRPCPYSEIPVILPASSMEEATDCAGFNLIHLVATGISCFLGSGLLTLAVYLSCQHCQRQSQESTLVHPATPNHLHYKGGGTPKNEKYTPMEFKTLNKNNLIPDDRANFYPLQQTNVYTTTYYPSPLNKHSFRPEASPGQRCFPNS

SEQ ID NO: 25404 - protein, 229 aa, Homo sapiens
ETFVFCCWKAAQIKEHLLKSKWCRPTSLNVVRIITSELYRSLGDVLRDVDAKALVRSDFLLVYGDVISNINITRALEEHRLRRKLEKNVSVMTMIFKESSPSHPTRCHEDNVVVAVDSTTNRVLHFQKTQGLRRFAFPLSLFQGSSDGVEVRYDLLDCHISICSPQVAQLFTDNFDYQTRDDFVRGLLVNEEVITWCWTRPTCGRVFEWRLEHRSISLCFVTMLRSRNE

SEQ ID NO: 25405 - protein, 337 aa, Homo sapiens
MEEPEEPADSGQSLVPVYIYSPEYVSMCDSLAKIPKRASMVHSLIEAYALHKQMRIVKPKVASMEEMATFHTDAYLQHLQKVSQEGDDDHPDSIEYGLGYDCPATEGIFDYAAAIGGATITAAQCLIDGMCKVAINWSGGWHHAKKDEASGFCYLNDAVLGILRLRRKFERILYVDLDLHHGDGVEDAFSFTSKVMTVSLHKFSPGFFPGTGDVSDVGLGKGRYYSVNVPIQDGIQDEKYYQICESVLKEVYQAFNPKAVVLQLGADTIAGDPMCSFNMTPVGIGKCLKYILQWQLATLILGGGGYNLANTARCWTYLTGVILGKTLSSEIPDHEAL

SEQ ID NO: 25406 - protein, 554 aa, Homo sapiens
MAARPAATLAWSLLLLSSALLREGCRARFVAERDSEDDGEEPVVFPESPLQSPTVLVAVLARNAAHTLPHFLGCLERLDYPKSRMAIWAATDHNVDNTTEIFREWLKNVQRLYHYVEWRPMDEPESYPDEIGPKHWPTSRFAHVMKLRQAALRTAREKWSDYILFIDVDNFLTNPQTLNLLIAENKTIVAPMLESRGLYSNFWCGITPKGFYKRTPDYVQIREWKRTGCFPVPMVHSTFLIDLRKEASDKLTFYPPHQDYTWTFDDIIVFAFSSRQAGIQMYLCNREHYGYLPIPLKPHQTLQEDIENLIHVQIEAMIDRPPMEPSQYVSVVPKYPDKMGFDEIFMINLKRRKDRRDRMLRTLYEQEIEVKIVEAVDGKALNTSQLKALNIEMLPGYRDPYSSRPLTRGEIGCFLSHYSVWKEVIDRELEKTLVIEDDVRFEHQFKKKLMKLMDNIDQAQLDWELIYIGRKRMQVKEPEKAVPNVANLVEADYSYWTLGYVISLEGAQKLVGANPFGKMLPVDEFLPVMYNKHPVLLSSPHCHLFQTLSDDCQR

SEQ ID NO: 25407 - protein, 2758 aa, Homo sapiens
MSDKMSSFLHIGDICSLYAEGSTNGFISTLGLVDDRCVVQPETGDLNNPPKKFRDCLFKLCPMNRYSAQKQFWKAAKPGANSTTDAVLLNKLHHAADLEKKQNETENRKLLGTVIQYGNVIQLLHLKSNKYLTVNKRLPALLEKNAMRVTLDEAGNEGSWFYIQPFYKLRSIGDSVVIGDKVVLNPVNAGQPLHASSHQLVDNPGCNEVNSVNCNTSWKIVLFMKWSDNKDDILKGGDVVRLFHAEQEKFLTCDEHRKKQHVFLRTTGRQSATSATSSKALWEVEVVQHDPCRGGAGYWNSLFRFKHLATGHYLAAEVDPDFEEECLEFQPSVDPDQDASRSRLRNAQEKMVYSLVSVPEGNDISSIFELDPTTLRGGDSLVPRNSYVRLRHLCTNTWVHSTNIPIDKEEEKPVMLKIGTSPVKEDKEAFAIVPVSPAEVRDLDFANDASKVLGSIAGKLEKGTITQNERRSVTKLLEDLVYFVTGGTNSGQDVLEVVFSKPNRERQKLMREQNILKQIFKLLQAPFTDCGDGPMLRLEELGDQRHAPFRHICRLCYRVLRHSQQDYRKNQEYIAKQFGFMQKQIGYDVLAEDTITALLHNNRKLLEKHITAAEIDTFVSLVRKNREPRFLDYLSDLCVSMNKSIPVTQELICKAVLNPTNADILIETKLVLSRFEFEGVSSTGENALEAGEDEEEVWLFWRDSNKEIRSKSVRELAQDAKEGQKEDRDVLSYYRYQLNLFARMCLDRQYLAINEISGQLDVDLILRCMSDENLPYDLRASFCRLMLHMHVDRDPQEQVTPVKYARLWSEIPSEIAIDDYDSSGASKDEIKERFAQTMEFVEEYLRDVVCQRFPFSDKEKNKLTFEVVNLARNLIYFGFYNFSDLLRLTKILLAILDCVHVTTIFPISKMAKGEENKGNNDVEKLKSSNVMRSIHGVGELMTQVVLRGGGFLPMTPMAAAPEGNVKQAEPEKEDIMVMDTKLKIIEILQFILNVRLDYRISCLLCIFKREFDESNSQTSETSSGNSSQEGPSNVPGALDFEHIEEQAEGIFGGSEENTPLDLDDHGGRTFLRVLLHLTMHDYPPLVSGALQLLFRHFSQRQEVLQAFKQVQLLVTSQDVDNYKQIKQDLDQLRSIVEKSELWVYKGQGPDETMDGASGENEHKKTEEGNNKPQKHESTSSYNYRVVKEILIRLSKLCVQESASVRKSRKQQQRLLRNMGAHAVVLELLQIPYEKAEDTKMQEIMRLAHEFLQNFCAGNQQNQALLHKHINLFLNPGILEAVTMQHIFMNNFQLCSEINERVVQHFVHCIETHGRNVQYIKFLQTIVKAEGKFIKKCQDMVMAELVNSGEDVLVFYNDRASFQTLIQMMRSERDRMDENSPLMYHIHLVELLAVCTEGKNVYTEIKCNSLLPLDDIVRVVTHEDCIPEVKIAYINFLNHCYVDTEVEMKEIYTSNHMWKLFENFLVDICRACNNTSDRKHADSILEKYVTEIVMSIVTTFFSSPFSDQSTTLQTRQPVFVQLLQGVFRVYHCNWLMPSQKASVESCIRVLSDVAKSRAIAIPVDLDSQVNNLFLKSHSIVQKTAMNWRLSARNAARRDSVLAASRDYRNIIERLQDIVSALEDRLRPLVQAELSVLVDVLHRPELLFPENTDARRKCESGGFICKLIKHTKQLLEENEEKLCIKVLQTLREMMTKDRGYGEKLISIDELDNAELPPAPDSENATEELEPSPPLRQLEDHKRGEALRQVLVNRYYGNVRPSGRRESLTSFGNGPLSAGGPGKPGGGGGGSGSSSMSRGEMSLAEVQCHLDKEGASNLVIDLIMNASSDRVFHESILLAIALLEGGNTTIQHSFFCRLTEDKKSEKFFKVFYDRMKVAQQEIKATVTVNTSDLGNKKKDDEVDRDAPSRKKAKEPTTQITEEVRDQLLEASAATRKAFTTFRREADPDDHYQPGEGTQATADKAKDDLEMSAVITIMQPILRFLQLLCENHNRDLQNFLRCQNNKTNYNLVCETLQFLDCICGSTTGGLGLLGLYINEKNVALINQTLESLTEYCQGPCHENQNCIATHESNGIDIITALILNDINPLGKKRMDLVLELKNNASKLLLAIMESRHDSENAERILYNMRPKELVEVIKKAYMQGEVEFEDGENGEDGAASPRNVGHNIYILAHQLARHNKELQSMLKPGGQVDGDEALEFYAKHTAQIEIVRLDRTMEQIVFPVPSICEFLTKESKLRIYYTTERDEQGSKINDFFLRSEDLFNEMNWQKKLRAQPVLYWCARNMSFWSSISFNLAVLMNLLVAFFYPFKGVRGGTLEPHWSGLLWTAMLISLAIVIALPKPHGIRALIASTILRLIFSVGLQPTLFLLGAFNVCNKIIFLMSFVGNCGTFTRGYRAMVLDVEFLYHLLYLVICAMGLFVHEFFYSLLLFDLVYREETLLNVIKSVTRNGRSIILTAVLALILVYLFSIVGYLFFKDDFILEVDRLPNETAVPETGESLASEFLFSDVCRVESGENCSSPAPREELVPAEETEQDKEHTCETLLMCIVTVLSHGLRSGGGVGDVLRKPSKEEPLFAARVIYDLLFFFMVIIIVLNLIFGVIIDTFADLRSEKQKKEEILKTTCFICGLERDKFDNKTVTFEEHIKEEHNMWHYLCFIVLVKVKDSTEYTGPESYVAEMIKERNLDWFPRMRAMSLVSSDSEGEQNELRNLQEKLESTMKLVTNLSGQLSELKDQMTEQRKQKQRIGLLGHPPHMNVNPQQPA

SEQ ID NO: 25408 - protein, 505 aa, Homo sapiens
GTEDLDKVKPRVQETGEIKEPLEISISQDVHDSKNTLTTGVEEIRSVDIINMLLNFEIKEVVVTLMKKSEKKGRPLHELNVLQLGMEAKVKTYDMTAKAYLKKISMQCFDFTDSKGEPLHIINSSNVTDEPLLKMLLTKADSDGPEFKTIHDSTKQRLKVSFASLDLVLHLEALLSFMDFLSSAAPFSEPSSSEKESELKPLVGESRSIAVKAVSSNISQKDVFDLKITAELNAFNVFVCDQKCNIADIKIHGMDASISVKPKQTDVFARLKDIIVMNVDLQSIHKKAVSILGDEVFRFQLTLYPDATEGEAYADMSKVDGKLSFKVGCIQIVYVHKFFMSLLNFLNNFQTAKEALSTATVQAAERAASSMKDLAQKSFRLLMDINLKAPVIIIPQSSVSPNAVIADLGLIRVENKFSLVPMEHYSLPPVIDKMNIELTQLKLSRTILQASLPQNDIEILKPVNMLLSIQRNLAAAWYVQIPGMEIKGKLKPMQNKKIGQTQSSL

SEQ ID NO: 25409 - protein, 417 aa, Homo sapiens
MAWNTNLRWRLPLTCLLLQVIMVILFGVFVRYDFEADAHWWSERTHKNLSDMENEFYYRYPSFQDVHVMVFVGFGFLMTFLQRYGFSAVGFNFLLAAFGIQWALLMQGWFHFLQDRYIVVGVENLINADFCVASVCVAFGAVLGKVSPIQLLIMTFFQVTLFAVNEFILLNLLKVKDAGGSMTIHTFGAYFGLTVTRILYRRNLEQSKERQNSVYQSDLFAMIGTLFLWMYWPSFNSAISYHGDSQHRAAINTYCSLAACVLTSVAISSALHKKGKLDMVHIQNATLAGGVAVGTAAEMMLMPYGALIIGFVCGIISTLGFVYLTPFLESRLHIQDTCGINNLHGIPGIIGGIVGAVTAASASLEVYGKEGFQRGLDRKNTGKVPDLWSLGDPGHGPDGWHHCGAHFEITILGTTFR

SEQ ID NO: 25410 - protein, 1360 aa, Homo sapiens
NQFTCQNGRCISKTFVCDEDNDCGDGSDELMHLCHTPEPTCPPHEFKCDNGRCIEMMKLCNHLDDCLDNSDEKGCGINECHDPSISGCDHNCTDTLTSFYCSCRPGYKLMSDKRTCVDIDECTEMPFVCSQKCENVIGSYICKCAPGYLREPDGKTCRQNSNIEPYLIFSNRYYLRNLTIDGYFYSLILEGLDNVVALDFDRVEKRLYWIDTQRQVIERMFLNKTNKETIINHRLPAAESLAVDWVSRKLYWLDARLDGLFVSDLNGGHRRMLAQHCVDANNTFCFDNPRGLALHPQYGYLYWADWGHRAYIGRVGMDGTNKSVIISTKLEWPNGITIDYTNDLLYWADAHLGYIEYSDLEGHHRHTVYDGALPHPFAITIFEDTIYWTDWNTRTVEKGNKYDGSNRQTLVNTTHRPFDIHVYHPYRQPIVSNPCGTNNGGCSHLCLIKPGGKGFTCECPDDFRTLQLSGSTYCMPMCSSTQFLCANNEKCIPIWWKCDGQKDCSDGSDELALCPQRFCRLGQFQCSDGNCTSPQTLCNAHQNCPDGSDEDRLLCENHHCDSNEWQCANKRCIPESWQCDTFNDCEDNSDEDSSHCASRTCRPGQFRCANGRCIPQAWKCDVDNDCGDHSDEPIEECMSSAHLCDNFTEFSCKTNYRCIPKWAVCNGVDDCRDNSDEQGCEERTCHPVGDFRCKNHHCIPLRWQCDGQNDCGDNSDEENCAPRECTESEFRCVNQQCIPSRWICDHYNDCGDNSDERDCEMRTCHPEYFQCTSGHCVHSELKCDGSADCLDASDEADCPTRFPDGAYCQATMFECKNHVCIPPYWKCDGDDDCGDGSDEELHLCLDVPCNSPNRFRCDNNRCIYSHEVCNGVDDCGDGTDETEEHCRKPTPKPCTEYEYKCGNGHCIPHDNVCDDADDCGDWSDELGCNKGKERTCAENICEQNCTQLNEGGFICSCTAGFETNVFDRTSCLDINECEQFGTCPQHCRNTKGSYECVCADGFTSMSDRPGKRCAAEGSSPLLLLPDNVRIRKYNLSSERFSEYLQDEEYIQAVDYDWDPKDIGLSVVYYTVRGEGSRFGAIKRAYIPNFESGRNNLVQEVDLKLKYVMQPDGIAVDWVGRHIYWSDVKNKRIEVAKLDGRYRKWLISTDLDQPAAIAVNPKLGLMFWTDWGKEPKIESAWMNGEDRNILVFEDLGWPTGLSIDYLNNDRIYWSDFKEDVIETIKYDGTDRRVIAKEAMNPYSLDIFEDQLYWISKEKGEVWKQNKFGQGKKEKTLVVNPWLTQVRIFHQLRYNKSVPNLCKQICSHLCLLRPGGYSCACPQGSSFIEGSTTECDAGVLAATPENIVKWRFQKASLQEQPQ

SEQ ID NO: 25411 - protein, 799 aa, Homo sapiens
MVKLANPLYTEWILEAIQKIKKQKQRPSEERICHAVSTSHGLDKKTVSEQLELSVQDGSVLKVTNKGLASYKDPDNPGRFSSVKPGTFPKSAKGSRGSCNDLRNVDWNKLLRRAIEGLEEPNGSSLKNIEKYLRSQSDLTSTTNNPAFQQRLRLGAKRAVNNGRLLKDGPQYRVNYGSLDGKGAPQYPSAFPSSLPPVSLLPHEKDQPRADPIPICSFCLGTKESNREKKPEELLSCADCGSSGHPSCLKFCPELTTNVKALRWQCIECKTCSACRVQGRNADNMLFCDSCDRGFHMECCDPPLSRMPKGMWICQVCRPKKKGRKLLHEKAAQIKRRYAKPIGRPKNKLKQRLLSVTSDEGSMNAFTGRGSPDTEIKINIKQESADVNVIGNKDVVTEEDLDVFKQAQELSWEKIECESGVEDCGRYPSVIEFGKYEIQTWYSSPYPQEYARLPKLYLCEFCLKYMKSKNILLRHSKKCGWFHPPANEIYRRKDLSVFEVDGNMSKIYCQNLCLLAKLFLDHKTLYYDVEPFLFYVLTKNDEKGCHLVGYFSKEKLCQQKYNVSCIMIMPQHQRQGFGRFLIDFSYLLSRREGQAGSPEKPLSDLGRLSYLAYWKSVILEYLYHHHERHISIKAISRATGMCPHDIATTLQHLHMIDKRDGRFVIIRREKLILSHMEKLKTCSRANELDPDSLRWTPILISNAAVSEEEREAEKEAERLMEQASCWEKEEQEILSTRANSRQSPAKVQSKNKYLHSPESRPVTGERGQLLELSKESSEEEEEEEDEEEEEEEEEEEEDE

SEQ ID NO: 25412 - protein, 1061 aa, Homo sapiens
MAAMAPALTDAAAEAHHIRFKLAPPSSTLSPGSAENNGNANILIAANGTKRKAIAAEDPSLDFRNNPTKEDLGKLQPLVASYLCSDVTSVPSKESLKLQGVFSKQTVLKSHPLLSQSYELRAELLGRQPVLEFSLENLRTMNTSGQTALPQAPVNGLAKKLTKSSTHSDHDNSTSLNGGKRALTSSALHGGEMGGSESGDLKGGMTNCTLPHRSLDVEHTTLYSNNSTANKSSVNSMEQPALQGSSRLSPGTDSSSNLGGVKLEGKKSPLSSILFSALDSDTRITALLRRQADIESRARRLQKRLQVVQAKQVERHIQHQLGGFLEKTLSKLPNLESLRPRSQLMLTRKAEAALRKAASETTTSEGLSNFLKSNSISEELERFTASGIANLRCSEQAFDSDVTDSSSGGESDIEEEELTRADPEQRHVPLRRRSEWKWAADRAAIVSRWNWLQAHVSDLEYRIRQQTDIYKQIRANKGLIVLGEVPPPEHTTDLFLPLSSEVKTDHGTDKLIESVSQPLENHGAPIIGHISESLSTKSCGALRPVNGVINTLQPVLADHIPGDSSDAEEQLHKKQRLNLVSSSSDGTCVAARTRPVLSCKKRRLVRPNSIVPLSKKVHRNSTIRPGCDVNPSCALCGSGSINTMPPEIHYEAPLLERLSQLDSCVHPVLAFPDDVPTSLHFQSMLKSQWQNKPFDKIKPPKKLSLKHRAPMPGSLPDSARKDRHKLVSSFLTTAKLSHHQTRPDRTHRQHLDDVGAVPMVERVTAPKAERLLNPPPPVHDPNHSKMRLRDHSSERSEVLKHHTDMSSSSYLAATHHPPHSPLVRQLSTSSDSPAPASSSSQVTASTSQQPVRRRRGESSFDINNIVIPMSVAATTRVEKLQYKEILTPSWREVDLQSLKGSPDEENEEIEDLSDAAFAALHAKCEEMERARWLWTTSVPPQRRGSRSPISPELHSAPLTPVARDTPRHLASEDTRCSTPELGLDEQSVQPWERRTFPLAHSPQAECEDQLDAQERAARCTRRTSGSKTGRETEAAPTSPPIVPLKSRHLVAAATAQRPTHR

SEQ ID NO: 25413 - protein, 59 aa, Homo sapiens
MPNWGGGAKCGACEKTVYHAEEIQCNGRSFHKTCFHCTLAQDLFPLCHLWEESGVHKCH

SEQ ID NO: 25414 - protein, 649 aa, Homo sapiens
MEMRWFLSKIQDDFRGGKINLEKTQRLLEKLDIRCSYIHVKQIFKDNDRLKQGRITIEEFRAIYRIITHREEIIEIFNTYSENRKILLASNLAQFLTQEQYAAEMSKAIAFEIIQKYEPIEEVRKAHQMSLEGFTRYMDSRECLLFKNECRKVYQDMTHPLNDYFISSSHNTYLVSDQLLGPSDLWGYVSALVKGCRCLEIDCWDGAQNEPVVYHGYTLTSKLLFKTVIQAIHKYAFMTSDYPVVLSLENHCSTAQQEVMADNLQATFGESLLSDMLDDFPDTLPSPEALKFKILVKNKKIGTLKETHERKGSDKRGKVEEWEEEVADGEEEEEEEEEEEEEEEDKFKESEVLESVLGDNQDKETGVKKLPGVMLFKKKKTRKLKIALALSDLVIYTKAEKFKSFQHSRLYQQFNENNSIGETQARKLSKLRVHEFIFHTRKFITRIYPKATRADSSNFNPQEFWNIGCQMVALNFQTPGLPMDLQNGKFLDNGGSGYILKPHFLRESKSYFNPSNIKEGMPITLTIRLISGIQLPLTHSSSNKGDSLVIIEVFGVPNDQMKQQTRVIKKNAFSPRWNETFTFIIHVPELALIRFVVEGQGLIAGNEFLGQYTLPLLCMNKGYRRIPLFSRMGESLEPASLFVYVWYVR

SEQ ID NO: 25415 - protein, 411 aa, Homo sapiens
MATTATMATSGSARKRLLKEEDMTKVEFETSEEVDVTPTFDTMGLREDLLRGIYAYGFEKPSAIQQRAIKQIIKGRDVIAQSQSGTGKTATFSISVLQCLDIQVRETQALILAPTRELAVQIQKGLLALGDYMNVQCHACIGGTNVGEDIRKLDYGQHVVAGTPGRVFDMIRRRSLRTRAIKMLVLDEADEMLNKGFKEQIYDVYRYLPPATQVVLISATLPHEILEMTNKFMTDPIRILVKRDELTLEGIKQFFVAVEREEWKFDTLCDLYDTLTITQAVIFCNTKRKVDWLTEKMREANFTVSSMHGDMPQKERESIMKEFRSGASRVLISTDVWARGLDVPQVSLIINYDLPNNRELYIHRIGRSGRYGRKGVAINFVKNDDIRILRDIEQYYSTQIDEMPMNVADLI

SEQ ID NO: 25416 - protein, 475 aa, Homo sapiens
MESKALLVLTLAVWLQSLTASRGGVAAADQRRDFIDIESKFALRTPEDTAEDTCHLIPGVAESVATCHFNHSSKTFMVIHGWTVTGMYESWVPKLVAALYKREPDSNVIVVDWLSRAQEHYPVSAGYTKLVGQDVARFINWMEEEFNYPLDNVHLLGYSLGAHAAGIAGSLTNKKVNRITGLDPAGPNFEYAEAPSRLSPDDADFVDVLHTFTRGSPGRSIGIQKPVGHVDIYPNGGTFQPGCNIGEAIRVIAERGLGDVDQLVKCSHERSIHLFIDSLLNEENPSKAYRCSSKEAFEKGLCLSCRKNRCNNLGYEINKVRAKRSSKMYLKTRSQMPYKVFHYQVKIHFSGTESETHTNQAFEISLYGTVAESENIPFTLPEVSTNKTYSFLIYTEVDIGELLMLKLKWKSDSYFSWSDWWSSPGFAIQKIRVKAGETQKKVIFCSREKVSHLQKGKAPAVFVKCHDKSLNKKSG

SEQ ID NO: 25417 - protein, 1386 aa, Homo sapiens
MAAVPQNNLQEQLERHSARTLNNKLSLSKPKFSGFTFKKKTSSDNNVSVTNVSVAKTPVLRNKDVNVTEDFSFSEPLPNTTNQQRVKDFFKNAPAGQETQRGGSKSLLPDFLQTPKEVVCTTQNTPTVKKSRDTALKKLEFSSSPDSLSTINDWDDMDDFDTSETSKSFVTPPQSHFVRVSTAQKSKKGKRNFFKAQLYTTNTVKTDLPPPSSESEQIDLTEEQKDDSEWLSSDVICIDDGPIAEVHINEDAQESDSLKTHLEDERDNSEKKKNLEEAELHSTEKVPCIEFDDDDYDTDFVPPSPEEIISASSSSSKCLSTLKDLDTSDRKEDVLSTSKDLLSKPEKMSMQELNPETSTDCDARQISLQQQLIHVMEHICKLIDTIPDDKLKLLDCGNELLQQRNIRRKLLTEVDFNKSDASLLGSLWRYRPDSLDGPMEGDSCPTGNSMKELNFSHLPSNSVSPGDCLLTTTLGKTGFSATRKNLFERPLFNTHLQKSFVSSNWAETPRLGKKNESSYFPGNVLTSTAVKDQNKHTASINDLERETQPSYDIDNFDIDDFDDDDDWEDIMHNLAASKSSTAAYQPIKEGRPIKSVSERLSSAKTDCLPVSSTAQNINFSESIQNYTDKSAQNLASRNLKHERFQSLSFPHTKEMMKIFHKKFGLHNFRTNQLEAINAALLGEDCFILMPTGGGKSLCYQLPACVSPGVTVVISPLRSLIVDQVQKLTSLDIPATYLTGDKTDSEATNIYLQLSKKDPIIKLLYVTPEKICASNRLISTLENLYERKLLARFVIDEAHCVSQWGHDFRQDYKRMNMLRQKFPSVPVMALTATANPRVQKDILTQLKILRPQVFSMSFNRHNLKYYVLPKKPKKVAFDCLEWIRKHHPYDSGIIYCLSRRECDTMADTLQRDGLAALAYHAGLSDSARDEVQQKWINQDGCQVICATIAFGMGIDKPDVRFVIHASLPKSVEGYYQESGRAGRDGEISHCLLFYTYHDVTRLKRLIMMEKDGNHHTRETHFNNLYSMVHYCENITECRRIQLLAYFGENGFNPDFCKKHPDVSCDNCCKTKDYKTRDVTDDVKSIVRFVQEHSSSQGMRNIKHVGPSGRFTMNMLVDIFLGSKSAKIQSGIFGKGSAYSRHNAERLFKKLILDKILDEDLYINANDQAIAYVMLGNKAQTVLNGNLKVDFMETENSSSVKKQKALVAKVSQREEMVKKCLGELTEVCKSLGKVFGVHYFNIFNTVTLKKLAESLSSDPEVLLQIDGVTEDKLEKYGAEVISVLQKYSEWTSPAEDSSPGISLSSSRGPGRSAAEELDEEIPVSSHYFASKTRNERKRKKMPASQRSKRRKTASSGSKAKGTKSDSVAQARVQWHNLGSLQPLPPVLK

SEQ ID NO: 25418 - protein, 4491 aa, Homo sapiens
MMPAQYALTSSLVLLVLLSTARAGPFSSRSNVTLPAPRPPPQPGGHTVGAGVGSPSSQLYEHTVEGGEKQVVFTHRINLPPSTGCGCPPGTEPPVLASEVQALRVRLEILEELVKGLKEQCTGGCCPASAQAGTGQTDVRTLCSLHGVFDLSRCTCSCEPGWGGPTCSDPTDAEIPPSSPPSASGSCPDDCNDQGRCVRGRCVCFPGYTGPSCGWPSCPGDCQGRGRCVQGVCVCRAGFSGPDCSQRSCPRGCSQRGRCEGGRCVCDPGYTGDDCGMRSCPRGCSQRGRCENGRCVCNPGYTGEDCGVRSCPRGCSQRGRCKDGRCVCDPGYTGEDCGTRSCPWDCGEGGRCVDGRCVCWPGYTGEDCSTRTCPRDCRGRGRCEDGECICDTGYSGDDCGVRSCPGDCNQRGRCEDGRCVCWPGYTGTDCGSRACPRDCRGRGRCENGVCVCNAGYSGEDCGVRSCPGDCRGRGRCESGRCMCWPGYTGRDCGTRACPGDCRGRGRCVDGRCVCNPGFTGEDCGSRRCPGDCRGHGLCEDGVCVCDAGYSGEDCSTRSCPGGCRGRGQCLDGRCVCEDGYSGEDCGVRQCPNDCSQHGVCQDGVCICWEGYVSEDCSIRTCPSNCHGRGRCEEGRCLCDPGYTGPTCATRMCPADCRGRGRCVQGVCLCHVGYGGEDCGQEEPPASACPGGCGPRELCRAGQCVCVEGFRGPDCAIQTCPGDCRGRGECHDGSCVCKDGYAGEDCGEEVPTIEGMRMHLLEETTVRTEWTPAPGPVDAYEIQFIPTTEGASPPFTARVPSSASAYDQRGLAPGQEYQVTVRALRGTSWGLPASKTITTMIDGPQDLRVVAVTPTTLELGWLRPQAEVDRFVVSYVSAGNQRVRLEVPPEADGTLLTDLMPGVEYVVTVTAERGRAVSYPASVRANTAPGHYSYPEVRPPAPPPKSRPRPAPAPRPPRPPWPSRPAEEREEESPPRPSLSQPPRRPWGNLTAELSRFRGTVQDLERHLRAHGYPLRANQTYTSVARHIHEYLQRRLLAAAPAGSPAPPPRHPRPTASPDPGTRKRDSNQGIYGLSPEGVDRVAASRHPKPEVLGSSADGALLVSLDGLRGQFERVVLRWRPQPPAEGPGGELTVPGTTRTVSLPDLRPGTTYHVEVHGVRAGQTSKSYAFITTTGSSPLGLLGTTDEPPPSGPSTTQGAQAPLLQQRPQELGELRVLGRDETGRLRVVWTAQPDTFAYFQLRMRVPEGPGAHEEVLPGDVRQALVPPPPPGTPYELSLHGVPPGGKPSDPIIYQGIMDKDEEKPGKSSGPPRLGELTVTDRTSDSLLLRWTVPEGEFDSFVIQYKDRDGQPQVVPVEGPQRSAVITSLDPGRKYKFVLYGFVGKKRHGPLVAEAKILPQSDPSPGTPPHLGNLWVTDPTPDSLHLSWTVPEGQFDTFMVQYRDRDGRPQVVPVEGPERSFVVSSLDPDHKYRFTLFGIANKKRYGPLTADGTTAPERKEEPPRPEFLEQPLLGELTVTGVTPDSLRLSWTVAQGPFDSFMVQYKDAQGQPQAVPVAGDENEVTVPGLDPDRKYKMNLYGLRGRQRVGPESVVAKTAPQEDVDETPSPTELGTEAPESPEEPLLGELTVTGSSPDSLSLFWTVPQGSFDSFTVQYKDRDGRPRAVRVGGKESEVTVGGLEPGHKYKMHLYGLHEGQRVGPVSAVGVTAPQQEETPPATESPLEPRLGELTVTDVTPNSVGLSWTVPEGQFDSFIVQYKDKDGQPQVVPVAADQREVTVYNLEPERKYKMNMYGLHDGQRMGPLSVVIVTAPLPPAPATEASKPPLEPRLGELTVTDITPDSVGLSWTVPEGEFDSFVVQYKDRDGQPQVVPVAADQREVTIPDLEPSRKYKFLLFGIQDGKRRSPVSVEAKTVARGDASPGAPPRLGELWVTDPTPDSLRLSWTVPEGQFDSFVVQFKDKDGPQVVPVEGHERSVTVTPLDAGRKYRFLLYGLLGKKRHGPLTADGTTEARSAMDDTGTKRPPKPRLGEELQVTTVTQNSVGLSWTVPEGQFDSFVVQYKDRDGQPQVVPVEGSLREVSVPGLDPAHRYKLLLYGLHHGKRVGPISAVAITAGREETETETTAPTPPAPEPHLGELTVEEATSHTLHLSWMVTEGEFDSFEIQYTDRDGQLQMVRIGGDRNDITLSGLESDHRYLVTLYGFSDGKHVGPVHVEALTVPEEEKPSEPPTATPEPPIKPRLGELTVTDATPDSLSLSWTVPEGQFDHFLVQYRNGDGQPKAVRVPGHEEGVTISGLEPDHKYKMNLYGFHGGQRMGPVSVVGVTAAEEETPSPTEPSMEAPEPAEEPLLGELTVTGSSPDSLSLSWTVPQGRFDSFTVQYKDRDGRPQVVRVGGEESEVTVGGLEPGRKYKMHLYGLHEGRRVGPVSAVGVTAPEEESPDAPLAKLRLGQMTVRDITSDSLSLSWTVPEGQFDHFLVQFKNGDGQPKAVRVPGHEDGVTISGLEPDHKYKMNLYGFHGGQRVGPVSAVGLTAPGKDEEMAPASTEPPTPEPPIKPRLEELTVTDATPDSLSLSWTVPEGQFDHFLVQYKNGDGQPKATRVPGHEDRVTISGLEPDNKYKMNLYGFHGGQRVGPVSAIGVTAAEEETPSPTEPSMEAPEPPEEPLLGELTVTGSSPDSLSLSWTVPQGRFDSFTVQYKDRDGRPQVVRVGGEESEVTVGGLEPGRKYKMHLYGLHEGRRVGPVSTVGVTAPQEDVDETPSPTEPGTEAPGPPEEPLLGELTVTGSSPDSLSLSWTVPQGRFDSFTVQYKDRDGRPQAVRVGGQESKVTVRGLEPGRKYKMHLYGLHEGRRLGPVSAVGVTEDEAETTQAVPTMTPEPPIKPRLGELTMTDATPDSLSLSWTVPEGQFDHFLVQYRNGDGQPKAVRVPGHEDGVTISGLEPDHKYKMNLYGFHGGQRVGPISVIGVTAAEEETPSPTELSTEAPEPPEEPLLGELTVTGSSPDSLSLSWTIPQGHFDSFTVQYKDRDGRPQVMRVRGEESEVTVGGLEPGRKYKMHLYGLHEGRRVGPVSTVGVTAPEDEAETTQAVPTTTPEPPNKPRLGELTVTDATPDSLSLSWMVPEGQFDHFLVQYRNGDGQPKVVRVPGHEDGVTISGLEPDHKYKMNLYGFHGGQRVGPISVIGVTAAEEETPAPTEPSTEAPEPPEEPLLGELTVTGSSPDSLSLSWTIPQGRFDSFTVQYKDRDGRPQVVRVRGEESEVTVGGLEPGCKYKMHLYGLHEGQRVGPVSAVGVTAPKDEAETTQAVPTMTPEPPIKPRLGELTVTDATPDSLSLSWMVPEGQFDHFLVQYRNGDGQPKAVRVPGHEDGVTISGLEPDHKYKMNLYGFHGGQRVGPVSAIGVTEEETPSPTEPSTEAPEAPEEPLLGELTVTGSSPDSLSLSWTVPQGRFDSFTVQYKDRDGQPQVVRVRGEESEVTVGGLEPGRKYKMHLYGLHEGQRVGPVSTVGITAPLPTPLPVEPRLGELAVAAVTSDSVGLSWTVAQGPFDSFLVQYRDAQGQPQAVPVSGDLRAVAVSGLDPARKYKFLLFGLQNGKRHGPVPVEARTAPDTKPSPRLGELTVTDATPDSVGLSWTVPEGEFDSFVVQYKDKDGRLQVVPVAANQREVTVQGLEPSRKYRFLLYGLSGRKRLGPISADSTTAPLEKELPPHLGELTVAEETSSSLRLSWTVAQGPFDSFVVQYRDTDGQPRAVPVAADQRTVTVEDLEPGKKYKFLLYGLLGGKRLGPVSALGMTAPEEDTPAPELAPEAPEPPEEPRLGVLTVTDTTPDSMRLSWSVAQGPFDSFVVQYEDTNGQPQALLVDGDQSKILISGLEPSTPYRFLLYGLHEGKRLGPLSAEGTTGLAPAGQTSEESRPRLSQLSVTDVTTSSLRLNWEAPPGAFDSFLLRFGVPSPSTLEPHPRPLLQRELMVPGTRHSAVLRDLRSGTLYSLTLYGLRGPHKADSIQGTARTLSPVLESPRDLQFSEIRETSAKVNWMPPPSRADSFKVSYQLADGGEPQSVQVDGQARTQKLQGLIPGARYEVTVVSVRGFEESEPLTGFLTTVPDGPTQLRALNLTEGFAVLHWKPPQNPVDTYDVQVTAPGAPPLQAETPGSAVDYPLHDLVLHTNYTATVRGLRGPNLTSPASITFTTGLEAPRDLEAKEVTPRTALLTWTEPPVRPAGYLLSFHTPGGQNQEILLPGGITSHQLLGLFPSTSYNARLQAMWGQSLLPPVSTSFTTGGLRIPFPRDCGEEMQNGAGASRTSTIFLNGNRERPLNVFCDMETDGGGWLVFQRRMDGQTDFWRDWEDYAHGFGNISGEFWLGNEALHSLTQAGDYSMRVDLRAGDEAVFAQYDSFHVDSAAEYYRLHLEGYHGTAGDSMSYHSGSVFSARDRDPNSLLISCAVSYRGAWWYRNCHYANLNGLYGSTVDHQGVSWYHWKGFEFSVPFTEMKLRPRNFRSPAGGG

SEQ ID NO: 25419 - protein, 1497 aa, Homo sapiens
MDVTKKNKRDGTEVTERIVTETVTTRLTSLPPKGGTSNGYAKTASLGGGSRLEKQSLTHGSSGYINSTGSTRGHASTSSYRRAHSPASTLPNSPGSTFERKTHVTRHAYEGSSSGNSSPEYPRKEFASSSTRGRSQTRESEIRVRLQSASPSTRWTELDDVKRLLKGSRSASVSPTRNSSNTLPIPKKGTVETKIVTASSQSVSGTYDATILDANLPSHVWSSTLPAGSSMGTYHNNMTTQSSSLLNTNAYSAGSVFGVPNNMASCSPTLHPGLSTSSSVFGMQNNLAPSLTTLSHGTTTTSTAYGVKKNMPQSPAAVNTGVSTSAACTTSVQSDDLLHKDCKFLILEKDNTPAKKEMELLIMTKDSGKVFTASPASIAATSFSEDTLKKEKQAAYNADSGLKAEANGDLKTVSTKGKTTTADIHSYGSSGGGGSGGGGGVGGAGGGPWGPAPAWCPCGSCCSWWKWLLGLLLTWLLLLGLLFGLIALAEEVRKLKARVDELERIRRSILPYGDSMDRIEKDRLQGMAPAAGADLDKIGLHSDSQEELWMFVRKKLMMEQENGNLRGSPGPKGDMGSPGPKGDRGFPGTPGIPGPLGHPGPQGPKGQKGSVGDPGMEGPMGQRGREGPMGPRGEAGPPGSGEKGERGAAGEPGPHGPPGVPGSVGPKGSSGSPGPQGPPGPVGLQGLRGEVGLPGVKGDKGPMGPPGPKGDQGEKGPRGLTGEPGMRGLPGAVGEPGAKGAMGPAGPDGHQGPRGEQGLTGMPGIRGPPGPSGDPGKPGLTGPQGPQGLPGTPGRPGIKGEPGAPGKIVTSEGSSMLTVPGPPGPPGAMGPPGPPGAPGPAGPAGLPGHQEVLNLQGPPGPPGPRGPPGPSIPGPPGPRGPPGEGLPGPPGPPGSFLSNSETFLSGPPGPPGPPGPKGDQGPPGPRGHQGEQGLPGFSTSGSSSFGLNLQGPPGPPGPQGPKGDKGDPGVPGALGIPSGPSEGGSSSTMYVSGPPGPPGPPGPPGSISSSGQEIQQYISEYMQSDSIRSYLSGVQGPPGPPGPPGPVTTITGETFDYSELASHVVSYLRTSGYGVSLFSSSISSEDILAVLQRDDVRQYLRQYLMGPRGPPGPPGASGDGSLLSLDYAELSSRILSYMSSSGISIGLPGPPGPPGLPGTSYEELLSLLRGSEFRGIVGPPGPPGPPGIPGNVWSSISVEDLSSYLHTAGLSFIPGPPGPPGPPGPRGPPGVSGALATYAAENSDSFRSELISYLTSPDVRSFIVGPPGPPGPQGPPGDSRLLSTDASHSRGSSSSSHSSSVRRGSSYSSSMSTGGGGAGSLGAGGAFGEAAGDRGPYGTDIGPGGGYGAAAEGGMYAGNGGLLGADFAGDLDYNELAVRVSESMQRQGLLQGMAYTVQGPPGQPGPQGPPGISKVFSAYSNVTADLMDFFQTYGAIQGPPGQKGEMGTPGPKGDRGPAGPPGHPGPPGPRGHKGEKGDKGDQVYAGRRRRRSIAVKP

SEQ ID NO: 25420 - protein, 131 aa, Homo sapiens
RFSSSTEQSSASRLMRRHKRRRRKQKVSRIERSSSFSSITDSTMSLNIITVTLNMEKYNFLGISIVGQSNERGDGGIYIGSIMKGGAVAADGRIEPGDMLLQAHHPDCSQVLGPKSTWLLHIAQERAHPAH

SEQ ID NO: 25421 - protein, 791 aa, Homo sapiens
GTETAEFAELKTQIEKMRLDYQHEIENLQNQQDSERAAHAKEMEALRAKLMKVIKEKENSLEAIRSKLDKAEDQHLVEMEDTLNKLQEAEIKVKELEVLQAKCNEQTKVIDNFTSQLKATEEKLLDLDALRKASSEGKSEMKKLRQQLEAAEKQIKHLEIEKNAESSKASSITRELQGRELKLTNLQENLSEVSQVKETLEKELQILKEKFAEASEEAVSVQRSMQETVNKLHQKEEQFNMLSSDLEKLRENLADMEAKFREKDEREEQLIKAKEKLENDIAEIMKMSGDNSSQLTKMNDELRLKERDVEELQLKLTKANENASFLQKSIEDMTVKAEQSQQEAAKKHEEEKKELERKLSDLEKKMETSHNQCQELKARYERATSETKTKHEEILQNLQKTLLDTEDKLKGAREENSGLLQELEELRKQADKAKAAQTAEDAMQIMEQMTKEKTETLASLEDTKQTNAKLQNELDTLKENNLKNVEELNKSKELLTVENQKMEEFRKEIETLKQAAAQKSQQLSALQEENVKLAEELGRSRDEVTSHQKLEEERSVLNNQLLEMKKRESKFIKDADEEKASLQKSISITSALLTEKDAELEKLRNEVTVLRGENASAKSLHSVVQTLESDKVKLELKVKNLELQLKENKRQLSSSSGNTDTQADEDERAQESQQMIDFLNSVIVDLQRKNQDLKMKVEMMSEAALNGNGDDLNNYDSDDQEKQSKKKPRLFCDICDCFDLHDTEDCPTQAQMSEDPPHSTHHGSRGEERPYCEICEMFGHWATNCNDDETF

SEQ ID NO: 25422 - protein, 330 aa, Homo sapiens
MDVTIVKTDYEGQAKKLLELMENTDVIIVAGGDGTLQEVVTGVLRRTDEATFSKIPIGFIPLGETSSLSHTLFAESGNKVQHITDATLAIVKGETVPLDVLQIKGEKEQPVFAMTGLRWGSFRDAGVKVSKYWYLGPLKIKAAHFFSTLKEWPQTHQASISYTGPTERPPNEPEETPVQRPSLYRRILRRLASYWAQPQDALSQEVSPEVWKDVQLSTIELSITTRNNQLDPTSKEDFLNICIEPDTISKGDFITIGSRKVRNPKLHVEGTECLQASQCTLLIPEGAGGSFSIDSEEYEAMPVEVKLLPRKLQFFCDPRKREQMLTSPTQ

SEQ ID NO: 25423 - protein, 286 aa, Homo sapiens
PEYVSMCDSLAKIPKRASMVHSLIEAYALHKQMRIVKPKVASMEEMATFHTDAYLQHLQKVSQEGDDDHPDSIEYGLGYDCPATEGIFDYAAAIGGATITAAQCLIDGMCKVAINWSGGWHHAKKDEASGFCYLNDAVLGILRLRRKFERILYVDLDLHHGDGVEDAFSFTSKVMTVSLHKFSPGFFPGTGDVSDVGLGKGRYYSVNVPIQDGIQDEKYYQICESVLKEVYQAFNPKAVVLQLGADTIAGDPMCSFNMTPVGIGKCLKYILQWQLATLILGGDRRL

SEQ ID NO: 25424 - protein, 315 aa, Homo sapiens
RPPPDWQPPFACDVDKLHFTPRIQRLNELEAQTRVKLNFLDQIAKYWELQGSTLKIPHVERKILDLFQLNKLVAEEGGFAVVCKDRKWTKIATKMGFAPGKAVGSHIRGHYERILNPYNLFLSGDSLRKPNLTTDTKDKEYKPHDIPQRQSVQPSETCPPARRAKRMRAEAMNIKIEPEETTEARTHNLRRRMGCPTPKCENEKEMKSSIKQEPIERKDYIVENEKEKPKSRSKKATNAVDLYVCLLCGSGNDEDRLLLCDGCDDSYHTFCLIPPLHDVPKGDWRCPKCLAQECSKPQEAFGFEQAARDYTLRTF

SEQ ID NO: 25425 - protein, 1499 aa, Homo sapiens
MEAATTLHPGPRPALPLGGPGPLGEFLPPPECPVFEPSWEEFADPFAFIHKIRPIAEQTGICKVRPPPDWQPPFACDVDKLHFTPRIQRLNELEAQTRVKLNFLDQIAKYWELQGSTLKIPHVERKILDLFQLNKLVAEEGGFAVVCKDRKWTKIATKMGFAPGKAVGSHIRGHYERILNPYNLFLSGDSLRAMNIKIEPEETTEARTHNLRRRMGCPTPKCENEKEMKSSIKQEPIERKDYIVENEKEKPKSRSKKATNAVDLYVCLLCGSGNDEDRLLLCDGCDDSYHTFCLIPPLHDVPKGDWRCPKCLAQECSKPQEAFGFEQAARDYTLRTFGEMADAFKSDYFNMPVHMVPTELVEKEFWRLVSTIEEDVTVEYGADIASKEFGSGFPVRDGKIKLSPEEEEYLDSGWNLNNMPVMEQSVLAHITADICGMKLPWLYVGMCFSSFCWHIEDHWSYSINYLHWGEPKTWYGVPGYAAEQLENVMKKLAPELFVSQPDLLHQLVTIMNPNTLMTHEVPVYRTNQCAGEFVITFPRAYHSGFNQGFNFAEAVNFCTVDWLPLGRQCVEHYRLLHRYCVFSHDEMICKMASKADVLDVVVASTVQKDMAIMIEDEKALRETVRKLGVIDSERMDFELLPDDERQCVKCKTTCFMSAISCSCKPGLLVCLHHVKELCSCPPYKYKLRYRYTLDDLYPMMNALKLRAESYNEWALNVNEALEAKINKKKSLVSFKALIEESEMKKFPDNDLLRHLRLVTQDAEKCASVAQQLLNGKRQTRYRSGGGKSQNQLTVNELRQFVTQLYALPCVLSQTPLLKDLLNRVEDFQQHSQKLLSEETPSAAELQDLLDVSFEFDVELPQLAEMRIRLEQARWLEEVQQACLDPSSLTLDDMRRLIDLGVGLAPYSAVEKAMARLQELLTVSEHWDDKAKSLLKARPRHSLNSLATAVKEIEEIPAYLPNGAALKDSVQRARDWLQDVEGLQAGGRVPVLDTLIELVTRGRSIPVHLNSLPRLETLVAEVQAWKECAVNTFLTENSPYSLLEVLCPRCDIGLLGLKRKQRKLKEPLPNGKKKSTKLESLSDLERALTESKETASAMATLGEARLREMEALQSLRLANEGKLLSPLQDVDIKICLCQKAPAAPMIQCELCRDAFHTSCVAVPSISQGLRIWLCPHCRRSEKPPLEKILPLLASLQRIRVRLPEGDALRYMIERTVNWQHRAQQLLSSGNLKFVQDRVGSGLLYSRWQASAGQVSDTNKVSQPPGTTSFSLPDDWDNRTSYLHSPFSTGRSCIPLHGVSPEVNELLMEAQLLQVSLPEIQELYQTLLAKPSPAQQTDRSSPVRPSSEKNDCCRGKRDGINSLERKLKRRLEREGLSSERWERVKKMRTPKKKKIKLSHPKDMNNFKLERERSYELVRSAETHSLPSDTSYSEQEDSEDEDAICPAVSCLQPEGDEVDWVQCDGSCNQWFHQVCVGVSPEMAEKEDYICVRCTVKDAPSRK

SEQ ID NO: 25426 - protein, 1724 aa, Homo sapiens
MAGASVKVAVRVRPFNSREMSRDSKCIIQMSGSTTTIVNPKQPKETPKSFSFDYSYWSHTSPEDINYASQKQVYRDIGEEMLQHAFEGYNVCIFAYGQTGAGKSYTMMGKQEKDQQGIIPQLCEDLFSRINDTTNDNMSYSVEVSYMEIYCERVRDLLNPKNKGNLRVREHPLLGPYVEDLSKLAVTSYNDIQDLMDSGNKARTVAATNMNETSSRSHAVFNIIFTQKRHDAETNITTEKVSKISLVDLAGSERADSTGAKGTRLKEGANINKSLTTLGKVISALAEMDSGPNKNKKKKKTDFIPYRDSVLTWLLRENLGGNSRTAMVAALSPADINYDETLSTLRYADRAKQIRCNAVINEDPNNKLIRELKDEVTRLRDLLYAQGLGDITDTNTVPGGPKYVSDLENNNLNRGGTVNEAPDPLSTVTNALVGMSPSSSLSALSSRAASVSSLHERILFAPGSEEAIERLKETEKIIAELNETWEEKLRRTEAIRMEREALLAEMGVAMREDGGTLGVFSPKKTPHLVNLNEDPLMSECLLYYIKDGITRVGREDGERRQDIVLSGHFIKEEHCVFRSDSRGGSEAVVTLEPCEGADTYVNGKKVTEPSILRSGNRIIMGKSHVFRFNHPEQARQERERTPCAETPAEPVDWAFAQRELLEKQGIDMKQEMEQRLQELEDQYRREREEATYLLEQQRLDYESKLEALQKQMDSRYYPEVNEEEEEPEDEVQWTERECELALWAFRKWKWYQFTSLRDLLWGNAIFLKEANAISVELKKKVQFQFVLLTDTLYSPLPPDLLPPEAAKDRETRPFPRTIVAVEVQDQKNGATHYWTLEKLRQRLDLMREMYDRAAEVPSSVIEDCDNVVTGGDPFYDRFPWFRLVGRAFVYLSNLLYPVPLVHRVAIVSEKGEVKGFLRVAVQAISADEEAPDYGSGVRQSGTAKISFDDQHFEKFQSESCPVVGMSRSGTSQEELRIVEGQGQGADVGPSADEVNNNTCSAVPPEGLLLDSSEKAALDGPLDAALDHLRLGNTFTFRVTVLQASSISAEYADIFCQFNFIHRHDEAFSTEPLKNTGRGPPLGFYHVQNIAVEVTKSFIEYIKSQPIVFEVFGHYQQHPFPPLCKDVLSPLRPSRRHFPRVMPLSKPVPATKLSTLTRPCPGPCHCKYDLLVYFEICELEANGDYIPAVVDHRGGMPCMGTFLLHQGIQRRITVTLLHETGSHIRWKEVRELVVGRIRNTPETDESLIDPNILSLNILSSGYIHPAQDDRTFYQFEAAWDSSMHNSLLLNRVTPYREKIYMTLSAYIEMENCTQPAVVTKDFCMVFYSRDAKLPASRSIRNLFGSGSLRASESNRVTGVYELSLCHVADAGSPGMQRRRRRVLDTSVAYVRGEENLAGWRPRSDSLILDHQWELEKLSLLQEVEKTRHYLLLREKLETAQRPVPEALSPAFSEDSESHGSSSASSPLSAEGRPSPLEAPNERQRELAVKCLRLLTHTFNREYTHSHVCVSASESKLSEMSVTLLRDPSMSPLGVATLTPSSTCPSLVEGRYGATDLRTPQPCSRPASPEPELLPEADSKKLPSPARATETDKEPQRLLVPDIQEIRVSPIVSKKGYLHFLEPHTSGWARRFVVVRRPYAYMYNSDKDTVERFVLNLATAQVEYSEDQQAMLKTPNTFAVCTEHRGILLQAASDKDMHDWLYAFNPLLAGTIRSKLSRRRSAQMRV

SEQ ID NO: 25427 - protein, 554 aa, Homo sapiens
MNEVSSECGKKCEPLGCSSTNGDLQGEAGAVVSIFLRMVPRIKSNEGYGYSNRNWRKENTMHSLDRNIVDGGQALGQWKRKSKGRSSWAAAPHCSPRCSLTSQGVKKMRSSTLQDPRRRDPQDDVYVDITDRLRFAILYSRPKSASNVHYFSIDNELEYENFSEDFGPLNLAMVYRYCCKINKKLKSITMLRKKIVHFTGSDQRKQANAAFLVGCYMVIYLGRTPEAAYRILIFGDTPYIPFRDAAYGSCNFYITLLDCFHAVKKAMQYGFLNFNSFNLDEYEHYEKAENGDLNWIIPDRFIAFCGPHSRARLESGYHQHSPETYIQYFKNHNVTTIIRLNKRMYDAKRFTDAGFDHHDLFFADGSTPTDAIVKRFLDICENAEGAIAVHCKAGLGRTGTLIACYIMKHYRMTAAETIAWVRICRPGLVIGPQQQFLVMKQTSLWLEGDYFRQRLKGQENGQHRAAFSKLLSGVDDISINGVENQDQQEPKPYSDDDEINGVTQGDRSRALKRRRQSKTNDILLPSPLAVLTFTLCSVVIWWIVCDYILPILLF

SEQ ID NO: 25428 - protein, 774 aa, Homo sapiens
MSGGHQLQLAALWPWLLMATLQAGFGRTGLVLAAAVESERSAEQKAIIRVIPLKMDPTGKLNLTLEGVFAGVAEITPAEGKLMQSHPLYLCNASDDDNLEPGFISIVKLESPRRAPRPCLSLASKARMAGERGASAVLFDITEDRAAAEQLQQPLGLTWPVVLIWGNDAEKLMEFVYKNQKAHVRIELKEPPAWPDYDVWILMTVVGTIFVIILASVLRIRCRPRHSRPDPLQQRTAWAISQLATRRYQASCRQARGEWPDSGSSCSSAPVCAICLEEFSEGQELRVISCLHEFHRNCVDPWLHQHRTCPLCMFNITEGDSFSQSLGPSRSYQEPGRRLHLIRQHPGHAHYHLPAAYLLGPSRSAVARPPRPGPFLPSQEPGMGPRHHRFPRAAHPRAPGEQQRLAGAQHPYAQGWGLSHLQSTSQHPAACPVPLRRARPPDSSGSGESYCTERSGYLADGPASDSSSGPCHGSSSDSVVNCTDISLQGVHGSSSTFCSSLSSDFDPLVYCSPKGDPQRVDMQPSVTSRPRSLDSVVPTGETQVSSHVHYHRHRHHHYKKRFQWHGRKPGPETGVPQSRPPIPRTQPQPEPPSPDQQVTRSNSAAPSGRLSNPQCPRALPEPAPGPVDASSICPSTSSLFNLQKSSLSARHPQRKRRGGPSEPTPGSRPQDATVHPACQIFPHYTPSVAYPWSPEAHPLICGPPGLDKRLLPETPGPCYSNSQPVWLCLTPRQPLEPHPPGEGPSEWSSDTAEGRPCPYPHCQVLSAQPDYRPV

SEQ ID NO: 25429 - protein, 490 aa, Homo sapiens
MRFTFTSRCLALFLLLNHPTPILPAFSNQTYPTIEPKPFLYVVGRKKMMDAQYKCYDRMQQLPAYQGEGPYCNRTWDGWLCWDDTPAGVLSYQFCPDYFPDFDPSEKVTKYCDEKGVWFKHPENNRTWSNYTMCNAFTPEKLKNAYVLYYLAIVGHSLSIFTLVISLGIFVFFRKLTTIFPLNWKYRKALSLGCQRVTLHKNMFLTYILNSMIIIIHLVEVVPNGELVRRDPVSCKILHFFHQYMMACNYFWMLCEGIYLHTLIVVAVFTEKQRLRWYYLLGWGFPLVPTTIHAITRAVYFNDNCWLSVETHLLYIIHGPVMAALVVNFFFLLNIVRVLVTKMRETHEAESHMYLKAVKATMILVPLLGIQFVVFPWRPSNKMLGKIYDYVMHSLIHFQGFFVATIYCFCNNEVQTTVKRQWAQFKIQWNQRWGRRPSNRSARAAAAAAEAGDIPIYICHQELRNEPANNQGEESAEIIPLNIIEQESSA

SEQ ID NO: 25430 - protein, 540 aa, Homo sapiens
MATSGAASAELVIGWCIFGLLLLAILAFCWIYVRKYQSRRESEVVSTITAIFSLAIALITSALLPVDIFLVSYMKNQNGTFKDWANANVSRQIEDTVLYGYYTLYSVILFCVFFWIPFVYFYYEEKDDDDTSKCTQIKTALKYTLGFVVICALLLLVGAFVPLNVPNNKNSTEWEKVKSLFEELGSSHGLAALSFSISSLTLIGMLAAITYTAYGMSALPLNLIKGTRSAAYERLENTEDIEEVEQHIQTIKSKSKDGRPLPARDKRALKQFEERLRTLKKRERHLEFIENSWWTKFCGALRPLKIVWGIFFILVALLFVISLFLSNLDKALHSAGIDSGFIIFGANLSNPLNMLLPLLQTVFPLDYILITIIIMYFIFTSMAGIRNIGIWFFWIRLYKIRRGRTRPQALLFLCMILLLIVLHTSYMIYSLAPQYVMYGSQNYLIETNITSDNHKGNSTLSVPKRCDADAPEDQCTVTRTYLFLHKFWFFSAAYYFGNWAFLGVFLIGLIVSCCKGKKSVIEGVDEDSDISDDEPSVYSA

SEQ ID NO: 25431 - protein, 176 aa, Homo sapiens
MSRESDVEAQQSHGSSACSQPHGSVTQSQGSSSQSQGISSSSTSTMPNSSQSSHSSSGTLSSLETVSTQELYSIPEDQEPEDQEPEEPTPAPWARLWALQDGFANLECVNDNYWFGRDKSCEYCFDEPLLKRTDKYRTYSKKHFRIFREVGPKNSYIAYIEDHSGNGTFVNTELVG

SEQ ID NO: 25432 - protein, 1128 aa, Homo sapiens
MGLCGLGLLSDNFGKILGRAGGAAHWRPGHLRKPDLAPEPRGLQVPRTRSAERPALPPQRSHLMPRLKESRSHESLLSPSSAVEALDLSMEEEVVIKPVHSSILGQDYCFEVTTSSGSKCFSCRSAAERDKWMENLRRAVHPNKDNSRRVEHILKLWVIEAKDLPAKKKYLCELCLDDVLYARTTGKLKTDNVFWGEHFEFHNLPPLRTVTVHLYRETDKKKKKERNSYLGLVSLPAASVAGRQFVEKWYPVVTPNPKGGKGPGPMIRIKARYQTITILPMEMYKEFAEHITNHYLGLCAALEPILSAKTKEEMASALVHILQSTGKVKDFLTDLMMSEVDRCGDNEHLIFRENTLATKAIEEYLKLVGQKYLQDALGEFIKALYESDENCEVDPSKCSAADLPEHQGNLKMCCELAFCKIINSYCVFPRELKEVFASWRQECSSRGRPDISERLISASLFLRFLCPAIMSPSLFNLLQEYPDDRTARTLTLIAKVTQNLANFAKFGSKEEYMSFMNQFLEHEWTNMQRFLLEISNPETLSNTAGFEGYIDLGRELSSLHSLLWEAVSQLEQSIVSKLGPLPRILRDVHTALSTPGSGQLPGTNDLASTPGSGSSSISAGLQKMVIENDLSGLIDFTRLPSPTPENKDLFFVTRSSGVQPSPARSSSYSEANEPDLQMANGGKSLSMVDLQDARTLDGEAGSPAGPDVLPTDGQAAAAQLVAGWPARATPVNLAGLATVRRAGQTPTTPGTSEGAPGRPQLLAPLSFQNPVYQMAAGLPLSPRGLGDSGSEGHSSLSSHSNSEELAAAAKLGSFSTAAEELARRPGELARRQMSLTEKGGQPTVPRQNSAGPQRRIDQPPPPPPPPPPAPRGRTPPNLLSTLQYPRPSSGTLASASPDWVGPSTRLRQQSSSSKGDSPELKPRAVHKQGPSPVSPNALDRTAAWLLTMNAQLLEDEGLGPDPPHRDRLRSKDELSQAEKDLAVLQDKLRISTKKLEEYETLFKCQEETTQKLVLEYQARLEEGEERLRRQQEDKDIQMKGIISRLMSVEEELKKDHAEMQAAVDSKQKIIDAQEKRIASLDAANARLMSALTQLKERYSMQARNGISPTNPTKLQITENGEFRNSSNC

SEQ ID NO: 25433 - protein, 1348 aa, Homo sapiens
MFNKSFGTPFGGGTGGFGTTSTFGQNTGFGTTSGGAFGTSAFGSSNNTGGLFGNSQTKPGGLFGTSSFSQPATSTSTGFGFGTSTGTANTLFGTASTGTSLFSSQNNAFAQNKPTGFGNFGTSTSSGGLFGTTNTTSNPFGSTSGSLFGPSSFTAAPTGTTIKFNPPTGTDTMVKAGVSTNISTKHQCITAMKEYESKSLEELRLEDYQANRKGPQNQVGAGTTTGLFGSSPATSSATGLFSSSTTNSGFAYGQNKTAFGTSTTGFGTNPGGLFGQQNQQTTSLFSKPFGQATTTQNTGFSFGNTSTIGQPSTNTMGLFGVTQASQPGGLFGTATNTSTGTAFGTGTGLFGQTNTGFGAVGSTLFGNNKLTTFGSSTTSAPSFGTTSGGLFGFGTNTSGNSIFGSKPAPGTLGTGLGAGFGTALGAGQASLFGNNQPKIGGPLGTGAFGAPGFNTTTATLGFGAPQAPVALTDPNASAAQQAVLQQHINSLTYSPFGDSPLFRNPMSDPKKKEERLKPTNPAAQKALTTPTHYKLTPRPATRVRPKALQTTGTAKSHLFDGLDDDEPSLANGAFMPKKSIKKLVLKNLNNSNLFSPVNRDSENLASPSEYPENGERFSFLSKPVDENHQQDGDEDSLVSHFYTNPIAKPIPQTPESAGNKHSNSNSVDDTIVALNMRAALRNGLEGSSEETSFHDESLQDDREEIENNSYHMHPAGIILTKVGYYTIPSMDDLAKITNEKGECIVSDFTIGRKGYGSIYFEGDVNLTNLNLDDIVHIRRKEVVVYLDDNQKPPVGEGLNRKAEVTLDGVWPTDKTSRCLIKSPDRLADINYEGRLEAVSRKQGAQFKEYRPETGSWVFKVSHFSKYGLQDSDEEEEEHPSKTSTKKLKTAPLPPASQTTPLQMALNGKPAPPPQSQSPEVEQLGRVVELDSDMVDITQEPVLDTMLEESMPEDQEPVSASTHIASSLGINPHVLQIMKASLLTDEEDVDMALDQRFSRLPSKADTSQEICSPRLPISASHSSKTRSLVGGLLQSKFTSGAFLSPSVSVQECRTPRAASLMNIPSTSSWSVPPPLTSVFTMPSPAPEVPLKTVGTRRQLGLVPREKSVTYGKGKLLMDMALFMGRSFRVGWGPNWTLANSGEQLNGSHELENHQIADSMEFGFLPNPVAVKPLTESPFKVHLEKLSLRQRKPDEDMKLYQTPLELKLKHSTVHVDELCPLIVPNLGVAVIHDYADWVKEASGDLPEAQIVKHWSLTWTLCEALWGHLKELDSQLNEPREYIQILERRRAFSRWLSCTATPQIEEEVSLTQKNSPVEAVFSYLTGKRISEACSLAQQSVSLCTPGWSAVA

SEQ ID NO: 25434 - protein, 241 aa, Homo sapiens
MAVFLQLLPLLLSRAQGNPGASLDGRPGDRVNLSCGGVSHPIRWVWAPSFPACKGLSKGRRPILWASSSGTPTVPPLQPFVGRLRSLDSGIRRLELLLSAGDSGTFFCKGRHEDESRTVLHVLGDRTYCKAPGPTHGSVYPQLLIPLLGAGLVLGLGALGLVWWLHRRLPPQPIRPLPRFAPLVKTEPQRPVKEEEPKIPGDLDQEPSLLYADLDHLALSRPRRLSTADPADASTIYAVVV

SEQ ID NO: 25435 - protein, 312 aa, Homo sapiens
MGSNITSTSIIFLLTGVPGLEAFHTWISIPFCFLSVTALLGNSLILFATITQPSLHEPMYYFLSMLSATDLGLSISTLVTMLSIFWFNVREISFNACLSHMFFIKFFTVMESSVLLAMAFDRFVAVSNPLRYAMILTDSRIAQIGVASVIRGLLMLTPMVALLIRLSYCHSQVLHHSYCYHPDVMKLSCTDTRINSAVGLTAMFSTVGVDLLLILLSYVLIIRTVLSVASPEERKETFSTCVSHIVAFAIYYIPLISLSIVHRFGKQAPAYVHTMIANTYLLISPLMNPVIYSVKTKQIRRAVIKILHSKET

SEQ ID NO: 25436 - protein, 683 aa, Homo sapiens [sequence omitted]

SEQ ID NO: 25437 - protein, 1728 aa, Homo sapiens
MAGASVKVAVRVRPFNSREMSRDSKCIIQMSGSTTTIVNPKQPKETPKSFSFDYSYWSHTSPEDINYASQKQVYRDIGEEMLQHAFEGYNVCIFAYGQTGAGKSYTMMGKQEKDQQGIIPQLCEDLFSRINDTTNDNMSYSVEVSYMEIYCERVRDLLNPKNKGNLRVREHPLLGPYVEDLSKLAVTSYNDIQDLMDSGNKARTVAATNMNETSSRSHAVFNIIFTQKRHDAETNITTEKVSKISLVDLAGSERADSTGAKGTRLKEGANINKSLTTLGKVISALAEMDSGPNKNKKKKKTDFIPYRDSVLTWLLRENLGGNSRTAMVAALSPADINYDETLSTLRYADRAKQIRCNAVINEDPNNKLIRELKDEVTRLRDLLYAQGLGDITDMTNALVGMSPSSSLSALSSRAASVSSLHERILFAPGSEEAIERLKETEKIIAELNETWEEKLRRTEAIRMEREALLAEMGVAMREDGGTLGVFSPKKTPHLVNLNEDPLMSECLLYYIKDGITRVGREDGERRQDIVLSGHFIKEEHCVFRSDSRGGSEAVVTLEPCEGADTYVNGKKVTEPSILRSGNRIIMGKSHVFRFNHPEQARQERERTPCAETPAEPVDWAFAQRELLEKQGIDMKQEMEQRLQELEDQYRREREEATYLLEQQRLDYESKLEALQKQMDSRYYPEVNEEEEEPEDEVQWTERECELALWAFRKWKWYQFTSLRDLLWGNAIFLKEANAISVELKKKVQFQFVLLTDTLYSPLPPDLLPPEAAKDRETRPFPRTIVAVEVQDQKNGATHYWTLEKLRQRLDLMREMYDRAAEVPSSVIEDCDNVVTGGDPFYDRFPWFRLVGRAFVYLSNLLYPVPLVHRVAIVSEKGEVKGFLRVAVQAISADEEAPDYGSGVRQSGTAKISFDDQHFEKFQSESCPVVGMSRSGTSQEELRIVEGQGQGADVGPSADEVNNNTCSAVPPEGLLLDSSEKAALDGPLDAALDHLRLGNTFTFRVTVLQASSISAEYADIFCQFNFIHRHDEAFSTEPLKNTGRGPPLGFYHVQNIAVEVTKSFIEYIKSQPIVFEVFGHYQQHPFPPLCKDVLSPLRPSRRHFPRVMPLSKPVPATKLSTLTRPCPGPCHCKYDLLVYFEICELEANGDYIPAVVDHRGGMPCMGTFLLHQGIQRRITVTLLHETGSHIRWKEVRELVVAPGGGQHLGRPWPADASLHFRRLLLSCVFLWPFLLRTPGRIRNTPETDESLIDPNILSLNILSSGYIHPAQDDRTFYQFEAAWDSSMHNSLLLNRVTPYREKIYMTLSAYIEMENCTQPAVVTKDFCMVFYSRDAKLPASRSIRNLFGSGSLRASESNRVTGVYELSLCHVADAGSPGMQRRRRRVLDTSVAYVRGEENLAGWRPRSDSLILDHQWELEKLSLLQEVEKTRHYLLLREKLETAQRPVPEALSPAFSEDSESHGSSSASSPLSAEGRPSPLEAPNERQRELAVKCLRLLTHTFNREYTHSHVCVSASESKLSEMSVTLLRDPSMSPLGVATLTPSSTCPSLVEGRYGATDLRTPQPCSRPASPEPELLPEADSKKLPSPARATETDKEPQRLLVPDIQEIRVSPIVSKKGYLHFLEPHTSGWARRFVVVRRPYAYMYNSDKDTVERFVLNLATAQVEYSEDQQAMLKTPNTFAVCTEHRGILLQAASDKDMHDWLYAFNPLLAGTIRSKLSRRRSAQMRV

SEQ ID NO: 25438 - protein, 1505 aa, Homo sapiens
MEAATTLHPGPRPALPLGGPGPLGEFLPPPECPVFEPSWEEFADPFAFIHKIRPIAEQTGICKVRPPPDWQPPFACDVDKLHFTPRIQRLNELEAQTRVKLNFLDQIAKYWELQGSTLKIPHVERKILDLFQLNKLVAEEGGFAVVCKDRKWTKIATKMGFAPGKAVGSHIRGHYERILNPYNLFLSGDSLRCLQKPNLTTDTKDKEYKPHDIPQRQSVQPSETCPPARRAKRMRAEAMNIKIEPEETTEARTHNLRRRMGCPTPKCENEKEMKSSIKQEPIERKDYIVENEKEKPKSRSKKATNAVDLYVCLLCGSGNDEDRLLLCDGCDDSYHTFCLIPPLHDVPKGDWRCPKCLAQECSKPQEAFGFEQAARDYTLRTFGEMADAFKSDYFNMPVHMVPTELVEKEFWRLVSTIEEDVTVEYGADIASKEFGSGFPVRDGKIKLSPEEEEYLDSGWNLNNMPVMEQSVLAHITADICGMKLPWLYVGMCFSSFCWHIEDHWSYSINYLHWGEPKTWYGVPGYAAEQLENVMKKLAPELFVSQPDLLHQLVTIMNPNTLMTHEVPVYRTNQCAGEFVITFPRAYHSGFNQGFNFAEAVNFCTVDWLPLGRQCVEHYRLLHRYCVFSHDEMICKMASKADVLDVVVASTVQKDMAIMIEDEKALRETVRKLGVIDSERMDFELLPDDERQCVKCKTTCFMSAISCSCKPGLLVCLHHVKELCSCPPYKYKLRYRYTLDDLYPMMNALKLRAESYNEWALNVNEALEAKINKKKSLVSFKALIEESEMKKFPDNDLLRHLRLVTQDAEKCASVAQQLLNGKRQTRYRSGGGKSQNQLTVNELRQFVTQLYALPCVLSQTPLLKDLLNRVEDFQQHSQKLLSEETPSAAELQDLLDVSFEFDVELPQLAEMRIRLEQARWLEEVQQACLDPSSLTLDDMRRLIDLGVGLAPYSAVEKAMARLQELLTVSEHWDDKAKSLLKARPRHSLNSLATAVKEIEEIPAYLPNGAALKDSVQRARDWLQDVEGLQAGGRVPVLDTLIELVTRGRSIPVHLNSLPRLETLVAEVQAWKECAVNTFLTENSPYSLLEVLCPRCDIGLLGLKRKQRKLKEPLPNGKKKSTKLESLSDLERALTESKETASAMATLGEARLREMEALQSLRLANEGKLLSPLQDVDIKICLCQKAPAAPMIQCELCRDAFHTSCVAVPSISQGLRIWLCPHCRRSEKPPLEKILPLLASLQRIRVRLPEGDALRYMIERTVNWQHRAQQLLSSGNLKFVQDRVGSGLLYSRWQASAGQVSDTNKVSQPPGTTSFSLPDDWDNRTSYLHSPFSTGRSCIPLHGVSPEVNELLMEAQLLQVSLPEIQELYQTLLAKPSPAQQTDRSSPVRPSSEKNDCCRGKRDGINSLERKLKRRLEREGLSSERWERVKKMRTPKKKKIKLSHPKDMNNFKLERERSYELVRSAETHSLPSDTSYSEQEDSEDEDAICPAVSCLQPEGDELSPSRR

SEQ ID NO: 25439 - protein, 413 aa, Homo sapiens
HGVKGQKGERGLPGLQGVIGFPGMQGPEGPQGPPGQKGDTGEPGLPGTKGTRGPPGASGYPGNPGLPGIPGQDGPPGPPGIPGCNGTKGERGPLGPPGLPGFAGNPGPPGLPGMKGDPGEILGHVPGMLLKGERGFPGIPGTPGPPGLPGLQGPVGPPGFTGPPGPPGPPGPPGEKGQMGLSFQGPKGDKGDQGVSGPPGVPGQAQVQEKGDFATKGEKGQKGEPGFQGMPGVGEKGEPGKPGPRGKPGKDGDKGEKGSPGFPGEPGYPGLIGRQGPQGEKGEAGPPGPPGIVIGTGPLGEKGERGYPGTPGPRGEPGPKGFPGLPGQPGPPGLPVPGQAGAPGFPGERGEKGDRGFPGTSLPGPSGRDGLPGPPGSPGPPGQPGYTSEFPQKWFNVGCKQTPGCRADPGWGL

SEQ ID NO: 25440 - protein, 1012 aa, Homo sapiens
MPVKKTDTDRALSLLEEYCKKLRKPEEQLLKNAVKKVMGIFKSSLFQALLDIQEFYEVTLLNSQKSCEQKIEEANQVLQKWEKTSLLAPCHDRLQKSSELTDCSGSKENASCIEQNKENQSFENETDETTTQNQGRCPAQNCSVEAPAWMPVHHCTKYRYQDEDAPHDHSLPRLTHEVRGPELVHVSEKNLSQIENVHGYVLQSHISPLKASPAPIIVNTDTLDTIPYVNGTEIEYEFEEITLERGNSGLGFSIAGGTDNPHIGDDPGIFITKIIPGGAAAEDGRLRVNDCILRVNEVDVSEVSHSKAVEALKEAGSIVRLYVRRRRPILETVVEIKLFKGPKGLGFSIAGGVGNQHIPGDNSIYVTKIIDGGAAQKDGRLQVGDRLLMVNNYSLEEVTHEEAVAILKNTSEVVYLKVGKPTTIYMTDPYGPPDITHSYSPPMENHLLSGNNGTLEYKTSLPPISPGRYSPIPKHMLVDDDYTRPPEPVYSTVNKLCDKPASPRHYSPVECDKSFLLSAPYSHYHLGLLPDSEMTSHSQHSTATRQPSMTLQRAVSLEGEPRKVVLHKGSTGLGFNIVGGEDGEGIFVSFILAGGPADLSGELQRGDQILSVNGIDLRGASHEQAAAALKGAGQTVTIIAQYQPEDYARFEAKIHDLREQMMNHSMSSGSGSLRTNQKRSLYVRAMFDYDKSKDSGLPSQGLSFKYGDILHVINASDDEWWQARRVMLEGDSEEMGVIPSKRRVERKERARLKTVKFNAKPGVIDSKGSFNDKRKKSFIFSRKFPFYKNKEQSEQETSDPERGQEDLILSYEPVTRQEINYTRPVIILGPMKDRINDDLISEFPDKFGSCVPHTTRPKRDYEVDGRDYHFVISREQMEKDIQEHKFIEAGQYNDNLYGTSVQSVRFVAERGKHCILDVSGNAIKRLQVAQLYPIAIFIKPRSLEPLMEMNKRLTEEQAKKTYDRAIKLEQEFGEYFTAIVQGDTLEDIYNQCKLVIEEQSGPFIWIPSKEKL

SEQ ID NO: 25441 - protein, 1036 aa, Homo sapiens
MEPQDLELELCKKHHFGINKPEKIIPSPDDSKFLLKTFTHIKSNVSAPNKKKVKESKEKEKLERRLLEELLKMFMDSESFYYSLTYDLTNSVQRQSTGERDGRPLWQKVDDRFFWNKYMIQDLTEIGTPDVDFWIIPMIQGFVQIEELVVNYTESSDDEKSSPETPPQESTCVDDIHPRFLVALISRRSRHRAGMRYKRRGVDKNGNVANYVETEQLIHVHNHTLSFVQTRGSVPVFWSQVGYRYNPRPRLDRSEKETVAYFCAHFEEQLNIYKKQVIINLVDQAGREKIIGDAYLKQVLLFNNSHLTYVSFDFHEHCRGMKFENVQTLTDAIYDIILDMKWCWVDEAGVICKQEGIFRVNCMDCLDRTNVVQAAIARVVMEQQLKKLGVMPPEQPLPVKCNRIYQIMWANNGDSISRQYAGTAALKGDFTRTGERKLAGVMKDGVNSANRYYLNRFKDAYRQAVIDLMQGIPVTEDLYSIFTKEKEHEALHKENQRSHQELISQLLQSYMKLLLPDDEKFHGGWALIDCDPSLIDATHRDVDVLLLLSNSAYYVAYYDDEVDKVNQYQRLSLENLEKIEIGPEPTLFGKPKFSCMRLHYRYKEASGYFHTLRAVMRNPEEDGKDTLQCIAEMLQITKQAMGSDLPIIEKKLERKSSKPHEDIIGIRSQNQGSLAQGKNFLMSKFSSLNQKVKQTKSNVNIGNLRKLGNFTKPEMKVNFLKPNLKVNLWKSDSSLETMENTGVMDKVQAESDGDMSSDNDSYHSDEFLTNSKSDEDRQLANSLESVGPIDYVLPSCGIIASAPRLGSRSQSLSSTDSSVHAPSEITVAHGSGLGKGQESPLKKSPSAGDVHILTGFAKPMDIYCHRFVQDAQNKVTHLSETRSVSQQASQERNQMTNQVSNETQSESTEQTPSRPSQLDVSLSATGPQFLSVEPAHSVASQKTPTSASSMLELETGLHVTPSPSESSSSRAVSPFAKIRSSMVQVASITQAGLTHGINFAVSKVQKSPPEPEIINQVQQNELKKMFIQCQTRIIQI

SEQ ID NO: 25442 - protein, 1564 aa, Homo sapiens
FRDIQEQALQTCAVVVMCKQLYWNWISTFTSGIRLEEQRAADGKTLKQQTVPQQKVGVTGPPDPQVRCPSVIEFGKYEIHTWYSSPYPQEYSRLPKLYLCEFCLKYMKSRTILQQHMKKCGWFHPPANEIYRKNNISVFEVDGNVSTIYCQNLCLLAKLFLDHKTLYYDVEPFLFYVLTQNDVKGCHLVGYFSKEKHCQQKYNVSCIMILPQYQRKGYGRFLIDFSYLLSKREGQAGSPEKPLSDLGRLSYMAYWKSVILECLYHQNDKQISIKKLSKLTGICPQDITSTLHHLRMLDFRSDQFVIIRREKLIQDHMAKLQLNLRPVDVDPECLRWTPVIVSNSVVSEEEEEEAEEGENEEPQCQERELEISVGKSVSHENKEQDSYSVESEKKPEVMAPVSSTRLSKQVLPHDSLPANSQPSRRGRWGRKNRKTQERFGDKDSKLLLEETSSAPQEQYGECGEKSEATQEQYTESEEQLVASEEQPSQDGKPDLPKRRLSEGVEPWRGQLKKSPEALKCRLTEGSERLPRRYSEGDRAVLRGFSESSEEEEEPESPRSSSPPILTKPTLKRKKPFLHRRRRVRKRKHHNSSVVTETISETTEVLDEPFEDSDSERPMPRLEPTFEIDEEEEEEDENELFPREYFRRLSSQDVLRCQSSSKRKSKDEEEDEESDDADDTPILKPVSLLRKRDVKNSPLEPDTSTPLKKKKGWPKGKSRKPIHWKKRPGRKPGFKLSREIMPVSTQACVIEPIVSIPKAGRKPKIQESEETVEPKEDMPLPEERKEEEEMQAEAEEAEEGEEEDAASSEVPAASPADSSNSPETETKEPEVEEEEEKPRVSEEQRQSEEEQQELEEPEPEEEEDAAAETAQNDDHDADDEDDGHLESTKKKELEEQPTREDVKEEPGVQESFLDANMQKSREKIKDKEETELDSEEEQPSHDTSVVSEQMAGSEDDHEEDSHTKEELIELKEEEEIPHSELDLETVQAVQSLTQEESSEHEGAYQDCEETLAACQTLQSYTQADEDPQMSMVEDCHASEHNSPISSVQSHPSQSVRSVSSPNVPALESGYTQISPEQGSLSAPSMQNMETSPMMDVPSVSDHSQQVVDSGFSDLGSIESTTENYENPSSYDSTMGGSICGNSSSQSSCSYGGLSSSSSLTQSSCVVTQQMASMGSSCSMMQQSSVQPAANCSIKSPQSCVVERPPSNQQQQPPPPPPQQPQPPPPQPQPAPQPPPPQQQPQQQPQPQPQQPPPPPPPQQQPPLSQCSMNNSFTPAPMIMEIPESGSTGNISIYERIPGDFGAGSYSQPSATFSLAKLQQLTNTIMDPHAMPYSHSPAVTSYATSVSLSNTGLAQLAPSHPLAGTPQAQATMTPPPNLASTTMNLTSPLLQCNMSATNIGIPHTQRLQGQMPVKGHISIRSKSAPLPSAAAHQQQLYGRSPSAVAMQAGPRALAVQRGMNMGVNLMPTPAYNVNSMNMNTLNAMNSYRMTQPMMNSSYHSNPAYMNQTAQYPMQMQMGMMGSQAYTQQPMQPNPHGNMMYTGPSHHSYMNAAGVPKQSLNGPYMRR

SEQ ID NO: 25443 - protein, 332 aa, Homo sapiens
MAEGDAGSDQRQNEEIEAMAAIYGEEWCVIDDCAKIFCIRISDDIDDPKWTLCLQVMLPNEYPGTAPPIYQLNAPWLKGQERADLSNSLEEIYIQNIGESILYLWVEKIRDVLIQKSQMTEPGPDVKKKTEEEDVECEDDLILACQPESSLKALDFDISETRTEVEVEELPPIDHGIPITDRRSTFQAHLAPVVCPKQVKMVLSKLYENKKIASATHNIYAYRIYCEDKQTFLQDCEDDGETAAGGRLLHLMEILNVKNVMVVVSRWYGGILLGPDRFKHINNCARNILVEKNYTNSPEESSKALGKNKKCSSLSNGLSENPGVSICSYVLR

SEQ ID NO: 25444 - protein, 620 aa, Homo sapiens
SIDQDYERAYHRAYDPDYERAYSPEYRRGARHDARSRGPRSRSREHPHSRSPSPEPRGRPGPIGVLLMKSRANEEYGLRLGSQIFVKEMTRTGLATKDGNLHEGDIILKINGTVTENMSLTDARKLIEKSRGKLQLVVLRDSQQTLINIPSLNDSDSEIEDISEIESNRSFSPEERRHQYSDYDYHSSSEKLKERPSSREDTPSRLSRMGATPTPFKSTGDIAGTVVPETNKEPRYQEDPPAPQPKAAPRTFLRPSPEDEAIYGPNTKMVRFKKGDSVGLRLAGGNDVGIFVAGIQEGTSAEQEGLQEGDQILKVNTQDFRGLVREDAVLYLLEIPKGEMVTILAQSRADVYRDILACGRGDSFFIRSHFECEKETPQSLAFTRGEVFRVVDTLYDGKLGNWLAVRIGNELEKGLIPNKSRAEQMASVQNAQRDNAGDRADFWRMRGQRSGVKKNLRKSREDLTAVVSVSTKFPAYERVLLREAGFKRPVVLFGPIADIAMEKLANELPDWFQTAKTEPKDAGSEKSTGVVRLNTVRQIIEQDKHALLDVTPKAVDLLNYTQWFPIVIFFNPDSRQGVKTMRQRLNPTSNKSSRKLFDQANKLKKTCAHLFTDRNCPEAS

SEQ ID NO: 25445 - protein, 447 aa, Homo sapiens
MRSSTLQDPRRRDPQDDVYVDITDRLRFAILYSRPKSASNVHYFSIDNELEYENFSEDFGPLNLAMVYRYCCKINKKLKSITMLRKKIVHFTGSDQRKQANAAFLVGCYMVIYLGRTPEAAYRILIFGDTPYIPFRDAAYGSCNFYITLLDCFHAVKKAMQYGFLNFNSFNLDEYEHYEKAENGDLNWIIPDRFIAFCGPHSRARLESGYHQHSPETYIQYFKNHNVTTIIRLNKRMYDAKRFTDAGFDHHDLFFADGSTPTDAIVKRFLDICENAEGAIAVHCKAGLGRTGTLIACYIMKHYRMTAAETIAWVRICRPGLVIGPQQQFLVMKQTSLWLEGDYFRQRLKGQENGQHRAAFSKLLSGVDDISINGVENQDQQEPKPYSDDDEINGVTQGDRSRALKRRRQSKTNDILLPSPLAVLTFTLCSVVIWWIVCDYILPILLF

SEQ ID NO: 25446 - protein, 314 aa, Homo sapiens
TLYTPAQTHPEQPGSEASTQPIAGTQTVPQTDEAAQTDSQPLHPSDPTEKQQPKRLHVSNIPFRFRDPDLRQMFGQFGKILDVEIIFNERGSKGFGFVTFETSSDADRAREKLNGTIVEGRKIEVNNATARVMTNKKTGNPYTNGWKLNPVVGAVYGPEFYAVTGFPYPTTGTAVAYRGAHLRGRGRAVYNTFRAAPPPPPIPTYGAALEQTLVKMPVPWAGLAPCPLPPQQTPEPAYPTSPAFPPLSCPFASRVVYQDGFYGAEIYGGYAAYRYAQPAAAAAAYSDSYGRVYAAADPYHHTIGPAATYSIGTM

SEQ ID NO: 25447 - protein, 1424 aa, Homo sapiens
MQKRQGYCSYCRVQYNNLEQHLFSAQHRSLTRQSRRQICTSSLMERFLQDVLQHHPYHCQESSSTQDETHVNTGSSSEVVHLDDAFSEEEEEDEDKVEDEDATEERPSEVSEPIEELHSRPHKSQEGTQEVSVRPSVIQKLEKGQQQPLEFVHKIGASVRKCNLVDIGQATNNRSNLVRPPVICNAPASCLPESSNDRPVTANTTSLPPAAHLDSVSKCDPNKVEKYLEQPDGASRNPVPSSHVETTSFSYQKHKESNRKSLRMNSDKLVLWKDVKSQGKTLSAGLKFHERMGTKGSLRVKSPSKLAVNPNKTDMPSNKGIFEDTIAKNHEEFFSNMDCTQEEKHLVFNKTAFWEQKCSVSSEMKFDCISLQSASDQPQETAQDLSLWKEEQIDQEDNYESRGSEMSFDCSSSFHSLTDQSKVSAKEVNLSKEVRTDVQYKNNKSYVSKISSDCDDILHLVTNQSQMIVKEISLQNARHISLVDQSYESSSSETNFDCDASPQSTSDYPQQSVTEVNLPKEVHIGLVDKNYGSSSSEVSADSVFPLQSVVDRPPVAVTETKLRKKAHTSLVDNYGSSCSETSFDCDVSLESVVDHPQLTVKGRNLKGRQVHLKHKKRKPSSAKAHLDCDVSLGTVADESQRAVEKINLLKEKNADLMDMNCESHGPEMGFQADAQLADQSQVAEIERQKVDVDLENKSVQSSRSSLSSDSPASLYHSAHDEPQEALDEVNLKELNIDMEVRSYDCSSSELTFDSDPPLLSVTEQSHLDAEGKERHIDLEDESCESDSSEITFDSDIPLYSVIDQPEVAVYEEETVDLESKSNESCVSEITFDSDIPLHSGNDHPEVAVKEVIQKEEYIHLERKNDEPSGSEISSDSHAPLHSVTNSPEVAVKKLNPQKEEQVHLENKENEPIDSEVSLDYNIIFHSVTGRSEDPIKEISLHTKEHMYLENKSVFETSLDSDVPLQAATHKPEVIVKETWLQREKHAEFQGRSTEFSGSKTSLDSGVPHYSVTEPQVAVNKINRKKQYVLENKNDKCSGSEIILDSNVPPQSMTDQPQLAFLKEKHVNLKDKNSKSGDSKITFDSEQLQEAVKKIDQWKEEVIGLKNKINEPSTYKLIHHPDVSVQSVADQPKVAIKHVNLGNENHMYLEVKNSQYSCSEMNLDSGFLGQSIVNRPQITILEQEHIELEGKHNQCCGSEVSFDSDDPLQSVADRLRETVKEISLWKDEEVDTEDRRNEAKGFEIMYDSDVLQPVAGQPEEVVKEVSLWKEHVDLENKIVKPTDSRINFDSHEPLQSVTNKIPGANKEINLLREEHVCLDDKGYVPSDSEIIYVSNIPLQSVIKQPHILEEEHASLEDKSSNSYSPEESSDSNDSFQAAADELQKPVKEINLWKEDHIYLEDKSYKLGDFDVSYASHIPVQFVTDQ

SEQ ID NO: 25448 - protein, 1182 aa, Homo sapiens
MVKLANPLYTEWILEAIQKIKKQKQRPSEERICHAVSTSHGLDKKTVSEQLELSVQDGSVLKVTNKGLASYKDPDNPGRFSSVKPGTFPKSAKGSRGSCNDLRNVDWNKLLRRAIEGLEEPNGSSLKNIEKYLRSQSDLTSTTNNPAFQQRLRLGAKRAVNNGRLLKDGPQYRVNYGSLDGKGAPQYPSAFPSSLPPVSLLPHEKDQPRADPIPICSFCLGTKESNREKKPEELLSCADCGSSGHPSCLKFCPELTTNVKALRWQCIECKTCSACRVQGRNADNMLFCDSCDRGFHMECCDPPLSRMPKGMWICQVCRPKKKGRKLLHEKAAQIKRRYAKPIGRPKNKLKQRLLSVTSDEGSMNAFTGRGSPGRGQKTKVCTTPSSGHAASGKDSSSRLAVTDPTRPGATTKITTTSTYISASTLKVNKKTKGLIDGLTKFFTPSPDGRRSRGEIIDFSKHYRPRKKVSQKQSCTSHVLATDTEIKINIKQESADVNVIGNKDVVTEEDLDVFKQAQELSWEKIECESGVEDCGRYPSVIEFGKYEIQTWYSSPYPQEYARLPKLYLCEFCLKYMKSKNILLRHSKKCGWFHPPANEIYRRKDLSVFEVDGNMSKIYCQNLCLLAKLFLDHKTLYYDVEPFLFYVLTKNDEKGCHLVGYFSKEKLCQQKYNVSCIMIMPQHQRQGFGRFLIDFSYLLSRREGQAGSPEKPLSDLGRLSYLAYWKSVILEYLYHHHERHISIKAISRATGMCPHDIATTLQHLHMIDKRDGRFVIIRREKLILSHMEKLKTCSRANELDPDSLRWTPILISNAAVSEEEREAEKEAERLMEQASCWEKEEQEILSTRANSRQSPAKVQSKNKYLHSPESRPVTGERGQLLELSKESSEEEEEEEDEEEEEEEEEEEEDEEEEEEEEEEEEEENIQSSPPRLTKPQSVAIKRKRPFVLKKKRGRKRRRINSSVTTETISETTEVLNEPFDNSDEERPMPQLEPTCEIEVEEDGRKPVLRKAFQHQPGKKRQTEEEEGKDNHCFKNADPCRNNMNDDSSNLKEGSKDNPEPLKCKQVWPKGTKRGLSKWRQNKERKTGFKLNLYTPPETPMEPDEQVTVEEQKETSEGKTSPSPIRIEEEVKETGEALLPQEENRREETCAPVSPNTSPGEKPEDDLIKPEEEEEEEEEEEEEEE

SEQ ID NO: 25449 - protein, 767 aa, Homo sapiens
MSQRPRAPRSALWLLAPPLLRWAPPLLTVLHSDLFQALLDILDYYEASLSESQKYRYQDEDTPPLEHSPAHLPNQANSPPVIVNTDTLEAPGYELQVNGTEGEMEYEEITLERGNSGLGFSIAGGTDNPHIGDDPSIFITKIIPGGAAAQDGRLRVNDSILFVNEVDVREVTHSAAVEALKEAGSIVRLYVMRRKPPAEKVMEIKLIKGPKGLGFSIAGGVGNQHIPGDNSIYVTKIIEGGAAHKDGRLQIGDKILAVNSVGLEDVMHEDAVAALKNTYDVVYLKVAKPSNAYLSDSYAPPDITTSYSQHLDNEISHSSYLGTDYPTAMTPTSPRRYSPVAKDLLGEEDIPREPRRIVIHRGSTGLGFNIVGGEDGEGIFISFILAGGPADLSGELRKGDQILSVNGVDLRNASHEQAAIALKNAGQTVTIIAQYKPEEYSRFEAKIHDLREQLMNSSLGSGTASLRSNPKRGFYIRALFDYDKTKDCGFLSQALSFRFGDVLHVIDASDEEWWQARRVHSDSETDDIGFIPSKRRVERREWSRLKAKDWGSSSGSQGREDSVLSYETVTQMEVHYARPIIILGPTKDRANDDLLSEFPDKFGSCVPHTTRPKREYEIDGRDYHFVSSREKMEKDIQAHKFIEAGQYNSHLYGTSVQSVREVAEQGKHCILDVSANAVRRLQAAHLHPIAIFIRPRSLENVLEINKRITEEQARKAFDRATKLEQEFTECFSAIVEGDSFEEIYHKVKRVIEDLSGPYIWVPARERL

SEQ ID NO: 25450 - protein, 402 aa, Homo sapiens
MLAAMGSLAAALWAVVHPRTLLLGTVAFLLAADFLKRRRPKNYPPGPWRLPFLGNFFLVDFEQSHLEVQLFVKKYGNLFSLELGDISAVLITGLPLIKEALIHMDQNFGNRPVTPMREHIFKKNGLIMSSGQAWKEQRRFTLTALRNFGLGKKSLEERIQEEAQHLTEAIKEENGQPFDPHFKINNAVSNIICSITFGERFEYQDSWFQQLLKLLDEVTYLEASKTCQLYNVFPWIMKFLPGPHQTLFSNWKKLKLFVSHMIDKHRKDWNPAETRDFIDAYLKEMSKHTGNPTSSFHEENLICSTLDLFFAGTETTSTTLRWALLYMALYPEIQEKVQAEIDRVIGQGQQPSTAARESMPYTNAVIHEVQRMGNIIPLNVPREVTVDTTLAGYHLPKNISPD

SEQ ID NO: 25451 - protein, 1249 aa, Homo sapiens
MSQLSKNLGDSSPPAEAPKPPVYSRPTVLMRAPPASSRAPPVPWDPPPIDLQASLAAWQAPQPAWEAPQGQLPAPVVPMTQPPALGGPIVPAPPLGGPMGKPPTPGVLMVHPPPPGAPMAQPPTPGVLMVHPSAPGAPMAHPPPPGTPMSHPPPPGTPMAHPPPPGTPMAHPPPPGTPMVHPPPPGTPMAHPPPPGTPMAHPPPPGTPMAHPPPPGTPMAHPPPPGTPMAQPPAPGVLMAQPLTPGVLMVQPAAPGAPMVQPPPAAMMTQPQPSGAPMAKPPGPGVLMIHPPGARAPMTQPPASGAPMAQPAAPPAQPMAPPAQPMASWAPQAQPLILQIQSQVIRAPPQVPQGPQAPPAQLATPPGWQATSPGWQATQQGWQATPLTWQTTQVTWQAPAVTWQVPPPMRQGPPPIRPGPPPIRPGPPPVRQAPPLIRQAPPVIRQAPPVIRQAPPVIRQAPAVIRQAPPVIRQAPPVIRQAPPVIRQAPPLIRQAPPPIRPAPQVLATQPPLWQALPPPPPLRQAPQARLPAPQVQAAPQVPTAPPATQVPAAPPAGPQVPQPVLPAPLSAPLSAPQAVHCPSIIWQAPKGQPPVPHEIPTSMEFQEVQQTQALAWQAQKAPTHIWQPLPAQEAQRQAPPLVQLEQPFQGAPPSQKAVQIQLPPQQAQASGPQAEVPTLPLQPSWQAPPAVLQAQPGPPVAAANFPLGSAKSLMTPSGECRASSIDRRGSSKERRTSSKERRAPSKDRMIFAATFCAPKAVSAARAHLPAAWKNLPATPETFAPSSSVFPATSQFQPASLNAFKGPSAASETPKSLPYALQDPFACVEALPAVPWVPQPNMNASKASQAVPTFLMATAAAPQATATTQEASKTSVEPPRRSGKATRKKKHLEAQEDSRGHTLAFHDWQGPRPWENLNLSDWEVQSPIQVSGDWEHPNTPRGLSGWEGPSTSRILSGWEGPSASWALSAWEGPSTSRALGLSESPGSSLPVVVSEVASVSPGSSATQDNSKVEAQPLSPLDERANALVQFLLVKDQAKVPVQRSEMVKVILREYKDECLDIINRANNKLECAFGYQLKEIDTKNHAYIIINKLGYHTGNLVASYLDRPKFGLLMVVLSLIFMKGNCVREDLIFNFLFKLGLDVRETNGLFGNTKKLITEVFVRQKYLEYRRIPYTEPAEYEFLWGPRAFLETSKMLVLRFLAKLHKKDPQSWPFHYLEALAECEWEDTDEDEPDTGDSAHGPTSRPPPR

SEQ ID NO: 25452 - protein, 1185 aa, Homo sapiens
MEVDTEEKRHRTRSKGVRVPVEPAIQELFSCPTPGCDGSGHVSGKYARHRSVYGCPLAKKRKTQDKQPQEPAPKRKPFAVKADSSSVDECDDSDGTEDMDEKEEDEGEEYSEDNDEPGDEDEEDEEGDREEEEEIEEEDEDDDEDGEDVEDEEEEEEEEEEEEEEEENDHQMNCHNTRIMQDTEKDDNNNDEYDNYDELVAKSLLNLGKIAEDAAYRARTESEMNSNTSNSLEDDSDKNENLGRKSELSLDLDSDVVRETVDSLKLLAQGHGVVLSENMNDRNYADSMSQQDSRNMNYVMLGKPMNNGLMEKMVEESDEEVCLSSLECLRNQCFDLARKLSETNPQERNPQQNMNIRQHVRPEEDFPGRTPDRNYSDMLNLMRLEEQLSPRSRVFASCAKEDGCHERDDDTTSVNSDRSEEVFDMTKGNLTLLEKAIALETERAKAMREKMAMEAGRRDNMRSYEDQSPRQLPGEDRKPKSSDSHVKKPYYGKDPSRTEKKESKCPTPGCDGTGHVTGLYPHHRSLSGCPHKDRVPPEILAMHESVLKCPTPGCTGRGHVNSNRNSHRSLSGCPIAAAEKLAKAQEKHQSCDVSKSSQASDRVLRPMCFVKQLEIPQYGYRNNVPTTTPRSNLAKELEKYSKTSFEYNSYDNHTYGKRAIAPKVQTRDISPKGYDDAKRYCKDPSPSSSSTSSYAPSSSSNLSCGGGSSASSTCSKSSFDYTHDMEAAHMAATAILNLSTRCREMPQNLSTKPQDLCATRNPDMEVDENGTLDLSMNKQRPRDSCCPILTPLEPMSPQQQAVMNNRCFQLGEGDCWDLPVDYTKMKPRRIDEDESKDITPEDLDPFQEALEERRYPGEVTIPSPKPKYPQCKESKKDLITLSGCPLADKSIRSMLATSSQELKCPTPGCDGSGHITGNYASHRSLSGCPRAKKSGIRIAQSKEDKEDQEPIRCPVPGCDGQGHITGKYASHRSASGCPLAAKRQKDGYLNGSQFSWKSVKTEGMSCPTPGCDGSGHVSGSFLTHRSLSGCPRATSAMKKAKLSGEQMLTIKQRASNGIENDEEIKQLDEEIKELNESNSQMEADMIKLRTQITTMESNLKTIEEENKVIEQQNESLLHELANLSQSLIHSLANIQLPHMDPINEQNFDAYVTTLTEMYTNQDRYQSPENKALLENIKQAVRGIQV

SEQ ID NO: 25453 - protein, 313 aa, Homo sapiens
DRVRTDAYRLGILRNWAALRGKTVLDVGAGTGILSIFCAQAGARRVYAVEASAIWQQAREVVRFNGLEDRVHVLPGPVETVELPEQVDAIVSEWMGYGLLHESMLSSVLHARTKWLKEGGLLLPASAELFIAPISDQMLEWRLGFWSQVKQHYGVDMSCLEGFATRCLMGHSEIVVQGLSGEDVLARPQRFAQLELSRAGLEQELEAGVGGRFRCSCYGSAPMHGFAIWFQVTFPGGESEKPLVLSTSPFHPATHWKQALLYLNEPVQVEQDTDVSGEITLLPSRDNPRRLRVLLRYKVGDQEEKTKDFAMED

SEQ ID NO: 25454 - protein, 1503 aa, Homo sapiens
MEAATTLHPGPRPALPLGGPGPLGEFLPPPECPVFEPSWEEFADPFAFIHKIRPIAEQTGICKVRPPPDWQPPFACDVDKLHFTPRIQRLNELELVAEEGGFAVVCKDRKWTKIATKMGFAPGKAVGSHIRGHYERILNPYNLFLSGDSLRCLQKPNLTTDTKDKEYKPHDIPQRQSVQPSETCPPARRAKRMRAEAMNIKIEPEETTEARTHNLRRRMGCPTPKCENEKEMKSSIKQEPIERKDYIVENEKEKPKSRSKKATNAVDLYVCLLCGSGNDEDRLLLCDGCDDSYHTFCLIPPLHDVPKGDWRCPKCLAQECSKPQEAFGFEQAARDYTLRTFGEMADAFKSDYFNMPVHMVPTELVEKEFWRLVSTIEEDVTVEYGADIASKEFGSGFPVRDGKIKLSPEEEEYLDSGWNLNNMPVMEQSVLAHITADICGMKLPWLYVGMCFSSFCWHIEDHWSYSINYLHWGEPKTWYGVPGYAAEQLENVMKKLAPELFVSQPDLLHQLVTIMNPNTLMTHEVPVYRTNQCAGEFVITFPRAYHSGFNQGFNFAEAVNFCTVDWLPLGRQCVEHYRLLHRYCVFSHDEMICKMASKADVLDVVVASTVQKDMAIMIEDEKALRETVRKLGVIDSERMDFELLPDDERQCVKCKTTCFMSAISCSCKPGLLVCLHHVKELCSCPPYKYKLRYRYTLDDLYPMMNALKLRAESYNEWALNVNEALEAKINKKKSLVSFKALIEESEMKKFPDNDLLRHLRLVTQDAEKCASVAQQLLNGKRQTRYRSGGGKSQNQLTVNELRQFVTQLYALPCVLSQTPLLKDLLNRVEDFQQHSQKLLSEETPSAAELQDLLDVSFEFDVELPQLAEMRIRLEQARWLEEVQQACLDPSSLTLDDMRRLIDLGVGLAPYSAVEKAMARLQELLTVSEHWDDKAKSLLKARPRHSLNSLATAVKEIEEIPAYLPNGAALKDSVQRARDWLQDVEGLQAGGRVPVLDTLIELVTRGRSIPVHLNSLPRLETLVAEVQAWKECAVNTFLTENSPYSLLEVLCPRCDIGLLGLKRKQRKLKEPLPNGKKKSTKLESLSDLERALTESKETASAMATLGEARLREMEALQSLRLANEGKLLSPLQDVDIKICLCQKAPAAPMIQCELCRDAFHTSCVAVPSISQGLRIWLCPHCRRSEKPPLEKILPLLASLQRIRVRLPEGDALRYMIERTVNWQHRAQQLLSSGNLKFVQDRVGSGLLYSRWQASAGQVSDTNKVSQPPGTTSFSLPDDWDNRTSYLHSPFSTGRSCIPLHGVSPEVNELLMEAQLLQVSLPEIQELYQTLLAKPSPAQQTDRSSPVRPSSEKNDCCRGKRDGINSLERKLKRRLEREGLSSERWERVKKMRTPKKKKIKLSHPKDMNNFKLERERSYELVRSAETHSLPSDTSYSEQEDSEDEDAICPAVSCLQPEGDEVDWVQCDGSCNQWFHQVCVGVSPEMAEKEDYICVRCTVKDAPSRK

SEQ ID NO: 25455 - protein, 493 aa, Homo sapiens
MARAPLGVLLLLGLLGRGVGKNEELRLYHHLFNNYDPGSRPVREPEDTVTISLKVTLTNLISLNEKEETLTTSVWIGIDWQDYRLNYSKDDFGGIETLRVPSELVWLPEIVLENNIDGQFGVAYDANVLVYEGGSVTWLPPAIYRSVCAVEVTYFPFDWQNCSLIFRSQTYNAEEVEFTFAVDNDGKTINKIDIDTEAYTENGEWAIDFCPGVIRRHHGGATDGPGETDVIYSLIIRRKPLFYVINIIVPCVLISGLVLLAYFLPAQAGGQKCTVSINVLLAQTVFLFLIAQKIPETSLSVPLLGRFLIFVMVVATLIVMNCVIVLNVSQRTPTTHAMSPRLRHVLLELLPRLLGSPPPPEAPRAASPPRRASSVGLLLRAEELILKKPRSELVFEGQRHRQGTWTAAFCQSLGAAAPEVRCCVDAVNFVAESTRDQEATGEEVSDWVRMGNALDNICFWAALVLFSVGSSLIFLGAYFNRVPDLPYAPCIQP

SEQ ID NO: 25456 - protein, 1177 aa, Homo sapiens
MVWRLVLLALWVWPSTQAGHQDKDTTFDLFSISNINRKTIGAKQFRGPDPGVPAYRFVRFDYIPPVNADDLSKITKIMRQKEGFFLTAQLKQDGKSRGTLLALEGPGLSQRQFEIVSNGPADTLDLTYWIDGTRHVVSLEDVGLADSQWKNVTVQVAGETYSLHVGCDLIDSFALDEPFYEHLQAEKSRMYVAKGSARESHFRGLLQNVHLVFENSVEDILSKKGCQQGQGAEINAISENTETLRLGPHVTTEYVGPSSERRPEVCERSCEELGNMVQELSGLHVLVNQLSENLKRVSNDNQFLWELIGGPPKTRNMSACWQDGRFFAENETWVVDSCTTCTCKKFKTICHQITCPPATCASPSFVEGECCPSCLHSVDGEEGWSPWAEWTQCSVTCGSGTQQRGRSCDVTSNTCLGPSIQTRACSLSKCDTRSECRAVRQDGGWSHWSPWSSCSVTCGVGNITRIRLCNSPVPQMGGKNCKGSGRETKACQGAPCPIDGRWSPWSPWSACTVTCAGGIRERTRVCNSPEPQYGGKACVGDVQERQMCNKRSCPVDGCLSNPCFPGAQCSSFPDGSWSCGSCPVGFLGNGTHCEDLDECALVPDICFSTSKVPRCVNTQPGFHCLPCPPRYRGNQPVGVGLEAAKTEKQVCEPENPCKDKTHNCHKHAECIYLGHFSDPMYKCECQTGYAGDGLICGEDSDLDGWPNLNLVCATNATYHCIKDNCPHLPNSGQEDFDKDGIGDACDDDDDNDGVTDEKDNCQLLFNPRQADYDKDEVGDRCDNCPYVHNPAQIDTDNNGEGDACSVDIDGDDVFNERDNCPYVYNTDQRDTDGDGVGDHCDNCPLVHNPDQTDVDNDLVGDQCDNNEDIDDDGHQNNQDNCPYISNANQADHDRDGQGDACDPDDDNDGVPDDRDNCRLVFNPDQEDLDGDGRGDICKDDFDNDNIPDIDDVCPENNAISETDFRNFQMVPLDPKGTTQIDPNWVIRHQGKELVQTANSDPGIAVGFDEFGSVDFSGTFYVNTDRDDDYAGFVFGYQSSSRFYVVMWKQVTQTYWEDQPTRAYGYSGVSLKVVNSTTGTGEHLRNALWHTGNTPGQVRTLWHDPRNIGWKDYTAYRWHLTHRPKTGYIRVLVHEGKQVMADSGPIYDQTYAGGRLGLFVFSQEMVYFSDLKYECRDI

SEQ ID NO: 25457 - protein, 294 aa, Homo sapiens
MARGERRRRAVPAEGVRTAERAARGGPGRRDGRGGGPRSTAGGVALAVVVLSLALGMSGRWVLAWYRARRAVTLHSAPPVLPADSSSPAVAPDLFWGTYRPHVYFGMKTRSPKPLLTGLMWAQQGTTPGTPKLRHTCEQGDGVGPYGWEFHDGLSFGRQHIQDGALRLTTEFVKRPGGQHGGDWSWRVTVEPQDSGTSALPLVSLFFYVVTDGKEVLLPEVGAKGQLKFISGHTSELGDFRFTLLPPTSPGDTAPKYGSYNVFWTSNPGLPLLTEMAVPRQEEIKPCQDWQAVY

SEQ ID NO: 25458 - protein, 860 aa, Homo sapiens
MEVDTEEKRHRTRSKGVRVPVEPAIQELFSCPTPGCDGSGHVSGKYARHRSVYGCPLAKKRKTQDKQPQEPAPKRKPFAVKADSSSVDECDDSDGTEDMDEKEEDEGEEYSEDNDEPGDEDEEDEEGDREEEEEIEEEDEDDDEDGEDVEDEEEEEEEEEEEEEEEENDPSRTEKKESKCPTPGCDGTGHVTGLYPHHRSLSGCPHKDRVPPEILAMHESVLKCPTPGCTGRGHVNSNRNSHRSLSGCPIAAAEKLAKAQEKHQSCDVSKSSQASDRVLRPMCFVKQLEIPQYGYRNNVPTTTPRSNLAKELEKYSKTSFEYNSYDNHTYGKRAIAPKVQTRDISPKGYDDAKRYCKDPSPSSSSTSSYAPSSSSNLSCGGGSSASSTCSKSSFDYTHDMEAAHMAATAILNLSTRCREMPQNLSTKPQDLCATRNPDMEVDENGTLDLSMNKQRPRDSCCPILTPLEPMSPQQQAVMNNRCFQLGEGDCWDLPVDYTKMKPRRIDEDESKDITPEDLDPFQEALEERRYPGEVTIPSPKPKYPQCKESKKDLITLSGCPLADKSIRSMLATSSQELKCPTPGCDGSGHITGNYASHRSLSGCPRAKKSGIRIAQSKEDKEDQEPIRCPVPGCDGQGHITGKYASHRSASGCPLAAKRQKDGYLNGSQFSWKSVKTEGMSCPTPGCDGSGHVSGSFLTHRSLSGCPRATSAMKKAKLSGEQMLTIKQRASNGIENDEEIKQLDEEIKELNESNSQMEADMIKLRTQITTMESNLKTIEEENKVIEQQNESLLHELANLSQSLIHSLANIQLPHMDPINEQNFDAYVTTLTEMYTNQDRYQSPENKALLENIKQAVRGIQV

SEQ ID NO: 25459 - protein, 418 aa, Homo sapiens
MPPSLANFCIFSRDGVSPCWSGWSRTPDLVIHSPWPPKVLQLQVFGNQLIPPNAQVKKATVFLNPAACKGKARTLFEKNAAPILHLSGMDVTIVKTDYEGQAKKLLELMENTDVIIVAGGDGTLQEVVTGVLRRTDEATFSKIPIGFIPLGETSSLSHTLFAESGNKVQHITDATLAIVKGETVPLDVLQIKGEKEQPVFAMTGLRWGSFRDAGVKVSKYWYLGPLKIKAAHFFSTLKEWPQTHQASISYTGPTERPPNEPEETPVQRPSLYRRILRRLASYWAQPQDALSQEVSPEVWKDVQLSTIELSITTRNNQLDPTSKEDFLNICIEPDTISKGDFITIGSRKVRNPKLHVEGTECLQASQCTLLIPEGAGGSFSIDSEEYEAMPVEVKLLPRKLQFFCDPRKREQMLTSPTQ

SEQ ID NO: 25460 - protein, 604 aa, Homo sapiens
MDVTKKNKRDGTEVTERIVTETVTTRLTSLPPKGGTSNGYAKTASLGGGSRLEKQSLTHGSSGYINSTGSTRGHASTSSYRRAHSPASTLPNSPGSTFERKTHVTRHAYEASSSTRGRSQTRESEIRVRLQSASPSTRWTELDDVKRLLKGSRSASVSPTRNSSNTLPIPKKGTVETKIVTASSQSVSGTYDATILDANLPSHVWSSTLPAGSSMGTYHNNMTTQSSSLLNTNAYSAGSVFGVPNNMASCSPTLHPGLSTSSSVFGMQNNLAPSLTTLSHGTTTTSTAYGVKKNMPQSPAAVNTGVSTSAACTTSVQSDDLLHKDCKFLILEKDNTPAKKEMELLIMTKDSGKVFTASPASIAATSFSEDTLKKEKQAAYNADSGLKAEANGDLKTVSTKGKTTTADIHSYGSSGGGGSGGGGGVGGAGGGPWGPAPAWCPCGSCCSWWKWLLGLLLTWLLLLGLLFGLIALAEEVRKLKARVDELERIRRSILPYGDSMDRIEKDRLQGMAPAAGADLDKIGLHSDSQEELWMFVRKKLMMEQENGNLRGSPGPKGDMGSPGPKGDRGFPGTPGIPGPLGHPGPQGPKGQKGSVGDPGMEGPM

SEQ ID NO: 25461 - protein, 714 aa, Homo sapiens
HAADLEKKQNETENRKLLGTVIQYGNVIQLLHLKSNKYLTVNKRLPALLEKNAMRVTLDEAGNEGSWFYIQPFYKLRSIGDSVVIGDKVVLNPVNAGQPLHASSHQLVDNPGCNEVNSVNCNTSWKIVLFMKWSDNKDDILKGGDVVRLFHAEQEKFLTCDEHRKKQHVFLRTTGRQSATSATSSKALWEVEVVQHDPCRGGAGYWNSLFRFKHLATGHYLAAEVDPDQDASRSRLRNAQEKMVYSLVSVPEGNDISSIFELDPTTLRGGDSLVPRNSYVRLRHLCTNTWVHSTNIPIDKEEEKPVMLKIGTSPVKEDKEAFAIVPVSPAEVRDLDFANDASKVLGSIAGKLEKGTITQNERRSVTKLLEDLVYFVTGGTNSGQDVLEVVFSKPNRERQKLMREQNILKQIFKLLQAPFTDCGDGPMLRLEELGDQRHAPFRHICRLCYRVLRHSQQDYRKNQEYIAKQFGFMQKQIGYDVLAEDTITALLHNNRKLLEKHITAAEIDTFVSLVRKNREPRFLDYLSDLCVSMNKSIPVTQELICKAVLNPTNADILIETKLVLSRFEFEGVSSTGENALEAGEDEEEVWLFWRDSNKEIRSKSVRELAQDAKEGQKEDRDVLSYYSCHDSLYVYPSARFPVCTCLTSATHLHGPQCLLGSSCKTCQSCHLKGREGEERKEVNQLILLKEKEREDKARLLLFFNKINKTADKMP

SEQ ID NO: 25462 - protein, 1191 aa, Homo sapiens
AQALHRMWIQAVKKLRRWKGRAPGMEELIWEQYTVTLQKDSKRGFGIAVSGGRDNPHFENGETSIVISDVLPGGPADGLLQENDRVVMVNGTPMEDVLHSFAVQQLRKSGKVAAIVVKRPRKVQVAALQASPPLDQDDRAFEVMDEFDGRSFRSGYSERSRLNSHGGRSRSWEDSPERGRPHERARSRERDLSRDRSRGRSLERGLDQDHARTRDRSRGRSLERGLDHDFGPSRDRDRDRSRGRSIDQDYERAYHRAYDPDYERAYSPEYRRGARHDARSRGPRSRSREHPHSRSPSPEPRGRPGPIGVLLMKSRANEEYGLRLGSQIFVKEMTRTGLATKDGNLHEGDIILKINGTVTENMSLTDARKLIEKSRGKLQLVVLRDSQQTLINIPSLNDSDSEIEDISEIESNRSFSPEERRHQYSDYDYHSSSEKLKERPSSREDTPSRLSRMGATPTPFKSTGDIAGTVVPETNKEPRYQEDPPAPQPKAAPRTFLRPSPEDEAIYGPNTKMVRFKKGDSVGLRLAGGNDVGIFVAGIQEGTSAEQEGLQEGDQILKVNTQDFRGLVREDAVLYLLEIPKGEMVTILAQSRADVYRDILACGRGDSFFIRSHFECEKETPQSLAFTRGEVFRVVDTLYDGKLGNWLAVRIGNELEKGLIPNKSRAEQMASVQNAQRDNAGDRADFWRMRGQRSGVKKNLRKSREDLTAVVSVSTKFPAYERVLLREAGFKRPVVLFGPIADIAMEKLANELPDWFQTAKTEPKDAGSEKSTGVVRLNTVRQIIEQDKHALLDVTPKAVDLLNYTQWFPIVIFFNPDSRQGVKTMRQRLNPTSNKSSRKLFDQANKLKKTCAHLFTATINLNSANDSWFGSLKDTIQHQQGEAVWVSEGKMEGMDDDPEDRMSYLTAMGADYLSCDSRLISDFEDTDGEGGAYTDNELDEPAEEPLVSSITRSSEPVQHEESIRKPSPEPRAQMRRAASSDQLRDNSPPPAFKPEPPKAKTQNKEESYDFSKSYEYKSNPSAVAGNETPGASTKGYPPPVAAKPTFGRSILKPSTPIPPQEGEEVGESSEEQDNAPKSVLGKVKIFEKMDHKARLQRMQELQEAQNARIEIAQKHPDIYAVPIKTHKPDPGTPQHTSSRPPEPQKAPSRPYQDTRGSYGSDAEEEEYRQQLSEHSKRGYYGQSARYRDTEL

SEQ ID NO: 25463 - protein, 341 aa, Homo sapiens
MATSGAASAELVIGWCIFGLLLLAILAFCWIYVRKYQSRRESEVVSTITAIFSLAIALITSALLPVDIFLVSYMKNQNGTFKDWANANVSRQIEDTVLYGYYTLYSVILFCVFFWIPFVYFYYEEKDDDDTSKCTQIKTALKYTLGFVVICALLLLVGAFVPLNVPNNKNSTEWEKVKSLFEELGSSHGLAALSFSISSLTLIGMLAAITYTAYGMSALPLNLIKGTRSAAYERLENTEDIEEVEQHIQTIKSKSKDGRPLPARDKRALKQFEERLRTLKKRERHLEFIENSWWTKFCGALRPLKMEFCSCCPGWSPMAQSRLTASSASQVQAILLPQPPK

SEQ ID NO: 25464 - protein, 561 aa, Homo sapiens
MRWILCWSLTLCLMAQTALGALHTKRPQVVTKYGTLQGKQMHVGKTPIQVFLGVPFSRPPLGILRFAPPEPPEPWKGIRDATTYPPGCLQESWGQLASMYVSTRERYKWLRFSEDCLYLNVYAPARAPGDPQLPVMVWFPGGAFIVGAASSYEGSDLAAREKVVLVFLQHRLGIFGFLSTDDSHARGNWGLLDQMAALRWVQENIAAFGGDPGNVTLFGQSAGAMSISGLMMSPLASGLFHRAISQSGTALFRLFITSNPLKVAKKVAHLAGCNHNSTQILVNCLRALSGTKVMRVSNKMRFLQLNFQRDPEEIIWSMSPVVDGVVIPDDPLVLLTQGKVSSVPYLLGVNNLEFNWLLPYIMKFPLNRQAMRKETITKMLWSTRTLLNITKEQVPLVVEEYLDNVNEHDWKMLRNRMMDIVQDATFVYATLQTAHYHRDAGLPVYLYEFEHHARGIIVKPRTDGADHGDEMYFLFGGPFATGLSMGKEKALSLQMMKYWANFARTGNPNDGNLPCWPRYNKDEKYLQLDFTTRVGMKLKEKKMAFWMSLYQSQRPEKQRQF

SEQ ID NO: 25465 - protein, 396 aa, Homo sapiens
MPMLLPHPHQHFLKGLLRAPFRCYHFIFHSSTHLGSGIPCAQPFNSLGLHCTKWMLLSDGLKRKLCVQTTLKDHTEGLSDKEQRFVDKLYTGLIQGQRACLAEAITLVESTHSRKKELAQVLLQKVLLYHREQEQSNKGKPLAFRVGLSGPPGAGKSTFIEYFGKMLTERGHKLSVLAVDPSSCTSGGSLLGDKTRMTELSRDMNAYIRPSPTRGTLGGVTRTTNEAILLCEGAGYDIILIETVAGGDELQGIKRGIIEMADLVAVTKSDGDLIVPARRIQAEYVSALKLLRKRSQVWKPKVIRISARSGEGISEMWDKMKDFQDLMLASGELTAKRRKQQKVWMWNLIQESVLEHFRTHPTVREQIPLLEQKVLIGALSPGLAADFLLKAFKSRD

SEQ ID NO: 25466 - protein, 2012 aa, Homo sapiens
EGQKEDRDVLSYYRYQLNLFARMCLDRQYLAINEISGQLDVDLILRCMSDENLPYDLRASFCRLMLHMHVDRDPQEQVTPVKYARLWSEIPSEIAIDDYDSSGASKDEIKERFAQTMEFVEEYLRDVVCQRFPFSDKEKNKLTFEVVNLARNLIYFGFYNFSDLLRLTKILLAILDCVHVTTIFPISKMAKGEENKGSNVMRSIHGVGELMTQVVLRGGGFLPMTPMAAAPEGNVKQAEPEKEDIMVMDTKLKIIEILQFILNVRLDYRISCLLCIFKREFDESNSQTSETSSGNSSQEGPSNVPGALDFEHIEEQAEGIFGGSEENTPLDLDDHGGRTFLRVLLHLTMHDYPPLVSGALQLLFRHFSQRQEVLQAFKQVQLLVTSQDVDNYKQIKQDLDQLRSIVEKSELWVYKGQGPDETMDGASGENEHKKTEEGNNKPQKHESTSSYNYRVVKEILIRLSKLCVQESASVRKSRKQQQRLLRNMGAHAVVLELLQIPYEKAEDTKMQEIMRLAHEFLQNFCAGNQQNQALLHKHINLFLNPGILEAVTMQHIFMNNFQLCSEINERVVQHFVHCIETHGRNVQYIKFLQTIVKAEGKFIKKCQDMVMAELVNSGEDVLVFYNDRASFQTLIQMMRSERDRMDENSPLMYHIHLVELLAVCTEGKNVYTEIKCNSLLPLDDIVRVVTHEDCIPEVKIAYINFLNHCYVDTEVEMKEIYTSNHMWKLFENFLVDICRACNNTSDRKHADSILEKYVTEIVMSIVTTFFSSPFSDQSTTLQTRQPVFVQLLQGVFRVYHCNWLMPSQKASVESCIRVLSDVAKSRAIAIPVDLDSQVNNLFLKSHSIVQKTAMNWRLSARNAARRDSVLAASRDYRNIIERLQDIVSALEDRLRPLVQAELSVLVDVLHRPELLFPENTDARRKCESGGFICKLIKHTKQLLEENEEKLCIKVLQTLREMMTKDRGYGEKLISIDELDNAELPPAPDSENATEGEALRQVLVNRYYGNVRPSGRRESLTSFGNGPLSAGGPGKPGGGGGGSGSSSMSRGEMSLAEVQCHLDKEGASNLVIDLIMNASSDRVFHESILLAIALLEGGNTTIQHSFFCRLTEDKKSEKFFKVFYDRMKVAQQEIKATVTVNTSDLGNKKKDDEVDRDAPSRKKAKEPTTQITEEVRDQLLEASAATRKAFTTFRREADPDDHYQPGEGTQATADKAKDDLEMSAVITIMQPILRFLQLLCENHNRDLQNFLRCQNNKTNYNLVCETLQFLDCICGSTTGGLGLLGLYINEKNVALINQTLESLTEYCQGPCHENQNCIATHESNGIDIITALILNDINPLGKKRMDLVLELKNNASKLLLAIMESRHDSENAERILYNMRPKELVEVIKKAYMQGEVEFEDGENGEDGAASPRNVGHNIYILAHQLARHNKELQSMLKPGGQVDGDEALEFYAKHTAQIEIVRLDRTMEQIVFPVPSICEFLTKESKLRIYYTTERDEQGSKINDFFLRSEDLFNEMNWQKKLRAQPVLYWCARNMSFWSSISFNLAVLMNLLVAFFYPFKGVRGGTLEPHWSGLLWTAMLISLAIVIALPKPHGIRALIASTILRLIFSVGLQPTLFLLGAFNVCNKIIFLMSFVGNCGTFTRGYRAMVLDVEFLYHLLYLVICAMGLFVHEFFYSLLLFDLVYREETLLNVIKSVTRNGRSIILTAVLALILVYLFSIVGYLFFKDDFILEVDRLPNETAVPETGESLASEFLFSDVCRVESGENCSSPAPREELVPAEETEQDKEHTCETLLMCIVTVLSHGLRSGGGVGDVLRKPSKEEPLFAARVIYDLLFFFMVIIIVLNLIFGVIIDTFADLRSEKQKKEEILKTTCFICGLERDKFDNKTVTFEEHIKEEHNMWHYLCFIVLVKVKDSTEYTGPESYVAEMIKERNLDWFPRMRAMSLVSSDSEGEQNELRNLQEKLESTMKLVTNLSGQLSELKDQMTEQRKQKQRIGLLGHPPHMNVNPQQPA

SEQ ID NO: 25467 - protein, 542 aa, Homo sapiens
MHCKVSLLDDTVYECVVEKHAKGQDLLKRVCEHLNLLEEDYFGLAIWDNATSKTWLDSAKEIKKQVRGVPWNFTFNVKFYPPDPAQLTEDITRYYLCLQLRQDIVAGRLPCSFATLALLGSYTIQSELGDYDPELHGVDYVSDFKLAPNQTKELEEKVMELHKSYRSMTPAQADLEFLENAKKLSMYGVDLHKAKDLEGVDIILGVCSSGLLVYKDKLRINRFPWPKVLKISYKRSSFFIKIRPGEQEQYESTIGFKLPSYRAAKKLWKVCVEHHTFFRLTSTDTIPKSKFLALGSKFRYSGRTQAQTRQASALIDRPAPHFERTASKRASRSLDGAAAVDSADRSPRPTSAPAITQGQVAEGGVLDASAKKTVVPKAQKETVKAEVKKEDEPPEQAEPEPTEAWKPPLVKTQTVTISDNANAVKSEIPTKDVPIVHTETKTITYEAAQTDDNSGDLDPGVLLTAQTITSETPSSTTTTQITKTVKGGISETRIEKRIVITGDADIDHDQVLVQAIKEAKEQHPDMSVTKVVVHQETEIADE

SEQ ID NO: 25468 - protein, 361 aa, Homo sapiens
MGRDQRAVAGPALRRWLLLGTVTVGFLAQSVLAGVKKFDVPCGGRDCSGGCQCYPEKGGRGQPGPVGPQGYNGPPGLQGFPGLQGRKGDKGERGAPGVTGPKGDVGARGVSGFPGADGIPGHPGQGGPRGRPGYDGCNGTQGDSGPQGPPGSEGFTGPPGPQGPKGQKGEPYALPKEERDRYRGEPGEPGLVGFQGPPGRPGHVGQMGPVGAPGRPGPPGPPGPKGQQGNRGLGFYGVKGEKGDVGQPGPNGIPSDTLHPIIAPTGVTFHPDQYKGEKGSEGEPGIRGISLKGEEGIMGFPGLRGYPGLSGEKGSPGQKGSRGLDGYQGPDGPRGPKGEAGDPGPPGLPAYSPHPSLAKGV

SEQ ID NO: 25469 - protein, 471 aa, Homo sapiens
MNGVLIPHTPIAVDFWSLRRAGTARLFFLSHMHSDHTVGLSSTWARPLYCSPITAHLLHRHLQVSKQWIQALEVGESHVLPLDEIGQETMTVTLLDANHCPGSVMFLFEGYFGTILYTGLYSLGKESLLEQLALEFQTWVVLSPRRLELVQLLGLADVFTVEEKAGRIHAVDHMEICHSNMLRWNQTHPTIAILPTSRKIHSSHPDIHVIPYSDHSSYSELRAFVAALKPCQVVPIVSRRPCGGFQDSLSPRISVPLIPDSVQQYMSSSSRKPSLLWLLERRLKRPRTQGVVFESPEESADQSQADRDSKKAKKEKLSPWPADLEKQPSHHPLRIKKQLFPDLYSKEWNKAVPFCESQKRVTMLTAPLGFSVHLRSTDEEFISQKTREEIGLGSPLVPMGDDDGGPEATGNQSAWMGHGSPLSHSSKGTPLLATEFRGLALKYLLTPVNFFQAGYSSRRFDQQVEKYHKPC

SEQ ID NO: 25470 - protein, 2198 aa, Homo sapiens
IPIEEFSAEYVRPQVHCIASYGRFVNQSATCVSLAHETPPTALILDVLSGRPFPHLPQQSSPSVDVLPGVTLKAPQNQVTLRGRVPHLGRYVFVIHFYQAAHPTFPAQVSVDGGWPRAGSFHASFCPHVLGCRDQVIAEGQIEFDISEPEVAATVKVPEGKSLVLVRVLVVPAENYDYQILHKKSMDKSLEFITNCGKNSFYLDPQTASRFCKNSARSLVAFYHKGALPCECHPTGATGPHCSPEGGQCPCQPNVIGRQCTRCATGHYGFPRCKPCSCGRRLCEEMTGQCRCPPRTVRPQCEVCETHSFSFHPMAGCEGCNCSRRGTIEAAMPECDRDSGQCRCKPRITGRQCDRCASGFYRFPECVPCNCNRDGTEPGVCDPGTGACLCKENVEGTECNVCREGSFHLDPANLKGCTSCFCFGVNNQCHSSHKRRTKFVDMLGWHLETADRVDIPVSFNPGSNSMVADLQELPATIHSASWVAPTSYLGDKVSSYGGYLTYQAKSFGLPGDMVLLEKKPDVQLTGQHMSIIYEETNTPRPDRLHHGRVHVVEGNFRHASSRAPVSREELMTVLSRLADVRIQGLYFTETQRLTLSEVGLEEASDTGSGRIALAVEICACPPAYAGDSCQGCSPGYYRDHKGLYTGRCVPCNCNGHSNQCQDGSGICVNCQHNTAGEHCERCQEGYYGNAVHGSCRACPCPHTNSFATGCVVNGGDVRCSCKAGYTGTQCERCAPGYFGNPQKFGGSCQPCSCNSNGQLGSCHPLTGDCINQEPKDSSPAEECDDCDSCVMTLLNDLATMGEQLRLVKSQLQGLSASAGLLEQMRHMETQAKDLRNQLLNYRSAISNHGSKIEGLERELTDLNQEFETLQEKAQVNSRKAQTLNNNVNRATQSAKELDVKIKNVIRNVHILLKQISGTDGEGNNVPSGDFSREWAEAQRMMRELRNRNFGKHLREAEADKRESQLLLNRIRTWQKTHQGENNGLANSIRDSLNEYEAKLSDLRARLQEAAAQAKQANGLNQENERALGAIQRQVKEINSLQSDFTKYLTTADSSLLQTNIALQLMEKSQKEYEKLAASLNEARQELSDKVRELSRSAGKTSLVEEAEKHARSLQELAKQLEEIKRNASGDELVRCAVDAATAYENILNAIKAAEDAANRAASASESALQTVIKEDLPRKAKTLSSNSDKLLNEAKMTQKKLKQVNKLTNKLPDLWRKIESINQQLLPLGNISDNMDRIRELIQQARDAASKVAVPMRFNGKSGVEVRLPNDLEDLKGYTSLSLFLQRPNSRENGGTENMFVMYLGNKDASRDYIGMAVVDGQLTCVYNLGDREAELQVDQILTKSETKEAVMDRVKFQRIYQFARLNYTKGATSSKPETPGVYDMDGRNSNTLLNLDPENVVFYVGGYPPDFKLPSRLSFPPYKGCIELDDLNENVLSLYNFKKTFNLNTTEVEPCRRRKEESDKNYFEGTGYARVPTQPHAPIPTFGQTIQTTVDRGLLFFAENGDRFISLNIEDGKLMVRYKLNSELPKERGVGDAINNGRDHSIQIKIGKLQKRMWINVDVQNTIIDGEVFDFSTYYLGGIPIAIRERFNISTPAFRGCMKNLKKTSGVVRLNDTVGVTKKCSEDWKLVRSASFSRGGQLSFTDLGLPPTDHLQASFGFQTFQPSGILLDHQTWTRNLQVTLEDGYIELSTSDSGGPIFKSPQTYMDGLLHYVSVISDNSGLRLLIDDQLLRNSKRLKHISSSRQSLRLGGSNFEGCISNVFVQRLSLSPEVLDLTSNSLKRDVSLGGCSLNKPPFLMLLKGSTRFNKTKTFRINQLLQDTPVASPRSVKVWQDACSPLPKTQANHGALQFGDIPTSHLLFKLPQELLKPRSQFAVDMQTTSSRGLVFHTGTKNSFMALYLSKGRLVFALGTDGKKLRIKSKEKCNDGKWHTVVFGHDGEKGRLVVDGLRAREGSLPGNSTISIRAPVYLGSPPSGKPKSLPTNSFVGCLKNFQLDSKPLYTPSSSFGVSSCLGGPLEKGIYFSEEGGHVVLAHSVLLGPEFKLVFSIRPRSLTGILIHIGSQPGKHLCVYLEAGKVTASMDSGAGGTSTSVTPKQSLCDGQWHSVAVTIKQHILHLELDTDSSYTAGQIPFPPASTQEPLHLGGAPANLTTLRIPVWKSFFGCLRNIHVNHIPVPVTEALEVQGPVSLNGCPDQ

SEQ ID NO: 25471 - protein, 340 aa, Homo sapiens
MLLPLLRSSCFPSSSPGGGGGSGGGGGGGDPGAESRPAAQLQRGAHGPPGPLQRAEAEPGADPPRAAEAEGAPGPGARSRGAGGGGRRAEREPHACMDPGAALQRRAGGGGGLGAGSPALSGGQGRRRKQPPRPADFKLQVIIIGSRGVGKTSLMERFTDDTFCEACKSTVGVDFKIKTVELRGKKIRLQIWDTAGQERFNSITSAYYRSAKGIILVYDITKKETFDDLPKWMKMIDKYASEDAELLLVGNKLDCETDREITRQQGEKFAQQITGMRFCEASAKDNFNVDEIFLKLVDDILKKMPLDILRNELSNSILSLQPEPEIPPELPPPRPHVRCC

SEQ ID NO: 25472 - protein, 382 aa, Homo sapiens
APVVAPPGVVVSRANKRSGAGPGGSGGGGARGAEEEPPPPLQAVLVADSFDRRFFPISKDQPRVLLPLANVALIDYTLEFLTATGVQETFVFCCWKAAQIKEHLLKSKWCRPTSLNVVRIITSELYRSLGDVLRDVDAKALVRSDFLLVYGDVISNINITRALEEHRLRRKLEKNVSVMTMIFKESSPSHPTRCHEDNVVVAVDSTTNRVLHFQKTQGLRRFAFPLSLFQGSSDGVEVRYDLLDCHISICSPQVAQLFTDNFDYQTRDDFVRGLLVNEEILGNQIHMHVTAKEYGARVSNLHMYSAVCADVIRRWVYPLTPEANFTDSTTQSCTHSRHNIYRGPEVITWCWTRPTCGRVFEWRLEHRSISLCFVTMLRSRNE

SEQ ID NO: 25473 - protein, 857 aa, Homo sapiens
MDKYDVIKAIGQGAFGKAYLAKGKSDSKHCVIKEINFEKMPIQEKEASKKEVILLEKMKHPNIVAFFNSFQENGRLFIVMEYCDGGDLMKRINRQRGVLFSEDQILGWFVQISLGLKHIHDRKILHRDIKAQNIFLSKNGMVAKLGDFGIARVLNNSMELARTCIGTPYYLSPEICQNKPYNNKTDIWSLGCVLYELCTLKHPFEGNNLQQLVLKICQAHFAPISPGFSRELHSLISQLFQVSPRDRPSINSILKRPFLENLIPKYLTPEVIQEEFSHMLICRAGAPASRHAGKVVQKCKIQKVRFQGKCPPRSRISVPIKRNAILHRNEWRPPAGAQKARSIKMIERPKIAAVCGHYDYYYAQLDMLRRRAHKPSYHPIPQENTGVEDYGQETRHGPSPSQWPAEYLQRKFEAQQYKLKVEKQLGLRPSSAEPNYNQRQELRSNGEEPRFQELPFRKNEMKEQEYWKQLEEIRQQYHNDMKEIRKKMGREPEENSKISHKTYLVKKSNLPVHQDASEGEAPVQMEFRSCCPGWSAMARSWLTATSASQDIEKDLKQMRLQNTKESKNPEQKYKAKKGVKFEINLDKCISDENILQEEEAMDIPNETLTFEDGMKFKEYECVKEHGDYTDKAFEKLHCPEAGFSTQTVAAVGNRRQWDGGAPQTLLQMMAVADITSTCPTGPDNGQVIVIEGIPGNRKQWRHEAPGTLMSVLAAAHLTSSSFSADEEFAMGTLKQWLPKEEDEGKVEMVSGIEVDEEQLEPRSDDDDTNFEESEDELRDEVVEYLEKLATFKGEEKTEEASSTSKDSRKSREREGISMQKSEELREGLENISTTSNDHICITDEDQGTSTTSQNIQV

SEQ ID NO: 25474 - protein, 1251 aa, Homo sapiens
MSTERDSETTFDEDSQPNDEVVPYSDDETEDELDDQGSAVEPEQNRVNREAEENREPFRKECTWQVKANDRKYHEQPHFMNTKFLCIKESKYANNAIKTYKYNAFTFIPMNLFEQFKRAANLYFLALLILQAVPQISTLAWYTTLVPLLVVLGVTAIKDLVDDVARHKMDKEINNRTCEVIKDGRFKVAKWKEIQVGDVIRLKKNDFVPADILLLSSSEPNSLCYVETAELDGETNLKFKMSLEITDQYLQREDTLATFDGFIECEEPNNRLDKFTGTLFWRNTSFPLDADKILLRGCVIRNTDFCHGLVIFAGADTKIMKNSGKTRFKRTKIDYLMNYMVYTIFVVLILLSAGLAIGHAYWEAQVGNSSWYLYDGEDDTPSYRGFLIFWGYIIVLNTMVPISLYVSVEVIRLGQSHFINWDLQMYYAEKDTPAKARTTTLNEQLGQIHYIFSDKTGTLTQNIMTFKKCCINGQIYGDHRDASQHNHNKIEQVDFSWNTYADGKLAFYDHYLIEQIQSGKEPEVRQFFFLLAVCHTVMVDRTDGQLNYQAASPDEGALVNAARNFGFAFLARTQNTITISELGTERTYNVLAILDFNSDRKRMSIIVRTPEGNIKLYCKGADTVIYERLHRMNPTKQETQDALDIFANETLRTLCLCYKEIEEKEFTEWNKKFMAASVASTNRDEALDKVYEEIEKDLILLGATAIEDKLQDGVPETISKLAKADIKIWVLTGDKKETAENIGFACELLTEDTTICYGEDINSLLHARMENQRNRGGVYAKFAPPVQESFFPPGGNRALIITGSWLNEILLEKKTKRNKILKLKFPRTEEERRMRTQSKRRLEAKKEQRQKNFVDLACECSAVICCRVTPKQKAMVVDLVKRYKKAITLAIGDGANDVNMIKTAHIGVGISGQEGMQAVMSSDYSFAQFRYLQRLLLVHGRWSYIRMCKFLRYFFYKNFAFTLVHFWYSFFNGYSAQTAYEDWFITLYNVLYTSLPVLLMGLLDQDVSDKLSLRFPGLYIVGQRDLLFNYKRFFVSLLHGVLTSMILFFIPLGAYLQTVGQDGEAPSDYQSFAVTIASALVITVNFQIGLDTSYWTFVNAFSIFGSIALYFGIMFDFHSAGIHVLFPSAFQFTGTASNALRQPYIWLTIILAVAVCLLPVVAIRFLSMTIWPSESDKIQKHRKRLKAEEQWQRRQQVFRRGVSTRRSAYAFSHQRGYADLISSGRSIRKKRSPLDAIVADGTAEYRRTGDS

SEQ ID NO: 25475 - protein, 620 aa, Homo sapiens
MGALTFRDVAIEFSLEEWQCLDSTQQNLYRNVMLENYRNLVFLGIAAFKPDLIIFLEQGKEPWNMKRHEMVEEPPVICSHFSQEFWPEQGIEDSFQKMILRRYDKCGHENLHLKISCTNVDECNVHKEGYNKLNQSLTTTQSKVFQCGKYANVFHKCSNSNRHKIRHTGEKGLKCKEYVRSFCMLSHLSQHERIYTRENSYKCEENGKAFNWSSTLTYYKSIHTGEKPYKCEECGKAFSKFSILTKHKVIHTGEKPYKCEECGKAFNRSSILTKHKIIHTGEKPYKCEECGKGFSSVSTLNTHKAIHAEEKPYKCEECGKASNSSSKLMEHKRIHTGEKPYKCEECGKAFSWSSSLTEHKRIHAGEKPYKCEECGKAFNRSSILTKHKIIHTGEKPYKCEGCGKAFSKVSTLNTHKAIHAEEKPYKCEECGKASNSSSKLMEHKRIHTGEKPYKCEECGKAFSWSSSLTEHKRIHAGEKPYKCEECGKAFTWSSSFTKHKRIHAAEKPYKCEECGKGFSTFSILTKHKIIHTGEKRYKCEECGKAFSWSSILTEHKIIHTGEKPYKCEECGKAFSRSSSLTRHKRIHTGEKPYKCEECGKAFKSSSTVSYHKKIHTGENP

SEQ ID NO: 25476 - protein, 645 aa, Homo sapiens [sequence omitted]

SEQ ID NO: 25477 - protein, 166 aa, Homo sapiens
CDSLAKIPKRASMVHSLIEAYALHKQMRIVKPKVASMEEMATFHTDAYLQHLQKVSQEGDDDHPDSIEYGLGYDCPATEGIFDYAAAIGGATITAAQCLIDGMCKVAINWSGGWHHAKKDEASGFCYLNDAVLGILRLRRKFERILYVDLDLHHGDGIFFFSDKLT

SEQ ID NO: 25478 - protein, 537 aa, Homo sapiens
ENYDDPHKTPASPVVHIRGLIDGVVEADLVEALQEFGPISYVVVMPKKRQALVEFEDVLGACNAVNYAADNQIYIAGHPAFVNYSTSQKISRPGDSDDSRSVNSVLLFTILNPIYSITTDVLYTICNPCGPVQRIVIFRKNGVQAMVEFDSVQSAQRAKASLNGADIYSGCCTLKIEYAKPTRLNVFKNDQDTWDYTNPNLSGQGDPGSNPNKRQRQPPLLGDHPAEYGEGRGFPSVDSRGSCAPARRPPCKFSPVLPLFPSHPPGGPHGGYHSHYHDEGYGPPPPHYEGRRMGPPVGGHRRGPSRYGPQYGHPPPPPPPPEYGPHADSPVLMVYGLDQSKMNCDRVFNVFCLYGNVEKVKFMKSKPGAAMVEMADGYAVDRAITHLNNNFMFGQKLNVCVSKQPAIMPGQSYGLEDGSCSYKDFSESRNNRFSTPEQAAKNRIQHPSNVLHFFNAPLEVTEENFFEICDELGVKRPSSVKVFSGKSERSSSGLLEWESKSDALETLGFLNHYQMKNPNGPYPYTLKLCFSTAQHAS

SEQ ID NO: 25479 - protein, 1321 aa, Homo sapiens
MSDSVILRSIKKFGEENDGFESDKSYNNDKKSRLQDEKKGDGVRVGFFQLFRFSSSTDIWLMFVGSLCAFLHGIAQPGVLLIFGTMTDVFIDYDVELQELQIPGKACVNNTIVWTNSSLNQNMTNGTRCGLLNIESEMIKFASYYAGIAVAVLITGYIQICFWVIAAARQIQKMRKFYFRRIMRMEIGWFDCNSVGELNTRFSDDINKINDAIADQMALFIQRMTSTICGFLLGFFRGWKLTLVIISVSPLIGIGAATIGLSVSKFTDYELKAYAKAGVVADEVISSMRTVAAFGGEKREVERYEKNLVFAQRWGIRKGIVMGFFTGFVWCLIFLCYALAFWYGSTLVLDEGEYTPGTLVQIFLSVIVGALNLGNASPCLEAFATGRAAATSIFETIDRKPIIDCMSEDGYKLDRIKGEIEFHNVTFHYPSRPEVKILNDLNMVIKPGEMTALVGPSGAGKSTALQLIQRFYDPCEGMVTVDGHDIRSLNIQWLRDQIGIVEQEPVLFSTTIAENIRYGREDATMEDIVQAAKEANAYNFIMDLPQQFDTLVGEGGGQMSGGQKQRVAIARALIRNPKILLLDMATSALDNESEAMVQEVLSKIQHGHTIISVAHRLSTVRAADTIIGFEHGTAVERGTHEELLERKGVYFTLVTLQSQGNQALNEEDIKDATEDDMLARTFSRGSYQDSLRASIRQRSKSQLSYLVHEPPLAVVDHKSTYEEDRKDKDIPVQEEVEPAPVRRILKFSAPEWPYMLVGSVGAAVNGTVTPLYAFLFSQILGTFSIPDKEEQRSQINGVCLLFVAMGCVSLFTQFLQGYAFAKSGELLTKRLRKFGFRAMLGQDIAWFDDLRNSPGALTTRLATDASQVQGAAGSQIGMIVNSFTNVTVAMIIAFSFSWKLSLVILCFFPFLALSGATQTRMLTGFASRDKQALEMVGQITNEALSNIRTVAGIGKERRFIEALETELEKPFKTAIQKANIYGFCFAFAQCIMFIANSASYRYGGYLISNEGLHFSYVFRVISAVVLSATALGRAFSYTPSYAKAKISAARFFQLLDRQPPISVYNTAGEKWDNFQGKIDFVDCKFTYPSRPDSQVLNGLSVSISPGQTLAFVGSSGCGKSTSIQLLERFYDPDQGKVMIDGHDSKKVNVQFLRSNIGIVSQEPVLFACSIMDNIKYGDNTKEIPMERVIAAAKQAQLHDFVMSLPEKYETNVGSQGSQLSRGEKQRIAIARAIVRDPKILLLDEATSALDTESEKTVQVALDKAREGRTCIVIAHRLSTIQNADIIAVMAQGVVIEKGTHEELMAQKGAYYKLVTTGSPIS

SEQ ID NO: 25480 - protein, 1444 aa, Homo sapiens
DSGPNKNKKKKKTDFIPYRDSVLTWLLRENLGGNSRTAMVAALSPADINYDETLSTLRYADRAKQIRCNAVINEDPNNKLIRELKDEVTRLRDLLYAQGLGDITDTNTVPGGPKYVSDLENNNLNRGGTVNEAPDPLSTVTNALVGMSPSSSLSALSSRAASVSSLHERILFAPGSEEAIERLKETEKIIAELNETWEEKLRRTEAIRMEREALLAEMGVAMREDGGTLGVFSPKKTPHLVNLNEDPLMSECLLYYIKDGITRVGREDGERRQDIVLSGHFIKEEHCVFRSDSRGGSEAVVTLEPCEGADTYVNGKKVTEPSILRSGNRIIMGKSHVFRFNHPEQARQERERTPCAETPAEPVDWAFAQRELLEKQGIDMKQEMEQRLQELEDQYRREREEATYLLEQQRLDYESKLEALQKQMDSRYYPEVNEEEEEPEDEVQWTERECELALWAFRKWKWYQFTSLRDLLWGNAIFLKEANAISVELKKKVQFQFVLLTDTLYSPLPPDLLPPEAAKDRETRPFPRTIVAVEVQDQKNGATHYWTLEKLRQRLDLMREMYDRAAEVPSSVIEDCDNVVTGGDPFYDRFPWFRLVGRAFVYLSNLLYPVPLVHRVAIVSEKGEVKGFLRVAVQAISADEEAPDYGSGVRQSGTAKISFDDQHFEKFQSESCPVVGMSRSGTSQEELRIVEGQGQGADVGPSADEVNNNTCSAVPPEGLLLDSSEKAALDGPLDAALDHLRLGNTFTFRVTVLQASSISAEYADIFCQFNFIHRHDEAFSTEPLKNTGRGPPLGFYHVQNIAVEVTKSFIEYIKSQPIVFEVFGHYQQHPFPPLCKDVLSPLRPSRRHFPRVMPLSKPVPATKLSTLTRPCPGPCHCKYDLLVYFEICELEANGDYIPAVVDHRGGMPCMGTFLLHQGIQRRITVTLLHETGSHIRWKEVRELVVGRIRNTPETDESLIDPNILSLNILSSGYIHPAQDDRVSLGNDTRTFYQFEAAWDSSMHNSLLLNRVTPYREKIYMTLSAYIEMENCTQPAVVTKDFCMVFYSRDAKLPASRSIRNLFGSGSLRASESNRVTGVYELSLCHVADAGSPGMQRRRRRVLDTSVAYVRGEENLAGWRPRSDSLILDHQWELEKLSLLQEVEKTRHYLLLREKLETAQRPVPEALSPAFSEDSESHGSSSASSPLSAEGRPSPLEAPNERQRELAVKCLRLLTHTFNREYTHSHVCVSASESKLSEMSVTLLRDPSMSPLGVATLTPSSTCPSLVEGRYGATDLRTPQPCSRPASPEPELLPEADSKKLPSPARATETDKEPQRLLVPDIQEIRVSPIVSKKGYLHFLEPHTSGWARRFVVVRRPYAYMYNSDKDTVERFVLNLATAQVEYSEDQQAMLKTPNTFAVCTEHRGILLQAASDKDMHDWLYAFNPLLAGTIRSKLSRRRSAQMRV

SEQ ID NO: 25481 - protein, 138 aa, Homo sapiens
MDVTIVKTDYEGQAKKLLELMENTDVIIVAGGDGTLQEVVTGVLRRTDEATFSKIPIGFIPLGETSSLSHTLFAESGNKVQHITDATLAIVKGETVPLDVLQIKGEKEQPVFAMTGLRWGSFRDAGVKVSKYWYLGPL

SEQ ID NO: 25482 - protein, 248 aa, Homo sapiens
MQWLNTMKELALGVRTSKTCTFSAAMTTMQGMEQAMPGAGPGVPQLGNMAVIHSHLWKGLQEKFLKGEPKVLGVVQILTALMSLSMGITMMCMASNTYGSNPISVYIGYTIWGSVMFIISGSLSIAAGIRTTKGLVRGSLGMNITSSVLAASGILINTFSLAFYSFHHPYCNYYGNSNNCHGTMSILMGLDGMVLLLSVLEFCIAVSLSAFGCKVLCCTPGGGKIKHYASIQVFISRERKKERRKERK

SEQ ID NO: 25483 - protein, 177 aa, Homo sapiens
MPRLLRLSLLWLGLLLVRFSRELSDISSARKLCGRYLVKEIEKLCGHANWSQFRFEEETPFSRLIAQASEKVEAYSPYQFESPQTASPARGRGTNPVSTSWEEAVNSWEMQSLPEYKDKKGYSPLGLLEFAGGPLQMLFAWVSPAEAAEQQRLLPVPSSGSFIPEGHPLDASQSFPV

SEQ ID NO: 25484 - protein, 470 aa, Homo sapiens
MSGRPRTTSFAESCKPVQQPSAFGSMKVSRDKDGSKVTTVVATPGQGPDRPQEVSYTDTKVIGNGSFGVVYQAKLCDSGELVAIKKVLQDKRFKNRELQIMRKLDHCNIVRLRYFFYSSGEKKDEVYLNLVLDYVPETVYRVARHYSRAKQTLPVIYVKLYMYQLFRSLAYIHSFGICHRDIKPQNLLLDPDTAVLKLCDFGSAKQLVRGEPNVSYICSRYYRAPELIFGATDYTSSIDVWSAGCVLAELLLGQPIFPGDSGVDQLVEIIKVLGTPTREQIREMNPNYTEFKFPQIKAHPWTKVFRPRTPPEAIALCSRLLEYTPTARLTPLEACAHSFFDELRDPNVKLPNGRDTPALFNFTTQELSSNPPLATILIPPHARIQAAASTPTNATAASGNLFCCHLLPIRWIILLPCALCSTPLLVSYMVLGTFLNLFVLPFSYLQNRDANTGDRGQTNNAASASASNST

SEQ ID NO: 25485 - protein, 842 aa, Homo sapiens
MQRSPLEKASVVSKLFFSWTRPILRKGYRQRLELSDIYQIPSVDSADNLSEKLEREWDRELASKKNPKLINALRRCFFWRFMFYGIFLYLGEVTKAVQPLLLGRIIASYDPDNKEERSIAIYLGIGLCLLFIVRTLLLHPAIFGLHHIGMQMRIAMFSLIYKKTLKLSSRVLDKISIGQLVSLLSNNLNKFDEGLALAHFVWIAPLQVALLMGLIWELLQASAFCGLGFLIVLALFQAGLGRMMMKYRDQRAGKISERLVITSEMIENIQSVKAYCWEEAMEKMIENLRQTELKLTRKAAYVRYFNSSAFFFSGFFVVFLSVLPYALIKGIILRKIFTTISFCIVLRMAVTRQFPWAVQTWYDSLGAINKIQDFLQKQEYKTLEYNLTTTEVVMENVTAFWEETSLLMVIMGELEPSEGKIKHSGRISFCSQFSWIMPGTIKENIIFGVSYDEYRYRSVIKACQLEEVAASLVVLWLLGNTPLQDKGNSTHSRNNSYAVIITSTSSYYVFYIYVGVADTLLAMGFFRGLPLVHTLITVSKILHHKMLHSVLQAPMSTLNTLKAGGILNRFSKDIAILDDLLPLTIFDFIQLLLIVIGAIAVVAVLQPYIFVATVPVIVAFIMLRAYFLQTSQQLKQLESEGRSPIFTHLVTSLKGLWTLRAFGRQPYFETLFHKALNLHTANWFLYLSTLRWFQMRIEMIFVIFFIAVTFISILTTGEGEGRVGIILTLAMNIMSTLQWAVNSSIDVDSLMRSVSRVFKFIDMPTEGKPTKSTKPYKNGQLSKVMIIENSHVKKDDIWPSGGQMTVKDLTAKYTEGGNAILENISFSISPGQRVRFEHCLLC

SEQ ID NO: 25486 - protein, 575 aa, Homo sapiens
MLWFSGVGALAERYCRRSPGITCCVLLLLNCSGVPMSLASSFLTGSVAKCENEGEVLQIPFITDNPCIMCVCLNKEVTCKREKCPVLSRDCALAIKQRGACCEQCKGCTYEGNTYNSSFKWQSPAEPCVLRQCQEGVVTESGVRCVVHCKNPLEHLGMCCPTCPGCVFEGVQYQEGEEFQPEGSKCTKCSCTGGRTQCVREVCPILSCPQHLSHIPPGQCCPKCLGQRKVFDLPFGSCLFRSDVYDNGSSFLYDNCTACTCRDSTVVCKRKCSHPGGCDQGQEGCCEECLLRVPPEDIKVCKFGNKIFQDGEMWSSINCTICACVKGRTECRNKQCIPISSCPQGKILNRKGCCPICTESLEISWDGDSFVEVMAAPHLKGKLCGLCGNYNGHKRDDLIGGDGNFKFDVDDFAESWRVESNEFCNRPQRKPVPELCQGTVKVKLRAHRECQKLKSWEFQTCHSTVDYATFYRSCVTDMCECPVHKNCYCESFLAYTRACQREGIKVHWEPQQNCAATQCKHGAVYDTCGPGCIKTCDNWNEIGPCNKPCVAGCHCPANLVLHKGRCIKPVLCPQR

SEQ ID NO: 25487 - protein, 1187 aa, Homo sapiens
MQRSPLEKASVVSKLFFSWTRPILRKGYRQRLELSDIYQIPSVDSADNLSEKLEREWDRELASKKNPKLINALRRCFFWRFMFYGIFLYLGEVTKAVQPLLLGRIIASYDPDNKEERSIAIYLGIGLCLLFIVRTLLLHPAIFGLHHIGMQMRIAMFSLIYKKTLKLSSRVLDKISIGQLVSLLSNNLNKFDEGLALAHFVWIAPLQVALLMGLIWELLQASAFCGLGFLIVLALFQAGLGRMMMKYRDQRAGKISERLVITSEMIENIQSVKAYCWEEAMEKMIENLRQTELKLTRKAAYVRYFNSSAFFFSGFFVVFLSVLPYALIKGIILRKIFTTISFCIVLRMAVTRQFPWAVQTWYDSLGAINKIQDFLQKQEYKTLEYNLTTTEVVMENVTAFWEETSLLMVIMGELEPSEGKIKHSGRISFCSQFSWIMPGTIKENIIFGVSYDEYRYRSVIKACQLEEDISKFAEKDNIVLGEGGITLSGGQRARISLARAVYKDADLYLLDSPFGYLDVLTEKEIFESCVCKLMANKTRILVTSKMEHLKKADKILILHEGSSYFYGTFSELQNLQPDFSSKLMGCDSFDQFSAERRNSILTETLHRFSLEGDAPVSWTETKKQSFKQTGEFGEKRKNSILNPINSIRKFSIVQKTPLQMNGIEEDSDEPLERRLSLVPDSEQGEAILPRISVISTGPTLQARRRQSVLNLMTHSVNQGQNIHRKTTASTRKVSLAPQANLTELDIYSRRLSQETGLEISEEINEEDLKECFFDDMESIPAVTTWNTYLRYITVHKSLIFVLIWCLVIFLAEVAASLVVLWLLGNTPLQDKGNSTHSRNNSYAVIITSTSSYYVFYIYVGVADTLLAMGFFRGLPLVHTLITVSKILHHKMLHSVLQAPMSTLNTLKAGGILNRFSKDIAILDDLLPLTIFDFIQLLLIVIGAIAVVAVLQPYIFVATVPVIVAFIMLRAYFLQTSQQLKQLESEGRSPIFTHLVTSLKGLWTLRAFGRQPYFETLFHKALNLHTANWFLYLSTLRWFQMRIEMIFVIFFIAVTFISILTTGEGEGRVGIILTLAMNIMSTLQWAVNSSIDVDSLMRSVSRVFKFIDMPTEGKPTKSTKPYKNGQLSKVMIIENSHVKKDDIWPSGGQMTVKDLTAKYTEGGNAILENISFSISPGQRVRFEHCLLC

SEQ ID NO: 25488 - protein, 650 aa, Homo sapiens
MLWFSGVGALAERYCRRSPGITCCVLLLLNCSGVPMSLASSFLTGSVAKCENEGEVLQIPFITDNPCIMCVCLNKEVTCKREKCPVLSRDCALAIKQRGACCEQCKGCTYEGNTYNSSFKWQSPAEPCVLRQCQEGVVTESGVRCVVHCKNPLEHLGMCCPTCPGCVFEGVQYQEGEEFQPEGSKCTKCSCTGGRTQCVREVCPILSCPQHLSHIPPGQCCPKCLGQRKVFDLPFGSCLFRSDVYDNGSSFLYDNCTACTCRDSTVVCKRKCSHPGGCDQGQEGCCEECLLRVPPEDIKVCKFGNKIFQGKILNRKGCCPICTEKPGVCTVFGDPHYNTFDGRTFNFQGTCQYVLTKDCSSPASPFQVLVKNDARRTRSFSWTKSVELVLGESRVSLQQHLTVRWNGSRIALPCRAPHFHIDLDGYLLKVTTKAGLEISWDGDSFVEVMAAPHLKGKLCGLCGNYNGHKRDDLIGGDGNFKFDVDDFAESWRVESNEFCNRPQRKPVPELCQGTVKVKLRAHRECQKLKSWEFQTCHSTVDYATFYRSCVTDMCECPVHKNCYCESFLAYTRACQREGIKVHWEPQQNCAATQCKHGAVYDTCGPGCIKTCDNWNEIGPCNKPCVAGCHCPANLVLHKGRCIKPVLCPQR

SEQ ID NO: 25489 - protein, 214 aa, Homo sapiens
MTVFFKTLRNHWKKTTAGLCLLTWGGHWLYGKHCDNLLRRAACQEAQVFGNQLIPPNAQVKKATVFLNPAACKGKARTLFEKNAAPILHLSGMDVTIVKTDYEGQAKKLLELMENTDVIIVAGGDGTLQEVVTGVLRRTDEATFSKIPIGFIPLGETSSLSHTLFAESGNKVQHITDATLAIVKGETVPLDVLQIKVLVSWASKNQSSPLFQHS

SEQ ID NO: 25490 - protein, 406 aa, Homo sapiens
MKARAPPPPGKAATLHVHSDQKPPHDGALGSQQNLVRMKEALRASTMDVTVVLPSGLEKRSVLNGSHAMMDLLVELCLQNHLNPSHHALEIRSSETQQPLSFKPNTLIGTLNVHTVFLKEKVPEEKVKPGPPKVPEKSVRLVVNYLRTQKAVVRVSPEVPLQNILPVICAKCEVSPEHVVLLRDNIAGEELELSKSLNELGIKELYAWDNRRETFRKSSLGNDETDKEKKKFLGFFKVNKRSNSKGCLTTPNSPSMHSRSLTLGPSLSLGSISGVSVKSEMKKRRAPPPPGSGPPVQDKASEKVSLGSQIDLQKKKRRAPAPPPPQPPPPSPLIPNRTEDKEENRKSTMGGGRQVPQKPPRGTARGPPQLVLPPPPPYPPPDTDVVEPLSFPGEGAGSEASDPIPK

SEQ ID NO: 25491 - protein, 187 aa, Homo sapiens
VGDVLRKPSKEEPLFAARVIYDLLFFFMVIIIVLNLIFGVIIDTFADLRSEKQKKEEILKTTCFICGLERDKFDNKTVTFEEHIKEEHNMWHYLCFIVLVKVKDSTEYTGPESYVAEMIKERNLDWFPRMRAMSLVSSDSEGEQNELRNLQEKLESTMKLVTNLSGQLSELKDQVKKENPSAYPPIT

SEQ ID NO: 25492 - protein, 910 aa, Homo sapiens
MSKTNKSKSGSRSSRSRSASRSRSRSFSKSRSRSRSLSRSRKRRLSSRSRSRSYSPAHNRERNHPRVYQNRDFRGHNRGYRRPYYFRGRNRGFYPWGQYNRGGYGNYRSNWQNYRQAYSPRRGRSRSRSPKRRSPSPRSRSHSRNSDKSSSDRSRRSSSSRSSSNHSRVESSKRKSAKEKKSSSKDSRPSQAAGDNQGDEAKEQTFSGGTSQDTKASESSKPWPDATYGTGSASRASAVSELSPRERSPALKSPLQSVVVRRRSPRPSPVPKPSPPLSSTSQMGSTLPSGAGYQSGTHQGQFDHGSGSLSPSKKSPVGKSPPSTGSTYGSSQKEESAASGGAAYTKRYLEEQKTENGKDKEQKQTNTDKEKIKEKGSFSDTGLGDGKMKSDSFAPKTDSEKPFRGSQSPKRYKLRDDFEKKMADFHKEEMDDQDKDKAKGRKESEFDDEPKFMSKVIGANKNQEEEKSGKWEGLVYAPPGKEKQRKTEELEEESFPERSKKEDRGKRSEGGHRGFVPEKNFRVTAYKAVQEKSSSPPPRKTSESRDKLGAKGDFPTGKSSFSITREAQVNVRMDSFDEDLARPSGLLAQERKLCRDLVHSNKKEQEFRSIFQHIQSAQSQRSPSELFAQHIVTIVHHVKEHHFGSSGMTLHERFTKYLKRGTEQEAAKNKKSPEIHRRIDISPSTFRKHGLAHDEMKSPREPGYKAEGKYKDDPVDLRLDIERRKKHKERDLKRGKSRESVDSRDSSHSRERSAEKTEKTHKGSKKQKKHRRARDRSRSSSSSSQSSHSYKAEEYTEETEEREESTTGFDKSRLGTKDFVGPSERGGGRARGTFQFRARGRGWGRGNYSGNNNNNSNNDFQKRNREEEWDPEYTPKSKKYYLHDDREGEGSDKWAYVVILETFNLGNFDS

SEQ ID NO: 25493 - protein, 375 aa, Homo sapiens
MEEPEEPADSGQSLVPVYIYSPEYVSMCDSLAKIPKRASMVHSLIEAYALHKQMRIVKPKVASMEEMATFHTDAYLQHLQKVSQEGDDDHPDSIEYGLGYDCPATEGIFDYAAAIGGATITAAQCLIDGMCKVAINWSGGWHHAKKDEASGFCYLNDAVLGILRLRRKFERILYVDLDLHHGDEDAFSFTSKVMTVSLHKFSPGFFPGTGDVSDVGLGKGRYYSVNVPIQDGIQDEKYYQICESVLKEVYQAFNPKAVVLQLGADTIAGDPMCSFNMTPVGIGKCLKYILQWQLATLILGGGGYNLANTARCWTYLTGVILGKTLSSEIPDHEFFTAYGPDYVLEITPSCRPDRNEPHRIQQILNYIKGNLKHVV

SEQ ID NO: 25494 - protein, 807 aa, Homo sapiens
MTTEKSLVTEAENSQHQQKEEGEEAINSGQQEPQQEESCQTAAEGDNWCEQKLKASNGDTPTHEDLTKNKERTSESRGLSRLFSSFLKRPKSQVSEEEGKEVESDKEKGEGGQKEIEFGTSLDEEIILKAPIAAPEPELKTDPSLDLHSLSSAETQPAQEELREDPDFEIKEGEGLEECSKIEVKEESPQSKAETELKASQKPIRKHRNMHCKVSLLDDTVYECVVEKHAKGQDLLKRVCEHLNLLEEDYFGLAIWDNATSKTWLDSAKEIKKQVRGVPWNFTFNVKFYPPDPAQLTEDITRYYLCLQLRQDIVAGRLPCSFATLALLGSYTIQSELGDYDPELHGVDYVSDFKLAPNQTKELEEKVMELHKSYRSMTPAQADLEFLENAKKLSMYGVDLHKAKDLEGVDIILGVCSSGLLVYKDKLRINRFPWPKVLKISYKRSSFFIKIRPGEQEQYESTIGFKLPSYRAAKKLWKVCVEHHTFFRLTSTDTIPKSKFLALGSKFRYSGRTQAQTRQASALIDRPAPHFERTASKRASRSLDGAAAVDSADRSPRPTSAPAITQGQVAEGGVLDASAKKTVVPKAQKETVKAEVKKEDEPPEQAEPEPTEAWKVEKTHIEVTVPTSNGDQTQKLAEKTEDLIRMRKDLDKSQEEIKKHHASISELKKNFMESVPEPRPSEWDKRLSTHSPFRTLNINGQIPTGEGVKKTSVLPSERKVGGPETQERALLVQDEEKIKRQERSTERALPQQENEEILPKVSIPIPEDHKSLKKCHLYFSTFPSPRIPFMMSFLVILVLAVWWLVFL

SEQ ID NO: 25495 - protein, 627 aa, Homo sapiens
MLWFSGVGALAERYCRRSPGITCCVLLLLNCSGVPMSLASSFLTGSVAKCENEGEVLQIPFITDNPCIMCVCLNKEVTCKREKCPVLSRDCALAIKQRGACCEQCKGCTYEGNTYNSSFKWQSPAEPCVLRQCQEGVVTESGVRCVVHCKNPLEHLGMCCPTCPGCVFEGVQYQEGEEFQPEGSKCTKCSCTGGRTQCVREVCPILSCPQHLSHIPPGQCCPKCLGQRKVFDLPFGSCLFRSDVYDNGSSFLYDNCTACTCRDSTVVCKRKCSHPGGCDQGQEGCCEECLLRVPPEDIKVCKFGNKIFQDGEMWSSINCTICACVKGRTECRNKQCIPISSCPQVLVKNDARRTRSFSWTKSVELVLGESRVSLQQHLTVRWNGSRIALPCRAPHFHIDLDGYLLKVTTKAGLEISWDGDSFVEVMAAPHLKGKLCGLCGNYNGHKRDDLIGGDGNFKFDVDDFAESWRVESNEFCNRPQRKPVPELCQGTVKVKLRAHRECQKLKSWEFQTCHSTVDYATFYRSCVTDMCECPVHKNCYCESFLAYTRACQREGIKVHWEPQQNCAATQCKHGAVYDTCGPGCIKTCDNWNEIGPCNKPCVAGCHCPANLVLHKGRCIKPVLCPQR

SEQ ID NO: 25496 - protein, 471 aa, Homo sapiens
MNILLQYVVKSFDRSTKVIDFHYPNELLQEYNWELADQPQNLEEILMHCQTTLKYAIKTGHPRYFNQLSTGLDMVGLAADWLTSTANTNMFTYEIAPVFVLLEYVTLKKMREIIGWPGGSGDGIFSPGGAISNMYAMMIARFKMFPEVKEKGMAALPRLIAFTSEHSHFSLKKGAAALGIGTDSVILIKCDERGKMIPSDLERRILEAKQKGFVPFLVSATAGTTVYGAFDPLLAVADICKKYKIWMHVDAAWGGGLLMSRKHKWKLSGVERANSVTWNPHKMMGVPLQCSALLVREEGLMQNCNQMHASYLFQQDKHYDLSYDTGDKALQCGRHVDVFKLWLMWRAKGTTGFEAHVDKCLELAEYLYNIIKNREGYEMVFDGKPQHTNVCFWYIPPSLRTLEDNEERMSRLSKVAPVIKARMMEYGTTMVSYQPLGDKVNFFRMVISNPAATHQDIDFLIEEIERLGQDL

SEQ ID NO: 25497 - protein, 2749 aa, Homo sapiens
MSDKMSSFLHIGDICSLYAEGSTNGFISTLGLVDDRCVVQPETGDLNNPPKKFRDCLFKLCPMNRYSAQKQFWKAAKPGANSTTDAVLLNKLHHAADLEKKQNETENRKLLGTVIQYGNVIQLLHLKSNKYLTVNKRLPALLEKNAMRVTLDEAGNEGSWFYIQPFYKLRSIGDSVVIGDKVVLNPVNAGQPLHASSHQLVDNPGCNEVNSVNCNTSWKIVLFMKWSDNKDDILKGGDVVRLFHAEQEKFLTCDEHRKKQHVFLRTTGRQSATSATSSKALWEVEVVQHDPCRGGAGYWNSLFRFKHLATGHYLAAEVDPDFEEECLEFQPSVDPDQDASRSRLRNAQEKMVYSLVSVPEGNDISSIFELDPTTLRGGDSLVPRNSYVRLRHLCTNTWVHSTNIPIDKEEEKPVMLKIGTSPVKEDKEAFAIVPVSPAEVRDLDFANDASKVLGSIAGKLEKGTITQNERRSVTKLLEDLVYFVTGGTNSGQDVLEVVFSKPNRERQKLMREQNILKQIFKLLQAPFTDCGDGPMLRLEELGDQRHAPFRHICRLCYRVLRHSQQDYRKNQEYIAKQFGFMQKQIGYDVLAEDTITALLHNNRKLLEKHITAAEIDTFVSLVRKNREPRFLDYLSDLCVSMNKSIPVTQELICKAVLNPTNADILIETKLVLSRFEFEGVSSTGENALEAGEDEEEVWLFWRDSNKEIRSKSVRELAQDAKEGQKEDRDVLSYYRYQLNLFARMCLDRQYLAINEISGQLDVDLILRCMSDENLPYDLRASFCRLMLHMHVDRDPQEQVTPVKYARLWSEIPSEIAIDDYDSSGASKDEIKERFAQTMEFVEEYLRDVVCQRFPFSDKEKNKLTFEVVNLARNLIYFGFYNFSDLLRLTKILLAILDCVHVTTIFPISKMAKGEENKGSNVMRSIHGVGELMTQVVLRGGGFLPMTPMAAAPEGNVKQAEPEKEDIMVMDTKLKIIEILQFILNVRLDYRISCLLCIFKREFDESNSQTSETSSGNSSQEGPSNVPGALDFEHIEEQAEGIFGGSEENTPLDLDDHGGRTFLRVLLHLTMHDYPPLVSGALQLLFRHFSQRQEVLQAFKQVQLLVTSQDVDNYKQIKQDLDQLRSIVEKSELWVYKGQGPDETMDGASGENEHKKTEEGNNKPQKHESTSSYNYRVVKEILIRLSKLCVQESASVRKSRKQQQRLLRNMGAHAVVLELLQIPYEKAEDTKMQEIMRLAHEFLQNFCAGNQQNQALLHKHINLFLNPGILEAVTMQHIFMNNFQLCSEINERVVQHFVHCIETHGRNVQYIKFLQTIVKAEGKFIKKCQDMVMAELVNSGEDVLVFYNDRASFQTLIQMMRSERDRMDENSPLMYHIHLVELLAVCTEGKNVYTEIKCNSLLPLDDIVRVVTHEDCIPEVKIAYINFLNHCYVDTEVEMKEIYTSNHMWKLFENFLVDICRACNNTSDRKHADSILEKYVTEIVMSIVTTFFSSPFSDQSTTLQTRQPVFVQLLQGVFRVYHCNWLMPSQKASVESCIRVLSDVAKSRAIAIPVDLDSQVNNLFLKSHSIVQKTAMNWRLSARNAARRDSVLAASRDYRNIIERLQDIVSALEDRLRPLVQAELSVLVDVLHRPELLFPENTDARRKCESGGFICKLIKHTKQLLEENEEKLCIKVLQTLREMMTKDRGYGEKLISIDELDNAELPPAPDSENATEELEPSPPLRQLEDHKRGEALRQVLVNRYYGNVRPSGRRESLTSFGNGPLSAGGPGKPGGGGGGSGSSSMSRGEMSLAEVQCHLDKEGASNLVIDLIMNASSDRVFHESILLAIALLEGGNTTIQHSFFCRLTEDKKSEKFFKVFYDRMKVAQQEIKATVTVNTSDLGNKKKDDEVDRDAPSRKKAKEPTTQITEEVRDQLLEASAATRKAFTTFRREADPDDHYQPGEGTQATADKAKDDLEMSAVITIMQPILRFLQLLCENHNRDLQNFLRCQNNKTNYNLVCETLQFLDCICGSTTGGLGLLGLYINEKNVALINQTLESLTEYCQGPCHENQNCIATHESNGIDIITALILNDINPLGKKRMDLVLELKNNASKLLLAIMESRHDSENAERILYNMRPKELVEVIKKAYMQGEVEFEDGENGEDGAASPRNVGHNIYILAHQLARHNKELQSMLKPGGQVDGDEALEFYAKHTAQIEIVRLDRTMEQIVFPVPSICEFLTKESKLRIYYTTERDEQGSKINDFFLRSEDLFNEMNWQKKLRAQPVLYWCARNMSFWSSISFNLAVLMNLLVAFFYPFKGVRGGTLEPHWSGLLWTAMLISLAIVIALPKPHGIRALIASTILRLIFSVGLQPTLFLLGAFNVCNKIIFLMSFVGNCGTFTRGYRAMVLDVEFLYHLLYLVICAMGLFVHEFFYSLLLFDLVYREETLLNVIKSVTRNGRSIILTAVLALILVYLFSIVGYLFFKDDFILEVDRLPNETAVPETGESLASEFLFSDVCRVESGENCSSPAPREELVPAEETEQDKEHTCETLLMCIVTVLSHGLRSGGGVGDVLRKPSKEEPLFAARVIYDLLFFFMVIIIVLNLIFGVIIDTFADLRSEKQKKEEILKTTCFICGLERDKFDNKTVTFEEHIKEEHNMWHYLCFIVLVKVKDSTEYTGPESYVAEMIKERNLDWFPRMRAMSLVSSDSEGEQNELRNLQEKLESTMKLVTNLSGQLSELKDQMTEQRKQKQRIGLLGHPPHMNVNPQQPA

SEQ ID NO: 25498 - protein, 646 aa, Homo sapiens
MEPQDLELELCKKHHFGINKPEKIIPSPDDSKFLLKTFTHIKSNVSAPNKKKVKESKEKEKLERRLLEELLKMFMDSESFYYSLTYDLTNSVQRQSTGERDGRPLWQKVDDRFFWNKYMIQDLTEIGTPDVDFWIIPMIQGFVQIEELVVNYTESSDDEKSSPETPPQESTCVDDIHPRFLVALISRRSRHRAGMRYKRRGVDKNGNVANYVETEQLIHVHNHTLSFVQTRGSVPVFWSQVGYRYNPRPRLDRSEKETVAYFCAHFEEQLNIYKKQVIINLVDQAGREKIIGDAYLKQVLLFNNSHLTYVSFDFHEHCRGMKFENVQTLTDAIYDIILDMKWCWVDEAGVICKQEGIFRVNCMDCLDRTNVVQAAIARVVMEQQLKKLGVMPPEQPLPVKCNRIYQIMWANNGDSISRQYAGTAALKGDFTRTGERKLAGVMKDGVNSANRYYLNRFKDAYRQAVIDLMQGIPVTEDLYSIFTKEKEHEALHKENQRSHQELISQLLQSYMKLLLPDDEKFHGGWALIDCDPSLIDATHRDVDVLLLLSNSAYYVAYYDDEVDKVNQYQRLSLENLEKIEIGPEPTLFGKPKFSCMRLHYRYKEASGYFHTLRAVMRNPEEDGKDTLQCIAEMLQITKQAMGSDLP

SEQ ID NO: 25499 - protein, 973 aa, Homo sapiens
MEVTCLLLLALIPFHCRGQGVYAPAQAQIVHAGQACVVKEDNISERVYTIREGDTLMLQCLVTGHPRPQVRWTKTAGSASDKFQETSVFNETLRIERIARTQGGRYYCKAENGVGVPAIKSIRVDVQYLDEPMLTVHQTVSDVRGNFYQEKTVFLRCTVNSNPPARFIWKRGSDTLSHSQDNGVDIYEPLYTQGETKVLKLKNLRPQDYASYTCQVSVRNVCGIPDKAITFRLTNTTAPPALKLSVNETLVVNPGENVTVQCLLTGGDPLPQLQWSHGPGPLPLGALAQGGTLSIPSVQARDSGYYNCTATNNVGNPAKKTVNLLVRSMKNATFQITPDVIKESENIQLGQDLKLSCHVDAVPQEKVTYQWFKNGKPARMSKRLLVTRNDPELPAVTSSLELIDLHFSDYGTYLCMASFPGAPVPDLSVEVNISSETVPPTISVPKGRAVVTVREGSPAELQCEVRGKPRPPVLWSRVDKEAALLPSGLPLEETPDGKLRLERVSRDMSGTYRCQTARYNGFNVRPREAQVQLNVQFPPEVEPSSQDVRQALGRPVLLRCSLLRGSPQRIASAVWRFKGQLLPPPPVVPAAAEAPDHAELRLDAVTRDSSGSYECSVSNDVGSAACLFQVSAKAYSPEFYFDTPNPTRSHKLSKNYSYVLQWTQREPDAVDPVLNYRLSIRQLNQHNAVVKAIPVRRVEKGQLLEYILTDLRVPHSYEVRLTPYTTFGAGDMASRIIHYTEPINSPNLSDNTCHFEDEKICGYTQDLTDNFDWTRQNALTQNPKRSPNTGPPTDISGTPEGYYMFIETSRPRELGDRARLVSPLYNASAKFYCVSFFYHMYGKHIGSLNLLVRSRNKGALDTHAWSLSGNKGNVWQQAHVPISPSGPFQIIFEGVRGPGYLGDIAIDDVTLKKGECPRKQTDPNKGILLCGLDSEDLHPGLLPVNLCAFVHSANTNQTLPLWKPLFNGRDGQM

SEQ ID NO: 25500 - protein, 1738 aa, Homo sapiens
SNVPGALDFEHIEEQAEGIFGGSEENTPLDLDDHGGRTFLRVLLHLTMHDYPPLVSGALQLLFRHFSQRQEVLQAFKQVQLLVTSQDVDNYKQIKQDLDQLRSIVEKSELWVYKGQGPDETMDGASGENEHKKTEEGNNKPQKHESTSSYNYRVVKEILIRLSKLCVQESASVRKSRKQQQRLLRNMGAHAVVLELLQIPYEKAEDTKMQEIMRLAHEFLQNFCAGNQQNQALLHKHINLFLNPGILEAVTMQHIFMNNFQLCSEINERVVQHFVHCIETHGRNVQYIKFLQTIVKAEGKFIKKCQDMVMAELVNSGEDVLVFYNDRASFQTLIQMMRSERDRMDENSPLMYHIHLVELLAVCTEGKNVYTEIKCNSLLPLDDIVRVVTHEDCIPEVKIAYINFLNHCYVDTEVEMKEIYTSNHMWKLFENFLVDICRACNNTSDRKHADSILEKYVTEIVMSIVTTFFSSPFSDQSTTLQTRQPVFVQLLQGVFRVYHCNWLMPSQKASVESCIRVLSDVAKSRAIAIPVDLDSQVNNLFLKSHSIVQKTAMNWRLSARNAARRDSVLAASRDYRNIIERLQDIVSALEDRLRPLVQAELSVLVDVLHRPELLFPENTDARRKCESGGFICKLIKHTKQLLEENEEKLCIKVLQTLREMMTKDRGYGEKLISIDELDNAELPPAPDSENATEELEPSPPLRQLEDHKRGEALRQVLVNRYYGNVRPSGRRESLTSFGNGPLSAGGPGKPGGGGGGSGSSSMSRGEMSLAEVQCHLDKEGASNLVIDLIMNASSDRVFHESILLAIALLEGGNTTIQHSFFCRLTEDKKSEKFFKVFYDRMKVAQQEIKATVTVNTSDLGNKKKDDEVDRDAPSRKKAKEPTTQITEEVRDQLLEASAATRKAFTTFRREADPDDHYQPGEGTQATADKAKDDLEMSAVITIMQPILRFLQLLCENHNRDLQNFLRCQNNKTNYNLVCETLQFLDCICGSTTGGLGLLGLYINEKNVALINQTLESLTEYCQGPCHENQNCIATHESNGIDIITALILNDINPLGKKRMDLVLELKNNASKLLLAIMESRHDSENAERILYNMRPKELVEVIKKAYMQGEVEFEDGENGEDGAASPRNVGHNIYILAHQLARHNKELQSMLKPGGQVDGDEALEFYAKHTAQIEIVRLDRTMEQIVFPVPSICEFLTKESKLRIYYTTERDEQGSKINDFFLRSEDLFNEMNWQKKLRAQPVLYWCARNMSFWSSISFNLAVLMNLLVAFFYPFKGVRGALPFEGFQKGRGTLEPHWSGLLWTAMLISLAIVIALPKPHGIRALIASTILRLIFSVGLQPTLFLLGAFNVCNKIIFLMSFVGNCGTFTRGYRAMVLDVEFLYHLLYLVICAMGLFVHEFFYSLLLFDLVYREETLLNVIKSVTRNGRSIILTAVLALILVYLFSIVGYLFFKDDFILEVDRLPNETAVPETGESLASEFLFSDVCRVESGENCSSPAPREELVPAEETEQDKEHTCETLLMCIVTVLSHGLRSGGGVGDVLRKPSKEEPLFAARVIYDLLFFFMVIIIVLNLIFGVIIDTFADLRSEKQKKEEILKTTCFICGLERDKFDNKTVTFEEHIKEEHNMWHYLCFIVLVKVKDSTEYTGPESYVAEMIKERNLDWFPRMRAMSLVSSDSEGEQNELRNLQEKLESTMKLVTNLSGQLSELKDQMTEQRKQKQRIGLLGHPPHMNVNPQQPA

SEQ ID NO: 25501 - protein, 839 aa, Homo sapiens
MTPGILGHWTVCPEHFSAMRGKARDCSEAAPKCNSSTVRFQGLAEGTKGTMKMDMEDADMTLWTEAEFEEKCTYIVNDHPWDSGADGGTSVQAEASLPRNLLFKYATNSEEVIGVMSKEYIPKGTRFGPLIGEIYTNDTVPKNANRKYFWRIYSRGELHHFIDGFNEEKSNWMRYVNPAHSPREQNLAACQNGMNIYFYTIKPIPANQELLVWYCRDFAERLHYPYPGELTMMNLTQTQSSLKQPSTEKNELCPKNVPKREYSVKEILKLDSNPSKGKDLYRSNISPLTSEKDLDDFRRRGSPEMPFYPRVVYPIRAPLPEDFLKASLAYGIERPTYITRSPIPSSTTPSPSARSSPDQSLKSSSPHSSPGNTVSPVGPGSQEHRDSYAYLNASYGTEGLGSYPGYAPLPHLPPAFIPSYNAHYPKFLLPPYGMNCNGLSAVSSMNGINNFGLFPRLCPVYSNLLGGGSLPHPMLNPTSLPSSLPSDGARRLLQPEHPREVLVPAPHSAFSFTGAAASMKDKACSPTSGSPTAGTAATAEHVVQPKATSAAMAAPSSDEAMNLIKNKRNMTGYKTLPYPLKKQNGKIKYECNVCAKTFGQLSNLKVHLRVHSGERPFKCQTCNKGFTQLAHLQKHYLVHTGEKPHECQVCHKRFSSTSNLKTHLRLHSGEKPYQCKVCPAKFTQFVHLKLHKRLHTRERPHKCSQCHKNYIHLCSLKVHLKGNCAAAPAPGLPLEDLTRINEEIEKFDISDNADRLEDVEDDISVISVVEKEILAVVRKEKEETGLKVSLQRNMGNGLLSSGCSLYESSDLPLMKLPPSNPLPLVPVKVKQETVEPMDP

SEQ ID NO: 25502 - protein, 1093 aa, Homo sapiens
MEPTVADVHLVPRTTKEVPALDAACCRAASIGVVATSLVVLTLGVLLAFLSTQGFHVDHTAELRGIRWTSSLRRETSDYHRTLTPTLEALFVSSFQKTELEASCVGCSVLNYRDGNSSVLVHFQLHFLLRPLQTLSLGLEEELLQRGIRARLREHGISLAAYGTIVSAELTGRHKGPLAERDFKSGRCPGNSFSCGNSQCVTKVNPECDDQEDCSDGSDEAHCECGLQPAWRMAGRIVGGMEASPGEFPWQASLRENKEHFCGAAIINARWLVSAAHCFNEFQDPTKWVAYVGATYLSGSEASTVRAQVVQIVKHPLYNADTADFDVAVLELTSPLPFGRHIQPVCLPAATHIFPPSKKCLISGWGYLKEDFLVKPEVLQKATVELLDQALCASLYGHSLTDRMVCAGYLDGKVDSCQGDSGGPLVCEEPSGRFFLAGIVSWGIGCAEARRPGVYARVTRLRDWILEATTKASMPLAPTMAPAPAAPSTAWPTSPESPVVSTPTKSMQALSTVPLDWVTVPKLQECGARPAMEKPTRVVGGFGAASGEVPWQVSLKEGSRHFCGATVVGDRWLLSAAHCFNHTKVEQVRAHLGTASLLGLGGSPVKIGLRRVVLHPLYNPGILDFDLAVLELASPLAFNKYIQPVCLPLAIQKFPVGRKCMISGWGNTQEGNATKPELLQKASVGIIDQKTCSVLYNFSLTDRMICAGFLEGKVDSCQGDSGGPLACEEAPGVFYLAGIVSWGIGCAQVKKPGVYTRITRLKGWILEIMSSQPLPMSPPSTTRMLATTSPRTTAGLTVPGATPSRPTPGAASRVTGQPANSTLSAVSTTARGQTPFPDAPEATTHTQLPDCGLAPAALTRIVGGSAAGRGEWPWQVSLWLRRREHRCGAVLVAERWLLSAAHCFDVYGDPKQWAAFLGTPFLSGAEGQLERVARIYKHPFYNLYTLDYDVALLELAGPVRRSRLVRPICLPEPAPRPPDGTRCVITGWGSVREGGSMARQLQKAAVRLLSEQTCRRFYPVQISSRMLCAGFPQGGVDSCSGDAGGPLACREPSGRWVLTGVTSWGYGCGRPHFPGVYTRVAAVRGWIGQHIQE

SEQ ID NO: 25503 - protein, 374 aa, Homo sapiens
MWTVQGAQNPSSKTLISVSKDFLRPLCRAACLLHNRCLGQSRWGELHSQLGGQEDPNSLRHKYNFIADVVEKIAPAVVHIELFRKLPFSKREVPVASGSGFIVSEDGLIVTNAHVVTNKHRVKVELKNGATYEAKIKDVDEKADIALIKIDHQGKLPVLLLGRSSELRPGEFVVAIGSPFSLQNTVTTGIVSTTQRGGKELGLRNSDMDYIQTDAIINYGNSGGPLVNLDGEVIGINTLKVTAGISFAIPSDKIKKFLTESHDRQAKGKAITKKKYIGIRMMSLTSSKAKELKDRHRDFPDVISGAYIIEVIPDTPAEAGGLKENDVIISINGQSVVSANDVSDVIKRESTLNMVVRRGNEDIMITVIPEEIDP

SEQ ID NO: 25504 - protein, 182 aa, Homo sapiens
PKRASMVHSLIEAYALHKQMRDEASGFCYLNDAVLGILRLRRKFERILYVDLDLHHGDGVEDAFSFTSKVMTVSLHKFSPGFFPGTGDVSDVGLGKGRYYSVNVPIQDGIQDEKYYQICESVLKEVYQAFNPKAVVLQLGADTIAGDPMCSFNMTPVGIGKCLKYILQWQLATLILGGDRRL

SEQ ID NO: 25505 - protein, 532 aa, Homo sapiens
MNGVLIPHTPIAVDFWSLRRAGTARLFFLSHMHSDHTVGLSSTWARPLYCSPITAHLLHRHLQVSKQWIQALEVGESHVLPLDEIGQETMTVTLLDANHCPGSVMFLFEGYFGTILYTGDFRYTPSMLKEPALTLGKQIHTLYLDNTNCNPALVLPSRQEAAHQIVQLIRKHPQHNIKIGLYSLGKESLLEQLALEFQTWVVLSPRRLELVQLLGLADVFTVEEKAGRIHAVDHMEICHSNMLRWNQTHPTIAILPTSRKIHSSHPDIHVIPYSDHSSYSELRAFVAALKPCQVVPIVSRRPCGGFQDSLSPRISVPLIPDSVQQYMSSSSRKPSLLWLLERRLKRPRTQGVVFESPEESADQSQADRDSKKAKKEKLSPWPADLEKQPSHHPLRIKKQLFPDLYSKEWNKAVPFCESQKRVTMLTAPLGFSVHLRSTDEEFISQKTREEIGLGSPLVPMGDDDGGPEATGNQSAWMGHGSPLSHSSKGTPLLATEFRGLALKYLLTPVNFFQAGYSSRRFDQQVEKYHKPC

SEQ ID NO: 25506 - protein, 156 aa, Homo sapiens
MEELIWEQYTVTLQKDSKRGFGIAVSGGRDNPHFENGETSIVISDVLPGGPADGLLQENDRVVMVNGTPMEDVLHSFAVQQLRKSGKVAAIVVKRPRKVQVAALQASPPLDQDDRAFEVMDEFDGRSFRSGYSERSRLNSHGGRSRSWEDSPERGR

SEQ ID NO: 25507 - protein, 326 aa, Homo sapiens
MEQSRSQQRGGEQSWWGSDPQYQYMPFEHCTSYGLPSENGGLQHRLRKDAGPRHNVHPTQIYGHHKEQFSDREQDIGMPKKTGSSSTVDSKDEDHYSKCQDCIHRLGQVVRRKLGEDGIFLVLLGLLMALVSWSMDYVSAKSLQAYKWSYAQMQPSLPLQFLVWVTFPLVLILFSALFCHLISPQAVGSGIPEMKTILRGVVLKEYLTMKAFVAKVVALTAGLGSGIPVGKEGPFVHIASICAAVLSKFMSVFCGVYETVPGQLDLLVSACAVGVGCCFAAPVGGVLFSIEVTSTYFAVRNYWRGFFAATFSAFVFRVLAVWNKDA

SEQ ID NO: 25508 - protein, 256 aa, Homo sapiens
MGIIQSILATSRDCYSFKKKPIPKKPTMLALAKILLISTLFYSLLSGSHGKENQDINTTQNIAEVFKTMENKPISLESEANLNSDKENITTSNLKASHSPPLNLPNNSHGITDFSSNSSAEHSLGSLKPTSTISTSPPLIHSFVSKVPWNAPIADEDLLPISAHPNATPALSSENFTWSLVNDTVKTPDNSSITVSILSSEPTSPSVTPLIVEPSGWLTTNSDSFTGFTPYQEKTTLQPTLKFTNNSKLFPNTSDP

SEQ ID NO: 25509 - protein, 2744 aa, Homo sapiens
MSDKMSSFLHIGDICSLYAEGSTNGFISTLGLVDDRCVVQPETGDLNNPPKKFRDCLFKLCPMNRYSAQKQFWKAAKPGANSTTDAVLLNKLHHAADLEKKQNETENRKLLGTVIQYGNVIQLLHLKSNKYLTVNKRLPALLEKNAMRVTLDEAGNEGSWFYIQPFYKLRSIGDSVVIGDKVVLNPVNAGQPLHASSHQLVDNPGCNEVNSVNCNTSWKIVLFMKWSDNKDDILKGGDVVRLFHAEQEKFLTCDEHRKKQHVFLRTTGRQSATSATSSKALWEVEVVQHDPCRGGAGYWNSLFRFKHLATGHYLAAEVDPDQDASRSRLRNAQEKMVYSLVSVPEGNDISSIFELDPTTLRGGDSLVPRNSYVRLRHLCTNTWVHSTNIPIDKEEEKPVMLKIGTSPVKEDKEAFAIVPVSPAEVRDLDFANDASKVLGSIAGKLEKGTITQNERRSVTKLLEDLVYFVTGGTNSGQDVLEVVFSKPNRERQKLMREQNILKQIFKLLQAPFTDCGDGPMLRLEELGDQRHAPFRHICRLCYRVLRHSQQDYRKNQEYIAKQFGFMQKQIGYDVLAEDTITALLHNNRKLLEKHITAAEIDTFVSLVRKNREPRFLDYLSDLCVSMNKSIPVTQELICKAVLNPTNADILIETKLVLSRFEFEGVSSTGENALEAGEDEEEVWLFWRDSNKEIRSKSVRELAQDAKEGQKEDRDVLSYYRYQLNLFARMCLDRQYLAINEISGQLDVDLILRCMSDENLPYDLRASFCRLMLHMHVDRDPQEQVTPVKYARLWSEIPSEIAIDDYDSSGASKDEIKERFAQTMEFVEEYLRDVVCQRFPFSDKEKNKLTFEVVNLARNLIYFGFYNFSDLLRLTKILLAILDCVHVTTIFPISKMAKGEENKGNNDVEKLKSSNVMRSIHGVGELMTQVVLRGGGFLPMTPMAAAPEGNVKQAEPEKEDIMVMDTKLKIIEILQFILNVRLDYRISCLLCIFKREFDESNSQTSETSSGNSSQEGPSNVPGALDFEHIEEQAEGIFGGSEENTPLDLDDHGGRTFLRVLLHLTMHDYPPLVSGALQLLFRHFSQRQEVLQAFKQVQLLVTSQDVDNYKQIKQDLDQLRSIVEKSELWVYKGQGPDETMDGASGENEHKKTEEGNNKPQKHESTSSYNYRVVKEILIRLSKLCVQESASVRKSRKQQQRLLRNMGAHAVVLELLQIPYEKAEDTKMQEIMRLAHEFLQNFCAGNQQNQALLHKHINLFLNPGILEAVTMQHIFMNNFQLCSEINERVVQHFVHCIETHGRNVQYIKFLQTIVKAEGKFIKKCQDMVMAELVNSGEDVLVFYNDRASFQTLIQMMRSERDRMDENSPLMYHIHLVELLAVCTEGKNVYTEIKCNSLLPLDDIVRVVTHEDCIPEVKIAYINFLNHCYVDTEVEMKEIYTSNHMWKLFENFLVDICRACNNTSDRKHADSILEKYVTEIVMSIVTTFFSSPFSDQSTTLQTRQPVFVQLLQGVFRVYHCNWLMPSQKASVESCIRVLSDVAKSRAIAIPVDLDSQVNNLFLKSHSIVQKTAMNWRLSARNAARRDSVLAASRDYRNIIERLQDIVSALEDRLRPLVQAELSVLVDVLHRPELLFPENTDARRKCESGGFICKLIKHTKQLLEENEEKLCIKVLQTLREMMTKDRGYGEKLISIDELDNAELPPAPDSENATEQELEPSPPLRQLEDHKRGEALRQVLVNRYYGNVRPSGRRESLTSFGNGPLSAGGPGKPGGGGGGSGSSSMSRGEMSLAEVQCHLDKEGASNLVIDLIMNASSDRVFHESILLAIALLEGGNTTIQHSFFCRLTEDKKSEKFFKVFYDRMKVAQQEIKATVTVNTSDLGNKKKDDEVDRDAPSRKKAKEPTTQITEEVRDQLLEASAATRKAFTTFRREADPDDHYQPGEGTQATADKAKDDLEMSAVITIMQPILRFLQLLCENHNRDLQNFLRCQNNKTNYNLVCETLQFLDCICGSTTGGLGLLGLYINEKNVALINQTLESLTEYCQGPCHENQNCIATHESNGIDIITALILNDINPLGKKRMDLVLELKNNASKLLLAIMESRHDSENAERILYNMRPKELVEVIKKAYMQGEVEFEDGENGEDGAASPRNVGHNIYILAHQLARHNKELQSMLKPGGQVDGDEALEFYAKHTAQIEIVRLDRTMEQIVFPVPSICEFLTKESKLRIYYTTERDEQGSKINDFFLRSEDLFNEMNWQKKLRAQPVLYWCARNMSFWSSISFNLAVLMNLLVAFFYPFKGVRGGTLEPHWSGLLWTAMLISLAIVIALPKPHGIRALIASTILRLIFSVGLQPTLFLLGAFNVCNKIIFLMSFVGNCGTFTRGYRAMVLDVEFLYHLLYLVICAMGLFVHEFFYSLLLFDLVYREETLLNVIKSVTRNGRSIILTAVLALILVYLFSIVGYLFFKDDFILEVDRLPNETAVPETGESLASEFLFSDVCRVESGENCSSPAPREELVPAEETEQDKEHTCETLLMCIVTVLSHGLRSGGGVGDVLRKPSKEEPLFAARVIYDLLFFFMVIIIVLNLIFGVIIDTFADLRSEKQKKEEILKTTCFICGLERDKFDNKTVTFEEHIKEEHNMWHYLCFIVLVKVKDSTEYTGPESYVAEMIKERNLDWFPRMRAMSLVSSDSEGEQNELRNLQEKLESTMKLVTNLSGQLSELKDQMTEQRKQKQRIGLLGHPPHMNVNPQQPA

SEQ ID NO: 25510 - protein, 1047 aa, Homo sapiens
MKTAQALHRMWIQAVKKLRRWKGRAPGMEELIWEQYTVTLQKDSKRGFGIAVSGGRDNPHFENGETSIVISDVLPGGPADGLLQENDRVVMVNGTPMEDVLHSFAVQQLRKSGKVAAIVVKRPRKVQVAALQASPPLDQDDRAFEVMDEFDGRSFRSGYSERSRLNSHGGRSRSWEDSPERGRPHERARSRERDLSRDRSRGRSLERGLDQDHARTRDRSRGRSLERGLDHDFGPSRDRDRDRSRGRSIDQDYERAYHRAYDPDYERAYSPEYRRGARHDARSRGPRSRSREHPHSRSPSPEPRGRPGPIGVLLMKSRANEEYGLRLGSQIFVKEMTRTGLATKDGNLHEGDIILKINGTVTENMSLTDARKLIEKSRGKLQLVVLRDSQQTLINIPSLNDSDSEIEDISEIESNRSFSPEERRHQYSDYDYHSSSEKLKERPSSREDTPSRLSRMGATPTPFKSTGDIAGTVVPETNKEPRYQEDPPAPQPKAAPRTFLRPSPEDEAIYGPNTKMVRFKKGDSVGLRLAGGNDVGIFVAGIQEGTSAEQEGLQEGDQILKVNTQDFRGLVREDAVLYLLEIPKGEMVTILAQSRADVYRDILACGRGDSFFIRSHFECEKETPQSLAFTRGEVFRVVDTLYDGKLGNWLAVRIGNELEKGLIPNKSRAEQMASVQNAQRDNAGDRADFWRMRGQRSGVKKNLRKSREDLTAVVSVSTKFPAYERVLLREAGFKRPVVLFGPIADIAMEKLANELPDWFQTAKTEPKDAGSEKSTGVVRLNTVRQIIEQDKHALLDVTPKAVDLLNYTQWFPIVIFFNPDSRQGVKTMRQRLNPTSNKSSRKLFDQANKLKKTCAHLFTATINLNSANDSWFGSLKDTIQHQQGEAVWVSEGKMEGMDDDPEDRMSYLTAMGADYLSCDSRLISDFEDTDGEGGAYTDNELDEPAEEPLVSSITRSSEPVQHEEIEIAQKHPDIYAVPIKTHKPDPGTPQHTSSRPPEPQKAPSRPYQDTRGSYGSDAEEEEYRQQLSEHSKRGYYGQSARYRDTEL

SEQ ID NO: 25511 - protein, 287 aa, Homo sapiens
KEDGCHERDDDTTSVNSDRSEEVFDMTKGNLTLLEKAIALETERAKAMREKMAMEAGRRDNMRSYEDQSPRQLPGEDRKPKSSDSHVKKPYYDPSRTEKKESKCPTPGCDGTGHVTGLYPHHRSLSGCPHKDRVPPEILAMHESVLKCPTPGCTGRGHVNSNRNSHRSLSGCPIAAAEKLAKAQEKHQSCDVSKSSQASDRVLRPMCFVKQLEIPQYGYRNNVPTTTPRSNLAKELEKYSKTSFEYNSYDNHTYGKRAIAPKRSGTARTPAPAAAAPAATRPAAAAT

SEQ ID NO: 25512 - protein, 925 aa, Homo sapiens
MERDGCAGGGSRGGEGGRAPREGPAGNGRDRGRSHAAEAPGDPQAAASLLAPMDVGEEPLEKAARARTAKDPNTYKVLSLVLSVCVLTTILGCIFGLKPSCAKEVKSCKGRCFERTFGNCRCDAACVELGNCCLDYQETCIEPEHIWTCNKFRCGEKRLTRSLCACSDDCKDKGDCCINYSSVCQGEKSWVEEPCESINEPQCPAGFETPPTLLFSLDGFRAEYLHTWGGLLPVISKLKKCGTYTKNMRPVYPTKTFPNHYSIVTGLYPESHGIIDNKMYDPKMNASFSLKSKEKFNPEWYKGEPIWVTAKYQGLKSGTFFWPGSDVEINGIFPDIYKMYNGSVPFEERILAVLQWLQLPKDERPHFYTLYLEEPDSSGHSYGPVSSEVIKALQRVDGMVGMLMDGLKELNLHRCLNLILISDHGMEQGSCKKYIYLNKYLGDVKNIKVIYGPAARLRPSDVPDKYYSFNYEGIARNLSCREPNQHFKPYLKHFLPKRLHFAKSDRIEPLTFYLDPQWQLALNPSERKYCGSGFHGSDNVFSNMQALFVGYGPGFKHGIEADTFENIEVYNLMCDLLNLTPAPNNGTHGSLNHLLKNPVYTPKHPKEVHPLVQCPFTRNPRDNLGCSCNPSILPIEDFQTQFNLTVAEEKIIKHETLPYGRPRVLQKENTICLLSQHQFMSGYSQDILMPLWTSYTVDRNDSFSTEDFSNCLYQDFRIPLSPVHKCSFYKNNTKVSYGFLSPPQLNKNSSGIYSEALLTTNIVPMYQSFQVIWRYFHDTLLRKYAEERNGVNVVSGPVFDFDYDGRCDSLENLRQKRRVIRNQEILIPTHFFIVLTSCKDTSQTPLHCENLDTLAFILPHRTDNSESCVHGKHDSSWVEELLMLHRARITDVEHITGLSFYQQRKEPVSDILKLKTHLPTFSQED

SEQ ID NO: 25513 - protein, 977 aa, Homo sapiens
MTTLDHVIATHQSEWVSFNEEPPFPAHSQGGTEEHLPGLSSSPDQSESSSGENHVVDGGSQDHSHSEQDDSSEKMGLISEAASPPGSPEQPPPDLASAISNWVQFEDDTPWASTSPPHQETAETALPLTMPCWTCPSFDSLGRCPLTSESSWTTHSEDTSSPSFGCSYTDLQLINAEEQTSGQASGADSTDKRTEWQTGRQTAVSPVQACSEHTSTRTHRLDPSPPSPQPKRSQNPGEGPEGASAPNDNSSSLQEDEEVEMEAISWQASSPAMNGHPAPPVTSARFPSWVTFDDNEVSCPLPPVTSPLKPNTPPSASVIPDVPYNSMGSFKKRDRPKSTLMNFSKVQKLDISSLNRTPSVTEASPWRATNPFLNETLQDVQPSPINPFSAFFEEQERRSQNSSISSTTGKSQRDSLIVIYQDAISFDDSSKTQSHSDAVEKLKQLQIDDPDHFGSATLPDDDPVAWIELDAHPPGSARSQPRDGWPMMLRIPEKKNIMSSRHWGPIFVKLTDTGYLQLYYEQGLEKPFREFKLEICHEISEPRLQNYDENGRIHSLRIDRVTYKEKKKYQPKPAVAHTAEREQVIKLGTTNYDDFLSFIHAVQDRLMDLPVLSMDLSTVGLNYLEEEITVDVRDEFSGIVSKGDNQILQHHVLTRIHILSFLSGLAECRLGLNDILVKGNEIVLRQDIMPTTTTKWIKLHECRFHGCVDEDVFHNSRVILFNPLDACRFELMRFRTVFAEKTLPFTLRTATSVNGAEVEVQSWLRMSTGFSANRDPLTQVPCENVMIRYPVPSEWVKNFRRESVLGEKSLKAKVNRGASFGSTSVSGSEPVMRVTLGTAKYEHAFNSIVWRINRLPDKNSASGHPHCFFCHLELGSDREVPSRFANHVNVEFSMPTTSASKASVRSISVEDKTDVRKWVNYSAHYSYQTTETDNLPNPLYCSCLPHTDLKRGSKRVVKIRWNASLEVPLASSIRTMV

SEQ ID NO: 25514 - protein, 681 aa, Homo sapiens
HNHYVMCAQFHPTEDLVVSASLDQTVRVWDISDAVVKHVLEGHDRGVNWAAFHPTMPLIVSGADDRQVKIWRMNESKAWEVDTCRGHYNNVSCAVFHPRQELILSNSEDKSIRVWDMSKRTGVQTFRRDHDRFWVLAAHPNLNLFAAGHDGGMIVFKLERERPAYAVHGNMLHYVKDRFLRQLDFNSSKDVAVMQLRSGSKFPVFNMSYNPAENAVLLCTRASNLENSTYDLYTIPKDADSQNPDAPEGKRSSGLTAVWVARNRFAVLDRMHSLLIKNLKNEITKKVQVPNCDEIFYAGTGNLLLRDADSITLFDVQQKRTLASVKISKVKYVIWSADMSHVALLAKHAIVICNRKLDALCNIHENIRVKSGAWDESGVFIYTTSNHIKYAVTTGDHGIIRTLDLPIYVTRVKGNNVYCLDRECRPRVLTIDPTEFKFKLALINRKYDEVLHMVRNAKLVGQSIIAYLQKKGYPEVALHFVKDEKTRFSLALECGNIEIALEAAKALDDKNCWEKLGEVALLQGNHQIVEMCYQRTKNFDKLSFLYLITGNLEKLRKMMKIAEIRKDMSGHYQNALYLGDVSERVRILKNCGQKSLAYLTAATHGLDEEAESLKETFDPEKETIPDIDPNAKLLQPPAPIMPLDTNWPLLTVSKGFFEGTIASKGKGGALAADIDIDTVGT

SEQ ID NO: 25515 - protein, 895 aa, Homo sapiens
MTAWTMGARGLDKRGSFFKLIDTIASEIGELKQEMVRTDVNLENGLEPAETHSMVRHKDGGYSEEEDVKTCARDSGYDSLSNRLSILDRLLHTHPIWLQLSLSEEEAAEVLQAQPPGIFLVHKSTKMQKKVLSLRLPCEFGAPLKEFAIKESTYTFSLEGSGISFADLFRLIAFYCISRDVLPFTLKLPYAISTAKSEAQLEELAQMGLNFWSSPADSKPPNLPPPHRPLSSDGVCPASLRQLCLINGVHSIKTRTPSELECSQTNGALCFINPLFLKVHSQDLSGGLKRPSTRTPNANGTERTRSPPPRPPPPAINSLHTSPRLARTETQTSMPETVNHNKHGNVALPGTKPTPIPPPRLKKQASFLEAEGGAKTLSGGRPGAGPELELGTAGSPGGAPPEAAPGDCTRAPPPSSESRPPCHGGRQRLSDMSISTSSSDSLEFDRSMPLFGYEADTNSSLEDYEGESDQETMAPPIKSKKKRSSSFVLPKLVKSQLQKVSGVFSSFMTPEKRMVRRIAELSRDKCTYFGCLVQDYVSFLQENKECHVSSTDMLQTIRQFMTQVKNYLSQSSELDPPIESLIPEDQIDVVLEKAMHKCILKPLKGHVEAMLKDFHMADGSWKQLKENLQLVRQRNPQELGVFAPTPDFVDVEKIKVKFMTMQKMYSPEKKVMLLLRVCKLIYTVMENNSGRMYGADDFLPVLTYVIAQCDMLELDTEIEYMMELLDPSLLHGEGGYYLTSAYGALSLIKNFQEEQAARLLSSETRDTLRQWHKRRTTNRTIPSVDDFQNYLRVAFQEVNSGCTGKTLLVRPYITTEDVCQICAEKFKVGDPEEYSLFLFVDETWQQLAEDTYPQKIKAELHSRPQPHIFHFVYKRIKNDPYGIIFQNGEEDLTTS

SEQ ID NO: 25516 - protein, 155 aa, Homo sapiens
MAGYLKLVCVSFQRQGFHTVGSRCKNRTGAEHLWLTRHLRDPFVKAAKVESYRCRSAFKLLEVNERHQILRPGLRVLDCGAAPGAWSQVAVQKVNAAGTDGVSLLPRLQCNGVISAHCNLCLPGSSDSPASASQVAGITGARHRTQLIFSFCFFK

SEQ ID NO: 25517 - protein, 739 aa, Homo sapiens
MEVDTEEKRHRTRSKGVRVPVEPAIQELFSCPTPGCDGSGHVSGKYARHRSVYGCPLAKKRKTQDKQPQEPAPKRKPFAVKADSSSVDECDDSDGTEDMDEKEEDEGEEYSEDNDEPGDEDEEDEEGDREEEEEIEEEDEDDDEDGEDVEDEEEEEEEEEEEEEEEENEDHQMNCHNTRIMQDTEKDDNNNDEYDNYDELVAKSLLNLGKIAEDAAYRARTESEMNSNTSNSLEDDSDKNENLGRKSELSLDLDSDVVRETVDSLKLLAQGHGVVLSENMNDRNYADSMSQQDSRNMNYVMLGKPMNNGLMEKMVEESDEEVCLSSLECLRNQCFDLARKLSETNPQERNPQQNMNIRQHVRPEEDFPGRTPDRNYSDMLNLMRLEEQLSPRSRVFASCAKEDGCHERDDDTTSVNSDRSEEVFDMTKGNLTLLEKAIALETERAKAMREKMAMEAGRRDNMRSYEDQSPRQLPGEDRKPKSSDSHVKKPYYAKRYCKDPSPSSSSTSSYAPSSSSNLSCGGGSSASSTCSKSSFDYTHDMEAAHMAATAILNLSTRCREMPQNLSTKPQDLCATRNPDMEVDENGTLDLSMNKQRPRDSCCPILTPLEPMSPQQQAVMNNRCFQLGEGDCWDLPVDYTKMKPRRIDEDESKDITPEDLDPFQEALEERRYPGEVTIPSPKPKYPQCKESKKDLITLSGCPLADKSIRSMLATSSQELKIPVQGPRALDHLLMFSDFLN

SEQ ID NO: 25518 - protein, 1699 aa, Homo sapiens
MAGASVKVAVRVRPFNSREMSRDSKCIIQMSGSTTTIVNPKQPKETPKSFSFDYSYWSHTSPEDINYASQKQVYRDIGEEMLQHAFEGYNVCIFAYGQTGAGKSYTMMGKQEKDQQGIIPQLCEDLFSRINDTTNDNMSYSVEVSYMEIYCERVRDLLNPKNKGNLRVREHPLLGPYVEDLSKLAVTSYNDIQDLMDSGNKARTVAATNMNETSSRSHAVFNIIFTQKRHDAETNITTEKVSKISLVDLAGSERADSTGAKGTRLKEGANINKSLTTLGKVISALAEMDSGPNKNKKKKKTDFIPYRDSVLTWLLRENLGGNSRTAMVAALSPADINYDETLSTLRYADRAKQIRCNAVINEDPNNKLIRELKDEVTRLRDLLYAQGLGDITDMTNALVGMSPSSSLSALSSRAASVSSLHERILFAPGSEEAIERLKETEKIIAELNETWEEKLRRTEAIRMEREALLAEMGVAMREDGGTLGVFSPKKTPHLVNLNEDPLMSECLLYYIKDGITRVGREDGERRQDIVLSGHFIKEEHCVFRSDSRGGSEAVVTLEPCEGADTYVNGKKVTEPSILRSGNRIIMGKSHVFRFNHPEQARQERERTPCAETPAEPVDWAFAQRELLEKQGIDMKQEMEQRLQELEDQYRREREEATYLLEQQRLDYESKLEALQKQMDSRYYPEVNEEEEEPEDEVQWTERECELALWAFRKWKWYQFTSLRDLLWGNAIFLKEANAISVELKKKVQFQFVLLTDTLYSPLPPDLLPPEAAKDRETRPFPRTIVAVEVQDQKNGATHYWTLEKLRQRLDLMREMYDRAAEVPSSVIEDCDNVVTGGDPFYDRFPWFRLVGRAFVYLSNLLYPVPLVHRVAIVSEKGEVKGFLRVAVQAISADEEAPDYGSGVRQSGTAKISFDDQHFEKFQSESCPVVGMSRSGTSQEELRIVEGQGQGADVGPSADEVNNNTCSAVPPEGLLLDSSEKAALDGPLDAALDHLRLGNTFTFRVTVLQASSISAEYADIFCQFNFIHRHDEAFSTEPLKNTGRGPPLGFYHVQNIAVEVTKSFIEYIKSQPIVFEVFGHYQQHPFPPLCKDVLSPLRPSRRHFPRVMPLSKPVPATKLSTLTRPCPGPCHCKYDLLVYFEICELEANGDYIPAVVDHRGGMPCMGTFLLHQGIQRRITVTLLHETGSHIRWKEVRELVVGRIRNTPETDESLIDPNILSLNILSSGYIHPAQDDRQFLDSDIPRTFYQFEAAWDSSMHNSLLLNRVTPYREKIYMTLSAYIEMENCTQPAVVTKDFCMVFYSRDAKLPASRSIRNLFGSGSLRASESNRVTGVYELSLCHVADAGSPGMQRRRRRVLDTSVAYVRGEENLAGWRPRSDSLILDHQWELEKLSLLQEVEKTRHYLLLREKLETAQRPVPEALSPAFSEDSESHGSSSASSPLSAEGRPSPLEAPNERQRELAVKCLRLLTHTFNREYTHSHVCVSASESKLSEMSVTLLRDPSMSPLGVATLTPSSTCPSLVEGRYGATDLRTPQPCSRPASPEPELLPEADSKKLPSPARATETDKEPQRLLVPDIQEIRVSPIVSKKGYLHFLEPHTSGWARRFVVVRRPYAYMYNSDKDTVERFVLNLATAQVEYSEDQQAMLKTPNTFAVCTEHRGILLQAASDKDMHDWLYAFNPLLAGTIRSKLSRRRSAQMRV

SEQ ID NO: 25519 - protein, 840 aa, Homo sapiens
MMYNEIGEAKKITERFIDPDKELEIMILNDSASAASSMEVTDRIASLEQRVQMQEDDIQLLKSALADVVRRLNITEEQQAVLNRKGPTKARPLMQTLPLRTTVNNGTVLPKKPTGSLPSPSGVRKETAVPATKRLNRSVSLLNACKLNRSTPSNIKRTSSSERVSPGGRRESNGDSRGNRNRTGSTSSSSSGKKNSESKPKEPVFSAEEGYVKMFLRGRPVTMYMPKDQVDSYSLEAKVELPTKRLKLEWVYGYRGRDCRNNLYLLPTGETVYFIASVVVLYNVEEQLQRHYAGHNDDVKCLAVHPDRITIATGQVAGTSKDGKQLPPHVRIWDSVTLNTLHVIGIGFFDRAVTCIAFSKSNGGTNLCAVDDSNDHVLSVWDWQKEEKLADVKCSNEAVFAADFHPTDTNIIVTCGKSHLYFWTLEGSSLNKKQGLFEKQEKPKFVLCVTFSENGDTITGDSSGNILVWGKGTNRISYAVQGAHEGGIFALCMLRDGTLVSGGGKDRKLISWSGNYQKLRKTEIPEQFGPIRTVAEGKGDVILIGTTRNFVLQGTLSGDFTPITQGHTDELWGLAIHASKSQFLTCGHDKHATLWDAVGHRPVWDKIIEDPAQSSGFHPSGSVVAVGTLTGRWFVFDTETKDLVTVHTDGNEQLSVMRYSPDGNFLAIGSHDNCIYIYGVSDNGRKYTRVGKCSGHSSFITHLDWSVNSQFLVSNSGDYEILYWVPSACKQVVSVETTRDIEWATYTCTLGFHVFGVWPEGSDGTDINAVCRAHEKKLLSTGDDFGKVHLFSYPCSQFRAPSHIYGGHSSHVTNVDFLCEDSHLISTGGKDTSIMQWRVI

SEQ ID NO: 25520 - protein, 156 aa, Homo sapiens
KKLKALEAMKNKQKSVTAKDSAKTTFTSITTNTINTSSDKTGGKKGAMKPCGLFLPFCTRDGTAGTPAISTTTTVEIRKSSVMTTEITSKVEKSPTTATGNSSCPSTETEEEKAKRLLYCSLCKVAVNSASQLEAHNSGEMQRFLFCFNSSAIIFL

SEQ ID NO: 25521 - protein, 1013 aa, Homo sapiens
MGDKKDDKDSPKKNKGKERRDLDDLKKEVAMTEHKMSVEEVCRKYNTDCVQGLTHSKAQEILARDGPNALTPPPTTPEWVKFCRQLFGGFSILLWIGAILCFLAYGIQAGTEDDPSGDNLYLGIVLAAVVIITGCFSYYQEAKSSKIMESFKNMVPQQALVIREGEKMQVNAEEVVVGDLVEIKGGDRVPADLRIISAHGCKVDNSSLTGESEPQTRSPDCTHDNPLETRNITFFSTNCVEGTARGVVVATGDRTVMGRIATLASGLEVGKTPIAIEIEHFIQLITGVAVFLGVSFFILSLILGYTWLEAVIFLIGIIVANVPEGLLATVTVCLTLTAKRMARKNCLVKNLEAVETLGSTSTICSDKTGTLTQNRMTVAHMWFDNQIHEADTTEDQSGTSFDKSSHTWVALSHIAGLCNRAVFKGGQDNIPVLKRDVAGDASESALLKCIELSSGSVKLMRERNKKVAEIPFNSTNKYQLSIHETEDPNDNRYLLVMKGAPERILDRCSTILLQGKEQPLDEEMKEAFQNAYLELGGLGERVLGFCHYYLPEEQFPKGFAFDCDDVNFTTDNLCFVGLMSMIDPPRAAVPDAVGKCRSAGIKVIMVTGDHPITAKAIAKGVGIISEGNETVEDIAARLNIPVSQVNPRDAKACVIHGTDLKDFTSEQIDEILQNHTEIVFARTSPQQKLIIVEGCQRQGAIVAVTGDGVNDSPALKKADIGVAMGIAGSDVSKQAADMILLDDNFASIVTGVEEGRLIFDNLKKSIAYTLTSNIPEITPFLLFIMANIPLPLGTITILCIDLGTDMVPAISLAYEAAESDIMKRQPRNPRTDKLVNERLISMAYGQIGMIQALGGFFSYFVILAENGFLPGNLVGIRLNWDDRTVNDLEDSYGQQWTYEQRKVVEFTCHTAFFVSIVVVQWADLIICKTRRNSVFQQGMKNKILIFGLFEETALAAFLSYCPGMDVALRMYPLKPSWWFCAFPYSFLIFVYDEIRKLILRRNPGGWVEKETYY

SEQ ID NO: 25522 - protein, 810 aa, Homo sapiens
AGWDKRYCEAGFSSVVTQAGELVLGAPGGYYFLGLLAQAPVADIFSSYRPGILLWHVSSQSLSFDSSNPEYFDGYWGYSVAVGEFDGDLNTTEYVVGAPTWSWTLGAVEILDSYYQRLHRLRGEQMASYFGHSVAVTDVNGDGRHDLLVGAPLYMESRADRKLAEVGRVYLFLQPRGPHALGAPSLLLTGTQLYGRFGSAIAPLGDLDRDGYNDIAVAAPYGGPSGRGQVLVFLGQSEGLRSRPSQVLDSPFPTGSAFGFSLRGAVDIDDNGYPDLIVGAYGANQVAVYRAQPVVKASVQLLVQDSLNPAVKSCVLPQTKTPVSCFNIQMCVGATGHNIPQKLSLNAELQLDRQKPRQGRRVLLLGSQQAGTTLNLDLGGKHSPICHTTMAFLRDEADFRDKLSPIVLSLNVSLPPTEAGMAPAVVLHGDTHVQEQTRIVLDCGEDDVCVPQLQLTASVTGSPLLVGADNVLELQMDAANEGEGAYEAELAVHLPQGAHYMRALSNVEGFERLICNQKKENETRVVLCELGNPMKKNAQIGIAMLVSVGNLEEAGESVSFQLQIRSKNSQNPNSKIVLLDVPVRAEAQVELRGNSFPASLVVAAEEGEREQNSLDSWGPKVEHTYELHNNGPGTVNGLHLSIHLPGQSQPSDLLYILDIQPQGGLQCFPQPPVNPLKVDWGLPIPSPSPIHPAHHKRDRRQIFLPEPEQPSRLQDPVLVSCDSAPCTVVQCDLQEMARGQRAMVTVLAFLWLPSLYQRPLDQFVLQSHAWFNVSSLPYAVPPLSLPRGEAQVGFFKRNRPPLEEDDEEGE

SEQ ID NO: 25523 - protein, 313 aa, Homo sapiens
MPKLNSTFVTEFLFEGFSSFRRQHKLVFFVVFLTLYLLTLSGNVIIMTIIRLDHHLHTPMYFFLCMLSISETCYTVAIIPHMLSGLLNPHQPIATQSCATQLFFYLTFGINNCFLLTVMGYDRYVAICNPLRYSVIMGKRACIQLASGSLGIGLGMAIVQVTSVFGLPFCDAFVISHFFCDVRHLLKLACTDTTVNEIINFVVSVCVLVLPMGLVFISYVLIISTILKIASAEGQKKAFATCASHLTVVIIHYGCASIIYLKPKSQSSLGQDRLISVTYTHHSPTEPCCVQPEEQGGQRCSAQSRGAKNSVSL

SEQ ID NO: 25524 - protein, 221 aa, Homo sapiens
MERRRLLGGMALLLLQALPSPLSARAEPPQDKEACVGTNNQSYICDTGHCCGQSQCCNYYYELWWFWLVWTIIIILSCCCVCHHRRAKHRLQAQQRQHEINLIAYREAHNYSALPFYFSWSAVAQSQLTAASTSQAQVIFPLHPPQAGDESTAFCVCEGRRGFLFDLKFLLTLFCLFLAFFSSFEMEFCSCRPGWSAVAQSWLTAISASRVQVILLSQPLK

SEQ ID NO: 25525 - protein, 945 aa, Homo sapiens
MVKLANPLYTEWILEAIQKIKKQKQRPSEERICHAVSTSHGLDKKTVSEQLELSVQDGSVLKVTNKGLASYKDPDNPGRFSSVKPGTFPKSAKGSRGSCNDLRNVDWNKLLRRAIEGLEEPNGSSLKNIEKYLRSQSDLTSTTNNPAFQQRLRLGAKRAVNNGRLLKDGPQYRVNYGSLDGKGAPQYPSAFPSSLPPVSLLPHEKDQPRADPIPICSFCLGTKESNREKKPEELLSCADCGSSGHPSCLKFCPELTTNVKALRWQCIECKTCSACRVQGRNADNMLFCDSCDRGFHMECCDPPLSRMPKGMWICQVCRPKKKGRKLLHEKAAQIKRRYAKPIGRPKNKLKQRLLSVTSDEGSMNAFTGRGSPGRGQKTKVCTTPSSGHAASGKDSSSRLAVTDPTRPGATTKITTTSTYISASTLKVNKKTKGLIDGLTKFFTPSPDGRRSRGEIIDFSKHYRPRKKVSQKQSCTSHVLATDTEIKINIKQESADVNVIGNKDVVTEEDLDVFKQAQELSWEKIECESGVEDCGRYPSVIEFGKYEIQTWYSSPYPQEYARLPKLYLCEFCLKYMKSKNILLRHSKKCGWFHPPANEIYRRKDLSVFEVDGNMSKIYCQNLCLLAKLFLDHKTLYYDVEPFLFYVLTKNDEKGCHLVGYFSKEKLCQQKYNVSCIMIMPQHQRQGFGRFLIDFSYLLSRREGQAGSPEKPLSDLGRLSYLAYWKSVILEYLYHHHERHISIKAISRATGMCPHDIATTLQHLHMIDKRDGRFVIIRREKLILSHMEKLKTCSRANELDPDSLRWTPILISNAAVSEEEREAEKEAERLMEQASCWEKEEQEILSTRANSRQSPAKVQSKNKYLHSPESRPVTGERGQLLELSKESSEEEEEEEDEEEEEEEEEEEEDEEEEEEEEEEEEEENIQSSPPRLTKPQSVAIKRKRPFV

SEQ ID NO: 25526 - protein, 230 aa, Homo sapiens
MEEPEEPADSGQSLVPVYIYSPEYVSMCDSLAKIPKRASMVHSLIEAYALHKQMRIVKPKVASMEEMATFHTDAYLQHLQKVSQEGDDDHPDSIEYGLGYDCPATEGIFDYAAAIGGATITAAQCLIDGMCKVAINWSGGWHHAKKDEASGFCYLNDAVLGILRLRRKFERILYVDLDLHHGDGTGDVSDVGLGKGRYYSVNVPIQDGIQDEKYYQICERYEPPAPNPGL

SEQ ID NO: 25527 - protein, 273 aa, Homo sapiens
MVLNALWSASRTSLGTGIIWGSCYGIAGSTNVTGDQVKKLDVLSNDLVMNMLKSSFATCVLVSEEDKHAIIVEPEKRKSTDEPSEKDALQPGRNLVAAGYALYGSATMLVLAMDCGVNCFMLDPAIGEFILVDKDVKIKKKGKIYSLNEGYARDFDPAVTEYIQRKKFPPDNSAPYGARYVGSMVADVHRTLVYGGIFLYPANKKSPNGKLRLLYECNPMAYVMEKAGGMATTGKEAVLDVIPTDIHQRAPVILGSPDDVLEFLKVYEKHSAQ

SEQ ID NO: 25528 - protein, 810 aa, Homo sapiens
MLERKYGGRLVTRHAARTIQTAFRQYQMNKNFERLRSSMSENRMSRRIVLSNMRMQFSFEGPEKVHSSYFEGKQVSVTNDGSQLGALVSPECGDLSEPTTLKSPAPSSDFADAITELEDAFSRQVKSLAESIDDALNCRSLHTEEAPALDAARARDTEPQTALHGMDHRKLDEMTASYSDVTLYIDEEELSPPLPLSQAGDRPSSTESDLRLRAGGAAPDYWALAHKEDKADTDTSCRSTPSLERQEQRLRVEHLPLLTIEPPSDSSVDLSDRSERGSLKRQSAYERSLGGQQGSPKHGPHSGAPKSLPREEPELRPRPPRPLDSHLAINGSANRQSKSESDYSDGDNDSINSTSNSNDTINCSSESSSRDSLREQTLSKQTYHKEARNSWDSPAFSNDVIRKRHYRIGLNLFNKKPEKGVQYLIERGFVPDTPVGVAHFLLQRKGLSRQMIGEFLGNRQKQFNRDVLDCVVDEMDFSTMELDEALRKFQAHIRVQGEAQKVERLIEAFSQRYCICNPGVVRQFRNPDTIFILAFAIILLNTDMYSPNVKPERKMKLEDFIKNLRGVDDGEDIPREMLMGIYERIRKRELKTNEDHVSQVQKVEKLIVGKKPIGSLHPGLGCVLSLPHRRLVCYCRLFEVPDPNKPQKLGLHQREIFLFNDLLVVTKIFQKKKNSVTYSFRQSFSLYGMQVLLFENQYYPNGIRLTSSVPGADIKVLINFNAPNPQDRKKFTDDLRESIAEVQEMEKHRIESELEKQKGVVRPSMSQCSSLKKESGNGTLSRACLDDSYASGEGLKRSALSSSLRDLSEA

SEQ ID NO: 25529 - protein, 1817 aa, Homo sapiens
LLAILDCVHVTTIFPISKMAKGEENKGSNVMRSIHGVGELMTQVVLRGGGFLPMTPMAAAPEGNVKQAEPEKEDIMVMDTKLKIIEILQFILNVRLDYRISCLLCIFKREFDESNSQTSETSSGNSSQEGPSNVPGALDFEHIEEQAEGIFGGSEENTPLDLDDHGGRTFLRVLLHLTMHDYPPLVSGALQLLFRHFSQRQEVLQAFKQVQLLVTSQDVDNYKQIKQDLDQLRSIVEKSELWVYKGQGPDETMDGASGENEHKKTEEGNNKPQKHESTSSYNYRVVKEILIRLSKLCVQESASVRKSRKQQQRLLRNMGAHAVVLELLQIPYEKAEDTKMQEIMRLAHEFLQNFCAGNQQNQALLHKHINLFLNPGILEAVTMQHIFMNNFQLCSEINERVVQHFVHCIETHGRNVQYIKFLQTIVKAEGKFIKKCQDMVMAELVNSGEDVLVFYNDRASFQTLIQMMRSERDRMDENSPLMYHIHLVELLAVCTEGKNVYTEIKCNSLLPLDDIVRVVTHEDCIPEVKIAYINFLNHCYVDTEVEMKEIYTSNHMWKLFENFLVDICRACNNTSDRKHADSILEKYVTEIVMSIVTTFFSSPFSDQSTTLQTRQPVFVQLLQGVFRVYHCNWLMPSQKASVESCIRVLSDVAKSRAIAIPVDLDSQVNNLFLKSHSIVQKTAMNWRLSARNAARRDSVLAASRDYRNIIERLQDIVSALEDRLRPLVQAELSVLVDVLHRPELLFPENTDARRKCESGGFICKLIKHTKQLLEENEEKLCIKVLQTLREMMTKDRGYGEKLISIDELDNAELPPAPDSENATEELEPSPPLRQLEDHKRGEALRQVLVNRYYGNVRPSGRRESLTSFGNGPLSAGGPGKPGGGGGGSGSSSMSRGEMSLAEVQCHLDKEGASNLVIDLIMNASSDRVFHESILLAIALLEGGNTTIQHSFFCRLTEDKKSEKFFKVFYDRMKVAQQEIKATVTVNTSDLGNKKKDDEVDRDAPSRKKAKEPTTQITEEVRDQLLEASAATRKAFTTFRREADPDDHYQPGEGTQATADKAKDDLEMSAVITIMQPILRFLQLLCENHNRDLQNFLRCQNNKTNYNLVCETLQFLDCICGSTTGGLGLLGLYINEKNVALINQTLESLTEYCQGPCHENQNCIATHESNGIDIITALILNDINPLGKKRMDLVLELKNNASKLLLAIMESRHDSENAERILYNMRPKELVEVIKKAYMQGEVEFEDGENGEDGAASPRNVGHNIYILAHQLARHNKELQSMLKPGGQVDGDEALEFYAKHTAQIEIVRLDRTMEQIVFPVPSICEFLTKESKLRIYYTTERDEQGSKINDFFLRSEDLFNEMNWQKKLRGTLEPHWSGLLWTAMLISLAIVIALPKPHGIRALIASTILRLIFSVGLQPTLFLLGAFNVCNKIIFLMSFVGNCGTFTRGYRAMVLDVEFLYHLLYLVICAMGLFVHEFFYSLLLFDLVYREETLLNVIKSVTRNGRSIILTAVLALILVYLFSIVGYLFFKDDFILEVDRLPNETAVPETGESLASEFLFSDVCRVESGENCSSPAPREELVPAEETEQDKEHTCETLLMCIVTVLSHGLRSGGGVGDVLRKPSKEEPLFAARVIYDLLFFFMVIIIVLNLIFGVIIDTFADLRSEKQKKEEILKTTCFICGLERDKFDNKTVTFEEHIKEEHNMWHYLCFIVLVKVKDSTEYTGPESYVAEMIKERNLDWFPRMRAMSLVSSDSEGEQNELRNLQEKLESTMKLVTNLSGQLSELKDQMTEQRKQKQRIGLLGHPPHMNVNPQQPA

SEQ ID NO: 25530 - protein, 2249 aa, Homo sapiens
MAHNAGAAAAAGTHSAKSGGSEAALKEGGSAAALSSSSSSSAAAAAASSSSSSGPGSAMETGLLPNHKLKTVGEAPAAPPHQQHHHHHHAHHHHHHAHHLHHHHALQQQLNQFQQQQQQQQQQQQQQQQQQHPISNNNSLGGAGGGAPQPGPDMEQPQHGGAKDSAAGGQADPPGPPLLSKPGDEDDAPPKMGEPAGGRYEHPGLGALGTQQPPVAVPGGGGGPAAVPEFNNYYGSAAPASGGPGGRAGPCFDQHGGQQSPGMGMMHSASAAAAGAPGSMDPLQNSHEGYPNSQCNHYPGYSRPGAGGGGGGGGGGGGGSGGGGGGGGAGAGGAGAGAVAAAAAAAAAAAGGGGGGGYGGSSAGYGVLSSPRQQGGGMMMGPGGGGAASLSKAAAGSAAGGFQRFAGQNQHPSGATPTLNQLLTSPSPMMRSYGGSYPEYSSPSAPPPPPSQPQSQAAAAGAAAGGQQAAAGMGLGKDMGAQYAAASPAWAAAQQRSHPAMSPGTPGPTMGRSQGSPMDPMVMKRPQLYGMGSNPHSQPQQSSPYPGGSYGPPGPQRYPIGIQGRTPGAMAGMQYPQQQDSGDATWKETFWLMPPQYGQQGVSGYCQQGQQPYYSQQPQPPHLPPQAQYLPSQSQQRYQPQQDMSQEGYGTRSQPPLAPGKPNHEDLNLIQQERPSSLPDLSGSIDDLPTGTEATLSSAVSASGSTSSQGDQSNPAQSPFSPHASPHLSSIPGGPSPSPVGSPVGSNQSRSGPISPASIPGSQMPPQPPGSQSESSSHPALSQSPMPQERGFMAGTQRNPQMAQYGPQQTGPSMSPHPSPGGQMHAGISSFQQSNSSGTYGPQMSQYGPQGNYSRPPAYSGVPSASYSGPGPGMGISANNQMHGQGPSQPCGAVPLGRMPSAGMQNRPFPGNMSSMTPSSPGMSQQGGPGMGPPMPTVNRKAQEAAAAVMQAAANSAQSRQGSFPGMNQSGLMASSSPYSQPMNNSSSLMNTQAPPYSMAPAMVNSSAASVGLADMMSPGESKLPLPLKADGKEEGTPQPESKSKKSSSSTTTGEKITKVYELGNEPERKLWVDRYLTFMEERGSPVSSLPAVGKKPLDLFRLYVCVKEIGGLAQVNKNKKWRELATNLNVGTSSSAASSLKKQYIQYLFAFECKIERGEEPPPEVFSTGDTKKQPKLQPPSPANSGSLQGPQTPQSTGSNSMAEVPGDLKPPTPASTPHGQMTPMQGGRSSTISVHDPFSDVSDSSFPKRNSMTPNAPYQQGMSMPDVMGRMPYEPNKDPFGGMRKVPGSSEPFMTQGQMPNSSMQDMYNQSPSGAMSNLGMGQRQQFPYGASYDRRHEPYGQQYPGQGPPSGQPPYGGHQPGLYPQQPNYKRHMDGMYGPPAKRHEGDMYNMQYSSQQQEMYNQYGGSYSGPDRRPIQGQYPYPYSRERMQGPGQIQTHGIPPQMMGGPLQSSSSEGPQQNMWAARNDMPYPYQNRQGPGGPTQAPPYPGMNRTDDMMVPDQRINHESQWPSHVSQRQPYMSSSASMQPITRPPQPSYQTPPSLPNHISRAPSPASFQRSLENRMSPSKSPFLPSMKMQKVMPTVPTSQVTGPPPQPPPIRREITFPPGSVEASQPVLKQRRKITSKDIVTPEAWRVMMSLKSGLLAESTWALDTINILLYDDSTVATFNLSQLSGFLELLVEYFRKCLIDIFGILMEYEVGDPSQKALDHNAARKDDSQSLADDSGKEEEDAECIDDDEEDEEDEEEDSEKTESDEKSSIALTAPDAAADPKEKPKQASKFDKLPIKIVKKNNLFVVDRSDKLGRVQEFNSGLLHWQLGGGDTTEHIQTHFESKMEIPPRRRPPPPLSSAGRKKEQEGKGDSEEQQEKSIIATIDDVLSARPGALPEDANPGPQTESSKFPFGIQQAKSHRNIKLLEDEPRSRDETPLCTIAHWQDSLAKRCICVSNIVRSLSFVPGNDAEMSKHPGLVLILGKLILLHHEHPERKRAPQTYEKEEDEDKGVACSKDEWWWDCLEVLRDNTLVTLANISGQLDLSAYTESICLPILDGLLHWMVCPSAEAQDPFPTVGPNSVLSPQRLVLETLCKLSIQDNNVDLILATPPFSRQEKFYATLVRYVGDRKNPVCREMSMALLSNLAQGDALAARAIAVQKGSIGNLISFLEDGVTMAQYQQSQHNLMHMQPPPLEPPSVDMMCRAAKALLAMARVDENRSEFLLHEGRLLDISISAVLNSLVASVICDVLFQIGQL

SEQ ID NO: 25531 - protein, 362 aa, Homo sapiens
VCTFTYLLVGAAVFDALESDHEMREEEKLKAEEIRIKGKYNISSEDYRQLELVILQSEPHRAGVQWKFAGSFYFAITVITTIGYGHAAPGTDAGKAFCMFYAVLGIPLTLVMFQSLGERMNTFVRYLLKRIKKCCGMRNTDVSMENMVTVGFFSCMGTLCIGAAAFSQCEEWSFFHAYYYCFITLTTIGFGDYVALQTKGALQKKPLYVAFSFMYILVGLTVIGAFLNLVVLRFLTMNSEDERRDAEERASLAGNRNSMVIHIPEEPRPSRPRYKADVPDLQSVCSCTCYRSQDYGGRSVAPQNSFSAKLAPHYFHSISYKIEEISPSTLKNSLFPSPISSISPGLHSFTDHQRLMKRRKSV

SEQ ID NO: 25532 - protein, 11 aa, Homo sapiens
MIGFLTEDKKK

SEQ ID NO: 25533 - protein, 420 aa, Homo sapiens
MDSALSDPHNGSAEAGGPTNSTTRPPSTPEGIALAYGSLLLMALLPIFFGALRSVRCARGKNASDMPETITSRDAARFPIIASCTLLGLYLFFKVYFPNKSYAGSVLKTWKTQKSKKGKTAVIQNPTTRDSHSFPSEIFSQEYINLLLSMYFFVLGILALSHTISPFMNKFFPASFPNRQYQLLFTQGSGENKEEIINYEFDTKDLVCLGLSSIVGVWYLLRKHWIANNLFGLAFSLNGVELLHLNNVSTGCILLGGLFIYDVFWVFGTNVMVTVAKSFEAPIKLVFPQDLLEKGLEANNFAMLGLGDVVIPGIFIALLLRFDISLKKNTHTYFYTSFAAYIFGLGLTIFIMHIFKHAQPALLYLVPACIGFPVLVALAKGEVTEMFSYEESNPKDPAAVTESKEGTEASASKGLEKKEK

SEQ ID NO: 25534 - protein, 672 aa, Homo sapiens
MMQESGTETKSNGSAIQNGSGGSNHLLECGGLREGRSNGETPAVDIGAADLAHAQQQQQQVARQLLLQQQQQQQVSGLKSPKRNDKQPALQVPVSVAMMTPQVITPQQMQQILQQQVLSPQQLQVLLQQQQALMLQQQLQEFYKKQQEQLQLQLLQQQHAGKQPKEQQQVATQQLAFQQQLLQMQQLQQQHLLSLQRQGLLTIQPGQPALPLQPLAQGMIPTELQQLWKEVTSAHTAEETTGNNHSSLDLTTTCVSSSAPSKTSLIMNPHASTNGQLSVHTPKRESLSHEEHPHSHPLYGHGVCKWPGCEAVCEDFQSFLKHLNSEHALDDRSTAQCRVQMQVVQQLELQLAKDKERLQAMMTHLHVKSTEPKAAPQPLNLVSSVTLSKSASEASPQSLPHTPTTPTAPLTPVTQGPSVITTTSMHTVGPIRRRYSDKYNVPISSDIAQNQEFYKNAEVRPPFTYASLIRQAILESPEKQLTLNEIYNWFTRMFAYFRRNAATWKNAVRHNLSLHKCFVRVENVKGAVWTVDEVEFQKRRPQKISGNPSLIKNMQSSHAYCTPLNAALQASMAENSIPLYTTASMGNPTLGNLASAIREELNGAMEHTNSNESDSSPGRSPMQAVHPVHVKEEPLDPEEAEGPLSLVTTANHSPDFDHDRDYEDEPVNEDME

SEQ ID NO: 25535 - protein, 3841 aa, Homo sapiens
LVLRDGCMHCDADGLHSLSYHPALNAILAVTSRGTIKVIDGTSGATLQASALSAKPGGQVKCQYISAVDKVIFVDDYAVGCRKDLNGILLLDTALQTPVSKQDDVVQLELPVTEAQQLLSACLEKVDISSTEGYDLFITQLKDGLKNTSHETAANHKVAKWATVTFHLPHHVLKSIASAIVNELKKINQNVAALPVASSVMDRLSYLLPSARPELGVGPGRSVDRSLMYSEANRRETFTSWPHVGYRWAQPDPMAQAGFYHQPASSGDDRAMCFTCSVCLVCWEPTDEPWSEHERHSPNCPFVKGEHTQNVPLSVTLATSPAQFPCTDGTDRISCFGSGSCPHFLAAATKRGKICIWDVSKLMKVHLKFEINAYDPAIVQQLILSGDPSSGVDSRRPTLAWLEDSSSCSDIPKLEGDSDDLLEDSDSEEHSRSDSVTGHTSQKEAMEVSLDITALSILQQPEKLQWEIVANVLEDTVKDLEELGANPCLTNSKSEKTKEKHQEQHNIPFPCLLAGGLLTYKSPATSPISSNSHRSLDGLSRTQGESISEQGSTDNESCTNSELNSPLVRRTLPVLLLYSIKESDEKAGKIFSQMNNIMSKSLHDDGFTVPQIIEMELDSQEQLLLQDPPVTYIQQFADAAANLTSPDSEKWNSVFPKPGTLVQCLRLPKFAEEENLCIDSITPCADGIHLLVGLRTCPVESLSAINQVEALNNLNKLNSALCNRRKGELESNLAVVNGANISVIQHESPADVQTPLIIQPEQRNVSGGYLVLYKMNYATRIVTLEEEPIKIQHIKDPQDTITSLILLPPDILDNREDDCEEPIEDMQLTSKNGFEREKTSDISTLGHLVITTQGGYVKILDLSNFEILAKVEPPKKEGTEEQDTFVSVIYCSGTDRLCACTKGGELHFLQIGGTCDDIDEADILVDGSLSKGIEPSSEGSKPLSNPSSPGISGVDLLVDQPFTLEILTSLVELTRFETLTPRFSATVPPCWVEVQQEQQQRRHPQHLHQQHHGDAAQHTRTWKLQTDSNSWDEHVFELVLPKACMVGHVDFKFVLNSNITNIPQIQVTLLKNKAPGLGKVNGLRLCPFLEDHKEDILCGPVWLASGLDLSGHAGMLTLTSPKLVKGMAGGKYRSFLIHVKAVNERGTEEICNGGMRPVVRLPSLKHQSNKGYSLASLLAKVAAGKEKSSNVKNENTSGTRKSENLRGCDLLQEVSVTIRRFKKTSISKERVQRCAMLQFSEFHEKLLNTLCRKTDDGQITEHAQSLVLDTLCWLAGVHSNGPGSSKEGNENLLSKTRKFLSDIVRVCFFEAGRSIAHKCARFLALCISNGKCDPCQPAFGPVLLKALLDNMSFLPAATTGGSVYWYFVLLNYVKDEDLAGCSTACASLLTAVSRQLQDRLTPMEALLQTRYGLYSSPFDPVLFDLEMSGSSCKNVYNSSIGVQSDEIDLSDVLSGNGKVSSCTAAEGSFTSLTGLLEVEPLHFTCVSTSDGTRIERDDASTFTVSSFGVTPAVGGLSSGTVGEASTALSSAAQVALQSLSHAMASAEQQLQVLQEKQQQLLKLQQQKAKLEAKLHQTTAAAAAAASAVGPVHNSVPSNPVAAPGFFIHPSDVIPPTPKTTPLFMTPPLTPPNEAVSVVINAELAQLFPGSVIDPPAVNLAAHNKNSNKSRMNPLGSGLALAISHASHFLQPPPHQSIIIERMHSGARRFVTLDFGRPILLTDVLIPTCGDLASLSIDIWTLGEEVDGRRLVVATDISTHSLILHDLIPPPVCRFMKITVIGRYGSTNARAKIPLGFYYGHTYILPWESELKLMHDPLKGEGESANQPEIDQHLAMMVALQEDIQCRYNLACHRLETLLQSIDLPPLNSANNAQYFLRKPDKAVEEDSRVFSAYQDCIQLQLQLNLAHNAVQRLKVALGASRKMLSETSNPEDLIQTSSTEQLRTIIRYLLDTLLSLLHASNGHSVPAVLQSTFHAQACEELFKHLCISGTPKIRLHTGLLLVQLCGGERWWGQFLSNVLQELYNSEQLLIFPQDRVFMLLSCIGQRSLSNSGVLESLLNLLDNLLSPLQPQLPMHRRTEGVLDIPMISWVVMLVSRLLDYVATVEDEAAAAKKPLNGKDRERFLTGNQWSFINNNLHTQSLNRSSKGSSSLDRLYSRKIRKQLVHHKQQLNLLKAKQKALVEQMEKEKIQSNKGSSYKLLVEQAKLKQATSKHFKDLIRLRRTAEWSRSNLDTEVTTAKESPEIEPLPFTLAHERCISVVQKLVLFLLSMDFTCHADLLLFVCKVLARIANATRPTIHLCEIVNEPQLERLLLLLVGTDFNRGDISWGGAWAQYSLTCMLQDILAGELLAPVAAEAMEEGTVGDDVGATAGDSDDSLQQSSVQLLETIDEPLTHDITGAPPLSSLEKDKEIDLELLQDLMEVDIDPLDIDLEKDPLAAKVFKPISSTWYDYWGADYGTYNYNPYIGGLGIPVAKPPANTEKNGSQTVSVSVSQALDARLEVGLEQQAELMLKMMSTLEADSILQALTNTSPTLSQSPTGTDDSLLGGLQAANQTSQLIIQLSSVPMLNVCFNKLFSMLQVHHVQLESLLQLWLTLSLNSSSTGNKENGADIFLYNANRIPVISLNQASITSFLTVLAWYPNTLLRTWCLVLHSLTLMTNMQLNSGSSSAIGTQESTAHLLVSDPNLIHVLVKFLSGTSPHGTNQHSPQVGPTATQAMQEFLTRLQVHLSSTCPQIFSEFLLKLIHILSTERGAFQTGQGPLDAQVKLLEFTLEQNFEVVSVSTISAVIESVTFLVHHYITCSDKVMSRSGSDSSVGARACFGGLFANLIRPGDAKAVCGEMTRDQLMFDLLKLVNILVQLPLSGNREYSARVSVTTNTTDSVSDEEKVSGGKDGNGSSTSVQGSPAYVADLVLANQQIMSQILSALGLCNSSAMAMIIGASGLHLTKHENFHGGLDAISVGDGLFTILTTLSKKASTVHMMLQPILTYMACGYMGRQGSLATCQLSEPLLWFILRVLDTSDALKAFHDMGGVQLICNNMVTSTRAIVNTARSMVSTIMKFLDSGPNKAVDSTLKTRILASEPDNAEGIHNFAPLGTITSSSPTAQPAEVLLQATPPHRRARSAAWSYIFLPEEAWCDLTIHLPAAVLLKEIHIQPHLASLATCPSSVSVEVSADGVNMLPLSTPVVTSGLTYIKIQLVKAEVASAVCLRLHRPRDASTLGLSQIKLLGLTAFGTTSSATVNNPFLPSEDQVSKTSIGWLRLLHHCLTHISDLEGMMASAAAPTANLLQTCAALLMSPYCGMHSPNIEVVLVKIGLQSTRIGLKLIDILLRNCAASGSDPTDLNSPLLFGRLNGLSSDSTIDILYQLGTTQDPGTKDRIQALLKWVSDSARVAAMKRSGRMNYMCPNSSTVEYGLLMPSPSHLHCVAAILWHSYELLVEYDLPALLDQELFELLFNWSMSLPCNMVLKKAVDSLLCSMCHVHPNYFSLLMGWMGITPPPVQCHHRLSMTDDSKKQDLSSSLTDDSKNAQAPLALTESHLATLASSSQSPEAIKQLLDSGLPSLLVRSLASFCFSHISSSESIAQSIDISQDKLRRHHVPQQCNKMPITADLVAPILRFLTEVGNSHIMKDWLGGSEVNPLWTALLFLLCHSGSTSGSHNLGAQQTSARSASLSSAATTGLTTQQRTAIENATVAFFLQCISCHPNNQKLMAQVLCELFQTSPQRGNLPTSGNISGFIRRLFLQLMLEDEKVTMFLQSPCPLYKGRINATSHVIQHPMYGAGHKFRTLHLPVSTTLSDVLDRVSVEMGFCHIGHADVELLTSSDLPSSASQSAEITDTPSITA

SEQ ID NO: 25536 - protein, 1136 aa, Homo sapiens
MDVASYLYTGDSHQLKRANCSGRYELAGLPGKWPALASAHPSLHRALDTLTHATNFLNVMLQSNKSREQNLQDDLDWYQALVWSLLEGEPSISRAAITFSTDSLSAPAPQVFLQATREESRILLQDLSSSAPHLANATLETEWFHGLRRKWRPHLHRRGPNQGPRGLGHSWRRKDGLGGDKSHFKWSPPYLECENGSYKPGWLVTLSSAIYGLQPNLVPEFRGVMKVDINLQKVDIDQCSSDGWFSGTHKCHLNNSECMPIKGLGFVLGAYECICKAGFYHPGVLPVNNFRRRGPDQHISGSTKDVSEEAYVCLPCREGCPFCADDSPCFVQEDKYLRLAIISFQALCMLLDFVSMLVVYHFRKAKSIRASGLILLETILFGSLLLYFPVVILYFEPSTFRCILLRWARLLGFATVYGTVTLKLHRVLKVFLSRTAQRIPYMTGGRVMRMLAVILLVVFWFLIGWTSSVCQNLEKQISLIGQGKTSDHLIFNMCLIDRWDYMTAVAEFLFLLWGVYLCYAVRTVPSAFHEPRYMAVAVHNELIISAIFHTIRFVLASRLQSDWMLMLYFAHTHLTVTVTIGLLLIPKFSHSSNNPRDDIATEAYEDELDMGRSGSYLNSSINSAWSEHSLDPEDIRDELKKLYAQLEIYKRKKMITNNPHLQKKRCSKKGLGRSIMRRITEIPETVSRQCSKEDKEGADHGTAKGTALIRKNPPESSGNTGKSKEETLKNRVFSLKKSHSTYDHVRDQTEESSSLPTESQEEETTENSTLESLSGKKLTQKLKEDSEAESTESVPLVCKSASAHNLSSEKKTGHPRTSMLQKSLSVIASAKEKTLGLAGKTQTAGVEERTKSQKPLPKDKETNRNHSNSDNTETKDPAPQNSNPAEEPRKPQKSGIMKQQRVNPTTANSDLNPGTTQMKDNFDIGEVCPWEVYDLTPGPVPSESKVQKHVSIVASEMEKNPTFSLKEKSHHKPKAAEVCQQSNQKRIDKAEVCLWESQGQSILEDEKLLISKTPVLPERAKEENGGQPRAANVCAGQSEELPPKAVASKTENENLNQIGHQEKKTSSSEENVRGSYNSSNNFQQPLTSRAEVCPWEFETPAQPNAGRSVALPASSALSANKIAGPRKEEIWDSFKV

SEQ ID NO: 25537 - protein, 549 aa, Homo sapiens
CIMCVCLNKEVTCKREKCPVLSRDCALAIKQRGACCEQCKGCTYEGNTYNSSFKWQSPAEPCVLRQCQEGVVTESGVRCVVHCKNPLEHLGMCCPTCPGCVFEGVQYQEGEEFQPEGSKCTKCSCTDSTVVCKRKCSHPGGCDQGQEGCCEECLLRVPPEDIKVCKFGNKIFQDGEMWSSINCTICACVKGRTECRNKQCIPISSCPQGKILNRKGCCPICTEKPGVCTVFGDPHYNTFDGRTFNFQGTCQYVLTKDCSSPASPFQVLVKNDARRTRSFSWTKSVELVLGESRVSLQQHLTVRWNGSRIALPCRAPHFHIDLDGYLLKVTTKAGLEISWDGDSFVEVMAAPHLKGKLCGLCGNYNGHKRDDLIGGDGNFKFDVDDFAESWRVESNEFCNRPQRKPVPELCQGTVKVKLRAHRECQKLKSWEFQTCHSTVDYATFYRSCVTDMCECPVHKNCYCESFLAYTRACQREGIKVHWEPQQNCAATQCKHGAVYDTCGPGCIKTCDNWNEIGPCNKPCVAGCHCPANLVLHKGRCIKPVLCPQR

SEQ ID NO: 25538 - protein, 470 aa, Homo sapiens
MQLRNPELHLGCALALRFLALVSWDIPGARALDNGLARTPTMGWLHWERFMCNLDCQEEPDSCISWSFALVAQAGVQCHDLGSPQPPPPRFKQFSCLILASSWNYSEKLFMEMAELMVSEGWKDAGYEYLCIDDCWMAPQRDSEGRLQADPQRFPHGIRQLANYVHSKGLKLGIYADVGNKTCAGFPGSFGYYDIDAQTFADWGVDLLKFDGCYCDSLENLADGYKHMSLALNRTGRSIVYSCEWPLYMWPFQKPNYTEIRQYCNHWRNFADIDDSWKSIKSILDWTSFNQERIVDVAGPGGWNDPDMLVIGNFGLSWNQQVTQMALWAIMAAPLFMSNDLRHISPQAKALLQDKDVIAINQDPLGKQGYQLRQGDNFEVWERPLSGLAWAVAMINRQEIGGPRSYTIAVASLGKGVACNPACFITQLLPVKRKLGFYEWTSRLRSHINPTGTVLLQLENTMQMSLKDLL

SEQ ID NO: 25539 - protein, 134 aa, Homo sapiens
MDVTIVKTDYEGQAKKLLELMENTDVIIVAGGDGTLQEVVTGVLRRTDEATFSKIPIGFIPLGETSSLSHTLFAESGNKVQHITDATLAIVKGETVPLDVLQIKTFILHPMDQGIISTFKFYYLINKLWTKGHQ

SEQ ID NO: 25540 - protein, 1699 aa, Homo sapiens
MAGASVKVAVRVRPFNSREMSRDSKCIIQMSGSTTTIVNPKQPKETPKSFSFDYSYWSHTSPEDINYASQKQVYRDIGEEMLQHAFEGYNVCIFAYGQTGAGKSYTMMGKQEKDQQGIIPQLCEDLFSRINDTTNDNMSYSVEVSYMEIYCERVRDLLNPKNKGNLRVREHPLLGPYVEDLSKLAVTSYNDIQDLMDSGNKARTVAATNMNETSSRSHAVFNIIFTQKRHDAETNITTEKVSKISLVDLAGSERADSTGAKGTRLKEGANINKSLTTLGKVISALAEMDSGPNKNKKKKKTDFIPYRDSVLTWLLRENLGGNSRTAMVAALSPADINYDETLSTLRYADRAKQIRCNAVINEDPNNKLIRELKDEVTRLRDLLYAQGLGDITDTNTVPGGPKLTNALVGMSPSSSLSALSSRAASVSSLHERILFAPGSEEAIERLKETEKIIAELNETWEEKLRRTEAIRMEREALLAEMGVAMREDGGTLGVFSPKKTPHLVNLNEDPLMSECLLYYIKDGITRVGREDGERRQDIVLSGHFIKEEHCVFRSDSRGGSEAVVTLEPCEGADTYVNGKKVTEPSILRSGNRIIMGKSHVFRFNHPEQARQERERTPCAETPAEPVDWAFAQRELLEKQGIDMKQEMEQRLQELEDQYRREREEATYLLEQQRLDYESKLEALQKQMDSRYYPEVNEEEEEPEDEVQWTERECELALWAFRKWKWYQFTSLRDLLWGNAIFLKEANAISVELKKKVQFQFVLLTDTLYSPLPPDLLPPEAAKDRETRPFPRTIVAVEVQDQKNGATHYWTLEKLRQRLDLMREMYDRAAEVPSSVIEDCDNVVTGGDPFYDRFPWFRLVGRAFVYLSNLLYPVPLVHRVAIVSEKGEVKGFLRVAVQAISADEEAPDYGSGVRQSGTAKISFDDQHFEKFQSESCPVVGMSRSGTSQEELRIVEGQGQGADVGPSADEVNNNTCSAVPPEGLLLDSSEKAALDGPLDAALDHLRLGNTFTFRVTVLQASSISAEYADIFCQFNFIHRHDEAFSTEPLKNTGRGPPLGFYHVQNIAVEVTKSFIEYIKSQPIVFEVFGHYQQHPFPPLCKDVLSPLRPSRRHFPRVMPLSKPVPATKLSTLTRPCPGPCHCKYDLLVYFEICELEANGDYIPAVVDHRGGMPCMGTFLLHQGIQRRITVTLLHETGSHIRWKEVRELVVGRIRNTPETDESLIDPNILSLNILSSGYIHPAQDDRTFYQFEAAWDSSMHNSLLLNRVTPYREKIYMTLSAYIEMENCTQPAVVTKDFCMVFYSRDAKLPASRSIRNLFGSGSLRASESNRVTGVYELSLCHVADAGSPGMQRRRRRVLDTSVAYVRGEENLAGWRPRSDSLILDHQWELEKLSLLQEVEKTRHYLLLREKLETAQRPVPEALSPAFSEDSESHGSSSASSPLSAEGRPSPLEAPNERQRELAVKCLRLLTHTFNREYTHSHVCVSASESKLSEMSVTLLRDPSMSPLGVATLTPSSTCPSLVEGRYGATDLRTPQPCSRPASPEPELLPEADSKKLPSPARATETDKEPQRLLVPDIQEIRVSPIVSKKGYLHFLEPHTSGWARRFVVVRRPYAYMYNSDKDTVERFVLNLATAQVEYSEDQQAMLKTPNTFAVCTEHRGILLQAASDKDMHDWLYAFNPLLAGTIRSKLSRRRSAQMRV

SEQ ID NO: 25541 - protein, 662 aa, Homo sapiens
VLTSYRSTAERKLLPLLKPPKPTRVRQDATIFGDPPQPDLDLLSEDGIQTGAGPGGVDLWAVRGQERGRGELKPSKLQSPTGTGLFASPPAAALVLKRVAVFIVTIPAGAGVGSPGWGSWSFFFSSLWLLSPGDSPDEAPQNTPPATVEGREEEGLEVLKEQNWELPLQDEPLYQTYRAAVLSEELWGVGEDGSPSPANAGDAPTFPRPPGPRNTLWQELPAVQASGLLDTLSPQERRMQESLFEVVTSEASYLRSLRLLTDTFVLSQALRDTLTPRDHHTLFSNVQRVQGVSERFLATLLSRVRSSPHISDLCDVVHAHAVGPFSVYVDYVRNQQYQEETYSRLMDTNVRFSAELRRLQSLPKCERLPLPSFLLLPFQRITRLRMLLQNILRQTEEGSSRQENAQKALGAVSKIIERCSAEVGRMKQTEELIRLTQRLRFHKVKALPLVSWSRRLEFQGELTELGCRRGGVLFASRPRFTPLCLLLFSDLLLITQPKSGQRLQVLDYAHRSLVQAQQVPDPSGPPTFRLSLLSNHQGRPTHRLLQASSLSDMQRWLGAFPTPGPLPCSPDTIYEDCDCSQELCSESSAPAKTEGRSLESRAAPKHLHKTPEGWLKGLPGAFPAQLVCEVTGEHERRRHLRQNQRLLEAVGSSSGTPNAPPP

SEQ ID NO: 25542 - protein, 1872 aa, Homo sapiens
MANLEESFPRGGTRKIHKPEKAFQQSVEQDNLFDISTEEGSTKRKKSQKGPAKTKKLKIEKRESSKSAREKFEILSVESLCEGMRILGCVKEVNELELVISLPNGLQGFVQVTEICDAYTKKLNEQVTQEQPLKDLLHLPELFSPGMLVRCVVSSLGITDRGKKSVKLSLNPKNVNRVLSAEALKPGMLLTGTVSSLEDHGYLVDIGVDGTRAFLPLLKAQEYIRQKNKGAKLKVGQYLNCIVEKVKGNGGVVSLSVGHSEVSTAIATEQQSWNLNNLLPGLVVKAQVQKVTPFGLTLNFLTFFTGVVDFMHLDPKKAGTYFSNQAVRACILCVHPRTRVVHLSLRPIFLQPGRPLTRLSCQNLGAVLDDVPVQGFFKKAGATFRLKDGVLAYARLSHLSDSKNVFNPEAFKPGNTHKCRIIDYSQMDELALLSLRTSIIEAQYLRYHDIEPGAVVKGTVLTIKSYGMLVKVGEQMRGLVPPMHLADILMKNPEKKYHIGDEVKCRVLLCDPEAKKLMMTLKKTLIESKLPVITCYADAKPGLQTHGFIIRVKDYGCIVKFYNNVQGLVPKHELSTEYIPDPERVFYTGQVVKVVVLNCEPSKERMLLSFKLSSDPEPKKEPAGHSQKKGKAINIGQLVDVKVLEKTKDGLEVAVLPHNIRAFLPTSHLSDHVANGPLLHHWLQAGDILHRVLCLSQSEGRVLLCRKPALVSTVEGGQDPKNFSEIHPGMLLIGFVKSIKDYGVFIQFPSGLSGLAPKAIMSDKFVTSTSDHFVEGQTVAAKVTNVDEEKQRMLLSLRLSDCGLGDLAITSLLLLNQCLEELQGVRSLMSNRDSVLIQTLAEMTPGMFLDLVVQEVLEDGSVVFSGGPVPDLVLKASRYHRAGQEVESGQKKKVVILNVDLLKLEVHVSLHQDLVNRKARKLRKGSEHQAIVQHLEKSFAIASLVETGHLAAFSLTSHLNDTFRFDSEKLQVGQGVSLTLKTTEPGVTGLLLAVEGPAAKRTMRPTQKDSETVDEDEEVDPALTVGTIKKHTLSIGDMVTGTVKSIKPTHVVVTLEDGIIGCIHASHILDDVPEGTSPTTKLKVGKTVTARVIGGRDMKTFKYLPISHPRFVRTIPELSVRPSELEDGHTALNTHSVSPMEKIKQYQAGQTVTCFLKKYNVVKKWLEVEIAPDIRGRIPLLLTSLSFKVLKHPDKKFRVGQALRATVVGPDSSKTLLCLSLTGPHKLEEGEVAMGRVVKVTPNEGLTVSFPFGKIGTVSIFHMSDSYSETPLEDFVPQKVVRCYILSTADNVLTLSLRSSRTNPETKSKVEDPEINSIQDIKEGQLLRGYVGSIQPHGVFFRLGPSVVGLARYSHVSQHSPSKKALYNKHLPEGKLLTARVLRLNHQKNLVELSFLPGDTGKPDVLSASLEGQLTKQEERKTEAEERDQKGEKKNQKRNEKKNQKGQEEVEMPSKEKQQPQKPQAQKRGGRECRESGSEQERVSKKPKKAGLSEEDDSLVDVYYREGKEEAEETNVLPKEKQTKPAEAPRLQLSSGFAWNVGLDSLTPALPPLAESSDSEEDEKPHQATQIKKSKKERELEKQKAEKELSRIEEALMDPGRQPESADDFDRLVLSSPNSSILWLQYMAFHLQATEIEKARAVAERALKTISFREEQEKLNVWVALLNLENMYGSQESLTKVFERAVQYNEPLKVFLHLADIYAKSEKFQEAGELYNRMLKRFRQEKAVWIKYGAFLLRRSQAAASHRVLQRALECLPSKEHVDVIAKFAQLEFQLGDAERAKAIFENTLSTYPKRTDVWSVYIDMTIKHGSQKDVRDIFERVIHLSLAPKRMKFFFKRYLDYEKQHGTEKDVQAVKAKALEYVEAKSSVLED

SEQ ID NO: 25543 - protein, 1166 aa, Homo sapiens
EYASMVPSSQGNLSILSRQESSFFTLTIVPHGYTEVANIPVARPGRRLYNVRNPNASHSDSVLVQIDATEGNKVITLRSPLQIKNHFSIAFIIYKFVKNVKLLERIGIARPEEEFHVPLDSYRCQLFIQPAGILEHQYKESTTYISWKEELHRSREVRCMLQCPSVEVSFLPLIVNTVALPDELSYICTHGEDWDVAYIIHLYPSLTLRNLLPYSLRYLLEGTAETHELAEGSTADVLHSRISGEIMELVLVKYQGKNWNGHFRIRDTLPEFFPVCFSSDSTEVTTVDLSVHVRRIGSRMVLSVFSPYWLINKTTRVLQYRSEDIHVKHPADFRDIILFSFKKKNIFTKNKVQLKISTSAWSSSFSLDTVGSYGCVKCPANNMEYLVGVSIKMSSFNLSRIVTLTPFCTIANKSSLELEVGEIASDGSMPTNKWNYIASSECLPFWPESLSGKLCVRVVGCEGSSKPFFYNRQDNGTLLSLEDLNGGILVDVNTAEHSTVITFSDYHEGSAPALIMNHTPWDILTYKQSGSPEEMVLLPRQARLFAWADPTGTRKLTWTYAANVGEHDLLKDGCGQFPYDANIQIHWVSFLDGRQRVLLFTDDVALVSKALQAEEMEQADYEITLSLHSLGLSLVNNESKQEVSYIGITSSGVVWEVKPKQKWKPFSQKQIILLEQSYQKHQISRDHGWIKLDNNFEVNFDKDPMEMRLPIRSPIKRDFLSGIQIEFKQSSHQRSLRARLYWLQVDNQLPGAMFPVVFHPVAPPKSIALDSEPKPFIDVSVITRFNEYSKVLQFKYFMVLIQEMALKIDQGFLGAIIALFTPTTDPEAERRRTKLIQQDIDALNAELMETSMTDMSILSFFEHFHISPVKLHLSLSLGSGGEESDKEKQEMFAVHSVNLLLKSIGATLTDVDDLIFKLAYYEIRYQFYKRDQLIWSVVRHYSEQFLKQMYVLVLGLDVLGNPFGLIRGLSEGVEALFYEPFQGAVQGPEEFAEGLVIGVRSLFGHTVGGAAGVVSRITGSVGKGLAAITMDKEYQQKRREELSRQPRDFGDSLARGGKGFLRGVVGGVTGIITKPVEGAKKEGAAGFFKGIGKGLVGAVARPTGGIVDMASSTFQGIQRAAESTEEVSSLRPPRLIHEDGIIRPYDRQESEGSDLLEVNFVLHGHE

SEQ ID NO: 25544 - protein, 741 aa, Homo sapiens
KEDGCHERDDDTTSVNSDRSEEVFDMTKGNLTLLEKAIALETERAKAMREKMAMEAGRRDNMRSYEDQSPRQLPGEDRKPKSSDSHVKKPYYDPSRTEKKESKCPTPGCDGTGHVTGLYPHHRSLSGCPHKDRVPPEILAMHESVLKCPTPGCTGRGHVNSNRNSHRSLSGCPIAAAEKLAKAQEKHQSCDVSKSSQASDRVLRPMCFVKQLEIPQYGYRNNVPTTTPRSNLAKELEKYSKTSFEYNSYDNHTYGKRAIAPKVQTRDISPKGYDDAKRYCKDPSPSSSSTSSYAPSSSSNLSCGGGSSASSTCSKSSFDYTHDMEAAHMAATAILNLSTRCREMPQNLSTKPQDLCATRNPDMEVDENGTLDLSMNKQRPRDSCCPILTPLEPMSPQQQAVMNNRCFQLGEGDCWDLPVDYTKMKPRRIDEDESKDITPEDLDPFQEALEERRYPGEVTIPSPKPKYPQCKESKKDLITLSGCPLADKSIRSMLATSSQELKCPTPGCDGSGHITGNYASHRSLSGCPRAKKSGIRIAQSKEDKEDQEPIRCPVPGCDGQGHITGKYASHRSASGCPLAAKRQKDGYLNGSQFSWKSVKTEGMSCPTPGCDGSGHVSGSFLTHRSLSGCPRATSAMKKAKLSGEQMLTIKQRASNGIENDEEIKQLDEEIKELNESNSQMEADMIKLRTQITTMESNLKTIEEENKVIEQQNESLLHELANLSQSLIHSLANIQLPHMVSD

SEQ ID NO: 25545 - protein, 411 aa, Homo sapiens
MNAETCVSYCESPAAAMDAYYSPVSQSREGSSPFRAFPGGDKFGTTFLSAAAKAQGFGDAKSRARYGAGQQDLATPLESGAGARGSFNKFQPQPSTPQPQPPPQPQPQQQQPQPQPPAQPHLYLQRGACKTPPDGSLKLQEGSSGHSAALQVPCYAKESSLGEPELPPDSDTVGMDSSYLSVKEAGVKGPQDRASSDLPSPLEKADSESNKGKKRRNRTTFTSYQLEELEKVFQKTHYPDVYAREQLAMRTDLTEARVQVWFQNRRAKWRKRERFGQMQQVRTHFSTAYELPLLTRAENYAQIQNPSWLGNNGAASPVPACVVPCDPVPACMSPHAHPPGSGASSVTDFLSVSGAGSHVGQTHMGSLFGAASLSPGLNGYELNGEPDRKTSSIAALRMKAKEHSAAISWAT

SEQ ID NO: 25546 - protein, 315 aa, Homo sapiens
MASARGGTGSVGLAAAPVRGRRENKQGGAGPGMKLGRAVLGLLLLAPSVVQAVEPISLGLALAGVLTGYIYPRLYCLFAECCGQKRSLSREALQKDLDDNLFGQHLAKKIILNAVFGFINNPKPKKPLTLSLHGWTGTGKNFVSKIIAENIYEGGLNSDYVHLFVATLHFPHASNITLYKDQLQLWIRGNVSACARSIFIFDEMDKMHAGLIDAIKPFLDYYDLVDGVSYQKAMFIFLSNAGAERITDVALDFWRSGKQREDIKLKDIEHALSVSVFNNKNNSFTLSPRLECSGVTLPHCNLCLPGSSDSCASAS

SEQ ID NO: 25547 - protein, 719 aa, Homo sapiens
EMKDFQFRALKKVRIFDSPEELPKERSSLLAVSNKYGLVFAGGASGLQIFPTKNLLIQNKPGDDPNKIVDKVQGLLVPMKFPIHHLALSCDNLTLSACMMSSEYGSIIAFFDVRTFSNEAKQQKRPFAYHKLLKDAGGMVIDMKWNPTVPSMVAVCLADGSIAVLQVTETVKVCATLPSTVAVTSVCWSPKGKQLAVGKQNGTVVQYLPTLQEKKVIPCPPFYESDHPVRVLDVLWIGTYVFAIVYAAADGTLETSPDVVMALLPKKEEKHPEIFVNFMEPCYGSCTERQHHYYLSYIEEWDLVLAASAASTEVSILARQSDQINWESWLLEDSSRAELPVTDKSDDSLPMGVVVDYTNQVEITISDEKTLPPAPVLMLLSTDGVLCPFYMINQNPGVKSLIKTPERLSLEGERQPKSPAPTPAASPVAPSAASFSFGSSGFKPTLESTPVPSVSAPNIAMKPSFPPSTSAVKVNLSEKFTAAATSTPVSSSQSAPPMSPFSSASKPAASGPLSHPTPLSAPPSSVPLKSSVLPSPSGRSAQGSSSPVPSMVQKSPRITPPAAKPGSPQAKSLQPAVAEKQGHQWKDSDPVMAGIGEEIAHFQKELEELKARTSKACFQVGTSEEMKMLRTESDDLHTFLLEIKETTESLHGDISSLKTTLLEGFAGVEEAREQNERNRDSGYLHLLYKRPLDPKSEAQLQEIRRLHQYVKFAVQDVND

SEQ ID NO: 25548 - protein, 385 aa, Homo sapiens
MGCRRTREGPSKAMIFPWKCQSTQRDLWNIFKLWGWTMLCCDFLAHHGTDCWTYHYSEKPMNWQRARRFCRDNYTDLVAIQNKAEIEYLEKTLPFSRSYYWIGIRKIGGIWTWVGTNKSLTEEAENWGDGEPNNKKNKEDCVEIYIKRNKDAGKWNDDACHKLKAALCYTASCQPWSCSGHGECVEIINNYTCNCDVGYYGPQCQFVIQCEPLEAPELGTMDCTHPLGNFSFSSQCAFSCSEGTNLTGIEETTCGPFGNWSSPEPTCQVIQCEPLSAPDLGIMNCSHPLASFSFTSACTFICSEGTELIGKKKTICESSGIWSNPSPICQKLDKSFSMIKEGDYNPLFIPVAVMVTAFSGLAFIIWLARRLKKGKKSKRSMNDPY

SEQ ID NO: 25549 - protein, 328 aa, Homo sapiens
MSVVKSIELVLPEDRIYLAGSSIKGQVILTLNSTLVDPIVKVELVGRGYVEWSEEAGASCDYSRNVICNNKADYVHKTKTFPVEDNWLSAGSHTFDFHFNLPPRLPSTFTSKFGHVFYFVQASCMGREHILAKKRMYLLVQGTSTFHKETPFQNPLFVEAEEKVSYNCCRQGTVCLQIQMERNTFTPGEKVVFTTEINNQTSKCIKTVVFALYAHIQYEGFTPSAERRSRLDSSELLRQEANTPVTRFNTTKVVSTFNLPLLLSVSSSTQDGEIMHTRYELVTTVHLPWSLTSLKAKVPIIITSASVDSAICQLSEDGVLPVNPDHQN

SEQ ID NO: 25550 - protein, 597 aa, Homo sapiens
RVDENTEENHCGETSSQIPDDTLNKKTSPGVKSCESSVCGEVFVGHSSLNRHIRADTAHKPSEYQEYGQEPYKCQQRKKAFRCHPSFQMQEKAHTGEKLYDCKECGKTFISHSSIQRHMIMHNGDGTYKCKFCGKACPCLSIYLIHERVHTGEKPYKCKQCGKAFSYSTSLQIHERTHTGEKPYECKECGKAFGSPNSLYEHRRTHTGEKPYECKQCGKAFRWFHSFQIHERTHSEEKAYECTKCGKAFKCPSYLCRHEVTHSGKKPCECKQCGKALSYLNFQRHMKMHTRMRPYKCKTVEKPLILPVRFEDMKELTLERNLMNASTVVKPSIVPVPFTIMKGLTLERNPMNVSSVVKPSFLPLPFDIMKGLTLERNRMSVSNVGKPSDLPHTFKCMEGLTLKRNPMNVSSVVKPSFFPLPFDIMKGLTLERNPMSVSNVGKPSHLPHTFKCMKGLTLESNCMNLNNVKKPLDLSETFKFMKRHTLERNPIRNMEKHSTISLPFKYMQQCTEDRMPMNVKSVTKHSYLPRSFEYMQEHTLERNPMNVRNAEKRSIIFLLCVYTKGCTLERNHINVRIVGKHSVCLVPFVDIKGLTLE

SEQ ID NO: 25551 - protein, 432 aa, Homo sapiens
MNNRKEDMEITSHYRHLLRELNEQRQHGVLCDVCVVVEGKVFKAHKNVLLGSSRYFKTLYCQVQKTSEQATVTHLDIVTAQGFKAIIDFMYSAHLALTSRNVIEVMSAASFLQMTDIVQACHDFIKAALDISIKSDASDELAEFEIGASSSSSTEALISAVMAGRSISPWLARRTSPANSSGDSAIASCHDGGSSYGKEDQEPKADGPDDVSSQPLWPGDVGYGPLRIKEEQVSPSQYGGSELPSAKDGAVQNSFSEQSAGDAWQPTGRRKNRKNKETVRHITQQVEDDSRASSPVPSFLPTSGWPFSSRDSNADLSVTEASSSDSRGERAELYAQVEEGLLGGEASYLGPPLTPEKDDALHQATAVANLRAALMSKNSLLSLKADVLGDDGSLLFEYLPRGAHSLSRPGSLVRVADGRTEAPPPSTLRATG

SEQ ID NO: 25552 - protein, 742 aa, Homo sapiens
AELYQYYLAQNIGLTGMKLENPADPQLMINPFQLDPATAAALAPGLGELSPYISDPALKLFQCAVCNKFTSDSLEALSVHVSSERSLPEEEWRAVIGDIYQCKLCNYNTQLKANFQLHCKTDKHMQKYQLVAHIKEGGKSNEWRLKCIAIGNPVHLKCNACDYYTNSVDKLRLHTTNHRHEAALKLYKHLQKQEGAVNPESCYYYCAVCDYTTKVKLNLVQHVRSVKHQQTEGLRKLQLHQQGLAPEEDNLSEIFFVKDCPPNELETASLGARTCDDDLTEQQLRSTSGIITPEKELKVSVAGGTQPLLLAKEEDVATKRSKPTEDNKFCHEQFYQCPYCNYNSRDQSRIQMHVLSQHSVQPVICCPLCQDVLSNKMHLQLHLTHLHSVSPDCVEKLLMTVPVPDVMMPNSMLLPAAASEKSERDTPAAVTAEGSGKYSGESPMDDKSMAGLEDSKANVEVKNEEQKPTKEPLEVSEWNKNSSKDVKIPDTLQDQLNEQQKRQPLSVSDRHVYKYRCNHCSLAFKTMQKLQIHSQYHAIRAATMCNLCQRSFRTFQALKKHLEAGHPELSEAELQQLYASLPVNGELWAESETMSQDDHGLEQEMEREYEVDHEGKASPVGSDSSSIPDDMGSEPKRTLPFRKGPNFTMEKFLDPSRPYKCTVCKESFTQKNILLVHYNSVSHLHKLKKVLQEASSPVPQETNSNTDNKPYKCSICNVAYSQSSTLEIHMRSVLHQTKARAA

SEQ ID NO: 25553 - protein, 202 aa, Homo sapiens
MPNVAETERSNDSGNGEHKSERKSPEENLQGAVKSFCTSASGAPLGPKGDGHYPWSCPVTHTREKIYAICSDYAFLNQATSIYKTPNPSRSPCLPDSTSLSAGNNSSRYIGIPTSTSEIIYNEENSLENLSNSLGKLPLAWEIDKSEFDGVTTNSKHKSGNAKKQVSKRKTSDKKGRYQKECPQHSPLEDIKQRKVLDLRRW

SEQ ID NO: 25554 - protein, 2425 aa, Homo sapiens
MSAAKENPCRKFQANIFNKSKCQNCFKPRESHLLNDEDLTQAKPIYGGWLLLAPDGTDFDNPVHRSRKWQRRFFILYEHGLLRYALDEMPTTLPQGTINMNQCTDVVDGEGRTGQKFSLCILTPEKEHFIRAETKEIVSGWLEMLMVYPRTNKQNQKKKRKVEPPTPQEPGPAKVAVTSSSSSSSSSSSIPSAEKVPTTKSTLWQEEMRTKDQPDGSSLSPAQSPSQSQPPAASSLREPGLESKEEESAMSSDRMDCGRKVRVESGYFSLEKTKQDLKAEEQQLPPPLSPPSPSTPNHRYSCPESPSQELGGPLPSPGPRLPHQMVCSISLSSLDVASQPPAYVDSGSTRGRGTERLGSAFAFKASRQYATLADVPKAIRISHREAFQVERRRLERRTRARSPGREEVARLFGNERRRSQVIEKFEALDIEKAEHMETNAVGPSPSSDTRQGRSEKRAFPRKRDFTNEAPPAPLPDASASPLSPHRRAKSLDRRSTEPSVTPDLLNFKKGWLTKQYEDGQWKKHWFVLADQSLRYYRDSVAEEAADLDGEIDLSACYDVTEYPVQRNYGFQIHTKEGEFTLSAMTSGIRRNWIQTIMKHVHPTTAPDVTSSLPEEKNKSSCSFETCPRPTEKQEAELGEPDPEQKRSRARERRREGRSKTFDWAEFRPIQQALAQERVGGVGPADTHEPLRPEAEPGELERERARRREERRKRFGMLDATDGPGTEDAALRMEVDRSPGLPMSDLKTHNVHVEIEQRWHQVETTPLREEKQVPIAPVHLSSEDGGDRLSTHELTSLLEKELEQSQKEASDLLEQNRLLQDQLRVALGREQSAREGYVLQTEVAASPSGAWQRLHRVNQDLQSELEAQCQRQELITHQIQTLKRSYGEAKDTIRHHEAEIRSLQARLSNAAAELAIKEQALAKLKGDLKREQGRVREQLEERQHSEAALSSQLRASEQKLKSAEALLLEKTQELRGLETQQALQRDRQKEVQRLQERIADLSQQLGASEQAQRLMEEKLQRNYELLLESCEKEKQALLQNLKEVEDKASAYEDQLQGQAQQVETLQKEKLSATFEGSEQVHQLEEQLEAREASVRRLAEHVQSLCDERDLLRQRFQELTERVATSDEDVAELREKLRRREADNQSLEHSYQRVSSQLQSMHTLLREKEEELERIKEAHEKVLEKKEQDLNEALVKMVALGSSLEETEIKLQAKEEILRKFASESPKDMEEPRSTPEETERDGTLLPGQPVQATRAPLGLPHTRLEDEDEDLGAPPGEEYGDGSPSREDSMVPPKSVEVLDREGHQQGTAKLDQGAPGVKRQRIRFSTIQCQRYIHPEGSEKTWTSSTSSDTSQDRSPSEESMSSEPAPSVLPATGDSDTYLSIIHSLETKLYVTEEKLKDVTVRLESQQGQSREALLALHHQWAGTEAQLREQLRASLLQVGALASQLEQERQERARRVEGHVGELGDFQVKNSQALMCLENCREQLRSLPRASQEDEQDARAASLASVESALVSAIQALQHWPAPAHGGARAQLETGGTEENGKPASLQQCSQSELTEQEQVRLLSDQIALEASLISQIADSLKNTTSDVSRMLHEISWSGQPPMESAGAPVDTWARKVLVDGEFWSQVESLRKHLGTLGGEAVGASGDGQQSIPQGLAPILANATWVRAELSFATQSVRESFHRRLQSIQETLRGTQTALRQHKCLLREILGAYQTPDFERVMQQVLEALRLPAGHEDGVQLSWDLSPLGEVLGRDSDSSQEPFDVSDQSPGAFVAIQEELAQQLKEKASLLEEIAAALPSLPPVESLRDCQKLLQVSQSLSYNTCLGGLGQYSSLLVQDAIIQAQVCYASCRIRLEYEKELQLCKESWQTREPSCSEQAQAARALREEYEELLRKQKSEYLDVIAIVERENAELKAKAAQLDHQQQCLEDAESKHSMSMFTLRGRYEEEIRCVVEQLTRTESTLQAERSRVLSQLDASVRDRQDMERHHGEQIQTLEDRFQLKVRELQTIHEEELRTLQEHYSQSLRCLQDTLCLHQGPHPKALPAPAPNWQATQGEADSMTGLRERIQELEAQMDVMREELGHKDLEGDAATLREKYQRDLESLKATCERGFAAMEETHQKKIEDLQRQHQRELEKLREEKDRLLAEETAATISAIEAMKNAHREEMERELEKSQRSQISSVNSDVEALRRQYLEELQSVQRELEVLSEQYSQKCLENAHLAQALEAERQALRQCQRENQELNAHNQELNNRLAAEITRLRTLLTGDGGGEATGSPLAQGKDAYELEVLLRVKESEIQYLKQEISSLKDELQTALRDKKYASDKYKDIYTELSIAKAKADCDISRLKEQLKAATEALGEKSPDSATVSGYDIMKSKSNPDFLKKDRSCVTRQLRNIRSKSLKEGLTVQERLKLFESRDLKKD

SEQ ID NO: 25555 - protein, 2095 aa, Homo sapiens
GLFSLLAERLMLQTNLITMTTYNVLFEILIEQIGTQVIHKQHPDPDSSVKIQNPQILKVIATLLRNSPQCPESMEVRRAFLSDMIKLFNNSRENRRSLLQCSVWQEWMLSLCYFNPKNSDEQKITEMVYAIFRILLYHAVKYEWGGWRVWVDTLSITHSKVTFEIHKENLANIFREQQGKVDEEIGLCSSTSVQAASGIRRDINVSVGSQQPDTKDSPVCPHFTTNGNENSSIEKTSSLESASNIELQTTNTSYEEMKAEQENQELPDEGTLEETLTNETRNADDLEVSSDIIEAVAISSNSFITTGKDSMTVSEVTASISSPSEEDASEMPEFLDKSIVEEEEDDDYVELKVEGSPTEEANLPTELQDNSLSPAASEAGEKLDMFGNDDKLIFQEGKPVTEKQTDTETQDSKDSGIQTMTASGSSAMSPETTVSQIAVESDLGQMLEEGKKATNLTRETKLINDCHGSVSEASSEQKIAKLDVSNVATDTERLELKASPNVEAPQPHRHVLEISRQHEQPGQGIAPDAVNGQRRDSRSTVFRIPEFNWSQMHQRLLTDLLFSIETDIQMWRSHSTKTVMDFVNSSDNVIFVHNTIHLISQVMDNMVMACGGILPLLSAATSATHELENIEPTQGLSIEASVTFLQRLISLVDVLIFASSLGFTEIEAEKSMSSGGILRQCLRLVCAVAVRNCLECQQHSQLKTRGDKALKPMHSLIPLGKSAAKSPVDIVTGGISPVRDLDRLLQDMDINRLRAVVFRDIEDSKQAQFLALAVVYFISVLMVSKYRDILEPQNERHSQSCTETGSENENVSLSEITPAAFSTLTTASVEESESTSSARRRDSGIGEETATGLGSHVEVTPHTAPPGVSAGPDAISEVLSTLSLEVNKSPETKNDRGNDLDTKATPSVSVSKNVNVKDILRSLVNIPADGVTVDPALLPPACLGALGDLSVEQPVQFRSFDRSVIVAAKKSAVSPSTFNTSIPTNAVSVVSSVDSAQASDMGGESPGSRSSNAKLPSVPTVDSVSQDPVSNMSITERLEHALEKAAPLLREIFVDFAPFLSRTLLGSHGQELLIEGTSLVCMKSSSSVVELVMLLCSQEWQNSIQKNAGLAFIELVNEGRLLSQTMKDHLVRVANEAEFILSRQRAEDIHRHAEFESLCAQYSADKREDEKMCDHLIRAAKYRDHVTATQLIQKIINILTDKHGAWGNSAVSRPLEFWRLDYWEDDLRRRRRFVRNPLGSTHPEATLKTAVEHATDEDILAKGKQSIRSQALGNQNSENEILLEGDDDTLSSVDEKDLENLAGPVSLSTPAQLVAPSVVVKGTLSVTSSELYFEVDEEDPNFKKIDPKILAYTEGLHGKWLFTEIRSIFSRRYLLQNTALEIFMANRVAVMFNFPDPATVKKVVNYLPRVGVGTSFGLPQTRRISLASPRQLFKASNMTQRWQHREISNFEYLMFLNTIAGRSYNDLNQYPVFPWVITNYESEELDLTLPTNFRDLSKPIGALNPKRAAFFAERYESWEDDQVPKFHYGTHYSTASFVLAWLLRIEPFTTYFLNLQGGKFDHADRTFSSISRAWRNSQRDTSDIKELIPEFYYLPEMFVNFNNYNLGVMDDGTVVSDVELPPWAKTSEEFVHINRLALESEFVSCQLHQWIDLIFGYKQQGPEAVRALNVFYYLTYEGAVNLNSITDPVLREAVEAQIRSFGQTPSQLLIEPHPPRGSAMQVYLLLQSPLMFTDKAQQDVIMVLKFPSNSPVTHVAANTQPGLATPAVITVTANRLFAVNKWHNLPAHQGAVQDQPYQLPVEIDPLIASNTGMHRRQITDLLDQSIQVHSQCFVITSDNRYILVCGFWDKSFRVYSTDTGRLIQVVFGHWDVVTCLARSESYIGGNCYILSGSRDATLLLWYWNGKCSGIGDNPGSETAAPRAILTGHDYEVTCAAVCAELGLVLSGSQEGPCLIHSMNGDLLRTLEGPENCLKPKLIQASREGHCVIFYENGLFCTFSVNGKLQATMETDDNIRAIQLSRDGQYLLTGGDRGVVVVRQVSDLKQLFAYPGCDAGIRAMALSYDQRCIISGMASGSIVLFYNDFNRWHHEYQTRY

SEQ ID NO: 25556 - protein, 722 aa, Homo sapiens
MLTFFLVSGGSLWLFVEFVLSLLEKMQTQEILRILRLPELGDLGQFFRSLSATTLVSMGALAAILAYWFTHRPKALQPPCNLLMQSEEVEDSGGARRSVIGSGPQLLTHYYDDARTMYQVFRRGLSISGNGPCLGFRKPKQPYQWLSYQEVADRAEFLGSGLLQHNCKACTDQFIGVFAQNRPEWIIVELACYTYSMVVVPLYDTLGPGAIRYIINTADISTVIVDKPQKAVLLLEHVERKETPGLKLIILMDPFEEALKERGQKCGVVIKSMQAVEDCGQENHQAPVPPQPDDLSIVCFTSGTTGNPKGAMLTHGNVVADFSGFLKVTESQWAPTCADVHISYLPLAHMFERMVQSVVYCHGGRVGFFQGDIRLLSDDMKALCPTIFPVVPRLLNRMYDKIFSQANTPLKRWLLEFAAKRKQAEVRSGIIRNDSIWDELFFNKIQASLGGCVRMIVTGAAPASPTVLGFLRAALGCQVYEGYGQTECTAGCTFTTPGDWTSGHVGAPLPCNHIKLVDVEELNYWACKGEGEICVRGPNVFKGYLKDPDRTKEALDSDGWLHTGDIGKWLPAGTLKIIDRKKHIFKLAQGEYVAPEKIENIYIRSQPVAQIYVHGDSLKAFLVGIVVPDPEVMPSWAQKRGIEGTYADLCTNKDLKKAILEDMVRLGKESGLHSFEQVKAIHIHSDMFSVQNGLLTPTLKAKRPELREYFKKQIEELYSISM

SEQ ID NO: 25557 - protein, 662 aa, Homo sapiens
MQTQEILRILRLPELGDLGQFFRSLSATTLDSGGARRSVIGSGPQLLTHYYDDARTMYQVFRRGLSISGNGPCLGFRKPKQPYQWLSYQEVADRAEFLGSGLLQHNCKACTDQFIGVFAQNRPEWIIVELACYTYSMVVVPLYDTLGPGAIRYIINTADISTVIVDKPQKAVLLLEHVERKETPGLKLIILMDPFEEALKERGQKCGVVIKSMQAVEDCGQENHQAPVPPQPDDLSIVCFTSGTTGNPKGAMLTHGNVVADFSGFLKVTESQWAPTCADVHISYLPLAHMFERMVQSVVYCHGGRVGFFQGDIRLLSDDMKALCPTIFPVVPRLLNRMYDKIFSQANTPLKRWLLEFAAKRKQAEVRSGIIRNDSIWDELFFNKIQASLGGCVRMIVTGAAPASPTVLGFLRAALGCQVYEGYGQTECTAGCTFTTPGDWTSGHVGAPLPCNHIKLVDVEELNYWACKGEGEICVRGPNVFKGYLKDPDRTKEALDSDGWLHTGDIGKWLPAGTLKIIDRKKHIFKLAQGEYVAPEKIENIYIRSQPVAQIYVHGDSLKAFLVGIVVPDPEVMPSWAQKRGIEGTYADLCTNKDLKKAILEDMVRLGKESGLHSFEQVKAIHIHSDMFSVQNGLLTPTLKAKRPELREYFKKQIEELYSISM

SEQ ID NO: 25558 - protein, 2284 aa, Homo sapiens
MEIRLEILTSTGIKQKKPWPRVSWLGKEKEAVFLLDDKFINEINLLSGKIKKKIPSLQPFLKDVIVLTTSSNDAWLAGVLTTGELFLWNKDQDCLKTIPITEKPKEMIKATVASSLRLYLYVSGNGKRIVLITPSGCIFLWEYLELKNILSSKSLSLAGRWSQVIPEEAVLLPSTEDKEAVVNAVFIKNELFGDCCLCSFTFYSGECLKLTFLAIRWHENVFTSVRSLPYHVHWAQQDCHLCSLIPKCESVKSRGALISAFSRDGLTLAVTLNQKDPKATQVLFINTLNFVTLCGSLKGCSNKSPVVPATLIRSYWVGDISWTHDSLFLACMLKRGSLVLLTCQGELLTLITFGCSIEFGPAEFIPLHPLITYRPQQFTFQDSNNSVDSSASDSDPMRQRFSIKAHSRLPYLVISDGYMVTTLRFLDSLSPSVHMRSLLLDSTQRLEKIYQSVILSKPKGKGLNLRSLNSLRSSLLEHQGNESSADFTVPKFLQAEETINENAADFQDFEAEETNEGRHFPDNLCPFWNKRDDVLCSSMKEGRLEFASMFDTIHAKDDSEETDRTITELHSIQKSLLAAWTIGISKTVTEKNLMLNYIVVCITHFFYILQFIKCPFPKLDLVLSKSSRHNAWILCIFQLFHQCLSIHYWDIRYKQDVGHLIKLTSNTVKLLLTQQQKGQLFSEKLLACFYLLKMVADNLNGVYILQPEVISASADGSKITAQDSLVVPIFQMFQDSGFQKNWSWNSFFKIHPQVVNPVQQPGHRLLILWRILYKKTLWYQAQLNRRVPEADSQLTEKMTHEASTVKSLLCHLQANLQSTGDCLNQTLELKSINGEECFLLGSYEKSVQLWKKALQEIEEKGGRRTYFLQIRYYLSLLYCHLYSYNLNDAQGLCDQLAREILRWSQLPVKENKDFSGAAKSHFECGMVGGVHPEAAVRVVQSMARFMAAYFTNQQLCILPPHHVNVLPPLHIKTEQSFRLIPLQHSKVASVVRDQNLSNVWTVEYALELLFIGGLVPEAVWLAYKLGDWKTSVSIGVAFQLFCKRDSNFMRSKKKSLNLPLRMTPAQIFQEKLQCVLGQPASLEAKNEMGSKYKQFTDPIEEEDANLLFGSVQEVLKASVMADADILSETFQLLIDSAKDFSKRLWGLVPFGLYLPAPPLYCPQPAILSEEDGDDLLLKAEKNNRQKVSGILQRVLLLFRAAQCSFPVAQWYILQLRWARKVMQKIRMKGSLPSLSPFPQSLLNYCKGGIAFFRPGAAGDHKLDEVSIRAIGCFRELCALCWMLHVRDKLSYSCRQYQKARENVKGEKDLEVEFDSCMIEHCLSAVEWAYRMLPFSRFFNMEELIQDIILSLIGELPPIRKVAEIFVKAFPYPEDVRVPLRDKYHSLHQRLRHCVVKGPQTEEMMSVVMHSIQKVRVKALKRVQRNIGSFEVNIWEPIEEEKPDEAPGVDRYSLGTSLSRSTLTELGDSVVHSDADTFSEALSVEEKSRINIYQRNAPNHMELTSIHKPTDKRKMCNQKENPTKKEDHEKLSQNTLPVIGVWEFERDDDEYIKFLDLFLSYILERDLPYSRDADIPFLTSFSGKLREHELNSLLFDVHTTLKRHQSKTKSQNVFRAGSCFVVAPESYESEKSSSLNDEYGMHLENQKLSSSVLVNQGIKPFLQYPSNEVNKNEGMSGLFGLKQRSIYKIQDDTREKCLIQRSSNHIFWTPKSIKTRRCIFKAIQCNDINPQEDLPLALNTFGSIGRLLEWMIRWSNRRLLCDSGITESSSEYSPVIRVKTSTAAILTSLWLLEQPYFATYKAKNAIIKMVENRDTGCQIGPNIERESKSDAGGSVAVATPGGTEERNGQNKSCQNILNRMPTEAKNPDIKEINDDIISITHNTKKEFIDIDENLLEVEAFTEEEMDMHISDYEEDIEESVGGFRSPSLAICMMTLPQQLEEEFTEEVQCQREEPLETIMEEKSTEQKGMIEAFSHPGHTTPQSMQVDTSSEISSAQISTYKEKSSSVPLLISNGVNVASQPPAPTPQKTQRNEFTAQLPDCSESVRQMLQDEMFKLVQLQQINFMSLMQIVGSSFANLPDTQQLVQQSQSVHLGESQESNLRGCGDVEDSNKNLKERFFIKPQSMGENAREPRKNSPHCHEGTIPSGQNSTGNVQNVPHGSIPLCQLNGQPRKKGPIPSSQNLPSTSFYPAPAGNTHLYLLSTPSVVQKAPRLIPHAKTFSPGDGFPLLQFKSKQEFQPLFLHTGSIPQVPFRPLPQPREAWGLSDSFQPALPQRAAQTTPASHL

SEQ ID NO: 25559 - protein, 606 aa, Homo sapiens
MSRIEKMSILGVRSFGIEDKDKQIITFFSPLTILVGPNGAGKTTIIECLKYICTGDFPPGTKGNTFVHDPKVAQETDVRAQIRLQFRDVNGELIAVQRSMVCTQKSKKTEFKTLEGVITRTKHGEKVSLSSKCAEIDREMISSLGVSKAVLNNVIFCHQEDSNWPLSEGKALKQKFDEIFSATRYIKALETLRQVRQTQGQKVKEYQMELKYLKQYKEKACEIRDQITSKEAQLTSSKEIVKSYENELDPLKNRLKEIEHNLSKIMKLDNEIKALDSRKKQMEKDNSELEEKMEKVFQGTDEQLNDLYHNHQRTVREKERKLVDCHRELEKLNKESRLLNQEKSELLVEQGRLQLQADRHQEHIRARDSLIQSLATQLELDGFERGPFSERQIKNFHKLVRERQEGEAKTANQLMNDFAEKETLKQKQIDEIRDKKTGLGRIIELKSEILSKKQNELKNVKYELQQLEGSSDRILELDQELIKAERELSKAEKNSNVETLKMEVISLQNEKADLDRTLRKLDQEMEQLNHHTTTRTQMEMLTKDKADKDEQIRKIKSRHSDELTSLLGYFPNKKQLEDWLHSKSKEINQTRDRLAKLNPSKHLAEA

SEQ ID NO: 25560 - protein, 631 aa, Homo sapiens
MNGDSRAAVVTSPPPTTAPHKERYFDRVDENNPEYLRERNMAPDLRQDFNMMEQKKRVSMILQSPAFCEELESMIQEQFKKGKNPTGLLALQQIADFMTTNVPNVYPAAPQGGMAALNMSLGMVTPVNDLRGSDSIAYDKGEKLLRCKLAAFYRLADLFGWSQLIYNHITTRVNSEQEHFLIVPFGLLYSEVTASSLVKINLQGDIVDRGSTNLGVNQAGFTLHSAIYAARPDVKCVVHIHTPAGAAVSAMKCGLLPISPEALSLGEVAYHDYHGILVDEEEKVLIQKNLGPKSKVLILRNHGLVSVGESVEEAFYYIHNLVVACEIQVRTLASAGGPDNLVLLNPEKYKAKSRSPGSPVGEGTGSPPKWQIGEQEFEALMRMLDNLGYRTGYPYRYPALREKSKKYSDVEVPASVTGYSFASDGDSGTCSPLRHSFQKQQREKTRWLNSGRGDEASEEGQNGSSPKSKTKWTKEDGHRTSTSAVPNLFVPLNTNPKEVQEMRNKIREQNLQDIKTAGPQSQVLCGVVMDRSLVQGELVTASKAIIEKEYQPHVIVSTTGPNPFTTLTDRELEEYRREVERKQKGSEENLDEAREQKEKSPPDQPAVPHPPPSTPIKLEEGDGCAREYLLP

SEQ ID NO: 25561 - protein, 460 aa, Homo sapiens
MMEALGFLKLEVNGPMVTVALSVALLALLKWYSTSAFSRLEKLGLRHPKPSPFIGNLTFFRQGFWESQMELRKLYGPLCGYYLGRRMFIVISEPDMIKQVLVENFSNFTNRMASGLEFKSVADSVLFLRDKRWEEVRGALMSAFSPEKLNEMVPLISQACDLLLAHLKRYAESGDAFDIQRCYCNYTTDVVASVAFGTPVDSWQAPEDPFVKHCKRFFEFCIPRPILVLLLSFPSIMVPLARILPNKNRDELNGFFNKLIRNVIALRDQQAAEERRRDFLQMVLDARHSASPMGVQDFDIVRDVFSSTGCKPNPSRQHQPSPMARPLTVDEIVGQAFIFLIAGYEIITNTLSFATYLLATNPDCQEKLLREVDVFKEKHMAPEFCSLEEGLPYLDMVIAETLRMYPPAFRFTREAAQDCEVLGQRIPAGAVLEMAVGALHHDPEHWPSPETFNPERYRCS

SEQ ID NO: 25562 - protein, 1293 aa, Homo sapiens
MAMGDDKSFDDEESVDGNRPSSAASAFKVPAPKTSGNPANSARKPGSAGGPKVGGASKEGGAGAVDEDDFIKAFTDVPSIQIYSSRELEETLNKIREILSDDKHDWDQRANALKKIRSLLVAGAAQYDCFFQHLRLLDGALKLSAKDLRSQVVREACITVAHLSTVLGNKFDHGAEAIVPTLFNLVPNSAKVMATSGCAAIRFIIRHTHVPRLIPLITSNCTSKSVPVRRRSFEFLDLLLQEWQTHSLERHAAVLVETIKKGIHDADAEARVEARKTYMGLRNHFPGEAETLYNSLEPSYQKSLQTYLKSSGSVASLPQSDRSSSSSQESLNRPFSSKWSTANPSTVAGRVSAGSSKASSLPGSLQRSRSDIDVNAAAGAKAHHAAGQSVRSGRLGAGALNAGSYASLEDTSDKLDGTASEDGRVRAKLSAPLAGMGNAKADSRGRSRTKMVSQSQPGSRSGSPGRVLTTTALSTVSSGVQRVLVNSASAQKRSKIPRSQGCSREASPSRLSVARSSRIPRPSVSQGCSREASRESSRDTSPVRSFQPLASRHHSRSTGALYAPEVYGASGPGYGISQSSRLSSSVSAMRVLNTGSDVEEAVADALKKPARRRYESYGMHSDDDANSDASSACSERSYSSRNGSIPTYMRQTEDVAEVLNRCASSNWSERKEGLLGLQNLLKNQRTLSRVELKRLCEIFTRMFADPHGKVFSMFLETLVDFIQVHKDDLQDWLFVLLTQLLKKMGADLLGSVQAKVQKALDVTRESFPNDLQFNILMRFTVDQTQTPSLKVKVAILKYIETLAKQMDPGDFINSSETRLAVSRVITWTTEPKSSDVRKAAQSVLISLFELNTPEFTMLLGALPKTFQDGATKLLHNHLRNTGNGTQSSMGSPLTRPTPRSPANWSSPLTSPTNTSQNTLSPSAFDYDTENMNSEDIYSSLRGVTEAIQNFSFRSQEDMNEPLKRDSKKDDGDSMCGGPGMSDPRAGGDATDSSQTALDNKASLLHSMPTHSSPRSRDYNPYNYSDSISPFNKSALKEAMFDDDADQFPDDLSLDHSDLVAELLKELSNHNERVEERKIALYELMKLTQEESFSVWDEHFKTILLLLLETLGDKEPTIRALALKVLREILRHQPARFKNYAELTVMKTLEAHKDPHKEVVRSAEEAASVLATSISPEQCIKVLCPIIQTADYPINLAAIKMQTKVIERVSKETLNLLLPEIMPGLIQGYDNSESSVRKACVFCLVAVHAVIGDELKPHLSQLTGSKMKLLNLYIKRAQTGSGGADPTTDVSGQS

SEQ ID NO: 25563 - protein, 553 aa, Homo sapiens
MGELCRRDSALTALDEETLWEMMESHRHRIVRCICPSRLTPYLRQAKVLCQLDEEEVLHSPRLTNSAMRAGHLLDLLKTRGKNGAIAFLESLKFHNPDVYTLVTGLQPDVDFSNFSGLMETSKLTECLAGAIGSLQEELNQEKGQKEVLLRRCQQLQEHLGLAETRAEGLHQLEADHSRMKREVSAHFHEVLRLKDEMLSLSLHYSNALQEKELAASRCRSLQEELYLLKQELQRANMVSSCELELQEQSLRTASDQESGDEELNRLKEENEKLRSLTFSLAEKDILEQSLDEARGSRQELVERIHSLRERAVAAERQREQYWEEKEQTLLQFQKSKMACQLYREKVNALQAQVCELQKERDQAYSARDSAQREISQSLVEKDSLRRQVFELTDQVCELRTQLRQLQAEPPGVLKQEARTREPCPREKQRLVRMHAICPRDDSDCSLVSSTESQLLSDLSATSSRELVDSFRSSSPAPPSQQSLYKRVAEDFGEEPWSFSSCLEIPEGDPGALPGAKAGDPHLDYELLDTADLPQLESSLQPVSPGRLDVSER

SEQ ID NO: 25564 - protein, 325 aa, Homo sapiens
MAALMTPGTGAPPAPGDFSGEGSQGLPDPSPEPKQLPELIRMKRDGGRLSEADIRGFVAAVVNGSAQGAQIGAMLMAIRLRGMDLEETSVLTQALAQSGQQLEWPEAWRQQLVDKHSTGGVGDKVSLVLAPALAACGCKVPMISGRGLGHTGGTLDKLESIPGFNVIQSPEQMQVLLDQAGCCIVGQSEQLVPADGILYAARDVTATVDSLPLITGWRGSQPRASGRGSADRHGQAPGSLRGPRPGGGGGAALHGRRRPARLKGPGHHARGRPALAQRTRGDSGPGRCPGGRGAGRRLGPWPLRADAGGAGRGSRSGPSPVLGKS

SEQ ID NO: 25565 - protein, 898 aa, Homo sapiens
VDFSSVVCLPPSVIAVNGLDGGGAGENDDEPVLVSLSAAPSPQSEAVANELQELSLQPELTLGLHPGRNPNLPPLSERKNVLQLKLQQRRTREELVSQGIMPPLKSPAAFHEQRRSLERARTEDYLKRKIRSRPERSELVRMHILEETSAEPSLQAKQLKLKRARLADDLNEKIAQRPGPMELVEKNILPVESSLKEAIIVGQVNYPKVADSSSFDEDSSDALSPEQPASHESQGSVPSPLEARVSEPLLSATSASPTQVVSQLPMGRDSREMLFLAEQPPLPPPPLLPPSLTNGTTIPTAKSTPTLIKQSQPKSASEKSQRSKKAKELKPKVKKLKYHQYIPPDQKQDRGAPPMDSSYAKILQQQQLFLQLQILNQQQQQHHNYQAILPAPPKSAGEALGSSGTPPVRSLSTTNSSSSSGAPGPCGLARQNSTSLTGKPGALPANLDDMKVAELKQELKLRSLPVSGTKTELIERLRAYQDQISPVPGAPKAPAATSILHKAGEVVVAFPAARLSTGPALVAAGLAPAEVVVATVASSGVVKFGSTGSTPPVSPTPSERSLLSTGDENSTPGDTFGEMVTSPLTQLTLQASPLQILVKEEGPRAGSCCLSPGGRAELEGRDKDQMLQEKDKQIEALTRMLRQKQQLVERLKLQLEQEKRAQQPAPAPAPLGTPVKQENSFSSCQLSQQPLGPAHPFNPSLAAPATNHIDPCAVAPGPPSVVVKQEALQPEPEPVPAPQLLLGPQGPSLIKGVAPPTLITDSTGTHLVLTVTNKNADSPGLSSGSPQQPSSQPGSPAPAPSAQMDLEHPLQPLFGTPTSLLKKEPPGYEEAMSQQPKQQENGSSSQQMDDLFDILIQSGGNPRNFSRFQGAAIPAREGEAIPEDSLWVPPGSTAITFC

SEQ ID NO: 25566 - protein, 896 aa, Homo sapiens
MKGKERSPVKAKRSRGGEDSTSRGERSKKLGGSGGSNGSSSGKTDSGGGSRRSLHLDKSSSRGGSREYDTGGGSSSSRLHSYSSPSTKNSSGGGESRSSSRGGGGESRSSGAASSAPGGGDGAEYKTLKISELGSQLSDEAVEDGLFHEFKRFGDVSVKISHLSGSGSGDERVAFVNFRRPEDARAAKHARGRLVLYDRPLKIEAVYVSRRRSRSPLDKDTYPPSASVVGASVGGHRHPPGGGGGQRSLSPGGAALGYRDYRLQQLALGRLPPPPPPPLPRDLERERDYPFYERVRPAYSLEPRVGAGAGAAPFREVDEISPEDDQRANRTLFLGNLDITVTESDLRRAFDRFGVITEVDIKRPSRGQTSTYGFLKFENLDMSHRAKLAMSGKIIIRNPIKIGYGKATPTTRLWVGGLGPWVPLAALAREFDRFGTIRTIDYRKGDSWAYIQYESLDAAHAAWTHMRGFPLGGPDRRLRVDFADTEHRYQQQYLQPLPLTHYELVTDAFGHRAPDPLRGARDRTPPLLYRDRDRDLYPDSDWVPPPPPVRERSTRTAATSVPAYEPLDSLDRRRDGWSLDRDRGDRDLPSSRDQPRKRRLPEESGGRHLDRSPESDRPRKRHCAPSPDRSPELSSSRDRYNSDNDRSSRLLLERPSPIRDRRGSLEKSQGDKRDRKNSASAERDRKHRTTAPTEGKSPLKKEDRSDGSAPSTSTASSKLKSPSQKQDGGTAPVASASPKLCLAWQGMLLLKNSNFPSNMHLLQGDLQVASSLLVEGSTGGKVAQLKITQRLRLDQPKLDEVTRRIKVAGPNGYAILLAVPGSSDSRSSSSSAASDTATSTQRPLRNLVSYLKQKQAAGVISLPVGGNKDKENTGVLHAFPPSKLVEQRMKIWNSKL

SEQ ID NO: 25567 - protein, 308 aa, Homo sapiens
MPNVAETERSNDSGNGEHKSERKSPEENLQGAVKSFCTSASGAPLGPKGDGHYPWSCPVTHTREKIYAICSDYAFLNQATSIYKTPNPSRSPCLPDSTSLSAGNNSSRYIGIPTSTSEIIYNEENSLENLSNSLGKLPLAWEIDKSEFDGVTTNSKHKSGNAKKQVSKRKTSDKKGRYQKECPQHSPLEDIKQRKVLDLRRWYCISRPQYKTSCGISSLISCWNFLYSTMGAGNLPPITQEEALHILGFQPPFEDIRFGPFTGNTTLMRWFRQINDHFHVKGCSYVLYKPHGKNKTAGETDGQILLLI

SEQ ID NO: 25568 - protein, 546 aa, Homo sapiens
GLLPRRRRCFPARAPLLRVALCLLCWTPAAVRAVPELGLWLETVNDKSGPLIFRKTMFNSTDIKLSVKSFHCSGPVKFTIVWHLKYHTCHNEHSNLEELFQKHKLSVDEDFCHYLKNDNCWTTKNENLDCNSDSQVFPSLNNKELINIRNVSNQERSMDVVARTQKDGFHIFIVSIKTENTDASWNLNVSLSMIGPHGYISASDWPLMIFYMVMCIVYILYGILWLTWSACYWKDILRIQFWIAAVIFLGMLEKAVFYSEYQNISNTGLSTQGLLIFAELISAIKRTLARLLVIIVSLGYGIVKPRLGTVMHRVIGLGLLYLIFAAVEGVMRVIGVSDSDLVLLASLPLSLLDSGLCWWIFISLAQTMKTLRLRKNTVKFSLYRHFKNTLIFAVLASIVFMGWTTKTFRIAKCQSDWMERWVDDAFWSFLFSLILIVIMFLWRPSANNQRYAFMPLIDDSDDEIEEFMVTSENLTEGIKLRASKSVSNGTAKPATSENFDEDLKWVEENIPSSFTDVALPVLVDSDEEIMTRSEMAEKMFSSEKIM

SEQ ID NO: 25569 - protein, 764 aa, Homo sapiens
MNFIKDNSRALIQRMGMTVIKQITDDLFVWNVLNREEVNIICCEKVEQDAARGIIHMILKKGSESCNLFLKSLKEWNYPLFQDLNGQSLFHQTSEGDLDDLAQDLKDLYHTPSFLNFYPLGEDIDIIFNLKSTFTEPVLWRKDQHHHRVEQLTLNGLLQALQSPCIIEGESGKGKSTLLQRIAMLWGSGKCKALTKFKFVFFLRLSRAQGGLFETLCDQLLDIPGTIRKQTFMAMLLKLRQRVLFLLDGYNEFKPQNCPEIEALIKENHRFKNMVIVTTTTECLRHIRQFGALTAEVGDMTEDSAQALIREVLIKELAEGLLLQIQKSRCLRNLMKTPLFVVITCAIQMGESEFHSHTQTTLFHTFYDLLIQKNKHKHKGVAASDFIRSLDHCGDLALEGVFSHKFDFELQDVSSVNEDVLLTTGLLCKYTAQRFKPKYKFFHKSFQEYTAGRRLSSLLTSHEPEEVTKGNGYLQKMVSISDITSTYSSLLRYTCGSSVEATRAVMKHLAAVYQHGCLLGLSIAKRPLWRQESLQSVKNTTEQEILKAININSFVECGIHLYQESTSKSALSQEFEAFFQGKSLYINSGNIPDYLFDFFEHLPNCASALDFIKLDFYGGAMASWEKAAEDTGGIHMEEAPETYIPSRAVSLFFNWKQEFRTLEVTLRDFSKLNKQDIRYLGKIFSSATSLRLQIKRCAGVAGSLSLVLSTCKNIYSLMVEASPLTIEDERHITSVTNLKTLSIHDLQNQRLPESNLFSFDRWSD

SEQ ID NO: 25570 - protein, 427 aa, Homo sapiens
KTDYTRIKSLSINVNLGNKEVMDTTKSQVRDYPKHNGQISDPQRDQKVTPEQTTQHTVSLNELWNKYRERQRQQRQPELGDRKELSLVDRLDRLAKILQNPITHSLQVSESTHDDSRGERSVKEWSGRQQQRNKLQKKKRFKSLEKSHKNTGELKKSKVLSHHRAGRSNQIKIEQIKFDKYILSKQPGFNYISNTSSDCRPSEESELLTDTTTNILSGTTSTVESDILTQTDREVALHERSSSVSTIDTARLIQAFGHERVCLSPRRIKLYSSITNQQRRYLEKRSKHSKKVLNTGHPLVTSEHTRRRHIQVANHVISSDSISSSASSFLSSNSTFCNKQNVHMLNKGIQAGNLEIVNGAKKHTRDVGITFPTPSSSEAKLEENSDVTSWSEEKREEKMLFTGYPEDRKLKKNKKNSHEGIASVSQT

SEQ ID NO: 25571 - protein, 171 aa, Homo sapiens
MAPKHKSSDAGNLDRPKRSRKVLPLSEKVKVLDLIRKDKKSYAEVAKIYGKNESSIREIVKKEKEIRASFAVSPPTAKVTATVRDKCLVKMEQALHLWVEEMNRKRVPIDSNMLRQKALSLYQDFSKGCSETDTKPFTASKGWLHRFRHRFSHHYKKKKGGSPEVGSSRSA

SEQ ID NO: 25572 - protein, 635 aa, Homo sapiens
MAQKGQLSDDEKFLFVDKNFINSPVAQADWAAKRLVWVPSEKQGFEAASIKEEKGDEVVVELVENGKKVTVGKDDIQKMNPPKFSKVEDMAELTCLNEASVLHNLRERYFSGLIYTYSGLFCVVVNPYKHLPIYSEKIVDMYKGKKRHEMPPHIYAIADTAYRSMLQDREDQSILCTGESGAGKTENTKKVIQYLAVVASSHKGKKDTSITGELEKQLLQANPILEAFGNAKTVKNDNSSRFGKFIRINFDVTGYIVGANIETYLLEKSRAIRQARDERTFHIFYYMIAGAKEKMRSDLLLEGFNNYTFLSNGFVPIPAAQDDEMFQETVEAMAIMGFSEEEQLSILKVVSSVLQLGNIVFKKERNTDQASMPDNTAAQKVCHLMGINVTDFTRSILTPRIKVGRDVVQKAQTKEQADFAVEALAKATYERLFRWILTRVNKALDKTHRQGASFLGILDIAGFEIFEVNSFEQLCINYTNEKLQQLFNHTMFILEQEEYQREGIEWNFIDFGLDLQPCIELIERPNNPPGVLALLDEECWFPKATDKSFVEKLCTEQGSHPKFQKPKQLKDKTEFSIIHYAGKVDYNASAWLTKNMDPLNDNVTSLLNASSDKFVADLWKDGALRISPIDNTWKP

SEQ ID NO: 25573 - protein, 631 aa, Homo sapiens
MLKFRTVHGGLRLLGIRRTSTAPAASPNVRRLEYKPIKKVMVANRGEIAIRVFRACTELGIRTVAIYSEQDTGQMHRQKADEAYLIGRGLAPVQAYLHIPDIIKVAKENNVDAVHPGYGFLSERADFAQACQDAGVRFIGPSPEVVRKMGDKVEARAIAIAAGVPVVPGTDAPITSLHEAHEFSNTYGFPIIFKAAYGGGGRGMRVVHSYEELEENYTRAYSEALAAFGNGALFVEKFIEKPRHIEVQILGDQYGNILHLYERDCSIQRRHQKVVEIAPAAHLDPQLRTRLTSDSVKLAKQVGYENAGTVEFLVDRHGKHYFIEVNSRLQVEHTVTEEITDVDLVHAQIHVAEGRSLPDLGLRQENIRINGCAIQCRVTTEDPARSFQPDTGRIEVFRSGEGMGIRLDNASAFQGAVISPHYDSLLVKVIAHGKDHPTAATKMSRALAEFRVRGVKTNIAFLQNVLNNQQFLAGTVDTQFIDENPELFQLRPAQNRAQKLLHYLGHVMVNGPTTPIPVKASPSPTDPVVPAVPIGPPPAGFRDILLREGPEGFARAVRNHPGLLLMDTTFRDAHQSLLATRVRTHDLKKIAPYVAHNFSKLFSMENWGDAAAGGQCCGLHQLPRQRGLQVL

SEQ ID NO: 25574 - protein, 345 aa, Homo sapiens
MMIISTMEPQVSNGPTSNTSNGPSSNNRNCPSPMQTGATTDDSKTNLIVNYLPQNMTQEEFRSLFGSIGEIESCKLVRDKITGQSLGYGFVNYIDPKDAEKAINTLNGLRLQTKTIKVSYARPSSASIRDANLYVSGLPKTMTQKELEQLFSQYGRIITSRILVDQVTGVSRGVGFIRFDKRIEAEEAIKGLNGQKPSGATEPITVKFANNPSQKSSQALLSQLYQSPNRRYPGPLHHQAQRFRLDNLLNMAYGVKRFSPITIDGMTSLVGMNIPGHTGTGWCIFVYNLSPDSDESVLWQLFGPFGAVNNVKVIRDFNTNKCKGFGFVTMTNYDEAAMAIASLNG

SEQ ID NO: 25575 - protein, 317 aa, Homo sapiens
MRPDRAEAPGPPAMAAGGPGAGSAAPVSSTSSLPLAALNMRVRRRLSLFLNVRTQVAADWTALAEEMDFEYLEIRQLETQADPTGRLLDAWQGRPGASVGRLLELLTKLGRDDVLLELGPSIEEDCQKYILKQQQEEAEKPLQVAAVDSSVPRTAELAGITTLDDPLGHMPERFDAFICYCPSDIQFVQEMIRQLEQTNYRLKLCVSDRDVLPGTCVWSIASELIEKRLARRPRGGCRRMVVVVSDDYLQSKECDFQTKFALSLSPGAHQKRLIPIKYKAMKKEFPSILRFITVCDYTNPCTKSWFWTRLAKALSLP

SEQ ID NO: 25576 - protein, 913 aa, Homo sapiens
MKGKERSPVKAKRSRGGEDSTSRGERSKKLGGSGGSNGSSSGKTDSGGGSRRSLHLDKSSSRGGSREYDTGGGSSSSRLHSYSSPSTKNSSGGGESRSSSRGGGGESRSSGAASSAPGGGDGAEYKTLKISELGSQLSDEAVEDGLFHEFKRFGDVSVKISHLSGSGSGDERVAFVNFRRPEDARAAKHARGRLVLYDRPLKIEAVYVSRRRSRSPLDKDTYPPSASVVGASVGGHRHPPGGGGGQRSLSPGGAALGYRDYRLQQLALGRLPPPPPPPLPRDLERERDYPFYERVRPAYSLEPRVGAGAGAAPFREVDEISPEDDQRANRTLFLGNLDITVTESDLRRAFDRFGVITEVDIKRPSRGQTSTYGFLKFENLDMSHRAKLAMSGKIIIRNPIKIGYGKATPTTRLWVGGLGPWVPLAALAREFDRFGTIRTIDYRKGDSWAYIQYESLDAAHAAWTHMRGFPLGGPDRRLRVDFADTEHRYQQQYLQPLPLTHYELVTDAFGHRAPDPLRGARDRTPPLLYRDRDRDLYPDSDWVPPPPPVRERSTRTAATSVPAYEPLDSLDRRRDGWSLDRDRGDRDLPSSRDQPRKRRLPEESGGRHLDRSPESDRPRKRHCAPSPDRSPELSSSRDRYNSDNDRSSRLLLERPSPIRDRRGSLEKSQGDKRDRKNSASAERDRKHRTTAPTEGKSPLKKEDRSDGSAPSTSTASSKLKSPSQKQDGGTAPVASASPKLCLAWQGMLLLKNSNFPSNMHLLQGDLQVASSLLVEGSTGGKVAQLKITQRLRLDQPKLDEVTRRIKVAGPNGYAILLAVPGSSDSRSSSSSAASDTATSTQRPLRNLVSYLKQKQAAGVISLPVGGNKDKENTGVLHAFPPCEFSQQFLDSPAKALAKSEEDYLVMIIVRGAS

SEQ ID NO: 25577 - protein, 1010 aa, Homo sapiens
MLLTLIILLPVVSKFSFVSLSAPQHWSCPEGTLAGNGNSTCVGPAPFLIFSHGNSIFRIDTEGTNYEQLVVDAGVSVIMDFHYNEKRIYWVDLERQLLQRVFLNGSRQERVCNIEKNVSGMAINWINEEVIWSNQQEGIITVTDMKGNNSHILLSALKYPANVAVDPVERFIFWSSEVAGSLYRADLDGVGVKALLETSEKITAVSLDVLDKRLFWIQYNREGSNSLICSCDYDGGSVHISKHPTQHNLFAMSLFGDRIFYSTWKMKTIWIANKHTGKDMVRINLHSSFVPLGELKVVHPLAQPKAEDDTWEPDVNECAFWNHGCTLGCKNTPGSYYCTCPVGFVLLPDGKRCHQLVSCPRNVSECSHDCVLTSEGPLCFCPEGSVLERDGKTCSGCSSPDNGGCSQLCVPLSPVSWECDCFPGYDLQLDEKSCAASGPQPFLLFANSQDIRHMHFDGTDYGTLLSQQMGMVYALDHDPVENKIYFAHTALKWIERANMDGSQRERLIEEGVDVPEGLAVDWIGRRFYWTDRGKSLIGRSDLNGKRSKIITKENISQPRGIAVHPMAKRLFWTDTGINPRIESSSLQGLGRLVIASSDLIWPSGITIDFLTDKLYWCDAKQSVIEMANLDGSKRRRLTQNDVGHPFAVAVFEDYVWFSDWAMPSVMRVNKRTGKDRVRLQGSMLKPSSLVVVHPLAKPGADPCLYQNGGCEHICKKRLGTAWCSCREGFMKASDGKTCLALDGHQLLAGGEVDLKNQVTPLDILSKTRVSEDNITESQHMLVAEIMVSDIDECQLGEHSCGENASCTNTEGGYTCMCAGRLSEPGLICPDSTPPPHLREDDHHYSVRNSDSECPLSHDGYCLHDGVCMYIEALDKYACNCVVGYIGERCQYRDLKWWELRHAGHGQQQKVIVVAVCVVVLVMLLLLSLWGAHYYRTQKLLSKNPKNPYEESSRDVRSRRPADTEDGMSSCPQPWGQCNQLHGGRSPSYVEWAQSKAAGFQYPVIRAPVPR

SEQ ID NO: 25578 - protein, 379 aa, Homo sapiens
MFPPSGSTGLIPPSHFQARPLSTLPRMAPTWLSDIPLVQPPGHQDVSERRLDTQRPQVTMWERDVSSDRQEPGRRGRSWGLEGSQALSQQAEVIVRQLQELRRLEEEVRLLRETSLQQKMRLEAQAMELEALARAEKAGRAEAEGLRAALAGAEVVRKNLEEGSQRELEEVQRLHQEQLSSLTQAHEEALSSLTSKAEGLEKSLSSLETRRAGEAKELAEAQREAELLRKQLSKTQEDLEAQVTLVENLRKYVGEQVPSEVHSQTWELERQKLLETMQHLQEDRDSLHATAELLQVRVQSLTHILALQEEELTRKVQPSDSLEPEFTRKCQSLLNRWREKVFALMVQLKAQELEHSDSVKQLKGQRQAFTMLVRLILNP

SEQ ID NO: 25579 - protein, 1513 aa, Homo sapiens
MRILKRFLACIQLLCVCRLDWANGYYRQQRKLVEEIGWSYTGALNQKNWGKKYPTCNSPKQSPINIDEDLTQVNVNLKKLKFQGWDKTSLENTFIHNTGKTVEINLTNDYRVSGGVSEMVFKASKITFHWGKCNMSSDGSEHSLEGQKFPLEMQIYCFDADRFSSFEEAVKGKGKLRALSILFEVGTEENLDFKAIIDGVESVSRFGKQAALDPFILLNLLPNSTDKYYIYNGSLTSPPCTDTVDWIVFKDTVSISESQLAVFCEVLTMQQSGYVMLMDYLQNNFREQQYKFSRQVFSSYTGKEEIHEAVCSSEPENVQADPENYTSLLVTWERPRVVYDTMIEKFAVLYQQLDGEDQTKHEFLTDGYQDLGAILNNLLPNMSYVLQIVAICTNGLYGKYSDQLIVDMPTDNPELDLFPELIGTEEIIKEEEEGKDIEEGAIVNPGRDSATNQIRKKEPQISTTTHYNRIGTKYNEAKTNRSPTRGSEFSGKGDVPNTSLNSTSQPVTKLATEKDISLTSQTVTELPPHTVEGTSASLNDGSKTVLRSPHMNLSGTAESLNTVSITEYEEESLLTSFKLDTGAEDSSGSSPATSAIPFISENISQGYIFSSENPETITYDVLIPESARNASEDSTSSGSEESLKDPSMEGNVWFPSSTDITAQPDVGSGRESFLQTNYTEIRVDESEKTTKSFSAGPVMSQGPSVTDLEMPHYSTFAYFPTEVTPHAFTPSSRQQDLVSTVNVVYSQTTQPVYNAVPSDPILVETPKVDKISSTMLHLIVSNSASSENMLHSTSVPVFDVSPTSHMHSASLQEASNSSHESRIGLAEGLESEKKAVIPLVIVSALTFICLVVLVGILIYWRKCFQTAHFYLEDSTSPRVISTPPTPIFPISDDVGAIPIKHFPKHVADLHASSGFTEEFETLKEFYQEVQSCTVDLGITADSSNHPDNKHKNRYINIVAYDHSRVKLAQLAEKDGKLTDYINANYVDGYNRPKAYIAAQGPLKSTAEDFWRMIWEHNVEVIVMITNLVEKGRRKCDQYWPADGSEEYGNFLVTQKSVQVLAYYTVRNFTLRNTKIKKGSQKGRPSGRVVTQYHYTQWPDMGVPEYSLPVLTFVRKAAYAKRHAVGPVVVHCSAGVGRTGTYIVLDSMLQQIQHEGTVNIFGFLKHIRSQRNYLVQTEEQYVFIHDTLVEAILSKETEVLDSHIHAYVNALLIPGPAGKTKLEKQFQLLSQSNIQQSDYSAALKQCNREKNRTSSIIPVERSRVGISSLSGEGTDYINASYIMGYYQSNEFIITQHPLLHTIKDFWRMIWDHNAQLVVMIPDGQNMAEDEFVYWPNKDEPINCESFKVTLMAEEHKCLSNEEKLIIQDFILEATQDDYVLEVRHFQCPKWPNPDSPISKTFELISVIKEEAANRDGPMIVHDEHGGVTAGTFCALTTLMHQLEKENSVDVYQVAKMINLMRPGVFADIEQYQFLYKVILSLVSTRQEENPSTSLDSNGAALPDGNIAESLESLV

SEQ ID NO: 25580 - protein, 650 aa, Homo sapiens
MGPASPAARGLSRRPGQPPLPLLLPLLLLLLRAQPAIGSLAGGSPGAAEAPGSAQVAGLCGRLTLHRDLRTGRWEPDPQRSRRCLRDPQRVLEYCRQMYPELQIARVEQATQAIPMERWCGGSRSGSCAHPHHQVVPFRCLPGEFVSEALLVPEGCRFLHQERMDQCESSTRRHQEAQEACSSQGLILHGSGMLLPCGSDRFRGVEYVCCPPPGTPDPSGTAVGDPSTRSWPPGSRVEGAEDEEEEESFPQPVDDYFVEPPQAEEEEETVPPPSSHTLAVVGKVTPTPRPTDGVDIYFGMPGEISEHEGFLRAKMDLEERRMRQINEVMREWAMADNQSKNLPKADRQALNEHFQSILQTLEEQVSGERQRLVETHATRVIALINDQRRAALEGFLAALQADPPQAERVLLALRRYLRAEQKEQRHTLRHYQHVAAVDPEKAQQMRFQVHTHLQVIEERVNQSLGLLDQNPHLAQELRPQIQELLHSEHLGPSELEAPAPGGSSEDKGGLQPPDSKDDTPMTLPKGSTEQDAASPEKEKMNPLEQYERKVNASVPRGFPFHSSEIQRDELAPAGTGVSREAVSGLLIMGAGGGSLIVLSMLLLRRKKPYGAISHGVVEVDPMLTLEEQQLRELQRHGYENPTYRFLEERP

SEQ ID NO: 25581 - protein, 461 aa, Homo sapiens
MSERKEGRGKGKGKKKERGSGKKPESAAGSQSPVTAVFWAIYWKNRVPIPYMLAASTGVCFPAGPHSPNSLTLPPRLKEMKSQESAAGSKLVLRCETSSEYSSLRFKWFKNGNELNRKNKPQNIKIQKKPGKSELRINKASLADSGEYMCKVISKLGNDSASANITIVESNEIITGMPASTEGAYVSSESPIRISVSTEGANTSSSTSTSTTGTSHLVKCAEKEKTFCVNGGECFMVKDLSNPSRYLCKCQPGFTGARCTENVPMKVQNQEKAEELYQKRVLTITGICIALLVVGIMCVVAYCKTKKQRKKLHDRLRQSLRSERNNMMNIANGPHHPNPPPENVQLVNQYVSKNVISSEHIVEREAETSFSTSHYTSTAHHSTTVTQTPSHSWSNGHTESILSESHSVIVMSSVENSRHSSPTGGPRGRLNGTGGPRECNSFLRHARETPDSYRDSPHSER

SEQ ID NO: 25582 - protein, 827 aa, Homo sapiens
MSPEKQHREEDEVDSVLLSASKILNSSEGVKESGCSDTEYGCIAESENQIQPQSALKVLQQQLESFQALRMQTLQNVSMVQSEISEILNKSIIEVENPQFSSEKNLVFGTRIEKDLPTENQEENLSMEKSHHFEDSKTLHSVEEKLSGDSVNSLPQSVNVPSQIHSEDTLTLRTSTDNLSSNIIIHPSENSDILKNYNNFYRFLPTAPPNVMSQADTVILDKSKITVPFLKHGFCENLDDICHSIKQMKEELQKSHDGEVALTNELQTLQTDPDVHRNGKYDMSPIHQDKMNFIKEENLDGNLNEDIKSKRISELEALVKKLLPFRETVSKFHVHFCRKCKKLSKSEMHRGKKNEKNNKEIPITGKNITDLKFHSRVPRYTLSFLDQTKHEMKDKERQPFLVKQGSIISENEKTSKVNSVTEQCVAKIQYLQNYLKESVQIQKKVMELESENLNLKSKMKPLIFTTQSLIQKVETYEKQLKNLVEEKSTIQSKLSKTEEYSKECLKEFKKIISKYNVLQGQNKTLEEKNIQLSLEKQQMMEALDQLKSKEHKTQSDMAIVNNENNRMSIEMEAMKTNILLIQDEKEMLEKKTHQLLKEKSSLGNELKESQLEIIQLKEKERLAKTEQETLLQIIETVKDEKLNLETTLQESTAARQIMEREIENIQTYQSTAEENFLQEIKNAKSEASIYKNSLSEIGKECEMLSKMVMETKTDNQILKEELKKHSQENIKFENSISRLTEDKILLENYVRSIENERDTLEFEMRHLQREYLSLSDKICNQHNDPSKTTYISRREKFHFDNYTHEDTSSPQSRPLASDLKDLSLEQM

SEQ ID NO: 25583 - protein, 2347 aa, Homo sapiens
MRILKRFLACIQLLCVCRLDWANGYYRQQRKLVEEIGWSYTGALNQKNWGKKYPTCNSPKQSPINIDEDLTQVNVNLKKLKFQGWDKTSLENTFIHNTGKTVEINLTNDYRVSGGVSEMVFKASKITFHWGKCNMSSDGSEHSLEGQKFPLEMQIYCFDADRFSSFEEAVKGKGKLRALSILFEVGTEENLDFKAIIDGVESVSRFGKQAALDPFILLNLLPNSTDKYYIYNGSLTSPPCTDTVDWIVFKDTVSISESQLAVFCEVLTMQQSGYVMLMDYLQNNFREQQYKFSRQVFSSYTGKEEIHEAVCSSEPENVQADPENYTSLLVTWERPRVVYDTMIEKFAVLYQQLDGEDQTKHEFLTDGYQDLGAILNNLLPNMSYVLQIVAICTNGLYGKYSDQLIVDMPTDNPELDLFPELIGTEEIIKEEEEGKDIEEGAIVNPGRDSATNQIRKKEPQISTTTHYNRIGTKYNEAKTNRSPTRGSEFSGKGDVPNTSLNSTSQPVTKLATEKDISLTSQTVTELPPHTVEGTSASLNDGSKTVLRSPHMNLSGTAESLNTVSITEYEEESLLTSFKLDTGAEDSSGSSPATSAIPFISENISQGYIFSSENPETITYDVLIPESARNASEDSTSSGSEESLKDPSMEGNVWFPSSTDITAQPDVGSGRESFLQTNYTEIRVDESEKTTKSFSAGPVMSQGPSVTDLEMPHYSTFAYFPTEVTPHAFTPSSRQQDLVSTVNVVYSQTTQPVYNGETPLQPSYSSEVFPLVTPLLLDNQILNTTPAASSSDSALHATPVFPSVDVSFESILSSYDGAPLLPFSSASFSSELFRHLHTVSQILPQVTSATESDKVPLHASLPVAGGDLLLEPSLAQYSDVLSTTHAASETLEFGSESGVLYKTLMFSQVEPPSSDAMMHARSSGPEPSYALSDNEGSQHIFTVSYSSAIPVHDSVGVTYQGSLFSGPSHIPIPKSSLITPTASLLQPTHALSGDGEWSGASSDSEFLLPDTDGLTALNISSPVSVAEFTYTTSVFGDDNKALSKSEIIYGNETELQIPSFNEMVYPSESTVMPNMYDNVNKLNASLQETSVSISSTKGMFPGSLAHTTTKVFDHEISQVPENNFSVQPTHTVSQASGDTSLKPVLSANSEPASSDPASSEMLSPSTQLLFYETSASFSTEVLLQPSFQASDVDTLLKTVLPAVPSDPILVETPKVDKISSTMLHLIVSNSASSENMLHSTSVPVFDVSPTSHMHSASLQGLTISYASEKYEPVLLKSESSHQVVPSLYSNDELFQTANLEINQAHPPKGRHVFATPVLSIDEPLNTLINKLIHSDEILTSTKSSVTGKVFAGIPTVASDTFVSTDHSVPIGNGHVAITAVSPHRDGSVTSTKLLFPSKATSELSHSAKSDAGLVGGGEDGDTDDDGDDDDDDRGSDGLSIHKCMSCSSYRESQEKVMNDSDTHENSLMDQNNPISYSLSENSEEDNRVTSVSSDSQTGMDRSPGKSPSANGLSQKHNDGKEENDIQTGSALLPLSPESKAWAVLTSDEESGSGQGTSDSLNENETSTDFSFADTNEKDADGILAAGDSEITPGFPQSPTSSVTSENSEVFHVSEAEASNSSHESRIGLAEGLESEKKAVIPLVIVSALTFICLVVLVGILIYWRKCFQTAHFYLEDSTSPRVISTPPTPIFPISDDVGAIPIKHFPKHVADLHASSGFTEEFEEVQSCTVDLGITADSSNHPDNKHKNRYINIVAYDHSRVKLAQLAEKDGKLTDYINANYVDGYNRPKAYIAAQGPLKSTAEDFWRMIWEHNVEVIVMITNLVEKGRRKCDQYWPADGSEEYGNFLVTQKSVQVLAYYTVRNFTLRNTKIKKGSQKGRPSGRVVTQYHYTQWPDMGVPEYSLPVLTFVRKAAYAKRHAVGPVVVHCSAGVGRTGTYIVLDSMLQQIQHEGTVNIFGFLKHIRSQRNYLVQTEEQYVFIHDTLVEAILSKETEVLDSHIHAYVNALLIPGPAGKTKLEKQFQGLTLSPRLECRGTISAHCNLPLPGLTDPPTSASRVARTILLSQSNIQQSDYSAALKQCNREKNRTSSIIPVERSRVGISSLSGEGTDYINASYIMGYYQSNEFIITQHPLLHTIKDFWRMIWDHNAQLVVMIPDGQNMAEDEFVYWPNKDEPINCESFKVTLMAEEHKCLSNEEKLIIQDFILEATQDDYVLEVRHFQCPKWPNPDSPISKTFELISVIKEEAANRDGPMIVHDEHGGVTAGTFCALTTLMHQLEKENSVDVYQVAKMINLMRPGVFADIEQYQFLYKVILSLVSTRQEENPSTSLDSNGAALPDGNIAESLESLV

SEQ ID NO: 25584 - protein, 1346 aa, Homo sapiens
INLGSELIAACGEPDKPIVKKSIDELNSAWDSLNKAWKDRIDKLEEAMQAAVQYQDGLQAVFDWVDIAGGKLASMSPIGTDLETVKQQIEELKQFKSEAYQQQIEMERLNHQAELLLKKVTEESDKHTVQDPLMELKLIWDSLEERIINRQHKLEGALLALGQFQHALDELLAWLTHTEGLLSEQKPVGGDPKAIEIELAKHHVLQNDVLAHQSTVEAVNKAGNDLIESSAGEEASNLQNKLEVLNQRWQNVLEKTEQRKQQLDGALRQAKGFHGEIEDLQQWLTDTERHLLASKPLGGLPETAKEQLNVHMEVCAAFEAKEETYKSLMQKGQQMLARCPKSAETNIDQDINNLKEKWESVETKLNERKTKLEEALNLAMEFHNSLQDFINWLTQAEQTLNVASRPSLILDTVLFQIDEHKVFANEVNSHREQIIELDKTGTHLKYFSQKQDVVLIKNLLISVQSRWEKVVQRLVERGRSLDDARKRAKQFHEAWSKLMEWLEESEKSLDSELEIANDPDKIKTQLAQHKEFQKSLGAKHSVYDTTNRTGRSLKEKTSLADDNLKLDDMLSELRDKWDTICGKSVERQNKLEEALLFSGQFTDALQALIDWLYRVEPQLAEDQPVHGDIDLVMNLIDNHKAFQKELGKRTSSVQALKRSARELIEGSRDDSSWVKVQMQELSTRWETVCALSISKQTRLEAALRQAEEFHSVVHALLEWLAEAEQTLRFHGVLPDDEDALRTLIDQHKEFMKKLEEKRAELNKATTMGDTVLAICHPDSITTIKHWITIIRARFEEVLAWAKQHQQRLASALAGLIAKQELLEALLAWLQWAETTLTDKDKEVIPQEIEEVKALIAEHQTFMEEMTRKQPDVDKVTKTYKRRAADPSSLQSHIPVLDKGRAGRKRFPASSLYPSGSQTQIETKNPRVNLLVSKWQQVWLLALERRRKLNDALDRLEELREFANFDFDIWRKKYMRWMNHKKSRVMDFFRRIDKDQDGKITRQEFIDGILSSKFPTSRLEMSAVADIFDRDGDGYIDYYEFVAALHPNKDAYKPITDADKIEDEVTRQVAKCKCAKRFQVEQIGDNKYRFGDSQQLRLVRILRSTVMVRVGGGWMALDEFLVKNDPCRVHHHGSKMLRSESNSSITTTQPTIAKGRTNMELREKFILADGASQGMAAFRPRGRRSRPSSRGASPNRSTSVSSQAAQAASPQVPATTTPKGTPIQGSKLRLPGYLSGKGFHSGEDSGLITTAAARVRTQFADSKKTPSRPGSRAGSKAGSRASSRRGSDASDFDISEIQSVCSDVETVPQTHRPTPRAGSRPSTAKPSKIPTPQRKSPASKLDKSSKR

SEQ ID NO: 25585 - protein, 727 aa, Homo sapiens
IGPPSPGDDEEEAAAAAGAPAAAGATGDLASAQLGGAPNRWEVLSATPTTIKDEAGNLVQIPSAATSSGQYVLPLQNLQNQQIFSVAPGSDSSNGTVSSVQYQVIPQIQSADGQQVQIGFTGSSDNGGINQESSQIQIIPGSNQTLLASGTPSANIQNLIPQTGQVQVQGVAIGGSSFPGQTQVVANVPLGLPGNITFVPINSVDLDSLGLSGSSQTMTAGINADGHLINTGQAMDSSDNSERTGERVSPDINETNTDTDLFVPTSSSSQLPVTIDSTGILQQNTNSLTTSSGQVHSSDLQGNYIQSPVSEETQAQNIQVSTAQPVVQHLQLQESQQPTSQAQIVQGITPQTIHGVQASGQNISQQALQNLQLQLNPGTFLIQAQTVTPSGQVTWQTFQVQGVQNLQNLQIQNTAAQQITLTPVQTLTLGQVAAGGAFTSTPVSLSTGQLPNLQTVTVNSIDSAGIQLHPGENADSPAAYTCFNSSNHSKRLDIRIKEEEPDPEEWQLSGDSTLNTNDLTHLRVQVVDEEGDQQHQEGKRLRRVACTCPNCKEGGGRGTNLGKKKQHICHIPGCGKVYGKTSHLRAHLRWHSGERPFVCNWMYCGKRFTRSDELQRHRRTHTGEKKFVCPECSKRFMRSDHLAKHIKTHQNKKGIHSSSTVLASVEAARDDTLITAGGTTLILANIQQGSVSGIGTVNTSATSNQDILTNTEIPLQLVTVSGNETME

SEQ ID NO: 25586 - protein, 587 aa, Homo sapiens
INLAMEIAEKHLDIPKMLDAEDLVYTARPDERAIMTYVSCYYHAFAGAQKAETAANRICKVLAVNQENERLEQAEKGYEEWLLNEIRRLERLEHLAEKFRQKASTHETWAYGKEQILLQKDYESASLTEVRALLRKHEAFESDLAAHQDRVEQIAAIAQELNELDYHDAVNVNDRCQKICDQWDRLGTLTQKRREALERMEKLLETIDQLHLEFAKRAAPFNNWMEGAMEDLQDMFIVHSIEEIQSLITAHEQFKATLPEADGERQSIMAIQNEVEKVIQSYNIRISSSNPYSTVTMDELRTKWDKVKQLVPIRDQSLQEELARQHANERLRRQFAAQANAIGPWIQNKMEEIARSSIQITGALEDQMNQLKQYEHNIINYKNNIDKLEGDHQLIQEALVFDNKHTNYTMEHIRVGWELLLTTIARTINEVETQILTRDAKGITQEQMNEFRASFNHFDRRKNGLMDHEDFRACLISMGYDLGEAEFARIMTLVDPNGQGTVTFQSFIDFMTRETADTDTAEQVIASFRILASDKPYILAEELRRELPPDQAQYCIKRMPAYSGPGSVPGALDYAAFSSALYGESDL

SEQ ID NO: 25587 - protein, 854 aa, Homo sapiens
ATTVIQDEDYMLQVYGKPVYQGHRSTLKKGPYLRFNSPSPKSRPQRPKVIERVKGTKVKSIRTQTDFYATKPKKMDSKMKHSVPVLPHGDQQYLFSPSREMPTFSGTLEGHLIPMAILLGQTQSNSDTMPPAGVIVSKPHPVTVTTSIPPSSRKVETGVKKPNIAIVEMKSEKKDPPQLTVQVLPSVDIDSISNSSADVLSPLSSPKEASLPPVQTWIKTPEIMKVDEEEVKFPGTNFDEIIDVIQEEEKCDEIPDSEPILEFNRSVKADSTKYNGPPFPPVASTFQPTADILDKVIERKETLENSLIQWVEQEIMSRIISGLFPVQQQIAPSISVSVSETSEPLTSDIVEGTSSGALQLFVDAGVPVNSNVIKHFVNEALAETIAVMLGDREAKKQGPVATGVSGDASTNETYLPARVCTPLPTPQPTPPCSPSSPAKECVLVKTPDSSPCDSDHDMAFPVKEICAEKGDDMPAIMLVNTPTVTPTTTPPPAAAVFTPTLSDISIDKLKVSSPELPKPWGDGDLPLEEENPNSPQEELHPRAIVMSVAKDEEPESMDFPAQPPPPEPVPFMPFPAGTKAPSPSQMPGSDSSTLESTLSVTVTETETLDKPISEGEILFSCGQKLAPKILEDIGLYLTNLNDSLSSTLHDAVEMEDDPPSEGQVIRMSHKKFHADAILSFAKQNQESAVSQQAVYHSEDLENSVGELSEGQRPQLTAAAENILMGHSLYMQPPVTNTQSLDQQCDPKPLSRQFDTVSGSIYEDSCASHGPMSLGELELEPNSKLVLPTTLLTAQENDVNLPVAAEDFSQYQLKQNQDVKQVEHKPSQSYLRVRNKSDIAPSQQQDFVGFIIFFL

SEQ ID NO: 25588 - protein, 1827 aa, Homo sapiens
KTFKKVKPCGICRQVITQEGCTCKVCSFSCHRKCQAKVAAPCVPPSNHELVPITTENAPKNVVDKGEGASRGGNTRKSLEDNGSTRVTPSVQPHLQPIRNMSVSRTMEDSCELDLVYVTERIIAVSFPSTANEENFRSNLREVAQMLKSKHGGNYLLFNLSERRPDITKLHAKVLEFGWPDLHTPALEKICSICKAMDTWLNADPHNVVVLHNKGNRGRIGVVIAAYMHYSNISASADQALDRFAMKRFYEDKIVPIGQPSQRRYVHYFSGLLSGSIKMNNKPLFLHHVIMHGIPNFESKGGCRPFLRIYQAMQPVYTSGIYNIPGDSQTSVCITIEPGLLLKGDILLKCYHKKFRSPARDVIFRVQFHTCAIHDLGVVFGKEDLDDAFKDDRFPEYGKVEFVFSYGPEKIQGMEHLENGPSVSVDYNTSDPLIRWDSYDNFSGHRDDGMEEVVGHTQGPLDGSLYAKVKKKDSLHGSTGAVNATRPTLSATPNHVEHTLSVSSDSGNSTASTKTDKTDEPVPGASSATAALSPQEKRELDRLLSGFGLEREKQGAMYHTQHLRSRPAGGSAVPSSGRHVVPAQVHVNGGALASERETDILDDELPNQDGHSAGSMGTLSSLDGVTNTSEGGYPEALSPLTNGLDKSYPMEPMVNGGGYPYESASRAGPAHAGHTAPMRPSYSAQEGLAGYQREGPHPAWPQPVTTSHYAHDPSGMFRSQSFSEAEPQLPPAPVRGGSSREAVQRGLNSWQQQQQQQQQPRPPPRQQERAHLESLVASRPSPQPLAETPIPSLPEFPRAASQQEIEQSIETLNMLMLDLEPASAAAPLHKSQSVPGAWPGASPLSSQPLSGSSRQSHPLTQSRSGYIPSGHSLGTPEPAPRASLESVPPGRSYSPYDYQPCLAGPNQDFHSKSPASSSLPAFLPTTHSPPGPQQPPASLPGLTAQPLLSPKEATSDPSRTPEEEPLNLEGLVAHRVAGVQAREKQPAEPPAPLRRRAASDGQYENQSPEATSPRSPGVRSPVQCVSPELALTIALNPGGRPKEPHLHSYKEAFEEMEGTSPSSPPPSGVRSPPGLAKTPLSALGLKPHNPADILLHPTGEEDEGKVVVRLSEEPRSYVESVARTAVAGPRAQDSEPKSFSAPATQAYGHEIPLRNGTLGGSFVSPSPLSTSSPILSADSTSVGSFPSGESSDQGPRTPTQPLLESGFRSGSLGQPSPSAQRNYQSSSPLPTVGSSYSSPDYSLQHFSSSPESQARAQFSVAGVHTVPGSPQARHRTVGTNTPPSPGFGWRAINPSMAAPSSPSLSHHQMMGPPGTGFHGSTVSSPQSSAATTPGSPSLCRHPAGVYQVSGLHNKVATTPGSPSLGRHPGAHQGNLASGLHSNAIASPGSPSLGRHLGGSGSVVPGSPCLDRHVAYGGYSTPEDRRPTLSRQSSASGYQAPSTPSFPVSPAYYPGLSSPATSPSPDSAAFRQGSPTPALPEKRRMSVGDRAGSLPNYATINGKVSSPVASGMSSPSGGSTVSFSHTLPDFSKYSMPDNSPETRAKVKFVQDTSKYWYKPEISREQAIALLKDQEPGAFIIRDSHSFRGAYGLAMKVSSPPPTIMQQNKKGDMTHELVRHFLIETGPRGVKLKGCPNEPNFGSLSALVYQHSIIPLALPCKLVIPNRDPTDESKDSSGPANSTADLLKQGAACNVLFVNSVDMESLTGPQAISKATSETLAADPTPAATIVHFKVSAQGITLTDNQRKLFFRRHYPLNTVTFCDLDPQERKWMKTEGGAPAKLFGFVARKQGSTTDNACHLFAELDPNQPASAIVNFVSKVMLNAGQKR

SEQ ID NO: 25589 - protein, 358 aa, Homo sapiens
MRAHAQRGRGCTRRSAAVLMARHGLPLLPLLSLLVGAWLKLGNGQATSMVQLQGGRFLMGTNSPDSRDGDGPVREATVKPFAIDIFPVTNKDFRDFVREKKYRTEAEMFGWSFVFEDFVSDELRNKATQPMKSVLWWLPVEKAFWRQPAGPGSGIRERLEHPVLHVSWNDARAYCAWRGKRLPTEEEWEFAARGGLKGQVYPWGNWFQPNRTNLWQGKFPKGDKAEDGFHGVSPVNAFPAQNNYGWATLQIQPQTTSVSAVLQTQAGRQGSCKQPGGDKEKSLLGSLSFPGHVANSAIPSSRASASGKNFPFPVSHPSVAGASHQGRRGLSLLCFGEGAQCVLTMAGGQVFLLEAKYY

SEQ ID NO: 25590 - protein, 634 aa, Homo sapiens
MQETLRNLASIGEKWKDQNIEDQYKNPRNNLRSLLGERVDENTEENHCGETSSQIPDDTLNKKTSPGVKSCESSVCGEVFVGHSSLNRHIRADTAHKPSEYQEYGQEPYKCQQRKKAFRCHPSFQMQEKAHTGEKLYDCKECGKTFISHSSIQRHMIMHNGDGTYKCKFCGKACPCLSIYLIHERVHTGEKPYKCKQCGKAFSYSTSLQIHERTHTGEKPYECKECGKAFGSPNSLYEHRRTHTGEKPYECKQCGKAFRWFHSFQIHERTHSEEKAYECTKCGKAFKCPSYLCRHEVTHSGKKPCECKQCGKALSYLNFQRHMKMHTRMRPYKCKTVEKPLILPVRFEDMKELTLERNLMNASTVVKPSIVPVPFTIMKGLTLERNPMNVSSVVKPSFLPLPFDIMKGLTLERNRMSVSNVGKPSDLPHTFKCMEGLTLKRNPMNVSSVVKPSFFPLPFDIMKGLTLERNPMSVSNVGKPSHLPHTFKCMKGLTLESNCMNLNNVKKPLDLSETFKFMKRHTLERNPIRNMEKHSTISLPFKYMQQCTEDRMPMNVKSVTKHSYLPRSFEYMQEHTLERNPMNVRNAEKRSIIFLLCVYTKGCTLERNHINVRIVGKHSVCLVPFVDIKGLTLE

SEQ ID NO: 25591 - protein, 1239 aa, Homo sapiens
MRSKGRARKLATNNECVYGNYPEIPLEEMPDADGVASTPSLNIQEPCSPATSSEAFTPKEGSPYKAPIYIPDDIPIPAEFELRESNMPGAGLGIWTKRKIEVGEKFGPYVGEQRSNLKDPSYGWEILDEFYNVKFCIDASQPDVGSWLKYIRFAGCYDQHNLVACQINDQIFYRVVADIAPGEELLLFMKSEDYPHETMAPDIHEERQYRCEDCDQLFESKAELADHQKFPCSTPHSAFSMVEEDFQQKLESENDLQEIHTIQECKECDQVFPDLQSLEKHMLSHTEEREYKCDQCPKAFNWKSNLIRHQMSHDSGKHYECENCAKVFTDPSNLQRHIRSQHVGARAHACPECGKTFATSSGLKQHKHIHSSVKPFICEVCHKSYTQFSNLCRHKRMHADCRTQIKCKDCGQMFSTTSSLNKHRRFCEGKNHFAAGGFFGQGISLPGTPAMDKTSMVNMSHANPGLADYFGANRHPAGLTFPTAPGFSFSFPGLFPSGLYHRPPLIPASSPVKGLSSTEQTNKSQSPLMTHPQILPATQDILKALSKHPSVGDNKPVELQPERSSEERPFEKISDQSESSDLDDVSTPSGSDLETTSGSDLESDIESDKEKFKENGKMFKDKVSPLQNLASINNKKEYSNHSIFSPSLEEQTAVSGAVNDSIKAIASIAEKYFGSTGLVGLQDKKVGALPYPSMFPLPFFPAFSQSMYPFPDRDLRSLPLKMEPQSPGEVKKLQKGSSESPFDLTTKRKDEKPLTPVPSKPPVTPATSQDQPLDLSMGSRSRASGTKLTEPRKNHVFGGKKGSNVESRPASDGSLQHARPTPFFMDPIYRVEKRKLTDPLEALKEKYLRPSPGFLFHPQFQLPDQRTWMSAIENMAEKLESFSALKPEASELLQSVPSMFNFRAPPNALPENLLRKGKERYTCRYCGKIFPRSANLTRHLRTHTGEQPYRCKYCDRSFSISSNLQRHVRNIHNKEKPFKCHLCDRCFGQQTNLDRHLKKHENGNMSGTATSSPHSELESTGAILDDKEDAYFTEIRNFIGNSNHGSQSPRNVEERMNGSHFKDEKALVTSQNSDLLDDEEVEDEVLLDEEDEDNDITGKTGKEPVTSNLHEGNPEDDYEETSALEMSCKTSPVRYKEEEYKSGLSALDHIRHFTDSLKMRKMEDNQYSEAELSSFSTSHVPEELKQPLHRKSKSQAYAMMLSLSDKESLHSTSHSSSNVWHSMARAAAESSAIQSISHV

SEQ ID NO: 25592 - protein, 958 aa, Homo sapiens
RFPSCEELETTKVTMQKSDDVLHDLGQKEKETNSMVQPKESLSMLKLPDLPQNSVKLQTTNTTRSVLKDAEKILRGVQNNKKVLEENLEAIIRAKDGAAMYSLINALSTNREMSEKIRIRKTVDEWIKTISAEIQDELSRTDYEQKRFDQKNQRTKKGQNMTKDIRTNTQDKTVNKSVIPRKHSQKQIEEHFRNLPMRGMPASSLQKERKEGLLKATTVIQDEDYMLQVYGKPVYQGHRSTLKKGPYLRFNSPSPKSRPQRPKVIERVKGTKVKSIRTQTDFYATKPKKMDSKMKHSVPVLPHGDQQYLFSPSREMPTFSGTLEGHLIPMAILLGQTQSNSDTMPPAGVIVSKPHPVTVTTSIPPSSRKVETGVKKPNIAIVEMKSEKKDPPQLTVQVLPSVDIDSISNSSADVLSPLSSPKEASLPPVQTWIKEEEKCDEIPDSEPILEFNRSVKADSTKYNGPPFPPVASTFQPTADILDKVIERKETLENSLIQWVEQEIMSRIISGLFPVQQQIAPSISVSVSETSEPLTSDIVEGTSSGALQLFVDAGVPVNSNVIKHFVNEALAETIAVMLGDREAKKQGPVATGVSGDASTNETYLPARVCTPLPTPQPTPPCSPSSPAKECVLVKTPDSSPCDSDHDMAFPVKEICAEKGDDMPAIMLVNTPTVTPTTTPPPAAAVFTPTLSDISIDKLKVSSPELPKPWGDGDLPLEEENPNSPQEELHPRAIVMSVAKDEEPESMDFPAQPPPPEPVPFMPFPAGTKAPSPSQMPGSDSSTLESTLSVTVTETETLDKPISEGEILFSCGQKLAPKILEDIGLYLTNLNDSLSSTLHDAVEMEDDPPSEGQVIRMSHKKFHADAILSFAKQNQESAVSQQAVYHSEDLENSVGELSEGQRPQLTAAAENILMGHSLYMQPPVTNTQSLDQQCDPKPLSRQFDTVSETESCSVTQAGVQ

SEQ ID NO: 25593 - protein, 578 aa, Homo sapiens
MCSEARLARRAVEELLRCGADPNLVLEDGAAAVHLAAGARHPRGLRCLGALLRQGGDPNARSVEALTPLHVAAAWGCRRGLELLLSQGADPALRDQDGLRPLDLALQQGHLECARVLQDLDTRTRTRTRIGAETQEPEPAPGTPGLSGPTDETLDSIALQKQPCRGDNRDIGLEADPGPPSLPVPLETVDKHGSSASPPGHWDYSSDASFVTAVEVSGAEDPASDTPPWAGSLPPTRQGLLHVVHANQRVPRSQGTEAELNARLQALTLTPPNAAGFQSSPSSMPLLDRSPAHSPPRTPTPGASDCHCLWEHQTSIDSDMATLWLTEDEASSTGGREPVGPCRHLPVSTVSDLELLKGLRALGPEFSGHSLELAAALRTGCIPDVQADEDALAQQFEQPDPARRWREGVVKSSFTYLLLDPRETQDLPARAFSLTPAERLQTFIRAIFYVGKGTRARPYVHLWEALGHHGRSRKQPHQACPKVRQILDIWASGCGVVSLHCFQHVVAVEAYTREACIVEALGIQTLTNQKQGHCYGVVAGWPPARRRRLGVHLLHRALLVFLAEGERQLHPQDIQARG

SEQ ID NO: 25594 - protein, 405 aa, Homo sapiens
MNSAHCNFRLPGSSDSPASASREAGITEAGITVAAGFVLRQCGSDGQWGLWRDHTQCENPEKNEAFLDQRLILERLQVMYTVGYSLSLATLLLALLILSLFRRLHCTRNYIHINLFTSFMLRAAAILSRDRLLPRPGPYLGDQALALWNQALAACRTAQIVTQYCVGANYTWLLVEGVYLHSLLVLVGGSEEGHFRYYLLLGWGAPALFVIPWVIVRYLYENTQCWERNEVKAIWWIIRTPILMTILINFLIFIRILGILLSKLRTRQMRCRDYRLRLARSTLTLVPLLGVHEVVFAPVTEEQARGALRFAKLGFEIFLSSFQGFLVSVLYCFINKEVQSEIRRGWHHCRLRRSLGEEQRQLPERAFRALPSGSGPGEVPTSRGLSSGTLPGPGNEASRELESYC

SEQ ID NO: 25595 - protein, 1004 aa, Homo sapiens
MTTRKLSAHSAATPGYKAVTHKHHTGWARMAKTGLPEKGQSQAGGESGSGQLLDQENGAGESALVSVYVHLDFPDKTWPPELSRTLTLPAASASSSPRPLLTGLRLTTECNVNHKGNFYCACLSGYQWNTSICLHYPPCQSLHNHQPCGCLVFSHPEPGYCQLLPPVPGILNLNSQLQMPGDTLSLTLHLSQEATNLSWFLRHPGSPSPILLQPGTQVSVTSSHGQAALSVSNMSHHWAGEYMSCFEAQGFKWNLYEVVRVPLKATDVARLPYQLSISCATSPGFQLSCCIPSTNLAYTAAWSPGEGSKASSFNESGSQCFVLAVQRCPMADTTYACDLQSLGLAPLRVPISITIIQDGDITCPEDASVLTWNVTKAGHVAQAPCPESKRGIVRRLCGADGVWGPVHSSCTDARLLALFTRTKLLQAGQGSPAEEVPQILAQLPGQAAEASSPSDLLTLLSTMKYVAKVVAEARIQLDRRALKNLLIATDKVLDMDTRSLWTLAQARKPWAGSTLLLAVETLACSLCPQDHPFAFSLPNVLLQSQLFGPTFPADYSISFPTRPPLQAQIPRHSLAPLVRNGTEISITSLVLRKLDHLLPSNYGQGLGDSLYATPGLVLVISIMAGDRAFSQGEVIMDFGNTDGSPHCVFWDHSLFQGRGGWSKEGCQAQVASASPTAQCLCQHLTAFSVLMSPHTVPEEPALALLTQVGLGASILALLVCLGVYWLVWRVVVRNKISYFRHAALLNMVFCLLAADTCFLGAPFLSPGPRSPLCLAAAFLCHFLYLATFFWMLAQALVLAHQLLFVFHQLAKHRVLPLMVLLGYLCPLGLAGVTLGLYLPQGQYLREGECWLDGKGGALYTFVGPVLAIIGVNGLVLAMAMLKLLRPSLSEGPPAEKRQALLGVIKALLILTPIFGLTWGLGLATLLEEVSTVPHYIFTILNTLQGVFILLFGCLMDRKIQEALRKRFCRAQAPSSTISLATNEGCILEHSKGGSDTARKTDASE

SEQ ID NO: 25596 - protein, 2354 aa, Homo sapiens
MRILKRFLACIQLLCVCRLDWANGYYRQQRKLVEEIGWSYTGALNQKNWGKKYPTCNSPKQSPINIDEDLTQVNVNLKKLKFQGWDKTSLENTFIHNTGKTVEINLTNDYRVSGGVSEMVFKASKITFHWGKCNMSSDGSEHSLEGQKFPLEMQIYCFDADRFSSFEEAVKGKGKLRALSILFEVGTEENLDFKAIIDGVESVSRFGKQAALDPFILLNLLPNSTDKYYIYNGSLTSPPCTDTVDWIVFKDTVSISESQLAVFCEVLTMQQSGYVMLMDYLQNNFREQQYKFSRQVFSSYTGKEEIHEAVCSSEPENVQADPENYTSLLVTWERPRVVYDTMIEKFAVLYQQLDGEDQTKHEFLTDGYQDLGAILNNLLPNMSYVLQIVAICTNGLYGKYSDQLIVDMPTDNPELDLFPELIGTEEIIKEEEEGKDIEEGAIVNPGRDSATNQIRKKEPQISTTTHYNRIGTKYNEAKTNRSPTRGSEFSGKGDVPNTSLNSTSQPVTKLATEKDISLTSQTVTELPPHTVEGTSASLNDGSKTVLRSPHMNLSGTAESLNTVSITEYEEESLLTSFKLDTGAEDSSGSSPATSAIPFISENISQGYIFSSENPETITYDVLIPESARNASEDSTSSGSEESLKDPSMEGNVWFPSSTDITAQPDVGSGRESFLQTNYTEIRVDESEKTTKSFSAGPVMSQGPSVTDLEMPHYSTFAYFPTEVTPHAFTPSSRQQDLVSTVNVVYSQTTQPVYNGETPLQPSYSSEVFPLVTPLLLDNQILNTTPAASSSDSALHATPVFPSVDVSFESILSSYDGAPLLPFSSASFSSELFRHLHTVSQILPQVTSATESDKVPLHASLPVAGGDLLLEPSLAQYSDVLSTTHAASETLEFGSESGVLYKTLMFSQVEPPSSDAMMHARSSGPEPSYALSDNEGSQHIFTVSYSSAIPVHDSVGVTYQGSLFSGPSHIPIPKSSLITPTASLLQPTHALSGDGEWSGASSDSEFLLPDTDGLTALNISSPVSVAEFTYTTSVFGDDNKALSKSEIIYGNETELQIPSFNEMVYPSESTVMPNMYDNVNKLNASLQETSVSISSTKGMFPGSLAHTTTKVFDHEISQVPENNFSVQPTHTVSQASGDTSLKPVLSANSEPASSDPASSEMLSPSTQLLFYETSASFSTEVLLQPSFQASDVDTLLKTVLPAVPSDPILVETPKVDKISSTMLHLIVSNSASSENMLHSTSVPVFDVSPTSHMHSASLQGLTISYASEKYEPVLLKSESSHQVVPSLYSNDELFQTANLEINQAHPPKGRHVFATPVLSIDEPLNTLINKLIHSDEILTSTKSSVTGKVFAGIPTVASDTFVSTDHSVPIGNGHVAITAVSPHRDGSVTSTKLLFPSKATSELSHSAKSDAGLVGGGEDGDTDDDGDDDDDDRGSDGLSIHKCMSCSSYRESQEKVMNDSDTHENSLMDQNNPISYSLSENSEEDNRVTSVSSDSQTGMDRSPGKSPSANGLSQKHNDGKEENDIQTGSALLPLSPESKAWAVLTSDEESGSGQGTSDSLNENETSTDFSFADTNEKDADGILAAGDSEITPGFPQSPTSSVTSENSEVFHVSEAEASNSSHESRIGLAEGLESEKKAVIPLVIVSALTFICLVVLVGILIYWRKCFQTAHFYLEDSTSPRVISTPPTPIFPISDDVGAIPIKHFPKHVADLHASSGFTEEFETLKEFYQEVQSCTVDLGITADSSNHPDNKHKNRYINIVAYDHSRVKLAQLAEKDGKLTDYINANYVDGYNRPKAYIAAQGPLKSTAEDFWRMIWEHNVEVIVMITNLVEKGRRKCDQYWPADGSEEYGNFLVTQKSVQVLAYYTVRNFTLRNTKIKKGSQKGRPSGRVVTQYHYTQWPDMGVPEYSLPVLTFVRKAAYAKRHAVGPVVVHCSAGVGRTGTYIVLDSMLQQIQHEGTVNIFGFLKHIRSQRNYLVQTEEQYVFIHDTLVEAILSKETEVLDSHIHAYVNALLIPGPAGKTKLEKQFQGLTLSPRLECRGTISAHCNLPLPGLTDPPTSASRVARTILLSQSNIQQSDYSAALKQCNREKNRTSSIIPVERSRVGISSLSGEGTDYINASYIMGYYQSNEFIITQHPLLHTIKDFWRMIWDHNAQLVVMIPDGQNMAEDEFVYWPNKDEPINCESFKVTLMAEEHKCLSNEEKLIIQDFILEATQDDYVLEVRHFQCPKWPNPDSPISKTFELISVIKEEAANRDGPMIVHDEHGGVTAGTFCALTTLMHQLEKENSVDVYQVAKMINLMRPGVFADIEQYQFLYKVILSLVSTRQEENPSTSLDSNGAALPDGNIAESLESLV

SEQ ID NO: 25597 - protein, 866 aa, Homo sapiens
MFSMRIVCLVLSVVGTAWTADSGEGDFLAEGGGVRGPRVVERHQSACKDSDWPFCSDEDWNYKCPSGCRMKGLIDEVNQDFTNRINKLKNSLFEYQKNNKDSHSLTTNIMEILRGDFSSANNRDNTYNRVSEDLRSRIEVLKRKVIEKVQHIQLLQKNVRAQLVDMKRLEVDIDIKIRSCRGSCSRALAREVDLKDYEDQQKQLEQVIAKDLLPSRDRQHLPLIKMKPVPDLVPGNFKSQLQKVPPEWKALTDMPQMRMELERPGGNEITRGGSTSYGTGSETESPRNPSSAGSWNSGSSGPGSTGNRNPGSSGTGGTATWKPGSSGPGSTGSWNSGSSGTGSTGNQNPGSPRPGSTGTWNPGSSERGSAGHWTSESSVSGSTGQWHSESGSFRPDSPGSGNARPNNPDWGTFEEVSGNVSPGTRREYHTEKLVTSKGDKELRTGKEKVTSGSTTTTRRSCSKTVTKTVIGPDGHKEVTKEVVTSEDGSDCPEAMDLGTLSGIGTLDGFRHRHPDEAAFFDTASTGKTFPGFFSPMLGEFVSETESRGSESGIFTNTKESSSHHPGIAEFPSRGKSSSYSKQFTSSTSYNRGDSTFESKSYKMADEAGSEADHEGTHSTKRGHAKSRPVRDCDDVLQTHPSGTQSGIFNIKLPGSSKIFSVYCDQETSLGGWLLIQQRMDGSLNFNRTWQDYKRGFGSLNDEGEGEFWLGNDYLHLLTQRGSVLRVELEDWAGNEAYAEYHFRVGSEAEGYALQVSSYEGTAGDALIEGSVEEGAEYTSHNNMQFSTFDRDADQWEENCAEVYGGGWWYNNCQAANLNGIYYPGGSYDPRNNSPYEIENGVVWVSFRGADYSLRAVRMKIRPLVTQ

SEQ ID NO: 25598 - protein, 720 aa, Homo sapiens
MQTQEILRILRLPELGDLGQFFRSLSATTLVSMGALAAILAYWFTHRPKALQPPCNLLMQSEEVETCCSKRWQALAQPRVAQIVLEEEDSGGARRSVIGSGPQLLTHYYDDARTMYQVFRRGLSISGNGPCLGFRKPKQPYQWLSYQEVADRAEFLGSGLLQHNCKACTDQFIGVFAQNRPEWIIVELACYTYSMVVVPLYDTLGPGAIRYIINTADISTVIVDKPQKAVLLLEHVERKETPGLKLIILMDPFEEALKERGQKCGVVIKSMQAVEDCGQENHQAPVPPQPDDLSIVCFTSGTTGNPKGAMLTHGNVVADFSGFLKVTESQWAPTCADVHISYLPLAHMFERMVQSVVYCHGGRVGFFQGDIRLLSDDMKALCPTIFPVVPRLLNRMYDKIFSQANTPLKRWLLEFAAKRKQAEVRSGIIRNDSIWDELFFNKIQASLGGCVRMIVTGAAPASPTVLGFLRAALGCQVYEGYGQTECTAGCTFTTPGDWTSGHVGAPLPCNHIKLVDVEELNYWACKGEGEICVRGPNVFKGYLKDPDRTKEALDSDGWLHTGDIGKWLPAGTLKIIDRKKHIFKLAQGEYVAPEKIENIYIRSQPVAQIYVHGDSLKAFLVGIVVPDPEVMPSWAQKRGIEGTYADLCTNKDLKKAILEDMVRLGKESGLHSFEQVKAIHIHSDMFSVQNGLLTPTLKAKRPELREYFKKQIEELYSISM

SEQ ID NO: 25599 - protein, 695 aa, Homo sapiens
MAAAPSTVTPLAAESSPQEATVSAASSSSYTACAAAAAAAAAAAVIVPASSATSAPACPPAGGCGDGGGGGFGGSTMAAAGRGGSSFKVDTRPCLREDAIWNEQEKAELFTDKFCQVCGVMLQFESQRISHYEGEKHAQNVSFYFQMHGEQNEVPGKKMKMHVENFQVHRYEGVDKNKFCDLCNMMFSSPLIAQSHYVGKVHAKKLKQLMEEHDQASPSGFQPEMAFSMRTYVCHICSIAFTSLDMFRSHMQGSEHQIKESIVINLVKNSRKTQDSYQNECADYINVQKARGLEAKTCFRKMEESSLETRRYREVVDSRPRHRMFEQRLPFETFRTYAAPYNISQAMEKQLPHSKKTYDSFQDELEDYIKVQKARGLDPKTCFRKMRENSVDTHGYREMVDSGPRSRMCEQRFSHEASQTYQRPYHISPVESQLPQWLPTHSKRTYDSFQDELEDYIKVQKARGLEPKTCFRKIGDSSVETHRNREMVDVRPRHRMLEQKLPCETFQTYSGPYSISQVVENQLPHCLPAHDSKQRLDSISYCQLTRDCFPEKPVPLSLNQQENNSGSYSVESEVYKHLSSENNTADHQAGHKRKHQKRKRHLEEGKERPEKEQSKHKRKKSYEDTDLDKDKSIRQRKREEDRVKVSSGKLKHRKKKKSHDVPSEKEERKHRKEKKKSVEERTEEEMLWDESILGF

SEQ ID NO: 25600 - protein, 574 aa, Homo sapiens
MKATWIRLLKRAKGGRLKNSDICGSADSYTSRPSDSDVSLEEDREAVRREAERQAQAQLEKAKTKPVAFAVRTNVSYSAAHEDDVPVPGMAISFEAKDFLHVKEKFNNDWWIGRLVKEGCEIGFIPSPVKLENMRLQHEQRAKQGKFYSSKSGGNSSSSLGDIVPSSRKSTPPSSAKQKQKSTEHTPPYDVVPSMRPVVLVGPSLKGYEVTDMMQKALFDFLKHRFEGRISITRVTADISLAKRSVLNNPSKHAIIERSNTRSSLAEVQSEIERIFELARTLQLVVLDADTINHPAQLSKTSLAPIIVYVKISSPKVLQRLIKSRGKSQAKHLNVQMVAADKLAQCPPELFDVILDENQLEDACEHLADYLEAYWKATHPPSSSLPNPLLSRTLATSSLPLSPTLASNSQGSQGDQRTDRSAPIRSASQAEEEPSVEPVKKSQHRSSSSAPHHNHRSGTSRGLSRQETFDSETQESRDSAYVEPKEDYSHDHVDHYASHRDHNHRDETHGSSDHRHRESRHRSRDVDREQDHNECNKQRSRHKSKDRYCEKDGEVISKKRNEAGEWNRDVYIRQ

SEQ ID NO: 25601 - protein, 223 aa, Homo sapiens
MPRVVPDQRSKFENEEFFRKLSRECEIKYTGFRDRPHEERQARFQNACRDGRSEIAFVATGTNLSLQFFPASWQGEQRQTPSREYVDLEREAGKVYLKAPMILNGVCVIWKGWIDLQRLDGMGCLEFDEERAQQEDALAQQAFEEARRRTREFEDRDRSHREEMEVRVSQLLAVTEWRSTRKFSSFWIPPPRGCFCIALTSRENSSCWCVFFRLIWSHLMTAS

SEQ ID NO: 25602 - protein, 335 aa, Homo sapiens
MLGIWTLLPLVLTSVARLSSKSVNAQVTDINSKGLELRKTVTTVETQNLEGLHHDGQFCHKPCPPGERKARDCTVNGDEPDCVPCQEGKEYTDKAHFSSKCRRCRLCDEGHGLEVEINCTRTQNTKCRCKPNFFCNSTVCEHCDPCTKCEHGIIKECTLTSNTKCKEEGSRSNLGWLCLLLLPIPLIVWVKRKEVQKTCRKHRKENQGSHESPTLNPETVAINLSDVDLSKYITTIAGVMTLSQVKGFVRKNGVNEAKIDEIKNDNVQDTAEQKVQLLRNWHQLHGKKEAYDTLIKDLKKANLCTLAEKIQTIILKDITSDSENSNFRNEIQSLV

SEQ ID NO: 25603 - protein, 38 aa, Homo sapiens [sequence omitted]

SEQ ID NO: 25604 - protein, 365 aa, Homo sapiens
MFPPSGSTGLIPPSHFQARPLSTLPRMAPTWLSDIPLVQPPGHQDVSERRLDTQRPQVTMWERDVSSDRQEPGRRGRSWGLEGSQALSQQAEVIVRQLQELRRLEEEVRLLRETSLQQKMRLEAQAMELEALARAEKAGRAEAEGLRAALAGAEVVRKNLEEGSQRELEEVQRLHQEQLSSLTQAHEEALSSLTSKAEGLEKSLSSLETRRAGEAKELAEAQREAELLRKQLSKTQEDLEAQVTLVENLRKYVGEQVPSEVHSQTWELERQKLLETMQHLQEDRDSLHATAELLQVRVQSLTHILALQEEELTRKVQPSDSLEPEFTRKCQSLLNRWREKVFALMVQLKAQELEHSDSVKQLKGQ

SEQ ID NO: 25605 - protein, 1460 aa, Homo sapiens
MDMRVRNESSFSASLGRAGGVSAQRDLFEERGEEYLSAFDKKAQADFDSCISSQRIGQELLFPPQENVQDAGAPGGHTQNLRCSPLEPDFVPDEKKPECGSWDVSHQPETADTAHGVERETPREGTAFNISSWDKNGSPNKQPSSEPEWTPEPRSSSSQHPEQTGRTRRSGPIKKPVLKALKVEDKEKELEKIKQELGEESTRLAKEKEQSPTAEKDEDEENDASLANSSTTTLEDKGPGHATFGREATKFEEEEKPDKAWEARPPRESSDVPPMKRNNWIFIDEEQAFGVRGQARGRGRGFREFTFRGRPAGGNGSGLCGGGVLGARSIYCSSQRSGRGRGLREFARPEDCPRAKPRRRVASETHSEGSEYEELPKRRRQRGSENGNEGSLLEREESTLKKGDCRDSWRSNKGCSEDHSGLDAKSRGPRAFGRALPPRLSNCGYGRRTFVSKESPHWQSKSPGSSWQEYGPSDTCGSRRPTDRDYVPDSYRHPDAFGGRGFEDSRAEDKRSFFQDEHVADSENAENRPFRRRRPPRQDKPPRFRRLRQERESLGLWGPEEEPHLLAGQWPGRPKLCSGDKSGTVGRRSPELSYQNSSDHANEEWETASESSDFSERRERREGPGSEPDSQVDGGLSGASLGEKKELAKRSFSSQRPVVDRQSRKLEPGGFGEKPVRPGGGDTSPRYESQQNGTPLKVKRSPDEALPGGLSGCSSGSGHSPYALERAAHASADLPEASSKKAEKEAKLAAPRAGEQGEAMKQFDLNYGSAIIENCGSSPGEESEVGSMVGEGFIEVLTKKQRRLLEEERRKKEQAVQVPVKGRGLSSRIPPRFAKKQNNLCLEQGDVTVPGSSLGTEIWESSSQALPVQAPANDSWRKAVTAFSSTETGSAEQGFKSSQGDSGVDLSAESRESSATSSQRSSPYGTLKPEEMSGPGLAEPKADSHKEQAPKPSEQKDSEQGSGQSKEHRPGPIGNERSLKNRKGSEGAERLQGAVVPPVNGVEIHVDSVLPVPPIEFGVSPKDSDFSLPPGSASGPTGSPVVKLQDALASNAGLTQSIPILRRDHHIQRAIGLSPMSFPTADLTLKMESARKAWENSPSLPEQSSPGGAGSGIQPPSSVGASSGVNYSSFGGVSMPPMPVASVAPSASMPGSHLPPLYLDGHVFASQPRLVPQTIPQQQSYQQAAAAQQIPISLHTSLQAQAQLGLRGGLPVSQSQEIFSSLQPFRSQVYMHPSLSPPSTMILSGGTALKPPYSAFPGMQPLEMVKPQSGSPYQPMSGNQALVYEGQLSQAAGLGASQMLDSQLPQLTMPLPRYGSGQQPLILPQSIQLPPGQSLSVGAPRRIPPPGSQPPVLNTSREPSQMEMKGFHFADSKQNVPSGGPVPSPQTYRPSSASPSGKPSGSAVNMGSVQGHYVQQAKQRVDEKPSLGAVKLQEAPSAASQMKRTGAIKPRAVKVEESKA

SEQ ID NO: 25606 - protein, 1339 aa, Homo sapiens
MAPRCPWPWPRRRRLLDVLAPLVLLLGVRAASAEPERISEEVGLLQLLGDPPPQQVTQTDDPDVGLAYVFGPDANSGQVARYHFPSLFFRDFSLLFHIRPATEGPGVLFAITDSAQAMVLLGVKLSGVQDGHQDISLLYTEPGAGQTHTAASFRLPAFVGQWTHLALSVAGGFVALYVDCEEFQRMPLARSSRGLELEPGAGLFVAQAGGADPDKFQGVIAELKVRRDPQVSPMHCLDEEGDDSDGASGDSGSGLGDARELLREETGAALKPRLPAPPPVTTPPLAGGSSTEDSRSEEVEEQTTVASLGAQTLPGSDSVSTWDGSVRTPGGRVKEGGLKGQKGEPGVPGPPGRAGPPGSPCLPGPPGLPCPVSPLGPAGPALQTVPGPQGPPGPPGRDGTPGRDGEPGDPGEDGKPGDTGPQGFPGTPGDVGPKGDKGDPGVGERGPPGPQGPPGPPGPSFRHDKLTFIDMEGSGFGGDLEALRGPRGFPGPPGPPGVPGLPGEPGRFGVNSSDVPGPAGLPGVPGREGPPGFPGLPGPPGPPGREGPPGRTGQKGSLGEAGAPGHKGSKGAPGPAGARGESGLAGAPGPAGPPGPPGPPGPPGPGLPAGFDDMEGSGGPFWSTARSADGPQGPPGLPGLKGDPGVPGLPGAKGEVGADGVPGFPGLPGREGIAGPQGPKGDRGSRGEKGDPGKDGVGQPGLPGPPGPPGPVVYVSEQDGSVLSVPGPEGRPGFAGFPGPAGPKGNLGSKGERGSPGPKGEKGEPGSIFSPDGGALGPAQKGAKGEPGFRGPPGPYGRPGYKGEIGFPGRPGRPGMNGLKGEKGEPGDASLGFGMRGMPGPPGPPGPPGPPGTPVYDSNVFAESSRPGPPGLPGNQGPPGPKGAKGEVGPPGPPGQFPFDFLQLEAEMKGEKGDRGDAGQKGERGEPGGGGFFGSSLPGPPGPPGPPGPRGYPGIPGPKGESIRGQPGPPGPQGPPGIGYEGRQGPPGPPGPPGPPSFPGPHRQTISVPGPPGPPGPPGPPGTMGASSGVRLWATRQAMLGQVHEVPEGWLIFVAEQEELYVRVQNGFRKVQLEARTPLPRGTDNEVAALQPPVVQLHDSNPYPRREHPHPTARPWRADDILASPPRLPEPQPYPGAPHHSSYVHLRPARPTSPPAHSHRDFQPVLHLVALNSPLSGGMRGIRGADFQCFQQARAVGLAGTFRAFLSSRLQDLYSIVRRADRAAVPIVNLKDELLFPSWEALFSGSEGPLKPGARIFSFDGKDVLRHPTWPQKSVWHGSDPNGRRLTESYCETWRTEAPSATGQASSLLGGRLLGQSAASCHHAYIVLCIENSFMTASK

SEQ ID NO: 25607 - protein, 534 aa, Homo sapiens
MLCCWSPEKPAYPARAPAWGCLLRVLGWFNSPRTSSETERSNDSGNGEHKSERKSPEENLQGAVKSFCTSASGAPLGPKGDGHYPWSCPVTHTREKIYAICSDYAFLNQATSIYKTPNPSRSPCLPDSTSLSAGNNSSRYIGIPTSTSEIIYNEENSLENLSNSLGKLPLAWEIDKSEFDGVTTNSKHKSGNAKKQVSKRKTSDKKGRYQKECPQHSPLEDIKQRKVLDLRRWYCISRPQYKTSCGISSLISCWNFLYSTMGAGNLPPITQEEALHILGFQPPFEDIRFGPFTGNTTLMRWFRQINDHFHVKGCSYVLYKPHGKNKTAGETASGALSKLTRGLKDESLAYIYHCQNHYFCPIGFEATPVKANKAFSRGPLSPQEVEYWILIGESSRKHPAIHCKKWADIVTDLNTQNPEYLDIRHLERGLQYRKTKKVGGNLHCIIAFQRLNWQRFGLWNFPFGTIRQESQPPTHAQGIAKSESEDNISKKQHGRLGRSFSASFHQDSAWKKMSSIHERRNSGYQGYSDYDGND

SEQ ID NO: 25608 - protein, 1274 aa, Homo sapiens
MARQPEEEETAVARARRPPLWLLCLVACWLLGAGAEADFSILDEAQVLASQMRRLAAEELGVVTMQRIFNSFVYTEKISNGESEVQQLAKKIREKFNRYLDVVNRNKQVVEASYTAHLTSPLTAIQDCCTIPPSMMEFDGNFNTNVSRTISCDRLSTTVNSRAFNPGRDLNSVLADNLKSNPGIKWQYFSSEEGIFTVFPAHKFRCKGSYEHRSRPIYVSTVRPQSKHIVVILDHGASVTDTQLQIAKDAAQVILSAIDEHDKISVLTVADTVRTCSLDQCYKTFLSPATSETKRKMSTFVSSVKSSDSPTQHAVGFQKAFQLIRSTNNNTKFQANTDMVIIYLSAGITSKDSSEEDKKATLQVINEENSFLNNSVMILTYALMNDGVTGLKELAFLRDLAEQNSGKYGVPDRMALPVIKGSMMVLNQLSNLETTVGRFYTNLPNRMIDEAVFSLPFSDEMGDGLIMTVSKPCYFGNLLLGIVGVDVNLAYILEDVTYYQDSLASYTFLIDDKGYTLMHPSLTRPYLLSEPPLHTDIIHYENIPKFELVRQNILSLPLGSQIIAVPVNSSLSWHINKLRETGKEAYNVSYAWKMVQDTSFILCIVVIQPEIPVKQLKNLNTVPSSKLLYHRLDLLGQPSACLHFKQLATLESPTIMLSAGSFSSPYEHLSQPETKRMVEHYTAYLSDNTRLIANPGLKFSVRNEVMATSHVTDEWMTQMEMSSLNTYIVRRYIATPNGVLRIYPGSLMDKAFDPTRRQWYLHAVANPGLISLTGPYLDVGGAGYVVTISHTIHSSSTQLSSGHTVAVMGIDFTLRYFYKVLMDLLPVCNQDGGNKIRCFIMEDRGYLVAHPTLIDPKGHAPVEQQHITHKEPLVANDILNHPNFVKKNLCNSFSDRTVQRFYKFNTSLAGDLTNLVHGSHCSKYRLARIPGTNAFVGIVNETCDSLAFCACSMVDRLCLNCHRMEQNECECPCECPLEVNECTGNLTNAENRNPSCEVHQEPVTYTAIDPGLQDALHQCVNSRCSQRLESGDCFGVLDCEWCMVDSDGKTHLDKPYCAPQKECFGGIVGAKSPYVDDMGAIGDEVITLNMIKSAPVGPVAGGIMGCIMVLVLAVYAYRHQIHRRSHQHMSPLAAQEMSVRMSNLENDRDERDDDSHEDRGIISNTRFIAAVIERHAHSPERRRRYWGRSGTESDHGYSTMSPQEDSENPPCNNDPLSAGVDVGNHDEDLDLDTPPQTAALLSHKFHHYRSHHPTLHHSHHLQAAVTVHTVDAEC

SEQ ID NO: 25609 - protein, 1217 aa, Homo sapiens
MAAGRAQVPSSEQAWLEDAQVFIQKTLCPAVKEPNVQLTPLVIDCVKTVWLSQGRNQGSTLPLSYSFVSVQDLKTHQRLPCCSHLSWSSSAYQAWAQEAGPNGNPLPREQLLLLGTLTDLSADLEQECRNGSLYVRDNTGVLSCELIDLDLSWLGHLFLFPRWSYLPPARWNSSGEGHLELWDAPVPVFPLTISPGPVTPIPVLYPESASCLLRLRNKLRGVQRNLAGSLVRLSALVKSKQKAYFILSLGRSHPAVTHVSIIVQVPAQLVWHRALRPGTAYVLTELRVSKIRGQRQHVWMTSQSSRLLLLKPECVQELELELEGPLLEADPKPLPMPSNSEDKKDPESLVRYSRLLSYSGAVTGVLNEPAGLYELDGQLGLCLAYQQFRGLRRVMRPGVCLQLQDVHLLQSVGGGTRRPVLAPCLRGAVLLQSFSRQKPGAHSSRQAYGASLYEQLVWERQLGLPLYLWATKALEELACKLCPHVLRHHQFLQHSSPGSPSLGLQLLAPTLDLLAPPGSPVRNAHNEILEEPHHCPLQKYTRLQTPSSFPTLATLKEEGQRKAWASFDPKALLPLPEASYLPSCQLNRRLAWSWLCLLPSAFCPAQVLLGVLVASSHKGCLQLRDQSGSLPCLLLAKHSQPLSDPRLIGCLVRAERFQLIVERDVRSSFPSWKELSMPGFIQKQQARVYVQFFLADALILPVPRPCLHSATPSTPQTDPTGPEGPHLGQSRLFLLCHKEALMKRNFCVPPGASPEVPKPALSFYVLGSWLGGTQRKEGTGWGLPEPQGNDDNDQKVHLIFFGSSVRWFEFLHPGQVYRLIAPGPATPMLFEKDGSSCISRRPLELAGCASCLTVQDNWTLELESSQDIQDVLDANKSLPESSLTDLLSDNFTDSLVSFSAEILSRTLCEPLVASLWMKLGNTGAMRRCVKLTVALETAECEFPPHLDVYIEDPHLPPSLGLLPGARVHFSQLEKRVSRSHNVYCCFRSSTYVQVLSFPPETTISIPLPHIYLAELLQGGQSPFQATASCHIVSVFSLQLFWVCAYCTSICRQGKCTRLGSTCPTQTAISQAIIRLLVEDGTAEAVVTCRNHHVAAALGLCPREWASLLDFVQVPGRVVLQFAGPGAQLESSARVDEPMTMFLWTLCTSPSVLRPIVLSFELERKPSKIVPLEPPRLQRFQCGELPFLTHVNPRLRLSCLSIRESEYSSSLGILASSC

SEQ ID NO: 25610 - protein, 296 aa, Homo sapiens
MGILLGLLLLGHLTVDTYGRPILEVPESVTGPWKGDVNLPCTYDPLQGYTQVLVKWLVQRGSDPVTIFLRDSSGDHIQQAKYQGRLHVSHKVPGDVSLQLSTLEMDDRSHYTCEVTWQTPDGNQVVRDKITELRVQKLSVSKPTVTTGSGYGFTVPQGMRISLQCQARGSPPISYIWYKQQTNNQEPIKVATLSTLLFKPAVIADSGSYFCTAKGQVGSEQHSDIVKFVVKDSSKLLKTKTEAPTTMTYPLKATSTVKQSWDWTTDMDGYLGETSAGPAFRHNGNMCLKWLSGNMF

SEQ ID NO: 25611 - protein, 886 aa, Homo sapiens
PVKFASSSSVQQVTFSRGTDGSNDAIAPDFPAQVLGTRDDDLSATVNIKHKEGIYSKRVVTKASLPVGEKPLQNENADASVQVLITGDENLSDKKQQEIHSTRAVTEAAQAKEKESLQKDTADSSAAAAAEHSAQVGDPEMKNLPDTKAITQKEEIHRKKTVPEEAWPNNKESLQINIEESECHSEFENTTRSVFRSAKFYIHHPVHLPSDQDICHESLGKSVFMRHSWKDFFQHHPDKHREHMCLPLPYQNMDKTKTDYTRIKSLSINVNLGNKEVMDTTKSQVRDYPKHNGQISDPQRDQKVTPEQTTQHTVSLNELWNKYRERQRQQRQPELGDRKELSLVDRLDRLAKILQNPITHSLQVSESTHDDSRGERSVKEWSGRQQQRNKLQKKKRFKSLEKSHKNTGELKKSKVLSHHRAGRSNQIKIEQIKFDKYILSKQPGFNYISNTSSDCRPSEESELLTDTTTNILSGTTSTVESDILTQTDREVALHERSSSVSTIDTARLIQAFGHERVCLSPRRIKLYSSITNQQRRYLEKRSKHSKKVLNTGHPLVTSEHTRRRHIQVANHVISSDSISSSASSFLSSNSTFCNKQNVHMLNKGIQAGNLEIVNGAKKHTRDVGITFPTPSSSEAKLEENSDVTSWSEEKREEKMLFTGYPEDRKLKKNKKNSHEGVSWFVPVENVESRSKKENVPNTCGPGISWFEPITKTRPWREPLREQNCQGQHLDGRGYLAGPGREAGRDLLRPFVRATLQESLQFHRPDFISRSGERIKRLKLIVQERKLQSMLQTERDALFNIDRERQGHQNRMCPLPKRVFLAIQKNKPISKKEMIQRSKRIYEQLPEVQKKREEEKRKSEYKSYRLRAQLYKKRVTNQLLGRKVPWD

SEQ ID NO: 25612 - protein, 2851 aa, Homo sapiens
MTLEGLYLARGPLARLLLAWSALLCMAGGQGRWDGALEAAGPGRVRRRGSPGILQGPNVCGSRFHAYCCPGWRTFPGRSQCVVPICRRACGEGFCSQPNLCTCADGTLAPSCGVSRGSGCSVSCMNGGTCRGASCLCQKGYTGTVCGQPICDRGCHNGGRCIGPNRCACVYGFMGPQCERDYRTGPCFGQVGPEGCQHQLTGLVCTKALCCATVGRAWGLPCELCPAQPHPCRRGFIPNIHTGACQDVDECQAVPGLCQGGSCVNMVGSFHCRCPVGHRLSDSSAACEDVNECLSLSGLCSGGDCTNTVGSYVCTCSQGFASSLDGTHCLNYRAGACFSVLFGGRCAGDLAGHYTRRQCCCDRGRCWAAGPVPELCPPRGSNEFQQLCAQRLPLLPGHPGLFPGLLGFGSNGMGPPLGPARLNPHGSDARGIPSLGPGNSNIGTATLNQTIDICRHFTNLCLNGRCLPTPSSYRCECNVGYTQDVRGECIDVDECTSSPCHHGDCVNIPGTYHCRCYPGFQATPTRQACVDVDECIVSGGLCHLGRCVNTEGSFQCVCNAGFELSPDGKNCVDHNECATSTMCVNGVCLNEDGSFSCLCKPGFLLAPGGHYCMDIDECQTPGICVNGHCTNTEGSFRCQCLGGLAVGTDGRVCVDTHVRSTCYGAIEKGSCARPFPGTVTKSECCCANPDHGFGEPCQLCPAKDSAEFQALCSSGLGITTDGRDINECALDPEVCANGVCENLRGSYRCVCNLGYEAGASGKDCTDVDECALNSLLCDNGWCQNSPGSYSCSCPPGFHFWQDTEICKDVDECLSSPCVSGVCRNLAGSYTCKCGPGSRLDPSGTFCLDSTKGTCWLKIQESRCEVNLQGASLRSECCATLGAAWGSPCERCEIDPACARGFARMTGVTCDDVNECESFPGVCPNGRCVNTAGSFRCECPEGLMLDASGRLCVDVRLEPCFLRWDEDECGVTLPGKYRMDVCCCSIGAVWGVECEACPDPESLEFASLCPRGLGFASRDFLSGRPFYKDVNECKVFPGLCTHGTCRNTVGSFHCACAGGFALDAQERNCTDIDECRISPDLCGQGTCVNTPGSFECECFPGYESGFMLMKNCMDVDECARDPLLCRGGTCTNTDGSYKCQCPPGHELTAKGTACEDIDECSLSDGLCPHGQCVNVIGAFQCSCHAGFQSTPDRQGCVDINECRVQNGGCDVHCINTEGSYRCSCGQGYSLMPDGRACADVDECEENPRVCDQGHCTNMPGGHRCLCYDGFMATPDMRTCVDVDECDLNPHICLHGDCENTKGSFVCHCQLGYMVRKGATGCSDVDECEVGGHNCDSHASCLNIPGSFSCRCLPGWVGDGFECHDLDECVSQEHRCSPRGDCLNVPGSYRCTCRQGFAGDGFFCEDRDECAENVDLCDNGQCLNAPGGYRCECEMGFDPTEDHRACQDVDECAQGNLCAFGSCENLPGMFRCICNGGYELDRGGGNCTDINECADPVNCINGVCINTPGSYLCSCPQDFELNPSGVGCVDTRAGNCFLETHDRGDSGISCSAEIGVGVTRASCCCSLGRAWGNPCELCPMANTTEYRTLCPGGEGFQPNRITVILEDIDECQELPGLCQGGDCVNTFGSFQCECPPGYHLSEHTRICEDIDECSTHSGICGPGTCYNTLGNYTCVCPAEYLQVNGGNNCMDMRKSVCFRHYNGTCQNELAFNVTRKMCCCSYNIGQAWNRPCEACPTPISPDYQILCGNQAPGFLTDIHTGKPLDIDECGEIPAICANGICINQIGSFRCECPAGFNYNSILLACEDVDECGSRESPCQQNADCINIPGSYRCKCTRGYKLSPGGACVGRNECREIPNVCSHGDCMDTEGSYMCLCHRGFQASADQTLCMDIDECDRQPCGNGTCKNIIGSYNCLCFPGFVVTHNGDCVDFDECTTLVGQVCRFGHCLNTAGSFHCLCQDGFELTADGKNCVDTNECLSLAGTCLPGTCQNLEGSFRCICPPGFQVQSDHCIDIDECSEEPNLCLFGTCTNSPGSFQCLCPPGFVLSDNGHRCFDTRQSFCFTRFEAGKCSVPKAFNTTKTRCCCSKRPGEGWGDPCELCPQEGSAAFQELCPFGHGAVPGPDDSREDVNECAENPGVCTNGVCVNTDGSFRCECPFGYSLDFTGINCVDTDECSVGHPCGQGTCTNVIGGFECACADGFEPGLMMTCEDIDECSLNPLLCAFRCHNTEGSYLCTCPAGYTLREDGAMCRDVDECADGQQDCHARGMECKNLIGTFACVCPPGMRPLPGSGEGCTDDNECHAQPDLCVNGRCVNTAGSFRCDCDEGFQPSPTLTECHDIRQGPCFAEVLQTMCRSLSSSSEAVTRAECCCGGGRGWGPRCELCPLPGTSAYRKLCPHGSGYTAEGRDVDECRMLAHLCAHGECINSLGSFRCHCQAGYTPDATATTCLDMDECSQVPKPCTFLCKNTKGSFLCSCPRGYLLEEDGRTCKDLDECTSRQHNCQFLCVNTVGAFTCRCPPGFTQHHQACFDNDECSAQPGPCGAHGHCHNTPGSFRCECHQGFTLVSSGHGCEDVNECDGPHRCQHGCQNQLGGYRCSCPQGFTQHSQWAQCVDENECALSPPTCGSASCRNTLGGFRCVCPSGFDFDQALGGCQEVDECAGRRGPCSYSCANTPGGFLCGCPQGYFRAGQGHCVSGLGFSPGPQDTPDKEELLSSEACYECKINGLSPRDRPRRSAHRDHQVNLATLDSEALLTLGLNLSHLGRAERILELRPALEGLEGRIRYVIVRGNEQGFFRMHHLRGVSSLQLGRRRPGPGTYRLEVVSHMAGPWGVQPEGQPGPWGQALRLKVQLQLL

SEQ ID NO: 25613 - protein, 534 aa, Homo sapiens
MMEALGFLKLEVNGPMVTVALSVALLALLKWYSTSAFSRLEKLGLRHPKPSPFIGNLTFFRQGFWESQMELRKLYGPLCGYYLGRRMFIVISEPDMIKQVLVENFSNFTNRMASGLEFKSVADSVLFLRDKRWEEVRGALMSAFSPEKLNEMVPLISQACDLLLAHLKRYAESGDAFDIQRCYCNYTTDVVASVAFGTPVDSWQAPEDPFVKHCKRFFEFCIPRPILVLLLSFPSIMVPLARILPNKNRDELNGFFNKLIRNVIALRDQQAAEERRRDFLQMVLDARHSASPMGVQDFDIVRDVFSSTGCKPNPSRQHQPSPMARPLTVDEIVGQAFIFLIAGYEIITNTLSFATYLLATNPDCQEKLLREVDVFKEKHMAPEFCSLEEGLPYLDMVIAETLRMYPPAFRFTREAAQDCEVLGQRIPAGAVLEMAVGALHHDPEHWPSPETFNPERFTAEARQQHRPFTYLPFGAGPRSCLGVRLGLLEVKLTLLHVLHKFRFQACPETQVPLQLESKSALGPKNGVYIKIVSR

SEQ ID NO: 25614 - protein, 489 aa, Homo sapiens
MAAEIDFLREQNRRLNEDFRRYQMESFSKYSSVQKAVCQGEGDDTFENLVFDQSFLAPLVTEYDKHLGELNGQLKYYQKQVGEMKLQLENVIKENERLHSELKDAVEKKLEAFPLGTEVGTDIYADDETVRNLQEQLQLANQEKTQAVELWQTVSQELDRLHKLYQEHMTEAQIHVFESQKQKDQLFDFQQLTKQLHVTNENMEVTNQQFLKTVTEQSVIIEQLRKKLRQAKLELRVAVAKVEELTNVTEDLQGQMKKKEKDVVSAHGREEASDRRLQQLQSSIKQLEIRLCVTIQEANQLRTENTHLEKQTRELQAKCNELENERYEAIVRARNSMQLLEEANLQKSQALLEEKQKEEDIEKMKETVSRFVQDATIRTKKEVANTKKQCNIQISRLTEELSALQMECAEKQGQIERVIKEKKAVEEELEKIYREGRGNESDYRKLEEMHQRFLVSERSKDDLQLRLTRAENRIKQLETESVQWNMNFQ

SEQ ID NO: 25615 - protein, 359 aa, Homo sapiens
MEPQVSNGPTSNTSNGPSSNNRNCPSPMQTGATTDDSKTNLIVNYLPQNMTQEEFRSLFGSIGEIESCKLVRDKITGQSLGYGFVNYIDPKDAEKAINTLNGLRLQTKTIKVSYARPSSASIRDANLYVSGLPKTMTQKELEQLFSQYGRIITSRILVDQVTGVSRGVGFIRFDKRIEAEEAIKGLNGQKPSGATEPITVKFANNPSQKSSQALLSQLYQSPNRRYPGPLHHQAQRFRLDNLLNMAYGVKRFSPITIDGMTSLVGMNIPGHTGTGWCIFVYNLSPDSDESVLWQLFGPFGAVNNVKVIRDFNTNKCKGFGFVTMTNYDEAAMAIASLNGYRLGDRVLQVSFKTNKAHKS

SEQ ID NO: 25616 - protein, 362 aa, Homo sapiens
MSDPSQLTQNVCLTQEMELSKAFSGQRTLLSAILSMLSLSFSTTSLLSNYWFVGTQKVPKPLCEKGLAAKCFDMPVSLDGDTNTSTQEVVQYNWETGDDRFSFRSFRSGMWLSCEETVEEPALLHPQSWKQFRALRSSGTAAAKGERCRSFIELTPPAKREILWLSLGTQITYIGLQFISFLLLLTDLLLTGNPACGLKLSAFAAVSSVLSGLLGMVAHMMYSQVFQATVNLGPEDWRPHVWNYGWAFYMAWLSFTCCMASAVTTFNTYTRMVLEFKCKHSKSFKENPNCLPHHHQCFPRRLSSAAPTVGPLTSYHQYHNQPIHSVSEGVDFYSELRNKGFQRGASQELKEAVRSSVEEEQC

SEQ ID NO: 25617 - protein, 1085 aa, Homo sapiens
MPRRKQEQPKRLPSHVSRQEEAEGELSEGEHWYGNSSETPSEASYGEVQENYKLSLEDRIQEQSTSPDTSLGSTTPSSHTLELVALDSEVLRDSLQCQDHLSPGVSSLCDDDPGSNKPLSSNLRRLLEAGSLKLDAAATANGRVESPVNVGSNLSFSPPSHHAQQLSVLARKLAEKQEQNDQYTPSNRFIWNQGKWLPNSTTTCSLSPDSAILKLKAAANAVLQDKSLTRTEETMRFESFSSPFSSQSASSTLAALSKKVSERSLTPGQEHPPPASSFLSLASMTSSAALLKEVAARAAGSLLAEKSSLLPEDPLPPPPSEKKPEKVTPPPPPPPPPPPPPPPQSLELLLLPVPKGRVSKPSNSASEEESGKPFQCPICGLVIKRKSYWKRHMVIHTGLKSHQCPLCPFRCARKDNLKSHMKVHQHQDRGETFQCQLCPFTSSRHFSLKLHMRCHQHFLRTEAKVKEEIPDPDVKGSPHLSDSACLGQQREGGGTELVGTMMTSNTPERTSQGGAGVSPLLVKEEPKEDNGLPTSFTLNAADRPANHTKLKDPSEYVANSASALFSQDISVKMASDFLMKLSAANQKEPMNLNFKVKEEPKEGESLSTTLPRSSYVFSPESEVSAPGVSEDALKPQEGKGSVLRRDVSVKAASELLMKLSAESYKETQMVKIKEEPMEVDIQDSHVSISPSRNVGYSTLIGREKTEPLQKMPEGRVPPERNLFSQDISVKMASELLFQLSEKVSKEHNHTKENTIRTTTSPFFSEDTFRQSPFTSNSKELLPSDSVLHGRISAPETEKIVLEAGNGLPSWKFNDQLFPCDVCGKVFGRQQTLSRHLSLHTEERKYKCHLCPYAAKCRANLNQHLTVHSVKLVSTDTEDIVSAVTSEGSDGKKHPYYYSCHVCGFETELNVQFVSHMSLHVDKEQWMFSICCTACDFVTMEEAEIKTHIGTKHTGEDRKTPSESNSPSSSSLSALSDSANSKDDSDGSQKNKGGNNLLVISVMPGSQPSLNSEEKPEKGFECVFCNFVCKTKNMFERHLQIHLITRMFECDVCHKFMKTPEQLLEHKKCHTVPTGGLKTVVSFRLL

SEQ ID NO: 25618 - protein, 61 aa, Homo sapiens
MNRSIPVEVDESEPYPSQLLKPIPEYSPEEESEPPAPNIRNMAPNSLSAPTMLHNSSGDFS

SEQ ID NO: 25619 - protein, 1940 aa, Homo sapiens
MPPLPLARDTRQPPGASLLVRGFMVPCNACLILLATATLGFAVLLFLNNYKPGTHFTPVPPTPPDACRGMLCGFGAVCEPNAEGPGRASCVCKKSPCPSVVAPVCGSDASTYSNECELQRAQCSQQRRIRLLSRGPCGSRDPCSNVTCSFGSTCARSADGLTASCLCPATCRGAPEGTVCGSDGADYPGECQLLRRACARQENVFKKFDGPCDPCQGALPDPSRSCRVNPRTRRPEMLLRPESCPARQAPVCGDDGVTYENDCVMGRSGAARGLLLQKVRSGQCQGRDQCPEPCRFNAVCLSRRGRPRCSCDRVTCDGAYRPVCAQDGRTYDSDCWRQQAECRQQRAIPSKHQGPCDQAPSPCLGVQCAFGATCAVKNGQAACECLQACSSLYDPVCGSDGVTYGSACELEATACTLGREIQVARKGPCDRCGQCRFGALCEAETGRCVCPSECVALAQPVCGSDGHTYPSECMLHVHACTHQISLHVASAGPCETCGDAVCAFGAVCSAGQCVCPRCEHPPPGPVCGSDGVTYGSACELREAACLQQTQIEEARAGPCEQAECGSGGSGSGEDGDCEQELCRQRGGIWDEDSEDGPCVCDFSCQSVPGSPVCGSDGVTYSTECELKKARCESQRGLYVAAQGACRGPTFAPLPPVAPLHCAQTPYGCCQDNITAARGVGLAGCPSACQCNPHGSYGGTCDPATGQCSCRPGVGGLRCDRCEPGFWNFRGIVTDGRSGCTPCSCDPQGAVRDDCEQMTGLCSCKPGVAGPKCGQCPDGRALGPAGCEADASAPATCAEMRCEFGARCVEESGSAHCVCPMLTCPEANATKVCGSDGVTYGNECQLKTIACRQGLQISIQSLGPCQEAVAPSTHPTSASVTVTTPGLLLSQALPAPPGALPLAPSSTAHSQTTPPPSSRPRTTASVPRTTVWPVLTVPPTAPSPAPSLVASAFGESGSTDGSSDEELSGDQEASGGGSGGLEPLEGSSVATPGPPVERASCYNSALGCCSDGKTPSLDAEGSNCPATKVFQGVLELEGVEGQELFYTPEMADPKSELFGETARSIESTLDDLFRNSDVKKDFRSVRLRDLGPGKSVRAIVDVHFDPTTAFRAPDVARALLRQIQVSRRRSLGVRRPLQEHVRFMDFDWFPAFITGATSGAIAAGATARATTASRLPSSAVTPRAPHPSHTSQPVAKTTAAPTTRRPPTTAPSRVPGRRPPAPQQPPKPCDSQPCFHGGTCQDWALGGGFTCSCPAGRGGAVCEKVLGAPVPAFEGRSFLAFPTLRAYHTLRLALEFRALEPQGLLLYNGNARGKDFLALALLDGRVQLRFDTGSGPAVLTSAVPVEPGQWHRLELSRHWRRGTLSVDGETPVLGESPSGTDGLNLDTDLFVGGVPEDQAAVALERTFVGAGLRGCIRLLDVNNQRLELGIGPGAATRGSGVGECGDHPCLPNPCHGGAPCQNLEAGRFHCQCPPGRVGPTCADEKSPCQPNPCHGAAPCRVLPEGGAQCECPLGREGTFCQTASGQDGSGPFLADFNGFSHLELRGLHTFARDLGEKMALEVVFLARGPSGLLLYNGQKTDGKGDFVSLALRDRRLEFRYDLGKGAAVIRSREPVTLGAWTRVSLERNGRKGALRVGDGPRVLGESPVPHTVLNLKEPLYVGGAPDFSKLARAAAVSSGFDGAIQLVSLGGRQLLTPEHVLRQVDVTSFAGHPCTRASGHPCLNGASCVPREAAYVCLCPGGFSGPHCEKGLVEKSAGDVDTLAFDGRTFVEYLNAVTESEKALQSNHFELSLRTEATQGLVLWSGKATERADYVALAIVDGHLQLSYNLGSQPVVLRSTVPVNTNRWLRVVAHREQREGSLQVGNEAPVTGSSPLGATQLDTDGALWLGGLPELPVGPALPKAYGTGFVGCLRDVVVGRHPLHLLEDAVTKPELRPCPTP

SEQ ID NO: 25620 - protein, 204 aa, Homo sapiens
MEFRFCRPGWSAMVRSRFTITSTSRVQAILLPQPPRFHGMISREAADQLLIVAEGSYLIRESQRQPGTYTLALRFGSQTRNFRLYYDGKHFVGEKRFESIHDLVTDGLITLYIETKAAEYIAKMTINPIYEHVGYTTLNREPAYKKHMPVLKETHDERDSTGQDGVSEKRLTSLVRRATLKENEQIPKYEKIHNFKVHTFRGPH

SEQ ID NO: 25621 - protein, 854 aa, Homo sapiens
MGELCRRDSALTALDEETLWEMMESHRHRIVRCICPSRLTPYLRQAKVLCQLDEEEVLHSPRLTNSAMRAGHLLDLLKTRGKNGAIAFLESLKFHNPDVYTLVTGLQPDVDFSNFSGLMETSKLTECLAGAIGSLQEELNQEKGQKEVLLRRCQQLQEHLGLAETRAEGLHQLEADHSRMKREVSAHFHEVLRLKDEMLSLSLHYSNALQEKELAASRCRSLQEELYLLKQELQRANMVSSCELELQEQSLRTASDQESGDEELNRLKEENEKLRSLTFSLAEKDILEQSLDEARGSRQELVERIHSLRERAVAAERQREQYWEEKEQTLLQFQKSKMACQLYREKVNALQAQVCELQKERDQAYSARDSAQREISQSLVEKDSLRRQVFELTDQVCELRTQLRQLQAEPPGVLKQEARTREPCPREKQRLVRMHAICPRDDSDCSLVSSTESQLLSDLSATSSRELVDSFRSSSPAPPSQQSLYKRVAEDFGEEPWSFSSCLEIPEGDPGALPGAKAGDPHLDYELLDTADLPQLESSLQPVSPGRLDVSESGVLMRRRPARRILSQVTMLAFQGDALLEQISVIGGNLTGIFIHRVTPGSAADQMALRPGTQIVMVDYEASEPLFKAVLEDTTLEEAVGLLRRVDGFCCLSVKVNTDGYKRLLQDLEAKVATSGDSFYIRVNLAMEGRAKGELQVHCNEVLHVTDTMFQGCGCWHAHRVNSYTMKDTAAHGTIPNYSRAQQQLIALIQDMTQQCTVTRKPSSGGPQKLVRIVSMDKAKASPLRLSFDRGQLDPSRMEGEAWLQHVLLGRELPHPGALYPGAAPSTRPAPACAPRAQGGWEDPERETVPPPRV

SEQ ID NO: 25622 - protein, 508 aa, Homo sapiens
MWETMRNLASIGKKWKDQNIKDHYKHRGRNLRSHMLERLYQTKDGSQRGGIFSQFANQNLSKKIPGVKLCESIVYGEVSMGQSSLNRHIKDHSGHEPKEYQEYGEKPDTRNQCWKPFSSHHSFRTHEIIHTGEKLYDCKECGKTFFSLKRIRRHIITHSGYTPYKCKVCGKAFDYPSRFRTHERSHTGEKPYECQECGKAFTCITSVRRHMIKHTGDGPYKCKVCGKPFHSLSSFQVHERIHTGEKPFKCKQCGKAFSCSPTLRIHERTHTGEKPYECKQCGKAFSYLPSLRLHERIHTGEKPFVCKQCGKAFRSASTFQIHERTHTGEKPYECKECGEAFSCIPSMRRHMIKHTGEGPYKCKVCGKPFHSLSPFRIHERTHTGEKPYVCKHCGKAFVSSTSIRIHERTHTGEKPYECKQCGKAFSYLNSFRTHEMIHTGEKPFECKRCGKAFRSSSSFRLHERTHTGQKPYHCKECGKAYSCRASFQRHMLTHAEDGPPYKCMWESL

SEQ ID NO: 25623 - protein, 2852 aa, Homo sapiens
MASEDNRVPSPPPTGDDGGGGGREETPTEGGALSLKPGLPIRGIRMKFAVLTGLVEVGEVSNRDIVETVFNLLVGGQFDLEMNFIIQEGESINCMVDLLEKCDITCQAEVWSMFTAILKKSIRNLQVCTEVGLVEKVLGKIEKVDNMIADLLVDMLGVLASYNLTVRELKLFFSKLQGDKGRWPPHAGKLLSVLKHMPQKYGPDAFFNFPGKSAAAIALPPIAKWPYQNGFTFHTWLRMDPVNNINVDKDKPYLYCFRTSKGLGYSAHFVGGCLIVTSIKSKGKGFQHCVKFDFKPQKWYMVTIVHIYNRWKNSELRCYVNGELASYGEITWFVNTSDTFDKCFLGSSETADANRVFCGQMTAVYLFSEALNAAQIFAIYQLGLGYKGTFKFKAESDLFLAEHHKLLLYDGKLSSAIAFTYNPRATDAQLCLESSPKDNPSIFVHSPHALMLQDVKAVLTHSIQSAMHSIGGVQVLFPLFAQLDYRQYLSDEIDLTICSTLLAFIMELLKNSIAMQEQMLACKGFLVIGYSLEKSSKSHVSRAVLELCLAFSKYLSNLQNGMPLLKQLCDHVLLNPAIWIHTPAKVQLMLYTYLSTEFIGTVNIYNTIRRVGTVLLIMHTLKYYYWAVNPQDRSGITPKGLDGPRPNQKEMLSLRAFLLMFIKQLVMKDSGVKEDELQAILNYLLTMHEDDNLMDVLQLLVALMSEHPNSMIPAFDQRNGLRVIYKLLASKSEGIRVQALKAMGYFLKHLAPKRKAEVMLGHGLFSLLAERLMLQTNLITMTTYNVLFEILIEQIGTQVIHKQHPDPDSSVKIQNPQILKVIATLLRNSPQCPESMEVRRAFLSDMIKLFNNSRENRRSLLQCSVWQEWMLSLCYFNPKNSDEQKITEMVYAIFRILLYHAVKYEWGGWRVWVDTLSITHSKVTFEIHKENLANIFREQQGKVDEEIGLCSSTSVQAASGIRRDINVSVGSQQPDTKDSPVCPHFTTNGNENSSIEKTSSLESASNIELQTTNTSYEEMKAEQENQELPDEGTLEETLTNETRNADDLEVSSDIIEAVAISSNSFITTGKDSMTVSEVTASISSPSEEDASEMPEFLDKSIVEEEEDDDYVELKVEGSPTEEANLPTELQDNSLSPAASEAGEKLDMFGNDDKLIFQEGKPVTEKQTDTETQDSKDSGIQTMTASGSSAMSPETTVSQIAVESDLGQMLEEGKKATNLTRETKLINDCHGSVSEASSEQKIAKLDVSNVATDTERLELKASPNVEAPQPHRHVLEISRQHEQPGQGIAPDAVNGQRRDSRSTVFRIPEFNWSQMHQRLLTDLLFSIETDIQMWRSHSTKTVMDFVNSSDNVIFVHNTIHLISQVMDNMVMACGGILPLLSAATSATHELENIEPTQGLSIEASVTFLQRLISLVDVLIFASSLGFTEIEAEKSMSSGGILRQCLRLVCAVAVRNCLECQQHSQLKTRGDKALKPMHSLIPLGKSAAKSPVDIVTGGISPVRDLDRLLQDMDINRLRAVVFRDIEDSKQAQFLALAVVYFISVLMVSKYRDILEPQNERHSQSCTETGSENENVSLSEITPAAFSTLTTASVEESESTSSARRRDSGIGEETATGLGSHVEVTPHTAPPGVSAGPDAISEVLSTLSLEVNKSPETKNDRGNDLDTKATPSVSVSKNVNVKDILRSLVNIPADGVTVDPALLPPACLGALGDLSVEQPVQFRSFDRSVIVAAKKSAVSPSTFNTSIPTNAVSVVSSVDSAQASDMGGESPGSRSSNAKLPSVPTVDSVSQDPVSNMSITERLEHALEKAAPLLREIFVDFAPFLSRTLLGSHGQELLIEGTSLVCMKSSSSVVELVMLLCSQEWQNSIQKNAGLAFIELVNEGRLLSQTMKDHLVRVANEAEFILSRQRAEDIHRHAEFESLCAQYSADKREDEKMCDHLIRAAKYRDHVTATQLIQKIINILTDKHGAWGNSAVSRPLEFWRLDYWEDDLRRRRRFVRNPLGSTHPEATLKTAVEHATDEDILAKGKQSIRSQALGNQNSENEILLEGDDDTLSSVDEKDLENLAGPVSLSTPAQLVAPSVVVKGTLSVTSSELYFEVDEEDPNFKKIDPKILAYTEGLHGKWLFTEIRSIFSRRYLLQNTALEIFMANRVAVMFNFPDPATVKKVVNYLPRVGVGTSFGLPQTRRISLASPRQLFKASNMTQRWQHREISNFEYLMFLNTIAGRSYNDLNQYPVFPWVITNYESEELDLTLPTNFRDLSKPIGALNPKRAAFFAERYESWEDDQVPKFHYGTHYSTASFVLAWLLRIEPFTTYFLNLQGGKFDHADRTFSSISRAWRNSQRDTSDIKELIPEFYYLPEMFVNFNNYNLGVMDDGTVVSDVELPPWAKTSEEFVHINRLALESEFVSCQLHQWIDLIFGYKQQGPEAVRALNVFYYLTYEGAVNLNSITDPVLREAVEAQIRSFGQTPSQLLIEPHPPRGSAMQVSPLMFTDKAQQDVIMVLKFPSNSPVTHVAANTQPGLATPAVITVTANRLFAVNKWHNLPAHQGAVQDQPYQLPVEIDPLIASNTGMHRRQITDLLDQSIQVHSQCFVITSDNRYILVCGFWDKSFRVYSTDTGRLIQVVFGHWDVVTCLARSESYIGGNCYILSGSRDATLLLWYWNGKCSGIGDNPGSETAAPRAILTGHDYEVTCAAVCAELGLVLSGSQEGPCLIHSMNGDLLRTLEGPENCLKPKLIQASREGHCVIFYENGLFCTFSVNGKLQATMETDDNIRAIQLSRDGQYLLTGGDRGVVVVRQVSDLKQLFAYPGCDAGIRAMALSYDQRCIISGMASGSIVLFYNDFNRWHHEYQTRY

SEQ ID NO: 25624 - protein, 459 aa, Homo sapiens
MSERKEGRGKGKGKKKERGSGKKPESAAGSQSPALPPRLKEMKSQESAAGSKLVLRCETSSEYSSLRFKWFKNGNELNRKNKPQNIKIQKKPGKSELRINKASLADSGEYMCKVISKLGNDSASANITIVESNEIITGMPASTEGAYVSSESPIRISVSTEGANTSSSTSTSTTGTSHLVKCAEKEKTFCVNGGECFMVKDLSNPSRYLCKCPNEFTGDRCQNYVMASFYKAEELYQKRVLTITGICIALLVVGIMCVVAYCKTKKQRKKLHDRLRQSLRSERNNMMNIANGPHHPNPPPENVQLVNQYVSKNVISSEHIVEREAETSFSTSHYTSTAHHSTTVTQTPSHSWSNGHTESILSESHSVIVMSSVENSRHSSPTGGPRGRLNGTGGPRECNSFLRHARETPDSYRDSPHSERHNLIAELRRNKAHRSKCMQIQLSATHLRSSSIPHLGFIL

SEQ ID NO: 25625 - protein, 712 aa, Homo sapiens
MKIKFKIKVVPALWCFYGGESALGVQSINWQTAFNRQAHHTDKFSSQELILRRGQNFQVLMIMNKGLGSNERLEFIVSTGPYPSESAMTKAVFPLSNGSSGGWSAVLQASNGNTLTISISSPASAPIGRYTMALQIFSQGGISSVKLGTFILLFNPWLNVDSVFMGNHAEREEYVQEDAGIIFVGSTNRIGMIGWNFGQFEEDILSICLSILDRSLNFRRDAATDVASRNDPKYVGRVLSAMINSNDDNGVLAGNWSGTYTGGRDPRSWNGSVEILKNWKKSGFSPVRYGQCWVFAGTLNTALRSLGIPSRVITNFNSAHDTDRNLSVDVYYDPMGNPLDKGSDSVWNFHVWNEGWFVRSDLGPSYGGWQVLDATPQERSQGVFQCGPASVIGVREGDVQLNFDMPFIFAEVNADRITWLYDNTTGKQWKNSVNSHTIGRYISTKAVGSNARMDVTDKYKYPEGSDQERQVFQKALGKLKPNTPFAATSSMGLETEEQEPSIIGKLKVAGMLAVGKEVNLVLLLKNLSRDTKTVTVNMTAWTIIYNGTLVHEVWKDSATMSLDPEEEAEHPIKISYAQYEKYLKSDNMIRITAVCKVPDESEVVVERDIILDNPTLTLEVLNEARVRKPVNVQMLFSNPLDEPVRDCVLMVEGSGLLLGNLKIDVPTLGPKEGSRVRFDILPSRSGTKQLLADFSCNKFPAIKAMLSIDVAE

SEQ ID NO: 25626 - protein, 314 aa, Homo sapiens
MPNVAETERSNDSGNGEHKSERKSPEENLQGAVKSFCTSASGAPLGPKGDGHYPWSCPVTHTREKIYAICSDYAFLNQATSIYKTPNPSRSPCLPDSTSLSAGNNSSRYIGIPTSTSEIIYNEENSLENLSNSLGKLPLAWEIDKSEFDGVTTNSKHKSGNAKKQVSKRKTSDKKGRYQKECPQHSPLEDIKQRKVLDLRRWYCISRPQYKTSCGISSLISCWNFLYSTMGAGNLPPITQEEALHILGFQPPFEDIRFGPFTGNTTLMRWFRQINDHFHVKGCSYVLYKPHGKNKTAGETAGDLSHHRKLNIGS

SEQ ID NO: 25627 - protein, 2555 aa, Homo sapiens
MPPLLAPLLCLALLPALAARGPRCSQPGETCLNGGKCEAANGTEACVCGGAFVGPRCQDPNPCLSTPCKNAGTCHVVDRRGVADYACSCALGFSGPLCLTPLDNACLTNPCRNGGTCDLLTLTEYKCRCPPGWSGKSCQQADPCASNPCANGGQCLPFEASYICHCPPSFHGPTCRQDVNECGQKPGLCRHGGTCHNEVGSYRCVCRATHTGPNCERPYVPCSPSPCQNGGTCRPTGDVTHECACLPGFTGQNCEENIDDCPGNNCKNGGACVDGVNTYNCRCPPEWTGQYCTEDVDECQLMPNACQNGGTCHNTHGGYNCVCVNGWTGEDCSENIDDCASAACFHGATCHDRVASFYCECPHGRTGLLCHLNDACISNPCNEGSNCDTNPVNGKAICTCPSGYTGPACSQDVDECSLGANPCEHAGKCINTLGSFECQCLQGYTGPRCEIDVNECVSNPCQNDATCLDQIGEFQCICMPGYEGVHCEVNTDECASSPCLHNGRCLDKINEFQCECPTGFTGHLCQYDVDECASTPCKNGAKCLDGPNTYTCVCTEGYTGTHCEVDIDECDPDPCHYGSCKDGVATFTCLCRPGYTGHHCETNINECSSQPCRHGGTCQDRDNAYLCFCLKGTTGPNCEINLDDCASSPCDSGTCLDKIDGYECACEPGYTGSMCNINIDECAGNPCHNGGTCEDGINGFTCRCPEGYHDPTCLSEVNECNSNPCVHGACRDSLNGYKCDCDPGWSGTNCDINNNECESNPCVNGGTCKDMTSGYVCTCREGFSGPNCQTNINECASNPCLNQGTCIDDVAGYKCNCLLPYTGATCEVVLAPCAPSPCRNGGECRQSEDYESFSCVCPTGWQGQTCEVDINECVLSPCRHGASCQNTHGGYRCHCQAGYSGRNCETDIDDCRPNPCHNGGSCTDGINTAFCDCLPGFRGTFCEEDINECASDPCRNGANCTDCVDSYTCTCPAGFSGIHCENNTPDCTESSCFNGGTCVDGINSFTCLCPPGFTGSYCQHDVNECDSQPCLHGGTCQDGCGSYRCTCPQGYTGPNCQNLVHWCDSSPCKNGGKCWQTHTQYRCECPSGWTGLYCDVPSVSCEVAAQRQGVDVARLCQHGGLCVDAGNTHHCRCQAGYTGSYCEDLVDECSPSPCQNGATCTDYLGGYSCKCVAGYHGVNCSEEIDECLSHPCQNGGTCLDLPNTYKCSCPRGTQGVHCEINVDDCNPPVDPVSRSPKCFNNGTCVDQVGGYSCTCPPGFVGERCEGDVNECLSNPCDARGTQNCVQRVNDFHCECRAGHTGRRCESVINGCKGKPCKNGGTCAVASNTARGFICKCPAGFEGATCENDARTCGSLRCLNGGTCISGPRSPTCLCLGPFTGPECQFPASSPCLGGNPCYNQGTCEPTSESPFYRCLCPAKFNGLLCHILDYSFGGGAGRDIPPPLIEEACELPECQEDAGNKVCSLQCNNHACGWDGGDCSLNFNDPWKNCTQSLQCWKYFSDGHCDSQCNSAGCLFDGFDCQRAEGQCNPLYDQYCKDHFSDGHCDQGCNSAECEWDGLDCAEHVPERLAAGTLVVVVLMPPEQLRNSSFHFLRELSRVLHTNVVFKRDAHGQQMIFPYYGREEELRKHPIKRAAEGWAAPDALLGQVKASLLPGGSEGGRRRRELDPMDVRGSIVYLEIDNRQCVQASSQCFQSATDVAAFLGALASLGSLNIPYKIEAVQSETVEPPPPAQLHFMYVAAAAFVLLFFVGCGVLLSRKRRRQHGQLWFPEGFKVSEASKKKRREPLGEDSVGLKPLKNASDGALMDDNQNEWGDEDLETKKFRFEEPVVLPDLDDQTDHRQWTQQHLDAADLRMSAMAPTPPQGEVDADCMDVNVRGPDGFTPLMIASCSGGGLETGNSEEEEDAPAVISDFIYQGASLHNQTDRTGETALHLAARYSRSDAAKRLLEASADANIQDNMGRTPLHAAVSADAQGVFQILIRNRATDLDARMHDGTTPLILAARLAVEGMLEDLINSHADVNAVDDLGKSALHWAAAVNNVDAAVVLLKNGANKDMQNNREETPLFLAAREGSYETAKVLLDHFANRDITDHMDRLPRDIAQERMHHDIVRLLDEYNLVRSPQLHGAPLGGTPTLSPPLCSPNGYLGSLKPGVQGKKVRKPSSKGLACGSKEAKDLKARRKKSQDGKGCLLDSSGMLSPVDSLESPHGYLSDVASPPLLPSPFQQSPSVPLNHLPGMPDTHLGIGHLNVAAKPEMAALGGGGRLAFETGPPRLSHLPVASGTSTVLGSSSGGALNFTVGGSTSLNGQCEWLSRLQSGMVPNQYNPLRGSVAPGPLSTQAPSLQHGMVGPLHSSLAASALSQMMSYQGLPSTRLATQPHLVQTQQVQPQNLQMQQQNLQPANIQQQQSLQPPPPPPQPHLGVSSAASGHLGRSFLSGEPSQADVQPLGPSSLAVHTILPQESPALPTSLPSSLVPPVTAAQFLTPPSQHSYSSPVDNTPSHQLQVPEHPFLTPSPESPDQWSSSSPHSNVSDWSEGVSSPPTSMQSQIARIPEAFK

SEQ ID NO: 25628 - protein, 669 aa, Homo sapiens
MLTFFLVSGGSLWLFVEFVLSLLEKMQTQEILRILRLPELGDLGQFFRSLSATTLDSGGARRSVIGSGPQLLTHYYDDARTMYQVFRRGLSISGNGPCLGFRKPKQPYQWLSYQEVADRAEFLGSGLLQHNCKACTDQFIGVFAQNRPEWIIVELACYTYSMVVVPLYDTLGPGAIRYIINTADISTVIVDKPQKAVLLLEHVERKETPGLKLIILMDPFEEALKERGQKCGVVIKSMQAVEDCGQENHQAPVPPQPDDLSIVCFTSGTTGNPKGAMLTHGNVVADFSGFLKVTEKVIFPRQDDVLISFLPLAHMFERVIQSVVYCHGGRVGFFQGDIRLLSDDMKALCPTIFPVVPRLLNRMYDKIFSQANTPLKRWLLEFAAKRKQAEVRSGIIRNDSIWDELFFNKIQASLGGCVRMIVTGAAPASPTVLGFLRAALGCQVYEGYGQTECTAGCTFTTPGDWTSGHVGAPLPCNHIKLVDVEELNYWACKGEGEICVRGPNVFKGYLKDPDRTKEALDSDGWLHTGDIGKWLPGEYVAPEKIENIYIRSQPVAQIYVHGDSLKAFLVGIVVPDPEVMPSWAQKRGIEGTYADLCTNKDLKKAILEDMVRLGKESGLHSFEQVKAIHIHSDMFSVQNGLLTPTLKAKRPELREYFKKQIEELYSISM

SEQ ID NO: 25629 - protein, 522 aa, Homo sapiens
MEIYSPDMSEVAAERSSSPSTQLSADPSLDGLPAAEDMPEPQTEDGRTPGLVGLAVPCCACLEAERLRGCLNSEKICIVPILACLVSLCLCIAGLKWVFVDKIFEYDSPTHLDPGGLGQDPIISLDATAASAVWVSSEAYTSPVSRAQSESEVQVTVQGDKAVVSFEPSAAPTPKNRIFAFSFLPSTAPSFPSPTRNPEVRTPKSATQPQTTETNLQTAPKLSTSTSTTGTSHLVKCAEKEKTFCVNGGECFMVKDLSNPSRYLCKCPNEFTGDRCQNYVMASFYKHLGIEFMEAEELYQKRVLTITGICIALLVVGIMCVVAYCKTKKQRKKLHDRLRQSLRSERNNMMNIANGPHHPNPPPENVQLVNQYVSKNVISSEHIVEREAETSFSTSHYTSTAHHSTTVTQTPSHSWSNGHTESILSESHSVIVMSSVENSRHSSPTGGPRGRLNGTGGPRECNSFLRHARETPDSYRDSPHSERHNLIAELRRNKAHRSKCMQIQLSATHLRSSSIPHLGFIL

SEQ ID NO: 25630 - protein, 1521 aa, Homo sapiens
MKGSEVSLEKKKKIKMPVKRLREVVSQNHGDHLVLLKDELPCVPPALSANKRLPVGTGTSLNGTSRGSSDLTSARNCYQPLLENPMVSESDFSKDVAVQVLPLDKIEENNKQKANDIFISQYTMGQKDALRTVLKQKAQSMPVFKEVKVHLLEDAGIEKDAVTQETRISPSGIDSATTVAAATAAAIATAAPLIKVQSDLEAKVNSVTELLSKLQETDKHLQRVTEQQTSIQRKQEKLHCHDHEKQMNVFMEQHIRHLEKLQQQQIDIQTHFISAALKTSSFQPVSMPSSRAVEKYSVKPEHPNLGSCNPSLYNTFASKQAPLKEVEDTSFDKQKSPLETPAPRRFAPVPVSRDDELSKRENLLEEKENMEVSCHRGNVRLLEQILNNNDSLTRKSESSNTTSLTRSKIGWTPEKTNRFPSCEELETTKVTMQKSDDVLHDLGQKEKETNSMVQPKESLSMLKLPDLPQNSVKLQTTNTTRSVLKDAEKILRGVQNNKKVLEENLEAIIRAKDGAAMYSLINALSTNREMSEKIRIRKTVDEWIKTISAEIQDELSRTDYEQKRFDQKNQRTKKGQNMTKDIRTNTQDKTVNKSVIPRKHSQKQIEEHFRNLPMRGMPASSLQKERKEGLLKATTVIQDEDYMLQVYGKPVYQGHRSTLKKGPYLRFNSPSPKSRPQRPKVIERVKGTKVKSIRTQTDFYATKPKKMDSKMKHSVPVLPHGDQQYLFSPSREMPTFSGTLEGHLIPMAILLGQTQSNSDTMPPAGVIVSKPHPVTVTTSIPPSSRKVETGVKKPNIAIVEMKSEKKDPPQLTVQVLPSVDIDSISNSSADVLSPLSSPKEASLPPVQTWIKEEEKCDEIPDSEPILEFNRSVKADSTKYNGPPFPPVASTFQPTADILDKVIERKETLENSLIQWVEQEIMSRIISGLFPVQQQIAPSISVSVSETSEPLTSDIVEGTSSGALQLFVDAGVPVNSNVIKHFVNEALAETIAVMLGDREAKKQGPVATGVSGDASTNETYLPARVCTPLPTPQPTPPCSPSSPAKECVLVKTPDSSPCDSDHDMAFPVKEICAEKGDDMPAIMLVNTPTVTPTTTPPPAAAVFTPTLSDISIDKLKVSSPELPKPWGDGDLPLEEENPNSPQEELHPRAIVMSVAKDEEPESMDFPAQPPPPEPVPFMPFPAGTKAPSPSQMPGSDSSTLESTLSVTVTETETLDKPISEGEILFSCGQKLAPKILEDIGLYLTNLNDSLSSTLHDAVEMEDDPPSEGQVIRMSHKKFHADAILSFAKQNQESAVSQQAVYHSEDLENSVGELSEGQRPQLTAAAENILMGHSLYMQPPVTNTQSLDQQCDPKPLSRQFDTVSGSIYEDSCASHGPMSLGELELEPNSKLVLPTTLLTAQENDVNLPVAAEDFSQYQLKQNQDVKQVEHKPSQSYLRVRNKSDIAPSQQQVSPGDMDRTQIELNPYLTCVFSGGKAVPLSASQMPPAKMSVMLPSVNLEDCSQSLSLSTMQEDMESSGADTF

SEQ ID NO: 25631 - protein, 1240 aa, Homo sapiens
MTLDRPGEGATMLKTFTVLLFCIRMSLGMTSIVMDPQPELWIESNYPQAPWENITLWCRSPSRISSKFLLLKDKTQMTWIRPSHKTFQVSFLIGALTESNAGLYRCCYWKETGWSKPSKVLELEAPGQLPKPIFWIQAETPALPGCNVNILCHGWLQDLVFMLFKEGYAEPVDYQVPTGTMAIFSIDNLTPEDEGVYICRTHIQMLPTLWSEPSNPLKLVVAGLYPKPTLTAHPGPIMAPGESLNLRCQGPIYGMTFALMRVEDLEKSFYHKKTIKNEANFFFQSLKIQDTGHYLCFYYDASYRGSLLSDVLKIWVTDTFPKTWLLARPSAVVQMGQNVSLRCRGPVDGVGLALYKKGEDKPLQFLDATSIDDNTSFFLNNVTYSDTGIYSCHYLLTWKTSIRMPSHNTVELMVVDKPPKPSLSAWPSTVFKLGKAITLQCRVSHPVLEFSLEWEERETFQKFSVNGDFIISNVDGKGTGTYSCSYRVETHPNIWSHRSEPLKLMGPAGYLTWNYVLNEAIRLSLIMQLVALLLVVLWIRWKCRRLRIREAWLLGTAQGVTMLFIVTALLCCGLCNGVLIEETEIVMPTPKPELWAETNFPLAPWKNLTLWCRSPSGSTKEFVLLKDGTGWIATRPASEQVRAAFPLGALTQSHTGSYHCHSWEEMAVSEPSEALELVGTDILPKPVISASPTIRGQELQLRCKGWLAGMGFALYKEGEQEPVQQLGAVGREAFFTIQRMEDKDEGNYSCRTHTEKRPFKWSEPSEPLELVIKEMYPKPFFKTWASPVVTPGARVTFNCSTPHQHMSFILYKDGSEIASSDRSWASPGASAAHFLIISVGIGDGGNYSCRYYDFSIWSEPSDPVELVVTEFYPKPTLLAQPGPVVFPGKSVILRCQGTFQGMRFALLQEGAHVPLQFRSVSGNSADFLLHTVGAEDSGNYSCIYYETTMSNRGSYLSMPLMIWVTGLLPKPSLLAQPGPMVAPGENMTLQCQGELPDSTFVLLKEGAQEPLEQQRPSGYRADFWMPAVRGEDSGIYSCVYYLDSTPFAASNHSDSLEIWVTDKPPKPSLSAWPSTMFKLGKDITLQCRGPLPGVEFVLEHDGEEAPQQFSEDGDFVINNVEGKGIGNYSCSYRLQAYPDIWSEPSDPLELVGAAGPVAQECTVGNIVRSSLIVVVVVALGVVLAIEWKKWPRLRTRGSETDGRDQTIALEECNQEGEPGTPANSPSSTSQRISVELPVPI

SEQ ID NO: 25632 - protein, 1274 aa, Homo sapiens
MDSQELKTLINYYCQERYFHHVLLVASEGIKRYGSDPVFRFYHAYGTLMEGKTQEALREFEAIKNKQDVSLCSLLALIYAHKMSPNPDREAILESDARVKEQRKGAGEKALYHAGLFLWHIGRHDKAREYIDRMIKISDGSKQGHVLKAWLDITRGKEPYTKKALKYFEEGLQDGNDTFALLGKAQCLEMRQNYSGALETVNQIIVNFPSFLPAFVKKMKLQLALQDWDQTVETAQRLLLQDSQNVEALRMQALYYVCREGDIEKASTKLENLGNTLDAMEPQNAQLFYNITLAFSRTCGRSQLILQKIQTLLERAFSLNPQQSEFATELGYQMILQGRVKEALKWYKTAMTLDETSVSALVGFIQCQLIEGQLQDADQQLEFLNEIQQSIGKSAELIYLHAVLAMKKNKRQEEVINLLNDVLDTHFSQLEGLPLGIQYFEKLNPDFLLEIVMEYLSFCPMQPASPGQPLCPLLRRCISVLETVVRTVPGLLQTVFLIAKVKYLSGDIEAAFNNLQHCLEHNPSYADAHLLLAQVYLSQEKVKLCSQSLELCLSYDFKVRDYPLYHLIKAQSQKKMGEIADAIKTLHMAMSLPGMKRIGASTKSKDRKTEVDTSHRLSIFLELIDVHRLNGEQHEATKVLQDAIHEFSGTSEEVRVTIANADLALAQGDIERALSILQNVTAEQPYFIEAREKMADIYLKHRKDKMLYITCFREIAERMANPRSFLLLGDAYMNILEPEEAIVAYEQALNQNPKDGTLASKMGKALIKTHNYSMAITYYEAALKTGQKNYLCYDLAELLLKLKWYDKAEKVLQHALAHEPVNELSALMEDGRCQVLLAKVYSKMEKLGDAITALQQARELQARVLKRVQMEQPDAVPAQKHLAAEICAEIAKHSVAQRDYEKAIKFYREALVHCETDNKIMLELARLYLAQDDPDSCLRQCALLLQSDQDNEAATMMMADLMFRKQDYEQAVFHLQQLLERKPDNYMTLSRLIDLLRRCGKLEDVPRFFSMAEKRNSRAKLEPGFQYCKGLYLWYTGEPNDALRHFNKARKDRDWGQNALYNMIEICLNPDNETVGGEVFENLDGDLGNSTEKQESVQLAVRTAEKLLKELKPQTVQGHVQLRIMENYCLMATKQKSNVEQALNTFTEIAASEKEHIPALLGMATAYMILKQTPRARNQLKRIAKMNWNAIDAEEFEKSWLLLADIYIQSAKYDMAEDLLKRCLRHNRSCCKAYEYMGYIMEKEQAYTDAALNYEMAWKYSNRTNPAVGFDCLM

SEQ ID NO: 25633 - protein, 820 aa, Homo sapiens
MFSQQQQQQLQQQQQQLQQLQQQQLQQQQLQQQQLLQLQQLLQQSPPQAPLPMAVSRGLPPQQPQQPLLNLQGTNSASLLNGSMLQRALLLQQLQGLDQFAMPPATYDTAGLTMPTATLGNLRGYGMASPGLAAPSLTPPQLATPNLQQFFPQATRQSLLGPPPVGVPMNPSQFNLSGRNPQKQARTSSSTTPNRKTMPVEDKSDPPEGSEEAAEPRMDTPEDQDLPPCPEDIAKEKRTPAPEPEPCEASELPAKRLRSSEEPTEKEPPGQLQVKAQPQARMTVPKQTQTPDLLPEALEAQVLPRFQPRVLQVQAQVQSQTQPRIPSTDTQVQPKLQKQAQTQTSPEHLVLQQKQVQPQLQQEAEPQKQVQPQVHTQAQPSVQPQEHPPAQVSVQPPEQTHEQPHTQPQVSLLAPEQTPVVVHVCGLEMPPDAVEAGGGMEKTLPEPVGTQVSMEEIQNESACGLDVGECENRAREMPGVWGAGGSLKVTILQSSDSRAFSTVPLTPVPRPSDSVSSTPAATSTPSKQALQFFCYICKASCSSQQEFQDHMSEPQHQQRLGEIQHMSQACLLSLLPVPRDVLETEDEEPPPRRWCNTCQLYYMGDLIQHRRTQDHKIAKQSLRPFCTVCNRYFKTPRKFVEHVKSQGHKDKAKELKSLEKEIAGQDEDHFITVDAVGCFEGDEEEEEDDEDEEEIEVEEELCKQVRSRDISREEWKGSETYSPNTAYGVDFLVPVMGYICRICHKFYHSNSGAQLSHCKSLGHFENLQKYKAAKNPSPTTRPVSRRCAINARNALTALFTSSGRPPSQPNTQDKTPSKAL

SEQ ID NO: 25634 - protein, 3616 aa, Homo sapiens
METCDSPPISRQENGQSTSKLCGTTQLDNEVPEKVAGMEPDRENSSTDDNLKTDERKSEALLGFSVENAAATQVTSAKEIPCNECATSFPSLQKYMEHHCPNARLPVLKDDNESEISELEDSDVENLTGEIVYQPDGSAYIIEDSKESGQNAQTGANSKLFSTAMFLDSLASAGEKSDQSASAPMSFYPQIINTFHIASSLGKPFTADQAFPNTSALAGVGPVLHSFRVYDLRHKREKDYLTSDGSAKNSCVSKDVPNNVDLSKFDGCVSDGKRKPVLMCFLCKLSFGYIRSFVTHAVHDHRMTLNDEEQKLLSNKCVSAIIQGIGKDKEPLISFLEPKKSTSVYPHFSTTNLIGPDPTFRGLWSAFHVENGDSLPAGFAFLKGSASTSSSAEQPLGITQMPKAEVNLGGLSSLVVNTPITSVSLSHSSSESSKMSESKDQENNCERPKESNVLHPNGECPVKSEPTEPGDEDEEDAYSNELDDEEVLGELTDSIGNKDFPLLNQSISPLSSSVLKFIEKGTSSSSATVSDDTEKKKQTAAVRASGSVASNYGISGKDFADASASKDSATAAHPSEIARGDEDSSATPHQHGFTPSTPGTPGPGGDGSPGSGIECPKCDTVLGSSRSLGGHMTMMHSRNSCKTLKCPKCNWHYKYQQTLEAHMKEKHPEPGGSCVYCKTGQPHPRLARGESYTCGYKPFRCEVCNYSTTTKGNLSIHMQSDKHLNNVQNLQNGNGEQVFGHSAPAPNTSLSGCGTPSPSKPKQKPTWRCEVCDYETNVARNLRIHMTSEKHMHNMMLLQQNMKQIQHNLHLGLAPAEAELYQYYLAQNIGLTGMKLENPADPQLMINPFQLDPATAAALAPGLVNNELPPEIRLASGQLMGDDLSLLTAGELSPYISDPALKLFQCAVCNKFTSDSLEALSVHVSSERSLPEEEWRAVIGDIYQCKLCNYNTQLKANFQLHCKTDKHMQKYQLVAHIKEGGKSNEWRLKCIAIGNPVHLKCNACDYYTNSVDKLRLHTTNHRHEAALKLYKHLQKQEGAVNPESCYYYCAVCDYTTKVKLNLVQHVRSVKHQQTEGLRKLQLHQQGLAPEEDNLSEIFFVKDCPPNELETASLGARTCDDDLTEQQLRSTSEEQSEEAEGAIKPTAVAEDDEKDTSERDNSEGKNSNKDSGIITPEKELKVSVAGGTQPLLLAKEEDVATKRSKPTEDNKFCHEQFYQCPYCNYNSRDQSRIQMHVLSQHSVQPVICCPLCQDVLSNKMHLQLHLTHLHSVSPDCVEKLLMTVPVPDVMMPNSMLLPAAASEKSERDTPAAVTAEGSGKYSGESPMDDKSMAGLEDSKANVEVKNEEQKPTKEPLEVSEWNKNSSKDVKIPDTLQDQLNEQQKRQPLSVSDRHVYKYRCNHCSLAFKTMQKLQIHSQYHAIRAATMCNLCQRSFRTFQALKKHLEAGHPELSEAELQQLYASLPVNGELWAESETMSQDDHGLEQEMEREYEVDHEGKASPVGSDSSSIPDDMGSEPKRTLPFRKGPNFTMEKFLDPSRPYKCTVCKESFTQKNILLVHYNSVSHLHKLKKVLQEASSPVPQETNSNTDNKPYKCSICNVAYSQSSTLEIHMRSVLHQTKARAAKLEPSGHVAGGHSIAANVNSPGQGMLDSMSLAAVNSKDTHLDAKELNKKQTPDLISAQPAHHPPQSPAQIQMQLQHELQQQAAFFQPQFLNPAFLPHFPMTPEALLQFQQPQFLFPFYIPGTEFSLGPDLGLPGSATFGMPGMTGMAGSLLEDLKQQIQTQHHVGQTQLQILQQQAQQYQATQPQLQPQKQQQQPPPPQQQQQQQASKLLKQEQSNIVSADCQIMKDVPSYKEAEDISEKPEKPKQEFISEGEGLKEGKDTKKQKSLEPSIPPPRIASGARGNAAKALLENFGFELVIQYNENRQKVQKKGKSGEGENTDKLECGTCGKLFSNVLILKSHQEHVHGQFFPYAALEKFARQYREAYDKLYPISPSSPETPPPPPPPPPLPPAPPQPSSMGPVKIPNTVSTPLQAPPPTPPPPPPPPPPPPPPPPPPPPSAPPQVQLPVSLDLPLFPSIMMQPVQHPALPPQLALQLPQMDALSADLTQLCQQQLGLDPNFLRHSQFKRPRTRITDDQLKILRAYFDINNSPSEEQIQEMAEKSGLSQKVIKHWFRNTLFKERQRNKDSPYNFSNPPITVLEDIRIDPQPTSLEHYKSDASFSKRSSRTRFTDYQLRVLQDFFDTNAYPKDDEIEQLSTVLNLPTRVIVVWFQNARQKARKSYENQAETKDNEKRELTNERYIRTSNMQYQCKKCNVVFPRIFDLITHQKKQCYKDEDDDAQDESQTEDSMDATDQVVYKHCTVSGQTDAAKNAAAPAASSGSGTSTPLIPSPKPEPEKTSPKPEYPAEKPKQSDPSPPSQGTKPALPLASTSSDPPQASTAQPQPQPQPPKQPQLIGRPPSASQTPVPSSPLQISMTSLQNSLPPQLLQYQCDQCTVAFPTLELWQEHQHMHFLAAQNQFLHSPFLERPMDMPYMIFDPNNPLMTGQLLGSSLTQMPPQASSSHTTAPTTVAASLKRKLDDKEDNNCSEKEGGNSGEDQHRDKRLRTTITPEQLEILYEKYLLDSNPTRKMLDHIAREVGLKKRVVQVWFQNTRARERKGQFRAVGPAQSHKRCPFCRALFKAKSALESHIRSRHWNEGKQAGYSLPPSPLISTEDGGESPQKYIYFDYPSLPLTKIDLSSENELASTVSTPVSKTAELSPKNLLSPSSFKAECSEDVENLNAPPAEAGYDQNKTDFDETSSINTAISDATTGDEGNTEMESTTGSSGDVKPALSPKEPKTLDTLPKPATTPTTEVCDDKFLFSLTSPSIHFNDKDGDHDQSFYITDDPDDNADRSETSSIADPSSPNPFGSSNPFKSKSNDRPGHKRFRTQMSNLQLKVLKACFSDYRTPTMQECEMLGNEIGLPKRVVQVWFQNARAKEKKFKINIGKPFMINQGGTEGTKPECTLCGVKYSARLSIRDHIFSKQHISKVRETVGSQLDREKDYLAPTTVRQLMAQQELDRIKKASDVLGLTVQQPGMMDSSSLHGISLPTAYPGLPGLPPVLLPGMNGPSSLPGFPQNSNTLTPPGAGMLGFPTSATSSPALSLSSAPTKPLLQTPPPPPPPPPPPPSSSLSGQQTEQQNKESEKKQTKPNKVKKIKEEELEATKPEKHPKKEEKISSALSVLGKVVGETHVDPIQLQALQNAIAGDPASFIGGQFLPYFIPGFASYFTPQLPGTVQGGYFPPVCGMESLFPYGPTMPQTLAGLSPGALLQQYQQYQQNLQESLQKQQKQQQEQQQKPVQAKTSKVESDQPQNSNDASETKEDKSTATESTKEEPQLESKSADFSDTYVVPFVKYEFICRKCQMMFTDEDAAVNHQKSFCYFGQPLIDPQETVLRVPVSKYQCLACDVAISGNEALSQHLQSSLHKEKTIKQAMRNAKEHVRLLPHSVCSPNPNTTSTSQSAASSNNTYPHLSCFSMKSWPNILFQASARRAASPPSSPPSLSLPSTVTSSLCSTSGVQTSLPTESCSDESDSELSQKLEDLDNSLEVKAKPASGLDGNFNSIRMDMFSV

SEQ ID NO: 25635 - protein, 1261 aa, Homo sapiens
MEGYPWWPCLVYNHPFDGTFIREKGKSVRVHVQFFDDSPTRGWVSKRLLKPYTGSKSKEAQKGGHFYSAKPEILRAMQRADEALNKDKIKRLELAVCDEPSEPEEEEEMEVGTTYVTDKSEEDNEIESEEEVQPKTQGSRRSSRQIKKRRVISDSESDIGGSDVEFKPDTKEEGSSDEISSGVGDSESEGLNSPVKVARKRKRMVTGNGSLKRKSSRKETPSATKQATSISSETKNTLRAFSAPQNSESQAHVSGGGDDSSRPTVWYHETLEWLKEEKRRDEHRRRPDHPDFDASTLYVPEDFLNSCTPGMRKWWQIKSQNFDLVICYKVGKFYELYHMDALIGVSELGLVFMKGNWAHSGFPEIAFGRYSDSLVQKGYKVARVEQTETPEMMEARCRKMAHISKYDRVVRREICRIITKGTQTYSVLEGDPSENYSKYLLSLKEKEEDSSGHTRAYGVCFVDTSLGKFFIGQFSDDRHCSRFRTLVAHYPPVQVLFEKGNLSKETKTILKSSLSCSLQEGLIPGSQFWDASKTLRTLLEEEYFREKLSDGIGVMLPQVLKGMTSESDSIGLTPGEKSELALSALGGCVFYLKKCLIDQELLSMANFEEYIPLDSDTVSTTRSGAIFTKAYQRMVLDAVTLNNLEIFLNGTNGSTEGTLLERVDTCHTPFGKRLLKQWLCAPLCNHYAINDRLDAIEDLMVVPDKISEVVELLKKLPDLERLLSKIHNVGSPLKSQNHPDSRAIMYEETTYSKKKIIDFLSALEGFKVMCKIIGIMEEVADGFKSKILKQVISLQTKNPEGRFPDLTVELNRWDTAFDHEKARKTGLITPKAGFDSDYDQALADIRENEQSLLEYLEKQRNRIGCRTIVYWGIGRNRYQLEIPENFTTRNLPEEYELKSTKKGCKRYWTKTIEKKLANLINAEERRDVSLKDCMRRLFYNFDKNYKDWQSAVECIAVLDVLLCLANYSRGGDGPMCRPVILLPEDTPPFLELKGSRHPCITKTFFGDDFIPNDILIGCEEEEQENGKAYCVLVTGPNMGGKSTLMRQAGLLAVMAQMGCYVPAEVCRLTPIDRVFTRLGASDRIMSGESTFFVELSETASILMHATAHSLVLVDELGRGTATFDGTAIANAVVKELAETIKCRTLFSTHYHSLVEDYSQNVAVRLGHMACMVENECEDPSQETITFLYKFIKGACPKSYGFNAARLANLPEEVIQKGHRKAREFEKMNQSLRLFREVCLASERSTVDAEAVHKLLTLIKEL

SEQ ID NO: 25636 - protein, 764 aa, Homo sapiens
MCIRQLKFFTTACVCECPQNILSPQPSCVNLGMMWTWALWMLPSLCKFSLAALPAKPENISCVYYYRKNLTCTWSPGKETSYTQYTVKRTYAFGEKHDNCTTNSSTSENRASCSFFLPRITIPDNYTIEVEAENGDGVIKSHMTYWRLENIAKTEPPKIFRVKPVLGIKRMIQIEWIKPELAPVSSDLKYTLRFRTVNSTSWMEVNFAKNRKDKNQTYNLTGLQPFTEYVIALRCAVKESKFWSDWSQEKMGMTEEEAPCGLELWRVLKPAEADGRRPVRLLWKKARGAPVLEKTLGYNIWYYPESNTNLTETMNTTNQQLELHLGGESFWVSMISYNSLGKSPVATLRIPAIQEKSFQCIEVMQACVAEDQLVVKWQSSALDVNTWMIEWFPDVDSEPTTLSWESVSQATNWTIQQDKLKPFWCYNISVYPMLHDKVGEPYSIQAYAKEGVPSEGPETKVENIGVKTVTITWKEIPKSERKGIICNYTIFYQAEGGKGFSKTVNSSILQYGLESLKRKTSYIVQVMASTSAGGTNGTSINFKTLSFSVFEIILITSLIGGGLLILIILTVAYGLKKPNKLTHLCWPTVPNPAESSIATWHGDDFKDKLNLKESDDSVNTEDRILKPCSTPSDKLVIDKLVVNFGNVLQEIFTDEARTGQENNLGGEKNGYVTCPFRPDCPLGKSFEELPVSPEIPPRKSQYLRSRMPEGTRPEAKEQLLFSGQSLVPDHLCEEGAPNPYLKNSVTAREFLVSEKLPEHTKGEV

SEQ ID NO: 25637 - protein, 322 aa, Homo sapiens
MFIKMSQPKKRAETLMFSEHAVISMRDGKLTLMFRVGNLRNSHMVSAQIRCKLLKSRQTPEGEFLPLDQLELDVGFSTGADQLFLVSPLTICHVIDAKSPFYDLSQRSMQTEQFEIVVILEGIVETTGMTCQARTSYTEDEVLWGHRFFPVISLEEGFFKVDYSQFHATFEVPTPPYSVKEQEEMLLMSSPLIAPAITNSKERHNSVECLDGLDDITTKLPSKLQKITGREDFPKKLLRMSSTTSEKAYSLGDLPMKLQRISSVPGNSEEKLVSKTTKMLSDPMSQSVADLPPKLQKMAGGAARMEGNLPAKLRKMNSDRFT

SEQ ID NO: 25638 - protein, 700 aa, Homo sapiens
MEIYSPDMSEVAAERSSSPSTQLSADPSLDGLPAAEDMPEPQTEDGRTPGLVGLAVPCCACLEAERLRGCLNSEKICIVPILACLVSLCLCIAGLKWVFVDKIFEYDSPTHLDPGGLGQDPIISLDATAASAVWVSSEAYTSPVSRAQSESEVQVTVQGDKAVVSFEPSAAPTPKNRIFAFSFLPSTAPSFPSPTRNPEVRTPKSATQPQTTETNLQTAPKLSTSTSTTGTSHLVKCAEKEKTFCVNGGECFMVKDLSNPSRYLCKCPNEFTGDRCQNYVMASFYKHLGIEFMEAEELYQKRVLTITGICIALLVVGIMCVVAYCKTKKQRKKLHDRLRQSLRSERNNMMNIANGPHHPNPPPENVQLVNQYVSKNVISSEHIVEREAETSFSTSHYTSTAHHSTTVTQTPSHSWSNGHTESILSESHSVIVMSSVENSRHSSPTGGPRGRLNGTGGPRECNSFLRHARETPDSYRDSPHSERYVSAMTTPARMSPVDFHTPSSPKSPPSEMSPPVSSMTVSMPSMAVSPFMEEERPLLLVTPPRLREKKFDHHPQQFSSFHHNPAHDSNSLPASPLRIVEDEEYETTQEYEPAQEPVKKLANSRRAKRTKPNGHIANRLEVDSNTSSQSSNSESETEDERVGEDTPFLGIQNPLAASLEATPAFRLADSRTNPAGRFSTQEEIQARLSSVIANQDPIAV

SEQ ID NO: 25639 - protein, 746 aa, Homo sapiens
MDSKESLTPGREENPSSVLAQERGDVMDFYKTLRGGATVKVSASSPSLAVASQSDSKQRRLLVDFPKGSVSNAQQPDLSKAVSLSMGLYMGETETKVMGNDLGFPQQGQISLSSGETDLKLLEESIANLNRSTSVPENPKSSASTAVSAAPTEKEFPKTHSDVSSEQQHLKGQTGTNGGNVKLYTTDQSTFDILQDLEFSSGSPGKETNESPWRSDLLIDENCLLSPLAGEDDSFLLEGNSNEDCKPLILPDTKPKIKDNGDLVLSSPSNVTLPQVKTEKEDFIELCTPGVIKQEKLGTVYCQASFPGANIIGNKMSAISVHGVSTSGGQMYHYDMNTASLSQQQDQKPIFNVIPPIPVGSENWNRCQGSGDDNLTSLGTLNFPGRTVFSNGYSSPSMRPDVSSPPSSSSTATTGPPPKLCLVCSDEASGCHYGVLTCGSCKVFFKRAVEGQHNYLCAGRNDCIIDKIRRKNCPACRYRKCLQAGMNLEARKTKKKIKGIQQATTGVSQETSENPGYDSSVPDSTWRIMTTLNMLGGRQVIAAVKWAKAIPGFRNLHLDDQMTLLQYSWMFLMAFALGWRSYRQSSANLLCFAPDLIINEQRMTLPCMYDQCKHMLYVSSELHRLQVSYEEYLCMKTLLLLSSVPKDGLKSQELFDEIRMTYIKELGKAIVKREGNSSQNWQRFYQLTKLLDSMHEVVENLLNYCFQTFLDKTMSIEFPEMLAEIITNQIPKYSNGNIKKLLFHQK

SEQ ID NO: 25640 - protein, 984 aa, Homo sapiens
MRAPARGTGCCGRSGGRWLAGAAQPRCLWAGGAGQRFMVPGGTMKSLKKDSRLRITPTRLLEASENVKEKKRAKGPEQPTPTIQEEPEPVSNVLQGDDILALAIKKEDLKEQHIPRLTEKEDKRVITQKFIIRKLKPMDPRRKVCHLVARPANPDEATKPLDYSGPGDSFDGSDQILPHHILGSLQDFKRIALARGNTQLAERIPTSPCLMTLISAEGESKQKAPKEEKRPPWAPPPQHNFLKNWQRNTALRKKQQEALSEHLKKPVSELLMHTGETYRRIQEERELIDCTLPTRRDRKSWENSGFWSRLEYLGDEMTGLVMTKTKTQRGLMEPITHIRKPHSIRVETGLPAQRDASYRYTWDRSLFLIYRRKELQRIMEELDFSQQDIDGLEVVGKGWPFSAVTVEDYTVFERSQGSSSEDTAYLGTLASSSDVSMPILGPSLLFCGKPACWIRGSNPQDKRQVGIAAHLTFETLEGEKTSSELTVVNNGTVAIWYDWRRQHQPDTFQDLKKNRMQRFYFDNREGVILPGEIKTFTFFFKSLTAGVFREFWEFRTHPTLLGGAILQVNLHAVSLTQDVFEDERKVLESKLTAHEAVTVVREVLQELLMGVLTPERTPSPVDAYLTEEDLFRHRNPPLHYEHQVVQSLHQLWRQYMTLPAKAEEARPGDKEHVSPIATEKASVNAELLPRFRSPISETQVPRPENEALRESGSQKARVGTKSPQRKSIMEEILVEESPDVDSTKSPWEPDGLPLLEWNLCLEDFRKAVMVLPDENHREDALMRLNKAALELCQKPRPLQSNLLHQMCLQLWRDVIDSLVGHSMWLRSVLGLPEKETIYLNVPEEQDQKSPPIMEVKVPVGKAGKEERKGAAQEKKQLGIKDKEDKKGAKLLGKEDRPNSKKHKAKDDKKVIKSASQDRFSLEDPTPDIILSSQEPIDPLVMGKYTQSLHSEVRGLLDTLVTDLMVLADELSPIKNVEEALRLCR

SEQ ID NO: 25641 - protein, 108 aa, Homo sapiens
MTWTSGQLQREKQARPGSGAVLAFPDDKDLRVYGPAESQSAVFGDVCPLLTSLLDGYNVCVMAYGQTGSGKSYTMLGRHSDDGPVLPLDPQSDLGIIPRVAEELFRAQ

SEQ ID NO: 25642 - protein, 966 aa, Homo sapiens
MTLLEPEMLMMAVQSVLQLKLQQRRTREELVSQGIMPPLKSPAAFHEQRRSLERARTEDYLKRKIRSRPERSELVRMHILEETSAEPSLQAKQLKLKRARLADDLNEKIAQRPGPMELVEKNILPVESSLKEAIIVGQVNYPKVADSSSFDEDSSDALSPEQPASHESQGSVPSPLEARVSEPLLSATSASPTQVVSQLPMGRDSREMLFLAEQPPLPPPPLLPPSLTNGTTIPTAKSTPTLIKQSQPKSASEKSQRSKKAKELKPKVKKLKYHQYIPPDQKQDRGAPPMDSSYAKILQQQQLFLQLQILNQQQQQHHNYQAILPAPPKSAGEALGSSGTPPVRSLSTTNSSSSSGAPGPCGLARQNSTSLTGKPGALPANLDDMKVAELKQELKLRSLPVSGTKTELIERLRAYQDQISPVPGAPKAPAATSILHKAGEVVVAFPAARLSTGPALVAAGLAPAEVVVATVASSGVVKFGSTGSTPPVSPTPSERSLLSTGDENSTPGDTFGEMVTSPLTQLTLQASPLQILVKEEGPRAGSCCLSPGGRAELEGRDKDQMLQEKDKQIEALTRMLRQKQQLVERLKLQLEQEKRAQQPAPAPAPLGTPVKQENSFSSCQLSQQPLGPAHPFNPSLAAPATNHIDPCAVAPGPPSVVVKQEALQPEPEPVPAPQLLLGPQGPSLIKGVAPPTLITDSTGTHLVLTVTNKNADSPGLSSGSPQQPSSQPGSPAPAPSAQMDLEHPLQPLFGTPTSLLKKEPPGYEEAMSQQPKQQENGSSSQQMDDLFDILIQSGEISADFKEPPSLPGKEKPSPKTVCGSPLAAQPSPSAELPQAAPPPPGSPSLPGRLEDFLESSTGLPLLTSGHDGPEPLSLIDDLHSQMLSSTAILDHPPSPMDTSELHFVPEPSSTMGLDLADGHLDSMDWLELSSGGPVLSLAPLSTTAPSLFSTDFLDGHDLQLHWDSCL

SEQ ID NO: 25643 - protein, 1880 aa, Homo sapiens
MASEDNRVPSPPPTGDDGGGGGREETPTEGGALSLKPGLPIRGIRMKFAVLTGLVEVGEVSNRDIVETVFNLLVGGQFDLEMNFIIQEGESINCMVDLLEKCDITCQAEVWSMFTAILKKSIRNLQVCTEVGLVEKVLGKIEKVDNMIADLLVDMLGVLASYNLTVRELKLFFSKLQGDKGRWPPHAGKLLSVLKHMPQKYGPDAFFNFPGKSAAAIALPPIAKWPYQNGFTFHTWLRMDPVNNINVDKDKPYLYCFRTSKGLGYSAHFVGGCLIVTSIKSKGKGFQHCVKFDFKPQKWYMVTIVHIYNRWKNSELRCYVNGELASYGEITWFVNTSDTFDKCFLGSSETADANRVFCGQMTAVYLFSEALNAAQIFAIYQLGLGYKGTFKFKAESDLFLAEHHKLLLYDGKLSSAIAFTYNPRATDAQLCLESSPKDNPSIFVHSPHALMLQDVKAVLTHSIQSAMHSIGGVQVLFPLFAQLDYRQYLSDEIDLTICSTLLAFIMELLKNSIAMQEQMLACKGFLVIGYSLEKSSKSHVSRAVLELCLAFSKYLSNLQNGMPLLKQLCDHVLLNPAIWIHTPAKVQLMLYTYLSTEFIGTVNIYNTIRRVGTVLLIMHTLKYYYWAVNPQDRSGITPKGLDGPRPNQKEMLSLRAFLLMFIKQLVMKDSGVKEDELQAILNYLLTMHEDDNLMDVLQLLVALMSEHPNSMIPAFDQRNGLRVIYKLLASKSEGIRVQALKAMGYFLKHLAPKRKAEVMLGHGLFSLLAERLMLQTNLITMTTYNVLFEILIEQIGTQVIHKQHPDPDSSVKIQNPQILKVIATLLRNSPQCPESMEVRRAFLSDMIKLFNNSRENRRSLLQCSVWQEWMLSLCYFNPKNSDEQKITEMVYAIFRILLYHAVKYEWGGWRVWVDTLSITHSKVTFEIHKENLANIFREQQGKVDEEIGLCSSTSVQAASGIRRDINVSVGSQQPDTKDSPVCPHFTTNGNENSSIEKTSSLESASNIELQTTNTSYEEMKAEQENQELPDEGTLEETLTNETRNADDLEVSSDIIEAVAISSNSFITTGKDSMTVSEVTASISSPSEEDASEMPEFLDKSIVEEEEDDDYVELKVEGSPTEEANLPTELQDNSLSPAASEAGEKLDMFGNDDKLIFQEGKPVTEKQTDTETQDSKDSGIQTMTASGSSAMSPETTVSQIAVESDLGQMLEEGKKATNLTRETKLINDCHGSVSEASSEQKIAKLDVSNVATDTERLELKASPNVEAPQPHRHVLEISRQHEQPGQGIAPDAVNGQRRDSRSTVFRIPEFNWSQMHQRLLTDLLFSIETDIQMWRSHSTKTVMDFVNSSDNVIFVHNTIHLISQVMDNMVMACGGILPLLSAATSATHELENIEPTQGLSIEASVTFLQRLISLVDVLIFASSLGFTEIEAEKSMSSGGILRQCLRLVCAVAVRNCLECQQHSQLKTRGDKALKPMHSLIPLGKSAAKSPVDIVTGGISPVRDLDRLLQDMDINRLRAVVFRDIEDSKQAQFLALAVVYFISVLMVSKYRDILEPQNERHSQSCTETGSENENVSLSEITPAAFSTLTTASVEESESTSSARRRDSGIGEETATGLGSHVEVTPHTAPPGVSAGPDAISEVLSTLSLEVNKSPETKNDRGNDLDTKATPSVSVSKNVNVKDILRSLVNIPADGVTVDPALLPPACLGALGDLSVEQPVQFRSFDRSVIVAAKKSAVSPSTFNTSIPTNAVSVVSSVDSAQASDMGGESPGSRSSNAKLPSVPTVDSVSQDPVSNMSITERLEHALEKAAPLLREIFVDFAPFLSRTLLGSHGQELLIEGTSLVCMKSSSSVVELVMLLCSQVRVAKFYSEECRPCFYRTCQ

SEQ ID NO: 25644 - protein, 1004 aa, Homo sapiens
MHPDATDSGGAGPSPARAAGAGGRPVSGFRGERRPESPGDAEAAAAAAPGAPGGRSWWKPVAVAALAAVALSFLGPGSGEAAGAAGLSSVLFRLSLYLSCAAAAFLLGILFALVCRSPRAQPPDFAAAWSRLAATSAARRPPGSPVYGNSHESAQSRRVVISHNMDKALKEVFDYSYRDYILSWYGNLSRDEGQLYHLLLEDFWEIARQLHHRLSHVDVVKVVCNDVVRTLLTHFCDLKAANARHEEQPRPFVLHACLRNSDDEVRFLQTCSRVLVFCLLPSKDVQSLSLRIMLAEILTTKVLKPVVELLSNPDYINQMLLAQLAYREQMNEHHKRAYTYAPSYEDFIKLINSNSDVEFLKQLRYQIVVEIIQATTISSFPQLKRHKGKETAAMKADLLRARNMKRYINQLTVAKKQCEKRIRILGGPAYDQQEDGALDEGEGPQSQKILQFEDILANTFYREHFGMYMERMDKRALISFWESVEHLKNANKNEIPQLVGEIYQNFFVESKEISVEKSLYKEIQQCLVGNKGIEVFYKIQEDVYETLKDRYYPSFIVSDLYEKLLIKEEEKHASQMISNKDEMGPRDEAGEEAVDDGTNQINEQASFAVNKLRELNEKLEYKRQALNSIQNAPKPDKKIVSKLKDEIILIEKERTDLQLHMARTDWWCENLGMWKASITSGEVTEENGEQLPCYFVMVSLQEVGGVETKNWTVPRRLSEFQNLHRKLSECVPSLKKVQLPSLSKLPFKSIDQKFMEKSKNQLNKFLQNLLSDERLCQSEALYAFLSPSPDYLKVIDVQGKKNSFSLSSFLERLPRDFFSHQEEETEEDSDLSDYGDDVDGRKDALAEPCFMLIGEIFELRGMFKWVRRTLIALVQVTFGRTINKQIRDTVSWIFSEQMLVYYINIFRDAFWPNGKLAPPTTIRSKEQSQETKQRAQQKLLENIPDMLQSLVGQQNARHGIIKIFNALQETRANKHLLYALMELLLIELCPELRVHLDQLKAGQV

SEQ ID NO: 25645 - protein, 1348 aa, Homo sapiens
MVIKTDELPAAAPADSAREHGSQAGGKGRPGAAELPSVMLLNGDCPESLKKEAAAAEPPRENGLDEAGPGDETTGQEVIVIQDTGFSVKILAPGIEPFSLQVSPQEMVQEIHQVLMDREDTCHRTCFSLHLDGNVLDHFSELRSVEGLQEGSVLRVVEEPYTVREARIHVRHVRDLLKSLDPSDAFNGVDCNSLSFLSVFTDGDLGDSGKRKKGLEMDPIDCTPPEYILPGSRERPLCPLQPQNRDWKPLQCLKVLTMSGWNPPPGNRKMHGDLMYLFVITAEDRQVSITASTRGFYLNQSTAYHFNPKPASPRFLSHSLVELLNQISPTFKKNFAVLQKKRVQRHPFERIATPFQVYSWTAPQAEHAMDCVRAEDAYTSRLGYEEHIPGQTRDWNEELQTTRELPRKNLPERLLRERAIFKVHSDFTAAATRGAMAVIDGNVMAINPSEETKMQMFIWNNIFFSLGFDVRDHYKDFGGDVAAYVAPTNDLNGVRTYNAVDVEGLYTLGTVVVDYRGYRVTAQSIIPGILERDQEQSVIYGSIDFGKTVVSHPRYLELLERTSRPLKILRHQVLNDRDEEVELCSSVECKGIIGNDGRHYILDLLRTFPPDLNFLPVPGEELPEECARAGFPRAHRHKLCCLRQELVDAFVEHRYLLFMKLAALQLMQQNASQLETPSSLENGGPSSLESKSEDPPGQEAGSEEEGSSASGLAKVKELAETIAADDGTADPRSREVIRNACKAVGSISSTAFDIRFNPDIFSPGVRFPESCQDEVRDQKQLLKDAAAFLLSCQIPGLVKDCMEHAVLPVDGATLAEVMRQRGINMRYLGKVLELVLRSPARHQLDHVFKIGIGELITRSAKHIFKTYLQGVELSGLSAAISHFLNCFLSSYPNPVAHLPADELVSKKRNKRRKNRPPGAADNTAWAVMTPQELWKNICQEAKNYFDFDLECETVDQAVETYGLQKITLLREISLKTGIQVLLKEYSFDSRHKPAFTEEDVLNIFPVVKHVNPKASDAFHFFQSGQAKVQQGFLKEGCELINEALNLFNNVYGAMHVETCACLRLLARLHYIMGDYAEALSNQQKAVLMSERVMGTEHPNTIQEYMHLALYCFASSQLSTALSLLYRARYLMLLVFGEDHPEMALLDNNIGLVLHGVMEYDLSLRFLENALAVSTKYHGPKALKVALSHHLVARVYESKAEFRSALQHEKEGYTIYKTQLGEDHEKTKESSEYLKCLTQQAVALQRTMNEIYRNGSSANIPPLKFTAPSMASVLEQLNVINGILFIPLSQKDLENLKAEVARRHQLQEASRNRDRAEEPMATEPAPAGAPGDLGSQPPAAKDPSPSVQG

SEQ ID NO: 25646 - protein, 374 aa, Homo sapiens
MDRAPQRQHRASRELLAAKKTHTSQIEVIPCKICGDKSSGIHYGVITCEGCKGFFRRSQRCNAAYSCTRQQNCPIDRTSRNRCQHCRLQKCLALGMSRDAVKFGRMSKKQRDSLHAEVQKQLQQRQQQQQEPVVKTPPAGAQGADTLTYTLGLPDGQLPLGSSPDLPEASACPPGLLKASGSGPSYSNNLAKAGLNGASCHLEYSPERGKAEGRESFYSTGSQLTPDRCGLRFEEHRHPGLGELGQGPDSYGSPSFRSTPEAPYASLTEIEHLVQSVCKSYRETCQLRLEDLLRQRSNIFSREEVTGYQRKFIRWGSRAQEDHRATQSATAGPSSLPAVHVGDVGTVCPPPHRGHSVRGGVRQEALRLYGALPE

SEQ ID NO: 25647 - protein, 720 aa, Homo sapiens
MSLWGLVSKMPPEKVQRLYVDFPQHLRHLLGDWLESQPWEFLVGSDAFCCNLASALLSDTVQHLQASVGEQGEGSTILQHISTLESIYQRDPLKLVATFRQILQGEKKAVMEQFRHLPMPFHWKQEELKFKTGLRRLQHRVGEIHLLREALQKGAEAGQVSLHSLIETPANGTGPSEALAMLLQETTGELEAAKALVLKRIQIWKRQQQLAGNGAPFEESLAPLQERCESLVDIYSQLQQEVGAAGGELEPKTRASLTGRLDEVLRTLVTSCFLVEKQPPQVLKTQTKFQAGVRFLLGLRFLGAPAKPPLVRADMVTEKQARELSVPQGPGAGAESTGEIINNTVPLENSIPGNCCSALFKNLLLKKIKRCERKGTESVTEEKCAVLFSASFTLGPGKLPIQLQALSLPLVVIVHGNQDNNAKATILWDNAFSEMDRVPFVVAERVPWEKMCETLNLKFMAEVGTNRGLLPEHFLFLAQKIFNDNSLSMEAFQHRSVSWSQFNKEILLGRGFTFWQWFDGVLDLTKRCLRSYWSDRLIIGFISKQYVTSLLLNEPDGTFLLRFSDSEIGGITIAHVIRGQDGSPQIENIQPFSAKDLSIRSLGDRIRDLAQLKNLYPKKPKDEAFRSHYKPEQMGKDGRGYVPATIKMTVERDQPLPTPELQMPTMVPSYDLGMAPDSSMSMQLGPDMVPLPRRISQRVVSLPGASPADAPQPGPDEPAL

SEQ ID NO: 25648 - protein, 1932 aa, Homo sapiens
MAPGALRGGCEQRAPGGGARTAALGPWPWPSPGPAPSPGAAPPRSRKMSGALLWPLLPLLLLLLSARDGVRAAQPQAPGYLIAAPSVFRAGVEEVISVTIFNSPREVTVQAQLVAQGEPVVQSQGAILDKGTIKLKVPTGLRGQALLKVWGRGWQAEEGPLFHNQTSVTVDGRGASVFIQTDKPVYRPQHRVLISIFTVSPNLRPVNEKLEAYILDPRGSRMIEWRHLKPFCCGITNMSFPLSDQPVLGEWFIFVEMQGHAYNKSFEVQKYVLPKFELLIDPPRYIQDLDACETGTVRARYTFGKPVAGALMINMTVNGVGYYSHEVGRPVLRTTKILGSRDFDICVRDMIPADVPEHFRGRVSIWAMVTSVDGSQQVAFDDSTPVQRQLVDIRYSKDTRKQFKPGLAYVGKVELSYPDGSPAEGVTVQIKAELTPKDNIYTSEVVSQRGLVGFEIPSIPTSAQHVWLETKVMALNGKPVGAQYLPSYLSLGSWYSPSQCYLQLQPPSHPLQVGEEAYFSVKSTCPCNFTLYYEVAARGNIVLSGQQPAHTTQQRSKRAAPALEKPIRLTHLSETEPPPAPEAEVDVCVTSLHLAVTPSMVPLGRLLVFYVRENGEGVADSLQFAVETFFENQVSVTYSANETQPGEVVDLRIRAARGSCVCVAAVDKSVYLLRSGFRLTPAQVFQELEDYDVSDSFGVSREDGPFWWAGLTAQRRRRSSVFPWPWGITKDSGFAFTETGLVVMTDRVSLNHRQDGGLYTDEAVPAFQPHTGSLVAVAPSRHPPRTEKRKRTFFPETWIWHCLNISDPSGEGTLSVKVPDSITSWVGEAVALSTSQGLGIAEPSLLKTFKPFFVDFMLPALIIRGEQVKIPLSVYNYMGTCAEVYMKLSVPKGIQFVGHPGKRHVTKKMCVAPGEAEPIWVVLSFSDLGLNNITAKALAYGDTNCCRDGRSSKHPEENHADRRVPIGVDHVRRSVMVEAEGVPRAYTYSAFFCPSERVHISTPNKYEFQYVQRPLRLTRFDVAVRAHNDARVALSSGPQDTAGMIEIVLGGHQNTRSWISTSKMGEPVASAHTAKILSWDEFRTFWISWRGGLIQVGHGPEPSNESVIVAWTLPRPPEVQFIGFSTGWGSMGEFRIWRKMEVDESYSEAFTLGVPHGAIPGSERATASIIGDVMGPTLNHLNNLLRLPFGCGEQNMIHFAPNVFVLKYLQKTQQLSPEVERETTDYLVQGYQRQLTYKRQDGSYSAFGERDASGSMWLTAFVLKSFAQARSFIFVDPRELAAAKSWIIQQQQADGSFLAVGRVLNKDIQGGIHGTVPLTAYVVVALLETGTASEEERGSTDKARHFLESAAPLAMDPYSCALTTYALTLLRSPAAPEALRKLRSLAIMRDGVTHWSLSNSWDVDKGTFLSFSDRVSQSVVSAEVEMTAYALLTYTLLGDVAAALPVVKWLSQQRNALGGFSSTQDTCVALQALAEYAILSYAGGINLTVSLASTNLDYQETFELHRTNQKVLQTAAIPSLPTGLFVSAKGDGCCLMQIDVTYNVPDPVAKPAFQLLVSLQEPEAQGRPPPMPASAAEGSRGDWPPADDDDPAADQHHQEYKVMLEVCTRWLHAGSSNMAVLEVPLLSGFRADIESLEQLLLDKHMGMKRYEVAGRRVLFYFDEIPSRCLTCVRFRALRECVVGRTSALPVSVYDYYEPAFEATRFYNVSTHSPLARELCAGPACNEVERAPARGPGWFPGESGPAVAPEEGAAIARCGCDHDCGAQGNPVCGSDGVVYASACRLREAACRQAAPLEPAPPSCCALEQRLPASSSSTYGDDLASVAPGPLQQDVKLNGAGLEVEDSDPEPEGEAEDRVTAGPRPPVSSGNLESSTQSASPFHRWGQTPAPQRHSGRVVGAHRPGLLSPVFVYSPAFQSGGEEGLWMSNTCTLR

SEQ ID NO: 25649 - protein, 904 aa, Homo sapiens
MGVQGLWKLLECSGRQVSPEALEGKILAVDISIWLNQALKGVRDRHGNSIENPHLLTLFHRLCKLLFFRIRPIFVFDGDAPLLKKQTLVKRRQRKDLASSDSRKTTEKLLKTFLKRQAIKTAFRSKRDEALPSLTQVRRENDLYVLPPLQEEEKHSSEEEDEKEWQERMNQKQALQEEFFHNPQAIDIESEDFSSLPPEVKHEILTDMKEFTKRRRTLFEAMPEESDDFSQYQLKGLLKKNYLNQHIEHVQKEMNQQHSGHIRRQYEDEGGFLKEVESRRVVSEDTSHYILIKGIQAKTVAEVDSESLPSSSKMHGMSFDVKSSPCEKLKTEKEPDATPPSPRTLLAMQAALLGSSSEEELESENRRQARGRNAPAAVDEGSISPRTLSAIKRALDDDEDVKVCAGDDVQTGGPGAEEMRINSSTENSDEGLKVRDGKGIPFTATLASSSVNSAEEHVASTNEGREPTDSVPKEQMSLVHVGTEAFPISDESMIKDRKDRLPLESAVVRHSDAPGLPNGRELTPASPTCTNSVSKNETHAEVLEQQNELCPYESKFDSSLLSSDDETKCKPNSASEVIGPVSLQETSSIVSVPSEAVDNVENVVSFNAKEHENFLETIQEQQTTESAGQDLISIPKAVEPMEIDSEESESDGSFIEVQSVISDEELQAEFPETSKPPSEQGEEELVGTREGEAPAESESLLRDNSERDDVDGEPQEAEKDAEDSLHEWQDINLEELETLESNLLAQQNSLKAQKQQQERIAATVTGQMFLESQELLRLFGIPYIQAPMEAEAQCAILDLTDQTSGTITDDSDIWLFGARHVYRNFFNKNKFVEYYQYVDFHNQLGLDRNKLINLAYLLGSDYTEGIPTVGCVTAMEILNEFPGHGLEPLLKFSCCRGLPQTRGG

SEQ ID NO: 25650 - protein, 643 aa, Homo sapiens
MFESCSGFSGFCASPIEESHGALISSCNSRTMTDGLVTFRDVAIDFSQEEWECLDPAQRDLYVDVMLENYSNLVSLDLESKTYETKKIFSENDIFEINFSQWEMKDKSKTLGLEASIFRNNWKCKSIFEGLKGHQEGYFSQMIISYEKIPSYRKSKSLTPHQRIHNTEKSYVCKECGKACSHGSKLVQHERTHTAEKHFECKECGKNYLSAYQLNVHQRFHTGEKPYECKECGKTFSWGSSLVKHERIHTGEKPYECKECGKAFSRGYHLTQHQKIHTGVKSYKCKECGKAFFWGSSLAKHEIIHTGEKPYKCKECGKAFSRGYQLTQHQKIHTGKKPYECKICGKAFCWGYQLTRHQIFHTGEKPYECKECGKAFNCGSSLIQHERIHTGEKPYECKECGKAFSRGYHLSQHQKIHTGEKPFECKECGKAFSWGSSLVKHERVHTGEKSHECKECGKTFCSGYQLTRHQVFHTGEKPYECKECGKAFNCGSSLVQHERIHTGEKPYECKECGKAFSRGYHLTQHQKIHTGEKPFKCKECGKAFSWGSSLVKHERVHTNEKSYECKDCGKAFGSGYQLSVHQRFHTGEKLYQRKEFGKTFTCGSKLVHERTHSNDKPYKYNECGEAFLWTTYSNEKIDTDETL

SEQ ID NO: 25651 - protein, 2059 aa, Homo sapiens
MRILKRFLACIQLLCVCRLDWANGYYRQQRKLVEEIGWSYTGALNQKNWGKKYPTCNSPKQSPINIDEDLTQVNVNLKKLKFQGWDKTSLENTFIHNTGKTVEINLTNDYRVSGGVSEMVFKASKITFHWGKCNMSSDGSEHSLEGQKFPLEMQIYCFDADRFSSFEEAVKGKGKLRALSILFEVGTEENLDFKAIIDGVESVSRFGKQAALDPFILLNLLPNSTDKYYIYNGSLTSPPCTDTVDWIVFKDTVSISESQLAVFCEVLTMQQSGYVMLMDYLQNNFREQQYKFSRQVFSSYTGKEEIHEAVCSSEPENVQADPENYTSLLVTWERPRVVYDTMIEKFAVLYQQLDGEDQTKHEFLTDGYQDLGAILNNLLPNMSYVLQIVAICTNGLYGKYSDQLIVDMPTDNPELDLFPELIGTEEIIKEEEEGKDIEEGAIVNPGRDSATNQIRKKEPQISTTTHYNRIGTKYNEAKTNRSPTRGSEFSGKGDVPNTSLNSTSQPVTKLATEKDISLTSQTVTELPPHTVEGTSASLNDGSKTVLRSPHMNLSGTAESLNTVSITEYEEESLLTSFKLDTGAEDSSGSSPATSAIPFISENISQGYIFSSENPETITYDVLIPESARNASEDSTSSGSEESLKDPSMEGNVWFPSSTDITAQPDVGSGRESFLQTNYTEIRVDESEKTTKSFSAGPVMSQGPSVTDLEMPHYSTFAYFPTEVTPHAFTPSSRQQDLVSTVNVVYSQTTQPVYNDGLTALNISSPVSVAEFTYTTSVFGDDNKALSKSEIIYGNETELQIPSFNEMVYPSESTVMPNMYDNVNKLNASLQETSVSISSTKGMFPGSLAHTTTKVFDHEISQVPENNFSVQPTHTVSQASGDTSLKPVLSANSEPASSDPASSEMLSPSTQLLFYETSASFSTEVLLQPSFQASDVDTLLKTVLPAVPSDPILVETPKVDKISSTMLHLIVSNSASSENMLHSTSVPVFDVSPTSHMHSASLQGLTISYASEKYEPVLLKSESSHQVVPSLYSNDELFQTANLEINQAHPPKGRHVFATPVLSIDEPLNTLINKLIHSDEILTSTKSSVTGKVFAGIPTVASDTFVSTDHSVPIGNGHVAITAVSPHRDGSVTSTKLLFPSKATSELSHSAKSDAGLVGGGEDGDTDDDGDDDDDDRGSDGLSIHKCMSCSSYRESQEKVMNDSDTHENSLMDQNNPISYSLSENSEEDNRVTSVSSDSQTGMDRSPGKSPSANGLSQKHNDGKEENDIQTGSALLPLSPESKAWAVLTSDEESGSGQGTSDSLNENETSTDFSFADTNEKDADGILAAGDSEITPGFPQSPTSSVTSENSEVFHVSEAEASNSSHESRIGLAEGLESEKKAVIPLVIVSALTFICLVVLVGILIYWRKCFQTAHFYLEDSTSPRVISTPPTPIFPISDDVGAIPIKHFPKHVADLHASSGFTEEFETLKEFYQEVQSCTVDLGITADSSNHPDNKHKNRYINIVAYDHSRVKLAQLAEKDGKLTDYINANYVDGYNRPKAYIAAQGPLKSTAEDFWRMIWEHNVEVIVMITNLVEKGRRKCDQYWPADGSEEYGNFLVTQKSVQVLAYYTVRNFTLRNTKIKKGSQKGRPSGRVVTQYHYTQWPDMGVPEYSLPVLTFVRKAAYAKRHAVGPVVVHCSAGVGRTGTYIVLDSMLQQIQHEGTVNIFGFLKHIRSQRNYLVQTEEQYVFIHDTLVEAILSKETEVLDSHIHAYVNALLIPGPAGKTKLEKQFQLLSQSNIQQSDYSAALKQCNREKNRTSSIIPVERSRVGISSLSGEGTDYINASYIMGYYQSNEFIITQHPLLHTIKDFWRMIWDHNAQLVVMIPDGQNMAEDEFVYWPNKDEPINCESFKVTLMAEEHKCLSNEEKLIIQDFILEATQDDYVLEVRHFQCPKWPNPDSPISKTFELISVIKEEAANRDGPMIVHDEHGGVTAGTFCALTTLMHQLEKENSVDVYQVAKMINLMRPGVFADIEQYQFLYKVILSLVSTRQEENPSTSLDSNGAALPDGNIAESLESLV

SEQ ID NO: 25652 - protein, 531 aa, Homo sapiens
MLKFRTVHGGLRLLGIRRTSTAPAASPNVRRLEYKPIKKVMVANRGEIAIRVFRACTELGIRTVAIYSEQDTGQMHRQKADEAYLIGRGLAPVQAYLHIPDIIKVAKENNVDAVHPGYGFLSERADFAQACQDAGVRFIGPSPEVVRKMGDKVEARAIAIAAGVPVVPGTDAPITSLHEAHEFSNTYGFPIIFKAAYGGGGRGMRVVHSYEELEENYTRAYSEALAAFGNGALFVEKFIEKPRHIEVQILGDQYGNILHLYERDCSIQRRHQKVVEIAPAAHLDPQLRTRLTSDSVKLAKQVGYENAGTVEFLVDRHGKHYFIEVNSRLQVEHTVTEEITDVDLVHAQIHVAEGRSLPDLGLRQENIRINGCAIQCRVTTEDPARSFQPDTGRIEVFRSGEGMGIRLDNASAFQGAVISPHYDSLLVKVIAHGKDHPTAATKMSRALAEFRVRGVKPFLLCLPCLCCMVTPSHPPLSCRPTSPSCRMCSTTSSSWQALWTPSSSTRTQSCSSCGLHRTGPKSCCTTSAMSW

SEQ ID NO: 25653 - protein, 1179 aa, Homo sapiens
ATEEPFPFHGLLPKKETGAASFLCRYPEYDGRGVLIAVLDTGVDPGAPGMQVTTDGKPKIVDIIDTTGSGDVNTATEVEPKDGEIVGLSGRVLKIPASWTNPSGKYHIGIKNGYDFYPKALKERIQKERKEKIWDPVHRVALAEACRKQEEFDVANNGSSQANKLIKEELQSQVELLNSFEKKYSDPGPVYDCLVWHDGEVWRACIDSNEDGDLSKSTVLRNYKEAQEYGSFGTAEMLNYSVNIYDDGNLLSIVTSGGAHGTHVASIAAGHFPEEPERNGVAPGAQILSIKIGDTRLSTMETGTGLIRAMIEVINHKCDLVNYSYGEATHWPNSGRICEVINEAVWKHNIIYVSSAGNNGPCLSTVGCPGGTTSSVIGVGAYVSPDMMVAEYSLREKLPANQYTWSSRGPSADGALGVSISAPGGAIASVPNWTLRGTQLMNGTSMSSPNACGGIALILSGLKANNIDYTVHSVRRALENTAVKADNIEVFAQGHGIIQVDKAYDYLVQNTSFANKLGFTVTVGNNRGIYLRDPVQVAAPSDHGVGIEPVFPENTENSEKISLQLHLALTSNSSWVQCPSHLELMNQCRHINIRVDPRGLREGLHYTEVCGYDIASPNAGPLFRVPITAVIAAKVNESSHYDLAFTDVHFKPGQIRRHFIEVPEGATWAEVTVCSCSSEVSAKFVLHAVQLVKQRAYRSHEFYKFCSLPEKGTLTEAFPVLGGKAIEFCIARWWASLSDVNIDYTISFHGIVCTAPQLNIPKSGEVTPSCPLLCELLYESEFDSQLWIIFDQNKRQMGSGDAYPHQYSLKLEKGDYTIRLQIRHEQISDLERLKDLPFIVSHRLSNTLSLDIHENHSFALLGKKKSSNLTLPPKYNQPFFVTSLPDDKIPKGAGPGCYLAGSLTLSKTELGKKADVIPVHYYLIPPPTKTKNGSKDKEKDSEKEKDLKEEFTEALRDLKIQWMTKLDSSDIYNELKETYPNYLPLYVARLHQLDAEKERMKRLNEIVDAANAVISHIDQTALAVYIAMKTDPRPDAATIKNDMDKQKSTLVDALCRKGCALADHLLHTQAQDGAISTDAEGKEEEGESPLDSLAETFWETTKWTDLFDNKVLTFAYKHALVNKMYGRGLKFATKLVEEKPTKENWKNCIQLMKLLGWTHCASFTENWLPIMYPPDYCVF

SEQ ID NO: 25654 - protein, 454 aa, Homo sapiens
MALIPDLAMETWLLLAVSLVLLYLFYDGQQPVLAITDPDMIKTVLVKECYSVFTNRRPFGPVGFMKSAISIAEDEEWKRLRSLLSPTFTSGKLKEMVPIIAQYGDVLVRNLRREAETGKPVTLKDVFGAYSMDVITSTSFGVNIDSLNNPQDPFVENTKKLLRFDFLDPFFLSITVFPFLIPILEVLNICVFPREVTNFLRKSVKRMKESRLEDTQKHRVDFLQLMIDSQNSKETESHKALSDLELVAQSIIFIFAGYETTSSVLSFIMYELATHPDVQQKLQEEIDAVLPNKAPPTYDTVLQMEYLDMVVNETLRLFPIAMRLERVCKKDVEINGMFIPKGVVVMIPSYALHRDPKYWTEPEKFLPERFSKKNKDNIDPYIYTPFGSGPRNCIGMRFALMNMKLALIRVLQNFSFKPCKETQIPLKLSLGGLLQPEKPVVLKVESRDGTVSGA

SEQ ID NO: 25655 - protein, 471 aa, Homo sapiens
MEFVTALADLRAEASCPICLDYLKDPVTISCGHNFCLSCIIMSWKDLHDSFPCPFCHFCCPERKFISNPQLGSLTEIAKQLQIRSKKRKRQEEKHVCKKHNQVLTFFCQKDLELLCPRCSLSTDHQHHCVWPIKKAASYHRKKLEEYNAPWKERVELIEKVITMQTRKSLELKKKVKHRAEEVKSEFEQLRLFLQNEQETVLRQLQDEEMDILAQLNESLTKFSDYTSSLKYLLKEIESIYVKSELELLANVKDIYHRYENLKFPELFLFKLKKYGYHLPPQYSGLDKIIKRFQVDVILDPETAHRKLIVSEDRKTVRYGNTTQNVPHNPRRFYLLPAVLGSKGYSCGRQYWEVEVKDKPEWILGVCNDCLPRRRKSQPILVQDGLWGIWRSSQNNYIVLGHREIILLPQVIPSKIGIFLDYEMNEVSFYNLNDRSLLYTFNDNFTGALWPYFYTGTDSKPLKISTVTDSE

SEQ ID NO: 25656 - protein, 320 aa, Homo sapiens
MRAHAQRGRGCTRRSAAVLMARHGLPLLPLLSLLVGAWLKLGNGQATSMVQLQGGRFLMGTNSPDSRDGDGPVREATVKPFAIDIFPVTNKDFRDFVREKKYRTEAEMFGWSFVFEDFVSDELRNKATQPMKSVLWWLPVEKAFWRQPAGPGSGIRERLEHPVLHVSWNDARAYCAWRGKRLPTEEEWEFAARGGLKGQVYPWGNWFQPNRTNLWQGKFPKGDKAEDGFHGVSPVNAFPAQNNYGLYDLLGNVWEWTASPYQAAEQDMRVLRGASWIDTADGSANHRARVTTRMGNTPDSASDNLGFRCAADAGRPPGEL

SEQ ID NO: 25657 - protein, 250 aa, Homo sapiens
MIQSSQPMSLKLTCSAFRLQRALRFLLGRLPWRVASGARRFRRWLNRYSYTVLSSWPERALISLKNRSRFLVRPNTRNRAFSWTCRAARSKPRPRRSTALPRSQASSSRHSWAEFLKFRKSFQMSNTSQPDPSRPGTERTSSKAAGCRPLGQLDSFSWAARPPPGAAGLAVSEGFFRKIRSSAPSSPSFSRALMSNTYLCFLTTGPRSSRENTQKSFPATSPREPVTSRLRGKAPALSQSRELSFTSAPF

SEQ ID NO: 25658 - protein, 2069 aa, Homo sapiens
MSQPPLLPASAETRKFTRALSKPGTAAELRQSVSEVVRGSVLLAKPKLIEPLDYENVIVQKKTQILNDCLREMLLFPYDDFQTAILRRQGRYICSTVPAKAEEEAQSLFVTECIKTYNSDWHLVNYKYEDYSGEFRQLPNKVVKLDKLPVHVYEVDEEVDKDEDAASLGSQKGGITKHGWLYKGNMNSAISVTMRSFKRRFFHLIQLGDGSYNLNFYKDEKISKEPKGSIFLDSCMGVVQNNKVRRFAFELKMQDKSSYLLAADSEVEMEEWITILNKILQLNFEAAMQEKRNGDSHEDDEQSKLEGSGSGLDSYLPELAKSAREAEIKLKSESRVKLFYLDPDAQKLDFSSAEPEVKSFEEKFGKRILVKCNDLSFNLQCCVAENEEGPTTNVEPFFVTLSLFDIKYNRKISADFHVDLNHFSVRQMLATTSPALMNGSGQSPSVLKGILHEAAMQYPKQGIFSVTCPHPDIFLVARIEKVLQGSITHCAEPYMKSSDSSKVAQKVLKNAKQACQRLGQYRMPFAWAARTLFKDASGNLDKNARFSAIYRQDSNKLSNDDMLKLLADFRKPEKMAKLPVILGNLDITIDNVSSDFPNYVNSSYIPTKQFETCSKTPITFEVEEFVPCIPKHTQPYTIYTNHLYVYPKYLKYDSQKSFAKARNIAICIEFKDSDEEDSQPLKCIYGRPGGPVFTRSAFAAVLHHHQNPEFYDEIKIELPTQLHEKHHLLLTFFHVSCDNSSKGSTKKRDVVETQVGYSWLPLLKDGRVVTSEQHIPVSANLPSGYLGYQELGMGRHYGPEIKWVDGGKPLLKISTHLVSTVYTQDQHLHNFFQYCQKTESGAQALGNELVKYLKSLHAMEGHVMIAFLPTILNQLFRVLTRATQEEVAVNVTRVIIHVVAQCHEEGLESHLRSYVKYAYKAEPYVASEYKTVHEELTKSMTTILKPSADFLTSNKLLKYSWFFFDVLIKSMAQHLIENSKVKLLRNQRFPASYHHAVETVVNMLMPHITQKFRDNPEASKNANHSLAVFIKRCFTFMDRGFVFKQINNYISCFAPGDPKTLFEYKFEFLRVVCNHEHYIPLNLPMPFGKGRIQRYQDLQLDYSLTDEFCRNHFLVGLLLREVGTALQEFREVRLIAISVLKNLLIKHSFDDRYASRSHQARIATLYLPLFGLLIENVQRINVRDVSPFPVNAGMTVKDESLALPAVNPLVTPQKGSTLDNSLHKDLLGAISGIASPYTTSTPNINSVRNADSRGSLISTDSGNSLPERNSEKSNSLDKHQQSSTLGNSVVRCDKLDQSEIKSLLMCFLYILKSMSDDALFTYWNKASTSELMDFFTISEVCLHQFQYMGKRYIARTGMMHARLQQLGSLDNSLTFNHSYGHSDADVLHQSLLEANIATEVCLTALDTLSLFTLAFKNQLLADHGHNPLMKKVFDVYLCFLQKHQSETALKNVFTALRSLIYKFPSTFYEGRADMCAALCYEILKCCNSKLSSIRTEASQLLYFLMRNNFDYTGKKSFVRTHLQVIISVSQLIADVVGIGGTRFQQSLSIINNCANSDRLIKHTSFSSDVKDLTKRIRTVLMATAQMKEHENDPEMLVDLQYSLAKSYASTPELRKTWLDSMARIHVKNGDLSEAAMCYVHVTALVAEYLTRKEAVQWEPPLLPHSHSACLRRSRGGVFRQGCTAFRVITPNIDEEASMMEDVGMQDVHFNEDVLMELLEQCADGLWKAERYELIADIYKLIIPIYEKRRDFERLAHLYDTLHRAYSKVTEVMHSGRRLLGTYFRVAFFGQAAQYQFTDSETDVEGFFEDEDGKEYIYKEPKLTPLSEISQRLLKLYSDKFGSENVKMIQDSGKVNPKDLDSKYAYIQVTHVIPFFDEKELQERKTEFERSHNIRRFMFEMPFTQTGKRQGGVEEQCKRRTILTAIHCFPYVKKRIPVMYQHHTDLNPIEVAIDEMSKKVAELRQLCSSAEVDMIKLQLKLQGSVSVQVNAGPLAYARAFLDDTNTKRYPDNKVKLLKEVFRQFVEACGQALAVNERLIKEDQLEYQEEMKANYREMAKELSEIMHEQLG

SEQ ID NO: 25659 - protein, 1301 aa, Homo sapiens
MKIITYFCIWAVAWAIPVPQSKPLERHVEKSMNLHLLARSNVSVQDELNASGTIKESGVLVHEGDRGRQENTQDGHKGEGNGSKWAEVGGKSFSTYSTLANEEGNIEGWNGDTGKAETYGHDGIHGKEENITANGIQGQVSIIDNAGATNRSNTNGNTDKNTQNGDVGDAGHNEDVAVVQEDGPQVAGSNNSTDNEDEIIENSCRNEGNTSEITPQINSKRNGTKEAEVTPGTGEDAGLDNSDGSPSGNGADEDEDEGSGDDEDEEAGNGKDSSNNSKGQEGQDHGKEDDHDSSIGQNSDSKEYYDPEGKEDPHNEVDGDKTSKSEENSAGIPEDNGSQRIEDTQKLNHRESKRVENRITKESETHAVGKSQDKGIEIKGPSSGNRNITKEVGKGNEGKEDKGQHGMILGKGNVKTQGEVVNIEGPGQKSEPGNKVGHSNTGSDSNSDGYDSYDFDDKSMQGDDPNSSDESNGNDDANSESDNNSSSRGDASYNSDESKDNGNGSDSKGAEDDDSDSTSDTNNSDSNGNGNNGNDDNDKSDSGKGKSDSSDSDSSDSSNSSDSSDSSDSDSSDSNSSSDSDSSDSDSSDSSDSDSSDSSNSSDSSDSSDSSDSSDSSDSSDSKSDSSKSESDSSDSDSKSDSSDSNSSDSSDNSDSSDSSNSSNSSDSSDSSDSSDSSSSSDSSNSSDSSDSSDSSNSSESSDSSDSSDSDSSDSSDSSNSNSSDSDSSNSSDSSDSSNSSDSSDSSDSSNSSDSSDSSDSSNSSDSSDSSDSSDSSDSSNSSDSNDSSNSSDSSDSSNSSDSSNSSDSSDSSDSSDSDSSNSSDSSNSSDSSDSSNSSDSSDSSDSSDGSDSDSSNRSDSSNSSDSSDSSDSSNSSDSSDSSDSNESSNSSDSSDSSNSSDSDSSDSSNSSDSSDSSNSSDSSESSNSSDNSNSSDSSNSSDSSDSSDSSNSSDSSNSSDSSNSSDSSDSNSSDSSDSSNSSDSSDSSDSSDSSDSSDSSNSSDSSDSSDSSDSSNSSDSSNSSDSSNSSDSSDSSDSSDSSDSSDSSDSSDSSNSSDSSDSSDSSDSSDSSDSSDSSDSSESSDSSDSSNSSDSSDSSDSSDSSDSSDSSDSSDSSDSSNSSDSSDSSDSSDSSDSSNSSDSSDSSESSDSSDSSDSSDSSDSSDSSDSSDSSDSSNSSDSSDSSDSSDSSDSSDSSDSSDSSDSSDSSDSSDSSDSSDSSDSSDSSDSNESSDSSDSSDSSDSSNSSDSSDSSDSSDSTSDSNDESDSQSKSGNGNNNGSDSDSDSEGSDSNHSTSDD

SEQ ID NO: 25660 - protein, 2053 aa, Homo sapiens
MWLVTFLLLLDSLHKARPEDVGTSLYFVNDSLQQVTFSSSVGVVVPCPAAGSPSAALRWYLATGDDIYDVPHIRHVHANGTLQLYPFSPSAFNSFIHDNDYFCTAENAAGKIRSPNIRVKAVFREPYTVRVEDQRSMRGNVAVFKCLIPSSVQEYVSVVSWEKDTVSIIPEHRFFITYHGGLYISDVQKEDALSTYRCITKHKYSGETRQSNGARLSVTDPAESIPTILDGFHSQEVWAGHTVELPCTASGYPIPAIRWLKDGRPLPADSRWTKRITGLTISDLRTEDSGTYICEVTNTFGSAEATGILMVIDPLHVTLTPKKLKTGIGSTVILSCALTGSPEFTIRWYRNTELVLPDEAISIRGLSNETLLITSAQKSHSGAYQCFATRKAQTAQDFAIIALEDGTPRIVSSFSEKVVNPGEQFSLMCAAKGAPPPTVTWALDDEPIVRDGSHRTNQYTMSDGTTISHMNVTGPQIRDGGVYRCTARNLVGSAEYQARINVRGPPSIRAMRNITAVAGRDTLINCRVIGYPYYSIKWYKDALLLPDNHRQVVFENGTLKLTDVQKGMDEGEYLCSVLIQPQLSISQSVHVAVKVPPLIQPFEFPPASIGQLLYIPCVVSSGDMPIRITWRKDGQVIISGSGVTIESKEFMSSLQISSVSLKHNGNYTCIASNAAATVSRERQLIVRVPPRFVVQPNNQDGIYGKAGVLNCSVDGYPPPKVMWKHAKGSGNPQQYHPVPLTGRIQILPNSSLLIRHVLEEDIGYYLCQASNGVGTDISKSMFLTVKIPAMITSHPNTTIAIKGHAKELNCTARGERPIIIRWEKGDTVIDPDRVMRYAIATKDNGDEVVSTLKLKPADRGDSVFFSCHAINSYGEDRGLIQLTVQEPPDPPELEIREVKARSMNLRWTQRFDGNSIITGFDIEYKNKSDSWDFKQSTRNISPTINQANIVDLHPASVYSIRMYSFNKIGRSEPSKELTISTEEAAPDGPPMDVTLQPVTSQSIQVTWKAPKKELQNGVIRGYQIGYRENSPGSNGQYSIVEMKATGDSEVYTLDNLKKFAQYGVVVQAFNRAGTGPSSSEINATTLEDVPSQPPENVRALSITSDVAVISWSEPPRSTLNGVLKGYRVIFWSLYVDGEWGEMQNITTTRERVELRGMEKFTNYSVQVLAYTQAGDGVRSSVLYIQTKEDVPGPPAGIKAVPSSASSVVVSWLPPTKPNGVIRKYTIFCSSPGSGQPAPSEYETSPEQLFYRIAHLNRGQQYLLWVAAVTSAGRGNSSEKVTIEPAGKAPAKIISFGGTVTTPWMKDVRLPCNSVGDPAPAVKWTKDSEDSAIPVSMDGHRLIHTNGTLLLRAVKAEDSGYYTCTATNTGGFDTIIVNLLVQVPPDQPRLTVSKTSASSITLTWIPGDNGGSSIRGFVLQYSVDNSEEWKDVFISSSERSFKLDSLKCGTWYKVKLAAKNSVGSGRISEIIEAKTHGREPSFSKDQHLFTHINSTHARLNLQGWNNGGCPITAIVLEYRPKGTWAWQGLRANSSGEVFLTELREATWYELRMRACNSAGCGNETAQFATLDYDGSTIPPIKSAQGEGDDVKKLFTIGCPVILATLGVALLFIVRKKRKEKRLKRLRDAKSLAEMLISKNNRSFDTPVKGPPQGPRLHIDIPRVQLLIEDKEGIKQLGDDKATIPVTDAEFSQAVNPQSFCTGVSLHHPTLIQSTGPLIDMSDIRPGTNPVSRKNVKSAHSTRNRYSSQWTLTKCQASTPARTLTSDWRTVGSQHGVTVTESDSYSASLSQDTDKGRNSMVSTESASSTYEELARAYEHAKLEEQLQHAKFEITECFISDSSSDQMTTGTNENADSMTSMSTPSEPGICRFTASPPKPQDADRGKNVAVPIPHRANKSDYCNLPLYAKSEAFFRKADGREPCPVVPPREASIRNLARTYHTQARHLTLDPASKSLGLPHPGAPAAASTATLPQRTLAMPAPPAGTAPPAPGPTPAEPPTAPSAAPPAPSTEPPRAGGPHTKMGGSRDSLLEMSTSGVGRSQKQGAGAYSKSYTLV

SEQ ID NO: 25661 - protein, 963 aa, Homo sapiens
MVSEKSHLGNPQEPVQEEPKTRLLSMTVRRGPRSLPPIPSTSRTGFAEFSMRGRMREKLQAARSKAESALLQEIPTPRPRRLRSPSKKELETEFGTEPGKEVERTQQEVDSQSYSRVKFHDSARKIKPKPQVPPGFPSAEEAYNFFTFNFDPEPEGSEEKPKARHRAGTNQEEEEGEEEEPPAQGGGKEMDEEELLNGDDAEDFLLGLDHVADDFVAVRPADYESIHDRLQMEREMLFIPSRQTVPTYKKLPENVQPRFLEDEGLYTGVRPEVARTNQNIMENRLLMQDPERRWFGDDGRILALPNPIKPFPSRPPVLTQEQSIKAELETLYKKAVKYVHSSQHVIRSGDPPGNFQLDIDISGLIFTHHPCFSREHVLAAKLAQLYDQYLARHQRNKAKFLTDKLQALRNAVQTGLDPEKPHQSLDTIQKTINEYKSEIRQTRKFRDAEQEKDRTLLKTIIKVWKEMKSLREFQRFTNTPLKLVLRKEKADQKADEEAYEAEIQAEISELLEEHTEEYAQKMEEYRTSLQQWKAWRKVQRAKKKKRKQAAEEHPGDEIAEPYPEEDLVKPSPPEPTDRAVIEQEVRERAAQSRRRPWEPTLVPELSLAGSVTPNDQCPRAEVSRREDVKKRSVYLKVLFNNKEVSRTVSRPLGADFRVHFGQIFNLQIVNWPESLTLQVYETVGHSSPTLLAEVFLPIPETTVVTGRAPTEEVEFSSNQHVTLDHEGVGSGVPFSFEADGSNQLTLMTSGKVSHSVAWAIGENGIPLIPPLSQQNIGFRSALKKADAISSIGTSGLTDMKKLAKWAAESKLDPNDPNNAPLMQLISVATSGESYVPDFFRLEQLQQEFNFVSDQELNRSKRFRLLHLRSQEVPEFRNYKQVPVYDREIMEKVFQDYEKRLRDRNVIETKEHIDTHRAIVAKYLQQVRESVINRFLIAKQYFLLADMIVEEEVPNIRPFFFLES

SEQ ID NO: 25662 - protein, 1009 aa, Homo sapiens
MNGEYRGRGFGRGRFQSWKRGRGGGNFSGKWREREHRPDLSKTTGKRTSEQTPQFLLSTKTPQSMQSTLDRFIPYKGWKLYFSEVYSDSSPLIEKIQAFEKFFTRHIDLYDKDEIERKGSILVDFKELTEGGEVTNLIPDIATELRDAPEKTLACMGLAIHQVLTKDLERHAAELQAQEGLSNDGETMVNVPHIHARVYNYEPLTQLKNVRANYYGKYIALRGTVVRVSNIKPLCTKMAFLCAACGEIQSFPLPDGKYSLPTKCPVPVCRGRSFTALRSSPLTVTMDWQSIKIQELMSDDQREAGRIPRTIECELVHDLVDSCVPGDTVTITGIVKVSNAEEGSRNKNDKCMFLLYIEANSISNSKGQKTKSSEDGCKHGMLMEFSLKDLYAIQEIQAEENLFKLIVNSLCPVIFGHELVKAGLALALFGGSQKYADDKNRIPIRGDPHILVVGDPGLGKSQMLQAACNVAPRGVYVCGNTTTTSGLTVTLSKDSSSGDFALEAGALVLGDQGICGIDEFDKMGNQHQALLEAMEQQSISLAKAGVVCSLPARTSIIAAANPVGGHYNKAKTVSENLKMGSALLSRFDLVFILLDTPNEHHDHLLSEHVIAIRAGKQRTISSATVARMNSQDSNTSVLEVVSEKPLSERLKVVPGETIDPIPHQLLRKYIGYARQYVYPRLSTEAARVLQDFYLELRKQSQRLNSSPITTRQLESLIRLTEARARLELREEATKEDAEDIVEIMKYSMLGTYSDEFGNLDFERSQHGSGMSNRSTAKRFISALNNVAERTYNNIFQFHQLRQIAKELNIQYENPWTIPNMLSMTRIGLAPVLGYLIIEEDFNIALGVFALAGLTDLLDGFIARNWANQRSALGSALDPLADKILISILYVSLTYADLIPVPLTYMIISRDVMLIAAVFYVRYRTLPTPRTLAKYFNPCYATARLKPTFISKVNTAVQLILVAASLAAPVFNYADSIYLQILWCFTAFTTAASAYSYYHYGRKTVQVIKD

SEQ ID NO: 25663 - protein, 570 aa, Homo sapiens
MPVKRLREVVSQNHGDHLVLLKDELPCVPPALSANKRLPVGTGTSLNGTSRGSSDLTSARNCYQPLLENPMVSESDFSKDVAVQVLPLDKIEENNKQKANDIFISQYTMGQKDALRTVLKQKAQSMPVFKEVKVHLLEDAGIEKDAVTQETRISPSGIDSATTVAAATAAAIATAAPLIKVQSDLEAKVNSVTELLSKLQETDKHLQRVTEQQTSIQRKQEKLHCHDHEKQMNVFMEQHIRHLEKLQQQQIDIQTHFISAALKTSSFQPVSMPSSRAVEKYSVKPEHPNLGSCNPSLYNTFASKQAPLKEVEDTSFDKQKSPLETPAPRRFAPVPVSRDDELSKRENLLEEKENMEVSCHRGNVRLLEQILNNNDSLTRKSESSNTTSLTRSKIGWTPEKTNRFPSCEELETTKVTMQKSDDVLHDLGQKEKETNSMVQPKESLSMLKLPDLPQNSVKLQTTNTTRSVLKDAEKILRGVQNNKKVLEENLEAIIRAKDGAAMYSLINALSTNREMSEKIRIRKTVDEWIKTISAEIQDELSRTDYEQKRFDQKNQRTKKGAFESNHSNTR

SEQ ID NO: 25664 - protein, 617 aa, Homo sapiens
TGDLASAQLGGAPNRWEVLSATPTTIKDEAGNLVQIPSAATSSGQYVLPLQNLQNQQIFSVAPGSDSSNGTVSSVQYQVIPQIQSADGQQVQIGFTGSSDNGGINQESSQIQIIPGSNQTLLASGTPSANIQNLIPQTGQVQVQGVAIGGSSFPGQTQVVANVPLGLPGNITFVPINSVDLDSLGLSGSSQTMTAGINADGHLINTGQAMDSSDNSERTGERVSPDINETNTDTDLFVPTSSSSQLPVTIDSTGILQQNTNSLTTSSGQVHSSDLQGNYIQSPVSEETQAQNIQVSTAQPVVQHLQLQESQQPTSQAQIVQGITPQTIHGVQASGQNISQQALQNLQLQLNPGTFLIQAQTVTPSGQVTWQTFQVQGVQNLQNLQIQNTAAQQITLTPVQTLTLGQVAAGGAFTSTPVSLSTGQLPNLQTVTVNSIDSAGIQLHPGENADSPADIRIKEEEPDPEEWQLSGDSTLNTNDLTHLRVQVVDEEGDQQHQEGKRLRRVACTCPNCKEGGGRGTNLGKKKQHICHIPGCGKVYGKTSHLRAHLRWHSGERPFVCNWMYCGKRFTRSDELQRHRRTHTGEKKFVCPECSKRFMRSDHLAKHIKTHQNKKGPV

SEQ ID NO: 25665 - protein, 482 aa, Homo sapiens
MVCTQKSKKTEFKTLEGVITRTKHGEKVSLSSKCAEIDREMISSLGVSKAVLNNVIFCHQEDSNWPLSEGKALKQKFDEIFSATRYIKALETLRQVRQTQGQKVKEYQMELKYLKQYKEKACEIRDQITSKEAQLTSSKEIVKSYENELDPLKNRLKEIEHNLSKIMKLDNEIKALDSRKKQMEKDNSELEEKMEKVFQGTDEQLNDLYHNHQRTVREKERKLVDCHRELEKLNKESRLLNQEKSELLVEQGRLQLQADRHQEHIRARDSLIQSLATQLELDGFERGPFSERQIKNFHKLVRERQEGEAKTANQLMNDFAEKETLKQKQIDEIRDKKTGLGRIIELKSEILSKKQNELKNVKYELQQLEGSSDRILELDQELIKAERELSKAEKNSNVETLKMEVISLQNEKADLDRTLRKLDQEMEQLNHHTTTRTQMEMLTKDKADKDEQIRKIKSRHSDELTSLLGYFPNKKQLEDWLH

SEQ ID NO: 25666 - protein, 89 aa, Homo sapiens
MVSESDFSKDVAVQVLPLDKIEENNKQKANDIFISQYTMGQKDALRTVLKQKDRVCHVAQLVLNSWAQAVFLPQPPTVLGLQSSKHACF

SEQ ID NO: 25667 - protein, 709 aa, Homo sapiens
MGHRTAMPEPRGSSQLRVNAAFAARYNRYREREELQRLKDRYGDRDSSSDSSSESDSSDERVEFDPQQERDFYKTLSLLKKKDPRIYQKDATFYNRTASSSDSEEDPEALEKQKKVRPMYLKDYERKVILEKAGKYVDEENSDGETSNHRLQETSSQSYVEEQKQLKESFRAFVEDSEDEDGAGEGGSSLLQKRAKTRQEKAQEEADYIEWLKGQKEIRNPDSLKELTHLKEYWNDPELDEGERFLRDYILNKRYEEEEEEEEDEEEMEEEEGVHGPPVQLAVDDSSDEGELFLKKQEDFEQKYNFRFEEPDSASVKTYPRSIASSVRRKDERRKEKREETRERKKREKAKKQEELKQLKNLKRKEILAKLEKLRKVTGNEMLGLEEGDLEDDFDPAQHDQLMQKCFGDEYYGAVEEEKPQFEEEEGLEDDWNWDTWDGPEQEGDWSQQELHCEDPNFNMDADYDPSQPRKKKREAPLTGKKKRKSPFAAAVGQEKPVFEPGDKTFEEYLDEYYRLDYEDIIDDLPCRFKYRTVVPCDFGLSTEEILAADDKELNRWCSLKKTCMYRSEQEELRDKRAYSQKAQNSWKKRQVFKSLCREEAETPAEATGKPQRDEAGPQRQLPALDGSLMGPESPPAQEEEAPVSPHKKPAPQKRRRAKKARLLGPTVMLGGCEFSRQRLQAFGLNPKRLHFRQLGRQRRKQQGPKNSS

SEQ ID NO: 25668 - protein, 404 aa, Homo sapiens
MEVVDPQQLGMFTEGELMSVGMDTFIHRIDSTEVIYQPRRKRAKLIGKYLMGDLLGEGSYGKVKEVLDSETLCRRAVKILKKKKLRRIPNGEANVKKEIQLLRRLRHKNVIQLVDVLYNEEKQKMYMVMEYCVCGMQEMLDSVPEKRFPVCQAHGYFCQLIDGLEYLHSQGIVHKDIKPGNLLLTTGGTLKISDLGVAEALHPFAADDTCRTSQGSPAFQPPEIANGLDTFSGFKVDIWSAGVTLYNITTGLYPFEGDNIYKLFENIGKGSYAIPGDCGPPLSDLLKGMLEYEPAKRFSIRQIRQHSWFRKKHPPAEAPVPIPPSPDTKDRWRSMTVVPYLEDLHGADEDEDLFDIEDDIIYTQDFTVPGGEEASEAGLRAERGLQKSEGSDLSGEEASRPAPQ

SEQ ID NO: 25669 - protein, 241 aa, Homo sapiens
MSERKEGRGKGKGKKKERGSGKKPESAAGSQSPALPPRLKEMKSQESAAGSKLVLRCETSSEYSSLRFKWFKNGNELNRKNKPQNIKIQKKPGKSELRINKASLADSGEYMCKVISKLGNDSASANITIVESNEIITGMPASTEGAYVSSESPIRISVSTEGANTSSSTSTSTTGTSHLVKCAEKEKTFCVNGGECFMVKDLSNPSRYLCKCPNEFTGDRCQNYVMASFYSTSTPFLSLPE

SEQ ID NO: 25670 - protein, 483 aa, Homo sapiens
MLKFRTVHGGLRLLGIRRTSTAPAASPNVRRLEYKPIKKVMVANRGEIAIRVFRACTELGIRTVAIYSEQDTGQMHRQKADEAYLIGRGLAPVQAYLHIPDIIKVAKENNVDAVHPGYGFLSERADFAQACQDAGVRFIGPSPEVVRKMGDKVEARAIAIAAGVPVVPGTDAPITSLHEAHEFSNTYGFPIIFKAAYGGGGRGMRVVHSYEELEENYTRAYSEALAAFGNGALFVEKFIEKPRHIEVQILGDQYGNILHLYERDCSIQRRHQKVVEIAPAAHLDPQLRTRLTSDSVKLAKQVGYENAGTVEFLVDRHGKHYFIEVNSRLQVEHTVTEEITDVDLVHAQIHVAEGRSLPDLGLRQENIRINGCAIQCRVTTEDPARSFQPDTGRIEVFRSGEGMGIRLDNASAFQGAVISPHYDSLLVKVIAHGKDHPTAATKMSRALAEFRVRGVKTNIAFLQNVLNNQQFLAGTVDTQFIDE

SEQ ID NO: 25671 - protein, 2413 aa, Homo sapiens; identical to SEQ ID NO: 8690

SEQ ID NO: 25672 - protein, 93 aa, Homo sapiens
MDGASAEQDGLQEDRSHSGPSSLPEAPLKPPGPLVPPDQQDKVQCAEVNRASTEGESPDGPGQGGLCQNGPTPPFPDPPSSLDPTTSPVGPDA

SEQ ID NO: 25673 - protein, 653 aa, Homo sapiens
MRLPDLRPWTSLLLVDAALLWLLQGPLGTLLPQGLPGLWLEGTLRLGGLWGLLKLRGLLGFVGTLLLPLCLATPLTVSLRALVAGASRAPPARVASAPWSWLLVGYGAAGLSWSLWAVLSPPGAQEKEQDQVNNKVLMWRLLKLSRPDLPLLVAAFFFLVLAVLGETLIPHYSGRVIDILGGDFDPHAFASAIFFMCLFSFGSSLSAGCRGGCFTYTMSRINLRIREQLFSSLLRQDLGFFQETKTGELNSRLSSDTTLMSNWLPLNANVLLRSLVKVVGLYGFMLSISPRLTLLSLLHMPFTIAAEKVYNTRHQEVLREIQDAVARAGQVVREAVGGLQTVRSFGAEEHEVCRYKEALEQCRQLYWRRDLERALYLLVRRVLHLGVQMLMLSCGLQQMQDGELTQGSLLSFMIYQESVGSYVQTLVYIYGDMLSNVGAAEKVFSYMDRQPNLPSPGTLAPTTLQGVVKFQDVSFAYPNRPDRPVLKGLTFTLRPGEVTALVGPNGSGKSTVAALLQNLYQPTGGQVLLDEKPISQYEHCYLHSQVVSVGQEPVLFSGSVRNNIAYGLQSCEDDKVMAAAQAAHADDFIQEMEHGIYTDVGEKGSQLAAGQKQRLAIARALVRDPRVLILDEATSALDVQCEQAKTLWKFMIF

SEQ ID NO: 25674 - protein, 659 aa, Homo sapiens
MSRIEKMSILGVRSFGIEDKDKQIITFFSPLTILVGPNGAGKTTIIECLKYICTGDFPPGTKGNTFVHDPKVAQETDVRAQIRLQFRDVNGELIAVQRSMVCTQKSKKTEFKTLEGVITRTKHGEKVSLSSKCAEIDREMISSLGVSKAVLNNVIFCHQEDSNWPLSEGKALKQKFDEIFSATRYIKALETLRQVRQTQGQKVKEYQMELKYLKQYKEKACEIRDQITSKEAQLTSSKEIVKSYENELDPLKNRLKEIEHNLSKIMKLDNEIKALDSRKKQMEKDNSELEEKMEKVFQGTDEQLNDLYHNHQRTVREKERKLVDCHRELEKLNKESRLLNQEKSELLVEQGRLQLQADRHQEHIRARDSLIQSLATQLELDGFERGPFSERQIKNFHKLVRERQEGEAKTANQLMNDFAEKETLKQKQIDEIRDKKTGLGRIIELKSEILSKKQNELKNVKYELQQLEGSSDRILELDQELIKAERELSKAEKNSNVETLKMEVISLQNEKADLDRTLRKLDQEMEQLNHHTTTRTQMEMLTKDKADKDEQIRKIKSRHSDELTSLLGYFPNKKQLEDWLHSKSKEINQTRDRLAKLKIVLVKPHSITSCYNSLKKCFRNLIPLIEEVLLLSAADLEAVILGIHQVERLLNFNFSVRIV

SEQ ID NO: 25675 - protein, 207 aa, Homo sapiens
MSERKEGRGKGKGKKKERGSGKKPESAAGSQSPALPPRLKEMKSQESAAGSKLVLRCETSSEYSSLRFKWFKNGNELNRKNKPQNIKIQKKPGKSELRINKASLADSGEYMCKVISKLGNDSASANITIVESNATSTSTTGTSHLVKCAEKEKTFCVNGGECFMVKDLSNPSRYLCKCPNEFTGDRCQNYVMASFYSTSTPFLSLPE

SEQ ID NO: 25676 - protein, 692 aa, Homo sapiens
MLTFFLVSGGSLWLFVEFVLSLLEKMQTQEILRILRLPELGDLGQFFRSLSATTLVSMGALAAILAYWFTHRPKALQPPCNLLMQSEEVEDSGGARRSVIGSGPQLLTHYYDDARTMYQVFRRGLSISGNGPCLGFRKPKQPYQWLSYQEVADRAEFLGSGLLQHNCKACTDQFIGVFAQNRPEWIIVELACYTYSMVVVPLYDTLGPGAIRYIINTADISTVIVDKPQKAVLLLEHVERKETPGLKLIILMDPFEEALKERGQKCGVVIKSMQAVEDCGQENHQAPVPPQPDDLSIVCFTSGTTGNPKGAMLTHGNVVADFSGFLKVTESQWAPTCADVHISYLPLAHMFERMVQSVVYCHGGRVGFFQGDIRLLSDDMKALCPTIFPVVPRLLNRMYDKIFSQANTPLKRWLLEFAAKRKQAEVRSGIIRNDSIWDELFFNKIQASLGGCVRMIVTGAAPASPTVLGFLRAALGCQVYEGYGQTECTAGCTFTTPGDWTSGHVGAPLPCNHIKLVDVEELNYWACKGEGEICVRGPNVFKGYLKDPDRTKEALDSDGWLHTGDIGKWLPAGTLKIIDRKKHIFKLAQGEYVAPEKIENIYIRSQPVAQIYVHGDSLKAFLVGIVVPDPEVMPSWAQKRGIEGTYADLCTNKDLKKAILEDMVRLGKESGLHSFEQDLPQCLIQIKVFSKY

SEQ ID NO: 25677 - protein, 1064 aa, Homo sapiens
RLSDAVKQLQAAERGDAQQRLGQSRLITEEANRTTMEVQQATAPMANNLTNWSQNLQHFDSSAYNTAVNSARDAVRNLTEVVPQLLDQLRTVEQKRPASNVSASIQRIRELIAQTRSVASKIQVSMMFDGQSAVEVHSRTSMDDLKAFTSLSLYMKPPVKRPELTETADQFILYLGSKNAKKEYMGLAIKNDNLVYVYNLGTKDVEIPLDSKPVSSWPAYFSIVKIERVGKHGKVFLTVPSLSSTAEEKFIKKGEFSGDDSLLDLDPEDTVFYVGGVPSNFKLPTSLNLPGFVGCLELATLNNDVISLYNFKHIYNMDPSTSVPCARDKLAFTQSRAASYFFDGSGYAVVRDITRRGKFGQVTRFDIEVRTPADNGLILLMVNGSMFFRLEMRNGYLHVFYDFGFSGGPVHLEDTLKKAQINDAKYHEISIIYHNDKKMILVVDRRHVKSMDNEKMKIPFTDIYIGGAPPEILQSRALRAHLPLDINFRGCMKGFQFQKKDFNLLEQTETLGVGYGCPEDSLISRRAYFNGQSFIASIQKISFFDGFEGGFNFRTLQPNGLLFYYASGSDVFSISLDNGTVIMDVKGIKVQSVDKQYNDGLSHFVISSVSPTSNAYFTRVDRDVEVEDFQRYTEKVHTSLYECPIESSPLFLLHKKGKNLSKPKASQNKKGGKSKDAPSWDPVALKLPERNTPRNSHCHLSNSPRAIEHAYQYGGTANSRQEFEHLKGDFGAKSQFSIRLRTRSSHGMIFYVSDQEENDFMTLFLAHGRLVYMFNVGHKKLKIRSQEKYNDGLWHDVIFIRERSSGRLVIDGLRVLEESLPPTEATWKIKGPIYLGGVAPGKAVKNVQINSIYSFSGCLSNLQLNGASITSASQTFSVTPCFEGPMETGTYFSTEGGYVVLDESFNIGLKFEIAFEVRPRSSSGTLVHGHSVNGEYLNVHMKNGQVIVKVNNGIRDFSTSVTPKQSLCDGRWHRITVIRDSNVVQLDVDSEVNHVVGPLNPKPIDHREPVFVGGVPESLLTPRLAPSKPFTGCIRHFVIDGHPVSFSKAALVSGAVSINSCPAA

SEQ ID NO: 25678 - protein, 207 aa, Homo sapiens
VLYSGWLRKSPPEKKLRLFAWRKRWFILRRGQTSSDPDVLEYYKNDGSKKPLRTINLNLCEQLDVDVTLNFNKKEIQKGYMFDIKTSERTFYLVAETREDMNEWVQSICQICGFRQEESTGFLGNISSASHGLCSSPAEPSCSHQHLPQEQEPTSEPPVSHCVPPTWPIPAPPGCLRSHQHASQRAEHASFLRQVHPAWWRECQPAC

SEQ ID NO: 25679 - protein, 383 aa, Homo sapiens
MILLQHAVLPPPKQPSPSPPMSVATRSTGTLQLPPQKPFGQEASLPLAGEEELSKGGEQDCALEELCKPLYCKLCNVTLNSAQQAQAHYQGKNHGKKLRNYYAANSCPPPARMSNVVEPAATPVVPVPPQMGSFKPGGRVILATENDYCKLCDASFSSPAVAQAHYQGKNHAKRLRLAEAQSNSFSESSELGQRRARKEGNEFKMMPNRRNMYTVQNNSGPYFNPRSRQRIPRDLAMCVTPSGQFYCSMCNVGAGEEMEFRQHLESKQHKSKDTEMLSALRCHCWGMEGFCVSNSRLFFLPFGASFSDMKLKPDLKGQWCSGKRVDVGIRPKLNLRPSSYRRCHHESLLQPLDTVSSLLESIKENGKRDSRHTKRINMELKAM

SEQ ID NO: 25680 - protein, 415 aa, Homo sapiens
MRLFRWLLKQPVPKQIERYSRFSPSPLSIKQFLDFGRDNACEKTSYMFLRKELPVRLANTMREVNLLPDNLLNRPSVGLVQSWYMQSFLELLEYENKSPEDPQVLDNFLQVLIKVRNRHNDVVPTMAQGVIEYKEKFGFDPFISTNIQYFLDRFYTNRISFRMLINQHTLLFGGDTNPVHPKHIGSIDPTCNVADVVKDAYETAKMLCEQYYLVAPELEVEEFNAKAPDKPIQVVYVPSHLFHMLFELFKNSMRATVELYEDRKEGYPAVKTLVTLGKEDLSIKISDLGGGVPLRKIDRLFNYMYSTAPRPSLEPTRAAPLAGFGYGLPISRLYARYFQGDLKLYSMEGVGTDAVIYLKALSSESFERLPVFNKSAWRHYKTTPEADDWSNPSSEPRDASKYKAKQDKIKTNRTF

SEQ ID NO: 25681 - protein, 379 aa, Homo sapiens
MFEISRTLNAALLNNEIISTMEPQVSNGPTSNTSNGPSSNNRNCPSPMQTGATTDDSKTNLIVNYLPQNMTQEEFRSLFGSIGEIESCKLVRDKITGQSLGYGFVNYIDPKDAEKAINTLNGLRLQTKTIKVSYARPSSASIRDANLYVSGLPKTMTQKELEQLFSQYGRIITSRILVDQVTGVSRGVGFIRFDKRIEAEEAIKGLNGQKPSGATEPITVKFANNPSQKSSQALLSQLYQSPNRRYPGPLHHQAQRFRLDNLLNMAYGVKRFSPITIDGMTSLVGMNIPGHTGTGWCIFVYNLSPDSDESVLWQLFGPFGAVNNVKVIRDFNTNKCKGFGFVTMTNYDEAAMAIASLNGYRLGDRVLQVSFKTNKAHKS

SEQ ID NO: 25682 - protein, 1581 aa, Homo sapiens
MADRGCPLEAAPLPAEVRESLAELELELSEGDITQKGYEKKRAKLLARYIPLIQGIDPSLQAENRIPGPSQTTAAAPKQQKSRPTASRDERFRSDVHTEAVQAALAKYKERKMPMPSKRRSVLVHSSVETYTPPDTSSASEDEGSLRRPGRLTSTPLQSHSSVEPWLDRVIQGSSTSSSASSTSSHPGGRPTTAPSAAATPGAAATTALAGLEAHTHIDLHSAPPDVTTGLVEHSYFERPQVASVRSVPRGCSGSMLETADGVPVNSRVSSKIQQLLNTLKRPKRPPLKEFFVDDFEELLEVQQPDPNQPKPEGSETSVLRGEPLTAGVPRPPSLLATLQRWGTTQPKSPCLTALDTTGKAVYTLTYGKLWSRSLKLAYTLLNKLTSKNEPLLKPGDRVALVFPNSDPVMFMVAFYGCLLAELVPVPIEVPLTRKDAGSQQVGFLLGSCGVFLALTTDACQKGLPKAQTGEVAAFKGWPPLSWLVIDGKHLAKPPKDWHPLAQDTGTGTAYIEYKTSKEGSTVGVTVSHASLLAQCRALTQACGYSEAETLTNVLDFKRDAGLWHGVLTSVMNRMHVVSVPYALMKANPLSWIQKVCFYKARAALVKSRDMHWSLLAQRGQRDVSLSSLRMLIVADGANPWSISSCDAFLNVFQSRGLRPEVICPCASSPEALTVAIRRPPDLGGPPPRKAVLSMNGLSYGVIRVDTEEKLSVLTVQDVGQVMPGANVCVVKLEGTPYLCKTDEVGEICVSSSATGTAYYGLLGITKNVFEAVPVTTGGAPIFDRPFTRTGLLGFIGPDNLVFIVGKLDGLMVTGVRRHNADDVVATALAVEPMKFVYRGRIAVFSVTVLHDDRIVLVAEQRPDASEEDSFQWMSRVLQAIDSIHQVGVYCLALVPANTLPKAPLGGIHISETKQRFLEGTLHPCNVLMCPHTCVTNLPKPRQKQPEVGPASMIVGNLVAGKRIAQASGRELAHLEDSDQARKFLFLADVLQWRAHTTPDHPLFLLLNAKGTVTSTATCVQLHKRAERVAAALMEKGRLSVGDHVALVYPPGVDLIAAFYGCLYCGCVPVTVRPPHPQNLGTTLPTVKMIVEVSKSACVLTTQAVTRLLRSKEAAAAVDIRTWPTILDTDDIPKKKIASVFRPPSPDVLAYLDFSVSTTGILAGVKMSHAATSALCRSIKLQCELYPSRQIAICLDPYCGLGFALWCLCSVYSGHQSVLVPPLELESNVSLWLSAVSQYKARVTFCSYSVMEMCTKGLGAQTGVLRMKGVNLSCVRTCMVVAEERPRIALTQSFSKLFKDLGLPARAVSTTFGCRVNVAICLQPNRLGKLAEQGTAGPDPTTVYVDMRALRHDRVRLVERGSPHSLPLMESGKILPGVKVIIAHTETKGPLGDSHLGEIWVSSPHNATGYYTVYGEEALHADHFSARLSFGDTQTIWARTGYLGFLRRTELTDASGGRHDALYVVGSLDETLELRGMRYHPIDIETSVIRAHRSIAECAVFTWTNLLVVVVELDGLEQDALDLVALVTNVVLEEHYLVVGVVVIVDPGVIPINSRGEKQRMHLRDGFLADQLDPIYVAYNM

SEQ ID NO: 25683 - protein, 818 aa, Homo sapiens
MAQWEMLQNLDSPFQDQLHQLYSHSLLPVDIRQYLAVWIEDQNWQEAALGSDDSKATMLFFHFLDQLNYECGRCSQDPESLLLQHNLRKFCRDIQPFSQDPTQLAEMIFNLLLEEKRILIQAQRAQLEQGEPVLETPVESQQHEIESRILDLRAMMEKLVKSISQLKDQQDVFCFRYKIQAKGKTPSLDPHQTKEQKILQETLNELDKRRKEVLDASKALLGRLTTLIELLLPKLEEWKAQQQKACIRAPIDHGLEQLETWFTAGAKLLFHLRQLLKELKGLSCLVSYQDDPLTKGVDLRNAQVTELLQRLLHRAFVVETQPCMPQTPHRPLILKTGSKFTVRTRLLVRLQEGNESLTVEVSIDRNPPQLQGFRKFNILTSNQKTLTPEKGQSQGLIWDFGYLTLVEQRSGGSGKGSNKGPLGVTEELHIISFTVKYTYQGLKQELKNQQFFSNPPKAPWSLLGPALSWQFSSYVGRGLNSDQLSMLRNKLFGQNCRTEDPLLSWADFTKRESPPGKLPFWTWLDKILELVHDHLKDLWNDGRIMGFVSRSQERRLLKKTMSGTFLLRFSESSEGGITCSWVEHQDDDKVLIYSVQPYTKEVLQSLPLTEIIRHYQLLTEENIPENPLRFLYPRIPRDEAFGCYYQEKVNLQERRKYLKHRLIVVSNRQVDELQQPLELKPEPELESLELELGLVPEPELSLDLEPLLKAGLDLGPELESVLESTLEPVIEPTLCMVSQTVPEPDQGPVSQPVPEPDLPCDLRHLNTEPMEIFRNCVKIEEIMPNGDPLLAGQNTVDEVYVSRPSHFYTDGPLMPSDF

SEQ ID NO: 25684 - protein, 316 aa, Homo sapiens
MATFVELSTKAKMPIVGLGTWRSLLGKVKEAVKVAIDAEYRHIDCAYFYENQHEVGEAIQEKIQEKAVMREDLFIVSKVWPTFFERPLVRKAFEKTLKDLKLSYLDVYLIHWPQGFKTGDDFFPKDDKGNMISGKGTFLDAWEAMEELVDEGLVKALGVSNFNHFQIERLLNKPGLKYKPVTNQVECHPYLTQEKLIQYCHSKGITVTAYSPLGSPDRPWAKPEDPSLLEDPKIKEIAAKHKKTTAQVLIRFHIQRNVTVIPKSMTPAHIVENIQVFDFKLSDEEMATILSFNRNWRAFDFKEFSHLEDFPFDAEY

SEQ ID NO: 25685 - protein, 1186 aa, Homo sapiens
MGVQGLWKLLECSGRQVSPEALEGKILAVDISIWLNQALKGVRDRHGNSIENPHLLTLFHRLCKLLFFRIRPIFVFDGDAPLLKKQTLVKRRQRKDLASSDSRKTTEKLLKTFLKRQAIKTAFRSKRDEALPSLTQVRRENDLYVLPPLQEEEKHSSEEEDEKEWQERMNQKQALQEEFFHNPQAIDIESEDFSSLPPEVKHEILTDMKEFTKRRRTLFEAMPEESDDFSQYQLKGLLKKNYLNQHIEHVQKEMNQQHSGHIRRQYEDEGGFLKEVESRRVVSEDTSHYILIKGIQAKTVAEVDSESLPSSSKMHGMSFDVKSSPCEKLKTEKEPDATPPSPRTLLAMQAALLGSSSEEELESENRRQARGRNAPAAVDEGSISPRTLSAIKRALDDDEDVKVCAGDDVQTGGPGAEEMRINSSTENSDEGLKVRDGKGIPFTATLASSSVNSAEEHVASTNEGREPTDSVPKEQMSLVHVGTEAFPISDESMIKDRKDRLPLESAVVRHSDAPGLPNGRELTPASPTCTNSVSKNETHAEVLEQQNELCPYESKFDSSLLSSDDETKCKPNSASEVIGPVSLQETSSIVSVPSEAVDNVENVVSFNAKEHENFLETIQEQQTTESAGQDLISIPKAVEPMEIDSEESESDGSFIEVQSVISDEELQAEFPETSKPPSEQGEEELVGTREGEAPAESESLLRDNSERDDVDGEPQEAEKDAEDSLHEWQDINLEELETLESNLLAQQNSLKAQKQQQERIAATVTGQMFLESQELLRLFGIPYIQAPMEAEAQCAILDLTDQTSGTITDDSDIWLFGARHVYRNFFNKNKFVEYYQYVDFHNQLGLDRNKLINLAYLLGSDYTEGIPTVGCVTAMEILNEFPGHGLEPLLKFSEWWHEAQKNPKIRPNPHDTKVKKKLRTLQLTPGFPNPAVAEAYLKPVVDDSKGSFLWGKPDLDKIREFCQRYFGWNRTKTDESLFPVLKQLDAQQTQLRIDSFFRLAQQEKEDAKRIKSQRLNRAVTCMLRKEKEAAASEIEAVSVAMEKEFELLDKAKGKTQKRGITNTLEESSSLKRKRLSDSKGKNTCGGFLGETCLSESSDGSSSEDAESSSLMNVQRRTAAKEPKTSASDSQNSVKEAPVKNGGATTSSSSDSDDDGGKEKMVLVTARSVFGKKRRKLRRARGRKRKT

SEQ ID NO: 25686 - protein, 126 aa, Homo sapiens
MPPQLQETRMNRSIPVEVDESEPYPSQLLKPIPEYSPEEESEPPAPNIRNMAPNSLSAPTMLHNSSGDFSQAHSTLKLANHQRPVSRQVTCLRTQVLEDSEDSFCRRHPGLGKAFPSGCSAVSEPA

SEQ ID NO: 25687 - protein, 1827 aa, Homo sapiens
RLAVVEVQCERLRMLYRDCARPPPPPLQADRRQPKEITWSPSRVFPPVRACMFSSHLTSVTFLADPSAGGGLPRGTFIYATSPLPVQAPSFYWEIEIVSYGDTDDDTGPIVSFGFTTEAEKRDGAWTNPVGTCLFHNNGRAVHYNGSSLLQWKSVRLDVTLSPGDVAGIGWERTEGTPPPPGQPAKGRVYFTYCGQRLSPYLEDVSGGMWPVVHIQKKNTKTRANFGSRPFAYAEGQAHRNAADLCTDLAEEISANFEALPFAMASDSDNDAGTSIASDPGTHGPPCRIAAVATAQQQYDSDTSCHYKVELSYENFITSGPDPHPPPIADDESDDDDDDDIPQEDHYALLVKAWETKVFPTIRRRFRNEAERKSGLDQIKGALQLGMVDIARQTVEFLYEENGGIPRDLYLPTIEDIKDEANKFTIDKVRKGLTVVTRSPDSNNVASSAVGTALPKFAIRGMLKTFGLHGVVLDVDSVNELVQVETYLRSEGVLVRYWYPIDMLERPPAGYRRTATNGLVTLDNTNLQIHRELLRCEAALARLYCRMALLNIFAPKLPHLFTRLFHIPAIRDITLEHLQLLSNQLLAPPLPDGTISSSSILLAQSLQHCIHSQNCSATDLFYQGNSQTVREWLNVAITRTLHQGEESLLELTKQICSFLQTAPEQFPSEEFPISESKVNMDVNFPGAAFVVVSCKESQSGFRKDSSLYKAPWARVLVYGLGHKVKRNGQLNLIEAACYPRDASPANTGLAPPPTADQYPSVVLSTDRVHIKLGVSPPPGAVLVLHSLPLEFPLAMAFAEQLLSWKSEDSEGKSEDEPDTIPTSVLLQVVELLGNFLWTTDMAACVKELVFHLLAELLRTVHTLEQRRHPAGLSSSIALQLNPCLAMLMALQSELHKLYDEETQNWVSGGACGGSGGAAAGDQGRFSTYFHALMEGCLAVAEVTLPTNMSVTASGVTSATAPNLSDSSSSSSSSPGQTPQSPSLLSKRKKVKMKREKASSSGKRQSSRTVDSDPTVLSIGGSKPEDMLWFHRALTLLIILRHLTRKDPQGLGVTSDAIADACQALVGPTAHSRLLVISGIPTHLDEGVVRGAIRKACNAHGGVFKDEIYIPLQEEDTKKPKDKAEGGDGKVEPEKTLAFPGTDSMEVSTSSSLTPAMSISASASTSQASICSSQGISQTVSDLSVDPLPAGLELPIPPGLLEPHAVSSQESLDISLCSTGSLGSLGSLGEPLDNAETASVSDMGSMYTVTSLDNQPLAARPIKGFAVVEIRSRAKIEKIRASLFNNNDLIGLSSLDGEDELMEMSTEEILTVSVVNQSLFDTQGSPGLEDYFNDKSIKGEKLVPGAREVLTEIFKSCAHSEQTLSLTPAKPIRVSDIYLSKEQINSQTPGNLLHLFFTNVRPPKKVLEDQLTQILRKYGVPKPKFDKSKYSKAGKEQHPVKVVSTKRPITKPPAKDKAVLNSVSRTALSEKKPTVKPKSPEKSKPDEKDPEKSPTKKQEVPEEKYLTLEGFHKFVIDRARQDIRSVWRAILSCGYDLHFERCACIDVRHAQKASRKWTLEMDVALVQYINQLCRHLAITPARLHPHEVYLDPADAADPRVACLLMIGLPVLPVSQASQPPGRDLSLTAPAPSDVPIESLRLRFALLQSLNTTLETFFLPLVELRQTPMYTHSIAALLKEAKGLIFYDTKVTVMNRVLNATVQRTADHAAPEITLDPLEIVGGEIRASENSYFCQAARQLASVPSSQLCVKLASGGDPTYAFNIRFTGEEVHGTTANLPRVPALAHPTHRETGTLQSQVTSQGHAASWGSRVQAPGLPGVSSQDAPASP

SEQ ID NO: 25688 - protein, 1003 aa, Homo sapiens
MATPGPRDIPLLPGSPRRLSPQAGSRGGQGPKHGQQCLKMPGPRAPGLQGGSNRDPGQPCGGESTRSSSVINNYLDANEPVSLEARLSRMHFHDSQRKVDYVLAYHYRKRGVHLAQGFPGHSLAIVSNGETGKEPHAGGPGDIELGPLDALEEERKEQREEFEHNLMEAGLELEKDLENKSQGSIFVRIHAPWQVLAREAEFLKIKVPTKKEMYEIKAGGSIAKKFSAALQKLSSHLQPRVPEHSNNKMKNLSYPFSREKMYLYNIQEKDTFFDNATRSRIVHEILKRTACSRANNTMGINSLIANNIYEAAYPLHDGEYDSPEDDMNDRKLLYQEWARYGVFYKFQPIDLIRKYFGEKIGLYFAWLGLYTSFLIPSSVIGVIVFLYGCATIEEDIPSREMCDQQNAFTMCPLCDKSCDYWNLSSACGTAQASHLFDNPATVFFSIFMALWATMFLENWKRLQMRLGYFWDLTGIEEEEERAQEHSRPEYETKVREKMLKESNQSAVQKLETNTTECGDEDDEDKLTWKDRFPGYLMNFASILFMIALTFSIVFGVIVYRITTAAALSLNKATRSNVRVTVTATAVIINLVVILILDEIYGAVAKWLTKIEVPKTEQTFEERLILKAFLLKFVNAYSPIFYVAFFKGRFVGRPGSYVYVFDGYRMEECAPGGCLMELCIQLSIIMLGKQLIQNNIFEIGVPKLKKLFRKLKDETEAGETDSAHSKHPEQWDLDYSLEPYTGLTPEYMEMIIQFGFVTLFVASFPLAPVFALLNNVIEVRLDAKKFVTELRRPDAVRTKDIGIWFDILSGIGKFSVISNAFVIAITSDFIPRLVYQYSYSHNGTLHGFVNHTLSFFNVSQLKEGTQPENSQFDQEVQFCRFKDYREPPWAPNPYEFSKQYWFILSARLAFVIIFQNLVMFLSVLVDWMIPDIPTDISDQIKKEKSLLVDFFLKEEHEKLKLMDEPALRSPGGGDRSRSRAASSAPSGQSQLGSMMSSGSQHTNV

SEQ ID NO: 25689 - protein, 601 aa, Homo sapiens
MLKLLNQKKGPSQCPLCKNDITKRSLQESTRFSQLVEELLKIICAFQLDTGLEYANSYNFAKKENNSPEHLKDEVSIIQSMGYRNRAKRLLQSEPENPSLQETSLSVQLSNLGTVRTLRTKQRIQPQKTSVYIELGSDSSEDTVNKATYCSVGDQELLQITPQGTRDEISLDSAKKAACEFSETDVTNTEHHQPSNNDLNTTEKRAAERHPEKYQGSSVSNLHVEPCGTNTHASSLQHENSSLLLTKDRMNVEKAEFCNKSKQPGLARSQHNRWAGSKETCNDRRTPSTEKKVDLNADPLCERKEWNKQKLPCSENPRDTEDVPWITLNSSIQKVNEWFSRSDELLGSDDSHDGESESNAKVADVLDVLNEVDEYSGSSEKIDLLASDPHEALICKSERVHSKSVESNIEDKIFGKTYRKKASLPNLSHVTENLIIGAFVTEPQIIQERPLTNKLKRKRRPTSGLHPEDFIKKADLAVQKTPEMINQGTNQTEQNGQVMNITNSGHENKTKGDSIQNEKNPNPIESLEKESAFKTKAEPISSSISNMELELNIHNSKAPKKNRLRRKSSTRHIHALELVVSRNLSPPNCTELQIDSCSSSE

SEQ ID NO: 25690 - protein, 505 aa, Homo sapiens
MKLSPQPSCVNLGMMWTWALWMLPSLCKFSLAALPAKPENISCVYYYRKNLTCTWSPGKETSYTQYTVKRTYAFGEKHDNCTTNSSTSENRASCSFFLPRITIPDNYTIEVEAENGDGVIKSHMTYWRLENIAKTEPPKIFRVKPVLGIKRMIQIEWIKPELAPVSSDLKYTLRFRTVNSTSWMEVNFAKNRKDKNQTYNLTGLQPFTEYVIALRCAVKESKFWSDWSQEKMGMTEEEAPCGLELWRVLKPAEADGRRPVRLLWKKARGAPVLEKTLGYNIWYYPESNTNLTETMNTTNQQLELHLGGESFWVSMISYNSLGKSPVATLRIPAIQEKSFQCIEVMQACVAEDQLVVKWQSSALDVNTWMIEWFPDVDSEPTTLSWESVSQATNWTIQQDKLKPFWCYNISVYPMLHDKVGEPYSIQAYAKEGVPSEGPETKVENIGVKTVTITWKEIPKSERKGIICNYTIFYQAEAKTVNSSILQYGLESLKRKTSYIVQVMAS

SEQ ID NO: 25691 - protein, 683 aa, Homo sapiens
MDKYDVIKAIGQGAFGKAYLAKGKSDSKHCVIKEINFEKMPIQEKEASKKEVILLEKMKHPNIVAFFNSFQENGRLFIVMEYCDGGDLMKRINRQRGVLFSEDQILGWFVQISLGLKHIHDRKILHRDIKAQNIFLSKNGMVAKLGDFGIARVLNNSMELARTCIGTPYYLSPEICQNKPYNNKTDIWSLGCVLYELCTLKHPFEGNNLQQLVLKICQAHFAPISPGFSRELHSLISQLFQVSPRDRPSINSILKRPFLENLIPKYLTPEVIQEEFSHMLICRAGAPASRHAGKVVQKCKIQKVRFQGKCPPRSRISVPIKRNAILHRNEWRPPAGAQKARSIKMIERPKIAAVCGHYDYYYAQLDMLRRRAHKPSYHPIPQENTGVEDYGQETRHGPSPSQWPAEYLQRKFEAQQYKLKVEKQLGLRPSSAEPNYNQRQELRSNGEEPRFQELPFRKNEMKEQEYWKQLEEIRQQYHNDMKEIRKKMGREPEENSKISHKTYLVKKSNLPVHQDASEGEAPVQDIEKDLKQMRLQNTKESKNPEQKYKAKKGVKFEINLDKCISDENILQEEEAMDIPNETLTFEDGMKFKEYECVKEHGDYTDKAFEKLHCPEAGFSTQTVAAVGNRRQWDGGAPQTLLQMMAVADITSTCPTGPDSESVLSVSRQEGKTKDPYSPVLILM

SEQ ID NO: 25692 - protein, 521 aa, Homo sapiens
AATGPSFWLGNETLKVPLALFALNRQRLCERLRKNPAVQAGSIVVLQGGEETQRYCTDTGVLFRQESFFHWAFGVTEPGCYGVIDVDTGKSTLFVPRLPASHATWMGKIHSKEHFKEKYAVDDVQYVDEIASVLTSQKPSVLLTLRGVNTDSGSVCREASFDGISKFEVNNTILHPEIVECRVFKTDMELEVLRYTNKISSEAHREVMKAVKVGMKEYELESLFEHYCYSRGGMRHSSYTCICGSGENSAVLHYGHAGAPNDRTIQNGDMCLFDMGGEYYCFASDITCSFPANGKFTADQKAVYEAVLRSSRAVMGAMKPGVWWPDMHRLADRIHLEELAHMGILSGSVDAMVQAHLGAVFMPHGLGHFLGIDVHDVGGYPEGVERIDEPGLRSLRTARHLQPGMVLTVEPGIYFIDHLLDEALADPARASFLNREVLQRFRGFGGDGASPLSRNRQRSCKTPARSRGSHPPGKDRVRIEEDVVVTDSGIELLTCVPRTVEEIEACMAGCDKAFTPFSGPK

SEQ ID NO: 25693 - protein, 858 aa, Homo sapiens
PGVQYNYVYDEDEYMIQEEEWDRDLLLDPAWEKQQRKTFTAWCNSHLRKAGTQIENIEEDFRNGLKLMLLLEVISGERLPKPDRGKMRFHKIANVNKALDYIASKGVKLVSIGAEEIVDGNVKMTLGMIWTIILRFAIQDISVEETSAKEGLLLWCQRKTAPYRNVNIQNFHTSWKDGLGLCALIHRHRPDLIDYSKLNKDDPIGNINLAMEIAEKHLDIPKMLDAEDLVYTARPDERAIMTYVSCYYHAFAGAQKLLEWIRRTIPWLENRTPEKTMQAMQKKLEDFRDYRRKHKPPKVQEKCQLEINFNTLQTKLRISNRPAFMPSEGKMVSDIAGAWQRLEQAEKGYEEWLLNEIRRLERLEHLAEKFRQKASTHETWAYGKEQILLQKDYESASLTEVRALLRKHEAFESDLAAHQDRVEQIAAIAQELNELDYHDAVNVNDRCQKICDQWDRLGTLTQKRREALERMEKLLETIDQLHLEFAKRAAPFNNWMEGAMEDLQDMFIVHSIEEIQSLITAHEQFKATLPEADGERQSIMAIQNEVEKVIQSYNIRISSSNPYSTVTMDELRTKWDKVKQLVPIRDQSLQEELARQHANERLRRQFAAQANAIGPWIQNKMEEIARSSIQITGALEDQMNQLKQYEHNIINYKNNIDKLEGDHQLIQEALVFDNKHTNYTMEHIRVGWELLLTTIARTINEVETQILTRDAKGITQEQMNEFRASFNHFDRRKNGLMDHEDFRACLISMGYDLGEAEFARIMTLVDPNGQGTVTFQSFIDFMTRETADTDTAEQVIASFRILASDKPYILAEELRRELPPDQAQYCIKRMPAYSGPGSVPGALDYAAFSSALYGESDL

SEQ ID NO: 25694 - protein, 1548 aa, Homo sapiens
MKGSEVSLEKKKKIKMPVKRLREVVSQNHGDHLVLLKDELPCVPPALSANKRLPVGTGTSLNGTSRGSSDLTSARNCYQPLLENPMVSESDFSKDVAVQVLPLDKIEENNKQKANDIFISQYTMGQKDALRTVLKQKAQSMPVFKEVKVHLLEDAGIEKDAVTQETRISPSGIDSATTVAAATAAAIATAAPLIKVQSDLEAKVNSVTELLSKLQETDKHLQRVTEQQTSIQRKQEKLHCHDHEKQMNVFMEQHIRHLEKLQQQQIDIQTHFISAALKTSSFQPVSMPSSRAVEKYSVKPEHPNLGSCNPSLYNTFASKQAPLKEVEDTSFDKQKSPLETPAPRRFAPVPVSRDDELSKRENLLEEKENMEVSCHRGNVRLLEQILNNNDSLTRKSESSNTTSLTRSKIGWTPEKTNRFPSCEELETTKVTMQKSDDVLHDLGQKEKETNSMVQPKESLSMLKLPDLPQNSVKLQTTNTTRSVLKDAEKILRGVQNNKKVLEENLEAIIRAKDGAAMYSLINALSTNREMSEKIRIRKTVDEWIKTISAEIQDELSRTDYEQKRFDQKNQRTKKGQNMTKDIRTNTQDKTVNKSVIPRKHSQKQIEEHFRNLPMRGMPASSLQKERKEGLLKATTVIQDEDYMLQVYGKPVYQGHRSTLKKGPYLRFNSPSPKSRPQRPKVIERVKGTKVKSIRTQTDFYATKPKKMDSKMKHSVPVLPHGDQQYLFSPSREMPTFSGTLEGHLIPMAILLGQTQSNSDTMPPAGVIVSKPHPVTVTTSIPPSSRKVETGVKKPNIAIVEMKSEKKDPPQLTVQVLPSVDIDSISNSSADVLSPLSSPKEASLPPVQTWIKTPEIMKVDEEEVKFPGTNFDEIIDVIQEEEKCDEIPDSEPILEFNRSVKADSTKYNGPPFPPVASTFQPTADILDKVIERKETLENSLIQWVEQEIMSRIISGLFPVQQQIAPSISVSVSETSEPLTSDIVEGTSSGALQLFVDAGVPVNSNVIKHFVNEALAETIAVMLGDREAKKQGPVATGVSGDASTNETYLPARVCTPLPTPQPTPPCSPSSPAKECVLVKTPDSSPCDSDHDMAFPVKEICAEKGDDMPAIMLVNTPTVTPTTTPPPAAAVFTPTLSDISIDKLKVSSPELPKPWGDGDLPLEEENPNSPQEELHPRAIVMSVAKDEEPESMDFPAQPPPPEPVPFMPFPAGTKAPSPSQMPGSDSSTLESTLSVTVTETETLDKPISEGEILFSCGQKLAPKILEDIGLYLTNLNDSLSSTLHDAVEMEDDPPSEGQVIRMSHKKFHADAILSFAKQNQESAVSQQAVYHSEDLENSVGELSEGQRPQLTAAAENILMGHSLYMQPPVTNTQSLDQQCDPKPLSRQFDTVSGSIYEDSCASHGPMSLGELELEPNSKLVLPTTLLTAQENDVNLPVAAEDFSQYQLKQNQDVKQVEHKPSQSYLRVRNKSDIAPSQQQVSPGDMDRTQIELNPYLTCVFSGGKAVPLSASQMPPAKMSVMLPSVNLEDCSQSLSLSTMQEDMESSGADTF

SEQ ID NO: 25695 - protein, 684 aa, Homo sapiens
VPTFSLPPAPGRLERLGRVMVELEALLPPPGAVPGGAGVWVPGGRPPVLRGLVRVLNRSFEKAVHVRASHDGWASFCDHPARYVPRSPPWAGAGGTGAGDPILDPGLGLGPGQASASSPDDGGRTDRFAFQLPFAEGAGDGARLDFVVRYETPEGTFWANNHGRNYTVLLRIAPAPTPTDAEGLPQQQQLPQLEPQPECQGPVEAEARQLKSCMKPVRRRPAEEELKTKNMDDNTFAMAEHPDVQESVGPLVAPTPLRPWPQMTLQVSDVPMTGNPAEEGDVPRSSPPVAFTEVLQAPAIRIPPSSPLCGLGGSPRDQASGPDASEGATGPFLEPSQQQAEATWGVSSENGGGLEAVSGSEELLGEDTIDQELEQLYLSHLSRLRAAVAAGGAGGGGEGSTDGGMSPSHPLGILTDRDLILKWPGPERALNSALAEEITLHYARLGRGVELIKDTEDPDDEGEGEEGLSVTPSSPEGDSPKESPPEILSGARSVVATMGDVWLPWAEGSGCDGPVVLGTEGQFIGDPEKGMGKDTSSLHMNRVIAGVTESLGEAGTEAQIEVTSEWAGSLDPISGKEPASPVLLQGQNPTLLSPLGAEVCLSSVARPHVSSQDEKDAGPSLEPPKKSPTLAVPAECVCALPPQLRGPLTQTLGVLAGLVVVPVALNSGVSLLVLALCLSLAWFS

SEQ ID NO: 25696 - protein, 1375 aa, Homo sapiens
MADVTARSLQYEYKANSNLVLQADRSLIDRTRRDEPTGEVLSLVGKLEGTRMGDKAQRTKPQMQEERRAKRRKRDEDRHDINKMKGYTLLSEGIDEMVGIIYKPKTKETRETYEVLLSFIQAALGDQPRDILCGAADEVLAVLKNEKLRDKERRKEIDLLLGQTDDTRYHVLVNLGKKITDYGGDKEIQNMDDNIDETYGVNVQFESDEEEGDEDVYGEVREEASDDDMEGDEAVVRCTLSANLVASGELMSSKKKDLHPRDIDAFWLQRQLSRFYDDAIVSQKKADEVLEILKTASDDRECENQLVLLLGFNTFDFIKVLRQHRMMILYCTLLASAQSEAEKERIMGKMEADPELSKFLYQLHETEKEDLIREERSRRERVRQSRMDTDLETMDLDQGGEALAPRQVLDLEDLVFTQGSHFMANKRCQLPDGSFRRQRKGYEEVHVPALKPKPFGSEEQLLPVEKLPKYAQAGFEGFKTLNRIQSKLYRAALETDENLLLCAPTGAGKTNVALMCMLREIGKHINMDGTINVDDFKIIYIAPMRSLVQEMVGSFGKRLATYGITVAELTGDHQLCKEEISATQIIVCTPEKWDIITRKGGERTYTQLVRLIILDEIHLLHDDRGPVLEALVARAIRNIEMTQEDVRLIGLSATLPNYEDVATFLRVDPAKGLFYFDNSFRPVPLEQTYVGITEKKAIKRFQIMNEIVYEKIMEHAGKNQVLVFVHSRKETGKTARAIRDMCLEKDTLGLFLREGSASTEVLRTEAEQCKNLELKDLLPYGFAIHHAGMTRVDRTLVEDLFADKHIQVLVSTATLAWGVNLPAHTVIIKGTQVYSPEKGRWTELGALDILQMLGRAGRPQYDTKGEGILITSHGELQYYLSLLNQQLPIESQMVSKLPDMLNAEIVLGNVQNAKDAVNWLGYAYLYIRMLRSPTLYGISHDDLKGDPLLDQRRLDLVHTAALMLDKNNLVKYDKKTGNFQVTELGRIASHYYITNDTVQTYNQLLKPTLSEIELFRVFSLSSEFKNITVREEEKLELQKLLERVPIPVKESIEEPSAKINVLLQAFISQLKLEGFALMADMVYVTQSAGRLMRAIFEIVLNRGWAQLTDKTLNLCKMIDKRMWQSMCPLRQFRKLPEEVVKKIEKKNFPFERLYDLNHNEIGELIRMPKMGKTIHKYVHLFPKLELSVHLQPITRSTLKVELTITPDFQWDEKVHGSSEAFWILVEDVDSEVILHHEYFLLKAKYAQDEHLITFFVPVFEPLPPQYFIRVVSDRWLSCETQLPVSFRHLILPEKYPPPTELLDLQPLPVSALRNSAFESLYQDKFPFFNPIQTQVFNTVYNSDDNVFVGAPTGSGKTICAEFAILRMLLQSSEGR

SEQ ID NO: 25697 - protein, 1575 aa, Homo sapiens
MMENLIRGRNPPQYQRSPCKEVRAALRKRPEEELQCLEMTTKRKIIGRLVPCRCFRGEEEIISVLDYSHCSLQQVPKEVFNFERTLEELYLDANQIEELPKQLFNCQALRKLSIPDNDLSNLPTTIASLVNLKELDISKNGVQEFPENIKCCKCLTIIEASVNPISKLPDGFTQLLNLTQLYLNDAFLEFLPANFGRLVKLRILELRENHLKTLPKSMHKLAQLERLDLGNNEFGELPEVLDQIQNLRELWMDNNALQVLPGSIGKLKMLVYLDMSKNRIETVDMDISGCEALEDLLLSSNMLQQLPDSIGLLKKLTTLKVDDNQLTMLPNTIGNLSLLEEFDCSCNELESLPSTIGYLHSLRTLAVDENFLPELPREIGSCKNVTVMSLRSNKLEFLPEEIGQMQKLRVLNLSDNRLKNLPFSFTKLKELAALWLSDNQSKALIPLQTEAHPETKQRVLTNYMFPQQPRGDEDFQSDSDSFNPTLWEEQRQQRMTVAFEFEDKKEDDENAGKVKDLSCQAPWERGQRGITLQPARLSGDCCTPWARCDQQIQDMPVPQNDPQLAWGCISGLQQERSMCTPLPVAAQSTTLPSLSGRQVEINLKRYPTPYPEDLKNMVKSVQNLVGKPSHGVRVENSNPTANTEQTVKEKYEHKWPVAPKEITVEDSFVHPANEMRIGELHPSLAETPLYPPKLVLLGKDKKESTDESEVDKTHCLNNSVSSGTYSDYSPSQASSGSSNTRVKVGSLQTTAKDAVHNSLWGNRIAPSFPQPLDSKPLLSQREAVPPGNIPQRPDRLPMSDTFTDNWTDGSHYDNTGFVAEETTAENANSNPLLSSKSRSTSSHGRRPLIRQDRIVGVPLELEQSTHRHTPETEVPPSNPWQNWTRTPSPFEDRTAFPSKLETTPTTSPLPERKEHIKESTEIPSPFSPGVPWEYHDSNPNRSLSNVFSQIHCRPESSKGVISISKSTERLSPLMKDIKSNKFKKSQSIDEIDIGTYKVYNIPLENYASGSDHLGSHERPDKMLGPEHGMSSMSRSQSVPMLDDEMLTYGSSKGPQQQKASMTKKVYQFDQSFNPQGSVEVKAEKRIPPPFQHNPEYVQQASKNIAKDLISPRAYRGYPPMEQMFSFSQPSVNEDAVVNAQFASQGARAGFLRRADSLVSATEMAMFRRVNEPHELPPTDRYGRPPYRGGLDRQSSVTVTESQFLKRNGRYEDEHPSYQEVKAQAGSFPVKNLTQRRPLSARSYSTESYGASQTRPVSARPTMAALLEKIPSDYNLGNYGDKPSDNSDLKTRPTPVKGEESCGKMPADWRQQLLRHIEARRLDRNAAYKHNTVNLGMLPYGGISAMHAGRSMTLNLQTKSKFDHQELPLQKTPSQQSNILDNGQEDVSPSGQWNPYPLGRRDVPPDTITKKAGSHIQTLMGSQSLQHRSREQQPYEGNINKVTIQQFQSPLPIQIPSSQATRGPQPGRCLIQTKGQRSMDGYPEQFCVRIEKNPGLGFSISGGISGQGNPFKPSDKGIFVTRVQPDGPASNLLQPGDKILQANGHSFVHMEHEKAVLLLKSFQNTVDLVIQRELTV

SEQ ID NO: 25698 - protein, 600 aa, Homo sapiens
MYYDDDEPSEVGSADSYTSRPSDSDVSLEEDREAVRREAERQAQAQLEKAKTKPVAFAVRTNVSYSAAHEDDVPVPGMAISFEAKDFLHVKEKFNNDWWIGRLVKEGCEIGFIPSPVKLENMRLQHEQRAKQGKFYSSKSGGNSSSSLGDIVPSSRKSTPPSSAIDIDATGLDAEENDIPANHRSPKPSANSVTSPHSKEKRMPFFKKTEHTPPYDVVPSMRPVVLVGPSLKGYEVTDMMQKALFDFLKHRFEGRISITRVTADISLAKRSVLNNPSKHAIIERSNTRSSLAEVQSEIERIFELARTLQLVVLDADTINHPAQLSKTSLAPIIVYVKISSPKVLQRLIKSRGKSQAKHLNVQMVAADKLAQCPPELFDVILDENQLEDACEHLADYLEAYWKATHPPSSSLPNPLLSRTLATSSLPLSPTLASNSQGSQGDQRTDRSAPIRSASQAEEEPSVEPVKKSQHRSSSSAPHHNHRSGTSRGLSRQETFDSETQESRDSAYVEPKEDYSHDHVDHYASHRDHNHRDETHGSSDHRHRESRHRSRDVDREQDHNECNKQRSRHKSKDRYCEKDGEVISKKRNEAGEWNRDVYIRQ

SEQ ID NO: 25699 - protein, 503 aa, Homo sapiens
MALIPDLAMETWLLLAVSLVLLYLYGTHSHGLFKKLGIPGPTPLPFLGNILSYHKGFCMFDMECHKKYGKVWGFYDGQQPVLAITDPDMIKTVLVKECYSVFTNRRPFGPVGFMKSAISIAEDEEWKRLRSLLSPTFTSGKLKEMVPIIAQYGDVLVRNLRREAETGKPVTLKDVFGAYSMDVITSTSFGVNIDSLNNPQDPFVENTKKLLRFDFLDPFFLSITVFPFLIPILEVLNICVFPREVTNFLRKSVKRMKESRLEDTQKHRVDFLQLMIDSQNSKETESHKALSDLELVAQSIIFIFAGYETTSSVLSFIMYELATHPDVQQKLQEEIDAVLPNKAPPTYDTVLQMEYLDMVVNETLRLFPIAMRLERVCKKDVEINGMFIPKGVVVMIPSYALHRDPKYWTEPEKFLPERFSKKNKDNIDPYIYTPFGSGPRNCIGMRFALMNMKLALIRVLQNFSFKPCKETQIPLKLSLGGLLQPEKPVVLKVESRDGTVSGA

SEQ ID NO: 25700 - protein, 483 aa, Homo sapiens
MEIYSPDMSEVAAERSSSPSTQLSADPSLDGLPAAEDMPEPQTEDGRTPGLVGLAVPCCACLEAERLRGCLNSEKICIVPILACLVSLCLCIAGLKWVFVDKIFEYDSPTHLDPGGLGQDPIISLDATAASAVWVSSEAYTSPVSRAQSESEVQVTVQGDKAVVSFEPSAAPTPKNRIFAFSFLPSTAPSFPSPTRNPEVRTPKSATQPQTTETNLQTAPKLSTSTSTTGTSHLVKCAEKEKTFCVNGGECFMVKDLSNPSRYLCKCPNEFTGDRCQNYVMASFYKHLGIEFMEAEELYQKRVLTITGICIALLVVGIMCVVAYCKTKKQRKKLHDRLRQSLRSERNNMMNIANGPHHPNPPPENVQLVNQYVSKNVISSEHIVEREAETSFSTSHYTSTAHHSTTVTQTPSHSWSNGHTESILSESHSVIVMSSVENSRHSSPTGGPRGRLNGTGGPRECNSFLRHARETPDSYRDSPHSER

SEQ ID NO: 25701 - protein, 1173 aa, Homo sapiens
MATAATEEPFPFHGLLPKKETGAASFLCRYPEYDGRGVLIAVLDTGVDPGAPGMQVTTDGKPKIVDIIDTTGSGDVNTATEVEPKDGEIVGLSGRVLKIPASWTNPSGKYHIGIKNGYDFYPKALKERIQKERKEKIWDPVHRVALAEACRKQEEFDVANNGSSQANKLIKEELQSQVELLNSFEKKYSDPGPVYDCLVWHDGEVWRACIDSNEDGDLSKSTVLRNYKEAQEYGSFGTAEMLNYSVNIYDDGNLLSIVTSGGAHGTHVASIAAGHFPEEPERNGVAPGAQILSIKIGDTRLSTMETGTGLIRAMIEVINHKCDLVNYSYGEATHWPNSGADGALGVSISAPGGAIASVPNWTLRGTQLMNGTSMSSPNACGGIALILSGLKANNIDYTVHSVRRALENTAVKADNIEVFAQGHGIIQVDKAYDYLVQNTSFANKLGFTVTVGNNRGIYLRDPVQVAAPSDHGVGIEPVFPENTENSEKISLQLHLALTSNSSWVQCPSHLELMNQCRHINIRVDPRGLREGLHYTEVCGYDIASPNAGPLFRVPITAVIAAKVNESSHYDLAFTDVHFKPGQIRRHFIEVPEGATWAEVTVCSCSSEVSAKFVLHAVQLVKQRAYRSHEFYKFCSLPEKGTLTEAFPVLGGKAIEFCIARWWASLSDVNIDYTISFHGIVCTAPQLNIHASEGINRFDVQSSLKYEDLAPCITLKNWVQTLRPVSAKTKPLGSRDVLPNNRQLYEMVLTYNFHQPKSGEVTPSCPLLCELLYESEFDSQLWIIFDQNKRQMGSGDAYPHQYSLKLEKGDYTIRLQIRHEQISDLERLKDLPFIVSHRLSNTLSLDIHENHSFALLGKKKSSNLTLPPKYNQPFFVTSLPDDKIPKGAGPGCYLAGSLTLSKTELGKKADVIPVHYYLIPPPTKTKNGSKDKEKDSEKEKDLKEEFTEALRDLKIQWMTKLDSSDIYNELKETYPNYLPLYVARLHQLDAEKERMKRLNEIVDAANAVISHIDQTALAVYIAMKTDPRPDAATIKNDMDKQKSTLVDALCRKGCALADHLLHTQAQDGAISTDAEGKEEEGESPLDSLAETFWETTKWTDLFDNKVLTFAYKHALVNKMYGRGLKFATKLVEEKPTKENWKNCIQLMKLLGWTHCASFTENWLPIMYPPDYCVF

SEQ ID NO: 25702 - protein, 636 aa, Homo sapiens
MGELCRRDSALTALDEETLWEMMESHRHRIVRCICPSRLTPYLRQAKVLCQLDEEEVLHSPRLTNSAMRAGHLLDLLKTRGKNGAIAFLESLKFHNPDVYTLVTGLQPDVDFSNFSGLMETSKLTECLAGAIGSLQEELNQEKGQKEVLLRRCQQLQEHLGLAETRAEGLHQLEADHSRMKREVSAHFHEVLRLKDEMLSLSLHYSNALQEKELAASRCRSLQEELYLLKQELQRANMVSSCELELQEQSLRTASDQESGDEELNRLKEENEKLRSLTFSLAEKDILEQSLDEARGSRQELVERIHSLRERAVAAERQREQYWEEKEQTLLQFQKSKMACQLYREKVNALQAQVCELQKERDQAYSARDSAQREISQSLVEKDSLRRQVFELTDQVCELRTQLRQLQAEPPGVLKQEARTREPCPREKQRLVRMHAICPRDDSDCSLVSSTESQLLSDLSATSSRELVDSFRSSSPAPPSQQSLYKRVAEDFGEEPWSFSSCLEIPEGDPGALPGAKAGDPHLDYELLDTADLPQLESSLQPVSPGRLDVSESGVLMRRRPARRILSQVTMLAFQGDALLEQISVIGGNLTGIFIHRVTPGSAADQMALRPGTQIVMTGKCLSQRTPDLDWGRVGS

SEQ ID NO: 25703 - protein, 1908 aa, Homo sapiens
MRILKRFLACIQLLCVCRLDWANGYYRQQRKLVEEIGWSYTGALNQKNWGKKYPTCNSPKQSPINIDEDLTQVNVNLKKLKFQGWDKTSLENTFIHNTGKTVEINLTNDYRVSGGVSEMVFKASKITFHWGKCNMSSDGSEHSLEGQKFPLEMQIYCFDADRFSSFEEAVKGKGKLRALSILFEVGTEENLDFKAIIDGVESVSRFGKQAALDPFILLNLLPNSTDKYYIYNGSLTSPPCTDTVDWIVFKDTVSISESQLAVFCEVLTMQQSGYVMLMDYLQNNFREQQYKFSRQVFSSYTGKEEIHEAVCSSEPENVQADPENYTSLLVTWERPRVVYDTMIEKFAVLYQQLDGEDQTKHEFLTDGYQDLGAILNNLLPNMSYVLQIVAICTNGLYGKYSDQLIVDMPTDNPELDLFPELIGTEEIIKEEEEGKDIEEGAIVNPGRDSATNQIRKKEPQISTTTHYNRIGTKYNEAKTNRSPTRGSEFSGKGDVPNTSLNSTSQPVTKLATEKDISLTSQTVTELPPHTVEGTSASLNDGSKTVLRSPHMNLSGTAESLNTVSITEYEEESLLTSFKLDTGAEDSSGSSPATSAIPFISENISQGYIFSSENPETITYDVLIPESARNASEDSTSSGSEESLKDPSMEGNVWFPSSTDITAQPDVGSGRESFLQTNYTEIRVDESEKTTKSFSAGPVMSQGPSVTDLEMPHYSTFAYFPTEVTPHAFTPSSRQQDLVSTVNVVYSQTTQPVYNAVPSDPILVETPKVDKISSTMLHLIVSNSASSENMLHSTSVPVFDVSPTSHMHSASLQGLTISYASEKYEPVLLKSESSHQVVPSLYSNDELFQTANLEINQAHPPKGRHVFATPVLSIDEPLNTLINKLIHSDEILTSTKSSVTGKVFAGIPTVASDTFVSTDHSVPIGNGHVAITAVSPHRDGSVTSTKLLFPSKATSELSHSAKSDAGLVGGGEDGDTDDDGDDDDDDRGSDGLSIHKCMSCSSYRESQEKVMNDSDTHENSLMDQNNPISYSLSENSEEDNRVTSVSSDSQTGMDRSPGKSPSANGLSQKHNDGKEENDIQTGSALLPLSPESKAWAVLTSDEESGSGQGTSDSLNENETSTDFSFADTNEKDADGILAAGDSEITPGFPQSPTSSVTSENSEVFHVSEAEASNSSHESRIGLAEGLESEKKAVIPLVIVSALTFICLVVLVGILIYWRKCFQTAHFYLEDSTSPRVISTPPTPIFPISDDVGAIPIKHFPKHVADLHASSGFTEEFETLKEFYQEVQSCTVDLGITADSSNHPDNKHKNRYINIVAYDHSRVKLAQLAEKDGKLTDYINANYVDGYNRPKAYIAAQGPLKSTAEDFWRMIWEHNVEVIVMITNLVEKGRRKCDQYWPADGSEEYGNFLVTQKSVQVLAYYTVRNFTLRNTKIKKGSQKGRPSGRVVTQYHYTQWPDMGVPEYSLPVLTFVRKAAYAKRHAVGPVVVHCSAGVGRTGTYIVLDSMLQQIQHEGTVNIFGFLKHIRSQRNYLVQTEEQYVFIHDTLVEAILSKETEVLDSHIHAYVNALLIPGPAGKTKLEKQFQGLTLSPRLECRGTISAHCNLPLPGLTDPPTSASRVARTILLSQSNIQQSDYSAALKQCNREKNRTSSIIPVERSRVGISSLSGEGTDYINASYIMGYYQSNEFIITQHPLLHTIKDFWRMIWDHNAQLVVMIPDGQNMAEDEFVYWPNKDEPINCESFKVTLMAEEHKCLSNEEKLIIQDFILEATQDDYVLEVRHFQCPKWPNPDSPISKTFELISVIKEEAANRDGPMIVHDEHGGVTAGTFCALTTLMHQLEKENSVDVYQVAKMINLMRPGVFADIEQYQFLYKVILSLVSTRQEENPSTSLDSNGAALPDGNIAESLESLV

SEQ ID NO: 25704 - protein, 894 aa, Homo sapiens
MSRIEKMSILGVRSFGIEDKDKQIITFFSPLTILVGPNGAGKTTIIECLKYICTGDFPPGTKGNTFVHDPKVAQETDVRAQIRLQFRDVNGELIAVQRSMVCTQKSKKTEFKTLEGVITRTKHGEKVSLSSKCAEIDREMISSLGVSKAVLNNVIFCHQEDSNWPLSEGKALKQKFDEIFSATRYIKALETLRQVRQTQGQKVKEYQMELKYLKQYKEKACEIRDQITSKEAQLTSSKEIVKSYENELDPLKNRLKEIEHNLSKIMKLDNEIKALDSRKKQMEKDNSELEEKMEKVFQGTDEQLNDLYHNHQRTVREKERKLVDCHRELEKLNKESRLLNQEKSELLVEQGRLQLQADRHQEHIRARDSLIQSLATQLELDGFERGPFSERQIKNFHKLVRERQEGEAKTANQLMNDFAEKETLKQKQIDEIRDKKTGLGRIIELKSEILSKKQNELKNVKYELQQLEGSSDRILELDQELIKASVLLLHISITKERELSKAEKNSNVETLKMEVISLQNEKADLDRTLRKLDQEMEQLNHHTTTRTQMEMLTKDKADKDEQIRKIKSRHSDELTSLLGYFPNKKQLEDWLHSKSKEINQTRDRLAKLNKELASSEQNKNHINNELKRKEEQLSSYEDKLFDVCGSQDFESDLDRLKEEIEKSSKQRAMLAGATAVYSQFITQLTDENQSCCPVCQRVFQTEAELQEVISDLQSKLRLAPDKLKSTESELKKKEKRRDEMLGLVPMRQSIIDLKEKEIPELRNKLQNVNRDIQRLKNDIEEQETLLGTIMPEEESAKVCLTDVTIMERFQMELKDVERKIAQQAAKLQGIDLDRTVQQVNQEKQEKQHKLDTVSSKIELNRKLIQDQQEQIQHLKSTTNELKSEKLQISTNLQR

SEQ ID NO: 25705 - protein, 353 aa, Homo sapiens
MVMIISTMEPQVSNGPTSNTSNGPSSNNRNCPSPMQTGATTDDSKTNLIVNYLPQNMTQEEFRSLFGSIGEIESCKLVRDKITGQSLGYGFVNYIDPKDAEKAINTLNGLRLQTKTIKVSYARPSSASIRDANLYVSGLPKTMTQKELEQLFSQYGRIITSRILVDQVTGVSRGVGFIRFDKRIEAEEAIKGLNGQKPSGATEPITVKFANNPSQKSSQALLSQLYQSPNRRYPGPLHHQAQRFRFSPITIDGMTSLVGMNIPGHTGTGWCIFVYNLSPDSDESVLWQLFGPFGAVNNVKVIRDFNTNKCKGFGFVTMTNYDEAAMAIASLNGYRLGDRVLQVSFKTNKAHKS

SEQ ID NO: 25706 - protein, 305 aa, Homo sapiens
MRAHAQRGRGCTRRSAAVLMARHGLPLLPLLSLLVGAWLKLGNGQATSMVQLQGGRFLMGTNSPDSRDGDGPVREATVKPFAIDIFPVTNKDFRDFVREKKYRTEAEMFGWSFVFEDFVSDELRNKATQPMKPAGPGSGIRERLEHPVLHVSWNDARAYCAWRGKRLPTEEEWEFAARGGLKGQVYPWGNWFQPNRTNLWQGKFPKGDKAEDGFHGVSPVNAFPAQNNYGLYDLLGNVWEWTASPYQAAEQDMRVLRGASWIDTADGSANHRARVTTRMGNTPDSASDNLGFRCAADAGRPPGEL

SEQ ID NO: 25707 - protein, 2383 aa, Homo sapiens
MGNVCGCVRAEKEEQYVDPAKTPLNPEKYSPGRKYFRRKPIKKTGGDKESVGANNENEGKKKSSSQPSKEQPAPLSRGLVQQESVTLNSALGDGIQQKKTEVVADSVKQKLLPSAVSSWSDCVNTSPAKDSETEVKVSELDERISEKDSTPYCAKRKKHLDDVNTSEITFQEKTDVFSFRKAASLSSIPSGIERSLEKSGFPEDPPKSYSSIQEKQNTERFCPHATQHFQFKKKRCHSLYTSMSSVSKDTDGNEISDIHVTGESEDMSAKERLLLWTQQATEGYAGIRCENFTTCWRDGKLFNAIIHKYRPDLIDMNTVAVQSNLANLEHAFYVAEKIGVIRLLDPEDVDVSSPDEKSVITYVSSLYDAFPKVPEGGEGIGANDVEVKWIEYQNMVNYLIQWIRHHVTTMSERTFPNNPVELKALYNQYLQFKETEIPPKETEKSKIKRLYKLLEIWIEFGRIKLLQGYHPNDIEKEWGKLIIAMLEREKALRPEVERLEMLQQIANRVQRDSVICEDKLILAGNALQSDSKRLESGVQFQNEAEIAGYILECENLLRQHVIDVQILIDGKYYQADQLVQRVAKLRDEIMALRNECSSVYSKGRILTTEQTKLMISGITQSLNSGFAQTLHPSLTSGLTQSLTPSLTSSSMTSGLSSGMTSRLTPSVTPAYTPGFPSGLVPNFSSGVEPNSLQTLKLMQIRKPLLKSSLLDQNLTEEEINMKFVQDLLNWVDEMQVQLDRTEWGSDLPSVESHLENHKNVHRAIEEFESSLKEAKISEIQMTAPLKLTYAEKLHRLESQYAKLLNTSRNQERHLDTLHNFVSRATNELIWLNEKEEEEVAYDWSERNTNIARKKDYHAELMRELDQKEENIKSVQEIAEQLLLENHPARLTIEAYRAAMQTQWSWILQLCQCVEQHIKENTAYFEFFNDAKEATDYLRNLKDAIQRKYSCDRSSSIHKLEDLVQESMEEKEELLQYKSTIANLMGKAKTIIQLKPRNSDCPLKTSIPIKAICDYRQIEITIYKDDECVLANNSHRAKWKVISPTGNEAMVPSVCFTVPPPNKEAVDLANRIEQQYQNVLTLWHESHINMKSVVSWHYLINEIDRIRASNVASIKTMLPGEHQQVLSNLQSRFEDFLEDSQESQVFSGSDITQLEKEVNVCKQYYQELLKSAEREEQEESVYNLYISEVRNIRLRLENCEDRLIRQIRTPLERDDLHESVFRITEQEKLKKELERLKDDLGTITNKCEEFFSQAAASSSVPTLRSELNVVLQNMNQVYSMSSTYIDKLKTVNLVLKNTQAAEALVKLYETKLCEEEAVIADKNNIENLISTLKQWRSEVDEKRQVFHALEDELQKAKAISDEMFKTYKERDLDFDWHKEKADQLVERWQNVHVQIDNRLRDLEGIGKSLKYYRDTYHPLDDWIQQVETTQRKIQENQPENSKTLATQLNQQKMLVSEIEMKQSKMDECQKYAEQYSATVKDYELQTMTYRAMVDSQQKSPVKRRRMQSSADLIIQEFMDLRTRYTALVTLMTQYIKFAGDSLKRLEEEEKSLEEEKKEHVEKAKELQKWVSNISKTLKDAEKAGKPPFSKQKISSEEISTKKEQLSEALQTIQLFLAKHGDKMTDEERNELEKQVKTLQESYNLLFSESLKQLQESQTSGDVKVEEKIVAERQQEYKEKLQGICDLLTQTENRLIGHQEAFMIGDGTVELKKYQSKQEELQKDMQGSAQALAEVVKNTENFLKENGEKLSQEDKALIEQKLNEAKIKCEQLNLKAEQSKKELDKVVTTAIKEETEKVAAVKQLEESKTKIENLLDWLSNVDKDSERAGTKHKQVIEQNGTHFQEGDGKSAIGEEDEVNGNLLETDVDGQVGTTQENLNQQYQKVKAQHEKIISQHQAVIIATQSAQVLLEKQGQYLSPEEKEKLQKNMKELKVHYETALAESEKKMKLTHSLQEELEKFDADYTEFEHWLQQSEQELENLEAGADDINGLMTKLKRQKSFSEDVISHKGDLRYITISGNRVLEAAKSCSKRDGGKVDTSATHREVQRKLDHATDRFRSLYSKCNVLGNNLKDLVDKYQHYEDASCGLLAGLQACEATASKHLSEPIAVDPKNLQRQLEETKALQGQISSQQVAVEKLKKTAEVLLDARGSLLPAKNDIQKTLDDIVGRYEDLSKSVNERNEKLQITLTRSLSVQDGLDEMLDWMGNVESSLKEQGQVPLNSTALQDIISKNIMLEQDIAGRQSSINAMNEKVKKFMETTDPSTASSLQAKMKDLSARFSEASHKHKETLAKMEELKTKVELFENLSEKLQTFLETKTQALTEVDVPGKDVTELSQYMQESTSEFLEHKKHLEVLHSLLKEISSHGLPSDKALVLEKTNNLSKKF

SEQ ID NO: 25708 - protein, 651 aa, Homo sapiens
MYGFVNHALELLVIRNYGPEVWEDIKREEVLVCRPGCSQIPELNGSSHLGFPKCWDNRKEAQLDEEGQFLVRIIYDDSKTYDLVAAASKVLNLNAGEILQMFGKMFFVFCQESGYDTILRVLGSNVREFLQNLDALHDHLATIYPGMRAPSFRCTDAEKGKGLILHYYSEREGLQDIVIGIIKTVAQQIHGTEIDMKVIQQRNEECDHTQFLIEEKESKEEDFYEDLDRFEENGTQESRISPYTFCKAFPFHIIFDRDLVVTQCGNAIYRVLPQLQPGNCSLLSVFSLVRPHIDISFHGILSHINTVFVLRSKEGLLDVEKLECEDELTGTEISCLRLKGQMIYLPEADSILFLCSPSVMNLDDLTRRGLYLSDIPLHDATRDLVLLGEQFREEYKLTQELEILTDRLQLTLRALEDEKKKTDTLLYSVLPPSVANELRHKRPVPAKRYDNVTILFSGIVGFNAFCSKHASGEGAMKIVNLLNDLYTRFDTLTDSRKNPFVYKVETVGDKYMTVSGLPEPCIHHARSICHLALDMMEIAGQVQVDGESVQITIGIHTGEVVTGVIGQRMPRYCLFGNTVNLTSRTETTGEKGKINVSEYTYRCLMSPENSDPQFHLEHRGPVSMKGKKEPMQVWFLSRKNTGTEETKQDDD

SEQ ID NO: 25709 - protein, 698 aa, Homo sapiens
MFKKRRRRARKYTLVSYGTGELEREADEEEEGDKEDTCEVAFLGASESEVDEELLSDVDDNTQVVNFDWDSGLVDIEKKLNRGDKMEMLPDTTGKGALMFAKRRERMDQITAQKEEDKVGGTPSREQDAAQTDGLRTTTSYQRKEEESVRTQSSVSKSYIEVSHGLGHVPQQNGFSGTSETANIQRMVPMNRTAKPFPGSVNQPATPFSPTRNMTSPIADFPAPPPYSAVTPPPDAFSRGVSSPIAGPAQPPPWPQPAPWSQPAFYDSSERIASRDERISVPAKRTGILQEAKRRSTTKPMFTFKEPKVSPNPELLSLLQNSEGKRGTGAGGDSGPEEDYLSLGAEACNFMQSSSAKQKTPPPVAPKPAVKSSSSQPVTPVSPVWSPGVAPTQPPAFPTSNPSKGTVVSSIKIAQPSYPPARPASTLNVAGPFKGPQAAVASQNYTPKPTVSTPTVNAVQPGAVGPSNELPGMSGRGAQLFAKRQSRMEKYVVDSDTVQAHAARAQSPTPSLPASWKYSSNVRAPPPVAYNPIHSPSYPLAALKSQPSAAQPSKMGKKKGKKPLNALDVMKHQPYQLNASLFTFQPPDAKDGLPQKSSVKVNSALAMKQALPPRPVNAASPTNVQASSVYSVPAYTSPPSFFAEASSPVSASPVPVGIPTSPKQESASSSYFVAPRPKFSAKKSGVTIQVWKPSVVEE

SEQ ID NO: 25710 - protein, 764 aa, Homo sapiens
SADVLSPLSSPKEASLPPVQTWIKTPEIMKVDEEEVKFPGTNFDEIIDVIQEEEKCDEIPDSEPILEFNRSVKADSTKYNGPPFPPVASTFQPTADILDKVIERKETLENSLIQWVEQEIMSRIISGLFPVQQQIAPSISVSVSETSEPLTSDIVEGTSSGALQLFVDAGVPVNSNVIKHFVNEALAETIAVMLGDREAKKQGPVATGVSGDASTNETYLPARVCTPLPTPQPTPPCSPSSPAKECVLVKTPDSSPCDSDHDMAFPVKEICAEKGDDMPAIMLVNTPTVTPTTTPPPAAAVFTPTLSDISIDKLKVSSPELPKPWGDGDLPLEEENPNSPQEELHPRAIVMSVAKDEEPESMDFPAQPPPPEPVPFMPFPAGTKAPSPSQMPGSDSSTLESTLSVTVTETETLDKPISEGEILFSCGQKLAPKILEDIGLYLTNLNDSLSSTLHDAVEMEDDPPSEGQVIRMSHKKFHADAILSFAKQNQESAVSQQAVYHSEDLENSVGELSEGQRPQLTAAAENILMGHSLYMQPPVTNTQSLDQQCDPKPLSRQFDTVSGSIYEDSCASHGPMSLGELELEPNSKLVLPTTLLTAQENDVNLPVAAEDFSQYQLKQNQDVKQVEHKPSQSYLRVRNKSDIAPSQQQETRSHSVVQAGLELLGSSSLPTSASQSAGITSVSHRTWQHNVFKVHPYCSRWESSATLRFTDAPCQDVSDAAVSEPRGLLSVSESQHNAGGHGVFGGRYLLNGKRQPAQCLCHWF

SEQ ID NO: 25711 - protein, 2078 aa, Homo sapiens
MGDEMDAMIPEREMKDFQFRALKKVRIFDSPEELPKERSSLLAVSNKYGLVFAGGASGLQIFPTKNLLIQNKPGDDPNKIVDKVQGLLVPMKFPIHHLALSCDNLTLSACMMSSEYGSIIAFFDVRTFSNEAKQQKRPFAYHKLLKDAGGMVIDMKWNPTVPSMVAVCLADGSIAVLQVTETVKVCATLPSTVAVTSVCWSPKGKQLAVGKQNGTVVQYLPTLQEKKVIPCPPFYESDHPVRVLDVLWIGTYVFAIVYAAADGTLETSPDVVMALLPKKEEKHPEIFVNFMEPCYGSCTERQHHYYLSYIEEWDLVLAASAASTEVSILARQSDQINWESWLLEDSSRAELPVTDKSDDSLPMGVVVDYTNQVEITISDEKTLPPAPVLMLLSTDGVLCPFYMINQNPGVKSLIKTPERLSLEGERQPKSPGSTPTTPTSSQAPQKLDASAAAAPASLPPSSPAAPIATFSLLPAGGAPTVFSFGSSSLKSSATVTGEPPSYSSGSDSSKAAPGPGPSTFSFVPPSKASLAPTPAASPVAPSAASFSFGSSGFKPTLESTPVPSVSAPNIAMKPSFPPSTSAVKVNLSENSQSAPPMSPFSSASKPAASGPLSHPTPLSAPPSSVPLKSSVLPSPSGRSAQGSSSPVPSMVQKSPRITPPAAKPGSPQAKSLQPAVAEKQGHQWKDSDPVMAGIGEEIAHFQKELEELKARTSKACFQVGTSEEMKMLRTESDDLHTFLLEIKETTESLHGDISSLKTTLLEGFAGVEEAREQNERNRDSGYLHLLYKRPLDPKSEAQLQEIRRLHQYVKFAVQDVNDVLDLEWDQHLEQKKKQRHLLVPERETLFNTLANNREIINQQRKRLNHLVDSLQQLRLYKQTSLWSLSSAVPSQSSIHSFDSDLESLCNALLKTTIESHTKSLPKVPAKLSPMKQAQLRNFLAKRKTPPVRSTAPASLSRSAFLSQRYYEDLDEVSSTSSVSQSLESEDARTSCKDDEAVVQAPRHAPVVRTPSIQPSLLPHAAPFAKSHLVHGSSPGVMGTSVATSASKIIPQGADSTMLATKTVKHGAPSPSHPISAPQAAAAAALRRQMASQAPAVNTLTESTLKNVPQVVNVQELKNNPATPSTAMGSSVPYSTAKTPHPVLTPVAANQAKQGSLINSLKPSGPTPASGQLSSGDKASGTAKIETAVTSTPSASGQFSKPFSFSPSGTGFNFGIITPTPSSNFTAAQGATPSTKESSQPDAFSSGGGSKPSYEAIPESSPPSGITSASNTTPGEPAASSSRPVAPSGTALSTTSSKLETPPSKLGELLFPSSLAGETLGSFSGLRVGQADDSTKPTNKASSTSLTSTQPTKTSGVPSGFNFTAPPVLGKHTEPPVTSSATTTSVAPPAATSTSSTAVFGSLPVTSAGSSGVISFGGTSLSAGKTSFSFGSQQTNSTVPPSAPPPTTAATPLPTSFPTLSFGSLLSSATTPSLPMSAGRSTEEATSSALPEKPGDSEVSASAASLLEEQQSAQLPQAPPQTSDSVKKEPVLAQPAVSNSGTAASSTSLVALSAEATPATTGVPDARTEAVPPASSFSVPGQTAVTAAAISSAGPVAVETSSTPIASSTTSIVAPGPSAEAAAFGTVTSGSSVFAQPPAASSSSAFNQLTNNTATAPSATPVFGQVAASTAPSLFGQQTGSTASTAAATPQVSSSGFSSPAFGTTAPGVFGQTTFGQASVFGQSASSAASVFSFSQPGFSSVPAFGQPASSTPTSTSGSVFGAASSTSSSSSFSFGQSSPNTGGGLFGQSNAPAFGQSPGFGQGGSVFGGTSAATTTAATSGFSFCQASGFGSSNTGSVFGQAASTGGIVFGQQSSSSSGSVFGSGNTGRGGGFFSGLGGKPSQDAANKNPFSSASGGFGSTATSNTSNLFGNSGAKTFGGFASSSFGEQKPTGTFSSGGGSVASQGFGFSSPNKTGGFGAAPVFGSPPTFGGSPGFGGVPAFGSAPAFTSPLGSTGGKVFGEGTAAASAGGFGFGSSSNTTSFGTLASQNAPTFGSLSQQTSGFGTQSSGFSGFGSGTGGFSFGSNNSSVQGFGGWRS

SEQ ID NO: 25712 - protein, 638 aa, Homo sapiens
MVSEKSHLGNPQEPVQEEPKTRLLSMTVRRGPRSLPPIPSTSRTGFAEFSMRGRMREKLQAARSKAESALLQEIPTPRPRRLRSPSKKELETEFGTEPGKEVERTQQEVDSQSYSRVKFHDSARKIKPKPQVPPGFPSAEEAYNFFTFNFDPEPEGSEEKPKARHRAGTNQEEEEGEEEEPPAQGGGKEMDEEELLNGDDAEDFLLGLDHVADDFVAVRPADYESIHDRLQMEREMLFIPSRQTVPTYKKLPENVQPRFLEDEGLYTGVRPEVARTNQNIMENRLLMQDPERRWFGDDGRILALPNPIKPFPSRPPVLTQEQSIKAELETLYKKAVKYVHSSQHVIRSGDPPGNFQLDIDISGLIFTHHPCFSREHVLAAKLAQLYDQYLARHQRNKAKFLTDKLQALRNAVQTGLDPEKPHQSLDTIQKTINEYKSEIRQTRKFRDAEQEKDRTLLKTIIKVWKEMKSLREFQRFTNTPLKLVLRKEKADQKADEEAYEAEIQAEISELLEEHTEEYAQKMEEYRTSLQQWKAWRKVQRAKKKKRKQAAEEHPGDEIAEPYPEEDLVKPSPPEPTDRAVIEQEVRERAAQSRRRPWEPTLVPELSLAGSVTPNDQCPSHGSQSIAPESAASASLRTC

SEQ ID NO: 25713 - protein, 607 aa, Homo sapiens
MGKGRAGRVGTTALPPRLKEMKSQESAAGSKLVLRCETSSEYSSLRFKWFKNGNELNRKNKPQNIKIQKKPGKSELRINKASLADSGEYMCKVISKLGNDSASANITIVESNEIITGMPASTEGAYVSSATSTSTTGTSHLVKCAEKEKTFCVNGGECFMVKDLSNPSRYLCKCPNEFTGDRCQNYVMASFYKHLGIEFMEAEELYQKRVLTITGICIALLVVGIMCVVAYCKTKKQRKKLHDRLRQSLRSERNNMMNIANGPHHPNPPPENVQLVNQYVSKNVISSEHIVEREAETSFSTSHYTSTAHHSTTVTQTPSHSWSNGHTESILSESHSVIVMSSVENSRHSSPTGGPRGRLNGTGGPRECNSFLRHARETPDSYRDSPHSERYVSAMTTPARMSPVDFHTPSSPKSPPSEMSPPVSSMTVSMPSMAVSPFMEEERPLLLVTPPRLREKKFDHHPQQFSSFHHNPAHDSNSLPASPLRIVEDEEYETTQEYEPAQEPVKKLANSRRAKRTKPNGHIANRLEVDSNTSSQSSNSESETEDERVGEDTPFLGIQNPLAASLEATPAFRLADSRTNPAGRFSTQEEIQARLSSVIANQDPIAV

SEQ ID NO: 25714 - protein, 161 aa, Homo sapiens
EEQPDGLSFPEGQEEPDEHQVATVTLEVLLLRTELSLLLQNTHPRQQALEQLLEDKVEDDMLQLSEFDPLLREIAPGPLTTPSVPADSDVAWSFLERCSISPALQAPLLVPASSVVLPQAHCTAHPVNRPCVQPVTTCSMDTHPVLITSARPCLGSCRVPT

SEQ ID NO: 25715 - protein, 581 aa, Homo sapiens
MDEDYYGSAAEWGDEADGGQQEDDSGEGEDDAEVQQECLHKFSTRDYIMEPSIFNTLKRYFQAGGSPENVIQLLSENYTAVAQTVNLLAEWLIQTGVEPVQVQETVENHLKSLLIKHFDPRKADSIFTEEGETPAWLEQMIAHTTWRDLFYKLAEAHPDCLMLNFTVKLISDAGYQGEITSVSTACQQLEVFSRVLRTSLATILDGGEENLEKNLPEFAKMVCHGEHTYLFAQAMMSVLAQEEQGGSAVRRIAQEVQRFAQEKGHDASQITLALGTAASYPRACQALGAMLSKGALNPADITVLFKMFTSMDPPPVELIRVPAFLDLFMQSLFKPGARINQDHKHKYIHILAYAASVVETWKKNKRVSINKDELKSTSKAVETVHNLCCNENKGASELVAELSTLYQCIRFPVVAMGVLKWVDWTVSEPRYFQLQTDHTPVHLALLDEISTCHQLLHPQVLQLLVKLFETEHSQLDVMEQLELKKTLLDRMVHLLSRGYVLPVVSYIRKCLEKLDTDISLIRYFVTEVLDVIAPPYTSDFVQLFLPILENDSIAGTIKTEGEHDPVTEFIAHCKSNFIMVN

SEQ ID NO: 25716 - protein, 710 aa, Homo sapiens
MRGENRPIGKRTLPPRAGWIGGCPGSQPDAKARKGWTLAPHSSRCHRCCHYRCHCRCCLCPAEMTVGRPEGAPGGAEGSRQIFPPESFADTEAGEELSGDGLVLPRASKLDEFLSPEEEIDSTSDSTGSIYQNLQELKQKGRWCLLESLFQSDPESDENLSEDEEDLESFFQDKDRGMVQVQCPQALRCGSTRRCSSLNNLPSNIPRPQTQPPSGSRPPSQHRSVSSWASSITVPRPFRMTLREARKKAEWLGSPASFEQERQRAQRQGEEEAECHRQFRAQPVPAHVYLPLYQEIMERSEARRQAGIQKRKELLLSSLKPFSFLEKEEQLKEAARQRDLAATAEAKISKQKATRRIPKSILEPALGDKLQEAELFRKIRIQMRALDMLQMASSPIASSSNRANPQPRTATRTQQEKLGFLHTNFRFQPRVNPVVPDYEGLYKAFQRRAAKRRETQEATRNKPFLLRTANLRHPQRPCDAATTGRRQDSPQPPATPLPRSRSLSGLASLSANTLPVHITDATRKRESAVRSALEKKNKADESIQWLEIHKKKSQAMSKSVTLRAKAMDPHKSLEEVFKAKLKENRNNDRKRAKEYKKELEEMKQRIQTRPYLFEQVAKDLAKKEAEQWYLDTLKQAGLEEDFVRNKGQGTRAVQEKETKIKDFPRFQETTKLSIRDPEQGLEGSLEQPASPRKVLEELSHQSPENLVSLA

SEQ ID NO: 25717 - protein, 511 aa, Homo sapiens
MKRTTSFRMAEDDPYLGRPEQMFHLDPSLTHTIFNPEVFQPQMALPTDGPYLQILEQPKQRGFRFRYVCEGPSHGGLPGASSEKNKKSYPQVKICNYVGPAKVIVQLVTNGKNIHLHAHSLVGKHCEDGICTVTAGPKDMVVGFANLGILHVTKKKVFETLEARMTEACIRGYNPGLLVHPDLAYLQAEGGGDRQLGDREKELIRQAALQQTKEMDLSVVRLMFTAFLPDSTGSFTRRLEPVVSDAIYDSKAPNASNLKIVRMDRTAGCVTGGEEIYLLCDKVQKDDIQIRFYEEEENGGVWEGFGDFSPTDVHRQFAIVFKTPKYKDINITKPASVFVQLRRKSDLETSEPKPFLYYPEIKDKEEVQRKRQKLMPNFSDSFGGGSGAGAGGGGMFGSGGGGGGTGSTGPGYSFPHYGFPTYGGITFHPGTTKSNAGMKHGTMDTESKKDPEGCDKSDDKNTVNLFGKVIETTEQDQEPSEATVGNGEVTLTYATGTKEESAGVQGHPRSY

SEQ ID NO: 25718 - protein, 880 aa, Homo sapiens
DDGDDDDDDRGSDGLSIHKCMSCSSYRESQEKVMNDSDTHENSLMDQNNPISYSLSENSEEDNRVTSVSSDSQTGMDRSPGKSPSANGLSQKHNDGKEENDIQTGSALLPLSPESKAWAVLTSDEESGSGQGTSDSLNENETSTDFSFADTNEKDADGILAAGDSEITPGFPQSPTSSVTSENSEVFHVSEAEASNSSHESRIGLAEGLESEKKAVIPLVIVSALTFICLVVLVGILIYWRKCFQTAHFYLEDSTSPRVISTPPTPIFPISDDVGAIPIKHFPKHVADLHASSGFTEEFEEVQSCTVDLGITADSSNHPDNKHKNRYINIVAYDHSRVKLAQLAEKDGKLTDYINANYVDRKCDQYWPADGSEEYGNFLVTQKSVQVLAYYTVRNFTLRNTKIKKGSQKGRPSGRVVTQYHYTQWPDMGVPEYSLPVLTFVRKAAYAKRHAVGPVVVHCSAGVGRTGTYIVLDSMLQQIQHEGTVNIFGFLKHIRSQRNYLVQTEEQYVFIHDTLVEAILSKETEVLDSHIHAYVNALLIPGPAGKTKLEKQFQGLTLSPRLECRGTISAHCNLPLPGLTDPPTSASRVARTILLSQSNIQQSDYSAALKQCNREKNRTSSIIPVERSRVGISSLSGEGTDYINASYIMGYYQSNEFIITQHPLLHTIKDFWRMIWDHNAQLVVMIPDGQNMAEDEFVYWPNKDEPINCESFKVTLMAEEHKCLSNEEKLIIQDFILEATQDDYVLEVRHFQCPKWPNPDSPISKTFELISVIKEEAANRDGPMIVHDEHGGVTAGTFCALTTLMHQLEKENSVDVYQVAKMINLMRPGVFADIEQYQFLYKVILSLVSTRQEENPSTSLDSNGAALPDGNIAESLESLV

SEQ ID NO: 25719 - protein, 624 aa, Homo sapiens
MGKGRAGRVGTTALPPRLKEMKSQESAAGSKLVLRCETSSEYSSLRFKWFKNGNELNRKNKPQNIKIQKKPGKSELRINKASLADSGEYMCKVISKLGNDSASANITIVESNEIITGMPASTEGAYVSSESPIRISVSTEGANTSSSTSTSTTGTSHLVKCAEKEKTFCVNGGECFMVKDLSNPSRYLCKCPNEFTGDRCQNYVMASFYKHLGIEFMEAEELYQKRVLTITGICIALLVVGIMCVVAYCKTKKQRKKLHDRLRQSLRSERNNMMNIANGPHHPNPPPENVQLVNQYVSKNVISSEHIVEREAETSFSTSHYTSTAHHSTTVTQTPSHSWSNGHTESILSESHSVIVMSSVENSRHSSPTGGPRGRLNGTGGPRECNSFLRHARETPDSYRDSPHSERYVSAMTTPARMSPVDFHTPSSPKSPPSEMSPPVSSMTVSMPSMAVSPFMEEERPLLLVTPPRLREKKFDHHPQQFSSFHHNPAHDSNSLPASPLRIVEDEEYETTQEYEPAQEPVKKLANSRRAKRTKPNGHIANRLEVDSNTSSQSSNSESETEDERVGEDTPFLGIQNPLAASLEATPAFRLADSRTNPAGRFSTQEEIQARLSSVIANQDPIAV

SEQ ID NO: 25720 - protein, 1963 aa, Homo sapiens
MPPLPLARDTRQPPGASLLVRGFMVPCNACLILLATATLGFAVLLFLNNYKPGTHFTPVPPTPPDACRGMLCGFGAVCEPNAEGPGRASCVCKKSPCPSVVAPVCGSDASTYSNECELQRAQCSQQRRIRLLSRGPCGSRDPCSNVTCSFGSTCARSADGLTASCLCPATCRGAPEGTVCGSDGADYPGECQLLRRACARQENVFKKFDGPCDPCQGALPDPSRSCRVNPRTRRPEMLLRPESCPARQAPVCGDDGVTYENDCVMGRSGAARGLLLQKVRSGQCQGRDQCPEPCRFNAVCLSRRGRPRCSCDRVTCDGAYRPVCAQDGRTYDSDCWRQQAECRQQRAIPSKHQGPCDQAPSPCLGVQCAFGATCAVKNGQAACECLQACSSLYDPVCGSDGVTYGSACELEATACTLGREIQVARKGPCDRCGQCRFGALCEAETGRCVCPSECVALAQPVCGSDGHTYPSECMLHVHACTHQISLHVASAGPCETCGDAVCAFGAVCSAGQCVCPRCEHPPPGPVCGSDGVTYGSACELREAACLQQTQIEEARAGPCEQAECGSGGSGSGEDGDCEQELCRQRGGIWDEDSEDGPCVCDFSCQSVPGSPVCGSDGVTYSTECELKKARCESQRGLYVAAQGACRGPTFAPLPPVAPLHCAQTPYGCCQDNITAARGVGLAGCPSACQCNPHGSYGGTCDPATGQCSCRPGVGGLRCDRCEPGFWNFRGIVTDGRSGCTPCSCDPQGAVRDDCEQMTGLCSCKPGVAGPKCGQCPDGRALGPAGCEADASAPATCAEMRCEFGARCVEESGSAHCVCPMLTCPEANATKVCGSDGVTYGNECQLKTIACRQGLQISIQSLGPCQEAVAPSTHPTSASVTVTTPGLLLSQALPAPPGALPLAPSSTAHSQTTPPPSSRPRTTASVPRTTVWPVLTVPPTAPSPAPSLVASAFGESGSTDGSSDEELSGDQEASGGGSGGLEPLEGSSVATPGPPVERASCYNSALGCCSDGKTPSLDAEGSNCPATKVFQGVLELEGVEGQELFYTPEMADPKSELFGETARSIESTLDDLFRNSDVKKDFRSVRLRDLGPGKSVRAIVDVHFDPTTAFRAPDVARALLRQIQVSRRRSLGVRRPLQEHVRFMDFDWFPAFITGATSGAIAAGATARATTASRLPSSAVTPRAPHPSHTSQPVAKTTAAPTTRRPPTTAPSRVPGRRPPAPQQPPKPCDSQPCFHGGTCQDWALGGGFTCSCPAGRGGAVCEKVLGAPVPAFEGRSFLAFPTLRAYHTLRLALEFRALEPQGLLLYNGNARGKDFLALALLDGRVQLRFDTGSGPAVLTSAVPVEPGQWHRLELSRHWRRGTLSVDGETPVLGESPSGTDGLNLDTDLFVGGVPEDQAAVALERTFVGAGLRGCIRLLDVNNQRLELGIGPGAATRGSGVGECGDHPCLPNPCHGGAPCQNLEAGRFHCQCPPGRVGPTCADEKSPCQPNPCHGAAPCRVLPEGGAQCECPLGREGTFCQTASGQDGSGPFLADFNGFSHLELRGLHTFARDLGEKMALEVVFLARGPSGLLLYNGQKTDGKGDFVSLALRDRRLEFRYDLGKGAAVIRSREPVTLGAWTRVSLERNGRKGALRVGDGPRVLGESPKSRKVPHTVLNLKEPLYVGGAPDFSKLARAAAVSSGFDGAIQLVSLGGRQLLTPEHVLRQVDVTSFAGHPCTRASGHPCLNGASCVPREAAYVCLCPGGFSGPHCEKGLVEKSAGDVDTLAFDGRTFVEYLNAVTESELANEIPVPETLDSGALHSEKALQSNHFELSLRTEATQGLVLWSGKATERADYVALAIVDGHLQLSYNLGSQPVVLRSTVPVNTNRWLRVVAHREQREGSLQVGNEAPVTGSSPLGATQLDTDGALWLGGLPELPVGPALPKAYGTGFVGCLRDVVVGRHPLHLLEDAVTKPELRPCPTP

SEQ ID NO: 25721 - protein, 386 aa, Homo sapiens
SFPPLETGRNLKKEVSRVLCKRCALPPRLKEMKSQESAAGSKLVLRCETSSEYSSLRFKWFKNGNELNRKNKPQNIKIQKKPGKSELRINKASLADSGEYMCKVISKLGNDSASANITIVESNATSTSTTGTSHLVKCAEKEKTFCVNGGECFMVKDLSNPSRYLCKGGGAVPEESADHNRHLHRPPCGRHHVCGGLLQNQQYVSKNVISSEHIVEREAETSFSTSHYTSTAHHSTTVTQTPSHSWSNGHTESILSESHSVIVMSSVENSRHSSPTGGPRGRLNGTGGPRECNSFLRHARETPDSYRDSPHSERREKPMGQQILIELAEKDLYFFLAVHLFSNKNPGCLCDDSGRGGFVHSQEEIGPPYLPFGCREYEQTSLRPKN

SEQ ID NO: 25722 - protein, 1136 aa, Homo sapiens
MKKASRSVGSVPKVSAISKTQTAEKIKPENSSSASTGGKLVKPGTAASLSKGLTLLPRLEYGGVITAQCSFDLPGSSDPLTSTFPITRTTGMCHFAQTKSSDDLLAGMAGGVTVTNGVKGKKSTCPSAAPSASAPAMTTVENKSKISTGTASSTKRSTSTGQGANDMALAKRSRSRTATECDVRMSKSKSDNQISDRAALEAKVKDLLTLAKTKDVEILHLRNELRDMRAQLGINEDHSEGDEKSEKETIMAHQPTDVESTLLQLQEQNTAIREELNQLKNENRMLKDRLNALGFSLEQRLDNSEKLFGYQSLSPEITPGNQSDGGGTLTSSVEGSAPGSVEDLLSQDENTLMDHQHSNSMDNLDSECSEVYQPLTSSDDALDAPSSSESEGIPSIERSRKGSSGNASEVSVACLTERIHQMEENQHSTSEELQATLQELADLQQITQELNSENERLGEEKVILMESLCQQSDKLEHFSRQIEYFRSLLDEHHISYVIDEDVKSGRYMELEQRYMDLAENARFEREQLLGVQQHLSNTLKMAEQDNKEAQEMIGALKERSHHMERIIESEQKGKAALAATLEEYKATVASDQIEMNRLKAQLENEKQKVAELYSIHNSGDKSDIQDLLESVRLDKEKAETLASSLQEDLAHTRNDANRLQDAIAKVEDEYRAFQEEAKKQIEDLNMTLEKLRSDLDEKETERSDMKETIFELEDEVEQHRAVKLHDNLIISDLENTVKKLQDQKHDMEREIKTLHRRLREESAEWRQFQADLQTAVVIANDIKSEAQEEIGDLKRRLHEAQEKNEKLTKELEEIKSRKQEEERGRVYNYMNAVERDLAALRQGMGLSRRSSTSSEPTPTVKTLIKSFDSASQVPNPAAAAIPRTPLSPSPMKTPPAAAVSPMQRHSISGPISTSKPLTALSDKRPNYGEIPVQEHLLRTSSASRPASLPRVPAMESAKTLSVSRRSSEEVKRDISAQEGASPASLMAMGTTSPQLSLSSSPTASVTPTTRSRIREERKDPLSALAREYGGSKRNALLKWCQKKTEGYQNIDITNFSSSWNDGLAFCALLHTYLPAHIPYQELNSQDKRRNFMLAFQAAESVGIKSTLDINEMVRTERPDWQNVMLYVTAIYKYFET

SEQ ID NO: 25723 - protein, 698 aa, Homo sapiens
GTSDSLNENETSTDFSFADTNEKDADGILAAGDSEITPGFPQSPTSSVTSENSEVFHVSEAEASNSSHESRIGLAEGLESEKKAVIPLVIVSALTFICLVVLVGILIYWRKCFQTAHFYLEDSTSPRVISTPPTPIFPISDDVGAIPIKHFPKHVADLHASSGFTEEFEEVQSCTVDLGITADSSNHPDNKHKNRYINIVAYDHSRVKLAQLAEKDGKLTDYINANYVDGYNRPKAYIAAQGPLKSTAEDFWRMIWEHNVEVIVMITNLVEKGRRKCDQYWPADGSEEYGNFLVTQKSVQVLAYYTVRNFTLRNTKIKKGSQKGRPSGRVVTQYHYTQWPDMGVPEYSLPVLTFVRKAAYAKRHAVGPVVVHCSAGVGRTGTYIVLDSMLQQIQHEGTVNIFGFLKHIRSQRNYLVQTEEQYVFIHDTLVEAILSKETEVLDSHIHAYVNALLIPGPAGKTKLEKQFQGLTLSPRLECRGTISAHCNLPLPGLTDPPTSASRVARTILLSQSNIQQSDYSAALKQCNREKNRTSSIIPVERSRVGISSLSGEGTDYINASYIMGYYQSNEFIITQHPLLHTIKDFWRMIWDHNAQLVVMIPDGQNMAEDEFVYWPNKDEPINCESFKVTLMAEEHKCLSNEEKLIIQDFILEATQAWRSDGRNFLCSDNPYAPTRKRKFRGCLPGSQDDQSDEARSLC

SEQ ID NO: 25724 - protein, 722 aa, Homo sapiens
MLTFFLVSGGSLWLFVEFVLSLLEKMQTQEILRILRLPELGDLGQFFRSLSATTLVSMGALAAILAYWFTHRPKALQPPCNLLMQSEEVEDSGGARRSVIGSGPQLLTHYYDDARTMYQVFRRGLSISGNGPCLGFRKPKQPYQWLSYQEVADRAEFLGSGLLQHNCKACTDQFIGVFAQNRPEWIIVELACYTYSMVVVPLYDTLGPGAIRYIINTADISTVIVDKPQKAVLLLEHVERKETPGLKLIILMDPFEEALKERGQKCGVVIKSMQAVEDCGQENHQAPVPPQPDDLSIVCFTSGTTGNPKGAMLTHGNVVADFSGFLKVTEKVIFPRQDDVLISFLPLAHMFERVIQSVVYCHGGRVGFFQGDIRLLSDDMKALCPTIFPVVPRLLNRMYDKIFSQANTPLKRWLLEFAAKRKQAEVRSGIIRNDSIWDELFFNKIQASLGGCVRMIVTGAAPASPTVLGFLRAALGCQVYEGYGQTECTAGCTFTTPGDWTSGHVGAPLPCNHIKLVDVEELNYWACKGEGEICVRGPNVFKGYLKDPDRTKEALDSDGWLHTGDIGKWLPAGTLKIIDRKKHIFKLAQGEYVAPEKIENIYIRSQPVAQIYVHGDSLKAFLVGIVVPDPEVMPSWAQKRGIEGTYADLCTNKDLKKAILEDMVRLGKESGLHSFEQVKAIHIHSDMFSVQNGLLTPTLKAKRPELREYFKKQIEELYSISM

SEQ ID NO: 25725 - protein, 105 aa, Homo sapiens
MNRSIPVEVDESEPYPSQLLKPIPEYSPEEESEPPAPNIRNMAPNSLSAPTMLHNSSGDFSQAHSTLKLANHQRPVSRQVTCLRTQVLEDSEDSFCRRHPGLGKA

SEQ ID NO: 25726 - protein, 272 aa, Homo sapiens
MQTQEILRILRLPELGDLGQFFRSLSATTLDSGGARRSVIGSGPQLLTHYYDDARTMYQVFRRGLSISGNGPCLGFRKPKQPYQWLSYQEVADRAEFLGSGLLQHNCKACTDQFIGVFAQNRPEWIIVELACYTYSMVVVPLYDTLGPGAIRYIINTADISTVIVDKPQKAVLLLEHVERKETPGLKLIILMDPFEEALKERGQKCGVVIKSMQAVEDCGQENHQAPVPPQPDDLSIVCFTSGTTGNPKGAMLTHGNVVADFSGFLKVTEDY

SEQ ID NO: 25727 - protein, 1494 aa, Homo sapiens
MRILKRFLACIQLLCVCRLDWANGYYRQQRKLVEEIGWSYTGALNQKNWGKKYPTCNSPKQSPINIDEDLTQVNVNLKKLKFQGWDKTSLENTFIHNTGKTVEINLTNDYRVSGGVSEMVFKASKITFHWGKCNMSSDGSEHSLEGQKFPLEMQIYCFDADRFSSFEEAVKGKGKLRALSILFEVGTEENLDFKAIIDGVESVSRFGKQAALDPFILLNLLPNSTDKYYIYNGSLTSPPCTDTVDWIVFKDTVSISESQLAVFCEVLTMQQSGYVMLMDYLQNNFREQQYKFSRQVFSSYTGKEEIHEAVCSSEPENVQADPENYTSLLVTWERPRVVYDTMIEKFAVLYQQLDGEDQTKHEFLTDGYQDLGAILNNLLPNMSYVLQIVAICTNGLYGKYSDQLIVDMPTDNPELDLFPELIGTEEIIKEEEEGKDIEEGAIVNPGRDSATNQIRKKEPQISTTTHYNRIGTKYNEAKTNRSPTRGSEFSGKGDVPNTSLNSTSQPVTKLATEKDISLTSQTVTELPPHTVEGTSASLNDGSKTVLRSPHMNLSGTAESLNTVSITEYEEESLLTSFKLDTGAEDSSGSSPATSAIPFISENISQGYIFSSENPETITYDVLIPESARNASEDSTSSGSEESLKDPSMEGNVWFPSSTDITAQPDVGSGRESFLQTNYTEIRVDESEKTTKSFSAGPVMSQGPSVTDLEMPHYSTFAYFPTEVTPHAFTPSSRQQDLVSTVNVVYSQTTQPVYNEASNSSHESRIGLAEGLESEKKAVIPLVIVSALTFICLVVLVGILIYWRKCFQTAHFYLEDSTSPRVISTPPTPIFPISDDVGAIPIKHFPKHVADLHASSGFTEEFETLKEFYQEVQSCTVDLGITADSSNHPDNKHKNRYINIVAYDHSRVKLAQLAEKDGKLTDYINANYVDGYNRPKAYIAAQGPLKSTAEDFWRMIWEHNVEVIVMITNLVEKGRRKCDQYWPADGSEEYGNFLVTQKSVQVLAYYTVRNFTLRNTKIKKGSQKGRPSGRVVTQYHYTQWPDMGVPEYSLPVLTFVRKAAYAKRHAVGPVVVHCSAGVGRTGTYIVLDSMLQQIQHEGTVNIFGFLKHIRSQRNYLVQTEEQYVFIHDTLVEAILSKETEVLDSHIHAYVNALLIPGPAGKTKLEKQFQGLTLSPRLECRGTISAHCNLPLPGLTDPPTSASRVARTILLSQSNIQQSDYSAALKQCNREKNRTSSIIPVERSRVGISSLSGEGTDYINASYIMGYYQSNEFIITQHPLLHTIKDFWRMIWDHNAQLVVMIPDGQNMAEDEFVYWPNKDEPINCESFKVTLMAEEHKCLSNEEKLIIQDFILEATQDDYVLEVRHFQCPKWPNPDSPISKTFELISVIKEEAANRDGPMIVHDEHGGVTAGTFCALTTLMHQLEKENSVDVYQVAKMINLMRPGVFADIEQYQFLYKVILSLVSTRQEENPSTSLDSNGAALPDGNIAESLESLV

SEQ ID NO: 25728 - protein, 632 aa, Homo sapiens
MAAAAPRRPTQGTVTFEDVAVKFTQEEWNLLSEAQRCLYRDVTLENLALMSSLGCWCGVEDEAAPSKQSIYIQRETQVRTPVTGVSPKKAHPCEMCGPILGDILHVADHQGTHHKQKLHRCEAWGNKLYDSGNFHQHQNEHIGEKPYRGSVEEALFVKRCKLHVSGESSVFSESGKDFLPRSGLLQQEASHTGEKSNSKTECVSPFQCGGAHYSHGDSMKHFSTKHILSQHQRLLPREECYVCCECGKSFSKYVSFSNHQRVHSGKRPYECGECEKSFSQKSSLIQHQQFHTGGKPYGCEECGKYFSLEGYLRRHQKVHAGKGPYECGECGKSFSSNVNLKSHQRIHTGERPYKCGECEKSFSRKPSLSYHQRIHTEVRPYKCGECGKSYISKGHLRIHQRMHTGERPYKCGDCGKSFNEKGHLRSHQRVHTTERPYKCGECGKCFSHKGNLILHQHGHTRKRPYMCWECGKLFKKKSHLLVHQRIHSGEKPYACEACQKFFRHKCHLTAHQRVHTGERPYECSDCGKSFTHSCAFIVHKRVHTGQKPYECSECGKSFAASSYLTSHRRVHTGQKPYECSECGKSFAGISSLTNHRRVHTGEKPYGCSECEKKFRKSSSLRYHQRVHERKAL

SEQ ID NO: 25729 - protein, 1159 aa, Homo sapiens
MAPKHKSSDAGNLDRPKRSRKVLPLSEKVKVLDLIRKDKKSYAEVAKIYGKNESSIREIVKKEKEIRASFAVSPPTAKVTATVRDKCLVKMEQALHLWVEEMNRKRVPIDSNMLRQKALSLYQDFSKGCSETDTKPFTASKGWLHRFRHRFSHHYKKKKGIMAQVAMSTLPVEDEESSESRMVVTFLMSALESMCKELAKSKAEVACIAVYETDVFVVGTERGRAFVNTRKDFQKDFVKYCVEEEEKAAEMHKMKSTTQANRMSVDAVEIETLRKTVEDYFCFCYGKALGKSTVVPVPYEKMLRDQSAVVVQGLPEGVAFKHPENYDLATLKWILENKAGISFIIKRPFLEPKKHVGGRVMVTDADRSILSPGGSCGPIKVKTEPTEDSGISLEMAAVTVKEESEDPDYYQYNIQAGPSETDDVDEKQPLSKPLQGSHHSSEGNEGTEMEVPAEDSTQHVPSETSEDPEVEVTIEDDDYSPPSKRPKANELPQPPVPEPANAGKRKVREFNFEKWNARITDLRKQVEELFERKYAQAIKAKGPVTIPYPLFQSHVEDLYVEGLPEGIPFRRPSTYGIPRLERILLAKERIRFVIKKHELLNSTREDLQLDKPASGVKEEWYARITKLRKMVDQLFCKKFAEALGSTEAKAVPYQKFEAHPNDLYVEGLPENIPFRSPSWYGIPRLEKIIQVGNRIKFVIKRPELLTHSTTEVTQPRTNTPVKEDWNVRITKLRKQVEEIFNLKFAQALGLTEAVKVPYPVFESNPEFLYVEGLPEGIPFRSPTWFGIPRLERIVRGSNKIKFVVKKPELVISYLPPGMASKINTKALQSPKRPRSPGSNSKVPEIEVTVEGPNNNNPQTSAVRTPTQTNGSNVPFKPRGREFSFEAWNAKITDLKQKVENLFNEKCGEALGLKQAVKVPFALFESFPEDFYVEGLPEGVPFRRPSTFGIPRLEKILRNKAKIKFIIKKPEMFETAIKESTSSKSPPRKINSSPNVNTTASGVEDLNIIQVTIPDDDNERLSKVEKARQLREQVNDLFSRKFGEAIGMGFPVKVPYRKITINPGCVVVDGMPPGVSFKAPSYLEISSMRRILDSAEFIKFTVIRPFPGLVINNQLVDQSESEGPVIQESAEPSQLEVPATEEIKETDGSSQIKQEPDPTW

SEQ ID NO: 25730 - protein, 524 aa, Homo sapiens
MPLLDGDLEGSGKHSSRKVDSPFGPGSPSKGFFSRGPQPRPSSPMSAPVRPKTSPGSPKTVFPFSYQESPPRSPRRMSFSGIFRSSSKESSPNSNPATSPGGIRFFSRSRKTSGLSSSPSTPTQVTKQHTFPLESYKHEPERLENRIYASSSPPDTGQRFCPSSFQSPTRPPLASPTHYAPSKAAALAAALGPAEAGMLEKLEFEDEVEDSESGVYMRFMRSHKCYDIVPTSSKLVVFDTTLQVKKAFFALVANGVRAAPLWESKKQSFVGMLTITDFINILHRYYKSPMVQIYELEEHKIETWRELYLQETFKPLVNISPDASLFDAVYSLIKNKIHRLPVIDPISGNALYILTHKRILKFLQLFMSDMPKPAFMKQNLDELGIGTYHNIAFIHPDTPIIKALNIFVERRISALPVVDESGKVVDIYSKFDVINLAAEKTYNNLDITVTQALQHRSQYFEGVVKCNKLEILETIVDRIVRAEVHRLVVVNEADSIVGIISLSDILQALILTPAGAKQKETETE

SEQ ID NO: 25731 - protein, 411 aa, Homo sapiens
MPSRKFADGEVVRGRWPGSSLYYEVEILSHDSTSQLYTVKYKDGTELELKENDIKPLTSFRQRKGGSTSSSPSRRRGSRSRSRSRSPGRPPKSARRSASASHQADIKEARREVEVKLTPLILKPFGNSISRYNGEPEHIERNDAPHKNTQEKFSLSQESSYIATQYSLRPRREEVKLKEIDSKEEKYVAKELAVRTFEVTPIRAKDLEFGGVPGVFLIMFGLPVFLFLLLLMCKQKDPSLLNFPPPLPALYELWETRVFGVYLLWFLIQVLFYLLPIGKVVEGTPLIDGRRLKYRLNGFYAFILTSAVIGTSLFQGVEFHYVYSHFLQFALAATVFCVVLSVYLYMRSLKAPRNDLSPASSGNAVYDFFIGRELNPRIGTFDLKYFCELRPGLIGWEPRQDSTIHLVVIPS

SEQ ID NO: 25732 - protein, 900 aa, Homo sapiens
CQSKAPGVDDQMNKHHFPLPQGQDCVVEKNNQHKPKSHISNINVEAKFNTVVSQSAPNHCTLAASASTPPSNRKALSCVHITLCPKTSSKLDSGTLDERFHSLDAASKARMNSEFNFDLHTVSSRSLEPTSKLLTSKPVAQDQESLGFLGPKSSLDFQVVQPSLPDSNTITQDLKTIPSQNSQIVTSRQIQVNISDFEGHSNPEGTPVFADRLPEKMKTPLSAFSEKLSSDAVTQITTESPEKTLFSSEIFINAEDRGHEIIEPGNQKLRKAPVKFASSSSVQQVTFSRGTDGQPLLLPYKPSGSTKMYYVPQLRQIPPSPDSKSDTTVESSHSGSNDAIAPDFPAQVLGTRDDDLSATVNIKHKEGIYSKRVVTKASLPVGEKPLQNENADASVQVLITGDENLSDKKQQEIHSTRAVTEAAQAKEKESLQKDTADSSAAAAAEHSAQVGDPEMKNLPDTKAITQKEEIHRKKTVPEEAWPNNKESLQINIEESECHSEFENTTRSVFRSAKFYIHHPVHLPSDQDICHESLGKSVFMRHSWKDFFQHHPDKHREHMCLPLPYQNMDKTKTDYTRIKSLSINVNLGNKEVMDTTKSQVRDYPKHNGQISDPQRDQKVTPEQTTQHTVSLNELWNKYRERQRQQRQPELGDRKELSLVDRLDRLAKILQNPITHSLQVSESTHDDSRGERSVKEWSGRQQQRNKLQKKKRFKSLEKSHKNTGELKKSKVLSHHRAGRSNQIKIEQIKFDKYILSKQPGFNYISNTSSDCRPSEESELLTDTTTNILSGTTSTVESDILTQTDREVALHERSSSVSTIDTARLIQAFGHERVCLSPRRIKLYSSITNQQRRYLEKRSKHSKKVLNTGHPLVTSEHTRRRHIQIQGSKFTVSQASSKCISTV

SEQ ID NO: 25733 - protein, 1011 aa, Homo sapiens
MPRGRASRTSIQSELHRDRRRPEITIVAAEPLRPASWFPGTPPPGLGFPTSSAAGSWRPNELVPAELPPSYEQVIKEINQVQVNTTNNNNAAATPRHTITSATQTDFSEEIDNDLPQTLQAPLKPLQPFSAVSSGNLPTNVAPLIVFDISEEPNCPENPSATRCPVPKPRSKSNLRPIPRDSHIKEQSQQKISPAAVGEESSPGRPQSLLDNASTSDSQAVMNIMNTEQSQNSIVSRIKVFEGQTNIETSGLPKKPEITPRSLPPKPTVSSGKPSVAPKPAANRASGEWDSGTENRLKVTSKEGLTPYPPLQEAGSIPVTKPELPKKPNPGLIRSVNPEIPGRGPLAESSDSGKKVPTPAPRPLLLKKSVSSENPTYPSAPLKPVTVPPRLAGASQAKAYKSLGEGPPANPPVPVLQSKPLVDIDLISFDDDVLPTPSGNLAEESVGSEMVLDPFQLPAKTEPIKERAVQPAPTRKPTVIRIPAKPGKCLHEDPQSPPPLPAEKPIGNTFSTVSGKLSNVERTRNLESNHPGQTGGFVRVPPRLPPRPVNGKTIPTQQPPTKVPPERPPPPKLSATRRSNKKLPFNRSSSDMDLQKKQSNLATGLSKAKSQVFKNQDPVLPPRPKPGHPLYSKYMLSVPHGIANEDIVSQNPGELSCKRGDVLVMLKQTENNYLECQKGEDTGRVHLSQMKIITPLDEHLRSRPNDPSHAQKPVDSGAPHAVVLHDFPAEQVDDLNLTSGEIVYLLEKIDTDWYRGNCRNQIGIFPANYVKVIIDIPEGGNGKRECVSSHCVKGSRCVARFEYIGEQKDELSFSEGEIIILKEYVNEEWARGEVRGRTGIFPLNFVEPVEDYPTSGANVLSTKVPLKTKKEDSGSNSQVNSLPAEWCEALHSFTAETSDDLSFKRGDRIQILERLDSDWCRGRLQDREGIFPAVFVRPCPAEAKSMLAIVPKGRKAKALYDFRGENEDELSFKAGDIITELESVDDDWMSGELMGKSGIFPKNYIQFLQIS

SEQ ID NO: 25734 - protein, 171 aa, Homo sapiens
MAPGVLAGVVSVVAGLGDAVGRELHRERDMRLSWFRVLTVLSICLSAVATATGAEGKRKLQIGVKKRVDHCPIKSRKGDVLHMHYTGKLEDGTEFDSSLPQNQPFVFSLGTGQVIKGWDQGLLGMCEGEKRKLVIPSELGYGERGAPPKIPGGATLVFEVELLKIERRTEL

SEQ ID NO: 25735 - protein, 2308 aa, Homo sapiens
MRILKRFLACIQLLCVCRLDWANGYYRQQRKLVEEIGWSYTGALNQKNWGKKYPTCNSPKQSPINIDEDLTQVNVNLKKLKFQGWDKTSLENTFIHNTGKTVEINLTNDYRVSGGVSEMVFKASKITFHWGKCNMSSDGSEHSLEGQKFPLEMQIYCFDADRFSSFEEAVKGKGKLRALSILFEVGTEENLDFKAIIDGVESVSRFGKQAALDPFILLNLLPNSTDKYYIYNGSLTSPPCTDTVDWIVFKDTVSISESQLAVFCEVLTMQQSGYVMLMDYLQNNFREQQYKFSRQVFSSYTGKEEIHEAVCSSEPENVQADPENYTSLLVTWERPRVVYDTMIEKFAVLYQQLDGEDQTKHEFLTDGYQDLGAILNNLLPNMSYVLQIVAICTNGLYGKYSDQLIVDMPTDNPELDLFPELIGTEEIIKEEEEGKDIEEGAIVNPGRDSATNQIRKKEPQISTTTHYNRIGTKYNEAKTNRSPTRGSEFSGKGDVPNTSLNSTSQPVTKLATEKDISLTSQTVTELPPHTVEGTSASLNDGSKTVLRSPHMNLSGTAESLNTVSITEYEEESLLTSFKLDTGAEDSSGSSPATSAIPFISENISQGYIFSSENPETITYDVLIPESARNASEDSTSSGSEESLKDPSMEGNVWFPSSTDITAQPDVGSGRESFLQTNYTEIRVDESEKTTKSFSAGPVMSQGPSVTDLEMPHYSTFAYFPTEVTPHAFTPSSRQQDLVSTVNVVYSQTTQPVYNGETPLQPSYSSEVFPLVTPLLLDNQILNTTPAASSSDSALHATPVFPSVDVSFESILSSYDGAPLLPFSSASFSSELFRHLHTVSQILPQVTSATESDKVPLHASLPVAGGDLLLEPSLAQYSDVLSTTHAASETLEFGSESGVLYKTLMFSQVEPPSSDAMMHARSSGPEPSYALSDNEGSQHIFTVSYSSAIPVHDSVGVTYQGSLFSGPSHIPIPKSSLITPTASLLQPTHALSGDGEWSGASSDSEFLLPDTDGLTALNISSPVSVAEFTYTTSVFGDDNKALSKSEIIYGNETELQIPSFNEMVYPSESTVMPNMYDNVNKLNASLQETSVSISSTKGMFPGSLAHTTTKVFDHEISQVPENNFSVQPTHTVSQASGDTSLKPVLSANSEPASSDPASSEMLSPSTQLLFYETSASFSTEVLLQPSFQASDVDTLLKTVLPAVPSDPILVETPKVDKISSTMLHLIVSNSASSENMLHSTSVPVFDVSPTSHMHSASLQGLTISYASEKYEPVLLKSESSHQVVPSLYSNDELFQTANLEINQAHPPKGRHVFATPVLSIDEPLNTLINKLIHSDEILTSTKSSVTGKVFAGIPTVASDTFVSTDHSVPIGNGHVAITAVSPHRDGSVTSTKLLFPSKATSELSHSAKSDAGLVGGGEDGDTDDDGDDDDDDRGSDGLSIHKCMSCSSYRESQEKVMNDSDTHENSLMDQNNPISYSLSENSEEDNRVTSVSSDSQTGMDRSPGKSPSANGLSQKHNDGKEENDIQTGSALLPLSPESKAWAVLTSDEESGSGQGTSDSLNENETSTDFSFADTNEKDADGILAAGDSEITPGFPQSPTSSVTSENSEVFHVSEAEASNSSHESRIGLAEGLESEKKAVIPLVIVSALTFICLVVLVGILIYWRKCFQTAHFYLEDSTSPRVISTPPTPIFPISDDVGAIPIKHFPKHVADLHASSGFTEEFEEVQSCTVDLGITADSSNHPDNKHKNRYINIVAYDHSRVKLAQLAEKDGKLTDYINANYVDGYNRPKAYIAAQGPLKSTAEDFWRMIWEHNVEVIVMITNLVEKGRRKCDQYWPADGSEEYGNFLVTQKSVQVLAYYTVRNFTLRNTKIKKGSQKGRPSGRVVTQYHYTQWPDMGVPEYSLPVLTFVRKAAYAKRHAVGPVVVHCSAGVGRTGTYIVLDSMLQQIQHEGTVNIFGFLKHIRSQRNYLVQTEEQYVFIHDTLVEAILSKETEVLDSHIHAYVNALLIPGPAGKTKLEKQFQLLSQSNIQQSDYSAALKQCNREKNRTSSIIPVERSRVGISSLSGEGTDYINASYIMGYYQSNEFIITQHPLLHTIKDFWRMIWDHNAQLVVMIPDGQNMAEDEFVYWPNKDEPINCESFKVTLMAEEHKCLSNEEKLIIQDFILEATQDDYVLEVRHFQCPKWPNPDSPISKTFELISVIKEEAANRDGPMIVHDEHGGVTAGTFCALTTLMHQLEKENSVDVYQVAKMINLMRPGVFADIEQYQFLYKVILSLVSTRQEENPSTSLDSNGAALPDGNIAESLESLV

SEQ ID NO: 25736 - protein, 137 aa, Homo sapiens
MSLLRSLRVFLVARTGSYPAGSLLRQSPQPRHTFYAGPRLSASASSKELLMKLRRKTGYSFVNCKKALETCGGDLKQTESCSVAQAGVQWHDVGSLQPPPPGFKRFSCLSLLSSWDYRRAPRHPAILFFIFYFFLYF

SEQ ID NO: 25737 - protein, 1013 aa, Homo sapiens
MGELCRRDSALTALDEETLWEMMESHRHRIVRCICPSRLTPYLRQAKVLCQLDEEEVLHSPRLTNSAMRAGHLLDLLKTRGKNGAIAFLESLKFHNPDVYTLVTGLQPDVDFSNFSGLMETSKLTECLAGAIGSLQEELNQEKGQKEVLLRRCQQLQEHLGLAETRAEGLHQLEADHSRMKREVSAHFHEVLRLKDEMLSLSLHYSNALQEKELAASRCRSLQEELYLLKQELQRANMVSSCELELQEQSLRTASDQESGDEELNRLKEENEKLRSLTFSLAEKDILEQSLDEARGSRQELVERIHSLRERAVAAERQREQYWEEKEQTLLQFQKSKMACQLYREKVNALQAQVCELQKERDQAYSARDSAQREISQSLVEKDSLRRQVFELTDQVCELRTQLRQLQAEPPGVLKQEARTREPCPREKQRLVRMHAICPRDDSDCSLVSSTESQLLSDLSATSSRELVDSFRSSSPAPPSQQSLYKRVAEDFGEEPWSFSSCLEIPEGDPGALPGAKAGDPHLDYELLDTADLPQLESSLQPVSPGRLDVSESGVLMRRRPARRILSQVTMLAFQGDALLEQISVIGGNLTGIFIHRVTPGSAADQMALRPGTQIVMVDYEASEPLFKAVLEDTTLEEAVGLLRRVDGFCCLSVKVNTDGYKRLLQDLEAKVATSGDSFYIRVNLAMEGRAKGELQVHCNEVLHVTDTMFQGCGCWHAHRVNSYTMKDTAAHGTIPNYSRAQQQLIALIQDMTQQCTVTRKPSSGGPQKLVRIVSMDKAKASPLRLSFDRGQLDPSRMEGEAWILSSTGSSTCFWAESCLTLVPYTLVRPHRPARPRPVLLVPRAVGKILSEKLCLLQGFKKCLAEYLSQEEYEAWSQRGDIIQEGEVSGGRCWVTRHAVESLMEKNTHALLDVQLDSVCTLHRMDIFPIVIHVSVNEKMAKKLKKGLQRLGTSEEQLLEAARQEEGDLDRAPCLYSSLAPDGWSDLDGLLSCVRQAIADEQKKVVWTEQSPR

SEQ ID NO: 25738 - protein, 1116 aa, Homo sapiens
MAPKHKSSDAGNLDRPKRSRKVLPLSEKVKVLDLIRKDKKSYAEVAKIYGKNESSIREIVKKEKEIRASFAVSPPTAKVTATVRDKCLVKMEQALHLWVEEMNRKRVPIDSNMLRQKALSLYQDFCKGCSETDTKPFTASKGWLHRFRHRFSHHYKKKKKGIMAQVAVSTLPVEEESSSETRMVVTFLVSALESMCKELAKSKAEVACIAVYETDVFVVGTERGCAFVNARTDFQKDFAKYCVAEGLCEVKPPCPVNGMQVHSGETEILRKAVEDYFCFCYGKALGTTVMVPVPYEKMLRDQSAVVVQGLPEGVAFQHPENYDLATLKWILENKAGISFIINRPFLGPESQLGGPGMVTDAERSIVSPSESCGPINVKTEPMEDSGISLKAEAVSVKKESEDPNYYQYNMQGSHPSSTSNEVIEMELPMEDSTPLVPSEEPNEDPEAEVKIEGNTNSSSVTNSAAGVEDLNIVQVTVPDNEKERLSSIEKIKQLREQVNDLFSRKFGEAIGVDFPVKVPYRKITFNPGCVVIDGMPPGVVFKAPGYLEISSMRRILEAAEFIKFTVIRPLPGLELSNGEYSTVGKRKIDQEGRVFQEKWERAYFFVEVQNIPTCLICKQSMSVSKEYNLRRHYQTNHSKHYDQYTERMRDEKLHELKKGLRKYLLGSSDTECPEQKQVFANPSPTQKSPVQPVEDLAGNLWEKLREKIRSFVAYSIAIDEITDINNTTQLAIFIRGVDENFDVSEELLDTVPMTGTKSGNEIFLRVEKSLKKFCINWSRLVSVASTGTPAMVDANNGLVTKLKSRVATFCKGAELKSICCIIHPESLCAQKLKMDHVMDVVVKSVNWICSRGLNHSEFTTLLYELDSQYGSLLYYTEIKWLSRGLVLKRFFESLEEIDSFMSSRGKPLPQLSSIDWIRDLAFLVDMTMHLNALNISLQGHSQIVTQMYDLIRAFLAKLCLWETHLTRNNLAHFPTLKLVSRNESDGLNYIPKIAELKTEFQKRLSDFKLYESELTLFSSPFSTKIDSVHEELQMEVIDLQCNTVLKTKYDKVGIPEFYKYLWGSYPKYKHHCAKILSMFGSTYICEQLFSIMKLSKTKYCSQLKDSQWDSVLHIAT

SEQ ID NO: 25739 - protein, 625 aa, Homo sapiens
MKDKQKKKKERTWAEAARLVLENYSDAPMTPKQILQVIEAEGLKEMRSGTSPLACLNAMLHSNSRGGEGLFYKLPGRISLFTLKKDALQWSRHPATVEGEEPEDTADVESCGSNEASTVSGENDVSLDETSSNASCSTESQSRPLSNPRDSYRASSQANKQKKKTGVMLPRVVLTPLKVNGAHVESASGFSGCHADGESGSPSSSSSGSLALGSAAIRGQAEVTQDPAPLLRGFRKPATGQMKRNRGEEIDFETPGSILVNTNLRALINSRTFHALPSHFQQQLLFLLPEVDRQVGTDGLLRLSSSALNNEFFTHAAQSWRERLADGEFTHEMQVRIRQEMEKEKKVEQWKEKFFEDYYGQKLGLTKEESLQQNVGQEEAEIKSGLCVPGESVRIQRGPATRQRDGHFKKRSRPDLRTRARRNLYKKQESEQAGVAKDAKSVASDVPLYKDGEAKTDPAGLSSPHLPGTSSAAPDLEGPEFPVESVASRIQAEPDNLARASASPDRIPSLPQETVDQEPKDQKRKSFEQAASASFPEKKPRLEDRQSFRNTIESVHTEKPQPTKEEPKVPPIRIQLSRIKPPWVVKGQPTYQICPRIIPTTESSCRGWTGARTLADIKARALQSH

SEQ ID NO: 25740 - protein, 1487 aa, Homo sapiens
MRILKRFLACIQLLCVCRLDWANGYYRQQRKLVEEIGWSYTGALNQKNWGKKYPTCNSPKQSPINIDEDLTQVNVNLKKLKFQGWDKTSLENTFIHNTGKTVEINLTNDYRVSGGVSEMVFKASKITFHWGKCNMSSDGSEHSLEGQKFPLEMQIYCFDADRFSSFEEAVKGKGKLRALSILFEVGTEENLDFKAIIDGVESVSRFGKQAALDPFILLNLLPNSTDKYYIYNGSLTSPPCTDTVDWIVFKDTVSISESQLAVFCEVLTMQQSGYVMLMDYLQNNFREQQYKFSRQVFSSYTGKEEIHEAVCSSEPENVQADPENYTSLLVTWERPRVVYDTMIEKFAVLYQQLDGEDQTKHEFLTDGYQDLGAILNNLLPNMSYVLQIVAICTNGLYGKYSDQLIVDMPTDNPELDLFPELIGTEEIIKEEEEGKDIEEGAIVNPGRDSATNQIRKKEPQISTTTHYNRIGTKYNEAKTNRSPTRGSEFSGKGDVPNTSLNSTSQPVTKLATEKDISLTSQTVTELPPHTVEGTSASLNDGSKTVLRSPHMNLSGTAESLNTVSITEYEEESLLTSFKLDTGAEDSSGSSPATSAIPFISENISQGYIFSSENPETITYDVLIPESARNASEDSTSSGSEESLKDPSMEGNVWFPSSTDITAQPDVGSGRESFLQTNYTEIRVDESEKTTKSFSAGPVMSQGPSVTDLEMPHYSTFAYFPTEVTPHAFTPSSRQQDLVSTVNVVYSQTTQPVYNEASNSSHESRIGLAEGLESEKKAVIPLVIVSALTFICLVVLVGILIYWRKCFQTAHFYLEDSTSPRVISTPPTPIFPISDDVGAIPIKHFPKHVADLHASSGFTEEFEEVQSCTVDLGITADSSNHPDNKHKNRYINIVAYDHSRVKLAQLAEKDGKLTDYINANYVDGYNRPKAYIAAQGPLKSTAEDFWRMIWEHNVEVIVMITNLVEKGRRKCDQYWPADGSEEYGNFLVTQKSVQVLAYYTVRNFTLRNTKIKKGSQKGRPSGRVVTQYHYTQWPDMGVPEYSLPVLTFVRKAAYAKRHAVGPVVVHCSAGVGRTGTYIVLDSMLQQIQHEGTVNIFGFLKHIRSQRNYLVQTEEQYVFIHDTLVEAILSKETEVLDSHIHAYVNALLIPGPAGKTKLEKQFQGLTLSPRLECRGTISAHCNLPLPGLTDPPTSASRVARTILLSQSNIQQSDYSAALKQCNREKNRTSSIIPVERSRVGISSLSGEGTDYINASYIMGYYQSNEFIITQHPLLHTIKDFWRMIWDHNAQLVVMIPDGQNMAEDEFVYWPNKDEPINCESFKVTLMAEEHKCLSNEEKLIIQDFILEATQDDYVLEVRHFQCPKWPNPDSPISKTFELISVIKEEAANRDGPMIVHDEHGGVTAGTFCALTTLMHQLEKENSVDVYQVAKMINLMRPGVFADIEQYQFLYKVILSLVSTRQEENPSTSLDSNGAALPDGNIAESLESLV

SEQ ID NO: 25741 - protein, 313 aa, Homo sapiens
AQSRPGWLGVAALGLTAVALGAVAWRRAWPTRRRRLLQQVGTVAQLWIYPVKSCKGVPVSEAECTAMGLRSGNLRDRFWLVINQEGNMVTARQEPRLVLISLTCDGDTLTLSAAYTKDLLLPIKTPTTNAVHKCRVHGLEIEGRDCGEATAQWITSFLKSQPYRLVHFEPHMRPRRPHQIADLFRPKDQIAYSDTSPFLILSEASLADLNSRLEKKVKATNFRPNIVISGCDVYAEDSWDELLIGDVELKRVMACSRCILTTVDPDTGVMSRKEPLETLKRSHFPANRWAARRGAPLRPAALGRPVLRISRSH

SEQ ID NO: 25742 - protein, 631 aa, Homo sapiens
MSGFSPELIDYLEGKISFEEFERRREERKTREKKSLQEKGKLSAEENPDDSEVPSSSGINSTKSQDKDVNEGETSDGVRKSVHKVFASMLGENEDDEEEEEEEEEEEEEEETPEQPTAGDVFVLEMVLNRETKKMMKEKRPRSKLPRALRGLMGEANIRFARGEREEAILMCMEIIRQAPLAYEPFSTLAMIYEDQGDMEKSLQFELIAAHLNPSDTEEWVRLAEMSLEQDNIKQAIFCYTKALKYEPTNVRYLWERSSLYEQMGDHKMAMDGYRRILNLLSPSDGERFMQLARDMAKSYYEANDVTSAINIIDEAFSKHQGLVSMEDVNIAAELYISNKQYDKALEIITDFSGIVLEKKTSEEGTSEENKAPENVTCTIPDGVPIDITVKLMVCLVHLNILEPLNPLLTTLVEQNPEDMGDLYLDVAEAFLDVGEYNSALPLLSALVCSERYNLAVVWLRHAECLKALGYMERAAESYGKVVDLAPLHLDARISLSTLQQQLGQPEKALEALEPMYDPDTLAQDANAAQQELKLLLHRSTLLFSQGKMYGYVDTLLTMLAMLLKVAMNRAQVCLISSSKSGERHLYLIKVSRDKISDSNDQESANCDAKGLSKGGFLQRTKEEKEVVKET

SEQ ID NO: 25743 - protein, 877 aa, Homo sapiens
MSSEFLAELHWEDGFAIPVANEENKLLEDQLSKLKDERASLQDELREYEERINSMTSHFKNVKQELSITQSLCKARERETESEEHFKAIAQRELGRVKDEIQRLENEMASILEKKSDKENGIFKATQKLDGLKCQMNWDQQALEAWLEESAHKDSDALTLQKYAQQDDNKIRALTLQLERLTLECNQKRKILDNELTETISAQLELDKAAQDFRKIHNERQELIKQWENTIEQMQKRDGDIDNCALLDSLKATVNRTSSDLEALRKNISKIKKDIHEETARLQKTKNHNEIIQTKLKEITEKTMSVEEKATNLEDMLKEEEKDVKEVDVQLNLIKGVLFKKAQELQTETMKEKAVLSEIEGTRSSLKHLNHQLQKLDFETLKQQEIMYSQDFHIQQVERRMSRLKGEINSEEKQALEAKIVELRKSLEEKKSTCGLLETQIKKLHNDLYFIKKAHSKNSDEKQSLMTKINELNLFIDRSEKELDKAKGFKQDLMIEDNLLKLEVKRTREMLHSKAEEVLSLEKRKQQLYTAMEERTEEIKVHKTMLASQIRYVDQERENISTEFRERLSKIEKLKNRYEILTVVMLPPEGEEEKTQAYYVIKAAQEKEELQREGDCLDAKINKAEKEIYALENTLQVLNSCNNNYKQSFKKVTPSSDEYELKIQLEEQKRAVDEKYRYKQRQIRELQEDIQSMENTLDVIEHLANNVKEKLSEKQAYSFQLSKETEEQKPKLERVTKQCAKLTKEIRLLKDTKDETMEEQDIKLREMKQFHKVIDEMLVDIIEENTEIRIILQTYFQQSGLELPTASTKGSRQSSRSPSHTSLSARSSRSTSTSTSQSSIKVLELKFPASSSLVGSPSRPSSASSSSSNVKSKKSSK

SEQ ID NO: 25744 - protein, 339 aa, Homo sapiens
MVTELLGGDMVNQSFICDPDDETFIKNIIIQDCMWSGFSAAAKLVSEKLASYQAARKDSGSPNPARGHSVCSTSSLYLQDLSAAASECIDPSVVFPYPLNDSSSPKSCASQDSSAFSPSSDSLLSSTESSPQGSPEPLVLHEETPPTTSSDSEEEQEDEEEIDVVSVEKRQAPGKRSESGSPSAGGHSKPPHSPLVLKRCHVSTHQHNYAAPPSTRKDYPAAKRVKLDSVRVLRQISNNRKCTSPRSSDTEENVKRRTHNVLERQRRNELKRSFFALRDQIPELENNEKAPKVVILKKATAYILSVQAEEQKLISEEDLLRKRREQLKHKLEQLRNSCA

SEQ ID NO: 25745 - protein, 149 aa, Homo sapiens
MAWQGLVLAACLLMFPSTTADCLSRCSLCAVKTQDGPKPINPLICSLQCQAALLPSEEWERCQSFLSFFTPSTLGLNDKEDLGSKSVGEGPYSELAKLSGSFLKELEKSKFLPSISTKENTLSKSLEEKLRGLSDGFREGAESELMRDA

SEQ ID NO: 25746 - protein, 624 aa, Homo sapiens
DEDALRTLIDQHKEFMKKLEEKRAELNKATTMGDTVLAICHPDSITTIKHWITIIRARFEEVLAWAKQHQQRLASALAGLIAKQELLEALLAWLQWAETTLTDKDKEVIPQEIEEVKALIAEHQTFMEEMTRKQPDVDKVTKTYKRRAADPSSLQSHIPVLDKGRAGRKRFPASSLYPSGSQTQIETKNPRVNLLVSKWQQVWLLALERRRKLNDALDRLEELREFANFDFDIWRKKYMRWMNHKKSRVMDFFRRIDKDQDGKITRQEFIDGILSSKFPTSRLEMSAVADIFDRDGDGYIDYYEFVAALHPNKDAYKPITDADKIEDEVTRQVAKCKCAKRFQVEQIGDNKYRFGDSQQLRLVRILRSTVMVRVGGGWMALDEFLVKNDPCRAKGRTNMELREKFILADGASQGMAAFRPRGRRSRPSSRGASPNRSTSVSSQAAQAASPQVPATTTPKILHPLTRNYGKPWLTNSKMSTPCKAAECSDFPVPSAEGTPIQGSKLRLPGYLSGKGFHSGEDSGLITTAAARVRTQFADSKKTPSRPGSRAGSKAGSRASSRRGSDASDFDISEIQSVCSDVETVPQTHRPTPRAGSRPSTAKPSKIPTPQRKSPASKLDKSSKR

SEQ ID NO: 25747 - protein, 334 aa, Homo sapiens
MPNVAETERSNDSGNGEHKSERKSPEENLQGAVKSFCTSASGAPLGPKGDGHYPWSCPVTHTREKIYAICSDYAFLNQATSIYKTPNPSRSPCLPDSTSLSAGNNSSRYIGIPTSTSEIIYNEENSLENLSNSLGKLPLAWEIDKSEFDGVTTNSKHKSGNAKKQVSKRKTSDKKGRYQKECPQHSPLEDIKQRKVLDLRRWYCISRPQYKTSCGISSLISCWNFLYSTMGAGNLPPITQEEALHILGFQPPFEDIRFGPFTGNTTLMRWFRQINDHFHVKGCSYVLYKPHGKNKTAGETGCAKPFSGPKDFYGHSPVIRSFRGPVKVNPWIER

SEQ ID NO: 25748 - protein, 822 aa, Homo sapiens
MATPRGRTKKKASFDHSPDSLPLRSSGRQAKKKATETTDEDEDGGSEKKYRKCEKAGCTATCPVCFASASERCAKNGYTSRWYHLSCGEHFCNECFDHYYRSHKDGYDKYTTWKKIWTSNGKTEPSPKAFMADQQLPYWVQCTKPECRKWRQLTKEIQLTPQIAKTYRCGMKPNTAIKPETSDHCSLPEDLRVLEVSNHWWYSMLILPPLLKDSVAAPLLSAYYPDCVGMSPSCTSTNRAAATGNASPGKLEHSKAALSVHVPGMNRYFQPFYQPNECGKALCVRPDVMELDELYEFPEYSRDPTMYLALRNLILALWYTNCKEALTPQKCIPHIIVRGLVRIRCVQEVERILYFMTRKGLINTGVLSVGADQYLLPKDYHNKSVIIIGAGPAGLAAARQLHNFGIKVTVLEAKDRIGGRVWDDKSFKGVTVGRGAQIVNGCINNPVALMCEQLGISMHKFGERCDLIQEGGRITDPTIDKRMDFHFNALLDVVSEWRKDKTQLQDVPLGEKIEEIYKAFIKESGIQFSELEGQVLQFHLSNLEYACGSNLHQVSARSWDHNEFFAQFAGDHTLLTPGYSVIIEKLAEGLDIQLKSPVQCIDYSGDEVQVTTTDGTGYSAQKVLVTVPLALLQKGAIQFNPPLSEKKMKAINSLGAGIIEKIALQFPYRFWDSKVQGADFFGHVPPSASKRGLFAVFYDMDPQKKHSVLMSVIAGEAVASVRTLDDKQVLQQCMATLRELFKEQEVPDPTKYFVTRWSTDPWIQMAYSFVKTGGSGEAYDIIAEDIQGTVFFAGEATNRHFPQTVTGAYLSGVREASKIAAF

SEQ ID NO: 25749 - protein, 548 aa, Homo sapiens
MAVMDLSSPWALTKQDSACFHLRNAEEERMIAVFLTTWLQEPMTFKDVAVEFTQEEWMMLDSAQRSLYRDVMLENYRNLTSVEYQLYRLTVISPLDQEEIRNMKKRIPQAICPDQKIQPKTKESTVQKILWEEPSNAVKMIKLTMHNWSSTLREDWECHKIRKQHKIPGGHWRQMIYAPKKTVPQELFRDYHELEENSKLGSKLIFSQSIFTSKHCQKCYSEIGCLKHNSIINNYVKNSISEKLYESHECDTTLWHFQRNQTVQKEYTYSKHGMHFTHNMFPVPNNLHMAQNACECNKDETLCHQSSLKKQGQTHTEKKHECNQCGKAFKRISNLTLYKKSHMGEKQYECKECGKVFNDSSTLRRHVRTHTGEKPYECNQCGKAFSQKTSLKAHMRTHTGEKPYECNQCGKSFGTSSYLIVHKRIHTGEKLYECSECGKAFNTSSHLKVHKKIHTGENVYECSDCGKVFSGVSSLRMHIRTHTGEKPYECKECRKAFSVSSSLRRHVRIHTGEKPYECIQCGKAFSQSSSLIIHKRIHTERETLNLHT

SEQ ID NO: 25750 - protein, 2720 aa, Homo sapiens
MEPALGPGVQKDLGYLQQWLKAFVGAFKKSISLSSLEPRRPEEAGAEVPLLPLDELHVLAEQLHQADLEQALLLLKLFIILCRNLENIEAGRGQVLVPRVLALLTKLVAELKGCPPPQGRGTQLENVALHALLLCEGLFDPYQTWRRQRSGEVISSKEKSKYKFPPAALPQEFSAFFQESLQNADHLPPILLLRLIHLFCAVLAGGKENGQMAVSDGSVKGLLSVVRGWSRGPAPDPCLVPLALEALVGAVHVLHASRAPPRGPELRALLESYFHVLNADWPAGLSSGPEEALVTLRVSMLDAIPMMLACEDRPVLQATFLSNNCFEHLTRLIQNSKVLDQDTDAIAVHVVRVLTCIMSDSPSAKEVFKERIGYPHLQEVLQSHGPPTHRLLQELLNMAVEGDHSMCPPPPIRNEQPVLVLAQWLPSLPTAELRLFLAQRLRWLCDSCPASRATCVQAGLVGCLLETLSTGLALEARCQEQLLALLQALGRVSIRPMELRHLLRPRPGLDSEPGGAEAGKARHAGAVIRTLSGMARHQGPARALRYFDLTPSMAGIMVPPVQRWPGPGFTFHAWLCLHPMDTAPTPAPTRPLQRKQLYSFFTSSGSGFEAFFTAAGTLVVAVCTRKEYLTMSLPEVSFADSAWHCVAIVHVPGRRPFSQNLVHVYKDGHLVKTAPLRCPSLSEPFSSCCIGSAGYRTTTTTTGLPTPPVPATLAYTHPALTRSQSVPASTGLGWGSGLVAPLQEGSIDSTLAGTQDTRWGSPTSLEGELGAVAIFHEALQATALRTLCTLGPNETAPFKPEGELHELSTRLLLHYSPQACKNNICLDLSPSHGLDGRLTGHRVETWDVKDVVNCVGGMGALLPLLERVAAQPKEAEAGPAETHDLVGPELTSGHNTQGLVLPLGKSSEERMERNAVAAFLLMLRNFLQGHMVNQESLVQCQGPAIIGALLRKVPSWAMDMNVLMSAQLLMEQVAAEGSGPLLYLLYQHLLFNFHLWTLSDFAVRLGHIQYMSSIVREHRQKLRKKYGVQFILDALRTHYSPQRERPLAADDLRTVQTSLLGLAREFLVRSLSADDVQVTQTMLSFLAATGDDGQAVGALDLLLALLHGSLVQESLAVFLLEPGNLEVLLALLVRPGSLPLLPDRVCKILRRLQQNERLPERSRQRLRLRECGLQGLVACLPEGTVSPQLCQGLYKLFLGADCLNLSDLLAVVQLSLQADLSVRLDICRQLFHLIYGQPDVVRLLARQAGWQDVLTRLYVLEAATAGSPPPSSPESPTSPKPAPPKPPTESPAEPSDVFLPSEAPCPDPDGFYHALSPFCTPFDLGLERSSVGSGNTAGGGGSSGTLTPASQPGTPSPLDGPRPFPAAPGRHSSSLSNVLEDGSLPEPTISGDDTSNTSNPQQTSEEELCNLLTNVLFSVTWRGVEGSDEAAWRERGQVFSVLTQLGASATLVRPPDCIKRSLLEMMLESALTDIKEAPVGVLASLTQQALWLLRLLQDFLCAEGHGNQELWSEKLFEGVCSLLDRLGAWPHLANGTADLREMAQIGLRLVLGYILLEDPQLHAQAYVRLHMLLQTAVPARREEACYVLSKLEAALGRVLNTSSLESATDEAGSPLAAAAAAAAAERCSWLVPLVRTLLDRAYEPLGLQWGLPSLPPTNGSPTFFEDFQAFCATPEWRHFIDKQVQPTMSQFEMDTYAKSHDLMSGFWNACYDMLMSSGQRRQWERAQSRRAFQELVLEPAQRRARLEGLRYTAVLKQQATQHSMALLHWGALWRQLASPCGAWALRDTPIPRWKLSSAETYSRMRLKLVPNHHFDPHLEASALRDNLGEVPLTPTEEASLPLAVTKEAKVSTPPELLQEDQLGEDELAELETPMEAAELDEQREKLVLSAECQLVTVVAVVPGLLEVTTQNVYFYDGSTERVETEEGIGYDFRRPLAQLREVHLRRFNLRRSALELFFIDQANYFLNFPCKVGTTPVSSPSQTPRPQPGPIPPHTQVRNQVYSWLLRLRPPSQGYLSSRSPQEMLRASGLTQKWVQREISNFEYLMQLNTIAGRTYNDLSQYPVFPWVLQDYVSPTLDLSNPAVFRDLSKPIGVVNPKHAQLVREKYESFEDPAGTIDKFHYGTHYSNAAGVMHYLIRVEPFTSLHVQLQSGRFDCSDRQFHSVAAAWQARLESPADVKELIPEFFYFPDFLENQNGFDLGCLQLTNEKVGDVVLPPWASSPEDFIQQHRQALESEYVSAHLHEWIDLIFGYKQRGPAAEEALNVFYYCTYEGAVDLDHVTDERERKALEGIISNFGQTPCQLLKEPHPTRLSAEEAAHRLARLDTNSPSIFQHLDELKAFFAEVVSDGVPLVLALVPHRQPHSFITQGSPDLLVTVSASGLLGTHSWLPYDRNISNYFSFSKDPTMGSHKTQRLLSGPWVPGSGVSGQALAVAPDGKLLFSGGHWDGSLRVTALPRGKLLSQLSCHLDVVTCLALDTCGIYLISGSRDTTCMVWRLLHQGGLSVGLAPKPVQVLYGHGAAVSCVAISTELDMAVSGSEDGTVIIHTVRRGQFVAALRPLGATFPGPIFHLALGSEGQIVVQSSAWERPGAQVTYSLHLYSVNGKLRASLPLAEQPTALTVTEDFVLLGTAQCALHILQLNTLLPAAPPLPMKVAIRSVAVTKERSHVLVGLEDGKLIVVVAGQPSEVRSSQFARKLWRSSRRISQVSSGETEYNPTEAR

SEQ ID NO: 25751 - protein, 1380 aa, Homo sapiens
MSGKRSRVRKPRARRAGRAQPAAGQQGPEVEPPPPTPGGPQGEAGVAPTGHVTSIEPAPQGHPRVARPEQPQAASRPVPATAPGSELVLVLAGHMEGCGAGDPMPALGPELLRLHEVQLCLAQEQLLLEDRWRQVQLQMQLWREEQLWLQQLQEEQLWLQQLQEEQAWVHVEGLQLAVALEQLRSEGFEALQTQGQAPGPNMARRSQSSSQGDNPLAPGYLPPHYKEYYRLAVDALAEGGSEAYSRFLATEGAPDFLCPEELEHVSRHLRPPQYVTREPPEGSLLDVDMDGSSGTYWPVNSDQAVPELDLGWPLTFGFQGTEVTTLVQPPPPDSPSIKDEARRMIRSAQQVVAVVMDMFTDVDLLSEVLEAAARRVPVYILLDEMNAQHFLDMADKCRVNLQHVDFLRVRTVAGPTYYCRTGKSFKGHVKEKFLLVDCAVVMSGSYSFMWSFEKIHRSLAHVFQGELVSSFDEEFRILFAQSEPLVPSAAALARMDAYALAPYAGAGPLVGVPGVGAPTPFSFPKRAHLLFPPPREEGLGFPSFLDPDRHFLSAFRREEPPRMPGGALEPHAGLRPLSRRLEAEAGPAGELAGARGFFQARHLEMDAFKRHSFATEGAGAVENFAAARQVSRQTFLSHGDDFRFQTSHFHRDQLYQQQYQWDPQLTPARPQGLFEKLRGGRAGFADPDDFTLGAGPRFPELGPDGHQRLDYVPSSASREVRHGSDPAFAPGPRGLEPSGAPRPNLTQRFPCQAAARPGPDPAPEAEPERRGGPEGRAGLRRWRLASYLSGCHGEDGGDDGLPAPMEAEAYEDDVLAPGGRAPAGDLLPSAFRVPAAFPTKVPVPGPGSGGNGPEREGPEEPGLAKQDSFRSRLNPLVQRSSRLRSSLIFSTSQAEGAAGAAAATEKVQLLHKEQTVSETLGPGGEAVRSAASTKVAELLEKYKGPARDPGGGAGAITVASHSKAVVSQAWREEVAAPGAVGGERRSLESCLLDLRDSFAQQLHQEAERQPGAASLTAAQLLDTLGRSGSDRLPSRFLSAQSHSTSPQGLDSPLPLEGSGAHQVLHNESKGSPTSAYPERKGSPTPGFSTRRGSPTTGFIEQKGSPTSAYPERRGSPVPPVPERRSSPVPPVPERRGSLTLTISGESPKAGPAEEGPSGPMEVLRKGSLRLRQLLSPKGERRMEDEGGFPVPQENGQPESPRRLSLGQGDSTEAATEERGPRARLSSATANALYSSNLRDDTKAILEQISAHGQKHRAVPAPSPGPTHNSPELGRPPAAGVLAPDMSDKDKCSAIFRSDSLGTQGRLSRTLPASAEERDRLLRRMESMRKEKRVYSRFEVFCKKEEASSPGAGEGPAEEGTRDSKVGKFVPKILGTFKSKK

SEQ ID NO: 25752 - protein, 1550 aa, Homo sapiens
MDPSAPQPRAETSGKDIWHPGERCLAPSPDNGKLCEASIKSITVDENGKSFAVVLYADFQERKIPLKQLQEVKFVKDCPRNLIFDDEDLEKPYFPNRKFPSSSVAFKLSDNGDSIPYTINRYLRDYQREGTRFLYGHYIHGGGCILGDDMGLGKTVQVISFLAAVLHKKGTREDIENNMPEFLLRSMKKEPLSSTAKKMFLIVAPLSVLYNWKDELDTWGYFRVTVLHGNRKDNELIRVKQRKCEIALTTYETLRLCLDELNSLEWSAVIVDEAHRIKNPKARVTEVMKALKCNVRIGLTGTILQNNMKELWCVMDWAVPGLLGSGTYFKKQFSDPVEHGQRHTATKRELATGRKAMQRLAKKMSGWFLRRTKTLIKDQLPKKEDRMVYCSLTDFQKAVYQTVLETEDVTLILQSSEPCTCRSGQKRRNCCYKTNSHGETVKTLYLSYLTVLQKVANHVALLQAASTSKQQETLIKRICDQVFSRFPDFVQKSKDAAFETLSDPKYSGKMKVLQQLLNHCRKNRDKVLLFSFSTKLLDVLQQYCMASGLDYRRLDGSTKSEERLKIVKEFNSTQDVNICLVSTMAGGLGLNFVGANVVVLFDPTWNPANDLQAIDRAYRIGQCRDVKVLRLISLGTVEEIMYLRQIYKQQLHCVVVGSENAKRYFEAVQGSKEHQGELFGIHNLFKFRSQGSCLTKDILEREGQVEAGIMTATTWLKEGPPAHKLEMPRQPDCQECRGTEQAAEPLAKEACDLCSDFSDEEPVGATGIKTAKNKAPDSSKASSSPGQLTLLQCGFSKLLETKCKAVEDSDGNTASDDESSDEQPTCLSTEAKDAGCEKNQDSLGTSKHQKLDNILNPKEKHIFYKSEKILEQNISSKSDEKKIKNTDKHCILQNVTESEDSDVICPTQYTTERFPDNSIRFKPPLEGSEDSETEHTVKTRNNDNSRNTDDKRNGIISKKLSPENTTLKSILKRKGTSDISDESDDIEISSKSRVRKRASSLRFKRIKETKKELHNSPKTMNKTNQVYAANEDHNSQFIDDYSSSDESLSVSHFSFSKQSHRPRTIRDRTSFSSKLPSHNKKNSTFIPRKPMKCSNEKVVNQEQSYESMDKFLDGVQEVAYIHSNQNVIGSSKAENHMSRWAAHDVFELKQFSQLPANIAVCSSKTYKEKVDADTLPHTKKGQQPSEGSISLPLYISNPVNQKKKKVYHTNQTTFIIGETPKGIRRKQFEEMASYFNSSSVNEFAKHITNATSEERQKMLRDFYASQYPEVKEFFVDSVSQFNNSSFEKGEQRTRKKSDKRESLIKPRLSDSETLSFKDSTNKISQVCSLKTYKRKSVKFQNHISYREEVFFNDAETKKSPVSSTQEIDSGKNSQASEDTVTSRSLNSESETRERRLENTMKDQQDLTRTGISRKEPLLKLENKKIENPVLENTSVISLLGDTSILDDLFKSHGNSPTQLPKKVLSGPMEKAKQRPKDFWDILNEQNDESLSKLTDLAVIETLCEKAPLAAPFKRREEPATSLWKSNEKFLWKKFSPSDTDENATNTQSTT

SEQ ID NO: 25753 - protein, 990 aa, Homo sapiens
MSKRGMSSRAKGDKAEALAALQAANEDLRAKLTDIQIELQQEKSKVSKVEREKNQELRQVREHEQHKTAVLLTELKTKLHEEKMKELQAVRETLLRQHEAELLRVIKIKDNENQRLQALLSALRDGGPEKVKTVLLSEAKEEAKKGFEVEKVKMQQEISELKGAKRQVEEALTLVIQADKIKAAEIRSVYHLHQEEITRIKKECEREIRRLMEEIKFKDRAVFVLERELGVQAGHAQRLQLQKEALDEQLSQVREADRHPGSPRRELPHAAGAGDASDHSGSPEQQLDEKDARRFQLKIAELSAIIRKLEDRNALLSEERNELLKRVREAESQYKPLLDKNKRLSRKNEDLSHALRRMENKLKFVTQENIEMRQRAGIIRRPSSLNDLDQSQDEREVDFLKLQIVEQQNLIDELSKTLETAGYVKSVLERDKLLRFRKQRKKMAKLPKPVVVETFFGYDEEASLESDGSSVSYQTDRTDQTPCTPDDDLEEGMAKEETELRFRQLTMEYQALQRAYALLQEQVGGTLDAEREVKTREQLQAEVQRAQARIEDLEKALAEQGQDMKWIEEKQALYRRNQELVEKIKQMETEEARLRHEVQDARDQNELLEFRILELEERERKSPAISFHHTPFVDGKSPLQVYCEAEGVTDIVVAELMKKLDILGDNAVSNLTNEEQVVVIQARTVLTLAEKWLQQIEETEAALQRKMVDLESEKELFSKQKGYLDEELDYRKQALDQANKHILELEAMLYDALQQEAGAKVAELLSEEEREKLKVAVEQWKRQVMSELRERDAQILRERMELLQLAQQRIKELEERIEAQKRQIKELEEKLSFSGHSPSWHPDVPHIESDPFPPVGPESRDKMGRRVSILKTQGDLVSARPSRGGRVRRGSVWGVELPSTWDVPELELALPTSRGLLRDGPGLGCWTLGPFSRTAAPIPFPGMCSIPCQAGVRTASVQKHQPRVPSSLLVLTVAATGVWRKIFRNNRGLA

SEQ ID NO: 25754 - protein, 2192 aa, Homo sapiens
MEIIEEIQCQTQQENLSSNSDGISPKRRRLSSSLNPSKRAPKQTEEIKHVDMNQKSILWSALKQKAESLQISLEYSGLKNPVIEMLEGIAVVLQLTALCTVHCSHQNMNCRTFKDCQHKSKKKPSVVITWMSLDFYTKVLKSCRSLLESVQKLDLEATIDKVVKIYDALIYMQVNSSFEDHILEDLCGMLSLPWIYSHSDDGCLKLTTFAANLLTLSCRISDSYSPQAQSRCVFLLTLFPRRIFLEWRTAVYNWALQSSHEVIRASCVSGFFILLQQQNSCNRVPKILIDKVKDDSDIVKKEFASILGQLVCTLHGMFYLTSSLTEPFSEHGHVDLFCRNLKATSQHECSSSQLKASVCKPFLFLLKKKIPSPVKLAFIDNLHHLCKHLDFREDETDVKAVLGTLLNLMEDPDKDVRVAFSGNIKHILESLDSEDGFIKELFVLRMKEAYTHAQISRNNELKDTLILTTGDIGRAAKGDLVPFALLHLLHCLLSKSASVSGAAYTEIRALVAAKSVKLQSFFSQYKKPICQFLVESLHSSQMTALPNTPCQNADVRKQDVAHQREMALNTLSEIANVFDFPDLNRFLTRTLQVLLPDLAAKASPAASALIRTLGKQLNVNRREILINNFKYIFSHLVCSCSKDELERALHYLKNETEIELGSLLRQDFQGLHNELLLRIGEHYQQVFNGLSILASFASSDDPYQGPRDIISPELMADYLQPKLLGILAFFNMQLLSSSVGIEDKKMALNSLMSLMKLMGPKHVSSVRVKMMTTLRTGLRFKDDFPELCCRAWDCFVRCLDHACLGSLLSHVIVALLPLIHIQPKETAAIFHYLIIENRDAVQDFLHEIYFLPDHPELKKIKAVLQEYRKETSESTDLQTTLQLSMKAIQHENVDVRIHALTSLKETLYKNQEKLIKYATDSETVEPIISQLVTVLLKGCQDANSQARLLCGECLGELGAIDPGRLDFSTTETQGKDFTFVTGVEDSSFAYGLLMELTRAYLAYADNSRAQDSAAYAIQELLSIYDCREMETNGPGHQLWRRFPEHVREILEPHLNTRYKSSQKSTDWSGVKKPIYLSKLGSNFAEWSASWAGYLITKVRHDLASKIFTCCSIMMKHDFKVTIYLLPHILVYVLLGCNQEDQQEVYAEIMAVLKHDDQHTINTQDIASDLCQLSTQTVFSMLDHLTQWARHKFQALKAEKCPHSKSNRNKVDSMVSTVDYEDYQSVTRFLDLIPQDTLAVASFRSKAYTRAVMHFESFITEKKQNIQEHLGFLQKLYAAMHEPDGVAGVSAIRKAEPSLKEQILEHESLGLLRDATACYDRAIQLEPDQIIHYHGVVKSMLGLGQLSTVITQVNGVHANRSEWTDELNTYRVEAAWKLSQWDLVENYLAADGKSTTWSVRLGQLLLSAKKRDITAFYDSLKLVRAEQIVPLSAASFERGSYQRGYEYIVRLHMLCELEHSIKPLFQHSPGDSSQEDSLNWVARLEMTQNSYRAKEPILALRRALLSLNKRPDYNEMVGECWLQSARVARKAGHHQTAYNALLNAGESRLAELYVERAKWLWSKGDVHQALIVLQKGVELCFPENETPPEGKNMLIHGRAMLLVGRFMEETANFESNAIMKKYKDVTACLPEWEDGHFYLAKYYDKLMPMVTDNKMEKQGDLIRYIVLHFGRSLQYGNQFIYQSMPRMLTLWLDYGTKAYEWEKAGRSDRVQMRNDLGKINKVITEHTNYLAPYQFLTAFSQLISRICHSHDEVFVVLMEIIAKVFLAYPQQAMWMMTAVSKSSYPMRVNRCKEILNKAIHMKKSLEKFVGDATRLTDKLLELCNKPVDGSSSTLSMSTHFKMLKKLVEEATFSEILIPLQSVMIPTLPSILGTHANHASHEPFPGHWAYIAGFDDMVEILASLQKPKKISLKGSDGKFYIMMCKPKDDLRKDCRLMEFNSLINKCLRKDAESRRRELHIRTYAVIPLNDECGIIEWVNNTAGLRPILTKLYKEKGVYMTGKELRQCMLPKSAALSEKLKVFREFLLPRHPPIFHEWFLRTFPDPTSWYSSRSAYCRSTAVMSMVGYILGLGDRHGENILFDSLTGECVHVDFNCLFNKGETFEVPEIVPFRLTHNMVNGMGPMGTEGLFRRACEVTMRLMRDQREPLMSVLKTFLHDPLVEWSKPVKGHSKAPLNETGEVVNEKMASSSNSFK

SEQ ID NO: 25755 - protein, 770 aa, Homo sapiens
MSKRGMSSRAKGDKAEALAALQAANEDLRAKLTDIQIELQQEKSKVSKVEREKNQELRQVREHEQHKTAVLLTELKTKLHEEKMKELQAVRETLLRQHEAELLRVIKIKDNENQRLQALLSALRDGGPEKVKTVLLSEAKEEAKKGFEVEKVKMQQEISELKGAKRQVEEALTLVIQADKIKAAEIRSVYHLHQEEITRIKKECEREIRRLQLDEKDARRFQLKIAELSAIIRKLEDRNALLSEERNELLKRVREAESQYKPLLDKNKRLSRKNEDLSHALRRMENKLKFVTQENIEMRQRAGIIRRPSSLNDLDQSQDEREVDFLKLQIVEQQNLIDELSKTLETAGYVKSVLERDKLLRFRKQRKKMAKLPKPVVVETFFGYDEEASLESDGSSVSYQTDRTDQTPCTPDDDLEEGMAKEETELRFRQLTMEYQALQRAYALLQEQVGGTLDAEREVKTREQLQAEVQRAQARIEDLEKALAEQGQDMKWIEEKQALYRRNQELVEKIKQMETEEARLRHEVQDARDQNELLEFRILELEERERKSPAISFHHTPFVDGKSPLQVYCEAEGVTDIVVAELMKKLDILGDNANLTNEEQVVVIQARTVLTLAEKWLQQIEETEAALQRKMVDLESEKELFSKQKGYLDEELDYRKQALDQANKHILELEAMLYDALQQEAGAKVAELLSEEEREKLKVAVEQWKRQVMSELRERDAQILRERMELLQLAQQRIKELEERIEAQKRQIKELEEKFLFLFLFFSLAFILWS

SEQ ID NO: 25756 - protein, 645 aa, Homo sapiens
MGFSGNGVTICEDDNECGNLTQSCGENANCTNTEGSYYCMCVPGFRSSSNQDRFITNDGTVCIENVNANCHLDNVCIAANINKTLTKIRSIKEPVALLQEVYRNSVTDLSPTDIITYIEILAESSSLLGYKNNTISAKDTLSNSTLTEFVKTVNNFVQRDTFVVWDKLSVNHRRTHLTKLMHTVEQATLRISQSFQKTTEFDTNSTDIALKVFFFDSYNMKHIHPHMNMDGDYINIFPKRKAAYDSNGNVAVAFVYYKSIGPLLSSSDNFLLKPQNYDNSEEEERVISSVISVSMSSNPPTLYELEKITFTLSHRKVTDRYRSLCAFWNYSPDTMNGSWSSEGCELTYSNETHTSCRCNHLTHFAILMSSGPSIGIKDYNILTRITQLGIIISLICLAICIFTFWFFSEIQSTRTTIHKNLCCSLFLAELVFLVGINTNTNKLFCSIIAGLLHYFFLAAFAWMCIEGIHLYLIVVGVIYNKGFLHKNFYIFGYLSPAVVVGFSAALGYRYYGTTKVCWLSTENNFIWSFIGPACLIILVNLLAFGVIIYKVFRHTAGLKPEVSCFENIRSCARGALALLFLLGTTWIFGVLHVVHASVVTAYLFTVSNAFQGMFIFLFLCVLSRKIQEEYYRLFKNVPCCFGCLR

SEQ ID NO: 25757 - protein, 875 aa, Homo sapiens
MPVRKQDTQRALHLLEEYRSKLSQTEDRQLRSSIERVINIFQSNLFQALIDIQEFYEVTLLDNPKCIDRSKPSEPIQPVNTWEISSLPSSTVTSETLPSSLSPSVEKYRYQDEDTPPQEHISPQITNEVIGPELVHVSEKNLSEIENVHGFVSHSHISPIKVNGTDADYEYEEITLERGNSGLGFSIAGGTDNPHIGDDSSIFITKIITGGAAAQDGRLRVNDCILRVNEVDVRDVTHSKAVEALKEAGSIVRLYVKRRKPVSEKIMEIKLIKGPKGLGFSIAGGVGNQHIPGDNSIYVTKIIEGGAAHKDGKLQIGDKLLAVNNVCLEEVTHEEAVTALKNTSDFVYLKVAKPTSMYMNDGYAPPDITNSSSQPVDNHVSPSSFLGQTPASPARYSPVSKAVLGDDEITREPRKVVLHRGSTGLGFNIVGGEDGEGIFISFILAGGPADLSGELRKGDRIISVNSVDLRAASHEQAAAALKNAGQAVTIVAQYRPEEYSRFEAKIHDLREQMMNSSISSGSGSLRTSQKRSLYVRALFDYDKTKDSGLPSQGLNFKFGDILHVINASDDEWWQARQVTPDGESDEVGVIPSKRRVEKKERARLKTVKFNSKTRDKGQSFNDKRKKNLFSRKFPFYKNKDQSEQETSDADQHVTSNASDSESSYRGQEEYVLSYEPVNQQEVNYTRPVIILGPMKDRINDDLISEFPDKFGSCVPHTTRPKRDYEVDGRDYHFVTSREQMEKDIQEHKFIEAGQYNNHLYGTSVQSVREVAEKGKHCILDVSGNAIKRLQIAQLYPISIFIKPKSMENIMEMNKRLTEEQARKTFERAMKLEQEFTEHFTAIVQGDTLEDIYNQVKQIIEEQSGSYIWVPAKEKL

SEQ ID NO: 25758 - protein, 755 aa, Homo sapiens
LHQEEITRIKKECEREIRRLMEEIKFKDRAVFVLERELGVQAGHAQRLQLQKEALDEQLSQVREADRHPGSPRRELPHAAGAGDASDHSGSPEQQLDEKDARRFQLKIAELSAIIRKLEDRNALLSEERNELLKRVREAESQYKPLLDKNKRLSRKNEDLSHALRRMENKLKFVTQENIEMRQRAGIIRRPSSLNDLDQSQDEREVDFLKLQIVEQQNLIDELSKTLETAGYVKSVLERDKLLRFRKQRKKMAKLPKPVVVETFFGYDEEASLESDGSSVSYQTDRTDQTPCTPDDDLEEGMAKEETELRFRQLTMEYQALQRAYALLQEQVGGTLDAERETREQLQAEVQRAQARIEDLEKALAEQGQDMKWIEEKQALYRRNQELVEKIKQMETEEARLRHEVQDARDQNELLEFRILELEERERKSPAISFHHTPFVDGKSPLQVYCEAEGVTDIVVAELMKKLDILGDNANLTNEEQVVVIQARTVLTLAEKWLQQIEETEAALQRKMVDLESEKELFSKQKGYLDEELDYRKQALDQANKHILELEAMLYDALQQEAGAKVAELLSEEEREKLKVAVEQWKRQVMSELRERDAQILRERMELLQLAQQRIKELEERIEAQKRQIKELEEKLSFSGHSPSWHPDVPHIESDPFPPVGPESRDKMGRRVSILKTQGDLVSARPSRGGRVRRGSVWGVELPSTWDVPELELALPTSRGLLRDGPGLGCWTLGPFSRTAAPIPFPGMCSIPCQA

SEQ ID NO: 25759 - protein, 3010 aa, Homo sapiens
MDQPQFSGAPRFLTRPKAFVVSVGKDATLSCQIVGNPTPQVSWEKDQQPVAAGARFRLAQDGDLYRLTILDLALGDSGQYVCRARNAIGEAFAAVGLQVDAEAACAEQAPHFLLRPTSIRVREGSEATFRCRVGGSPRPAVSWSKDGRRLGEPDGPRVRVEELGEASALRIRAARPRDGGTYEVRAENPLGAASAAAALVVDSDAADTASRPGTSTAALLAHLQRRREAMRAEGAPASPPSTGTRTCTVTEGKHARLSCYVTGEPKPETVWKKDGQLVTEGRRHVVYEDAQENFVLKILFCKQSDRGLYTCTASNLVGQTYSSVLVVVREPAVPFKKRLQDLEVREKESATFLCEVPQPSTEAAWFKEETRLWASAKYGIEEEGTERRLTVRNVSADDDAVYICETPEGSRTVAELAVQGNLLRKLPRKTAVRVGDTAMFCVELAVPVGPVHWLRNQEEVVAGGRVAISAEGTRHTLTISQCCLEDVGQVAFMAGDCQTSTQFCVSAPRKPPLQPPVDPVVKARMESSVILSWSPPPHGERPVTIDGYLVEKKKLGTYTWIRCHEAEWVATPELTVADVAEEGNFQFRVSALNSFGQSPYLEFPGTVHLAPKLAVRTPLKAVQAVEGGEVTFSVDLTVASAGEWFLDGQALKASSVYEIHCDRTRHTLTIREVPASLHGAQLKFVANGIESSIRMEVRAAPGLTANKPPAAAAREVLARLHEEAQLLAELSDQAAAVTWLKDGRTLSPGPKYEVQASAGRRVLLVRDVARDDAGLYECVSRGGRIAYQLSVQGLARFLHKDMAGSCVDAVAGGPAQFECETSEAHVHVHWYKDGMELGHSGERFLQEDVGTRHRLVAATVTRQDEGTYSCRVGEDSVDFRLRVSEPKVVFAKEQLARRKLQAEAGASATLSCEVAQAQTEVTWYKDGKKLSSSSKVCMEATGCTRRLVVQQAGQADAGEYSCEAGGQRLSFHLDVKEPKVVFAKDQVAHSEVQAEAGASATLSCEVAQAQTEVMWYKDGKKLSSSLKVHVEAKGCRRRLVVQQAGKTDAGDYSCEARGQRVSFRLHITEPKMMFAKEQSVHNEVQAEAGASAMLSCEVAQAQTEVTWYKDGKKLSSSSKVGMEVKGCTRRLVLPQAGKADAGEYSCEAGGQRVSFHLHITEPKGVFAKEQSVHNEVQAEAGTTAMLSCEVAQPQTEVTWYKDGKKLSSSSKVRMEVKGCTRRLVVQQVGKADAGEYSCEAGGQRVSFQLHITEPKAVFAKEQLVHNEVRTEAGASATLSCEVAQAQTEVTWYKDGKKLSSSSKVRIEAAGCMRQLVVQQAGQADAGEYTCEAGGQRLSFHLDVSEPKAVFAKEQLAHRKVQAEAGAIATLSCEVAQAQTEVTWYKDGKKLSSSSKVRMEAVGCTRRLVVQQACQADTGEYSCEAGGQRLSFSLDVAEPKVVFAKEQPVHREVQAQAGASTTLSCEVAQAQTEVMWYKDGKKLSFSSKVRMEAVGCTRRLVVQQAGQAVAGEYSCEAGSQRLSFHLHVAEPKAVFAKEQPASREVQAEAGTSATLSCEVAQAQTEVTWYKDGKKLSSSSKVRMEAVGCTRRLVVQEAGQADAGEYSCKAGDQRLSFHLHVAEPKVVFAKEQPAHREVQAEAGASATLSCEVAQAQTEVTWYKDGKKLSSSSKVRVEAVGCTRRLVVQQAGQAEAGEYSCEAGGQQLSFRLQVAELEPQISERPCRREPLVVKEHEDIILTATLATPSAATVTWLKDGVEIRRSKRHETASQGDTHTLTVHGAQVLDSAIYSCRVGAEGQDFPVQVEEVAAKFCRLLEPVCGELGGTVTLACELSPACAEVVWRCGNTQLRVGKRFQMVAEGPVRSLTVLGLRAEDAGEYVCESRDDHTSAQLTVSVPRVVKFMSGLSTVVAEEGGEATFQCVVSPSDVAVVWFRDGALLQPSEKFAISQSGASHSLTISDLVLEDAGQITVEAEGASSSAALRVREAPVLFKKKLEPQTVEERSSVTLEVELTRPWPELRWTRNATALAPGKNVEIHAEGARHRLVLHNVGFADRGFFGCETPDDKTQAKLTVEMRQVRLVRGLQAVEAREQGTATMEVQLSHADVDGSWTRDGLRFQQGPTCHLAVRGPMHTLTLSGLRPEDSGLMVFKAEGVHTSARLVVTELPVSFSRPLQDVVTTEKEKVTLECELSRPNVDVRWLKDGVELRAGKTMAIAAQGACRSLTIYRCEFADQGVYVCDAHDAQSSASVKVQGRTYTLIYRRVLAEDAGEIQFVAENAESRAQLRVKELPVTLVRPLRDKIAMEKHRGVLECQVSRASAQVRWFKGSQELQPGPKYELVSDGLYRKLIISDVHAEDEDTYTCDAGDVKTSAQFFVEEQSITIVRGLQDVTVMEPAPAWFECETSIPSVRPPKWLLGKTVLQAGGNVGLEQEGTVHRLMLRRTCSTMTGPVHFTVGKSRSSARLVVSDIPVVLTRPLEPKTGRELQSVVLSCDFRPAPKAVQWYKDDTPLSPSEKFKMSLEGQMAELRILRLMPADAGVYRCQAGSAHSSTEVTVEAREVTVTGPLQDAEATEEGWASFSCELSHEDEEVEWSLNGMPLYNDSFHEISHKGRRHTLVLKSIQRADAGIVRASSLKVSTSARLEVRVKPVVFLKALDDLSAEERGTLALQCEVSDPEAHVVWRKDGVQLGPSDKYDFLHTAGTRGLVVHDVSPEDAGLYTCHVGSEETRARVRVHDLHVGITKRLKTMEVLEGESCSFECVLSHESASDPAMWTVGGKTVGSSSRFQATRQGRKYILVVREAAPSDAGEVVFSVRGLTSKASLIVRERPAAIIKPLEDQWVAPGEDVELRCELSRAGTPVHWLKDRKAIRKSQKYDVVCEGTMAMLVIRGASLKDAGEYTCEVEASKSTASLHVEEKANCFTEELTNLQVEEKGTAVFTCKTEHPAATVTWRKGLLELRASGKHQPSQEGLTLRLTISALEKADSDTYTCDIGQAQSRAQLLVQGEAAKCARA

SEQ ID NO: 25760 - protein, 446 aa, Homo sapiens
MPSALAIFTCRPNSHPFQERHVYLDEPIKIGRSVARCRPAQNNATFDCKVLSRNHALVWFDHKTGKFYLQDTKSSNGTFINSQRLSRGSEESPPCEILSGDIIQFGVDVTENTRKGTVTHGCIVSTIKLFLPDGMEARLRSDVIHAPLPSPVDKVAANTPSMYSQELFQLSQYLQEALHREQMLEQKLATLQRLLAITQEASDTSWQALIDEDRLLSRLEVMGNQLQACSKNQTEDSLRKELIALQEDKHNYETTAKESLRRVLQEKIEVVRKLSEVERSLSNTEDECTHLKEMNERTQEELRELANKYNGAVNEIKDLSDKLKVAEGKQEEIQQKGQAEKKELQHKIDEMEEKEQELQAKIEALQADNDFTNERLTALQEHLLSKSGGDCTFIHQFIECQKKLIVEGHLTKAVEETKLSKVGKWTALNKSPSPQQSRHDPHYNLI

SEQ ID NO: 25761 - protein, 159 aa, Homo sapiens
MRILHVNGFNGEGGEEDPQAARSNSDGEKATKVQDIKNNLKEAIETIVAAMSNLVPPVELANPENQFRVDYILSVMNVPDFDFPPEFYEHAKALWEDEGVRACYERSNEYQLIDCAQYFLDKIDVIKQADYVPSDQDLLRCRVLTSGIFETKFQVDKVN

SEQ ID NO: 25762 - protein, 828 aa, Homo sapiens
MPSALAIFTCRPNSHPFQERHVYLDEPIKIGRSVARCRPAQNNATFDCKVLSRNHALVWFDHKTGKFYLQDTKSSNGTFINSQRLSRGSEESPPCEILSGDIIQFGVDVTENTRKVTHGCIVSTIKLFLPDGMEARLRSDVIHAPLPSPVDKVAANTPSMYSQELFQLSQYLQEALHREQMLEQKLATLQRLLAITQEASDTSWQALIDEDRLLSRLEVMGNQLQACSKNQTEDSLRKELIALQEDKHNYETTAKESLRRVLQEKIEVVRKLSEVERSLSNTEDECTHLKEMNERTQEELRELANKYNGAVNEIKDLSDKLKVAEGKQEEIQQKGQAEKKELQHKIDEMEEKEQELQAKIEALQADNDFTNERLTALQVRLEHLQEKTLKECSSLEHLLSKSGGDCTFIHQFIECQKKLIVEGHLTKAVEETKLSKENQTRAKESDFSDTLSPSKEKSSDDTTDAQMDEQDLNEPLAKVSLLKDDLQGAQSEIEAKQEIQHLRKELIEAQELARTSKQKCFELQALLEEERKAYRNQVEESTKQIQVLQAQLQRLHIDTENLREEKDSEITSTRDELLSARDEILLLHQAAAKVASERDTDIASLQEELKKVRAELERWRKAASEYEKEITSLQNSFQLRCQQCEDQQREEATRLQGELEKLRKEWNALETECHSLKRENVLLSSELQRQEKELHNSQKQSLELTSDLSILQMSRKELENQVGSLKEQHLRDSADLKTLLSKAENQAKDVQKEYEKTQTVLSELKLKFEMTEQEKQSITDELKQCKNNLKLLREKGNNKPWPWMPMLAALVAVTAIVLYVPGLARASP

SEQ ID NO: 25763 - protein, 537 aa, Homo sapiens
MALLARILRAGLRPAPERGGLLGGGAPRRPQPAGARLPAGARAEDKGAGRPGSPPGGGRAEGPRSLAAMPGPRTLANLAEFFCRDGFSRIHEIQQKHTREYGKIFKSHFGPQFVVSIADRDMVAQVLRAEGAAPQRANMESWREYRDLRGRATGLISAEGEQWLKMRSVLRQRILKPKDVAIYSGEVNQVIADLIKRIYLLRSQAEDGETVTNVNDLFFKYSMEGVATILYESRLGCLENSIPQLTVEYIEALELMFSMFKTSMYAGAIPRWLRPFIPKPWREFCRSWDGLFKFSQIHVDNKLRDIQYQMDRGRRVSGGLLTYLFLSQALTLQEIYANVTEMLLAGVDTTSFTLSWTVYLLARHPEVQQTVYREIVKNLGERHVPTAADVPKVPLVRALLKETLRLFPVLPGNGRVTQEDLVIGGYLIPKGTQLALCHYATSYQDENFPRAKEFRPERWLRKGDLDRVDNFGSIPFGHGVRSCIGRRIAELEIHLVVIQLLQHFEIKTSSQTNAVHAKTHGLLTPGGPIHVRFVNRK

SEQ ID NO: 25764 - protein, 732 aa, Homo sapiens
MSSTRSQNPHGLKQIGLDQIWDDLRAGIQQVYTRQSMAKSRYMELYTHVYNYCTSVHQSNQARGAGVPPSKSKKGQTPGGAQFVGLELYKRLKEFLKNYLTNLLKDGEDLMDESVLKFYTQQWEDYRFSSKVLNGICAYLNRHWVRRECDEGRKGIYEIYSLALVTWRDCLFRPLNKQVTNAVLKLIEKERNGETINTRLISGVVQSYVELGLNEDDAFAKGPTLTVYKESFESQFLADTERFYTRESTEFLQQNPVTEYMKKAEARLLEEQRRVQVYLHESTQDELARKCEQVLIEKHLEIFHTEFQNLLDADKNEDLGRMYNLVSRIQDGLGELKKLLETHIHNQGLAAIEKCGEAALNDPKMYVQTVLDVHKKYNALVMSAFNNDAGFVAALDKACGRFINNNAVTKMAQSSSKSPELLARYCDSLLKKSSKNPEEAELEDTLNQVMVVFKYIEDKDVFQKFYAKMLAKRLVHQNSASDDAEASMISKLKQACGFEYTSKLQRMFQDIGVSKDLNEQFKKHLTNSEPLDLDFSIQVLSSGSWPFQQSCTFALPSEASTFQMAILLQYNTEDAYTVQQLTDSTQIKMDILAQVLQILLKSKLLVLEDENANVDEVELKPDTLIKLYLGYKNKKLRVNINVPMKTEQKQEQETTHKNIEEDRKLLIQAAIVRIMKMRKVLKHQQLLGEVLTQLSSRFKPRVPVIKKCIDILIEKEYLERVDGEKDTYSYLA

SEQ ID NO: 25765 - protein, 648 aa, Homo sapiens
MDRGSLYAQPQLPSPAQRKSLRERWLMDGAAAVPEPSEDPTSKDPQSPEGQAQARIRNLEDSLFTLQSQLQLLQSASTGAQHKPSGRPSWRRQGHRPLSQSIVEAGSVGQTDLNKRASLPAGLVGTPPESPSEPREDVLGFLPGPRQVPGAAGDSSEANGPCPSPIPTPEQGLSQRAVPSEGRVGEAKGGGVVSVVWEGLRATEDCATGATGPELEAKVEEVVLEAIGDRKGAGSLELPAWVKEDRGIVEVVWEGVGGSDAEAMGEIGRVPEVVQTSSPRLQERLEAAASIEGEDVPQGSPEGDGQGGSGGEEGSFIWVERVTLSEEWEELLVEGLEGPEVAGRERGDESPLGAEGAKTGGGEETWEAEKRKAEESMGIGSEEKPGTGRDEAEMSPVVERKGGEKKLELESRGSAEKLGTEREGGEEPLGIERKVEGHLRAEKEGDEEKRGAEEEEVEEPLGVEKKGGEEEPEATKEPLEAERKGGEETLEAEKRGGEESLETEKTQGTEGDLNLEQGSREGSESQAEEMNEAGPPLEANTETRPEKEGPQPQEKPVGALEEEGVKPQTAAEGQGPLGDATPLLAETPAPEQPAECQPLLQGEGPSANPSAHPVPTYAPARQPEPSAPTEGEEASGPKQKTCQCCAVM

SEQ ID NO: 25766 - protein, 868 aa, Homo sapiens
MPVRKQDTQRALHLLEEYRSKLSQTEDRQLRSSIERVINIFQSNLFQALIDIQEFYEVTLLDNPKCIDRSKPSEPIQPVNTWEISSLPSSTVTSETLPSSLSPSVEKYRYQDEDTPPQEHISPQITNEVIGPELVHVSEKNLSEIENVHGFVSHSHISPIKANPPPVLVNTDSLETPTYVNGTDADYEYEEITLERGNSGLGFSIAGGTDNPHIGDDSSIFITKIITGGAAAQDGRLRVNDCILRVNEVDVRDVTHSKAVEALKEAGSIVRLYVKRRKPVSEKIMEIKLIKGPKGLGFSIAGGVGNQHIPGDNSIYVTKIIEGGAAHKDGKLQIGDKLLAVNNVCLEEVTHEEAVTALKNTSDFVYLKVAKPTSMYMNDGYAPPDITNSSSQPVDNHVSPSSFLGQTPASPARYSPVSKAVLGDDEITREPRKVVLHRGSTGLGFNIVGGEDGEGIFISFILAGGPADLSGELRKGDRIISVNSVDLRAASHEQAAAALKNAGQAVTIVAQYRPEEYSRFEAKIHDLREQMMNSSISSGSGSLRTSQKRSLYVRALFDYDKTKDSGLPSQGLNFKFGDILHVINASDDEWWQARQVTPDGESDEVGVIPSKRSSHSMTSVKRTSFPENSPSTRTRTRVSRKQVMLTEIPDDMGSKGLSGQEEYVLSYEPVNQQEVNYTRPVIILGPMKDRINDDLISEFPDKFGSCVPHTTRPKRDYEVDGRDYHFVTSREQMEKDIQEHKFIEAGQYNNHLYGTSVQSVREVAEKGKHCILDVSGNAIKRLQIAQLYPISIFIKPKSMENIMEMNKRLTEEQARKTFERAMKLEQEFTEHFTAIVQGDTLEDIYNQVKQIIEEQSGSYIWVPAKEKL

SEQ ID NO: 25767 - protein, 237 aa, Homo sapiens
MMSEGKPPDKKRPRRSLSISKNKKKASNSIISCFNNAPPAKLACPVCSKMVPRYDLNRHLDEMCANNDFVQVDPGQVGLINSNVSMVDLTSVTLEDVTPKKSPPPKTNLTPGQSDSAKREVKQKISPYFKSNDVVCKNQDELRNRSVKVICLGSLASKLSRKYVKAKKSIDKDEEFAGSSPQSSKSTVVKSLIDNSSEIEDEDQILENSSQKENVFKCDSLKEECIPEHMLLVRSYM

SEQ ID NO: 25768 - protein, 744 aa, Homo sapiens
MDCLCIVTTKKYRYQDEDTPPQEHISPQITNEVIGPELVHVSEKNLSEIENVHGFVSHSHISPIKANPPPVLVNTDSLETPTYVNGTDADYEYEEITLERGNSGLGFSIAGGTDNPHIGDDSSIFITKIITGGAAAQDGRLRVNDCILRVNEVDVRDVTHSKAVEALKEAGSIVRLYVKRRKPVSEKIMEIKLIKGPKGLGFSIAGGVGNQHIPGDNSIYVTKIIEGGAAHKDGKLQIGDKLLAVNNVCLEEVTHEEAVTALKNTSDFVYLKVAKPTSMYMNDGYAPPDITNSSSQPVDNHVSPSSFLGQTPASPARYSPVSKAVLGDDEITREPRKVVLHRGSTGLGFNIVGGEDGEGIFISFILAGGPADLSGELRKGDRIISVNSVDLRAASHEQAAAALKNAGQAVTIVAQYRPEEYSRFEAKIHDLREQMMNSSISSGSGSLRTSQKRSLYVRALFDYDKTKDSGLPSQGLNFKFGDILHVINASDDEWWQARQVTPDGESDEVGVIPSKRRVEKKERARLKTVKFNSKTRDKGEIPDDMGSKGLSGQEEYVLSYEPVNQQEVNYTRPVIILGPMKDRINDDLISEFPDKFGSCVPHTTRPKRDYEVDGRDYHFVTSREQMEKDIQEHKFIEAGQYNNHLYGTSVQSVREVAEKGKHCILDVSGNAIKRLQIAQLYPISIFIKPKSMENIMEMNKRLTEEQARKTFERAMKLEQEFTEHFTGSSGGSRAVLDYHILNVL

SEQ ID NO: 25769 - protein, 460 aa, Homo sapiens
MLELQYHNEDLEKDKTSQNCLGRGMEQVAKKLGVAHEEIQRLTDELQVKEKEQCKLDSALKKAQLEIDKLKENLVKLKENDAADLQKAKEQNQRLDEEILALRNRVRSLDSEKKVLGEMVERLKGEVCESQENKQLGNHSPGKTVGGEQREQHPSSGEKLKYNQQGEVQQLHQNLHRLQILCNSAENELRYERGQNLDLKQHNSLLQEENIKIKIELKHAQQKLLDSTKMCSSLTAEYKHCQQKIKELELEVLKHTQSIKSQNNLQEKLVQEKSKVADAEEKILDLQRKLEHAHKVCLTDTCISEKQQLEEKIKEATQNEAKVKQQYQEEQQKRKLLYQNVDELHRQVRTLQDKENLLEMTCSQQQSRIQQQEALLKQLENEKRKYDEHVKSNQELSEKLSKLQQEKEALREEYLRLLKLLNVHVRWSLALLPRLECNGMNSAHCNLCLPGSSNYPTSTS

SEQ ID NO: 25770 - protein, 892 aa, Homo sapiens
MPVRKQDTQRALHLLEEYRSKLSQTEDRQLRSSIERVINIFQSNLFQALIDIQEFYEVTLLDNPKCIDRSKPSEPIQPVNTWEISSLPSSTVTSETLPSSLSPSVEKYRYQDEDTPPQEHISPQITNEVIGPELVHVSEKNLSEIENVHGFVSHSHISPIKANPPPVLVNTDSLETPTYVNGTDADYEYEEITLERGNSGLGFSIAGGTDNPHIGDDSSIFITKIITGGAAAQDGRLRVNDCILRVNEVDVRDVTHSKAVEALKEAGSIVRLYVKRRKPVSEKIMEIKLIKGPKGLGFSIAGGVGNQHIPGDNSIYVTKIIEGGAAHKDGKLQIGDKLLAVNNVCLEEVTHEEAVTALKNTSDFVYLKVAKPTSMYMNDGYAPPDITNSSSQPVDNHVSPSSFLGQTPASPARYSPVSKAVLGDDEITREPRKVVLHRGSTGLGFNIVGGEDGEGIFISFILAGGPADLSGELRKGDRIISVNSVDLRAASHEQAAAALKNAGQAVTIVAQYRPEEYSRFEAKIHDLREQMMNSSISSGSGSLRTSQKRSLYVRALFDYDKTKDSGLPSQGLNFKFGDILHVINASDDEWWQARQVTPDGESDEVGVIPSKRRVEKKERARLKTVKFNSKTRDKGSFNDKRKKNLFSRKFPFYKNKDQSEQETSDADQHVTSNASDSESSYRGQEEYVLSYEPVNQQEVNYTRPVIILGPMKDRINDDLISEFPDKFGSCVPHTTRPKRDYEVDGRDYHFVTSREQMEKDIQEHKFIEAGQYNNHLYGTSVQSVREVAEKGKHCILDVSGNAIKRLQIAQLYPISIFIKPKSMENIMEMNKRLTEEQARKTFERAMKLEQEFTEHFTAIVQGDTLEDIYNQVKQIIEEQSGSYIWVPAKEKL

SEQ ID NO: 25771 - protein, 1279 aa, Homo sapiens
MVTPRLERMAENSRFKKKVHFGETRADRSKKLFRHYTVGSYDSFDTSSDCIIEEKTVVLQKKDNEGFGFVLRGAKADTPIEEFTPTPAFPALQYLESVDEGGVAWQAGLRTGDFLIEVNNENVVKVGHRQVVNMIRQGGNHLVLKVVTVTRNLDPDDTARKKAPPPPKRAPTTALTLRSKSMTSELEELVDKASVRKKKDKPEEIVPASKPSRAAENMAVEPRVATIKQRPSSRCFPAGSDMNSVYERQGIAVMTPTVPGSPKAPFLGIPRGTMRRQKSIDSRIFLSGITEEERQFLAPPMLKFTRSLSMPDTSEDIPPPPQSVPPSPPPPSPTTYNCPKSPTPRVYGTIKPAFNQNSAAKVSPATRSDTVATMMREKGMYFRRELDRYSLDSEDLYSRNAGPQANFRNKRGQMPENPYSEVGKIASKAVYVPAKPARRKGMLVKQSNVEDSPEKTCSIPIPTIIVKEPSTSSSGKSSQGSSMEIDPQAPEPPSQLRPDESLTVSSPFAAAIAGAVRDREKRLEARRNSPAFLSTDLGDEDVGLGPPAPRTRPSMFPEEGDFADEDSAEQLSSPMPSATPREPENHFVGGAEASAPGEAGRPLNSTSKAQGPESSPAVPSASSGTAGPGNYVHPLTGRLLDPSSPLALALSARDRAMKESQQGPKGEAPKADLNKPLYIDTKMRPSLDAGFPTVTRQNTRGPLRRQETENKYETDLGRDRKGDDKKNMLIDIMDTSQQKSAGLLMVHTVDATKLDNALQEEDEKAEVEMKPDSSPSEVPEGVSETEGALQISAAPEPTTVPGRTIVAVGSMEEAVILPFRIPPPPLASVDLDEDFIFTEPLPPPLEFANSFDIPDDRAASVPALSDLVKQKKSDTPQSPSLNSSQPTNSADSKKPASLSNCLPASFLPPPESFDAVADSGIEEVDSRSSSDHHLETTSTISTVSSISTLSSEGGENVDTCTVYADGQAFMVDKPPVPPKPKMKPIIHKSNALYQDALVEEDVDSFVIPPPAPPPPPGSAQPGMAKVLQPRTSKLWGDVTEIKSPILSGPKANVISELNSILQQMNREKLAKPGEGLDSPMGAKSASLAPRSPEIMSTISGTRSTTVTFTVRPGTSQPITLQSRPPDYESRTSGTRRAPSPVVSPTEMNKETLPAPLSAATASPSPALSDVFSLPSQPPSGDLFGLNPAGRSRSPSPSILQQPISNKPFTTKPVHLWTKPDVADWLESLNLGEHKEAFMDNEIDGSHLPNLQKEDLIDLGVTRVGHRMNIERALKQLLDR

SEQ ID NO: 25772 - protein, 688 aa, Homo sapiens
MALQSQVWSLATPMPMAESSLYRQRLEVIAEKRRLQEEIRAARREVEEEKLRVERLKRKSLRERWLMDGAAAVPEPSEDPTSKDPQSPEGQAQARIRNLEDSLFTLQSQLQLLQSASTGAQHKPSGRPSWRRQGHRPLSQSIVEAGSVGQTDLNKRASLPAGLVGTPPESPSEPREDVLGFLPGPRQVPGAAGDSSEANGPCPSPIPTPEQGLSQRAVPSEGRVGEAKGGGVVSVVWEGLRATEDCATGATGPELEAKVEEVVLEAIGDRKGAGSLELPAWVKEDRGIVEVVWEGVGGSDAEAMGEIGRVPEVVQTSSPRLQERLEAAASIEGEDVPQGSPEGDGQGGSGGEEGSFIWVERVTLSEEWEELLVEGLEGPEVAGRERGDESPLGAEGAKTGGGEETWEAEKRKAEESMGIGSEEKPGTGRDEAEMSPVVERKGGEKKLELESRGSAEKLGTEREGGEEPLGIERKVEGHLRAEKEGDEEKRGAEEEEVEEPLGVEKKGGEEEPEATKEPLEAERKGGEETLEAEKRGGEESLETEKTQGTEGDLNLEQGSREGSESQAEEMNEAGPPLEANTETRPEKEGPQPQEKPVGALEEEGVKPQTAAEGQGPLGDATPLLAETPAPEQPAECQPLLQGEGPSANPSAHPVPTYAPARQPEPSAPTEGEEASGPKQKTCQCCAVM

SEQ ID NO: 25773 - protein, 759 aa, Homo sapiens
MSSTRSQNPHGLKQIGLDQIWDDLRAGIQQVYTRQSMAKSRYMELYTHVYNYCTSVHQSNQARGAGVPPSKSKKGQTPGGAQFVGLELYKRLKEFLKNYLTNLLKDGEDLMDESVLKFYTQQWEDYRFSSKVLNGICAYLNRHWVRRECDEGRKGIYEIYSVTNAVLKLIEKERNGETINTRLISGVVQSYVELGLNEDDAFAKGPTLTVYKESFESQFLADTERFYTRESTEFLQQNPVTEYMKKAEARLLEEQRRVQVYLHESTQDELARKCEQVLIEKHLEIFHTEFQNLLDADKNEDLGRMYNLVSRIQDGLGELKKLLETHIHNQGLAAIEKCGEAALNDPKMYVQTVLDVHKKYNALVMSAFNNDAGFVAALDKACGRFINNNAVTKMAQSSSKSPELLARYCDSLLKKSSKNPEEAELEDTLNQVMVVFKYIEDKDVFQKFYAKMLAKRLVHQNSASDDAEASMISKLKQACGFEYTSKLQRMFQDIGVSKDLNEQFKKHLTNSEPLDLDFSIQVLSSGSWPFQQSCTFALPSELERSYQRFTAFYASRHSGRKLTWLYQLSKGELVTNCFKNRYTLQASTFQMAILLQYNTEDAYTVQQLTDSTQIKMDILAQVLQILLKSKLLVLEDENANVDEVELKPDTLIKLYLGYKNKKLRVNINVPMKTEQKQEQETTHKNIEEDRKLLIQAAIVRIMKMRKVLKHQQLLGEVLTQLSSRFKPRVPVIKKCIDILIEKEYLERVDGEKDTYSYLA

SEQ ID NO: 25774 - protein, 1294 aa, Homo sapiens
MEDGKPVWAPHPTDGFQMGNIVDIGPDSLTIEPLNQKGKTFLALINQVFPAEEDSKKDVEDNCSLMYLNEATLLHNIKVRYSKDRIYTYVANILIAVNPYFDIPKIYSSEAIKSYQGKSLGTRPPHVFAIADKAFRDMKVLKMSQSIIVSGESGAGKTENTKFVLRYLTESYGTGQDIDDRIVEANPLLEAFGNAKTVRNNNSSRFGKFVEIHFNEKSSVVGGFVSHYLLEKSRICVQGKEERNYHIFYRLCAGASEDIREKLHLSSPDNFRYLNRGCTRYFANKETDKQILQNRKSPEYLKAGSMKDPLLDDHGDFIRMCTAMKKIGLDDEEKLDLFRVVAGVLHLGNIDFEEAGSTSGGCNLKNKSAQSLEYCAELLGLDQDDLRVSLTTRVMLTTAGGTKGTVIKVPLKVEQANNARDALAKTVYSHLFDHVVNRVNQCFPFETSSYFIGVLDIAGFEYFEHNSFEQFCINYCNEKLQQFFNERILKEEQELYQKEGLGVNEVHYVDNQDCIDLIEAKLVGILDILDEENRLPQPSDQHFTSAVHQKHKDHFRLTIPRKSKLAVHRNIRDDEGFIIRHFAGAVCYETTQFVEKNNDALHMSLESLICESRDKFIRELFESSTNNNKDTKQKAGKLSFISVGNKFKTQLNLLLDKLRSTGASFIRCIKPNLKMTSHHFEGAQILSQLQCSGMVSVLDLMQGGYPSRASFHELYNMYKKYMPDKLARLDPRLFCKALFKALGLNENDYKFGLTKVFFRPGKFAEFDQIMKSDPDHLAELVKRVNHWLTCSRWKKVQWCSLSVIKLKNKIKYRAEACIKMQKTIRMWLCKRRHKPRIDGLVKVGTLKKRLDKFNEVVSVLKDGKPEMNKQIKNLEISIDTLMAKIKSTMMTQEQIQKEYDALVKSSEELLSALQKKKQQEEEAERLRRIQEEMEKERKRREEDEKRRRKEEEERRMKLEMEAKRKQEEEERKKREDDEKRIQAEVEAQLARQKEEESQQQAVLEQERRDRELALRIAQSEAELISDEAQADLALRSLDSYPVTSKNDGTRPKMTPEQMAKEMSEFLSRGPAVLATKAAAGTKKYDLSKWKYAELRDTINTSCDIELLAACREEFHRRLKVYHAWKSKNKKRNTETEQRAPKSVTDYDFAPFLNNSPQQNPAAQIPARQREIEMNRQQRFFRIPFIRPADQYKDPQSKKKGWWYAHFDGPWIARQMELHPDKPPILLVAGKDDMEMCELNLEETGLTRKRGAEILPRQFEEIWERCGGIQYLQNAIESRQARPTYATAMLQSLLK

SEQ ID NO: 25775 - protein, 688 aa, Homo sapiens
RALHLLEEYRSKLSQTEDRQLRSSIERVINIFQSNLFQALIDIQEFYEVTLLDNPKCIDRSKPSEPIQPVNTWEISSLPSSTVTSETLPSSLSPSVEKYRYQDEDTPPQEHISPQITNEVIGPELVHVSEKNLSEIENVHGFVSHSHISPIKVNGTDADYEYEEITLERGNSGLGFSIAGGTDNPHIGDDSSIFITKIITGGAAAQDGRLRVNDCILRVNEVDVRDVTHSKAVEALKEAGSIVRLYVKRRKPVSEKIMEIKLIKGPKGLGFSIAGGVGNQHIPGDNSIYVTKIIEGGAAHKDGKLQIGDKLLAVNNVCLEEVTHEEAVTALKNTSDFVYLKVAKPTSMYMNDGYAPPDITNSSSQPVDNHVSPSSFLGQTPASPARYSPVSKAVLGDDEITREPRKVVLHRGSTGLGFNIVGGEDGEGIFISFILAGGPADLSGELRKGDRIISVNSVDLRAASHEQAAAALKNAGQAVTIVAQYRPEEYSRFEAKIHDLREQMMNSSISSGSGSLRTSQKRSLYVRALFDYDKTKDSGLPSQGLNFKFGDILHVINASDDEWWQARQVTPDGESDEVGVIPSKRRVEKKERARLKTVKFNSKTRDKGEIPDDMGSKGLKHVTSNASDSESSYRGQEEYVLSYEPVNQQEVNYTRPVIILGPMKDRINDDLISEFPDKFGSCVPLFFC

SEQ ID NO: 25776 - protein, 897 aa, Homo sapiens
KKKVLEKYGDMRVTMGCEIFSMWQNLGEHKLHFIPALIGPFLEVTLIPQPDLRNVMIPIFHDMMDWEQRRSGNFKQVEAKLIDKLDSLMSEGKGDETYRELFNSILLKKIERETWRESGVSLIATVTRLMERLLDYRDCMKMGEVDGKKIGCTVSLLNFYKTELNKEEMYIRYIHKLYDLHLKAQNFTEAAYTLLLYDELLEWSDRPLREFLTYPMQTEWQRKEHLHLTIIQNFDRGKCWENGIILCRKIAEQYESYYDYRNLSKMRMMEASLYDKIMDQQRLEPEFFRVGFYGKKFPFFLRNKEFVCRGHDYERLEAFQQRMLNEFPHAIAMQHANQPDETIFQAEAQYLQIYAVTPIPESQEVLQREGVPDNIKSFYKVNHIWKFRYDRPFHKGTKDKENEFKSLWVERTSLYLVQSLPGISRWFEVEKREVVEMSPLENAIEVLENKNQQLKTLISQCQTRQMQNINPLTMCLNGVIDAAVNGGVSRYQEAFFVKEYILSHPEDGEKIARLRELMLEQEFSACMQASPVHFPNGSPRVCRNSAPASVSPDGTRVIPRRSPLSYPAVNRYSSSSLSSQASAEVSNITGQSESSDEVFNMQPSPSTSSLSSTHSASPNVTSSAPSSARASPLLSDKHKHSRENSCLSPRERPCSAIYPTPVEPSQRMLFNHIGDGALPRSDPNLSAPEKAVNPTPSSWSLDSGKEAKNMSDSGKLISPPVPPRPTQTASPARHTTSVSPSPAGRSPLKGSVQSFTPSPVEYHSPGLISNSPVLSGSYSSGISSLSRCSTSETSGFENQVNEQSAPLPVPVPVPVPSYGGEEPVRKESKTPPPYSVYERTLRRPVPLPHSLSIPVTSEPPALPPKPLAARSSHLENGARRTDPGPRPRPLPRKVSQL

SEQ ID NO: 25777 - protein, 426 aa, Homo sapiens
MASSSGSKAEFIVGGKYKLVRKIGSGSFGDIYLAINITNGEEVAVKLESQKARHPQLLYESKLYKILQGGVGIPHIRVLFLLPRQECNSVISAHCNLGLPGSSNFPASAFQVAGLQHVKLISLALKNLYCSFNLSATLTLPFMTAHAPKWFAPAWWYGQEKDYNVLVMDLLGPSLEDLFNFCSRRFTMKTVLMLADQMISRIEYVHTKNFIHRDIKPDNFLMGIGRHCNKLFLIDFGLAKKYRDNRTRQHIPYREDKNLTGTARYASINAHLGIEQSRRDDMESLGYVLMYFNRTSLPWQGLKAATKKQKYEKISEKKMSTPVEVLCKGFPAEFAMYLNYCRGLRFEEAPDYMYLRQLFRILFRTLNHQYDYTFDWTMLKQKAAQQAASSSGQGQQAQTPTGKQTDKTKSNMKAFFFTVDSKAGKI

SEQ ID NO: 25778 - protein, 830 aa, Homo sapiens
MSKRGMSSRAKGDKAEALAALQAANEDLRAKLTDIQIELQQEKSKVSKVEREKNQELRQVREHEQHKTAVLLTELKTKLHEEKMKELQAVRETLLRQHEAELLRVIKIKDNENQRLQALLSALRDGGPEKVKTVLLSEAKEEAKKGFEVEKVKMQQEISELKGAKRQVEEALTLVIQADKIKAAEIRSVYHLHQEEITRIKKECEREIRRLMEEIKFKDRAVFVLERELGVQAGHAQRLQLQKEALDEQLSQVREADRHPGSPRRELPHAAGAGDASDHSGSPQLDEKDARRFQLKIAELSAIIRKLEDRNALLSEERNELLKRVREAESQYKPLLDKNKRLSRKNEDLSHALRRMENKLKFVTQENIEMRQRAGIIRRPSSLNDLDQSQDEREVDFLKLQIVEQQNLIDELSKTLETAGYVKSVLERDKLLRFRKQRKKMAKLPKPVVVETFFGYDEEASLESDGSSVSYQTDRTDQTPCTPDDDLEEGMAKEETELRFRQLTMEYQALQRAYALLQEQVGGTLDAEREVKTREQLQAEVQRAQARIEDLEKALAEQGQDMKWIEEKQALYRRNQELVEKIKQMETEEARLRHEVQDARDQNELLEFRILELEERERKSPAISFHHTPFVDGKSPLQVYCEAEGVTDIVVAELMKKLDILGDNAVSNLTNEEQVVVIQARTVLTLAEKWLQQIEETEAALQRKMVDLESEKELFSKQKGYLDEELDYRKQALDQANKQEAGAKVAELLSEEEREKLKVAVEQWKRQVMSELRERDAQILRERMELLQLAQQRIKELEERIEAQKRQIKELEEKFLFLFLFFSLAFILWS

SEQ ID NO: 25779 - protein, 649 aa, Homo sapiens
MSSTRSQNPHGLKQIGLDQIWDDLRAGIQQVYTRQSMAKSRYMELYTHVYNYCTSVHQSNQARGAGVPPSKSKKGQTPGGAQFVGLELYKRLKEFLKNYLTNLLKDGEDLMDESVLKFYTQQWEDYRFSSKVLNGICAYLNRHWVRRECDEGRKGIYEIYSLALVTWRDCLFRPLNKQVTNAVLKLIEKERNGETINTRLISGVVQSYVELGLNEDDAFAKGPTLTVYKESFESQFLADTERFYTRESTEFLQQNPVTEYMKKAEARLLEEQRRVQVYLHESTQDELARKCEQVLIEKHLEIFHTEFQNLLDADKNEDLGRMYNLVSRIQDGLGELKKLLETHIHNQGLAAIEKCGEAALNDPKMYVQTVLDVHKKYNALVMSAFNNDAGFVAALDKACGRFINNNAVTKMAQSSSKSPELLARYCDSLLKKSSKNPEEAELEDTLNQVMVVFKYIEDKDVFQKFYAKMLAKRLVHQNSASDDAEASMISKLKQACGFEYTSKLQRMFQDIGVSKDLNEQFKKHLTNSEPLDLDFSIQVLSSGSWPFQQSCTFALPSELERSYQRFTAFYASRHSGRKLTWLYQLSKGELVTNCFKNRYTLQASTFQMAILLQYNTEDAYTVQQLTDSTQIKMDILAQVLQILLKSKLL

SEQ ID NO: 25780 - protein, 992 aa, Homo sapiens
MSAAPAYSEDKGGSAGPGEPEYGHDPASGGIFSSDYKRHDDLKEMLDTNKDSLKLEAMKRIVAMIARGKNASDLFPAVVKNVACKNIEVKKLVYVYLVRYAEEQQDLALLSISTFQRGLKDPNQLIRASALRVLSSIRVPIIVPIMMLAIKEAASDMSPYVRKTAAHAIPKLYSLDSDQKDQLIEVIEKLLADKTTLVAGSVVMAFEEVCPERIDLIHKNYRKLCNLLIDVEEWGQVVIISMLTRYARTQFLSPTQNESLLEENAEKAFYGSEEDEAKGAGSEETAAAAAPSRKPYVMDPDHRLLLRNTKPLLQSRSAAVVMAVAQLYFHLAPKAEVGVIAKALVRLLRSHSEVQYVVLQNVATMSIKRRGMFEPYLKSFYIRSTDPTQIKILKLEVLTNLANETNIPTVLREFQTYIRSMDKDFVAATIQAIGRCATNIGRVRDTCLNGLVQLLSNRDELVVAESVVVIKKLLQMQPAQHGEIIKHLAKLTDNIQVPMARASILWLIGEYCEHVPRIAPDVLRKMAKSFTAEEDIVKLQVINLAAKLYLTNSKQTKLLTQYVLSLAKYDQNYDIRDRARFTRQLIVPSEQGGALSRHAKKLFLAPKPAPVLESSFKDRDHFQLGSLSHLLNAKATGYQELPDWPEEAPDPSVRNVEVPEWTKCSNREKRKEKEKPFYSDSEGESGPTESADSDPESESESDSKSSSESGSGESSSESDNEDQDEDEEKGRGSESEQSEEDGKRKTKKKVPERKGEASSSDEGSDSSSSSSESEMTSESEEEQLEPASWSRKTPPSSKSAPATKEISLLDLEDFTPPSVQPVSPPAIVSTSLAADLEGLTLTDSTLVPSLLSPVSGVGRQELLHRVAGEGLAVDYTFSRQPFSGDPHMVSVHIHFSNSSDTPIKGLHVGTPKLPAGISIQEFPEIESLAPGESATAVMGINFCDSTQAANFQLCTQTRQFYVSIQPPVGELMAPVFMSENEFKKEQGLQGGH

SEQ ID NO: 25781 - protein, 846 aa, Homo sapiens
MSKRGMSSRAKGDKAEALAALQAANEDLRAKLTDIQIELQQEKSKVSKVEREKNQELRQVREHEQHKTAVLLTELKTKLHEEKMKELQAVRETLLRQHEAELLRVIKIKDNENQRLQALLSALRDGGPEKVKTVLLSEAKEEAKKGFEVEKVKMQQEISELKGAKRQVEEALTLVIQADKIKAAEIRSVYHLHQEEITRIKKECEREIRRLMEEIKFKDRAVFVLERELGVQAGHAQRLQLQKEALDEQLSQVREADRHPGSPRRELPHAAGAGDASDHSGSPEQQLDEKDARRFQLKIAELSAIIRKLEDRNALLSEERNELLKRVREAESQYKPLLDKNKRLSRKNEDLSHALRRMENKLKFVTQENIEMRQRAGIIRRPSSLNDLDQSQDEREVDFLKLQIVEQQNLIDELSKTLETAGYVKSVLERDKLLRFRKQRKKMAKLPKPVVVETFFGYDEEASLESDGSSVSYQTDRTDQTPCTPDDDLEEGMAKEETELRFRQLTMEYQALQRAYALLQEQVGGTLDAEREVKTREQLQAEVQRAQARIEDLEKALAEQGQDMKWIEEKQALYRRNQELVEKIKQMETEEARLRHEVQDARDQNELLEFRILELEERERKSPAISFHHTPFVDGKSPLQVYCEAEGVTDIVVAELMKKLDILGDNAVSNLTNEEQVVVIQARTVLTLAEKWLQQIEETEAALQRKMVDLESEKELFSKQKGYLDEELDYRKQALDQANKHILELEAMLYDALQQEAGAKVAELLSEEEREKLKVAVEQWKRQVMSELRERDAQILRERMELLQLAQQRIKELEERIEAQKRQIKELEEKFLFLFLFFSLAFILWS

SEQ ID NO: 25782 - protein, 359 aa, Homo sapiens
MPLVKRNIEPRHLCRGALPEGITSELECVTNSTLAAIIRQLSSLSKHAEDIFGELFNEANNFYIRANSLQDRIDRLAVKVTQLDSTVEEVSLQDINMKKAFKSSTVQDQQVVSKNSIPNPVADIYNQSDKPPPLNILTPYRDDKKDGLKFYTDPSYFFDLWKEKMLQDTEDKRKEKRRQKREKHKLNPNRNQQVNVRKVRTRKEEWERRKMGIEFMSDAKKLEQAGSAKEDRVPSGSHASDVTDYSYPATPNHSLHPQPVTPSYAAGDVPPHGPASQAAEHEYRPPSASARHMALNRPQQPPPPPPPQAPEGSQASAPMAPADYGMLPAQIIEYYNPSGPPPPPPPPVIPSAQTAFVSP

SEQ ID NO: 25783 - protein, 351 aa, Homo sapiens
MDSGAGESGKSTIVKQMRILHVNGFNGEGGEEDPQAARSNSDGEKATKVQDIKNNLKEAIETIVAAMSNLVPPVELANPENQFRVDYILSVMNVPDFDFPPEFYEHAKALWEDEGVRACYERSNEYQLIDCAQYFLDKIDVIKQADYVPSDQDLLRCRVLTSGIFETKFQVDKVNFHMFDVGGQRDERRKWIQCFNDVTAIIFVVASSSYNMVIREDNQTNRLQEALNLFKSIWNNRWLRTISVILFLNKQDLLAEKVLAGKSKIEDYFPEFARYTTPEDATPEPGEDPRVTRAKYFIRDEFLRISTASGDGRHYCYPHFTCAVDTENIRRVFNDCRDIIQRMHLRQYELL

SEQ ID NO: 25784 - protein, 768 aa, Homo sapiens
MLSSVCVSSFRGRQGASKQQPAPPPQPPESPPPPPLPPQQQQPAQPGPAASPAGPPAPRGPGDRRAEPCPGLPAAAMGRHGGGGGDSGKIVINVGGVRHETYRSTLRTLPGTRLAGLTEPEAAARFDYDPGADEFFFDRHPGVFAYVLNYYRTGKLHCPADVCGPLFEEELGFWGIDETDVEACCWMTYRQHRDAEEALDSFEAPDPAGAANAANAAGAHDGGLDDEAGAGGGGLDGAGGELKRLCFQDAGGGAGGPPGGAGGAGGTWWRRWQPRVWALFEDPYSSRAARYVAFASLFFILISITTFCLETHEGFIHISNKTVTQASPIPGAPPENITNVEVETEPFLTYVEGVCVVWFTFEFLMRITFCPDKVEFLKSSLNIIDCVAILPFYLEVGLSGLSSKAAKDVLGFLRVVRFVRILRIFKLTRHFVGLRVLGHTLRASTNEFLLLIIFLALGVLIFATMIYYAERIGADPDDILGSNHTYFKNIPIGFWWAVVTMTTLGYGDMYPKTWSGMLVGALCALAGVLTIAMPVPVIVNNFGMYYSLAMAKQKLPKKKNKHIPRPPQPGSPNYCKPDPPPPPPPHPHHGSGGISPPPPITPPSMGVTVAGAYPAGPHTHPGLLRGGAGGLGIMGLPPLPAPGEPCPLAQEEVIEINRADPRPNGDPAAAALAHEDCPAIDQPAMSPEDKSPITPGSRGRYSRDRACFLLTDYAPSPDGSIRKGYEKSRSLSSIAGLSGVSLRLAPLATPPGSPRAARRAPPTLPSIL

SEQ ID NO: 25785 - protein, 2412 aa, Homo sapiens
MGISTVILEMCLLWGQVLSTGGWIPRTTDYASLIPSEVPLDPTVAEGSPFPSESTLESTVAEGSPISLESTLESTVAEGSLIPSESTLESTVAEGSDSGLALRLVNGDGRCQGRVEILYRGSWGTVCDDSWDTNDANVVCRQLGCGWAMSAPGNAWFGQGSGPIALDDVRCSGHESYLWSCPHNGWLSHNCGHGEDAGVICSAAQPQSTLRPESWPVRISPPVPTEGSESSLALRLVNGGDRCRGRVEVLYRGSWGTVCDDYWDTNDANVVCRQLGCGWAMSAPGNAQFGQGSGPIVLDDVRCSGHESYLWSCPHNGWLTHNCGHSEDAGVICSAPQSRPTPSPDTWPTSHASTAGPESSLALRLVNGGDRCQGRVEVLYRGSWGTVCDDSWDTSDANVVCRQLGCGWATSAPGNARFGQGSGPIVLDDVRCSGYESYLWSCPHNGWLSHNCQHSEDAGVICSAAHSWSTPSPDTLPTITLPASTVGSESSLALRLVNGGDRCQGRVEVLYRGSWGTVCDDSWDTNDANVVCRQLGCGWAMLAPGNARFGQGSGPIVLDDVRCSGNESYLWSCPHNGWLSHNCGHSEDAGVICSGPESSLALRLVNGGDRCQGRVEVLYRGSWGTVCDDSWDTNDANVVCRQLGCGWATSAPGNARFGQGSGPIVLDDVRCSGHESYLWSCPNNGWLSHNCGHHEDAGVICSAAQSRSTPRPDTLSTITLPPSTVGSESSLTLRLVNGSDRCQGRVEVLYRGSWGTVCDDSWDTNDANVVCRQLGCGWATSAPGNARFGQGSGPIVLDDVRCSGHESYLWSCPHNGWLSHNCGHHEDAGVICSVSQSRPTPSPDTWPTSHASTAGPESSLALRLVNGGDRCQGRVEVLYRGSWGTVCDDSWDTSDANVVCRQLGCGWATSAPGNARFGQGSGPIVLDDVRCSGYESYLWSCPHNGWLSHNCQHSEDAGVICSAAHSWSTPSPDTLPTITLPASTVGSESSLALRLVNGGDRCQGRVEVLYQGSWGTVCDDSWDTNDANVVCRQLGCGWAMSAPGNARFGQGSGPIVLDDVRCSGHESYLWSCPHNGWLSHNCGHSEDAGVICSASQSRPTPSPDTWPTSHASTAGSESSLALRLVNGGDRCQGRVEVLYRGSWGTVCDDYWDTNDANVVCRQLGCGWAMSAPGNARFGQGSGPIVLDDVRCSGHESYLWSCPHNGWLSHNCGHHEDAGVICSASQSQPTPSPDTWPTSHASTAGSESSLALRLVNGGDRCQGRVEVLYRGSWGTVCDDYWDTNDANVVCRQLGCGWATSAPGNARFGQGSGPIVLDDVRCSGHESYLWSCPHNGWLSHNCGHHEDAGVICSASQSQPTPSPDTWPTSHASTAGSESSLALRLVNGGDRCQGRVEVLYRGSWGTVCDDYWDTNDANVVCRQLGCGWATSAPGNARFGQGSGPIVLDDVRCSGHESYLWSCPHNGWLSHNCGHHEDAGVICSASQSQPTPSPDTWPTSRASTAGSESTLALRLVNGGDRCRGRVEVLYQGSWGTVCDDYWDTNDANVVCRQLGCGWAMSAPGNAQFGQGSGPIVLDDVRCSGHESYLWSCPHNGWLSHNCGHHEDAGVICSAAQSQSTPRPDTWLTTNLPALTVGSESSLALRLVNGGDRCRGRVEVLYRGSWGTVCDDSWDTNDANVVCRQLGCGWAMSAPGNARFGQGSGPIVLDDVRCSGNESYLWSCPHKGWLTHNCGHHEDAGVICSATQINSTTTDWWHPTTTTTARPSSNCGGFLFYASGTFSSPSYPAYYPNNAKCVWEIEVNSGYRINLGFSNLKLEAHHNCSFDYVEIFDGSLNSSLLLGKICNDTRQIFTSSYNRMTIHFRSDISFQNTGFLAWYNSFPSDATLRLVNLNSSYGLCAGRVEIYHGGTWGTVCDDSWTIQEAEVVCRQLGCGRAVSALGNAYFGSGSGPITLDDVECSGTESTLWQCRNRGWFSHNCNHREDAGVICSGNHLSTPAPFLNITRPNNYSCGGFLSQPSGDFSSPFYPGNYPNNAKCVWDIEVQNNYRVTVIFRDVQLEGGCNYDYIEVFDGPYRSSPLIARVCDGARGSFTSSSNFMSIRFISDHSITRRGFRAEYYSSPSNDSTNLLCLPNHMQASVSRSYLQSLGFSASDLVISTWNGYYECRPQITPNLVIFTIPYSGCGTFKQADNDTIDYSNFLTAAVSGGIIKRRTDLRIHVSCRMLQNTWVDTMYIANDTIHVANNTIQVEEVQYGNFDVNISFYTSSSFLYPVTSRPYYVDLNQDLYVQAEILHSDAVLTLFVDTCVASPYSNDFTSLTYDLIRSGCVRDDTYGPYSSPSLRIARFRFRAFHFLNRFPSVYLRCKMVVCRAYDPSSRCYRGCVLRSKRDVGSYQEKVDVVLGPIQLQTPPRREEEPR

SEQ ID NO: 25786 - protein, 286 aa, Homo sapiens
MLELQYHNEDLEKDKTSQNCLGRGMEQVAKKLGVAHEEIQRLTDELQVKEKEQCKLDSALKKAQLEIDKLKENLVKLKENDAADLQKAKEQNQRLDEEILALRNRVRSLDSEKKVLGEMVERLKGEVCESQENKQLGNHSPGKTVGGEQREQHPSSGEKLKYNQQGEVQQLHQNLHRLQILCNSAENELRYERGQNLDLKQHNSLLQEENIKIKIELKHAQQKLLDSTKMCSSLTAEYKHCQQKIKELELEVLKHTQSIKSQNNLQEKLVQEKSKVADAEEKRSSS

SEQ ID NO: 25787 - protein, 203 aa, Homo sapiens [sequence omitted]

SEQ ID NO: 25788 - protein, 865 aa, Homo sapiens
MPVRKQDTQRALHLLEEYRSKLSQTEDRQLRSSIERVINIFQSNLFQALIDIQEFYEVTLLDNPKCIDRSKPSEPIQPVNTWEISSLPSSTVTSETLPSSLSPSVEKYRYQDEDTPPQEHISPQITNEVIGPELVHVSEKNLSEIENVHGFVSHSHISPIKVNGTDADYEYEEITLERGNSGLGFSIAGGTDNPHIGDDSSIFITKIITGGAAAQDGRLRVNDCILRVNEVDVRDVTHSKAVEALKEAGSIVRLYVKRRKPVSEKIMEIKLIKGPKGLGFSIAGGVGNQHIPGDNSIYVTKIIEGGAAHKDGKLQIGDKLLAVNNVCLEEVTHEEAVTALKNTSDFVYLKVAKPTSMYMNDGYAPPDITNSSSQPVDNHVSPSSFLGQTPASPARYSPVSKAVLGDDEITREPRKVVLHRGSTGLGFNIVGGEDGEGIFISFILAGGPADLSGELRKGDRIISVNSVDLRAASHEQAAAALKNAGQAVTIVAQYRPEEYSRFEAKIHDLREQMMNSSISSGSGSLRTSQKRSLYVRALFDYDKTKDSGLPSQGLNFKFGDILHVINASDDEWWQARQVTPDGESDEVGVIPSKRRVEKKERARLKTVKFNSKTRDKGEIPDDMGSKGLKHVTSNASDSESSYLILITDEYGCSKGGQEEYVLSYEPVNQQEVNYTRPVIILGPMKDRINDDLISEFPDKFGSCVPHTTRPKRDYEVDGRDYHFVTSREQMEKDIQEHKFIEAGQYNNHLYGTSVQSVREVAEKGKHCILDVSGNAIKRLQIAQLYPISIFIKPKSMENIMEMNKRLTEEQARKTFERAMKLEQEFTEHFTAIVQGDTLEDIYNQVKQIIEEQSGSYIWVPAKEKL

SEQ ID NO: 25789 - protein, 796 aa, Homo sapiens
LVKLKENDAADLQKAKEQNQRLDEEILALRNRVRSLDSEKKVLGEMVERLKGEVCESQENKQLGNHSPGKTILKMSQEKNEMFESEWSKEREREKQLASGLDTAEKALKVESEELQKSKSELICLYNEVHNLPGESESKDHFLIACDLLQRENSELETKVLKLSQEFAQLNHFTLGGKTAPSNLITSENTCKDPESNEPILETEIQSRKEETEELCPKLGERKQKEIPEESVKEGSFPREGQKEEGSQQNRDMKDEEKEQQLTMKPEEIVRLREELSHINQSLLQSQSSGDSSDDSGAQHPSSGEKLKYNQQGEVQQLHQNLHRLQILCNSAENELRYERGQNLDLKQHNSLLQEENIKIKIELKHAQQKLLDSTKMCSSLTAEYKHCQQKIKELELEVLKHTQSIKSQNNLQEKLVQEKSKVADAEEKILDLQRKLEHAHKVCLTDTCISEKQQLEEKIKEATQNEAKVKQQYQEEQQKRKLLYQNVDELHRQVRTLQDKENLLEMTCSQQQSRIQQQEALLKQLENEKRKYDEHVKSNQELSEKLSKLQQEKEALREEYLRLLKLLNVHVRNYNEKHHQQKVKLQKVKYRLTNEVELRDKRINQFEDEIGILQHKIEKEKAIQDQITAQNDTLLLEKRKLQEQVIEQEQLIHSNKWTISSIQSRVLYMDKENKQLQENSLRLTQQIGFLERIIRSIHIRRGEETTISDILESEVVNEILPLSNSSFSGKGLVESFASLQETEEIKSKEAMASSKSPEKSPENLVCSQNSEAGYINVASLKETHGIQEQDQKSEL

SEQ ID NO: 25790 - protein, 244 aa, Homo sapiens
MLELQYHNEDLEKDKTSQNCLGRGMEQVAKKLGVAHEEIQRLTDELQVKEKEQCKLDSALKKAQLEIDKLKENLVKLKENDAADLQKAKEQNQRLDEEILALRNRVRSLDSEKKVLGEMVERLKGEVCESQENKQLGNHSPGKTVGGEQREQHPSSGEKLKYNQQGEVQQLHQNLHRLQILCNSAENELRYERGQNLDLKQHNSLLQEENIKILDLQRKLEHAHKVCLTDTCISEKQQLEEKIK

SEQ ID NO: 25791 - protein, 783 aa, Homo sapiens
MTADKDKDKDKEKDRDRDRDREREKRDKARESENSRPRRSCTLEGGAKNYAESDHSEDEDNDNNSATAEESTKKNKKKPPKKKSRYERTDTGEITSYITEDDVVYRPGDCVYIESRRPNTPYFICSIQDFKLVHNSQACCRSPTPALCDPPACSLPVASQPPQHLSEAGRGPVGSKRDHLLMNVKWYYRQSEVPDSVYQHLVQDRHNENDSGRELVITDPVIKNRELFISDYVDTYHAAALRGKCNISHFSDIFAAREFKARVDSFFYILGYNPETRRLNSTQGEIRVGPSHQAKLPDLQPFPSPDGDTVTQHEELVWMPGVNDCDLLMYLRAARSMAAFAGMCDGGSTEDGCVAASRDDTTLNALNTLHESGYDAGKALQRLVKKPVPKLIEKCWTEDEVKRFVKGLRQYGKNFFRIRKELLPNKETGELITFYYYWKKTPEAASSRAHRRHRRQAVFRRIKTRTASTPVNTPSRPPSSEFLDLSSASEDDFDSEDSEQELKGYACRHCFTTTSKDWHHGGRENILLCTDCRIHFKKYGELPPIEKPVDPPPFMFKPVKEEDDGLSGKHSMRTRRSRGSMSTLRSGRKKQPASPDGRTSPINEDIRSSGRNSPSAASTSSNDSKAETVKKSAKKVKEEASSPLKSNKRQREKVASDTEEADRTSSKKTKTQEISRPNSPSEGEGESSDSRSVNDEGSSDPKDIDQDNRSTSPSIPSPQDNESDSDSSAQQQMLQAQPPALQAPTGVTPAPSSAPPGTPQLPTPGPTPSATAVPPQGSPTASQ

SEQ ID NO: 25792 - protein, 1075 aa, Homo sapiens
IGKTKIFLKDHHDMLLEVERDKAITDRVILLQKVIRGFKDRSNFLKLKNAATLIQRHWRGHNCRKNYGLMRLGFLRLQALHRSRKLHQQYRLARQRIIQFQARCRAYLVRKAFRHRLWAVLTVQAYARGMIARRLHQRLRAEYLWRLEAEKMRLAEEEKLRKEMSAKKAKEEAERKHQERLAQLAREDAERELKEKEAARRKKELLEQMERARHEPVNHSDMVDKMFGFLGTSGGLPGQEGQAPSGFEDLERGRREMVEEDLDAALPLPDEDEEDLSEYKFAKFAATYFQGTTTHSYTRRPLKQPLLYHDDEGDQLAALAVWITILRFMGDLPEPKYHTAMSDGSEKIPVMTKIYETLGKKTYKRELQALQGEGEAQLPEGQKKSSVRHKLVHLTLKKKSKLTEEVTKRLHDGESTVQGNSMLEDRPTSNLEKLHFIIGNGILRPALRDEIYCQISKQLTHNPSKSSYARGWILVSLCVGCFAPSEKFVKYLRNFIHGGPPGYAPYCEERLRRTFVNGTRTQPPSWLELQATKSKKPIMLPVTFMDGTTKTLLTDSATTAKELCNALADKISLKDRFGFSLYIALFDKVSSLGSGSDHVMDAISQCEQYAKEQGAQERNAPWRLFFRKEVFTPWHSPSEDNVATNLIYQQVVRGVKFGEYRCEKEDDLAELASQQYFVDYGSEMILERLLNLVPTYIPDREITPLKTLEKWAQLAIAAHKKGIYAQRRTDAQKVKEDVVSYARFKWPLLFSRFYEAYKFSGPSLPKNDVIVAVNWTGVYFVDEQEQVLLELSFPEIMAVSSSRECRVWLSLGCSDLGCAAPHSGWAGLTPAGPCSPCWSCRGAKTTAPSFTLATIKGDEYTFTSSNAEDIRDLVVTFLEGLRKRSKYVVALQDNPNPAGEESGFLSFAKGDLIILDHDTGEQVMNSGWANGINERTKQRGDFPTDSVYVMPTVTMPPREIVALVTMTPDQRQDVVRLLQLRTAEPEVRAKPYTLEEFSYDYFRPPPKHTLSRVMVSKARGKDRLWSHTREPLKQALLKKLLGSEELSQEACLAFIDGRLPVQEDTLRQRAHRPDL

SEQ ID NO: 25793 - protein, 926 aa, Homo sapiens
MEDGKPVWAPHPTDGFQMGNIVDIGPDSLTIEPLNQKGKTFLALINQVFPAEEDSKKDVEDNCSLMYLNEATLLHNIKVRYSKDRIYTYVANILIAVNPYFDIPKIYSSEAIKSYQGKSLGTRPPHVFAIADKAFRDMKVLKMSQSIIVSGESGAGKTENTKFVLRYLTESYGTGQDIDDRIVEANPLLEAFGNAKTVRNNNSSRFGKFVEIHFNEKSSVVGGFVSHYLLEKSRICVQGKEERNYHIFYRLCAGASEDIREKLHLSSPDNFRYLNRGCTRYFANKETDKQILQNRKSPEYLKAGSMKDPLLDDHGDFIRMCTAMKKIGLDDEEKLDLFRVVAGVLHLGNIDFEEAGSTSGGCNLKNKSAQSLEYCAELLGLDQDDLRVSLTTRVMLTTAGGTKGTVIKVPLKVEQANNARDALAKTVYSHLFDHVVNRVNQCFPFETSSYFIGVLDIAGFEYFEHNSFEQFCINYCNEKLQQFFNERILKEEQELYQKEGLGVNEVHYVDNQDCIDLIEAKLVGILDILDEENRLPQPSDQHFTSAVHQKHKDHFRLTIPRKSKLAVHRNIRDDEGFIIRHFAGAVCYETTQFVEKNNDALHMSLESLICESRDKFIRELFESSTNNNKDTKQKAGKLSFISVGNKFKTQLNLLLDKLRSTGASFIRCIKPNLKMTSHHFEGAQILSQLQCSGMVSVLDLMQGGYPSRASFHELYNMYKKYMPDKLARLDPRLFCKALFKALGLNENDYKFGLTKVFFRPGKFAEFDQIMKSDPDHLAELVKRVNHWLTCSRWKKVQWCSLSVIKLKNKIKYRAEACIKMQKTIRMWLCKRRHKPRIDGLVKVGTLKKRLDKFNEVVSVLKDGKPEMNKQIKNLEISIDTLMAKIKSTMMTQEQIQKEYDALVKSSEELLSALQKKKQQEEEAERL

SEQ ID NO: 25794 - protein, 280 aa, Homo sapiens
IWDDLRAGIQQVYTRQSMAKSRYMELYTHVYNYCTSVHQSNQARGAGVPPSKSKKGQTPGGAQFVGLELYKRLKEFLKNYLTNLLKDGEDLMDESVLKFYTQQWEDYRFSSKVLNGICAYLNRHWVRRECDEGRKGIYEIYSAEARLLEEQRRVQVYLHESTQDELARKCEQVLIEKHLEIFHTEFQNLLDADKNEDLGRMYNLVSRIQDGLGELKKLLETHIHNQGLAAIEKCGEAALNDPKMYVQTVLDVHKKYNALVMSAFNNDAGFVAALDKACGR

SEQ ID NO: 25795 - protein, 109 aa, Homo sapiens
MSPGAMRRSLPSTSSTSSTKRLKSVEDEMDSPGEEPFYTGQGRSPGSGSQSSGWHEVEPGMPSPTTLKKSEKSGFSSPSPSQTSSLGTAFTQHHRPVITGPRAFLWSLP

SEQ ID NO: 25796 - protein, 874 aa, Homo sapiens
MFKTVSKQHAQRHFSGISVLDRFKCSGSEKMSPSIKNLDCFSPMLCHCKVACSNSTISLMFGCKKYRYQDEDTPPQEHISPQITNEVIGPELVHVSEKNLSEIENVHGFVSHSHISPIKPTEAVLPSPPTVPVIPVLPVPAENTVILPTIPQANPPPVLVNTDSLETPTYVNGTDADYEYEEITLERGNSGLGFSIAGGTDNPHIGDDSSIFITKIITGGAAAQDGRLRVNDCILRVNEVDVRDVTHSKAVEALKEAGSIVRLYVKRRKPVSEKIMEIKLIKGPKGLGFSIAGGVGNQHIPGDNSIYVTKIIEGGAAHKDGKLQIGDKLLAVNNVCLEEVTHEEAVTALKNTSDFVYLKVAKPTSMYMNDGYAPPDITNSSSQPVDNHVSPSSFLGQTPASPARYSPVSKAVLGDDEITREPRKVVLHRGSTGLGFNIVGGEDGEGIFISFILAGGPADLSGELRKGDRIISVNSVDLRAASHEQAAAALKNAGQAVTIVAQYRPEEYSRFEAKIHDLREQMMNSSISSGSGSLRTSQKRSLYVRALFDYDKTKDSGLPSQGLNFKFGDILHVINASDDEWWQARQVTPDGESDEVGVIPSKRRVEKKERARLKTVKFNSKTRDKGEIPDDMGSKGLKHVTSNASDSESSYLILITDEYGCSKGGQEEYVLSYEPVNQQEVNYTRPVIILGPMKDRINDDLISEFPDKFGSCVPHTTRPKRDYEVDGRDYHFVTSREQMEKDIQEHKFIEAGQYNNHLYGTSVQSVREVAEKGKHCILDVSGNAIKRLQIAQLYPISIFIKPKSMENIMEMNKRLTEEQARKTFERAMKLEQEFTEHFTAIVQGDTLEDIYNQVKQIIEEQSGSYIWVPAKEKL

SEQ ID NO: 25797 - protein, 273 aa, Homo sapiens
MRILHVNGFNGDSEKATKVQDIKNNLKEAIETIVAAMSNLVPPVELANPENQFRVDYILSVMNVPDFDFPPEFYEHAKALWEDEGVRACYERSNEYQLIDCAQYFLDKIDVIKQADYVPSDQDLLRCRVLTSGIFETKFQVDKVNFHMFDVGGQRDERRKWIQCFNDVTAIIFVVASSSYNMVIREDNQTNRLQEALNLFKSIWNNRWLRTISVILFLNKQDLLAEKVLAGKSKIEDYFPEFARYTTPEDATPEPGEDPRVTRAKYFIRDEFL

SEQ ID NO: 25798 - protein, 710 aa, Homo sapiens
MLELQYHNEDLEKDKTSQNCLGRGMEQVAKKLGVAHEEIQRLTDELQVKEKEQCKLDSALKKAQLEIDKLKENLVKLKENDAADLQKAKEQNQRLDEEILALRNRVRSLDSEKKVLGEMVERLKGEVCESQENKQLGNHSPGKTVGGEQREQHPSSGEKLKYNQQGEVQQLHQNLHRLQILCNSAENELRYERGQNLDLKQHNSLLQEENIKIKIELKHAQQKLLDSTKMCSSLTAEYKHCQQKIKELELEVLKHTQSIKSQNNLQEKLVQEKSKVADAEEKILDLQRKLEHAHKVCLTDTCISEKQQLEEKIKEATQNEAKVKQQYQEEQQKRKLLYQNVDELHRQVRTLQDKENLLEMTCSQQQSRIQQQEALLKQLENEKRKYDEHVKSNQELSEKLSKLQQEKEALREEYLRLLKLLNVHVRNYNEKHHQQKVKLQKVKYRLTNEVELRDKRINQFEDEIGILQHKIEKEKAIQDQITAQNDTLLLEKRKLQEQVIEQEQLIHSNKWTISSIQSRVLYMDKENKQLQENSLRLTQQIGFLERIIRSIHIRRGENLKEFPVPKWWHRGKLASLPPTKKQKEIYSTEVFTSNNAELQHEDESVPEATEKWKHSEQMETTISDILESEVVNEILPLSNSSFSGKGLVESFASLQETEEIKSKEAMASSKSPEKSPENLVCSQNSEAGYINVASLKETHGIQEQDQKSEL

SEQ ID NO: 25799 - protein, 644 aa, Homo sapiens
QCPEGYTCVKIGRNPDYGYTSFDTFSWAFLALFRLMTQDYWENLYQQTLRAAGKTYMIFFVVVIFLGSFYLINLILAVVAMAYEEQNQANIEEAKQKELEFQQMLDRLKKEQEEAEAIAAAAAEYTSIRRSRIMGLSESSSETSKLSSKSAKERRNRRKKKNQKKLSSGEEKGDAEKLSKSESEDSIRRKSFHLGVEGHRRAHEKRLSTPNQSPLSIRGSLFSARRSSRTSLFSFKGRGRDIGSETEFADDEHSIFGDNESRRGSLFVPHRPQERRSSNISQASRSPPMLPVNGKMHSAVDCNGVVSLVDGRSALMLPNGQLLPEGTTNQIHKKRRCSSYLLSEDMLNDPNLRQRAMSRASILTNTVEELEESRQKCPPWWYRFAHKFLIWNCSPYWIKFKKCIYFIVMDPFVDLAITICIVLNTLFMAMEHHPMTEEFKNVLAIGNLVFTGIFAAEMVLKLIAMDPYEYFQVGWNIFDSLIVTLSLVELFLADVEGLSVLRSFRLLRVFKLAKSWPTLNMLIKIIGNSVGALGNLTLVLAIIVFIFAVVGMQLFGKSYKECVCKINDDCTLPRWHMNDFFHSFLIVFRVLCGEWIETMWDCMEVAGQAMCLIVYMMVMVIGNLVPHSDSANCTWGIRFGKYEC

SEQ ID NO: 25800 - protein, 189 aa, Homo sapiens
MFSCCFPTSRGCCFRNGGSESLFRQCRRRLIPHPRRLWPFVRRRTQVPQDSPGQALAGQATPEIPSGLPLHIVLVQEEIREPMEAQTHAPGPYADIAALAAPAVEPKPAWEEPPPERALEVEGAPAKDQPSQELPEIMVMLKSIKTRLGRRVPAAPPALRRNLLLQAWKCVCNWASRLFAPNVLPRTGS

SEQ ID NO: 25801 - protein, 879 aa, Homo sapiens
MPVRKQDTQRALHLLEEYRSKLSQTEDRQLRSSIERVINIFQSNLFQALIDIQEFYEVTLLDNPKCIDRSKPSEPIQPVNTWEISSLPSSTVTSETLPSSLSPSVEKYRYQDEDTPPQEHISPQITNEVIGPELVHVSEKNLSEIENVHGFVSHSHISPIKANPPPVLVNTDSLETPTYVNGTDADYEYEEITLERGNSGLGFSIAGGTDNPHIGDDSSIFITKIITGGAAAQDGRLRVNDCILRVNEVDVRDVTHSKAVEALKEAGSIVRLYVKRRKPVSEKIMEIKLIKGPKGLGFSIAGGVGNQHIPGDNSIYVTKIIEGGAAHKDGKLQIGDKLLAVNNVCLEEVTHEEAVTALKNTSDFVYLKVAKPTSMYMNDGYAPPDITNSSSQPVDNHVSPSSFLGQTPASPARYSPVSKAVLGDDEITREPRKVVLHRGSTGLGFNIVGGEDGEGIFISFILAGGPADLSGELRKGDRIISVNSVDLRAASHEQAAAALKNAGQAVTIVAQYRPEEYSRFEAKIHDLREQMMNSSISSGSGSLRTSQKRSLYVRALFDYDKTKDSGLPSQGLNFKFGDILHVINASDDEWWQARQVTPDGESDEVGVIPSKRRVEKKERARLKTVKFNSKTRDKGQSFNDKRKKNLFSRKFPFYKNKDQSEQETSDADRGQEEYVLSYEPVNQQEVNYTRPVIILGPMKDRINDDLISEFPDKFGSCVPHTTRPKRDYEVDGRDYHFVTSREQMEKDIQEHKFIEAGQYNNHLYGTSVQSVREVAEKGKHCILDVSGNAIKRLQIAQLYPISIFIKPKSMENIMEMNKRLTEEQARKTFERAMKLEQEFTEHFTAIVQGDTLEDIYNQVKQIIEEQSGSYIWVPAKEKL

SEQ ID NO: 25802 - protein, 761 aa, Homo sapiens
MKELQAVRETLLRQHEAELLRVIKIKDNENQRLQALLSALRDGGPEKVKTVLLSEAKEEAKKGFEVEKVKMQQEISELKGAKRQVEEALTLVIQADKIKAAEIRSVYHLHQEEITRIKKECEREIRRLMEEIKFKDRAVFVLERELGVQAGHAQRLQLQKEALDEQLSQVREADRHPGSPRRELPHAAGAGDASDHSGSPEQQLDEKDARRFQLKIAELSAIIRKLEDRNALLSEERNELLKRVREAESQYKPLLDKNKRLSRKNEDLSHALRRMENKLKFVTQENIEMRQRAGIIRRPSSLNDLDQSQDEREVDFLKLQIVEQQNLIDELSKTLETAGYVKSVLERDKLLRFRKQRKKMAKLPKPVVVETFFGYDEEASLESDGSSVSYQTDRTDQTPCTPDDDLEEGMAKEETELRFRQLTMEYQALQRAYALLQEQVGGTLDAEREVKTREQLQAEVQRAQARIEDLEKALAEQGQDMKWIEEKQALYRRNQELVEKIKQMETEEARLRHEVQDARDQNELLEFRILELEERERKSPAISFHHTPFVDGKSPLQVYCEAEGVTDIVVAELMKKLDILGDNANLTNEEQVVVIQARTVLTLAEKWLQQIEETEAALQRKMVDLESEKELFSKQKGYLDEELDYRKQALDQANKHILELEAMLYDALQQEAGAKVAELLSEEEREKLKVAVEQWKRQVMSELRERDAQILRERMELLQLAQQRIKELEERIEAQKRQIKELEEKFLFLFLFFSLAFILWS

SEQ ID NO: 25803 - protein, 1178 aa, Homo sapiens
MSRETRRGALPRLRRGEQAAKMPGRCVGPSRSGRGVRRPWGKRRGAGTSRGRGARRRAKPSEWETRCVSAERPQGRQRPWGTRQAAETADAAGANEALGAPGTPGSIEAARDPGAVWVNGAVGEPEVVGLAGAVWVTGSGEEETEDRSPRGCERKGRPGSLGHESILHLWLKVQAMRAASGCGEGSRVELHPVPAGEGPVERGVPGRASWVETSRGGLTGPWVKEQARGIPRAPSGPTALGLGAAYERALGFCGQGQAGRVPPASVPGALASSSEMAPHLWRGEAVGVPETGEEIGYGFVSGPCEKEQTMGEPGTVGWTGAVGAPRAMEGELGCGGAAGLWGRGQSPQIPGALTHEAVCGATPGVWGRGQAVGVSDAVEEEPTSVGAAGVCYRRQAVEETDSVGMPGPWGTGYSVGVPCAAEEETRCGGDPGFRERGQPVWVETGSGGDPGSRGAAQTAESSCPGEQAAGSGGAPGLWGIQQATGVPRALGKDTGCVSVPGLWGAGQMVRVPQAVVVPGALGEELSHSGGLGLWDGQQALGGPPAEAVPGLGEETCSGNVLSPWERRQAVGEPESLGPPALGVPGSVDQEAGCGDVACQCGRRQAVGVSETVGIPRAADVPRQGCAAAGVLMAMGVPGSGKVPARVPAAVWASGPVCQEGSSRDILNLWERTRAARISVASGGPVAREELWSGGEESVASGGPVAQEELWSGGEESVASGGHVAREKLWSGGEDCGSGAFPGPWGRRQTIGVPVVPEGPGLGGETDSGGIPRPWGQRQRVRAPVATEVLLAPRVPGSVELEPGDGGFSGLSGRQQTAGMPGTVGLSAASGVPVAPRVPRPVQEETGSELWGERETVGGPADAKGPTRMEVPTSTRMPGPMAEKTGSGGVSGLLGGRQTTGVSMAVGLLGSVGEGTIFEHVSGLSGRRQTAGRPVAARGSMAVGVPTAPGLPGPMVGDTGSGDDGSGIWGRRLATEGPTAARVPGPVEGETGSEGVSGLWRRRHGGAIPEAGRVPLPLGVLAAVGAPMAGRAPAAVWVTGSSGAEADVGVSGLTVLRRQSTGGVGASEDETGGGNILGLAGGSQAVGTSHTCVPGARLWSCPRSLGEETAYENALGMSGTRTAVGVPSVSREEIGLGHFRDHLQPSGRRLAGGVSAVRVRGSNLGESYVGEARLRGAFQ

SEQ ID NO: 25804 - protein, 59 aa, Homo sapiens
MRSLGQNPTEAELQDMINEVDADGNGTIDFPEFLTMMARKMKDTDSEEEIREAFRVFDK

SEQ ID NO: 25805 - protein, 678 aa, Homo sapiens
MSSTRSQNPHGLKQIGLDQIWDDLRAGIQQVYTRQSMAKSRYMELYTHVYNYCTSVHQSNQARGAGVPPSKSKKGQTPGGAQFVGLELYKRLKEFLKNYLTNLLKDGEDLMDESVLKFYTQQWEDYRFSSKVLNGICAYLNRHWVRRECDEGRKGIYEIYSLALVTWRDCLFRPLNKQVTNAVLKLIEKERNGETINTRLISGVVQSYVELGLNEDDAFAKGPTLTVYKESFESQFLADTERFYTRESTEFLQQNPVTEYMKKDPKMYVQTVLDVHKKYNALVMSAFNNDAGFVAALDKACGRFINNNAVTKMAQSSSKSPELLARYCDSLLKKSSKNPEEAELEDTLNQVMVVFKYIEDKDVFQKFYAKMLAKRLVHQNSASDDAEASMISKLKQACGFEYTSKLQRMFQDIGVSKDLNEQFKKHLTNSEPLDLDFSIQVLSSGSWPFQQSCTFALPSELERSYQRFTAFYASRHSGRKLTWLYQLSKGELVTNCFKNRYTLQASTFQMAILLQYNTEDAYTVQQLTDSTQIKMDILAQVLQILLKSKLLVLEDENANVDEVELKPDTLIKLYLGYKNKKLRVNINVPMKTEQKQEQETTHKNIEEDRKLLIQAAIVRIMKMRKVLKHQQLLGEVLTQLSSRFKPRVPVIKKCIDILIEKEYLERVDGEKDTYSYLA

SEQ ID NO: 25806 - protein, 925 aa, Homo sapiens
MPVRKQDTQRALHLLEEYRSKLSQTEDRQLRSSIERVINIFQSNLFQALIDIQEFYEVTLLDNPKCIDRSKPSEPIQPVNTWEISSLPSSTVTSETLPSSLSPSVEKYRYQDEDTPPQEHISPQITNEVIGPELVHVSEKNLSEIENVHGFVSHSHISPIKPTEAVLPSPPTVPVIPVLPVPAENTVILPTIPQANPPPVLVNTDSLETPTYVNGTDADYEYEEITLERGNSGLGFSIAGGTDNPHIGDDSSIFITKIITGGAAAQDGRLRVNDCILRVNEVDVRDVTHSKAVEALKEAGSIVRLYVKRRKPVSEKIMEIKLIKGPKGLGFSIAGGVGNQHIPGDNSIYVTKIIEGGAAHKDGKLQIGDKLLAVNNVCLEEVTHEEAVTALKNTSDFVYLKVAKPTSMYMNDGYAPPDITNSSSQPVDNHVSPSSFLGQTPASPARYSPVSKAVLGDDEITREPRKVVLHRGSTGLGFNIVGGEDGEGIFISFILAGGPADLSGELRKGDRIISVNSVDLRAASHEQAAAALKNAGQAVTIVAQYRPEEYSRFEAKIHDLREQMMNSSISSGSGSLRTSQKRSLYVRALFDYDKTKDSGLPSQGLNFKFGDILHVINASDDEWWQARQVTPDGESDEVGVIPSKRRVEKKERARLKTVKFNSKTRDKGSFNDKRKKNLFSRKFPFYKNKDQSEQETSDADQHVTSNASDSESSYRGQEEYVLSYEPVNQQEVNYTRPVIILGPMKDRINDDLISEFPDKFGSCVPHTTRPKRDYEVDGRDYHFVTSREQMEKDIQEHKFIEAGQYNNHLYGTSVQSVREVAEKGKHCILDVSGNAIKRLQIAQLYPISIFIKPKSMENIMEMNKRLTEEQARKTFERAMKLEQEFTEHFTAIVQGDTLEDIYNQVKQIIEEQSGSYIWVPAKEKL

SEQ ID NO: 25807 - protein, 391 aa, Homo sapiens
MLELQYHNEDLEKDKTSQNCLGRGMEQVAKKLGVAHEEIQRLTDELQVKEKEQCKLDSALKKAQLEIDKLKENLVKLKENDAADLQKAKEQNQRLDEEILALRNRVRSLDSEKKVLGEMVERLKGEVCESQENKQLGNHSPGKTVGGEQREQHPSSGEKLKYNQQGEVQQLHQNLHRLQILCNSAENELRYERGQNLDLKQHNSLLQEENIKIKIELKHAQQKLLDSTKMCSSLTAEYKHCQQKIKELELEVLKHTQSIKSQNNLQEKLVQEKSKVADAEEKILDLQRKLEHAHKVCLTDTCISEKQQLEEKIKEATQNEAKVKQQYQEEQQKRKLLYQNVDELHRQVRTLQDKENLLEMTCSQQQSRIQQQEALLKQLENEKRKYDEVRK

SEQ ID NO: 25808 - protein, 165 aa, Homo sapiens
MSRVPSPPPPAEMSSGPVAESWCYTQIKVVKFSYMWTINNFSFCREEMGEVIKSSTFSSGANDKLKWCLRVNPKGLDEESKDYLSLYLLLVSCPKSEVRAKFKFSILNAKGEETKAMESQRAYRFVQGKDWGFKKFIRRDFLLDEANGLLPDDKLTLFCEILIKS

SEQ ID NO: 25809 - protein, 806 aa, Homo sapiens
MAAEEADVDIEGDVVAAAGAQPGSGENTASVLQKDHYLDSSWRTENGLIPWTLDNTISEENRAVIEKMLLEEEYYLSKKSQPEKVWLDQKEDDKKYMKSLQKTAKIMVHSPTKPASYSVKWTIEEKELFEQGLAKFGRRWTKISKLIGSRTVLQVKSYARQYFKNKVKCGLDKETPNQKTGHNLQVKNEDKGTKAWTPSCLRGRADPNLNAVKIEKLSDDEEVDITDEVDELSSQTPQKNSSSDLLLDFPNSKMHETNQGEFITSDSQEALFSKSSRGCLQNEKQDETLSSSEITLWTEKQSNGDKKSIELNDQKFNELIKNCNKHDGRGIIVDARQLPSPEPCEIQKNLNDNEMLFHSCQMVEESHEEEELKPPEQEIEIDRNIIQEEEKQAIPEFFEGRQAKTPERYLKIRNYILDQWEICKPKYLNKTSVRPGLKNCGDVNCIGRIHTYLELIGAINFGCEQAVYNRPQTVDKVRIRDRKDAVEAYQLAQRLQSMRTRRRRVRDPWGNWCDAKDLEGQTFEHLSAEELAKRREEEKGRPVKSLKVPRPTKSSFDPFQLIPCNFFSEEKQEPFQVKVASEALLIMDLHAHVSMAEVIGLLGGRYSEVDKVVEVCAAEPCNSLSTGLQCEMDPVSQTQASETLAVRGFSVIGWYHSHPAFDPNPSLRDIDTQAKYQSYFSRGGAKFIGMIVSPYNRNNPLPYSQITCLVISEEISPDGSYRLPYKFEVQQMLEEPQWGLVFEKTRWIIEKYRLSHSSVPMDKIFRRDSDLTCLQKALSSFSRALRIQSQSPALSRHIHDQQRQLE

SEQ ID NO: 25810 - protein, 1245 aa, Homo sapiens
MGSVTGAVLKTLLLLSTQNWNRVEAGNSYDCDDPLVSALPQASFSSSSELSSSHGPGFARLNRRDGAGGWSPLVSNKYQWLQIDLGERMEVTAVATQGGYGSSNWVTSYLLMFSDSGWNWKQYRQEDSIWGFSGNANADSVVYYRLQPSIKARFLRFIPLEWNPKGRIGMRIEVFGCAYRSEVVDLDGKSSLLYRFDQKSLSPIKDIISLKFKTMQSDGILLHREGPNGDHITLQLRRARLFLLINSGEAKLPSTSTLVNLTLGSLLDDQHWHSVLIQRLGKQVNFTVDEHRHHFHARGEFNLMNLDYEISFGGIPAPGKSVSFPHRNFHGCLENLYYNGVDIIDLAKQQKPQIIAMGNVSFSCSQPQSMPVTFLSSRSYLALPDFSGEEEVSATFQFRTWNKAGLLLFSELQLISGGILLFLSDGKLKSNLYQPGKLPSDITAGVELNDGQWHSVSLSAKKNHLSVAVDGQMASAAPLLGPEQIYSGGTYYFGGCPDKSFGSKCKSPLGGFQGCMRLISISGKVVDLISVQQGSLGNFSDLQIDSCGISDRCLPNYCEHGGECSQSWSTFHCNCTNTGYRGATCHNSIYEQSCEAYKHRGNTSGFYYIDSDGSGPLEPFLLYCNMTETAWTIIQHNGSDLTRVRNTNPENPYAGFFEYVASMEQLQATINRAEHCEQEFTYYCKKSRLVNKQDGTPLSWWVGRTNETQTYWGGSSPDLQKCTCGLEGNCIDSQYYCNCDADRNEWTNDTGLLAYKEHLPVTKIVITDTGRLHSEAAYKLGPLLCQGDRSFWNSASFDTEASYLHFPTFHGELSADVSFFFKTTASSGVFLENLGIADFIRIELRSPTVVTFSFDVGNGPFEISVQSPTHFNDNQWHHVRVERNMKEASLQVDQLTPKTQPAPADGHVLLQLNSQLFVGGTATRQRGFLGCIRSLQLNGMTLDLEERAQVTPEVQPGCRGHCSSYGKLCRNGGKCRERPIGFFCDCTFSAYTGPFCSNEISAYFGSGSSVIYNFQENYLLSKNSSSHAASFHGDMKLSREMIKFSFRTTRTPSLLLFVSSFYKEYLSVIIAKNGSLQIRYKLNKYQEPDVVNFDFKNMADGQLHHIMINREEGVVFIEIDDNRRRQVHLSSGTEFSAVKSLVLGRILEHSDVDQDTALAGAQGFTGCLSAVQLSHVAPLKAALHPSHPDPVTVTGHVTESSCMAQPGTDATSRERTHSFADHSGTIDDREPLANAIKSDSAVIGG

SEQ ID NO: 25811 - protein, 718 aa, Homo sapiens
MSIKRRGMFEPYLKSFYIRSTDPTQIKILKLEVLTNLANETNIPTVLREFQTYIRSMDKDFVAATIQAIGRCATNIGRVRDTCLNGLVQLLSNRDELVVAESVVVIKKLLQMQPAQHGEIIKHLAKLTDNIQVPMARASILWLIGEYCEHVPRIAPDVLRKMAKSFTAEEDIVKLQVINLAAKLYLTNSKQTKLLTQYVLSLAKYDQNYDIRDRARFTRQLIVPSEQGGALSRHAKKLFLAPKPAPVLESSFKDRDHFQLGSLSHLLNAKATGYQELPDWPEEAPDPSVRNVEVPEWTKCSNREKRKEKEKPFYSDSEGESGPTESADSDPESESESDSKSSSESGSGESSSESDNEDQDEDEEKGRGSESEQSEEDGKRKTKKKVPERKGEASSSDEGSDSSSSSSESEMTSESEEEQLEPASWSRKTPPSSKSAPATKEISLLDLEDFTPPSVQPVSPPAIVSTSLAADLEGLTLTDSTLVPSLLSPVSGVGRQELLHRVAGEGLAVDYTFSRQPFSGDPHMVSVHIHFSNSSDTPIKGLHVGTPKLPAGISIQEFPEIESLAPGESATAVMGINFCDSTQAANFQLCTQTRQFYVSIQPPVGELMAPVFMSENEFKKEQGKLMGMNEITEKLMLPDTCRSDHIVVQKVTATANLGRVPCGTSDEYRFAGRTLTGGSLVLLTLDARPAGAAQLTVNSEKMVIGTMLVKDVIQALTQ

SEQ ID NO: 25812 - protein, 335 aa, Homo sapiens
MRILHVNGFNGEGGEEDPQAARSNSDGEKATKVQDIKNNLKEAIETIVAAMSNLVPPVELANPENQFRVDYILSVMNVPDFDFPPEFYEHAKALWEDEGVRACYERSNEYQLIDCAQYFLDKIDVIKQADYVPSDQDLLRCRVLTSGIFETKFQVDKVNFHMFDVGGQRDERRKWIQCFNDVTAIIFVVASSSYNMVIREDNQTNRLQEALNLFKSIWNNRWLRTISVILFLNKQDLLAEKVLAGKSKIEDYFPEFARYTTPEDATPEPGEDPRVTRAKYFIRDEFLRISTASGDGRHYCYPHFTCAVDTENIRRVFNDCRDIIQRMHLRQYELL

SEQ ID NO: 25813 - protein, 567 aa, Homo sapiens
MSLVPATNYIYTPLNQLKGGTIVNVYGVVKFFKPPYLSKGTDYCSVVTIVDQTNVKLTCLLFSGNYEALPIIYKNGDIVRFHRLKIQVYKKETQGITSSGFASLTFEGTLGAPIIPRTSSKYFNFTTEDHKMVEALRVWASTHMSPSWTLLKLCDVQPMQYFDLTCQLLGKAEVDGASFLLKVWDGTRTPFPSWRVLIQDLVLEGDLSHIHRLQNLTIDILVYDNHVHVARSLKVGSFLRIYSLHTKLQSMNSENQTMLSLEFHLHGGTSYGRGIRVLPESNSDVDQLKKDLESANLTANQHSDVICQSEPDDSFPSSGSVSLYEVERCQQLSATILTDHQYLERTPLCAILKQKAPQQYRIRAKLRSYKPRRLFQSVKLHCPKCHLLQEVPHEGDLDIIFQDGATKTPDVKLQNTSLYDSKIWTTKNQKGRKVAVHFVKNNGILPLSNECLLLIEGGTLSEICKLSNKFNSVIPVRSGHEDLELLDLSAPFLIQGTIHHYGCKQCSSLRSIQNLNSLVDKTSWIPSSVAEAISAEDLCDQMHRGFHPHTKQAIPQQTPAGCPPVQF

SEQ ID NO: 25814 - protein, 908 aa, Homo sapiens
EKQEQNDQYTPSNRFIWNQGKWLPNSTTTCSLSPDSAILKLKAAANAVLQDKSLTRTEETMRFESFSSPFSSQSASSTLAALSKKVSERSLTPGQEHPPPASSFLSLASMTSSAALLKEVAARAAGSLLAEKSSLLPEDPLPPPPSEKKPEKVTPPPPPPPPPPPPPPPQSLELLLLPVPKGRVSKPSNSEEESGKPFQCPICGLVIKRKSYWKRHMVIHTGLKSHQCPLCPFRCARKDNLKSHMKVHQHQDRGETFQCQLCPFTSSRHFSLKLHMRCHQHFLRTEAKVKEEIPDPDVKGSPHLSDSACLGQQREGGGTELVGTMMTSNTPERTSQGGAGVSPLLVKEEPKEDNGLPTSFTLNAADRPANHTKLKDPSEYVANSASALFSQDISVKMASDFLMKLSAANQKEPMNLNFKVKEEPKEGESLSTTLPRSSYVFSPESEVSAPGVSEDALKPQEGKGSVLRRDVSVKAASELLMKLSAESYKETQMVKIKEEPMEVDIQDSHVSISPSRNVGYSTLIGREKTEPLQKMPEGRVPPERNLFSQDISVKMASELLFQLSEKVSKEHNHTKENTIRTTTSPFFSEDTFRQSPFTSNSKELLPSDSVLHGRISAPETEKIVLEAGNGLPSWKFNDQLFPCDVCGKVFGRQQTLSRHLSLHTEERKYKCHLCPYAAKCRANLNQHLTVHSVKLVSTDTEDIVSAVTSEGSDGKKHPYYYSCHVCGFETELNVQFVSHMSLHVDKEQWMFSICCTACDFVTMEEAEIKTHIGTKHTGEDRKTPSESNSPSSSSLSALSDSANSKDDSDGSQKNKGGNNLLVISVMPGSQPSLNSEEKPEKGFECVFCNFVCKTKNMFERHLQIHLITRMFECDVCHKFMKTPEQLLEHKKCHTVPTGGLNLCSRMTK

SEQ ID NO: 25815 - protein, 379 aa, Homo sapiens
MATPEENSNPHDRATPQLPAQLQELEHRVARRRLSQARHRATLAALFNNLRKTVYSQSDLIASKWQVLNKAKSHIPELEQTLDNLLKLKASFNLEDGHASSLEEVKKEYASMYSGNDSLLSNSFPQNGSSPWCPTEAVRKDAEEEEDEEEEDQEEEEEEEEEEEEEEEEEEEEEEEEEKKVILYSPGTLSPDLMEFERYLNFYKQTMDLLTGSGIITPQEAALPIVSAAISHLWQNLSEERKASLRQAWAQKHRGPATLAEACREPACAEGSVKDSGVDSQGASCSLVSTPEEILFEDAFDVASFLDKSEVPSTSSSSSVLASCNPENPEEKFQLYMQIINFFKGLSCANTQVKQEASFPVDEEMIMLQCTETFDDEDL

SEQ ID NO: 25816 - protein, 666 aa, Homo sapiens
MLELQYHNEDLEKDKTSQNCLGRGMEQVAKKLGVAHEEIQRLTDELQVKEKEQCKLDSALKKAQLEIDKLKENLVKLKENDAADLQKAKEQNQRLDEEILALRNRVRSLDSEKKVLGEMVERLKGEVCESQENKQLGNHSPGKTVGGEQREQHPSSGEKLKYNQQGEVQQLHQNLHRLQILCNSAENELRYERGQNLDLKQHNSLLQEENIKIKIELKHAQQKLLDSTKMCSSLTAEYKHCQQKIKELELEVLKHTQSIKSQNNLQEKLVQEKSKVADAEEKILDLQRKLEHAHKVCLTDTCISEKQQLEEKIKEATQNEAKVKQQYQEEQQKRKLLYQNVDELHRQVRTLQDKENLLEMTCSQQQSRIQQQEALLKQLENEKRKYDEHVKSNQELSEKLSKLQQEKEALREEYLRLLKLLNVHVRNYNEKHHQQKVKLQKVKYRLTNEVELRDKRINQFEDEIGILQHKIEKEKAIQDQITAQNDTLLLEKRKLQEQVIEQEQLIHSNKWTISSIQSRVLYMDKENKQLQENSLRLTQQIGFLERIIRSIHIRRGENLKEFPVPKWWHRGKLASLPPTKKQKEIYSTEVFTSNNAELQHEDESVPEATEKWKHSEQMETTISDILESEVVNEILPLSNSRLVKSRQIKSSLSEMDCQPCLRVMAA

SEQ ID NO: 25817 - protein, 185 aa, Homo sapiens
QQPPLPPSQPAFSQVPASSTSTLPPSTHSKTSAVSSQANSQPPVQVSVKTQVSVTAAIPHLKTSTLPPLPLPPLLPGDDDMDRICCPRYGERRQTESDWGKRCVDKFDIIGIIGEGTYGQVYKAKDKDTGELVALKKVRLDNEKEGFPITAIREIKILRQLIHRSVVNMKEIVTDKQDALDFKKD

SEQ ID NO: 25818 - protein, 317 aa, Homo sapiens
IDKDEEFAGSSPQSSKSTVVKSLIDNSSEIEDEDQILENSSQKENVFKCDSLKEECIPEHMVRGSKIMEAESQKATRECEKSALTPGFSDNAIMLFSPDFTLRNTLKSTSEDSLVKQECIKEVVEKREACHCEEVKMTVASEAKIQLSDSEAKSHSSADDASAWSNIQEAPLQDDSCLNNDIPHSIPLEQGSSCNGPGQTTGHPYYLRSFLVVLKTVLENEDDMLLFDEQEKGIVTKFYQLSATGQKLYVRLFQRKLSWIKMTKLEYEEIALDLTPVIEELTNAGFLQTEPKPWLDSQYESVKAPGLCFPASCYCFR

SEQ ID NO: 25819 - protein, 1133 aa, Homo sapiens
MGISTVILEMCLLWGQVLSTGGWIPRTTDYASLIPSEVPLDPTVAEGSPFPSESTLESTVAEGSPISLESTLESTVAEGSLIPSESTLESTVAEGSDSGLALRLVNGDGRCQGRVEILYRGSWGTVCDDSWDTNDANVVCRQLGCGWAMSAPGNAWFGQGSGPIALDDVRCSGHESYLWSCPHNGWLSHNCGHGEDAGVICSAPQSRPTPSPDTWPTSHASTAGSESSLALRLVNGGDRCQGRVEVLYRGSWGTVCDDYWDTNDANVVCRQLGCGWATSAPGNARFGQGSGPIVLDDVRCSGHESYLWSCPHNGWLSHNCGHHEDAGVICSASQSQPTPSPDTWPTSRASTAGSESTLALRLVNGGDRCRGRVEVLYQGSWGTVCDDYWDTNDANVVCRQLGCGWAMSAPGNAQFGQGSGPIVLDDVRCSGHESYLWSCPHNGWLSHNCGHHEDAGVICSATQINSTTTDWWHPTTTTTARPSSNCGGFLFYASGTFSSPSYPAYYPNNAKCVWEIEVNSGYRINLGFSNLKLEAHHNCSFDYVEIFDGSLNSSLLLGKICNDTRQIFTSSYNRMTIHFRSDISFQNTGFLAWYNSFPSDATLRLVNLNSSYGLCAGRVEIYHGGTWGTVCDDSWTIQEAEVVCRQLGCGRAVSALGNAYFGSGSGPITLDDVECSGTESTLWQCRNRGWFSHNCNHREDAGVICSGNHLSTPAPFLNITRPNTDYSCGGFLSQPSGDFSSPFYPGNYPNNAKCVWDIEVQNNYRVTVIFRDVQLEGGCNYDYIEVFDGPYRSSPLIARVCDGARGSFTSSSNFMSIRFISDHSITRRGFRAEYYSSPSNDSTNLLCLPNHMQASVSRSYLQSLGFSASDLVISTWNGYYECRPQITPNLVIFTIPYSGCGTFKQADNDTIDYSNFLTAAVSGGIIKRRTDLRIHVSCRMLQNTWVDTMYIANDTIHVANNTIQVEEVQYGNFDVNISFYTSSSFLYPVTSRPYYVDLNQDLYVQAEILHSDAVLTLFVDTCVASPYSNDFTSLTYDLIRSGCVRDDTYGPYSSPSLRIARFRFRAFHFLNRFPSVYLRCKMVVCRAYDPSSRCYRGCVLRSKRDVGSYQEKVDVVLGPIQLQTPPRREEEPR

SEQ ID NO: 25820 - protein, 320 aa, Homo sapiens
MRILHVNGFNGDEKATKVQDIKNNLKEAIETIVAAMSNLVPPVELANPENQFRVDYILSVMNVPDFDFPPEFYEHAKALWEDEGVRACYERSNEYQLIDCAQYFLDKIDVIKQADYVPSDQDLLRCRVLTSGIFETKFQVDKVNFHMFDVGGQRDERRKWIQCFNDVTAIIFVVASSSYNMVIREDNQTNRLQEALNLFKSIWNNRWLRTISVILFLNKQDLLAEKVLAGKSKIEDYFPEFARYTTPEDATPEPGEDPRVTRAKYFIRDEFLRISTASGDGRHYCYPHFTCAVDTENIRRVFNDCRDIIQRMHLRQYELL

SEQ ID NO: 25821 - protein, 760 aa, Homo sapiens
MQFFGRLVNTFSGVTNLFSNPFRVKEVAVADYTSSDRVREEGQLILFQNTPNRTWDCVLVNPRNSQSGFRLFQLELEADALVNFHQYSSQLLPFYESSPQVLHTEVLQHLTDLIRNHPSWSVAHLAVELGIRECFHHSRIISCANCAENEEGCTPLHLACRKGDGEILVELVQYCHTQMDVTDYKGETVFHYAVQGDNSQVLQLLGRNAVAGLNQVNNQGLTPLHLACQLGKQEMVRVLLLCNARCNIMGPNGYPIHSAMKFSQKGCAEMIISMDSSQIHSKDPRYGASPLHWAKNAEMARMLLKRGCNVNSTSSAGNTALHVAVMRNRFDCAIVLLTHGANADARGEHGNTPLHLAMSKDNVEMIKALIVFGAEVDTPNDFGETPTFLASKIGRPCPALCLTELQDLMHISRARKPAFILGSMRDEKRTHDHLLCLDGGGVKGLIIIQLLIAIEKASGVATKDLFDWVAGTSTGGILALAILHSKSMAYMRGMYFRMKDEVFRGSRPYESGPLEEFLKREFGEHTKMTDVRKPKVMLTGTLSDRQPAELHLFRNYDAPETVREPRFNQNVNLRPPAQPSDQLVWRAARSSGAAPTYFRPNGRFLDGGLLANNPTLDAMTEIHEYNQDLIRKGQANKVKKLSIVVSLGTGRSPQVPVTCVDVFRPSNPWELAKTVFGAKELGKMVVDCCTDPDGRAVDRARAWCEMVGIQYFRLNPQLGTDIMLDEVSDTVLVNALWETEVYIYEHREEFQKLIQLLLSP

SEQ ID NO: 25822 - protein, 559 aa, Homo sapiens
MSLVPATNYIYTPLNQLKGGTIVNVYGVVKFFKPPYLSKGTDYCSVVTIVDQTNVKLTCLLFSGNYEALPIIYKNGDIVRFHRLKIQVYKKETQGITSSGFASLTFEGTLGAPIIPRTSSKYFNFTTEDHKMVEALRVWASTHMSPSWTLLKLCDVQPMQYFDLTCQLLGKAEVDGASFLLKVWDGTRTPFPSWRVLIQDLVLEGDLSHIHRLQNLTIDILVYDNHVHVARSLKVGSFLRIYSLHTKLQSMNSENQTMLSLEFHLHGGTSYGRGIRVLPESNSDVDQLKKDLESANLTANQHSDVICQSEPDDSFPSSGSVSLYEVERCQQLSATILTDHQYLERTPLCAILKQKAPQQYRIRAKLRSYKPRRLFQSVKLHCPKCHLLQEVPHEGDLDIIFQDGATKTPDVKLQNTSLYDSKIWTTKNQKGRKVAVHFVKNNGILPLSNECLLLIEALGIVPLQYVFVMTFTLDDGTGVLEAYLMDSDKFFQIPASEVLMDDDLQKSVDMIMDMFCPPGIKIDAYPWLECFIKSYNVTNGTDNQICYQIFDTTVAEDVI

SEQ ID NO: 25823 - protein, 2532 aa, Homo sapiens
MGISTVILEMCLLWGQVLSTGGWIPRTTDYASLIPSEVPLDPTVAEGSPFPSESTLESTVAEGSPISLESTLESTVAEGSLIPSESTLESTVAEGSDSGLALRLVNGDGRCQGRVEILYRGSWGTVCDDSWDTNDANVVCRQLGCGWAMSAPGNAWFGQGSGPIALDDVRCSGHESYLWSCPHNGWLSHNCGHGEDAGVICSAAQPQSTLRPESWPVRISPPVPTEGSESSLALRLVNGGDRCRGRVEVLYRGSWGTVCDDYWDTNDANVVCRQLGCGWAMSAPGNAQFGQGSGPIVLDDVRCSGHESYLWSCPHNGWLTHNCGHSEDAGVICSAPQSRPTPSPDTWPTSHASTAGPESSLALRLVNGGDRCQGRVEVLYRGSWGTVCDDSWDTSDANVVCRQLGCGWATSAPGNARFGQGSGPIVLDDVRCSGYESYLWSCPHNGWLSHNCQHSEDAGVICSDTLPTITLPASTVGSESSLALRLVNGGDRCQGRVEVLYRGSWGTVCDDSWDTNDANVVCRQLGCGWAMLAPGNARFGQGSGPIVLDDVRCSGNESYLWSCPHNGWLSHNCGHSEDAGVICSGPESSLALRLVNGGDRCQGRVEVLYRGSWGTVCDDSWDTNDANVVCRQLGCGWATSAPGNARFGQGSGPIVLDDVRCSGHESYLWSCPNNGWLSHNCGHHEDAGVICSAAQSRSTPRPDTLSTITLPPSTVGSESSLTLRLVNGSDRCQGRVEVLYRGSWGTVCDDSWDTNDANVVCRQLGCGWATSAPGNARFGQGSGPIVLDDVRCSGHESYLWSCPHNGWLSHNCGHHEDAGVICSVSQSRPTPSPDTWPTSHASTAGPESSLALRLVNGGDRCQGRVEVLYRGSWGTVCDDSWDTSDANVVCRQLGCGWATSAPGNARFGQGSGPIVLDDVRCSGYESYLWSCPHNGWLSHNCQHSEDAGVICSAAHSWSTPSPDTLPTITLPASTVGSESSLALRLVNGGDRCQGRVEVLYQGSWGTVCDDSWDTNDANVVCRQLGCGWAMSAPGNARFGQGSGPIVLDDVRCSGHESYLWSCPHNGWLSHNCGHSEDAGVICSASQSRPTPSPDTWPTSHASTAGSESSLALRLVNGGDRCQGRVEVLYRGSWGTVCDDYWDTNDANVVCRQLGCGWAMSAPGNARFGQGSGPIVLDDVRCSGHESYLWSCPHNGWLSHNCGHHEDAGVICSASQSQPTPSPDTWPTSHASTAGSESSLALRLVNGGDRCQGRVEVLYRGSWGTVCDDYWDTNDANVVCRQLGCGWATSAPGNARFGQGSGPIVLDDVRCSGHESYLWSCPHNGWLSHNCGHHEDAGVICSASQSQPTPSPDTWPTSHASTAGSESSLALRLVNGGDRCQGRVEVLYRGSWGTVCDDYWDTNDANVVCRQLGCGWATSAPGNARFGQGSGPIVLDDVRCSGHESYLWSCPHNGWLSHNCGHHEDAGVICSASQSQPTPSPDTWPTSHASTAGSESSLALRLVNGGDRCQGRVEVLYRGSWGTVCDDYWDTNDANVVCRQLGCGWATSAPGNARFGQGSGPIVLDDVRCSGHESYLWSCPHNGWLSHNCGHHEDAGVICSASQSQPTPSPDTWPTSRASTAGSESTLALRLVNGGDRCRGRVEVLYQGSWGTVCDDYWDTNDANVVCRQLGCGWAMSAPGNAQFGQGSGPIVLDDVRCSGHESYLWSCPHNGWLSHNCGHHEDAGVICSAAQSQSTPRPDTWLTTNLPALTVGSESSLALRLVNGGDRCRGRVEVLYRGSWGTVCDDSWDTNDANVVCRQLGCGWAMSAPGNARFGQGSGPIVLDDVRCSGNESYLWSCPHKGWLTHNCGHHEDAGVICSATQINSTTTDWWHPTTTTTARPSSNCGGFLFYASGTFSSPSYPAYYPNNAKCVWEIEVNSGYRINLGFSNLKLEAHHNCSFDYVEIFDGSLNSSLLLGKICNDTRQIFTSSYNRMTIHFRSDISFQNTGFLAWYNSFPSDATLRLVNLNSSYGLCAGRVEIYHGGTWGTVCDDSWTIQEAEVVCRQLGCGRAVSALGNAYFGSGSGPITLDDVECSGTESTLWQCRNRGWFSHNCNHREDAGVICSGNHLSTPAPFLNITRPNTDYSCGGFLSQPSGDFSSPFYPGNYPNNAKCVWDIEVQNNYRVTVIFRDVQLEGGCNYDYIEVFDGPYRSSPLIARVCDGARGSFTSSSNFMSIRFISDHSITRRGFRAEYYSSPSNDSTNLLCLPNHMQASVSRSYLQSLGFSASDLVISTWNGYYECRPQITPNLVIFTIPYSGCGTFKQADNDTIDYSNFLTAAVSGGIIKRRTDLRIHVSCRMLQNTWVDTMYIANDTIHVANNTIQVEEVQYGNFDVNISFYTSSSFLYPVTSRPYYVDLNQDLYVQAEILHSDAVLTLFVDTCVASPYSNDFTSLTYDLIRSGCVRDDTYGPYSSPSLRIARFRFRAFHFLNRFPSVYLRCKMVVCRAYDPSSRCYRGCVLRSKRDVGSYQEKVDVVLGPIQLQTPPRREEEPR

SEQ ID NO: 25824 - protein, 5379 aa, Homo sapiens
MWPSYQDEHEFNAHLVCRMCCMDERDRVQKKTFTKWVNKHLMKVRKHINDLYEDLRDGHNLISLLEVLSGIKLPREKGRMRFHRLQNVQIALDFLKQRQVKLVNIRNDDITDGNPKLTLGLIWTIILHFQISDIYISGESGDMSAKEKLLLWTQKVTAGYTGIKCTNFSSCWSDGKMFNALIHRYRPDLVDMERVQIQSNRENLEQAFEVAERLGVTRLLDAEDVDVPSPDEKSVITYVSSIYDAFPKVPEGGEGISATEVDSRWQEYQSRVDSLIPWIKQHTILMSDKTFPQNPVELKALYNQYIHFKETEILAKEREKGRIEELYKLLEVWIEFGRIKLPQGYHPNDVEEEWGKLIIEMLEREKSLRPAVERLELLLQIANKIQNGALNCEEKLTLAKNTLQADAAHLESGQPVQCESDVIMYIQECEGLIRQLQVDLQILRDENYYQLEELAFRVMRLQDELVTLRLECTNLYRKGHFTSLELVPPSTLTTTHLKAEPLTKATHSSSTSWFRKPMTRAELVAISSSEDEGNLRFVYELLSWVEEMQMKLERAEWGNDLPSVELQLETQQHIHTSVEELGSSVKEARLYEGKMSQNFHTSYAETLGKLETQYCKLKETSSFRMRHLQSLHKFVSRATAELIWLNEKEEEELAYDWSDNNSNISAKRNYFSELTMELEEKQDVFRSLQDTAELLSLENHPAKQTVEAYSAAVQSQLQWMKQLCLCVEQHVKENTAYFQFFSDARELESFLRNLQDSIKRKYSCDHNTSLSRLEDLLQDSMDEKEQLIQSKSSVASLVGRSKTIVQLKPRSPDHVLKNTISVKAVCDYRQIEITICKNDECVLEDNSQRTKWKVISPTGNEAMVPSVCFLIPPPNKDAIEMASRVEQSYQKVMALWHQLHVNTKSLISWNYLRKDLDLVQTWNLEKLRSSAPGECHQIMKNLQAHYEDFLQDSRDSVLFSVADRLRLEEEVEACKARFQHLMKSMENEDKEETVAKMYISELKNIRLRLEEYEQRVVKRIQSLASSRTDRDAWQDNALRIAEQEHTQEDLQQLRSDLDAVSMKCDSFLHQSPSSSSVPTLRSELNLLVEKMDHVYGLSTVYLNKLKTVDVIVRSIQDAELLVKGYEIKLSQEEVVLADLSALEAHWSTLRHWLSDVKDKNSVFSVLDEEIAKAKVVAEQMSRLTPERNLDLERYQEKGSQLQERWHRVIAQLEIRQSELESIQEVLGDYRACHGTLIKWIEETTAQQEMMKPGQAEDSRVLSEQLSQQTALFAEIERNQTKLDQCQKFSQQYSTIVKDYELQLMTYKAFVESQQKSPGKRRRMLSSSDAITQEFMDLRTRYTALVTLTTQHVKYISDALRRLEEEEKVVEEEKQEHVEKVKELLGWVSTLARNTQGKATSSETKESTDIEKAILEQQVLSEELTTKKEQVSEAIKTSQIFLAKHGHKLSEKEKKQISEQLNALNKAYHDLCDGSANQLQQLQSQLAHQTEQKTLQKQQNTCHQQLEDLCSWVGQAERALAGHQGRTTQQDLSALQKNQSDLKDLQDDIQNRATSFATVVKDIEGFMEENQTKLSPRELTALREKLHQAKEQYEALQEETRVAQKELEEAVTSALQQETEKSKAAKELAENKKKIDALLDWVTSVGSSGGQLLTNLPGMEQLSGASLEKGALDTTDGYMGVNQAPEKLDKQCEMMKARHQELLSQQQNFILATQSAQAFLDQHGHNLTPEEQQMLQQKLGELKEQYSTSLAQSEAELKQVQTLQDELQKFLQDHKEFESWLERSEKELENMHKGGSSPETLPSLLKRQGSFSEDVISHKGDLRFVTISGQKVLDMENSFKEGKEPSEIGNLVKDKLKDATERYTALHSKCTRLGSHLNMLLGQYHQFQNSADSLQAWMQACEANVEKLLSDTVASDPGVLQEQLATTKQLQEELAEHQVPVEKLQKVARDIMEIEGEPAPDHRHVQETTDSILSHFQSLSYSLAERSSLLQKAIAQSQSVQESLESLLQSIGEVEQNLEGKQVSSLSSGVIQEALATNMKLKQDIARQKSSLEATREMVTRFMETADSTTAAVLQGKLAEVSQRFEQLCLQQQEKESSLKKLLPQAEMFEHLSGKLQQFMENKSRMLASGNQPDQDITHFFQQIQELNLEMEDQQENLDTLEHLVTELSSCGFALDLCQHQDRVQNLRKDFTELQKTVKEREKDASSCQEQLDEFRKLVRTFQKWLKETEGSIPPTETSMSAKELEKQIEHLKSLLDDWASKGTLVEEINCKGTSLENLIMEITAPDSQGKTGSILPSVGSSVGSVNGYHTCKDLTEIQCDMSDVNLKYEKLGGVLHERQESLQAILNRMEEVHKEANSVLQWLESKEEVLKSMDAMSSPTKTETVKAQAESNKAFLAELEQNSPKIQKVKEALAGLLVTYPNSQEAENWKKIQEELNSRWERATEVTVARQRQLEESASHLACFQAAESQLRPWLMEKELMMGVLGPLSIDPNMLNAQKQQVQFMLKEFEARRQQHEQLNEAAQGILTGPGDVSLSTSQVQKELQSINQKWVELTDKLNSRSSQIDQAIVKSTQYQELLQDLSEKVRAVGQRLSVQSAISTQPEAVKQQLEETSEIRSDLEQLDHEVKEAQTLCDELSVLIGEQYLKDELKKRLETVALPLQGLEDLAADRINRLQAALASTQQFQQMFDELRTWLDDKQSQQAKNCPISAKLERLQSQLQENEEFQKSLNQHSGSYEVIVAEGESLLLSVPPGEEKRTLQNQLVELKNHWEELSKKTADRQSRLKDCMQKAQKYQWHVEDLVPWIEDCKAKMSELRVTLDPVQLESSLLRSKAMLNEVEKRRSLLEILNSAADILINSSEADEDGIRDEKAGINQNMDAVTEELQAKTGSLEEMTQRLREFQESFKNIEKKVEGAKHQLEIFDALGSQACSNKNLEKLRAQQEVLQALEPQVDYLRNFTQGLVEDAPDGSDASQLLHQAEVAQQEFLEVKQRVNSGCVMMENKLEGIGQFHCRVREMFSQLADLDDELDGMGAIGRDTDSLQSQIEDVRLFLNKIHVLKLDIEASEAECRHMLEEEGTLDLLGLKRELEALNKQCGKLTERGKARQEQLELTLGRVEDFYRKLKGLNDATTAAEEAEALQWVVGTEVEIINQQLADFKMFQKEQVDPLQMKLQQVNGLGQGLIQSAGKDCDVQGLEHDMEEINARWNTLNKKVAQRIAQLQEALLHCGKFQDALEPLLSWLADTEELIANQKPPSAEYKVVKAQIQEQKLLQRLLDDRKATVDMLQAEGGRIAQSAELADREKITGQLESLESRWTELLSKAAARQKQLEDILVLAKQFHETAEPISDFLSVTEKKLANSEPVGTQTAKIQQQIIRHKALEEDIENHATDVHQAVKIGQSLSSLTSPAEQGVLSEKIDSLQARYSEIQDRCCRKAALLDQALSNARLFGEDEVEVLNWLAEVEDKLSSVFVKDFKQDVLHRQHADHLALNEEIVNRKKNVDQAIKNGQALLKQTTGEEVLLIQEKLDGIKTRYADITVTSSKALRTLEQARQLATKFQSTYEELTGWLREVEEELATSGGQSPTGEQIPQFQQRQKELKKEVMEHRLVLDTVNEVSRALLELVPWRAREGLDKLVSDANEQYKLVSDTIGQRVDEIDAAIQRSQQYEQAADAELAWVAETKRKLMALGPIRLEQDQTTAQLQVQKAFSIDIIRHKDSMDELFSHRSEIFGTCGEEQKTVLQEKTESLIQQYEAISLLNSERYARLERAQVLVNQFWETYEELSPWIEETRALIAQLPSPAIDHEQLRQQQEEMRQLRESIAEHKPHIDKLLKIGPQLKELNPEEGEMVEEKYQKAENMYAQIKEEVRQRALALDEAVSQSTQITEFHDKIEPMLETLENLSSRLRMPPLIPAEVDKIRECISDNKSATVELEKLQPSFEALKRRGEELIGRSQGADKDLAAKEIQDKLDQMVFFWEDIKARAEEREIKFLDVLELAEKFWYDMAALLTTIKDTQDIVHDLESPGIDPSIIKQQVEAAETIKEETDGLHEELEFIRILGADLIFACGETEKPEVRKSIDEMNNAWENLNKTWKERLEKLEDAMQAAVQYQDTLQAMFDWLDNTVIKLCTMPPVGTDLNTVKDQLNEMKEFKVEVYQQQIEMEKLNHQGELMLKKATDETDRDIIREPLTELKHLWENLGEKIAHRQHKLEGALLALGQFQHALEELMSWLTHTEELLDAQRPISGDPKVIEVELAKHHVLKNDVLAHQATVETVNKAGNELLESSAGDDASSLRSRLEAMNQCWESVLQKTEEREQQLQSTLQQAQGFHSEIEDFLLELTRMESQLSASKPTGGLPETAREQLDTHMELYSQLKAKEETYNQLLDKGRLMLLSRDDSGSGSKTEQSVALLEQKWHVVSSKMEERKSKLEEALNLATEFQNSLQEFINWLTLAEQSLNIASPPSLILNTVLSQIEEHKVFANEVNAHRDQIIELDQTGNQLKFLSQKQDVVLIKNLLVSVQSRWEKVVQRSIERGRSLDDARKRAKQFHEAWKKLIDWLEDAESHLDSELEISNDPDKIKLQLSKHKEFQKTLGGKQPVYDTTIRTGRALKEKTLLPEDSQKLDNFLGEVRDKWDTVCGKSVERQHKLEEALLFSGQFMDALQALVDWLYKVEPQLAEDQPVHGDLDLVMNLMDAHKVFQKELGKRTGTVQVLKRSGRELIENSRDDTTWVKGQLQELSTRWDTVCKLSVSKQSRLEQALKQAEVFRDTVHMLLEWLSEAEQTLRFRGALPDDTEALQSLIDTHKEFMKKVEEKRVDVNSAVAMGEVILAVCHPDCITTIKHWITIIRARFEEVLTWAKQHQQRLETALSELVANAELLEELLAWIQWAETTLIQRDQEPIPQNIDRVKALIAEHQTFMEEMTRKQPDVDRVTKTYKRKNIEPTHAPFIEKSRSGGRKSLSQPTPPPMPILSQSEAKNPRINQLSARWQQVWLLALERQRKLNDALDRLEELKEFANFDFDVWRKKYMRWMNHKKSRVMDFFRRIDKDQDGKITRQEFIDGILASKFPTTKLEMTAVADIFDRDGDGYIDYYEFVAALHPNKDAYRPTTDADKIEDEVTRQVAQCKCAKRFQVEQIGENKYRFGDSQQLRLVRILRSTVMVRVGGGWMALDEFLVKNDPCRARGRTNIELREKFILPEGASQGMTPFRSRGRRSKPSSRAASPTRSSSSASQSNHSCTSMPSSPATPASGTKVIPSSGSKLKRPTPTFHSSRTSLAGDTSNSSSPASTGAKTNRADPKKSASRPGSRAGSRAGSRASSRRGSDASDFDLLETQSACSDTSESSAAGGQGNSRRGLNKPSKIPTMSKKTTTASPRTPGPKR

SEQ ID NO: 25825 - protein, 687 aa, Homo sapiens
MKELQAVRETLLRQHEAELLRVIKIKDNENQRLQALLSALRDGGPEKVKTVLLSEAKEEAKKGFEVEKVKMQQEISELKGAKRQVEEALTLVIQADKIKAAEIRSVYHLHQEEITRIKKECEREIRRLQLDEKDARRFQLKIAELSAIIRKLEDRNALLSEERNELLKRVREAESQYKPLLDKNKRLSRKNEDLSHALRRMENKLKFVTQENIEMRQRAGIIRRPSSLNDLDQSQDEREVDFLKLQIVEQQNLIDELSKTLETAGYVKSVLERDKLLRFRKQRKKMAKLPKPVVVETFFGYDEEASLESDGSSVSYQTDRTDQTPCTPDDDLEEGMAKEETELRFRQLTMEYQALQRAYALLQEQVGGTLDAEREVKTREQLQAEVQRAQARIEDLEKALAEQGQDMKWIEEKQALYRRNQELVEKIKQMETEEARLRHEVQDARDQNELLEFRILELEERERKSPAISFHHTPFVDGKSPLQVYCEAEGVTDIVVAELMKKLDILGDNANLTNEEQVVVIQARTVLTLAEKWLQQIEETEAALQRKMVDLESEKELFSKQKGYLDEELDYRKQALDQANKHILELEAMLYDALQQEAGAKVAELLSEEEREKLKVAVEQWKRQVMSELRERDAQILRERMELLQLAQQRIKELEERIEAQKRQIKELEEKFLFLFLFFSLAFILWS

SEQ ID NO: 25826 - protein, 187 aa, Homo sapiens
MLAGRPGTRSAVGELGTESSDNLDRAPLGPRESGGHHRPGSYLDMKIHLEKNLEEERQILLQQQKICRNRARKYFVESNRRKKAFEEKRKEQEEKEHQIREQILQQRKQKFEEVTEKFQRAHVPLSQRRKAVSRKPVPPLEEALKQIQESNLKSEVNLPFSRRPTINWSREEKRRKWSREERNREES

SEQ ID NO: 25827 - protein, 720 aa, Homo sapiens
RNVSADDDAVYICETPEGSRTVAELAVQAPRKPPLQPPVDPVVKARMESSVILSWSPPPHGERPVTIDGYLVEKKKLGTYTWIRCHEAEWVATPELTVADVAEEGNFQFRVSALNSFGQSPYLEFPGTVHLAPKLAVRTPLKAVQAVEGGEVTFSVDLTVASAGEWFLDGQALKASSVYEIHCDRTRHTLTIREVPASLHGAQLKFVANGIESSIRMEVRAAPGLTANKPPAAAAREVLARLHEEAQLLAELSDQAAAVTWLKDGRTLSPGPKYEVQASAGRRVLLVRDVARDDAGLYECVSRGGRIAYQLSVQGLARFLHKDMAGSCVDAVAGGPAQFECETSEAHVHVHWYKDGMELGHSGERFLQEDVGTRHRLVAATVTRQDEGTYSCRVGEDSVDFRLRVSEPKVVFAKDQVAHSEVQAEAGASATLSCEVAQAQTEVMWYKDGKKLSSSLKVHVEAKGCRRRLVVQQAGKTDAGDYSCEARGQRVSFRLHITEPKMMFAKEQSVHNEVQAEAGASAMLSCEVAQAQTEVTWYKDGKKLSSSSKVGMEVKGCTRRLVLPQAGKADAGEYSCEAGGQRVSFHLHITEPKGVFAKEQSVHNEVQAEAGTTAMLSCEVAQPQTEVTWYKDGKKLSSSSKVRMEVKGCTRRLVVQQVGKADAGEYSCEAGGQRVSFQLHITEPKAVFAKEQLVHNEVRTEAGASATLSCEVAQAQTEVT

SEQ ID NO: 25828 - protein, 205 aa, Homo sapiens
MRILHVNGFNGDEKATKVQDIKNNLKEAIETIVAAMSNLVPPVELANPENQFRVDYILSVMNVPDFDFPPEFYEHAKALWEDEGVRACYERSNEYQLIDCAQYFLDKIDVIKQADYVPSDQDLLRCRVLTSGIFETKFQVDKVNFHMFDVGGQRDERRKWIQCFNDVTAIIFVVASSSYNMVIREDNQTNRLQEALNLFKSIWNN

SEQ ID NO: 25829 - protein, 116 aa, Homo sapiens
DLIDSSLIQQVLLRPSFWEARKHSLSVQQLSQALQELFQKAREENPGQVHPRAPELTLSLLTTMYNSKGTGFLQLMPAAAALITLSGDSPLSKYRATKRLLLQSKYSSKIHCKYSI

SEQ ID NO: 25830 - protein, 201 aa, Homo sapiens
MPSALAIFTCRPNSHPFQERHVYLDEPIKIGRSVARCRPAQNNATFDCKVLSRNHALVWFDHKTGKFYLQDTKSSNGTFINSQRLSRGSEESPPCEILSGDIIQFGVDVTENTRKVTHGCIVSTIKLFLPDGMEARLRSDVIHAPLPSPVDKVAANTPSMYSQELFQLSQYLQVFRGSNMHGAVISCDNSAFFWIPPKGPL

SEQ ID NO: 25831 - protein, 537 aa, Homo sapiens
MMMVDLKVAAYLDPQIRALWETKGPARESSGQSKKSPQMDCLDPKSSCWHFRNFTYDEAGGPREAVSKLQELCHLWLKPEIHSKEQILELLVLEQFLTILPRETQTQMQKHHPQSIEEAVALVEHLQRESGQTWNGVAVHELGKEAVLLGETAEASSFGLKPTESQPVGVSQDEEFWNTYEGLQEQLSRNTHKETEPVYERAVPTQQILAFPEQTNTKDWTVTPEHVLPESQSLLTFEEVAMYFSQEEWELLDPTQKALYNDVMQENYETVISLALFVLPKPKVISCLEQGEEPWVQVSPEFKDSAGKSPTGLKLKNDTENHQPVSLSDLEIQASAGVISKKAKVKVPQKTAGKENHFDMHRVGKWHQDFPVKKRKKLSTWKQELLKLMDRHKKDCAREKPFKCQECGKTFRVSSDLIKHQRIHTEEKPYKCQQCDKRFRWSSDLNKHLTTHQGIKPYKCSWCGKSFSQNTNLHTHQRTHTGEKPFTCHECGKKFSQNSHLIKHRRTHTGEQPYTCSICRRNFSRRSSLLRHQKLHL

SEQ ID NO: 25832 - protein, 1086 aa, Homo sapiens
MAQALLVPPGPESFRLFTRESLAAIEKRAAEEKAKKPKKEQDNDDENKPKPNSDLEAGKNLPFIYGDIPPEMVSEPLEDLDPYYINKKTFIVMNKGKAIFRFSATSALYILTPLNPVRKIAIKILVHSLFSMLIMCTILTNCVFMTLSNPPDWTKNVEYTFTGIYTFESLIKILARGFCLEDFTFLRDPWNWLDFSVIVMAYVTEFVDLGNVSALRTFRVLRALKTISVIPGLKTIVGALIQSVKKLSDVMILTVFCLSVFALIGLQLFMGNLRNKCLQWPPSDSAFETNTTSYFNGTMDSNGTFVNVTMSTFNWKDYIGDDSHFYVLDGQKDPLLCGNGSDAGQCPEGYICVKAGRNPNYGYTSFDTFSWAFLSLFRLMTQDYWENLYQLTLRAAGKTYMIFFVLVIFLGSFYLVNLILAVVAMAYEEQNQATLEEAEQKEAEFQQMLEQLKKQQEEAQAVAAASAASRDFSGIGGLGELLESSSEASKLSSKSAKEWRNRRKKRRQREHLEGNNKGERDSFPKSESEDSVKRSSFLFSMDGNRLTSDKKFCSPHQSLLSIRGSLFSPRRNSKTSIFSFRGRAKDVGSENDFADDEHSTFEDSESRRDSLFVPHRHGERRNSNVSQGTTTETEVRKRRLSSYQISMEMLEDSSGRQRAVSIASILTNTMEELEESRQKCPPCWYRFANVFLIWDCCDAWLKVKHLVNLIVMDPFVDLAITICIVLNTLFMAMEHYPMTEQFSSVLTVGNLVFTGIFTAEMVLKIIAMDPYYYFQEGWNIFDGIIVSLSLMELGLSNVEGLSVLRSFRLLRVFKLAKSWPTLNMLIKIIGNSVGALGNLTLVLAIIVFIFAVVGMQLFGKSYKECVCKINDDCTLPRWHMNDFFHSFLIVFRVLCGEWIETMWDCMEVAGQTMCLIVFMLVMVIGNLVVLNLFLALLLSSFSSDNLAATDDDNEMNNLQIAVGRMQKGIDYVKNKMRECFQKAFFRKPKVIEIHEGNKIDSCMSNNTGIEISKELNYLRDGNGTTSGVGTGSSVEKYVIDENDYMSFINNPSLTVTVPIAVGESDFENLNTEEFSSESELEESKEE

SEQ ID NO: 25833 - protein, 273 aa, Homo sapiens
MLELQYHNEDLEKDKTSQNCLGRGMEQVAKKLGVAHEEIQRLTDELQVKEKEQCKLDSALKKAQLEIDKLKENLVKLKENDAADLQKAKEQNQRLDEEILALRNRVRSLDSEKKVLGEMVERLKGEVCESQENKQLGNHSPGKTVGGEQREQHPSSGEKLKYNQQGEVQQLHQNLHRLQILCNSAENELRYERGQNLDLKQHNSLLQEENIKVTLVGKCFMEGFQLALGINESKFLYLIIHDRIHKYVDNVSYLVTSSFNFSLLSKNVCIINL

SEQ ID NO: 25834 - protein, 816 aa, Homo sapiens
ITEEERQFLAPPMLKFTRSLSMPDTSEDIPPPPQSVPPSPPPPSPTTYNCPKSPTPRVYGTIKPAFNQNSAAKVSPATRSDTVATMMREKGMYFRRELDRYSLDSEDLYSRNAGPQANFRNKRGQMPENPYSEVGKIASKAVYVPAKPARRKGMLVKQSNVEDSPEKTCSIPIPTIIVKEPSTSSSGKSSQGSSMEIDPQAPEPPSQLRPDESLTVSSPFAAAIAGAVRDREKRLEARRNSPAFLSTDLGDEDVGLGPPAPRTRPSMFPEEGDFADEDSAEQLSSPMPSATPREPENHFVGGAEASAPGEAGRPLNSTSKAQGPESSPAVPSASSGTAGPGNYVHPLTGRLLDPSSPLALALSARDRAMKESQQGPKGEAPKADLNKPLYIDTKMRPSLDAGFPTVTRQNTRGPLRRQETENKYETDLGRDRKGDDKKNMLIDIMDTSQQKSAGLLMVHTVDATKLDNALQEEDEKAEVEMKPDSSPSEVPEGVSETEGALQISAAPEPTTVPGRTIVAVGSMEEAVILPFRIPPPPLASVDLDEDFIFTEPLPPPLEFANSFDIPDDRAASVPALSDLVKQKKSDTPQSPSLNSSQPTNSADSKKPASLSNCLPASFLPPPESFDAVADSGIEEVDSRSSSDHHLETTSTISTVSSISTLSSEGGENVDTCTVYADGQAFMVDKPPVPPKPKMKPIIHKSNALYQDALVEEDVDSFVIPPPAPPPPPGSAQPGMAKVLQPRTSKLWGDVTEIKSPILSGPKANVISELNSILQQMNREKLAKPGEGLDSPMGAKSASLAPSVVSSHSICHFHLLP

SEQ ID NO: 25835 - protein, 296 aa, Homo sapiens
VTLEDAGTVSFHVGTCSSEAQLKVTEAVPCLVRGLQNVDVFAGEVATFSCEVSHAGGPEARWWLDGTLLQDGPQSAIAVRDGIFHSLMLSGLGVADSGTVIFRAGPLVSTAKLLIKDPVVEVVSAMQDLAVEEGGSAELLCQYSRPVQATWKMDEREVHTDGHRVIIEQDWNVARLTFRPALPCDSGIYSCEAAGTRVVALLQVQAKNTVVRGLENVEALEGGEALFECQLSQPEVAAHTWLLDDEPVHTSENAEVVFFENGLRHLLLLKNLRPQDSCRVTFLAGDMVTSAFLTVR

SEQ ID NO: 25836 - protein, 2146 aa, Homo sapiens
MAPQEAKPQGSREAGPATRGRGGRPVARGLGRAAWGAARCTGVRGPGAGASHDAPPRPPTLLLGLLLLAALLEHGQADPGTDNLQMNVTRTPESFPPGKLLPISPTWPFTEVRSSSAADRIKTVLGQSSDNTSLPQSARTPASKTHHRTRAHADFSSSLYQGSGHSASLEPSKDSTESLVQPGPKGGQEAADVSGLPLTSMLPSLSTVPSGTSFSAVPPSQPVWAGTSSISKHPPRSDIPPLLPLPPSSSLAPDSPHSIISEPAEQSPKVLLVPQTAPADPSLGQNIANPLIPFSDEMDHTASQNAQDLIGIPHLGVSGSSTKWHSELSPTEGPHSAGSSTPGFLSPMAELSHPSPPPPALGSLLQLPDGSPSWSMLEVASGPASTQQIKAGVPGRVHNGVSLPTFKNTETATHEAEPPLFQTAESGAIEMTSRKLASATANDSANPLHLSAAPENSRGPALSAEHTSSLVPSLHITTLGQEQAILSGAVPASPSTGTADFPSILTFLQPTENHASPSPVPEMPTLPAEGSDGSPPATRDLLLSSKVPNLLSTSWTFPRWKKDSVTAILGKNEEANVTIPLQAFPRKEVLSLHTVNGFVSDFSTGSVSSPIITAPRTNPLPSGPPLPSILSIQATQTVFPSLGFSSTKPEAYAAAVDHSGLPASASKQVRASPSSMDVYDSLTIGDMKKPATTDVFWSSLSAETGSLSTESIISGLQQQTNYDLNGHTISTTSWETHLAPTAPPNGLTSAADAIKSQDFKDTAGHSVTAEGFSIQDLVLGTSIEQPVQQSDMTMVGSHIDLWPTSNNNHSRDFQTAEVAYYSPTTRHSVSHPQLQLPNQPAHPLLLTSPGPTSTGSLQEMLSDGTDTGSEISSDINSSPERNASTPFQNILGYHSAAESSISTSVFPRTSSRVLRASQHPKKWTADTVSSKVQPTAAAAVTLFLRKSSPPALSAALVAKGTSSSPLAVASGPAKSSSMTTLAKNVTNKAASGPKRTPGAVHTAFPFTPTYMYARTGHTTSTHTAMQGNMDTASGLLSTTYLPRKPQAMHTGLPNPTNLEMPRASTPRPLTVTAALTSITASVKATRLPPLRAENTDAVLPAASAAVVTTGKMASNLECQMSSKLLVKTVLFLTQRRVQISESLKFSIAKGLTQALRKAFHQNDVSAHVDILEYSHNVTVGYYATKGKLVYLPAVVIEMLGVYGVSNVTADLKQHTPHLQSVAVLASPWNPQPAGYFQLKTVLQFVSQADNIQSCKFAQTMEQRLQKAFQDAERKVLNTKSNLTIQIVSTSNASQAVTLVYVVGNQSTFLNGTVASSLLSQLSAELVGFYLTYPPLTIAEPLEYPNLDISETTRDYWVITVLQGVDNSLVGLHNQSFARVMEQRLAQLFMMSQQQGRRFKRATTLGSYTVQMVKMQRVPGPKDPAELTYYTLYNGKPLLGTAAAKILSTIDSQRMALTLHHVVLLQADPVVKNPPNNLWIIAAVLAPIAVVTVIIIIITAVLCRKNKNDFKPDTMINLPQRAKPVQGFDYAKQHLGQQGADEEVIPVTQETVVLPLPIRDAPQERDVAQDGSTIKTAKSTETRKSRSPSENGSVISNESGKPSSGRRSPQNVMAQQKVTKEEARKRNVPASDEEEGAVLFDNSSKVAAEPFDTSSGSVQLIAIKPTALPMVPPTSDRSQESSAVLNGEVNKALKQKSDIEHYRNKLRLKAKRKGYYDFPAVETSKGLTERKKMYEKAPKEMEHVLDPDSELCAPFTESKNRQQMKNSVYRSRQSLNSPSPGETEMDLLVTRERPRRGIRNSGYDTEPEIIEETNIDRVPEPRGYSRSRQVKGHSETSTLSSQPSIDEVRQQMHMLLEEAFSLASAGHAGQSRHQEAYGSAQHLPYSEVVTSAPGTMTRPRAGVQWVPTYRPEMYQYSLPRPAYRFSQLPEMVMGSPPPPVPPRTGPVAVASLRRSTSDIGSKTRMAESTGPEPAQLHDSASFTQMSRGPVSVTQLDQSALNYSGNTVPAVFAIPAANRPGFTGYFIPTPPSSYRNQAWMSYAGENELPSQWADSVPLPGYIEAYPRSRYPQSSPSRLPRQYSQPANLHPSLEQAPAPSTAASQQSLAENDPSDAPLTNISTAALVKAIREEVAKLAKKQTDMFEFQV

SEQ ID NO: 25837 - protein, 748 aa, Homo sapiens
MSKRGMSSRAKGDKAEALAALQAANEDLRAKLTDIQIELQQEKSKVSKVEREKNQELRQVREHEQHKTAVLLTELKTKLHEEKMKELQAVRETLLRQHEAELLRVIKIKDNENQRLQALLSALRDGGPEKVKTVLLSEAKEEAKKGFEVEKVKMQQEISELKGAKRQVEEALTLVIQADKIKAAEIRSVYHLHQEEITRIKKECEREIRRLQLDEKDARRFQLKIAELSAIIRKLEDRNALLSEERNELLKRVREAESQYKPLLDKNKRLSRKNEDLSHALRRMENKLKFVTQENIEMRQRAGIIRRPSSLNDLDQSQDEREVDFLKLQIVEQQNLIDELSKTLETAGYVKSVLERDKLLRFRKQRKKMAKLPKPVVVETFFGYDEEASLESDGSSVSYQTDRTDQTPCTPDDDLEEGMAKEETELRFRQLTMEYQALQRAYALLQEQVGGTLDAEREVKTREQLQAEVQRAQARIEDLEKALAEQGQDMKWIEEKQALYRRNQELVEKIKQMETEEARLRHEVQDARDQNELLEFRILELEERERKSPAISFHHTPFVDGKSPLQVYCEAEGVTDIVVAELMKKLDILGDNAWLQQIEETEAALQRKMVDLESEKELFSKQKGYLDEELDYRKQALDQANKHILELEAMLYDALQQEAGAKVAELLSEEEREKLKVAVEQWKRQVMSELRERDAQILRERMELLQLAQQRIKELEERIEAQKRQIKELEEKFLFLFLFFSLAFILWS

SEQ ID NO: 25838 - protein, 295 aa, Homo sapiens
MEDGFLDDGRGDQPLHSGLGSPHCFSHQNGERVERYSRKVFVGGLPPDIDEDEITASFRRFGPLIVDWPHKAESKSYFPPKGYAFLLFQDESSVQALIDACIEEDGKLYLCVSSPTIKDKPVQIRPWNLSDSDFVMDGSQPLDPRKTIFVGGVPRPLRAVELAMIMDRLYGGVCYAGIDTDPELKYPKGAGRVAFSNQQSYIAAISARFVQLQHGEIDKRVEVKPYVLDDQLCDECQGARCGGKFAPFFCANVTCLQYYCEYCWAAIHSRAGREFHKPLVKEGGDRPRHISFRWN

SEQ ID NO: 25839 - protein, 228 aa, Homo sapiens
MRILHVNGFNGEGGEEDPQAARSNSDGEKATKVQDIKNNLKEAIETIVAAMSNLVPPVELANPENQFRVDYILSVMNVPDFDFPPEFYEHAKALWEDEGVRACYERSNEYQLIDCAQYFLDKIDVIKQADYVPSDQDLLRCRVLTSGIFETKFQVDKVNFHMFDVGGQRDERRKWIQCFNDVTAIIFVVASSSYNMVIREDNQTNRLQEALNLFKSIWNNRWLRTISV

SEQ ID NO: 25840 - protein, 2393 aa, Homo sapiens
MGISTVILEMCLLWGQVLSTGGWIPRTTDYASLIPSEVPLDPTVAEGSPFPSESTLESTVAEGSPISLESTLESTVAEGSLIPSESTLESTVAEGSDSGLALRLVNGDGRCQGRVEILYRGSWGTVCDDSWDTNDANVVCRQLGCGWAMSAPGNAWFGQGSGPIALDDVRCSGHESYLWSCPHNGWLSHNCGHGEDAGVICSAAQPQSTLRPESWPVRISPPVPTEGSESSLALRLVNGGDRCRGRVEVLYRGSWGTVCDDYWDTNDANVVCRQLGCGWAMSAPGNAQFGQGSGPIVLDDVRCSGHESYLWSCPHNGWLTHNCGHSEDAGVICSAPQSRPTPSPDTWPTSHASTAGPESSLALRLVNGGDRCQGRVEVLYRGSWGTVCDDSWDTSDANVVCRQLGCGWATSAPGNARFGQGSGPIVLDDVRCSGYESYLWSCPHNGWLSHNCQHSEDAGVICSAAHSWSTPSPDTLPTITLPASTVGSESSLALRLVNGGDRCQGRVEVLYRGSWGTVCDDSWDTNDANVVCRQLGCGWAMLAPGNARFGQGSGPIVLDDVRCSGNESYLWSCPHNGWLSHNCGHSEDAGVICSGPESSLALRLVNGGDRCQGRVEVLYRGSWGTVCDDSWDTNDANVVCRQLGCGWATSAPGNARFGQGSGPIVLDDVRCSGHESYLWSCPNNGWLSHNCGHHEDAGVICSAAQSRSTPRPDTLSTITLPPSTVGSESSLTLRLVNGSDRCQGRVEVLYRGSWGTVCDDSWDTNDANVVCRQLGCGWATSAPGNARFGQGSGPIVLDDVRCSGHESYLWSCPHNGWLSHNCGHHEDAGVICSVSQSRPTPSPDTWPTSHASTAGPESSLALRLVNGGDRCQGRVEVLYRGSWGTVCDDSWDTSDANVVCRQLGCGWATSAPGNARFGQGSGPIVLDDVRCSGYESYLWSCPHNGWLSHNCQHSEDAGVICSAAHSWSTPSPDTLPTITLPASTVGSESSLALRLVNGGDRCQGRVEVLYQGSWGTVCDDSWDTNDANVVCRQLGCGWAMSAPGNARFGQGSGPIVLDDVRCSGHESYLWSCPHNGWLSHNCGHSEDAGVICSASQSRPTPSPDTWPTSHASTAGSESSLALRLVNGGDRCQGRVEVLYRGSWGTVCDDYWDTNDANVVCRQLGCGWAMSAPGNARFGQGSGPIVLDDVRCSGHESYLWSCPHNGWLSHNCGHHEDAGVICSASQSQPTPSPDTWPTSHASTAGSESSLALRLVNGGDRCQGRVEVLYRGSWGTVCDDYWDTNDANVVCRQLGCGWATSAPGNARFGQGSGPIVLDDVRCSGHESYLWSCPHNGWLSHNCGHHEDAGVICSASQSQPTPSPDTWPTSHASTAGSESSLALRLVNGGDRCQGRVEVLYRGSWGTVCDDYWDTNDANVVCRQLGCGWATSAPGNARFGQGSGPIVLDDVRCSGHESYLWSCPHNGWLSHNCGHHEDAGVICSASQSQPTPSPDTWPTSRASTAGSESTLALRLVNGGDRCRGRVEVLYQGSWGTVCDDYWDTNDANVVCRQLGCGWAMSAPGNAQFGQGSGPIVLDDVRCSGHESYLWSCPHNGWLSHNCGHHEDAGVICSAAQSQSTPRPDTWLTTNLPALTVGSESSLALRLVNGGDRCRGRVEVLYRGSWGTVCDDSWDTNDANVVCRQLGCGWAMSAPGNARFGQGSGPIVLDDVRCSGNESYLWSCPHKGWLTHNCGHHEDAGVICSGPSSNCGGFLFYASGTFSSPSYPAYYPNNAKCVWEIEVNSGYRINLGFSNLKLEAHHNCSFDYVEIFDGSLNSSLLLGKICNDTRQIFTSSYNRMTIHFRSDISFQNTGFLAWYNSFPSDATLRLVNLNSSYGLCAGRVEIYHGGTWGTVCDDSWTIQEAEVVCRQLGCGRAVSALGNAYFGSGSGPITLDDVECSGTESTLWQCRNRGWFSHNCNHREDAGVICSGNHLSTPAPFLNITRPNTDYSCGGFLSQPSGDFSSPFYPGNYPNNAKCVWDIEVQNNYRVTVIFRDVQLEGGCNYDYIEVFDGPYRSSPLIARVCDGARGSFTSSSNFMSIRFISDHSITRRGFRAEYYSSPSNDSTNLLCLPNHMQASVSRSYLQSLGFSASDLVISTWNGYYECRPQITPNLVIFTIPYSGCGTFKQADNDTIDYSNFLTAAVSGGIIKRRTDLRIHVSCRMLQNTWVDTMYIANDTIHVANNTIQVEEVQYGNFDVNISFYTSSSFLYPVTSRPYYVDLNQDLYVQAEILHSDAVLTLFVDTCVASPYSNDFTSLTYDLIRSGCVRDDTYGPYSSPSLRIARFRFRAFHFLNRFPSVYLRCKMVVCRAYDPSSRCYRGCVLRSKRDVGSYQEKVDVVLGPIQLQTPPRREEEPR

SEQ ID NO: 25841 - protein, 288 aa, Homo sapiens
MDLMVEASPRRIFANAHTYHINSISINSDYETYLSADDLRINLWHLEITDRSFNIVDIKPANMEELTEVITAAEFHPNSCNTFVYSSSKGTIRLCDMRASALCDRHSKLFEEPEDPSNRSFFSEIISSISDVKFSHSGRYMMTRDYLSVKIWDLNMENRPVETYQVHEYLRSKLCSLYENDCIFDKFECCWNGSDSVVMTGSYNNFFRMFDRNTKRDITLEASRENNKPRTVLKPRKVCASGKRKKDEISVDSLDFNKKILHTAWHPKENIIAVATTNNLYIFQDKVN

SEQ ID NO: 25842 - protein, 206 aa, Homo sapiens
MRILHVNGFNGDSEKATKVQDIKNNLKEAIETIVAAMSNLVPPVELANPENQFRVDYILSVMNVPDFDFPPEFYEHAKALWEDEGVRACYERSNEYQLIDCAQYFLDKIDVIKQADYVPSDQDLLRCRVLTSGIFETKFQVDKVNFHMFDVGGQRDERRKWIQCFNDVTAIIFVVASSSYNMVIREDNQTNRLQEALNLFKSIWNN

SEQ ID NO: 25843 - protein, 2328 aa, Homo sapiens
MTPCTTAARGTPSALQDTRPPRLSICFEGPPLRRRGGVVDHRDVILAHQAHKIHSTPQARRKEWEMARFGDEMPARYGGGGSGAAAGVVVGSGGGRGAGGSRQGGQPGAQRMYKQSMAQRARTMALYNPIPVRQNCLTVNRSLFLFSEDNVVRKYAKKITEWPPFEYMILATIIANCIVLALEQHLPDDDKTPMSERLDDTEPYFIGIFCFEAGIKIIALGFAFHKGSYLRNGWNVMDFVVVLTGILATVGTEFDLRTLRAVRVLRPLKLVSGIPSLQVVLKSIMKAMIPLLQIGLLLFFAILIFAIIGLEFYMGKFHTTCFEEGTDDIQGESPAPCGTEEPARTCPNGTKCQPYWEGPNNGITQFDNILFAVLTVFQCITMEGWTDLLYNSNDASGNTWNWLYFIPLIIIGSFFMLNLVLGVLSGEFAKERERVENRRAFLKLRRQQQIERELNGYMEWISKAEEVILAEDETDGEQRHPFDGALRRTTIKKSKTDLLNPEEAEDQLADIASVGSPFARASIKSAKLENSTFFHKKERRMRFYIRRMVKTQAFYWTVLSLVALNTLCVAIVHYNQPEWLSDFLYYAEFIFLGLFMSEMFIKMYGLGTRPYFHSSFNCFDCGVIIGSIFEVIWAVIKPGTSFGISVLRALRLLRIFKVTKYWASLRNLVVSLLNSMKSIISLLFLLFLFIVVFALLGMQLFGGQFNFDEGTPPTNFDTFPAAIMTVFQILTGEDWNEVMYDGIKSQGGVQGGMVFSIYFIVLTLFGNYTLLNVFLAIAVDNLANAQELTKDEQEEEEAANQKLALQKAKEVAEVSPLSAANMSIAVKEQQKNQKPAKSVWEQRTSEMRKQNLLASREALYNEMDPDERWKAAYTRHLRPDMKTHLDRPLVVDPQENRNNNTNKSRAAEPTVDQRLGQQRAEDFLRKQARYHDRARDPSGSAGLDARRPWAGSQEAELSREGPYGRESDHHAREGSLEQPGFWEGEAERGKAGDPHRRHVHRQGGSRESRSGSPRTGADGEHRRHRAHRRPGEEGPEDKAERRARHREGSRPARGGEGEGEGPDGGERRRRHRHGAPATYEGDARREDKERRHRRRKENQGSGVPVSGPNLSTTRPIQQDLGRQDPPLAEDIDNMKNNKLATAESAAPHGSLGHAGLPQSPAKMGNSTDPGPMLAIPAMATNPQNAASRRTPNNPGNPSNPGPPKTPENSLIVTNPSGTQTNSAKTARKPDHTTVDIPPACPPPLNHTVVQVNKNANPDPLPKKEEEKKEEEEDDRGEDGPKPMPPYSSMFILSTTNPLRRLCHYILNLRYFEMCILMVIAMSSIALAAEDPVQPNAPRNNVLRYFDYVFTGVFTFEMVIKMIDLGLVLHQGAYFRDLWNILDFIVVSGALVAFAFTGNSKGKDINTIKSLRVLRVLRPLKTIKRLPKLKAVFDCVVNSLKNVFNILIVYMLFMFIFAVVAVQLFKGKFFHCTDESKEFEKDCRGKYLLYEKNEVKARDREWKKYEFHYDNVLWALLTLFTVSTGEGWPQVLKHSVDATFENQGPSPGYRMEMSIFYVVYFVVFPFFFVNIFVALIIITFQEQGDKMMEEYSLEKNERACIDFAISAKPLTRHMPQNKQSFQYRMWQFVVSPPFEYTIMAMIALNTIVLMMKFYGASVAYENALRVFNIVFTSLFSLECVLKVMAFGILNYFRDAWNIFDFVTVLGSITDILVTEFGNPNNFINLSFLRLFRAARLIKLLRQGYTIRILLWTFVQSFKALPYVCLLIAMLFFIYAIIGMQVFGNIGIDVEDEDSDEDEFQITEHNNFRTFFQALMLLFRSATGEAWHNIMLSCLSGKPCDKNSGILTRECGNEFAYFYFVSFIFLCSFLMLNLFVAVIMDNFEYLTRDSSILGPHHLDEYVRVWAEYDPAAWGRMPYLDMYQMLRHMSPPLGLGKKCPARVAYKRLLRMDLPVADDNTVHFNSTLMALIRTALDIKIAKGGADKQQMDAELRKEMMAIWPNLSQKTLDLLVTPHKSTDLTVGKIYAAMMIMEYYRQSKAKKLQAMREEQDRTPLMFQRMEPPSPTQEGGPGQNALPSTQLDPGGALMAHESGLKESPSWVTQRAQEMFQKTGTWSPEQGPPTDMPNSQPNSQSVEMREMGRDGYSDSEHYLPMEGQGRAASMPRLPAENQRRRGRPRGNNLSTISDTSPMKRSASVLGPKARRLDDYSLERVPPEENQRHHQRRRDRSHRASERSLGRYTDVDTGLGTDLSMTTQSGDLPSKERDQERGRPKDRKHRQHHHHHHHHHHPPPPDKDRYAQERPDHGRARARDQRWSRSPSEGREHMAHRQ

SEQ ID NO: 25844 - protein, 1592 aa, Homo sapiens
MSAPVGPRGRLAPIPAASQPPLQPEMPDLSHLTEEERKIILAVMDRQKKEEEKEQSVLKKLHQQFEMYKEQVKKMGEESQQQQEQKGDAPTCGICHKTKFADGCGHNCSYCQTKFCARCGGRVSLRSNKVMWVCNLCRKQQEILTKSGAWFYNSGSNTPQQPDQKVLRGLRNEEAPQEKKPKLHEQTQFQGPSGDLSVPAVEKSRSHGLTRQHSIKNGSGVKHHIASDIASDRKRSPSVSRDQNRRYDQREEREEYSQYATSDTAMPRSPSDYADRRSQHEPQFYEDSDHLSYRDSNRRSHRHSKEYIVDDEDVESRDEYERQRREEEYQSRYRSDPNLARYPVKPQPYEEQMRIHAEVSRARHERRHSDVSLANADLEDSRISMLRMDRPSRQRSISERRAAMENQRSYSMERTREAQGPSSYAQRTTNHSPPTPRRSPLPIDRPDLRRTDSLRKQHHLDPSSAVRKTKREKMETMLRNDSLSSDQSESVRPPPPKPHKSKKGGKMRQISLSSSEEELASTPEYTSCDDVEIESESVSEKGDMDYNWLDHTSWHSSEASPMSLHPVTWQPSKDGDRLIGRILLNKRLKDGSVPRDSGAMLGLKVVGGKMTESGRLCAFITKVKKGSLADTVGHLRPGDEVLEWNGRLLQGATFEEVYNIILESKPEPQVELVVSRPIGDIPRIPDSTHAQLESSSSSFESQKMDRPSISVTSPMSPGMLRDVPQFLSGQLSIKLWFDKVGHQLIVTILGAKDLPSREDGRPRNPYVKIYFLPDRSDKNKRRTKTVKKTLEPKWNQTFIYSPVHRREFRERMLEITLWDQARVREEESEFLGEILIELETALLDDEPHWYKLQTHDVSSLPLPHPSPYMPRRQLHGESPTRRLQRSKRISDSEVSDYDCDDGIGVVSDYRHDGRDLQSSTLSVPEQVMSSNHCSPSGSPHRVDVIGRTRSWSPSVPPPQSRNVEQGLRGTRTMTGHYNTISRMDRHRVMDDHYSPDRDSHFLTLPRSRYSQTIDHHHRDGRDCEAADRQPYHRSRSTEQRPLLERTTTRSRSTERPDTNLMRSMPSLMTGRSAPPSPALSRSHPRTGSVQTSPSSTPVAGRRGRQLPQLPPKGTLDRNNGVKEIEPYEEVTWEDQQKKVNGTISDDKPLPKKKHQSETGKLVLEIETLNVMKELDSTRRRYAGTMDIEERNRQMKINKYKQVAGSDPRLEQDYHSKYRSGWDPHRGADNVSTKSSDSDVSDISAVSRTSSASRFSSTSYMSVQSERPGGNKKISVFTSKMQSRQMGISGKNMTKSTSISGDMCSLEKNDGSQSDTAVGTLGTSGKKRRSSLGAKMVAIVGLSRKSRSASQLSQTEAGGKKLRSTVQRSTETGLAVEMRNWMTRQASRESTDGSMNSYSSEGNLIFPGVRLASDSQFSDFLDGLGPAQLVGRQTLATPAMGDIQVGMMDKKGQLEVEIIRARGLVVKPGSKTLPAPYVKVYLLDNGVCIAKKKTKVARKTLEPLYQQLLSFEESPQGKVLQIIVWGDYGRMDHKSFMGVAQILLDELELSNMVIGWFKLFPPSSLVDPTLAPLTRRASQSSLESSTGPSYSRS

SEQ ID NO: 25845 - protein, 842 aa, Homo sapiens
MPSALAIFTCRPNSHPFQERHVYLDEPIKIGRSVARCRPAQNNATFDCKVLSRNHALVWFDHKTGKFYLQDTKSSNGTFINSQRLSRGSEESPPCEILSGDIIQFGVDVTENTRKVTHGCIVSTIKLFLPDGMEARLRSDVIHAPLPSPVDKVAANTPSMYSQELFQLSQYLQEALHREQMLEQKLATLQRLLAITQEASDTSWQALIDEDRLLSRLEVMGNQLQACSKNQTEDSLRKELIALQEDKHNYETTAKESLRRVLQEKIEVVRKLSEVERSLSNTEDECTHLKEMNERTQEELRELANKYNGAVNEIKDLSDKLKVAEGKQEEIQQKGQAEKKELQHKIDEMEEKEQELQAKIEALQADNDFTNERLTALQVRLEHLQEKTLKECSSLGIQVDDFLPKINGSTEKEHLLSKSGGDCTFIHQFIECQKKLIVEGHLTKAVEETKLSKENQTRAKESDFSDTLSPSKEKSSDDTTDAQMDEQDLNEPLAKVSLLKDDLQGAQSEIEAKQEIQHLRKELIEAQELARTSKQKCFELQALLEEERKAYRNQVEESTKQIQVLQAQLQRLHIDTENLREEKDSEITSTRDELLSARDEILLLHQAAAKVASERDTDIASLQEELKKVRAELERWRKAASEYEKEITSLQNSFQLRCQQCEDQQREEATRLQGELEKLRKEWNALETECHSLKRENVLLSSELQRQEKELHNSQKQSLELTSDLSILQMSRKELENQVGSLKEQHLRDSADLKTLLSKAENQAKDVQKEYEKTQTVLSELKLKFEMTEQEKQSITDELKQCKNNLKLLREKGNNPSILQPVPAVFIGLFLAFLFWCFGPLW

SEQ ID NO: 25846 - protein, 138 aa, Homo sapiens
ENDAADLQKAKEQNQRLDEEILALRNRVRSLDSEKKVLGEMVERLKGEVCESQENKQLGNHSPGKTVGGEQREQILKMSQEKNEMFESEWSKEREREKQLASGLDTAEKALKVESESHGLIARFNFLSCHLGKIYQET

SEQ ID NO: 25847 - protein, 879 aa, Homo sapiens
MRNRGQGLFRLRSRCFLHQSLPLGAGRRKGLDVAEPGPSRCRSDSPAVAAVVPAMASYPSGSGKPKAKYPFKKRASLQASTAAPEARGGLGAPPLQSARSLPGPAPCLKHFPLDLRTSMDGKCKEIAEELFTRSLAESELRSAPYEFPEESPIEQLEERRQRLERQISQDVKLEPDILLRAKQDFLKTDSDSDLQLYKEQGEGQGDRSLRERDVLEREFQRVTISGEEKCGVPFTDLLDAAKSVVRALFIREKYMALSLQSFCPTTRRYLQQLAEKPLETRTYEQGPDTPVSADAPVHPPALEQHPYEHCEPSTMPGDLGLGLRMVRGVVHVYTRREPDEHCSEVELPYPDLQEFVADVNVLMALIINGPIKSFCYRRLQYLSSKFQMHVLLNEMKELAAQKKVPHRDFYNIRKVDTHIHASSCMNQKHLLRFIKRAMKRHLEEIVHVEQGREQTLREVFESMNLTAYDLSVDTLDVHADRNTFHRFDKFNAKYNPIGESVLREIFIKTDNRVSGKYFAHIIKEVMSDLEESKYQNAELRLSIYGRSRDEWDKLARWAVMHRVHSPNVRWLVQVPRLFDVYRTKGQLANFQEMLENIFLPLFEATVHPASHPELHLFLEHVDGFDSVDDESKPENHVFNLESPLPEAWVEEDNPPYAYYLYYTFANMAMLNHLRRQRGFHTFVLRPHCGEAGPIHHLVSAFMLAENISHGLLLRKAPVLQYLYYLAQIGIAMSPLSNNSLFLSYHRNPLPEYLSRGLMVSLSTDDPLQFHFTKEPLMEEYSIATQVWKLSSCDMCELARNSVLMSGFSHKVKSHWLGPNYTKEGPEGNDIRRTNVPDIRVGYRYETLCQELALITQAVQSEMLETIPEEAGITMSPGPQ

SEQ ID NO: 25848 - protein, 104 aa, Homo sapiens
MRSLGQNPTEAELQDMINEVDADGNGTIDFPEFLTMMARKMKDTDSEEEIREAFRVFDKDGNGYISAAELRHVMTNLGEKLTDEEVDEMIREADIDGDGQVNYE

SEQ ID NO: 25849 - protein, 1121 aa, Homo sapiens [sequence omitted]

SEQ ID NO: 25850 - protein, 573 aa, Homo sapiens
MMSEGKPPDKKRPRRSLSISKNKKKASNSIISCFNNAPPAKLACPVCSKMVPRYDLNRHLDEMCANNDFVQVDPGQVGLINSNVSMVDLTSVTLEDVTPKKSPPPKTNLTPGQSDSAKREVKQKISPYFKSNDVVCKNQDELRNRSVKVICLGSLASKLSRKYVKAKKSIDKDEEFAGSSPQSSKSTVVKSLIDNSSEIEDEDQILENSSQKENVFKCDSLKEECIPEHMVRGSKIMEAESQKATRECEKSALTPGFSDNAIMLFSPDFTLRNTLKSTSEDSLVKQECIKEVVEKREACHCEEVKMTVASEAKIQLSDSEAKSHSSADDASAWSNIQEAPLQDDSCLNNDIPHSIPLEQGSSCNGPGQTTGHPYYLRSFLVVLKTVLENEDDMLLFDEQEKGIVTKFYQLSATGQKLYVRLFQRKLSWIKMTKLEYEEIALDLTPVIEELTNAGFLQTESELQELSEVLELLSAPELKSLAKTFHLVNPNGQKQQLVDAFLKLAKQRSVCTWGKNKPGIGAVILKRLEAVSTGASPGLCVEVDEMGTLGQSVDEWLSVQWWCDRNPTPSPSTP

SEQ ID NO: 25851 - protein, 1780 aa, Homo sapiens
MEEDLEGENWQTFSIPWCFSRAAEDEGEHICHHRTKSSGWPPPSGTWGLSQVPPYGWEMTANRDGRDYFINHMTQAIPFDDPRLESCQIIPPAPRKVEMRRDPVLGFGFVAGSEKPVVVRSVTPGGPSEGKLIPGDQIVMINDEPVSAAPRERVIDLVRSCKESILLTVIQPYPSPKSAFISAAKKARLKSNPVKVRFSEEVIINGQVSETVKDNSLLFMPNVLKVYLENGQTKSFRFDCSTSIKDVILTLQEKLSIKGIEHFSLMLEQRTEGAGTKLLLLHEQETLTQVTQRPSSHKMRCLFRISFVPKDPIDLLRRDPVAFEYLYVQSCNDVVQERFGPELKYDIALRLAALQMYIATVTTKQTQKISLKYIEKEWGLETFLPSAVLQSMKEKNIKKALSHLVKANQNLVPPGKKLSALQAKVHYLKFLSDLRLYGGRVFKATLVQAEKRSEVTLLVGPRYGISHVINTKTNLVALLADFSHVNRIEMFSEEESLVRVELHVLDVKPITLLMESSDAMNLACLTAGYYRLLVDSRRSIFNMANKKNTATQETGPENKGKHNLLGPDWNCIPQMTTFIGEGEQEAQITYIDSKQKTVEITDSTMCPKEHRHLYIDNAYSSDGLNQQLSQPGEAPCEADYRSLAQRSLLTLSGPETLKKAQESPRGAKVSFIFGDFALDDGISPPTLGYETLLDEGPEMLEKQRNLYIGSANDMKGLDLTPEAEGIQFVENSVYANIGDVKSFQAAEGIEEPLLHDICYAENTDDAEDEDEVSCEEDLVVGEMNQPAILNLSGSSDDIIDLTSLPPPEGDDNEDDFLLRSLNMAIAAPPPGFRDSSDEEDSQSQAASFPEDKEKGSSLQNDEIPVSLIDAVPTSAEGKCEKGLDNAVVSTLGALEALSVSEEQQTSDNSGVAILRAYSPESSSDSGNETNSSEMTESSELATAQKQSENLSRMFLATHEGYHPLAEEQTEFPASKTPAGGLPPKSSHALAARPATDLPPKVVPSKQLLHSDHMEMEPETMETKSVTDYFSKLHMGSVAYSCTSKRKSKLADGEGKAPPNGNTTGKKQQGTKTAEMEEEASGKFGTVSSRDSQHLSTFNLERTAFRKDSQRWYVATEGGMAEKSGLEAATGKTFPRASGLGAREAEGKEEGAPDGETSDGSGLGQGDRFLTDVTCASSAKDLDNPEDADSSTCDHPSKLPEADESVARLCDYHLAKRMSSLQSEGHFSLQSSQGSSVDAGCGTGSSGSACATPVESPLCPSLGKHLIPDASGKGVNYIPSEERAPGLPNHGATFKELHPQTEGMCPRMTVPALHTAINTEPLFGTLRDGCHRLPKIKETTALTEPGKERRGGMPSAWSQHPEADPILLPSNIHSESKVPIPNQDPNDFSQANQAYGEAVSWRPPDLRGGSLRTPPSQKALRHSSSILSGSVDLETFRERTKGAVSLKCPGITEAQEASSERRAELPLGRKLTKSFSQSSMHLSSEGRFHKRSPVAHKDSKLYRTLPLRKLEGSNWRCRGPFSYCFLNRGQDEDGEEEEERGEATVQVSCLYRPQMTQAMPEPSSPCLAVAIQKQRGELSRGSVLKVWAEDLRDPDDLDFSNLAFDARIARINALKESTYAMPDGFLAAQNDANELLCLVRATKEKREESRPEAYDLTLSQYKQLLSIESRQLGSACRKMAMAEKSPEEMLLAMTSSFQVLCCLTEACMRLVKVVNSETQRQEIVGKIDEVVINYICLLKAAEAATGKNPGDPNVGLSARHSTTMAALVSTLTRSLKRLLNK

SEQ ID NO: 25852 - protein, 680 aa, Homo sapiens
MKMHSTESLLKKIERETWRESGVSLIATVTRLMERLLDYRDCMKMGEVDGKKIGCTVSLLNFYKTELNKEEMYIRYIHKLYDLHLKAQNFTEAAYTLLLYDELLEWSDRPLREFLTYPMQTEWQRKEHLHLTIIQNFDRGKCWENGIILCRKIAEQYESYYDYRNLSKMRMMEASLYDKIMDQQRLEPEFFRVGFYGKKFPFFLRNKEFVCRGHDYERLEAFQQRMLNEFPHAIAMQHANQPDETIFQAEAQYLQIYAVTPIPESQEVLQREGVPDNIKSFYKVNHIWKFRYDRPFHKGTKDKENEFKSLWVERTSLYLVQSLPGISRWFEVEKREVVEMSPLENAIEVLENKNQQLKTLISQCQTRQMQNINPLTMCLNGVIDAAVNGGVSRYQEAFFVKEYILSHPEDGEKIARLRELMLEQAQILEFGLAVHEKFVPQDMRPLHKKLVDQFFVMKSSLGIQEFSACMQASPVHFPNGSPRVCRNSAPASVSPDGTRVIPRRSPLSYPAVNRYSSSSLSSQASAEVSNITGQSESSDEVFNMQPSPSTSSLSSTHSASPNVTSSAPSSARASPLLSDKHKHSRENSCLSPRERPCSAIYPTPVEPSQRMLFNHIGDGALPRSDPNLSAPEKGLCAVFHPLSSGVPLARTHLQLPCLVGQLQQWDFFSQPVQHVGNLRL

SEQ ID NO: 25853 - protein, 310 aa, Homo sapiens
PAVPLPDVELRLPPLYGDNLDQHFRLLAQKQSLPYLEAANLLLQAQLPPKPPAWAWAEGWTRYGPEGEAVPVAIPEERALVFDVEVCLAEGTCPTLAVAISPSAWYSWCSQRLVEERYSWTSQLSPADLIPLEVPTGASSPTQRDWQEQLVVGHNVSFDRAHIREQYLIQGSRMRFLDTMSMHMAISGLSSFQRSLWIAAKQGKHKVQPPTKQGQKSQRKARRGPAISSWDWLDISSVNSLAEVHRLYVGGPPLEKEPRELFVKGTMKDIRENFQVSPPSDSGRHAGDGCLLPACQPELGALPGRGTGHL

SEQ ID NO: 25854 - protein, 575 aa, Homo sapiens
MDCLCIVTTKKYRYQDEDTPPQEHISPQITNEVIGPELVHVSEKNLSEIENVHGFVSHSHISPIKANPPPVLVNTDSLETPTYVNGTDADYEYEEITLERGNSGLGFSIAGGTDNPHIGDDSSIFITKIITGGAAAQDGRLRVNDCILRVNEVDVRDVTHSKAVEALKEAGSIVRLYVKRRKPVSEKIMEIKLIKGPKGLGFSIAGGVGNQHIPGDNSIYVTKIIEGGAAHKDGKLQIGDKLLAVNNVCLEEVTHEEAVTALKNTSDFVYLKVAKPTSMYMNDGYAPPDITNSSSQPVDNHVSPSSFLGQTPASPARYSPVSKAVLGDDEITREPRKVVLHRGSTGLGFNIVGGEDGEGIFISFILAGGPADLSGELRKGDRIISVNSVDLRAASHEQAAAALKNAGQAVTIVAQYRPEEYSRFEAKIHDLREQMMNSSISSGSGSLRTSQKRSLYVRALFDYDKTKDSGLPSQGLNFKFGDILHVINASDDEWWQARQVTPDGESDEVGVIPSKRRVEKKERARLKTVKFNSKTRDKGQSFNDKRKKNLFSRKFPFYKNKDQSEQETSDADRDP

SEQ ID NO: 25855 - protein, 1072 aa, Homo sapiens
MSRRKPASGGLAASSSAPARQAVLSRFFQSTGSLKSTSSSTGAADQVDPGAAAAAAAAAAAAPPAPPAPAFPPQLPPHIATEIDRRKKRPLENDGPVKKKVKKVQQKEGGSDLGMSGNSEPKKCLRTRNVSKSLEKLKEFCCDSALPQSRVQTESLQERFAVLPKCTDFDDISLLHAKNAVSSEDSKRQINQKDTTLFDLSQFGSSNTSHENLQKTASKSANKRSKSIYTPLELQYIEMKQQHKDAVLCVECGYKYRFFGEDAEIAARELNIYCHLDHNFMTASIPTHRLFVHVRRLVAKGYKVGVVKQTETAALKAIGDNRSSLFSRKLTALYTKSTLIGEDVNPLIKLDDAVNVDEIMTDTSTSYLLCISENKENVRDKKKGNIFIGIVGVQPATGEVVFDSFQDSASRSELETRMSSLQPVELLLPSALSEQTEALIHRATSVSVQDDRIRVERMDNIYFEYSHAFQAVTEFYAKDTVDIKGSQIISGIVNLEKPVICSLAAIIKYLKEFNLEKMLSKPEEINARLDAVSEVLHSESSVFGQIENHLRKLPDIERGLCSIYHKKCSTQEFFLIVKTLYHLKSEFQAIIPAVNSHIQSDLLRTVILEIPELLSPVEHYLKILNEQAAKVGDKTELFKDLSDFPLIKKRKDEIQGVIDEIRMHLQEIRKILKNPSAQYVTVSGQEFMIEIKNSAVSCIPTDWVKVGSTKAVSRFHSPFIVENYRHLNQLREQLVLDCSAEWLDFLEKFSEHYHSLCKAVHHLATVDCIFSLAKVAKQGDYCRPTVQEERKIVIKNGRHPVIDVLLGEQDQYVPNNTDLSEDSERVMIITGPNMGGKSSYIKQVALITIMAQIGSYVPAEEATIGIVDGIFTRMGAADNIYKGQSTFMEELTDTAEIIRKATSQSLVILDELGRGTSTHDGIAIAYATLEYFIRDVKSLTLFVTHYPPVCELEKNYSHQVGNYHMGFLVSEDESKLDPGAAEQVPDFVTFLYQITRGIAARSYGLNVAKLADVPGEILKKAAHKSKELEGLINTKRKRLKYFAKLWTMHNAQDLQKWTEEFNMEETQTSLLH

SEQ ID NO: 25856 - protein, 586 aa, Homo sapiens
MSKLSFRARALDASKPLPVFRCEDLPDLHEYASINRAVPQMPTGMEKEEESEHHLQRAISAQQVYGEKRDNMVIPVPEAESNIAYYESIYPGEFKMPKQLIHIQPFSLDAEQPDYDLDSEDEVFVNKLKKKMDICPLQFEEMIDRLEKGSGQQPVSLQEAKLLLKEDDELIREVYEYWIKKRKNCRGPSLIPSVKQEKRDGSSTNDPYVAFRRRTEKMQTRKNRKNDEASYEKMLKLRRDLSRAVTILEMIKRREKSKRELLHLTLEIMEKRYNLGDYNGEIMSEVMAQRQPMKPTYAIPIIPITNSSQFKHQEAMDVKEFKVNKQDKADLIRPKRKYEKKPKVLPSSAAATPQQTSPAALPVFNAKDLNQYDFPSSDEEPLSQVLSGSSEAEEDNDPDGPFAFRRKAGCQYYAPHLDQTGNWPWTSPKDGGLGDVRYRYCLTTLTVPQRCIGFARRRVGRGGRVLLDRAHSDYDSVFHHLDLEMLSSPQHSPVNQFANTSETNTSDKSFSKDLSQILVNIKSCRWRHFRPRTPSLHDSDNDELSCRKLYRSINRTGTAQPGTQTCSTSTQSKSSSGSAHFELSSP

SEQ ID NO: 25857 - protein, 1964 aa, Homo sapiens
MEFPIGSLETNNFRRFTPESLVEIEKQIAAKQGTKKAREKHREQKDQEEKPRPQLDLKACNQLPKFYGELPAELIGEPLEDLDPFYSTHRTFMVLNKGRTISRFSATRALWLFSPFNLIRRTAIKVSVHSWFSLFITVTILVNCVCMTRTDLPEKIEYVFTVIYTFEALIKILARGFCLNEFTYLRDPWNWLDFSVITLAYVGTAIDLRGISGLRTFRVLRALKTVSVIPGLKVIVGALIHSVKKLADVTILTIFCLSVFALVGLQLFKGNLKNKCVKNDMAVNETTNYSSHRKREWSLFHRDQDIYINKRGTSDPLLCGNGSDSGHCPDGYICLKTSDNPDFNYTSFDSFAWAFLSLFRLMTQDSWERLYQQTLRTSGKIYMIFFVLVIFLGSFYLVNLILAVVTMAYEEQNQATTDEIEAKEKKFQEALEMLRKEQEVLAALGIDTTSLHSHNGSPLTSKNASERRHRIKPRVSEGSTEDNKSPRSDPYNQRRMSFLGLASGKRRASHGSVFHFRSPGRDISLPEGVTDDGVFPGDHESHRGSLLLGGGAGQQGPLPRSPLPQPSNPDSRHGEDEHQPPPTSELAPGAVDVSAFDAGQKKTFLSAEYLDEPFRAQRAMSVVSIITSVLEELEESEQKCPPCLTSLSQKYLIWDCCPMWVKLKTILFGLVTDPFAELTITLCIVVNTIFMAMEHHGMSPTFEAMLQIGNIVFTIFFTAEMVFKIIAFDPYYYFQKKWNIFDCIIVTVSLLELGVAKKGSLSVLRSFRLLRVFKLAKSWPTLNTLIKIIGNSVGALGNLTIILAIIVFVFALVGKQLLGENYRNNRKNISAPHEDWPRWHMHDFFHSFLIVFRILCGEWIENMWACMEVGQKSICLILFLTVMVLGNLVVLNLFIALLLNSFSADNLTAPEDDGEVNNLQVALARIQVFGHRTKQALCSFFSRSCPFPQPKAEPELVVKLPLSSSKAENHIAANTARGSSGGLQAPRGPRDEHSDFIANPTVWVSVPIAEGESDLDDLEDDGGEDAQSFQQEVIPKGQEQLQQVERCGDHLTPRSPGTGTSSEDLAPSLGETWKDESVPQVPAEGVDDTSSSEGSTVDCLDPEEILRKIPELADDLEEPDDCFTEGCIRHCPCCKLDTTKSPWDVGWQVRKTCYRIVEHSWFESFIIFMILLSSGSLAFEDYYLDQKPTVKALLEYTDRVFTFIFVFEMLLKWVAYGFKKYFTNAWCWLDFLIVNISLISLTAKILEYSEVAPIKALRTLRALRPLRALSRFEGMRVVVDALVGAIPSIMNVLLVCLIFWLIFSIMGVNLFAGKFWRCINYTDGEFSLVPLSIVNNKSDCKIQNSTGSFFWVNVKVNFDNVAMGYLALLQVATFKGWMDIMYAAVDSREVNMQPKWEDNVYMYLYFVIFIIFGGFFTLNLFVGVIIDNFNQQKKKLGGQDIFMTEEQKKYYNAMKKLGSKKPQKPIPRPLNKFQGFVFDIVTRQAFDITIMVLICLNMITMMVETDDQSEEKTKILGKINQFFVAVFTGECVMKMFALRQYYFTNGWNVFDFIVVVLSIASLIFSAILKSLQSYFSPTLFRVIRLARIGRILRLIRAAKGIRTLLFALMMSLPALFNIGLLLFLVMFIYSIFGMSSFPHVRWEAGIDDMFNFQTFANSMLCLFQITTSAGWDGLLSPILNTGPPYCDPNLPNSNGTRGDCGSPAVGIIFFTTYIIISFLIMVNMYIAVILENFNVATEESTEPLSEDDFDMFYETWEKFDPEATQFITFSALSDFADTLSGPLRIPKPNRNILIQMDLPLVPGDKIHCLDILFAFTKNVLGESGELDSLKANMEEKFMATNLSKSSYEPIATTLRWKQEDISATVIQKAYRSYVLHRSMALSNTPCVPRAEEEAASLPDEGFVAFTANENCVLPDKSETASATSFPPSYESVTRGLSDRVNMRTSSSIQNEDEATSMELIAPGP

SEQ ID NO: 25858 - protein, 632 aa, Homo sapiens
MKRLPLLVVFSTLLNCSYTQNCTKTPCLPNAKCEIRNGIEACYCNMGFSGNGVTICEDDNECGNLTQSCGENANCTNTEGSYYCMCVPGFRSSSNQDRFITNDGTVCIENVNANCHLDNVCIAANINKTLTKIRSIKEPVALLQEVYRNSVTDLSPTDIITYIEILAESSSLLGYKNNTISAKDTLSNSTLTEFVKTVNNFVQRDTFVVWDKLSVNHRRTHLTKLMHTVEQATLRISQSFQKTTEFDTNSTDIALKVFFFDSYNMKHIHPHMNMDGDYINIFPKRKAAYDSNGNVAVAFVYYKSIGPLLSSSDNFLLKPQNYDNSEEEERVISSVISVSMSSNPPTLYELEKITFTLSHRKGIKDYNILTRITQLGIIISLICLAICIFTFWFFSEIQSTRTTIHKNLCCSLFLAELVFLVGINTNTNKLFCSIIAGLLHYFFLAAFAWMCIEGIHLYLIVVGVIYNKGFLHKNFYIFGYLSPAVVVGFSAALGYRYYGTTKVCWLSTENNFIWSFIGPACLIILVNLLAFGVIIYKVFRHTAGLKPEVSCFENIRSCARGALALLFLLGTTWIFGVLHVVHASVVTAYLFTVSNAFQGMFIFLFLCVLSRKIQEEYYRLFKNVPCCFGCLR

SEQ ID NO: 25859 - protein, 214 aa, Homo sapiens
MSSTRSQNPHGLKQIGLDQIWDDLRAGIQQVYTRQSMAKSRYMELYTHVYNYCTSVHQSNQARGAGVPPSKSKKGQTPGGAQFVGLELYKRLKEFLKNYLTNLLKDGEDLMDESVLKFYTQQWEDYRFSSKVLNGICAYLNRHWVRRECDEGRKGIYEIYSLALVTWRDCLFRPLNKQVTNAVLKLIEKERNGETINTRLISGVVQSYGRGSSA

SEQ ID NO: 25860 - protein, 180 aa, Homo sapiens
MRILHVNGFNGEGGEEDPQAARSNSDGEKATKVQDIKNNLKEAIETIVAAMSNLVPPVELANPENQFRVDYILSVMNVPDFDFPPEFYEHAKALWEDEGVRACYERSNEYQLIDCAQYFLDKIDVIKQADYVPSDQDLLRCRVLTSGIFETKFQVDKVNFHMFDVGGQRDERRKWIQCFN

SEQ ID NO: 25861 - protein, 732 aa, Homo sapiens
MSSTRSQNPHGLKQIGLDQIWDDLRAGIQQVYTRQSMAKSRYMELYTHVYNYCTSVHQSNQARGAGVPPSKSKKGQTPGGAQFVGLELYKRLKEFLKNYLTNLLKDGEDLMDESVLKFYTQQWEDYRFSSKVLNGICAYLNRHWVRRECDEGRKGIYEIYSLALVTWRDCLFRPLNKQVTNAVLKLIEKERNGETINTRLISGVVQSYVELGLNEDDAFAKGPTLTVYKESFESQFLADTERFYTRESTEFLQQNPVTEYMKKAEARLLEEQRRVQVYLHESTQDELARKCEQVLIEKHLEIFHTEFQNLLDADKNEDLGRMYNLVSRIQDGLGELKKLLETHIHNQGLAAIEKCGEAALNDPKMYVQTVLDVHKKYNALVMSAFNNDAGFVAALDKACGRFINNNAVTKMAQSSSKSPELLARYCDSLLKKSSKNPEEAELEDTLNQVQACGFEYTSKLQRMFQDIGVSKDLNEQFKKHLTNSEPLDLDFSIQVLSSGSWPFQQSCTFALPSELERSYQRFTAFYASRHSGRKLTWLYQLSKGELVTNCFKNRYTLQASTFQMAILLQYNTEDAYTVQQLTDSTQIKMDILAQVLQILLKSKLLVLEDENANVDEVELKPDTLIKLYLGYKNKKLRVNINVPMKTEQKQEQETTHKNIEEDRKLLIQAAIVRIMKMRKVLKHQQLLGEVLTQLSSRFKPRVPVIKKCIDILIEKEYLERVDGEKDTYSYLA

SEQ ID NO: 25862 - protein, 900 aa, Homo sapiens
MSDSGSQLGSMGSLTMKSQLQITETRFHHLDQAGLELLTSGSTHLGLPKYRDYRREPPRPAFISAKLKENKKNWFGPSPYVEVTVDGQSKKTEKCNNTNSPKWKQPLTVIVTPVSKLHFRVWSHQTLKSDVLLGTAALDIYETLKSNNMKLEEVVVTLQLGGDKEPTETIGDLSICLDGLQLESEVVTNGETTCSESASQNDDGSRSKDETRVSTNGSDDPEDAGAGENRRVSGNNSPSLSNGGFKPSRPPRPSRPPPPTPRRPASVNGSPSATSESDGSSTGSLPPTNTNTNTSEGATSGLIIPLTISGGSGPRPLNPVTQAPLPPGWEQRVDQHGRVYYVDHVEKRTTWDRPEPLPPGWERRVDNMGRIYYVDHFTRTTTWQRPTLESVRNYEQWQLQRSQLQGAMQQFNQRFIYGNQDLFATSQSKEFDPLGPLPPGWEKRTDSNGRVYFVNHNTRITQWEDPRSQGQLNEKPLPEGWEMRFTVDGIPYFVDHNRRTTTYIDPRTGKSALDNGPQIAYVRDFKAKVQYFRFWCQQLAMPQHIKITVTRKTLFEDSFQQIMSFSPQDLRRRLWVIFPGEEGLDYGGVAREWFFLLSHEVLNPMYCLFEYAGKDNYCLQINPASYINPDHLKYFRFIGRFIAMALFHGKFIDTGFSLPFYKRILNKPVGLKDLESIDPEFYNSLIWVKENNIEECDLEMYFSVDKEILGEIKSHDLKPNGGNILVTEENKEEYIRMVAEWRLSRGVEEQTQAFFEGFNEILPQQYLQYFDAKELEVLLCGMQEIDLNDWQRHAIYRHYARTSKQIMWFWQFVKEIDNEKRMRLLQFVTGTCRLPVGGFADLMGSNGPQKFCIEKVGKENWLPRSHTCFNRLDLPPYKSYEQLKEKLLFAIEETEGFGQE

SEQ ID NO: 25863 - protein, 509 aa, Homo sapiens
MSLVPATNYIYTPLNQLKGGTIVNVYGVVKFFKPPYLSKGTDYCSVVTIVDQTNVKLTCLLFSGNYEALPIIYKNGDIVRFHRLKIQVYKKETQGITSSGFASLTFEGTLGAPIIPRTSSKYFNFTTEDHKMVEALRVWASTHMSPSWTLLKLCDVQPMQYFDLTCQLLGKAEVDGASFLLKVWDGTRTPFPSWRVLIQDLVLEGDLSHIHRLQNLTIDILVYDNHVHVARSLKVGSFLRIYSLHTKLQSMNSENQTMLSLEFHLHGGTSYGRGIRVLPESNSDVDQLKKDLESANLTANQHSDVICQSEPDDSFPSSGSVSLYEVERCQQLSATILTDHQYLERTPLCAILKQKAPQQYRIRAKLRSYKPRRLFQSVKLHCPKCHLLQEVPHEGDLDIIFQDGATKTPDVKLQNTSLYDSKIWTTKNQKGRKVAVHFVKNNGILPLSNECLLLIEGGTLSEICKLSNKFNSVIPVRSGHEDLELLDLSAPFLIQGTIHHYGNQRRRLM

SEQ ID NO: 25864 - protein, 878 aa, Homo sapiens
MPVRKQDTQRALHLLEEYRSKLSQTEDRQLRSSIERVINIFQSNLFQALIDIQEFYEVTLLDNPKCIDRSKPSEPIQPVNTWEISSLPSSTVTSETLPSSLSPSVEKYRYQDEDTPPQEHISPQITNEVIGPELVHVSEKNLSEIENVHGFVSHSHISPIKANPPPVLVNTDSLETPTYVNGTDADYEYEEITLERGNSGLGFSIAGGTDNPHIGDDSSIFITKIITGGAAAQDGRLRVNDCILRVNEVDVRDVTHSKAVEALKEAGSIVRLYVKRRKPVSEKIMEIKLIKGPKGLGFSIAGGVGNQHIPGDNSIYVTKIIEGGAAHKDGKLQIGDKLLAVNNVCLEEVTHEEAVTALKNTSDFVYLKVAKPTSMYMNDGYAPPDITNSSSQPVDNHVSPSSFLGQTPASPARYSPVSKAVLGDDEITREPRKVVLHRGSTGLGFNIVGGEDGEGIFISFILAGGPADLSGELRKGDRIISVNSVDLRAASHEQAAAALKNAGQAVTIVAQYRPEEYSRFEAKIHDLREQMMNSSISSGSGSLRTSQKRSLYVRALFDYDKTKDSGLPSQGLNFKFGDILHVINASDDEWWQARQVTPDGESDEVGVIPSKRRVEKKERARLKTVKFNSKTRDKGEIPDDMGSKGLKHVTSNASDSESSYHEYGCSKGGQEEYVLSYEPVNQQEVNYTRPVIILGPMKDRINDDLISEFPDKFGSCVPHTTRPKRDYEVDGRDYHFVTSREQMEKDIQEHKFIEAGQYNNHLYGTSVQSVREVAEKGKHCILDVSGNAIKRLQIAQLYPISIFIKPKSMENIMEMNKRLTEEQARKTFERAMKLEQEFTEHFTAIVQGDTLEDIYNQVKQIIEEQSGSYIWVPAKEKL

SEQ ID NO: 25865 - protein, 883 aa, Homo sapiens
MRMAVGSVKMQPPCESPALAAAAAVVAADGPLRRSPSAREPEREQPPASLRPRLRDLPALLRSGLTLRRKRSAAGGRTLSRRISNPYLEHTPSQIYGENSSCAGRALRNIIIVQAADLIKDRVNLKGFYRRSCVGSELVDWLLEHCPFVQCRSMAIGVWQLLLDMGIMLSVDQHLYFQDTYVFYQFSSDECSYLYCEFEREEEWQNGVKLLLQLVPLIPARGGICELSHQKIEDSEESSDEILVRLTSAVQRELAAVIALKARKSAIEQDEENNDKHVAVTEAESVPDSQAGVMCKLQERDEIGRIELVQKLAKENYQFLQTDKKEQEKSEHQDDEVTTVQVKEQDQSVLVLKKVQCCGPAPTAGSAESHWRYVVVSGTPEKILEHLLNDLHLEEVQDKETETLLDDFLLTYTVFMTTDDLCQALLRHYSAKKYQGKEENSDVPRRKRKVLHLVSQWIALYKDWLPEDEHSKMFLKTIYRNVLDDVYEYPILEKELKEFQKILGMHRRHTVDEYSPQKKNKALFHQFSLKENWLQHRGTVTETEEIFCHVYITEHSYVSVKAKVSSIAQEILKVVAEKIQYAEEDLALVAITFSGEKHELQPNDLVISKSLEASGRIYVYRKDLADTLNPFAENEESQQRSMRILGMNTWDLALELMNFDWSLFNSIHEQELIYFTFSRQGSGEHTANLSLLLQRCNEVQLWVATEILLCSQLGKRVQLVKKFIKIAAHCKAQRNLNSFFAIVMGLNTASVSRLSQTWEKIPGKFKKLFSELESLTDPSLNHKAYRDAFKKMKPPKIPFMPLLLKDVTFIHEGNKTFLDNLVNFEKLHMIADTVRTLRHCRTNQFGDLSPKEHQELKSYVNHLYVIDSQQALFELSHRIEPRV

SEQ ID NO: 25866 - protein, 2649 aa, Homo sapiens
MNGDMPHVPITTLAGIASLTDLLNQLPLPSPLPATTTKSLLFNARIAEEVNCLLACRDDNLVSQLVHSLNQVSTDHIELKDNLGSDDPEGDIPVLLQAVLARSPNVFREKSMQNRYVQSGMMMSQYKLSQNSMHSSPASSNYQQTTISHSPSSRFVPPQTSSGNRFMPQQNSPVPSPYAPQSPAGYMPYSHPSSYTTHPQMQQASVSSPIVAGGLRNIHDNKVSGPLSGNSANHHADNPRHGSSEDYLHMVHRLSSDDGDSSTMRNAASFPLRSPQPVCSPAGSEGTPKGSRPPLILQSQSLPCSSPRDVPPDILLDSPERKQKKQKKMKLGKDEKEQSEKAAMYDIISSPSKDSTKLTLRLSRVRSSDMDQQEDMISGVENSNVSENDIPFNVQYPGQTSKTPITPQDINRPLNAAQCLSQQEQTAFLPANQVPVLQQNTSVAAKQPQTSVVQNQQQISQQGPIYDEVELDALAEIERIERESAIERERFSKEVQDKDKPLKKRKQDSYPQEAGGATGGNRPASQETGSTGNGSRPALMVSIDLHQAGRVDSQASITQDSDSIKKPEEIKQCNDAPVSVLQEDIVGSLKSTPENHPETPKKKSDPELSKSEMKQSESRLAESKPNENRLVETKSSENKLETKVETQTEELKQNESRTTECKQNESTIVEPKQNENRLSDTKPNDNKQNNGRSETTKSRPETPKQKGESRPETPKQKSDGHPETPKQKGDGRPETPKQKGESRPETPKQKNEGRPETPKHRHDNRRDSGKPSTEKKPEVSKHKQDTKSDSPRLKSERAEALKQRPDGRSVSESLRRDHDNKQKSDDRGESERHRGDQSRVRRPETLRSSSRNEHGIKSDSSKTDKLERKHRHESGDSRERPSSGEQKSRPDSPRVKQGDSNKSRSDKLGFKSPTSKDDKRTEGNKSKVDTNKAHPDNKAEFPSYLLGGRSGALKNFVIPKIKRDKDGNVTQETKKMEMKGEPKDKVEKIGLVEDLNKGAKPVVVLQKLSLDDVQKLIKDREDKSRSSLKPIKNKPSKSNKGSIDQSVLKELPPELLAEIESTMPLCERVKMNKRKRSTVNEKPKYAEISSDEDNDSDEAFESSRKRHKKDDDKAWEYEERDRRSSGDHRRSGHSHEGRRSSGGGRYRNRSPSDSDMEDYSPPPSLSEVARKMKKKEKQKKRKAYEPKLTPEEMMDSSTFKRFTASIENILDNLEDMDFTAFGDDDEIPQELLLGKHQLNELGSESAKIKAMGIMDKLSTDKTVKVLNILEKNIQDGSKLSTLLNHNNDTEEEERLWRDLIMERVTKSADACLTTINIMTSPNMPKAVYIEDVIERVIQYTKFHLQNTLYPQYDPVYRLDPHGGGLLSSKAKRAKCSTHKQRVIVMLYNKVCDIVSSLSELLEIQLLTDTTILQVSSMGITPFFVENVSELQLCAIKLVTAVFSRYEKHRQLILEEIFTSLARLPTSKRSLRNFRLNSSDMDGEPMYIQMVTALVLQLIQCVVHLPSSEKDSNAEEDSNKKIDQDVVITNSYETAMRTAQNFLSIFLKKCGSKQGEEDYRPLFENFVQDLLSTVNKPEWPAAELLLSLLGRLLVHQFSNKSTEMALRVASLDYLGTVAARLRKDAVTSKMDQGSIERILKQVSGGEDEIQQLQKALLDYLDENTETDPSLVFSRKFYIAQWFRDTTLETEKAMKSQKDEESSEGTHHAKEIETTGQIMHRAENRKKFLRSIIKTTPSQFSTLKMNSDTVDYDDACLIVRYLASMRPFAQSFDIYLTQILRVLGENAIAVRTKAMKCLSEVVAVDPSILARLDMQRGVHGRLMDNSTSVREAAVELLGRFVLCRPQLAEQYYDMLIERILDTGISVRKRVIKILRDICIEQPTFPKITEMCVKMIRRVNDEEGIKKLVNETFQKLWFTPTPHNDKEAMTRKILNITDVVAACRDTGYDWFEQLLQNLLKSEEDSSYKPVKKACTQLVDNLVEHILKYEESLADSDNKGVNSGRLVACITTLFLFSKIRPQLMVKHAMTMQPYLTTKCSTQNDFMVICNVAKILELVVPLMEHPSETFLATIEEDLMKLIIKYGMTVVQHCVSCLGAVVNKVTQNFKFVWACFNRYYGAISKLKSQHQEDPNNTSLLTNKPALLRSLFTVGALCRHFDFDLEDFKGNSKVNIKDKVLELLMYFTKHSDEEVQTKAIIGLGFAFIQHPSLMFEQEVKNLYNNILSDKNSSVNLKIQVLKNLQTYLQEEDTRMQQADRDWKKVAKQEDLKEMGDVSSGMSSSIMQLYLKQVLEAFFHTQSSVRHFALNVIALTLNQGLIHPVQCVPYLIAMGTDPEPAMRNKADQQLVEIDKKYAGFIHMKAVAGMKMSYQVQQAINTCLKDPVRGFRQDESSSALCSHLYSMIRGNRQHRRAFLISLLNLFDDTASMVKDKRKERKSSPSKENESSDSEEEVSRPRKSRKRVDSDSDSDSEDDINSVMKCLPENSAPLIEFANVSQGILLLLMLKQHLKNLCGFSDSKIQKYSPSESAKVYDKAINRKTGVHFHPKQTLDFLRSDMANSKITEEVKRSIVKQYLDFKLLMEHLDPDEEEEEGEVSASTNARNKAITSLLGGGSPKNNTAAETEDDESDGEDRGGGTSGVRRRRSQRISQRITH

SEQ ID NO: 25867 - protein, 693 aa, Homo sapiens
MALLAMHSWRWAAAAAAFEKRRHSAILIRPLVSVSGSGPQWRPHQLGALGTARAYQIPESLKSITWQRLGKGNSGQFLDAAKALQVWPLIEKRTCWHGHAGGGLHTDPKEGLKDVDTRKIIKAMLSYVWPKDRPDLRARVAISLGFLGGAKAMNIVVPFMFKYAVDSLNQMSGNMLNLSDAPNTVATMATAVLIGYGVSRAGAAFFNEVRNAVFGKVAQNSIRRIAKNVFLHLHNLDLGFHLSRQTGALSKAIDRGTRGISFVLSALVFNLLPIMFEVMLVSGVLYFNNERYEAQRYDGFLKTYETASLKSTSTLAMLNFGQSAIFSVGLTAIMVLASQGIVAGTLTVGDLVMVNGLLFQLSLPLNFLGTVYRETRQALIDMNTLFTLLKVDTQIKDKVMASPLQITPQTATVAFDNVHFEYIEGQKVLSGISFEVPAGKKVAIVGGSGSGKSTIVRLLFRFYEPQKGSIYLAGQNIQDVSLESLRRAVGVVPQDAVLFHNTIYYNLLYGNISASPEEVYAVAKLAGLHDAILRMPHGYDTQVGERGLKLSGGEKQRVAIARAILKDPPVILYDEATSSLDSITEETILGAMKDVVKHRTSIFIAHRLSTVVDADEIIVLDQGKVAERGTHHGLLANPHSIYSEMWHTQSSRVQNHDNPKWEAKKENISKEEERKKLQEEIVNSVKGCGNCSC

SEQ ID NO: 25868 - protein, 233 aa, Homo sapiens
MRILHVNGFNGEGGEEDPQAARSNSDGSEKATKVQDIKNNLKEAIETIVAAMSNLVPPVELANPENQFRVDYILSVMNVPDFDFPPEFYEHAKALWEDEGVRACYERSNEYQLIDCAQYFLDKIDVIKQADYVPSDQDLLRCRVLTSGIFETKFQVDKVNFHMFDVGGQRDERRKWIQCFNDVTAIIFVVASSSYNMVIREDNQTNRLQEALNLFKSIWNNRWLRTISVILFL

SEQ ID NO: 25869 - protein, 165 aa, Homo sapiens
MRILHVNGFNGDSEKATKVQDIKNNLKEAIETIVAAMSNLVPPVELANPENQFRVDYILSVMNVPDFDFPPEFYEHAKALWEDEGVRACYERSNEYQLIDCAQYFLDKIDVIKQADYVPSDQDLLRCRVLTSGIFETKFQVDKVNFHMFDVGGQRDERRKWIQCF

SEQ ID NO: 25870 - protein, 221 aa, Homo sapiens
MRILHVNGFNGEGGEEDPQAARSNSDGSEKATKVQDIKNNLKEAIETIVAAMSNLVPPVELANPENQFRVDYILSVMNVPDFDFPPEFYEHAKALWEDEGVRACYERSNEYQLIDCAQYFLDKIDVIKQADYVPSDQDLLRCRVLTSGIFETKFQVDKVNFHMFDVGGQRDERRKWIQCFNDVTAIIFVVASSSYNMVIREDNQTNRLQEALNLFKSIWNN

SEQ ID NO: 25871 - protein, 1027 aa, Homo sapiens
MLPLGSEPALNELLLRKEEEWRALQAHRTQLQEAALQDTRSQLEEAQGKLRCLQEDFVYNLQVLEERDLELERYDAAFAQAREWEEARRAEVSELKIEAAKLRQALAREARKVEELQQQQQLAFQEHRLELERVHSDKNGEIDHHREQYENLKWTLERKLEELDGELALQRQELLLEFESKMRKREHEFRLQADNMSNTALSRELKVKLLHKELEALKEAGAKAAESLQRAEATNAELERKLQSRAGELQDLEAMSRARVKDLEDKLHSVQLTRKKEEETFKRKHEELDRLAREKDAVLVAVKGAHVEQLQELQTRVLELQAHCETLEAQLRRAEWRQADTAKEKDAAIDQLREDASTVKSAWDAQIAQLSKEMVSRDLQIQTLQEEEVKLKAQVARSQQDIERYKQQLSLAVERERSLERDQVQLGLDWQRRCDDIERDQIQKSEALIQGLSMAKSQVAAKLQETEQALQEQEVVLKAVTLERDQAVQALRMHGLPRPGAQMLLRQHEEEISKDFPSSEIQRLREQNTSLRNAIAQMRKEMEALSHQIPPPIQTAAESTDANQPDPEAGGDAATPDYVLALEAEIRTLKHKFKTLEKHLEDVLDPLKMSSPHAESQPSVRTSTETTGGSAQAGQAGGSVQAGQAGGSVQAGPVSSGLALRKLGDRVQLLNLLVTRLRQKVLREPLEPAALQRELPREVDQVHLEVLELRKQVAELGKHLRIAQHGGAEPSGRKQPPASDAVALGREGLTKRGPMEAEDQGELFLHLRSVARAPQTLSMHRLQRKLKEAARKIISLRLEKEQLIEMGNRLRAELGRPERWLLHHALPPAPEARKPGEEPRRPLDRSPPLGQVQPHFTSQDAKSAEDEAPSRHLGKHQPRSAQVGSRLDALQGPKTQHSIHTVTCKSPRQKEDRSPKPPQAPQHPEEHGRQSHSSSSFASGTLQDMWRLLDLGSSPSGVTSQGDSTPELPAPPAADRRPVKMQAGIATPGMKTAAQAKAKTTGASRSHPAKAKGCQRPPKIRNYNIMD

SEQ ID NO: 25872 - protein, 819 aa, Homo sapiens
MNYIFGNNTLLYSRGSRGGNTSSSHGSAGPKQKHWAKKGSSDELQAEPEPSRWQQIVAFFTRRHSFIDCISVATSSTQPTEAVLPSPPTVPVIPVLPVPAENTVILPTIPQANPPPVLVNTDSLETPTYVNGTDADYEYEEITLERGNSGLGFSIAGGTDNPHIGDDSSIFITKIITGGAAAQDGRLRVNDCILRVNEVDVRDVTHSKAVEALKEAGSIVRLYVKRRKPVSEKIMEIKLIKGPKGLGFSIAGGVGNQHIPGDNSIYVTKIIEGGAAHKDGKLQIGDKLLAVNNVCLEEVTHEEAVTALKNTSDFVYLKVAKPTSMYMNDGYAPPDITNSSSQPVDNHVSPSSFLGQTPASPARYSPVSKAVLGDDEITREPRKVVLHRGSTGLGFNIVGGEDGEGIFISFILAGGPADLSGELRKGDRIISVNSVDLRAASHEQAAAALKNAGQAVTIVAQYRPEEYSRFEAKIHDLREQMMNSSISSGSGSLRTSQKRSLYVRALFDYDKTKDSGLPSQGLNFKFGDILHVINASDDEWWQARQVTPDGESDEVGVIPSKRRVEKKERARLKTVKFNSKTRDKGEIPDDMGSKGLIILITDEYGCSKGGQEEYVLSYEPVNQQEVNYTRPVIILGPMKDRINDDLISEFPDKFGSCVPHTTRPKRDYEVDGRDYHFVTSREQMEKDIQEHKFIEAGQYNNHLYGTSVQSVREVAEKGKHCILDVSGNAIKRLQIAQLYPISIFIKPKSMENIMEMNKRLTEEQARKTFERAMKLEQEFTEHFTAIVQGDTLEDIYNQVKQIIEEQSGSYIWVPAKEKL

SEQ ID NO: 25873 - protein, 770 aa, Homo sapiens
MSKRGMSSRAKGDKAEALAALQAANEDLRAKLTDIQIELQQEKSKVSKVEREKNQELRQVREHEQHKTAVLLTELKTKLHEEKMKELQAVRETLLRQHEAELLRVIKIKDNENQRLQALLSALRDGGPEKVKTVLLSEAKEEAKKGFEVEKVKMQQEISELKGAKRQVEEALTLVIQADKIKAAEIRSVYHLHQEEITRIKKECEREIRRLEQQLDEKDARRFQLKIAELSAIIRKLEDRNALLSEERNELLKRVREAESQYKPLLDKNKRLSRKNEDLSHALRRMENKLKFVTQENIEMRQRAGIIRRPSSLNDLDQSQDEREVDFLKLQIVEQQNLIDELSKTLETAGYVKSVLERDKLLRFRKQRKKMAKLPKPVVVETFFGYDEEASLESDGSSVSYQTDRTDQTPCTPDDDLEEGMAKEETELRFRQLTMEYQALQRAYALLQEQVGGTLDAERETREQLQAEVQRAQARIEDLEKALAEQGQDMKWIEEKQALYRRNQELVEKIKQMETEEARLRHEVQDARDQNELLEFRILELEERERKSPAISFHHTPFVDGKSPLQVYCEAEGVTDIVVAELMKKLDILGDNANLTNEEQVVVIQARTVLTLAEKWLQQIEETEAALQRKMVDLESEKELFSKQKGYLDEELDYRKQALDQANKHILELEAMLYDALQQEAGAKVAELLSEEEREKLKVAVEQWKRQVMSELRERDAQILRERMELLQLAQQRIKELEERIEAQKRQIKELEEKFLFLFLFFSLAFILWS

SEQ ID NO: 25874 - protein, 1470 aa, Homo sapiens
MKSLLNAFTKKEVPFREAPAYSNRRRRPPNTLAAPRVLLRSNSDNNLNASAPDWAVCSTATSHRSLSPQLLQQMPSKPEGAAKTIGSYVPGPRSRSPSLNRLGGAGEDGKRPQPLWHVGSPFALGANKDSLSAFEYPGPKRKLYSAVPGRLFVAVKPYQPQVDGEIPLHRGDRVKVLSIGEGGFWEGSARGHIGWFPAECVEEVQCKPRDSQAETRADRSKKLFRHYTVGSYDSFDTSSDCIIEEKTVVLQKKDNEGFGFVLRGAKADTPIEEFTPTPAFPALQYLESVDEGGVAWQAGLRTGDFLIEVNNENVVKVGHRQVVNMIRQGGNHLVLKVVTVTRNLDPDDTARKKAPPPPKRAPTTALTLRSKSMTSELEELVDKASVRKKKDKPEEIVPASKPSRAAENMAVEPRVATIKQRPSSRCFPAGSDMNSVYERQGIAVMTPTVPGSPKAPFLGIPRGTMRRQKSIDSRIFLSGITEEERQFLAPPMLKFTRSLSMPDTSEDIPPPPQSVPPSPPPPSPTTYNCPKSPTPRVYGTIKPAFNQNSAAKVSPATRSDTVATMMREKGMYFRRELDRYSLDSEDLYSRNAGPQANFRNKRGQMPENPYSEVGKIASKAVYVPAKPARRKGMLVKQSNVEDSPEKTCSIPIPTIIVKEPSTSSSGKSSQGSSMEIDPQAPEPPSQLRPDESLTVSSPFAAAIAGAVRDREKRLEARRNSPAFLSTDLGDEDVGLGPPAPRTRPSMFPEEGDFADEDSAEQLSSPMPSATPREPENHFVGGAEASAPGEAGRPLNSTSKAQGPESSPAVPSASSGTAGPGNYVHPLTGRLLDPSSPLALALSARDRAMKESQQGPKGEAPKADLNKPLYIDTKMRPSLDAGFPTVTRQNTRGPLRRQETENKYETDLGRDRKGDDKKNMLIDIMDTSQQKSAGLLMVHTVDATKLDNALQEEDEKAEVEMKPDSSPSEVPEGVSETEGALQISAAPEPTTVPGRTIVAVGSMEEAVILPFRIPPPPLASVDLDEDFIFTEPLPPPLEFANSFDIPDDRAASVPALSDLVKQKKSDTPQSPSLNSSQPTNSADSKKPASLSNCLPASFLPPPESFDAVADSGIEEVDSRSSSDHHLETTSTISTVSSISTLSSEGGENVDTCTVYADGQAFMVDKPPVPPKPKMKPIIHKSNALYQDALVEEDVDSFVIPPPAPPPPPGSAQPGMAKVLQPRTSKLWGDVTEIKSPILSGPKANVISELNSILQQMNREKLAKPGEGLDSPMGAKSASLAPRSPEIMSTISGTRSTTVTFTVRPGTSQPITLQSRPPDYESRTSGTRRAPSPVVSPTEMNKETLPAPLSAATASPSPALSDVFSLPSQPPSGDLFGLNPAGRSRSPSPSILQQPISNKPFTTKPVHLWTKPDVADWLESLNLGEHKEAFMDNEIDGSHLPNLQKEDLIDLGVTRVGHRMNIERALKQLLDR

SEQ ID NO: 25875 - protein, 843 aa, Homo sapiens
MSKRGMSSRAKGDKAEALAALQAANEDLRAKLTDIQIELQQEKSKVSKVEREKNQELRQVREHEQHKTAVLLTELKTKLHEEKMKELQAVRETLLRQHEAELLRVIKIKDNENQRLQALLSALRDGGPEKVKTVLLSEAKEEAKKGFEVEKVKMQQEISELKGAKRQVEEALTLVIQADKIKAAEIRSVYHLHQEEITRIKKECEREIRRLMEEIKFKDRAVFVLERELGVQAGHAQRLQLQKEALDEQLSQVREADRHPGSPRRELPHAAGAGDASDHSGSPEQQLDEKDARRFQLKIAELSAIIRKLEDRNALLSEERNELLKRVREAESQYKPLLDKNKRLSRKNEDLSHALRRMENKLKFVTQENIEMRQRAGIIRRPSSLNDLDQSQDEREVDFLKLQIVEQQNLIDELSKTLETAGYVKSVLERDKLLRFRKQRKKMAKLPKPVVVETFFGYDEEASLESDGSSVSYQTDRTDQTPCTPDDDLEEGMAKEETELRFRQLTMEYQALQRAYALLQEQVGGTLDAEREVKTREQLQAEVQRAQARIEDLEKALAEQGQDMKWIEEKQALYRRNQELVEKIKQMETEEARLRHEVQDARDQNELLEFRILELEERERKSPAISFHHTPFVDGKSPLQVYCEAEGVTDIVVAELMKKLDILGDNANLTNEEQVVVIQARTVLTLAEKWLQQIEETEAALQRKMVDLESEKELFSKQKGYLDEELDYRKQALDQANKHILELEAMLYDALQQEAGAKVAELLSEEEREKLKVAVEQWKRQVMSELRERDAQILRERMELLQLAQQRIKELEERIEAQKRQIKELEEKWDQKAGTKWDVASPS

SEQ ID NO: 25876 - protein, 402 aa, Homo sapiens
MPSALAIFTCRPNSHPFQERHVYLDEPIKIGRSVARCRPAQNNATFDCKVLSRNHALVWFDHKTGKFYLQDTKSSNGTFINSQRLSRGSEESPPCEILSGDIIQFGVDVTENTRKVTHGCIVSTIKLFLPDGMEARLRSDVIHAPLPSPVDKVAANTPSMYSQELFQLSQYLQEALHREQMLEQKLATLQRLLAITQEASDTSWQALIDEDRLLSRLEVMGNQLQACSKNQTEDSLRKELIALQEDKHNYETTAKESLRRVLQEKIEVVRKLSEVERSLSNTEDECTHLKEMNERTQEELRELANKYNGAVNEIKDLSDKLKVAEGKQEEIQQKGQAEKKELQHKIDEMEEKEQELQAKIEALQADNDFTNERLTALQVRLEHLQEKTLKECSSLGSLLPRL

SEQ ID NO: 25877 - protein, 437 aa, Homo sapiens
LITSLQNARDIQDMRIKKKQRQRVFPQPGSLYLAKTSTLPRISLKAAVGGQVPSACSHKQLYTYGVSKHCIKINSKNAESFQFHTEDYFGKESLWTGKGIQLADGGWLIPSNDGKAGKEEFYRALCDTPGVDPKLISRIWVYNHYRWIIWKLAAMECAFPKEFANRCLSPERVLLQLKYRYDTEIDRSRRSAIKKIMERDDTAAKTLVLCVSDIISLSANISETSSNKTSSADTQKVAIIELTDGWYAVKAQLDPPLLAVLKNGRLTVGQKIILHGAELVGSPDACTPLEAPESLMLKISANSTRPARWYTKLGFFPDPRPFPLPLSSLFSDGGNVGCVDVIIQRAYPIQWMEKTSSGLYIFRNEREEEKEAAKYVEAQQKRLEALFTKIQEEFEEHEVPHGWGGLRKLTIIVEDEGEASTFFTRWQEREYRENSHF

SEQ ID NO: 25878 - protein, 577 aa, Homo sapiens
ASALRVLSSIRVPIIVPIMMLAIKEAASDMSPYVRKTAAHAIPKLYSLDSDQKDQLIEVIEKLLADKTTLVAGSVVMAFEEVCPERIDLIHKNYRKLCNLLIDVEEWGQVVIISMLTRYARTQFLSPTQNESLLEENAEKAFYGSEEDEAKGAGSEETAAAAAPSRKPYVMDPDHRLLLRNTKPLLQSRSAAVVMAVAQLYFHLAPKAEVGVIAKALVRLLRSHSEVQYVVLQNVATMSIKRRGMFEPYLKSFYIRSTDPTQIKILKLEVLTNLANETNIPTVLREFQTYIRSMDKDFVAATIQAIGRCATNIGRVRDTCLNGLVQLLSNRDELVVAESVVVIKKLLQMQPAQHGEIIKHLAKLTDNIQVPMARASILWLIGEYCEHVPRIAPDVLRKMAKSFTAEEDIVKLQVINLAAKLYLTNSKQTKLLTQYVLSLAKYDQNYDIRDRARFTRQLIVPSEQGGALSRHAKKLFLAPKPAPVLESSFKDRDHFQLGSLSHLLNAKATGYQELPDWPEEAPDPSVRNVEVPEWTKCSNREKRKEKEKPFYSDSEGESGPTESADSGVCSRPKEACI

SEQ ID NO: 25879 - protein, 1169 aa, Homo sapiens
MDPSAPQPRAETSGKDIWHPGERCLAPSPDNGKLCEASIKSITVDENGKSFAVVLYADFQERKIPLKQLQEVKFVKDCPRNLIFDDEDLEKPYFPNRKFPSSSVAFKLSDNGDSIPYTINRYLRDYQREGTRFLYGHYIHGGGCILGDDMGLGKTVQVISFLAAVLHKKGTREDIENNMPEFLLRSMKKEPLSSTAKKMFLIVAPLSVLYNWKDELDTWGYFRVTVLHGNRKDNELIRVKQRKCEIALTTYETLRLCLDELNSLEWSAVIVDEAHRIKNPKARVTEVMKALKCNVRIGLTGTILQNNMKELWCVMDWAVPGLLGSGTYFKKQFSDPVEHGQRHTATKRELATGRKAMQRLAKKMSGWFLRRTKTLIKDQLPKKEDRMVYCSLTDFQKAVYQTVLETEDVTLILQSSEPCTCRSGQKRRNCCYKTNSHGETVKTLYLSYLTVLQKVANHVALLQAASTSKQQETLIKRICDQVFSRFPDFVQKSKDAAFETLSDPKYSGKMKVLQQLLNHCRKNRDKVLLFSFSTKLLDVLQQYCMASGLDYRRLDGSTKSEERLKIVKEFNSTQDVNICLVSTMAGGLGLNFVGANVVVLFDPTWNPANDLQAIDRAYRIGQCRDVKVLRLISLGTVEEIMYLRQIYKQQLHCVVVGSENAKRYFEAVQGSKEHQGELFGIHNLFKFRSQGSCLTKDILEREGQVEAGIMTATTWLKEGPPAHKLEMPRQPDCQECRGTEQAAEPLAKEACDLCSDFSDEEPVGATGIKTAKNKAPDSSKASSSPGQLTLLQCGFSKLLETKCKAVEDSDGNTASDDESSDEQPTCLSTEAKDAGCEKNQDSLGTSKHQKLDNILNPKEKHIFYKSEKILEQNISSKSDEKKIKNTDKHCILQNVTESEDSDVICPTQYTTERFPDNSIRFKPPLEGSEDSETEHTVKTRNNDNSRNTDDKRNGIISKKLSPENTTLKSILKRKGTSDISDESDDIEISSKSRVRKRASSLRFKRIKETKKELHNSPKTMNKTNQVYAANEDHNSQFIDDYSSSDESLSVSHFSFSKQSHRPRTIRDRTSFSSKLPSHNKKNSTFIPRKPMKCSNEKVVNQEQSYESMDKFLDGVQEVAYIHSNQNVIGSSKAENHMSRWAAHDVFELKQFSQLPANIAVCSSKKFGRS

SEQ ID NO: 25880 - protein, 839 aa, Homo sapiens
MPVRKQDTQRALHLLEEYRSKLSQTEDRQLRSSIERVINIFQSNLFQALIDIQEFYEVTLLDNPKCIDRSKPSEPIQPVNTWEISSLPSSTVTSETLPSSLSPSVEKYRYQDEDTPPQEHISPQITNEVIGPELVHVSEKNLSEIENVHGFVSHSHISPIKVNGTDADYEYEEITLERGNSGLGFSIAGGTDNPHIGDDSSIFITKIITGGAAAQDGRLRVNDCILRVNEVDVRDVTHSKAVEALKEAGSIVRLYVKRRKPVSEKIMEIKLIKGPKGLGFSIAGGVGNQHIPGDNSIYVTKIIEGGAAHKDGKLQIGDKLLAVNNVCLEEVTHEEAVTALKNTSDFVYLKVAKPTSMYMNDGYAPPDITNSSSQPVDNHVSPSSFLGQTPASPARYSPVSKAVLGDDEITREPRKVVLHRGSTGLGFNIVGGEDGEGIFISFILAGGPADLSGELRKGDRIISVNSVDLRAASHEQAAAALKNAGQAVTIVAQYRPEEYSRFEAKIHDLREQMMNSSISSGSGSLRTSQKRSLYVRALFDYDKTKDSGLPSQGLNFKFGDILHVINASDDEWWQARQVTPDGESDEVGVIPSKRRVEKKERARLKTVKFNSKTRDKGEIPDDMGSKGLSGQEEYVLSYEPVNQQEVNYTRPVIILGPMKDRINDDLISEFPDKFGSCVPHTTRPKRDYEVDGRDYHFVTSREQMEKDIQEHKFIEAGQYNNHLYGTSVQSVREVAEKGKHCILDVSGNAIKRLQIAQLYPISIFIKPKSMENIMEMNKRLTEEQARKTFERAMKLEQEFTEHFTAIVQGDTLEDIYNQVKQIIEEQSGSYIWVPAKEKL

SEQ ID NO: 25881 - protein, 569 aa, Homo sapiens
SLLEENAEKAFYGSEEDEAKGAGSEETAAAAAPSRKPYVMDPDHRLLLRNTKPLLQSRSAAVVMAVAQLYFHLAPKAEVGVIAKALVRLLRSHSEVQYVVLQNVATMSIKRRGMFEPYLKSFYIRSTDPTQIKILKLEVLTNLANETNIPTVLREFQTYIRSMDKDFVAATIQAIGRCATNIGRVRDTCLNGLVQLLSNRDELVVAESVVVIKKLLQMQPAQHGEIIKHLAKLTDNIQVPMARASILWLIGEYCEHVPRIAPDVLRKMAKSFTAEEDIVKLQVINLAAKLYLTNSKQTKLLTQYVLSLAKYDQNYDIRDRARFTRQLIVPSEQGGALSRHAKKLFLAPKPAPVLESSFKDRDHFQLGSLSHLLNAKATGYQELPDWPEEAPDPSVRNVEVPEWTKCSNREKRKEKEKPFYSDSEGESGPTESADSDPESESESDSKSSSESGSGESSSESDNEDQDEDEEKGRGSESEQSEEDGKRKTKKKVPERKGEASSSDEGSDSSSSSSESEMTSESEEEQLEPASWSRKTPPSSKSAPATKEISLLDLEDCSLLNPSHLHFASS

SEQ ID NO: 25882 - protein, 461 aa, Homo sapiens
MTEITAEGNASTTTTVIDSKNGSVPKSPGKVLKRTVTEDIVTTFSSPAAWLLVIALIITWSAVAIVMFDLVDYKNFSASSIAKIGSDPLKLVRDAMEETTDWIYGFFSLLSDIISSEDEEDDDGDEDTDKGEIDEPPLRKKEIHKDKTEKQEKPERKIQTKVTHKEKEKGKEKVREKEKPEKKATHKEKIEKKEKPETKTLAKEQKKAKTAEKSEEKTKKEVKGGKQEKVKQTAAKVKEVQKTPSKPKEKEDKEKAAVSKHEQKDQYAFCRYMIDIFVHGDLKPGQSPAIPPPLPTEQASRPTPASPALEEKEGEKKKAEKKVTSETKKKAEKEDIKKKSEKETAIDVEKKEPGKASETKQGTVKIAAQAAAKKDEKKEDSKKTKKPAEVEQPKGKKQEKKEKHVEPAKSPKKEHSVPSDKQVKAKTERAKEEIGAVSIKKAVPGKKEEKTTKTVEQGKKK

SEQ ID NO: 25883 - protein, 2580 aa, Homo sapiens
MGEHGLELASMIPALRELGSATPEEYNTVVQKPRQILCQFIDRILTDVNVVAVELVKKTDSQPTSVMLLDFIQHIMKSSPLMFVNVSGSHEAKGSCIEFSNWIITRLLRIAATPSCHLLHKKICEVICSLLFLFKSKSPAIFGVLTKELLQLFEDLVYLHRRNVMGHAVEWPVVMSRFLSQLDEHMGYLQSAPLQLMSMQNLEFIEVTLLMVLTRIIAIVFFRRQELLLWQIGCVLLEYGSPKIKSLAISFLTELFQLGGLPAQPASTFFSSFLELLKHLVEMDTDQLKLYEEPLSKLIKTLFPFEAEAYRNIEPVYLNMLLEKLCVMFEDGVLMRLKSDLLKAALCHLLQYFLKFVPAGYESALQVRKVYVRNICKALLDVLGIEVDAEYLLGPLYAALKMESMEIIEEIQCQTQQENLSSNSDGISPKRRRLSSSLNPSKRAPKQTEDRTFKDCQHKSKKKPSVVITWMSLDFYTKVLKSCRSLLESVQKLDLEATIDKVVKIYDALIYMQVNSSFEDHILEDLCGMLSLPWIYSHSDDGCLKLTTFAANLLTLSCRISDSYSPQAQSRCVFLLTLFPRRIFLEWRTAVYNWALQSSHEVIRASCVSGFFILLQQQNSCNRVPKILIDKVKDDSDIVKKEFASILGQLVCTLHGMFYLTSSLTEPFSEHGHVDLFCRNLKATSQHECSSSQLKASVCKPFLFLLKKKIPSPVKLAFIDNLHHLCKHLDFREDETDVKAVLGTLLNLMEDPDKDVRVAFSGNIKHILESLDSEDGFIKELFVLRMKEAYTHAQISRNNELKDTLILTTGDIGRAAKGDLVPFALLHLLHCLLSKSASVSGAAYTEIRALVAAKSVKLQSFFSQYKKPICQFLVESLHSSQMTALPNTPCQNADVRKQDVAHQREMALNTLSEIANVFDFPDLNRFLTRTLQVLLPDLAAKASPAASALIRTLGKQLNVNRREILINNFKYIFSHLVCSCSKDELERALHYLKNETEIELGSLLRQDFQGLHNELLLRIGEHYQQVFNGLSILASFASSDDPYQGPRDIISPELMADYLQPKLLGILAFFNMQLLSSSVGIEDKKMALNSLMSLMKLMGPKHVSSVRVKMMTTLRTGLRFKDDFPELCCRAWDCFVRCLDHACLGSLLSHVIVALLPLIHIQPKETAAIFHYLIIENRDAVQDFLHEIYFLPDHPELKKIKAVLQEYRKETSESTDLQTTLQLSMKAIQHENVDVRIHALTSLKETLYKNQEKLIKYATDSETVEPIISQLVTVLLKGCQDANSQARLLCGECLGELGAIDPGRLDFSTTETQGKDFTFVTGVEDSSFAYGLLMELTRAYLAYADNSRAQDSAAYAIQELLSIYDCREMETNGPGHQLWRRFPEHVREILEPHLNTRYKSSQKSTDWSGVKKPIYLSKLGSNFAEWSASWAGYLITKVRHDLASKIFTCCSIMMKHDFKVTIYLLPHILVYVLLGCNQEDQQEVYAEIMAVLKHDDQHTINTQDIASDLCQLSTQTVFSMLDHLTQWARHKFQALKAEKCPHSKSNRNKVDSMVSTVDYEDYQSVTRFLDLIPQDTLAVASFRSKAYTRAVMHFESFITEKKQNIQEHLGFLQKLYAAMHEPDGVAGVSAIRKAEPSLKEQILEHESLGLLRDATACYDRAIQLEPDQIIHYHGVVKSMLGLGQLSTVITQVNGVHANRSEWTDELNTYRVEAAWKLSQWDLVENYLAADGKSTTWSVRLGQLLLSAKKRDITAFYDSLKLVRAEQIVPLSAASFERGSYQRGYEYIVRLHMLCELEHSIKPLFQHSPGDSSQEDSLNWVARLEMTQNSYRAKEPILALRRALLSLNKRPDYNEMVGECWLQSARVARKAGHHQTAYNALLNAGESRLAELYVERAKWLWSKGDVHQALIVLQKGVELCFPENETPPEGKNMLIHGRAMLLVGRFMEETANFESNAIMKKYKDVTACLPEWEDGHFYLAKYYDKLMPMVTDNKMEKQGDLIRYIVLHFGRSLQYGNQFIYQSMPRMLTLWLDYGTKAYEWEKAGRSDRVQMRNDLGKINKVITEHTNYLAPYQFLTAFSQLISRICHSHDEVFVVLMEIIAKVFLAYPQQAMWMMTAVSKSSYPMRVNRCKEILNKAIHMKKSLEKFVGDATRLTDKLLELCNKPVDGSSSTLSMSTHFKMLKKLVEEATFSEILIPLQSVMIPTLPSILGTHANHASHEPFPGHWAYIAGFDDMVEILASLQKPKKISLKGSDGKFYIMMCKPKDDLRKDCRLMEFNSLINKCLRKDAESRRRELHIRTYAVIPLNDECGIIEWVNNTAGLRPILTKLYKEKGVYMTGKELRQCMLPKSAALSEKLKVFREFLLPRHPPIFHEWFLRTFPDPTSWYSSRSAYCRSTAVMSMVGYILGLGDRHGENILFDSLTGECVHVDFNCLFNKGETFEVPEIVPFRLTHNMVNGMGPMGTEGLFRRACEVTMRLMRDQREPLMSVLKTFLHDPLVEWSKPVKGHSKAPLNETGEVVNEKAKTHVLDIEQRLQGVIKTRNRVTGLPLSIEGHVHYLIQEATDENLLCQMYLGWTPYM

SEQ ID NO: 25884 - protein, 242 aa, Homo sapiens
MSPGAMRRSLPSTSSTSSTKRLKSVEDEMDSPGEEPFYTGQGRSPGSGSQSSGWHEVEPGMPSPTTLKKSEKSGFSSPSPSQTSSLGTAFTQHHRPVITGPRASPHATPSTLHFPTSPIIQQPGPYFSHPAIRYHPQETLKEFVQLVCPDAGQQAGQVGFLNPNGSSQGKVHNPFLPTPMLPPPPPPPMARPVPLPVPDTKPPTTSTEGGAASPTSPILVPGIKVAASHHPPDRPPDPFSTL

SEQ ID NO: 25885 - protein, 498 aa, Homo sapiens
GERRNSNVSQASMSSRMVPGLPANGKMHSTVDCNGVVSLGTTTETEVRKRRLSSYQISMEMLEDSSGRQRAVSIASILTNTMEELEESRQKCPPCWYRFANVFLIWDCCDAWLKVKHLVNLIVMDPFVDLAITICIVLNTLFMAMEHYPMTEQFSSVLTVGNLVFTGIFTAEMVLKIIAMDPYYYFQEGWNIFDGIIVSLSLMELGLSNVEGLSVLRSFRLLRVFKLAKSWPTLNMLIKIIGNSVGALGNLTLVLAIIVFIFAVVGMQLFGKSYKECVCKINDDCTLPRWHMNDFFHSFLIVFRVLCGEWIETMWDCMEVAGQTMCLIVFMLVMVIGNLVVLNLFLALLLSSFSSDNLAATDDDNEMNNLQIAVGRMQKGIDYVKNKMRECFQKAFFRKPKVIEIHEGNKIDSCMSNNTGIEISKELNYLRDGNGTTSGVGTGSSVEKYVIDENDYMSFINNPSLTVTVPIAVGESDFENLNTEEFSSESELEESKEE

SEQ ID NO: 25886 - protein, 833 aa, Homo sapiens
MNYIFGNNTLLYSRGSRGGNTSSSHGSAGPKQKHWAKKGSSDELQAEPEPSRWQQIVAFFTRRHSFIDCISVATSSTQPTEAVLPSPPTVPVIPVLPVPAENTVILPTIPQANPPPVLVNTDSLETPTYVNGTDADYEYEEITLERGNSGLGFSIAGGTDNPHIGDDSSIFITKIITGGAAAQDGRLRVNDCILRVNEVDVRDVTHSKAVEALKEAGSIVRLYVKRRKPVSEKIMEIKLIKGPKGLGFSIAGGVGNQHIPGDNSIYVTKIIEGGAAHKDGKLQIGDKLLAVNNVCLEEVTHEEAVTALKNTSDFVYLKVAKPTSMYMNDGYAPPDITNSSSQPVDNHVSPSSFLGQTPASPARYSPVSKAVLGDDEITREPRKVVLHRGSTGLGFNIVGGEDGEGIFISFILAGGPADLSGELRKGDRIISVNSVDLRAASHEQAAAALKNAGQAVTIVAQYRPEEYSRFEAKIHDLREQMMNSSISSGSGSLRTSQKRSLYVRALFDYDKTKDSGLPSQGLNFKFGDILHVINASDDEWWQARQVTPDGESDEVGVIPSKRRVEKKERARLKTVKFNSKTRDKGEIPDDMGSKGLKHVTSNASDSESSYLILITDEYGCSKGGQEEYVLSYEPVNQQEVNYTRPVIILGPMKDRINDDLISEFPDKFGSCVPHTTRPKRDYEVDGRDYHFVTSREQMEKDIQEHKFIEAGQYNNHLYGTSVQSVREVAEKGKHCILDVSGNAIKRLQIAQLYPISIFIKPKSMENIMEMNKRLTEEQARKTFERAMKLEQEFTEHFTAIVQGDTLEDIYNQVKQIIEEQSGSYIWVPAKEKL

SEQ ID NO: 25887 - protein, 543 aa, Homo sapiens
MPSALAIFTCRPNSHPFQERHVYLDEPIKIGRSVARCRPAQNNATFDCKVLSRNHALVWFDHKTGKFYLQDTKSSNGTFINSQRLSRGSEESPPCEILSGDIIQFGVDVTENTRKVTHGCIVSTIKLFLPDGMEARLRSDVIHAPLPSPVDKVAANTPSMYSQELFQLSQYLQEALHREQMLEQKLATLQRLLAITQEASDTSWQALIDEDRLLSRLEVMGNQLQACSKNQTEDSLRKELIALQEDKHNYETTAKESLRRVLQEKIEVVRKLSEVERSLSNTEDECTHLKEMNERTQEELRELANKYNGAVNEIKDLSDKLKVAEGKQEEIQQKGQAEKKELQHKIDEMEEKEQELQAKIEALQADNDFTNERLTALQVRLEHLQEKTLKECSSLGIQVDDFLPKINGSTEKEHLLSKSGGDCTFIHQFIECQKKLIVEGHLTKAVEETKLSKENQTRAKESDFSDTLSPSKEKSSDDTTDAQMDEQDLNEPLAKVSLLKDDLQGAQSEIEAKQEIQHLRKELIEAQELARTSKQKCFELQGQ

SEQ ID NO: 25888 - protein, 830 aa, Homo sapiens
MSDSGSQLGSMGSLTMKSQLQITVISAKLKENKKNWFGPSPYVEVTVDGQSKKTEKCNNTNSPKWKQPLTVIVTPVSKLHFRVWSHQTLKSDVLLGTAALDIYETLKSNNMKLEEVVVTLQLGGDKEPTETIGDLSICLDGLQLESEVVTNGETTCSESASQNDDGSRSKDETRVSTNGSDDPEDAGAGENRRVSGNNSPSLSNGGFKPSRPPRPSRPPPPTPRRPASVNGSPSATSESDGSSTGSLPPTNTNTNTSEGATSGLIIPLTISGGSGPRPLNPVTQAPLPPGWERRVDNMGRIYYVDHFTRTTTWQRPTLESVRNYEQWQLQRSQLQGAMQQFNQRFIYGNQDLFATSQSKEFDPLGPLPPGWEKRTDSNGRVYFVNHNTRITQWEDPRSQGQLNEKPLPEGWEMRFTVDGIPYFVDHNRRTTTYIDPRTGKSALDNGPQIAYVRDFKAKVQYFRFWCQQLAMPQHIKITVTRKTLFEDSFQQIMSFSPQDLRRRLWVIFPGEEGLDYGGVAREWFFLLSHEVLNPMYCLFEYAGKDNYCLQINPASYINPDHLKYFRFIGRFIAMALFHGKFIDTGFSLPFYKRILNKPVGLKDLESIDPEFYNSLIWVKENNIEECDLEMYFSVDKEILGEIKSHDLKPNGGNILVTEENKEEYIRMVAEWRLSRGVEEQTQAFFEGFNEILPQQYLQYFDAKELEVLLCGMQEIDLNDWQRHAIYRHYARTSKQIMWFWQFVKEIDNEKRMRLLQFVTGTCRLPVGGFADLMGSNGPQKFCIEKVGKENWLPRSHTCFNRLDLPPYKSYEQLKEKLLFAIEETEGFGQE

SEQ ID NO: 25889 - protein, 717 aa, Homo sapiens [sequence omitted]

SEQ ID NO: 25890 - protein, 508 aa, Homo sapiens
MSAAPAYSEDKGGSAGPGEPEYGHDPASGGIFSSDYKRHDDLKEMLDTNKDSLKLEAMKRIVAMIARGKNASDLFPAVVKNVACKNIEVKKLVYVYLVRYAEEQQDLALLSISTFQRGLKDPNQLIRASALRVLSSIRVPIIVPIMMLAIKEAASDMSPYVRKTAAHAIPKLYSLDSDQKDQLIEVIEKLLADKTTLVAGSVVMAFEEVCPERIDLIHKNYRKLCNLLIDVEEWGQVVIISMLTRYARTQFLSPTQNESLLEENAEKAFYGSEEDEAKGAGSEETAAAAAPSRKPYVMDPDHRLLLRNTKPLLQSRSAAVVMAVAQLYFHLAPKAEVGVIAKALVRLLRSHSEVQYVVLQNVATMSIKRRGMFEPYLKSFYIRSTDPTQIKILKLEVLTNLANETNIPTVLREFQTYIRSMDKDFVAATIQAIGRCATNIGRVRDTCLNGLVQLLSNRDELVVAESVVVIKKLLQMQPAQHGEIIKHLAKLTDNIQVFRWKEQRHWTM

SEQ ID NO: 25891 - protein, 237 aa, Homo sapiens
MVTCWRPGRLGSYFWTGAVIFLDKIDVIKQADYVPSDQDLLRCRVLTSGIFETKFQVDKVNFHMFDVGGQRDERRKWIQCFNDVTAIIFVVASSSYNMVIREDNQTNRLQEALNLFKSIWNNRWLRTISVILFLNKQDLLAEKVLAGKSKIEDYFPEFARYTTPEDATPEPGEDPRVTRAKYFIRDEFLRISTASGDGRHYCYPHFTCAVDTENIRRVFNDCRDIIQRMHLRQYELL

SEQ ID NO: 25892 - protein, 1081 aa, Homo sapiens
MAGLRQELRSPDSHSDEGACGQGATEIDRRKKRPLENDGPVKKKVKKVQQKEGGSDLGMSGNSEPKKCLRTRNVSKSLEKLKEFCCDSALPQSRVQTESLQERFAVLPKCTDFDDISLLHAKNAVSSEDSKRQINQKDTTLFDLSQFGSSNTSHENLQKTASKSANKRSKSIYTPLELQYIEMKQQHKDAVLCVECGYKYRFFGEDAEIAARELNIYCHLDHNFMTASIPTHRLFVHVRRLVAKGYKVGVVKQTETAALKAIGDNRSSLFSRKLTALYTKSTLIGEDVNPLIKLDDAVNVDEIMTDTSTSYLLCISENKENVRDKKKGNIFIGIVGVQPATGEVVFDSFQDSASRSELETRMSSLQPVELLLPSALSEQTEALIHRATSVSVQDDRIRVERMDNIYFEYSHAFQAVTEFYAKDTVDIKGSQIISGIVNLEKPVICSLAAIIKYLKEFNLEKMLSKPENFKQLSSKMEFMTINGTTLRNLEILQNQTDMKTKGSLLWVLDHTKTSFGRRKLKKWVTQPLLKLREINARLDAVSEVLHSESSVFGQIENHLRKLPDIERGLCSIYHKKCSTQEFFLIVKTLYHLKSEFQAIIPAVNSHIQSDLLRTVILEIPELLSPVEHYLKILNEQAAKVGDKTELFKDLSDFPLIKKRKDEIQGVIDEIRMHLQEIRKILKNPSAQYVTVSGQEFMIEIKNSAVSCIPTDWVKVGSTKAVSRFHSPFIVENYRHLNQLREQLVLDCSAEWLDFLEKFSEHYHSLCKAVHHLATVDCIFSLAKVAKQGDYCRPTVQEERKIVIKNGRHPVIDVLLGEQDQYVPNNTDLSEDSERVMIITGPNMGGKSSYIKQVALITIMAQIGSYVPAEEATIGIVDGIFTRMGAADNIYKGQSTFMEELTDTAEIIRKATSQSLVILDELGRGTSTHDGIAIAYATLEYFIRDVKSLTLFVTHYPPVCELEKNYSHQVGNYHMGFLVSEDESKLDPGAAEQVPDFVTFLYQITRGIAARSYGLNVAKLADVPGEILKKAAHKSKELEGLINTKRKRLKYFAKLWTMHNAQDLQKWTEEFNMEETQTSLLH

SEQ ID NO: 25893 - protein, 1086 aa, Homo sapiens
MVEKRCPLQRDGVYRWFSELPSPQRVEFLCGLLDLCIPLELRFLGSCLEDLARKDYHSLRDSEIKANNPADLGSLTNLTDEVVRSKLLVSLALLGSEQREAAGVLYRTLTHIDSIIHNYGLQLNEGRTGDEFLLLFTMASNHPAFSFHQKQVLRQELTQIQSSLNGGGGHGGKGAPGPGGALPTCPACHKITPRTEAPVSSVSNSLENALHTSAHSTEESLPKRPLGKHSKVSVEKIDLKGLSHTKNDRNVECSFEVLWSDSSITSVTKSSSEVTEFISKLCQLYPEENLEKLIPCLAGPDAFYVERNHVDLDSGLRYLASLPSHVLKNDHVRRFLSTSSPPQQLQSPSPGNPSLSKVGTVMGVSGRPVCGVAGIPSSQSGAQHHGQHPAGSAAPLPHCSHAGSAGSALAYRTQMDTSPAILMPSSLQTPQTQEQNGILDWLRKLRLHKYYPVFKQLSMEKFLSLTEEDLNKFESLTMGAKKKLKTQLELEKEKSERRCLNPSAPPLVTSSGVARVPPTSHVGPVQSGRGSHAAELRVEVEQPHHQLPREGSSSEYSSSSSSPMGVQAREESSDSAEENDRRVEIHLESSDKEKPVMLLNHFTSSSARPTAQVLPVQNEASSNPSGHHPLPPQMLSAASHITPIRMLNSVHKPERGSADMKLLSSSVHSLLSLEERNKGSGPRSSMKVDKSFGSAMMDVLPASAPHQPVQVLSGLSESSSMSPTVSFGPRTKVVHASTLDRVLKTAQQPALVVETSTAATGTPSTVLHAARPPIKLLLSSSVPADSAISGQTSCPNNVQISVPPAIINPRTALYTANTKVAFSAMSSMPVGPLQGGFCANSNTASPSSHPSTSFANMATLPSCPAPSSSPALSSVPESSFYSSSGGGGSTGNIPASNPNHHHHHHHQQPPAPPQPAPPPPGCIVCTSCGCSGSCGSSGLTVSYANYFQHPFSGPSVFTFPFLPFSPMCSSGYVSAQQYGGGSTFPVVHAPYSSSGTPDPVLSGQSTFAVPPMQNFMAGTAGVYQTQGLVGSSNGSSHKKSGNLSCYNCGATGHRAQDCKQPSMDFNRPGTFRLKYAPPAESLDSTD

SEQ ID NO: 25894 - protein, 664 aa, Homo sapiens
MEDGKPVWAPHPTDGFQMGNIVDIGPDSLTIEPLNQKGKTFLALINQVFPAEEDSKKDVEDNCSLMYLNEATLLHNIKVRYSKDRIYTYVANILIAVNPYFDIPKIYSSEAIKSYQGKSLGTRPPHVFAIADKAFRDMKVLKMSQSIIVSGESGAGKTENTKFVLRYLTESYGTGQDIDDRIVEANPLLEAFGNAKTVRNNNSSRFGKFVEIHFNEKSSVVGGFVSHYLLEKSRICVQGKEERNYHIFYRLCAGASEDIREKLHLSSPDNFRYLNRGCTRYFANKETDKQILQNRKSPEEDEYLKAGSMKDPLLDDHGDFIRMCTAMKKIGLDDEEKLDLFRVVAGVLHLGNIDFEEAGSTSGGCNLKNKSAQSLEYCAELLGLDQDDLRVSLTTRVMLTTAGGTKGTVIKVPLKVEQANNARDALAKTVYSHLFDHVVNRVNQCFPFETSSYFIGVLDIAGFEYFEHNSFEQFCINYCNEKLQQFFNERILKEEQELYQKEGLGVNEVHYVDNQDCIDLIEAKLVGILDILDEENRLPQPSDQHFTSAVHQKHKDHFRLTIPRKSKLAVHRNIRDDEGFIIRHFAGAVCYETTQFVEKNNDALHMSLESLICESRDKFIRELFESSTNNNKDTKQKAGKLSFISVGNKFKRFCFSWSSPARDG

SEQ ID NO: 25895 - protein, 345 aa, Homo sapiens
MQSPQKTTLILPTQQVRRSSRIKPPGPTAVPKRSSSVKNITPRKKGPNSGKKEKPLPVICSTSAASLKSLTRDRGMLYKDVASGPCKIVMSTVCVYVNKHGNFGPHLDPKRIQQLPDHFGPGPVNVVLRRIVQACVDCALETKTVFGYLKPDNRGGEVITASFDGETHSIQLPPVNSASFALRFLENFCHSLQCDNLLSSQPFSSSRGHTHSSAEHDKNQSAKEDVTERQSTKRSPQQTVPYVVPLSPKLPKTKEYASEGEPLFAGGSAIPKEENLSEDSKSSSLNSGNYLNPACRNPMYIHTSVSQDFSRSVPGTTSSPLVGDISPKSSPHEVKFQMQRKSEGN

SEQ ID NO: 25896 - protein, 337 aa, Homo sapiens
HLFILEGLADQGLRQLWENHQSWIPRSEHRKYKVLYNSQLLFRSRLYGDLEAILYHVHLFQPTELLLQQAVFFLRDTERRRVFQALARIHDICYNSTTLWDVTVRDLLPSSAMIKDLSQEFGMPLSQEELTDEKLFALPPQPAPNLEDYHSRNSTLTLEIHAHQEKYLQWRSAMLMKNKDKKHSFIQKNITEAYQVSKKPPKSVAKVIKISAPANKAVYNYSTQTMNSTELAKKELYQEIAKEPRKRFTYSQDYLSAMVEPLDLKEEEKKAQKKSRQAWLTARGFQVTGLQSDTESSFQDLKLPPIKELNEVHREEQGLRWGVHRDLSPPDLLTPPI

SEQ ID NO: 25897 - protein, 8483 aa, Homo sapiens
MDQPQFSGAPRFLTRPKAFVVSVGKDATLSCQIVGNPTPQVSWEKDQQPVAAGARFRLAQDGDLYRLTILDLALGDSGQYVCRARNAIGEAFAAVGLQVDAEAACAEQAPHFLLRPTSIRVREGSEATFRCRVGGSPRPAVSWSKDGRRLGEPDGPRVRVEELGEASALRIRAARPRDGGTYEVRAENPLGAASAAAALVVDSDAADTASRPGTSTAALLAHLQRRREAMRAEGAPASPPSTGTRTCTVTEGKHARLSCYVTGEPKPETVWKKDGQLVTEGRRHVVYEDAQENFVLKILFCKQSDRGLYTCTASNLVGQTYSSVLVVVREPAVPFKKRLQDLEVREKESATFLCEVPQPSTEAAWFKEETRLWASAKYGIEEEGTERRLTVRNVSADDDAVYICETPEGSRTVAELAVQGNLLRKLPRKTAVRVGDTAMFCVELAVPVGPVHWLRNQEEVVAGGRVAISAEGTRHTLTISQCCLEDVGQVAFMAGDCQTSTQFCVSAPRKPPLQPPVDPVVKARMESSVILSWSPPPHGERPVTIDGYLVEKKKLGTYTWIRCHEAEWVATPELTVADVAEEGNFQFRVSALNSFGQSPYLEFPGTVHLAPKLAVRTPLKAVQAVEGGEVTFSVDLTVASAGEWFLDGQALKASSVYEIHCDRTRHTLTIREVPASLHGAQLKFVANGIESSIRMEVRAAPGLTANKPPAAAAREVLARLHEEAQLLAELSDQAAAVTWLKDGRTLSPGPKYEVQASAGRRVLLVRDVARDDAGLYECVSRGGRIAYQLSVQGLARFLHKDMAGSCVDAVAGGPAQFECETSEAHVHVHWYKDGMELGHSGERFLQEDVGTRHRLVAATVTRQDEGTYSCRVGEDSVDFRLRVSEPKVVFAKEQLARRKLQAEAGASATLSCEVAQAQTEVTWYKDGKKLSSSSKVCMEATGCTRRLVVQQAGQADAGEYSCEAGGQRLSFHLDVKEPKVVFAKDQVAHSEVQAEAGASATLSCEVAQAQTEVMWYKDGKKLSSSLKVHVEAKGCRRRLVVQQAGKTDAGDYSCEARGQRVSFRLHITEPKMMFAKEQSVHNEVQAEAGASAMLSCEVAQAQTEVTWYKDGKKLSSSSKVGMEVKGCTRRLVLPQAGKADAGEYSCEAGGQRVSFHLHITEPKGVFAKEQSVHNEVQAEAGTTAMLSCEVAQPQTEVTWYKDGKKLSSSSKVRMEVKGCTRRLVVQQVGKADAGEYSCEAGGQRVSFQLHITEPKAVFAKEQLVHNEVRTEAGASATLSCEVAQAQTEVTWYKDGKKLSSSSKVRIEAAGCMRQLVVQQAGQADAGEYTCEAGGQRLSFHLDVSEPKAVFAKEQLAHRKVQAEAGAIATLSCEVAQAQTEVTWYKDGKKLSSSSKVRMEAVGCTRRLVVQQACQADTGEYSCEAGGQRLSFSLDVAEPKVVFAKEQPVHREVQAQAGASTTLSCEVAQAQTEVMWYKDGKKLSFSSKVRMEAVGCTRRLVVQQAGQAVAGEYSCEAGSQRLSFHLHVAEPKAVFAKEQPASREVQAEAGTSATLSCEVAQAQTEVTWYKDGKKLSSSSKVRMEAVGCTRRLVVQEAGQADAGEYSCKAGDQRLSFHLHVAEPKVVFAKEQPAHREVQAEAGASATLSCEVAQAQTEVTWYKDGKKLSSSSKVRVEAVGCTRRLVVQQAGQAEAGEYSCEAGGQQLSFRLQVAELEPQISERPCRREPLVVKEHEDIILTATLATPSAATVTWLKDGVEIRRSKRHETASQGDTHTLTVHGAQVLDSAIYSCRVGAEGQDFPVQVEEVAAKFCRLLEPVCGELGGTVTLACELSPACAEVVWRCGNTQLRVGKRFQMVAEGPVRSLTVLGLRAEDAGEYVCESRDDHTSAQLTVSVPRVVKFMSGLSTVVAEEGGEATFQCVVSPSDVAVVWFRDGALLQPSEKFAISQSGASHSLTISDLVLEDAGQITVEAEGASSSAALRVREAPVLFKKKLEPQTVEERSSVTLEVELTRPWPELRWTRNATALAPGKNVEIHAEGARHRLVLHNVGFADRGFFGCETPDDKTQAKLTVEMRQVRLVRGLQAVEAREQGTATMEVQLSHADVDGSWTRDGLRFQQGPTCHLAVRGPMHTLTLSGLRPEDSGLMVFKAEGVHTSARLVVTELPVSFSRPLQDVVTTEKEKVTLECELSRPNVDVRWLKDGVELRAGKTMAIAAQGACRSLTIYRCEFADQGVYVCDAHDAQSSASVKVQGRTYTLIYRRVLAEDAGEIQFVAENAESRAQLRVKELPVTLVRPLRDKIAMEKHRGVLECQVSRASAQVRWFKGSQELQPGPKYELVSDGLYRKLIISDVHAEDEDTYTCDAGDVKTSAQFFVEEQSITIVRGLQDVTVMEPAPAWFECETSIPSVRPPKWLLGKTVLQAGGNVGLEQEGTVHRLMLRRTCSTMTGPVHFTVGKSRSSARLVVSDIPVVLTRPLEPKTGRELQSVVLSCDFRPAPKAVQWYKDDTPLSPSEKFKMSLEGQMAELRILRLMPADAGVYRCQAGSAHSSTEVTVEAREVTVTGPLQDAEATEEGWASFSCELSHEDEEVEWSLNGMPLYNDSFHEISHKGRRHTLVLKSIQRADAGIVRASSLKVSTSARLEVRVKPVVFLKALDDLSAEERGTLALQCEVSDPEAHVVWRKDGVQLGPSDKYDFLHTAGTRGLVVHDVSPEDAGLYTCHVGSEETRARVRVHDLHVGITKRLKTMEVLEGESCSFECVLSHESASDPAMWTVGGKTVGSSSRFQATRQGRKYILVVREAAPSDAGEVVFSVRGLTSKASLIVRERPAAIIKPLEDQWVAPGEDVELRCELSRAGTPVHWLKDRKAIRKSQKYDVVCEGTMAMLVIRGASLKDAGEYTCEVEASKSTASLHVEEKANCFTEELTNLQVEEKGTAVFTCKTEHPAATVTWRKGLLELRASGKHQPSQEGLTLRLTISALEKADSDTYTCDIGQAQSRAQLLVQGRRVHIIEDLEDVDVQEGSSATFRCRISPANYEPVHWFLDKTPLHANELNEIDAQPGGYHVLTLRQLALKDSGTIYFEAGDQRASAALRVTEKPSVFSRELTDATITEGEDLTLVCETSTCDIPVCWTKDGKTLRGSARCQLSHEGHRAQLLITGATLQDSGRYKCEAGGACSSSIVRVHARPVRFQEALKDLEVLEGGAATLRCVLSSVAAPVKWCYGNNVLRPGDKYSLRQEGAMLELVVRNLRPQDSGRYSCSFGDQTTSATLTVTALPAQFIGKLRNKEATEGATATLRCELSKAAPVEWRKGSETLRDGDRYCLRQDGAMCELQIRGLAMVDAAEYSCVCGEERTSASLTIRPMPAHFIGRLRHQESIEGATATLRCELSKAAPVEWRKGRESLRDGDRHSLRQDGAVCELQICGLAVADAGEYSCVCGEERTSATLTVKALPAKFTEGLRNEEAVEGATAMLWCELSKVAPVEWRKGPENLRDGDRYILRQEGTRCELQICGLAMADAGEYLCVCGQERTSATLTIRALPARFIEDVKNQEAREGATAVLQCELNSAAPVEWRKGSETLRDGDRYSLRQDGTKCELQIRGLAMADTGEYSCVCGQERTSAMLTVRALPIKFTEGLRNEEATEGATAVLRCELSKMAPVEWWKGHETLRDGDRHSLRQDGARCELQIRGLVAEDAGEYLCMCGKERTSAMLTVRAMPSKFIEGLRNEEATEGDTATLWCELSKAAPVEWRKGHETLRDGDRHSLRQDGSRCELQIRGLAVVDAGEYSCVCGQERTSATLTVRALPARFIEDVKNQEAREGATAVLQCELSKAAPVEWRKGSETLRGGDRYSLRQDGTRCELQIHGLSVADTGEYSCVCGQERTSATLTVRALPARFTQDLKTKEASEGATATLQCELSKVAPVEWKKGPETLRDGGRYSLKQDGTRCELQIHDLSVADAGEYSCMCGQERTSATLTVRALPARFTEGLRNEEAMEGATATLQCELSKAAPVEWRKGLEALRDGDKYSLRQDGAVCELQIHGLAMADNGVYSCVCGQERTSATLTVRALPARFIEDMRNQKATEGATVTLQCKLRKAAPVEWRKGPNTLKDGDRYSLKQDGTSCELQIRGLVIADAGEYSCICEQERTSATLTVRALPARFIEDVRNHEATEGATAVLQCELSKAAPVEWRKGSETLRDGDRYSLRQDGTRCELQIRGLAVEDTGEYLCVCGQERTSATLTVRALPARFIDNMTNQEAREGATATLHCELSKVAPVEWRKGPETLRDGDRHSLRQDGTRCELQIRGLSVADAGEYSCVCGQERTSATLTIREATEGATAMLQCELSKVAPVEWRKGPETLRDGDRYNLRQDGTRCELQIHGLSVADTGEYSCVCGQEKTSATLTVKAPQPVFREPLQSLQAEEGSTATLQCELSEPTATVVWSKGGLQLQANGRREPRLQGCTAELVLQDLQREDTGEYTCTCGSQATSATLTVTAAPVRFLRELQHQEVDEGGTAHLCCELSRAGASVEWRKGSLQLFPCAKYQMVQDGAAAELLVRGVEQEDAGDYTCDTGHTQSMASLSVRVPRPKFKTRLQSLEQETGDIARLCCQLSDAESGAVVQWLKEGVELHAGPKYEMRSQGATRELLIHQLEAKDTGEYACVTGGQKTAASLRVTEPEVTIVRGLVDAEVTADEDVEFSCEVSRAGATGVQWCLQGLPLQSNEVTEVAVRDGRIHTLRLKGVTPEDAGTVSFHLGNHASSAQLTVRAPEVTILEPLQDVQLSEGQDASFQCRLSRASGQEARWALGGVPLQANEMNDITVEQGTLHLLTLHKVTLEDAGTVSFHVGTCSSEAQLKVTAKNTVVRGLENVEALEGGEALFECQLSQPEVAAHTWLLDDEPVHTSENAEVVFFENGLRHLLLLKNLRPQDSCRVTFLAGDMVTSAFLTVRGWRLEILEPLKNAAVRAGAQACFTCTLSEAVPVGEASWYINGAAVQPDDSDWTVTADGSHHALLLRSAQPHHAGEVTFACRDAVASARLTVLGLPDPPEDAEVVARSSHTVTLSWAAPMSDGGGGLCGYRVEVKEGATGQWRLCHELVPGPECVVDGLAPGETYRFRVAAVGPVGAGEPVHLPQTVRLAEPPKPVPPQPSAPESRQVAAGEDVSLELEVVAEAGEVIWHKGMERIQPGGRFEVVSQGRQQMLVIKGFTAEDQGEYHCGLAQGSICPAAATFQVALSPASVDEAPQPSLPPEAAQEGDLHLLWEALARKRRMSREPTLDSISELPEEDGRSQRLPQEAEEVAPDLSEGYSTADELARTGDADLSHTSSDDESRAGTPSLVTYLKKAGRPGTSPLASKVGAPAAPSVKPQQQQEPLAAVRPPLGDLSTKDLGDPSMDKAAVKIQAAFKGYKVRKEMKQQEGPMFSHTFGDTEAQVGDALRLECVVASKADVRARWLKDGVELTDGRHHHIDQLGDGTCSLLITGLDRADAGCYTCQVSNKFGQVTHSACVVVSGSESEAESSSGGELDDAFRRAARRLHRLFRTKSPAEVSDEELFLSADEGPAEPEEPADWQTYREDEHFICIRFEALTEARQAVTRFQEMFATLGIGVEIKLVEQGPRRVEMCISKETPAPVVPPEPLPSLLTSDAAPVFLTELQNQEVQDGYPVSFDCVVTGQPMPSVRWFKDGKLLEEDDHYMINEDQQGGHQLIITAVVPADMGVYRCLAENSMGVSSTKAELRVDLTSTDYDTAADATESSSYFSAQGYLSSREQEGTESTTDEGQLPQVVEELRDLQVAPGTRLAKFQLKVKGYPAPRLYWFKDGQPLTASAHIRMTDKKILHTLEIISVTREDSGQYAAYISNAMGAAYSSARLLVRGPDEPEEKPASDVHEQLVPPRMLERFTPKKVKKGSSITFSVKVEGRPVPTVHWLREEAERGVLWIGPDTPGYTVASSAQQHSLVLLDVGRQHQGTYTCIASNAAGQALCSASLHVSGLPKVEEQEKVKEALISTFLQGTTQAISAQGLETASFADLGGQRKEEPLAAKEALGHLSLAEVGTEEFLQKLTSQITEMVSAKITQAKLQVPGGDSDEDSKTPSASPRHGRSRPSSSIQESSSESEDGDARGEIFDIYVVTADYLPLGAEQDAITLREGQYVEVLDAAHPLRWLVRTKPTKSSPSRQGWVSPAYLDRRLKLSPEWGAAEAPEFPGEAVSEDEYKARLSSVIQELLSSEQAFVEELQFLQSHHLQHLERCPHVPIAVAGQKAVIFRNVRDIGRFHSSFLQELQQCDTDDDVAMCFIKNQAAFEQYLEFLVGRVQAESVVVSTAIQEFYKKYAEEALLAGDPSQPPPPPLQHYLEQPVERVQRYQALLKELIRNKARNRQNCALLEQAYAVVSALPQRAENKLHVSLMENYPGTLQALGEPIRQGHFIVWEGAPGARMPWKGHNRHVFLFRNHLVICKPRRDSRTDTVSYVFRNMMKLSSIDLNDQVEGDDRAFEVWQEREDSVRKYLLQARTAIIKSSWVKEICGIQQRLALPVWRPPDFEEELADCTAELGETVKLACRVTGTPKPVISWYKDGKAVQVDPHHILIEDPDGSCALILDSLTGVDSGQYMCFAASAAGNCSTLGKILVQVPPRFVNKVRASPFVEGEDAQFTCTIEGAPYPQIRWYKDGALLTTGNKFQTLSEPRSGLLVLVIRAASKEDLGLYECELVNRLGSARASAELRIQSPMLQAQEQCHREQLVAAVEDTTLERADQEVTSVLKRLLGPKAPGPSTGDLTGPGPCPRGAPALQETGSQPPVTGTSEAPAVPPRVPQPLLHEGPEQEPEAIARAQEWTVPIRMEGAAWPGAGTGELLWDVHSHVVRETTQRTYTYQAIDTHTARPPSMQVTIEDVQAQTGGTAQFEAIIEGDPQPSVTWYKDSVQLVDSTRLSQQQEGTTYSLVLRHVASKDAGVYTCLAQNTGGQVLCKAELLVLGGDNEPDSEKQSHRRKLHSFYEVKEEIGRGVFGFVKRVQHKGNKILCAAKFIPLRSRTRAQAYRERDILAALSHPLVTGLLDQFETRKTLILILELCSSEELLDRLYRKGVVTEAEVKVYIQQLVEGLHYLHSHGVLHLDIKPSNILMVHPAREDIKICDFGFAQNITPAELQFSQYGSPEFVSPEIIQQNPVSEASDIWAMGVISYLSLTCSSPFAGESDRATLLNVLEGRVSWSSPMAAHLSEDAKDFIKATLQRAPQARPSAAQCLSHPWFLKSMPAEEAHFINTKQLKFLLARSRWQRSLMSYKSILVMRSIPELLRGPPDSPSLGVARHLCRDTGGSSSSSSSSDNELAPFARAKSLPPSPVTHSPLLHPRGFLRPSASLPEEAEASERSTEAPAPPASPEGAGPPAAQGCVPRHSVIRSLFYHQAGESPEHGALAPGSRRHPARRRHLLKGGYIAGALPGLREPLMEHRVLEEEAAREEQATLLAKAPSFETALRLPASGTHLAPGHSHSLEHDSPSTPRPSSEACGEAQRLPSAPSGGAPIRDMGHPQGSKQLPSTGGHPGTAQPERPSPDSPWGQPAPFCHPKQGSAPQEGCSPHPAVAPCPPGSFPPGSCKEAPLVPSSPFLGQPQAPPAPAKASPPLDSKMGPGDISLPGRPKPGPCSSPGSASQASSSQVSSLRVGSSQVGTEPGPSLDAEGWTQEAEDLSDSTPTLQRPQEQATMRKFSLGGRGGYAGVAGYGTFAFGGDAGGMLGQGPMWARIAWAVSQSEEEEQEEARAESQSEEQQEARAESPLPQVSARPVPEVGRAPTRSSPEPTPWEDIGQVSLVQIRDLSGDAEAADTISLDISEVDPAYLNLSDLYDIKYLPFEFMIFRKVPKSAQPEPPSPMAEEELAEFPEPTWPWPGELGPHAGLEITEESEDVDALLAEAAVGRKRKWSSPSRSLFHFPGRHLPLDEPAELGLRERVKASVEHISRILKGRPEGLEKEGPPRKKPGLASFRLSGLKSWDRAPTFLRELSDETVVLGQSVTLACQVSAQPAAQATWSKDGAPLESSSRVLISATLKNFQLLTILVVVAEDLGVYTCSVSNALGTVTTTGVLRKAERPSSSPCPDIGEVYADGVLLVWKPVESYGPVTYIVQCSLEGGSWTTLASDIFDCCYLTSKLSRGGTYTFRTACVSKAGMGPYSSPSEQVLLGGPSHLASEEESQGRSAQPLPSTKTFAFQTQIQRGRFSVVRQCWEKASGRALAAKIIPYHPKDKTAVLREYEALKGLRHPHLAQLHAAYLSPRHLVLILELCSGPELLPCLAERASYSESEVKDYLWQMLSATQYLHNQHILHLDLRSENMIITEYNLLKVVDLGNAQSLSQEKVLPSDKFKDYLETMAPELLEGQGAVPQTDIWAIGVTAFIMLSAEYPVSSEGARDLQRGLRKGLVRLSRCYAGLSGGAVAFLRSTLCAQPWGRPCASSCLQCPWLTEEGPACSRPAPVTFPTARLRVFVRNREKRRALLYKRHNLAQVR

SEQ ID NO: 25898 - protein, 628 aa, Homo sapiens
MFKTVSKQHAQRHFSGISVLDRFKCSGSEKMSPSIKNLDCFSPMLCHCKVACSNSTISLMFGCKKYRYQDEDTPPQEHISPQITNEVIGPELVHVSEKNLSEIENVHGFVSHSHISPIKANPPPVLVNTDSLETPTYVNGTDADYEYEEITLERGNSGLGFSIAGGTDNPHIGDDSSIFITKIITGGAAAQDGRLRVNDCILRVNEVDVRDVTHSKAVEALKEAGSIVRLYVKRRKPVSEKIMEIKLIKGPKGLGFSIAGGVGNQHIPGDNSIYVTKIIEGGAAHKDGKLQIGDKLLAVNNVCLEEVTHEEAVTALKNTSDFVYLKVAKPTSMYMNDGYAPPDITNSSSQPVDNHVSPSSFLGQTPASPARYSPVSKAVLGDDEITREPRKVVLHRGSTGLGFNIVGGEDGEGIFISFILAGGPADLSGELRKGDRIISVNSVDLRAASHEQAAAALKNAGQAVTIVAQYRPEEYSRFEAKIHDLREQMMNSSISSGSGSLRTSQKRSLYVRALFDYDKTKDSGLPSQGLNFKFGDILHVINASDDEWWQARQVTPDGESDEVGVIPSKRRVEKKERARLKTVKFNSKTRDKGSFNDKRKKNLFSRKFPFYKNKDQSEQETSDADRDP

SEQ ID NO: 25899 - protein, 1527 aa, Homo sapiens
MGISTVILEMCLLWGQVLSTGGWIPRTTDYASLIPSEVPLDPTVAEGSPFPSESTLESTVAEGSPISLESTLESTVAEGSLIPSESTLESTVAEGSDSGLALRLVNGDGRCQGRVEILYRGSWGTVCDDSWDTNDANVVCRQLGCGWAMSAPGNAWFGQGSGPIALDDVRCSGHESYLWSCPHNGWLSHNCGHGEDAGVICSAAQPQSTLRPESWPVRISPPVPTEGSESSLALRLVNGGDRCRGRVEVLYRGSWGTVCDDYWDTNDANVVCRQLGCGWAMSAPGNAQFGQGSGPIVLDDVRCSGHESYLWSCPHNGWLTHNCGHSEDAGVICSAPQSRPTPSPDTWPTSHASTAGPESSLALRLVNGGDRCQGRVEVLYRGSWGTVCDDSWDTSDANVVCRQLGCGWATSAPGNARFGQGSGPIVLDDVRCSGYESYLWSCPHNGWLSHNCQHSEDAGVICSAAHSWSTPSPDTLPTITLPASTVGSESSLALRLVNGGDRCQGRVEVLYRGSWGTVCDDYWDTNDANVVCRQLGCGWATSAPGNARFGQGSGPIVLDDVRCSGHESYLWSCPHNGWLSHNCGHHEDAGVICSASQSQPTPSPDTWPTSRASTAGSESTLALRLVNGGDRCRGRVEVLYQGSWGTVCDDYWDTNDANVVCRQLGCGWAMSAPGNAQFGQGSGPIVLDDVRCSGHESYLWSCPHNGWLSHNCGHHEDAGVICSAAQSQSTPRPDTWLTTNLPALTVGSESSLALRLVNGGDRCRGRVEVLYRGSWGTVCDDSWDTNDANVVCRQLGCGWAMSAPGNARFGQGSGPIVLDDVRCSGNESYLWSCPHKGWLTHNCGHHEDAGVICSATQINSTTTDWWHPTTTTTARPSSNCGGFLFYASGTFSSPSYPAYYPNNAKCVWEIEVNSGYRINLGFSNLKLEAHHNCSFDYVEIFDGSLNSSLLLGKICNDTRQIFTSSYNRMTIHFRSDISFQNTGFLAWYNSFPSDATLRLVNLNSSYGLCAGRVEIYHGGTWGTVCDDSWTIQEAEVVCRQLGCGRAVSALGNAYFGSGSGPITLDDVECSGTESTLWQCRNRGWFSHNCNHREDAGVICSGNHLSTPAPFLNITRPNTDYSCGGFLSQPSGDFSSPFYPGNYPNNAKCVWDIEVQNNYRVTVIFRDVQLEGGCNYDYIEVFDGPYRSSPLIARVCDGARGSFTSSSNFMSIRFISDHSITRRGFRAEYYSSPSNDSTNLLCLPNHMQASVSRSYLQSLGFSASDLVISTWNGYYECRPQITPNLVIFTIPYSGCGTFKQADNDTIDYSNFLTAAVSGGIIKRRTDLRIHVSCRMLQNTWVDTMYIANDTIHVANNTIQVEEVQYGNFDVNISFYTSSSFLYPVTSRPYYVDLNQDLYVQAEILHSDAVLTLFVDTCVASPYSNDFTSLTYDLIRSGCVRDDTYGPYSSPSLRIARFRFRAFHFLNRFPSVYLRCKMVVCRAYDPSSRCYRGCVLRSKRDVGSYQEKVDVVLGPIQLQTPPRREEEPR

SEQ ID NO: 25900 - protein, 451 aa, Homo sapiens
MEISGPPFEIGSAPAGVDDTPVNMDSPPIALDGPPIKVSGAPDKRERAERPPVEEEAAEMEGAADAAEGGKVPSPGYGSPAAGAASADTAARAAPAAPADPDSGATPEDPDSGTAPADPDSGAFAADPDSGAAPAAPADPDSGAAPDAPADPDSGAAPDAPADPDAGAAPEAPAAPAAAETRAAHVAPAAPDAGAPTAPAASATRAAQVRRAASAAPASGARRKIHLRPPSPEIQAADPPTPRPTRASAWRGKSESSRGRRVYYDEGVASSDDDSSGDESDDGTSGCLRWFQHRRNRRRRKPQRNLLRNFLVQAFGGCFGRSESPQPKASRSLKVKKVPLAEKRRQMRKEALEKRAQKRAEKKRSKLIDKQLQDEKMGYMCTHRLLLLGRKVVPSDTEGRFRLDRPAPATVSWTGRGFSVSSLLIRSPNPPAFTVEKPDTQVLENLVKAPL

SEQ ID NO: 25901 - protein, 340 aa, Homo sapiens
MTQVNATSYKTIKLWKISERDKRPEGYNLKEEDGRYRDPTTVTTLRVPVFRPMDLMVEASPRRIFANAHTYHINSISINSDYETYLSADDLRINLWHLEITDRSFNIVDIKPANMEELTEVITAAEFHPNSCNTFVYSSSKGTIRLCDMRASALCDRHSKLFEEPEDPSNRSFFSEIISSISDVKFSHSGRYMMTRDYLSVKIWDLNMENRPVETYQVHEYLRSKLCSLYENDCIFDKFECCWNGSDSVVMTGSYNNFFRMFDRNTKRDITLEASRENNKPRTVLKPRKVCASGKRKKDEISVDSLDFNKKILHTAWHPKENIIAVATTNNLYIFQDKVN

SEQ ID NO: 25902 - protein, 261 aa, Homo sapiens
EEIQRLTDELQVKEKEQCKLDSALKKAQLEIDKLKENLVKLKENDAADLQKAKEQNQRLDEEILALRNRVRSLDSEKKVLGEMVERLKGEVCESQENKQLGNHSPGKTHPSSGEKLKYNQQGEVQQLHQNLHRLQILCNSAENELRYERGQNLDLKQHNSLLQEENIKIKIELKHAQQKLLDSTKMCSSLTAEYKHCQQKIKELELEVLKHTQSIKSQNNLQEKLVQEKSKVADAEEKILDLQRKLEHAHKVCLTDTCISE

SEQ ID NO: 25903 - protein, 508 aa, Homo sapiens
MYSPLCLTQDEFHPFIEALLPHVRAFAYTWFNLQARKRKYFKKHEKRMSKEEERAVKDELLSEKPEVKQKWASRLLAKLRKDIRPEYREDFVLTVTGKKPPCCVLSNPDQKGKMRRIDCLRQADKVWRLDLVMVILFKGIPLESTDGERLVKSPQCSNPGLCVQPHHIGVSVKELDLYLAYFVHAADSSQSESPSQPSDADIKDQPENGHLGFQDSFVTSGVFSVTELVRVSQTPIAAGTGPNFSLSDLESSSYYSMSPGAMRRSLPSTSSTSSTKRLKSVEDEMDSPGEEPFYTGQGRSPGSGSQSSGWHEVEPGMPSPTTLKKSEKSGFSSPSPSQTSSLGTAFTQHHRPVITGPRASPHATPSTLHFPTSPIIQQPGPYFSHPAIRYHPQETLKEFVQLVCPDAGQQAGQVGFLNPNGSSQGKVHNPFLPTPMLPPPPPPPMARPVPLPVPDTKPPTTSTEGGAASPTSPTYSTPSTSPANRFVSVGPRDPSFVNIPQQTQGCSC

SEQ ID NO: 25904 - protein, 1805 aa, Homo sapiens
MPLKLLTNHYERCWKYYCLPGGWGNFGAASEEELHLSRKLFWGIFDALSQKKYEQELFKLALPCLSAVAGALPPDYMESNYVSMMEKQSSMDSEGNFNPQPVDTSNITIPEKLEYFINKYAEHSHDKWSMDKLANGWIYGEIYSDSSKVQPLMKPYKLLSEKEKEIYRWPIKESLKTMLAWGWRIERTREGDSMALYNRTRRISQTSQVSVDAAHGYSPRAIDMSNVTLSRDLHAMAEMMAENYHNIWAKKKKMELESKGGGNHPLLVPYDTLTAKEKAKDREKAQDILKFLQINGYAVSRGFKDLELDTPSIEKRFAYSFLQQLIRYVDEAHQYILEFDGGSRGKGEHFPYEQEIKFFAKVVLPLIDQYFKNHRLYFLSAASRPLCSGGHASNKEKEMVTSLFCKLGVLVRHRISLFGNDATSIVNCLHILGQTLDARTVMKTGLESVKSALRAFLDNAAEDLEKTMENLKQGQFTHTRNQPKGVTQIINYTTVALLPMLSSLFEHIGQHQFGEDLILEDVQVSCYRILTSLYALGTSKSIYVERQRSALGECLAAFAGAFPVAFLETHLDKHNIYSIYNTKSSRERAALSLPTNVEDVCPNIPSLEKLMEEIVELAESGIRYTQMPHVMEVILPMLCSYMSRWWEHGPENNPERAEMCCTALNSEHMNTLLGNILKIIYNNLGIDEGAWMKRLAVFSQPIINKVKPQLLKTHFLPLMEKLKKKAATVVSEEDHLKAEARGDMSEAELLILDEFTTLARDLYAFYPLLIRFVDYNRAKWLKEPNPEAEELFRMVAEVFIYWSKSHNFKREEQNFVVQNEINNMSFLITDTKSKMSKAAVSDQERKKMKRKGDRYSMQTSLIVAALKRLLPIGLNICAPGDQELIALAKNRFSLKDTEDEVRDIIRSNIHLQGKLEDPAIRWQMALYKDLPNRTDDTSDPEKTVERVLDIANVLFHLEQVEHPQRSKKAVWHKLLSKQRKRAVVACFRMAPLYNLPRHRAVNLFLQGYEKSWIETEEHYFEDKLIEDLAKPGAEPPEEDEGTKRVDPLHQLILLFSRTALTEKCKLEEDFLYMAYADIMAKSCHDEEDDDGEEEVKSFEVTGSQRSKEKEMEKQKLLYQQARLHDRGAAEMVLQTISASKGETGPMVAATLKLGIAILNGGNSTVQQKMLDYLKEKKDVGFFQSLAGLMQSCSVLDLNAFERQNKAEGLGMVTEEGSGEKVLQDDEFTCDLFRFLQLLCEGHNSDFQNYLRTQTGNNTTVNIIISTVDYLLRVQESISDFYWYYSGKDVIDEQGQRNFSKAIQVAKQVFNTLTEYIQGPCTGNQQSLAHSRLWDAVVGFLHVFAHMQMKLSQDSSQIELLKELMDLQKDMVVMLLSMLEGNVVNGTIGKQMVDMLVESSNNVEMILKFFDMFLKLKDLTSSDTFKEYDPDGKGVISKRDFHKAMESHKHYTQSETEFLLSCAETDENETLDYEEFVKRFHEPAKDIGFNVAVLLTNLSEHMPNDTRLQTFLELAESVLNYFQPFLGRIEIMGSAKRIERVYFEISESSRTQWEKPQVKESKRQFIFDVVNEGGEKEKMELFVNFCEDTIFEMQLAAQISESDLNERSANKEESEKERPEEQGPRMAFFSILTVRSALFALRYNILTLMRMLSLKSLKKQMKKVKKMTVKDMVTAFFSSYWSIFMTLLHFVASVFRGFFRIICSLLLGGSLVEGAKKIKVAELLANMPDPTQDEVRGDGEEGERKPLEAALPSEDLTDLKELTEESDLLSDIFGLDLKREGGQYKLIPHNPNAGLSDLMSNPVPMP

SEQ ID NO: 25905 - protein, 1088 aa, Homo sapiens
TSVKRRLSCLRSRVTRQKEKGKSPAHLKDKGQDARERRECVNGHQLLQGTFSGPSSCPLCGKPFLSSASLKEHPRGTLLSDGSPALSRNVGMTVSQKGGPQPTPSPAGPGTQLGPITGEMDEADSAFLKFKQTADDSLSLTSPNTESIFVEDPYTASLRSEIESDGHEFEAESWSLAVDAAYAKKQKREVVKRQDVLYELMQTEVHHVRTLKIMLKVYSRALQEELQFSSKAIGRLFPCADDLLETHSHFLARLKERRQESLEEGSDRNYVIQKIGDLLVQQFSGENGERMKEKYGVFCSGHNEAVSHYKLLLQQNKKFQNLIKKIGNFSIVRRLGVQECILLVTQRITKYPVLVERIIQNTEAGTEDYEDLTQALNLIKDIISQVDAKVSECEKGQRLREIAGKMDLKSSSKLKNGLTFRKEDMLQRQLHLEGMLCWKTTSGRLKDILAILLTDVLLLLQEKDQKYVFASVDSKPPVISLQKLIVREVANEEKAMFLISASLQGPEMYEIYTSSKEDRNAWMAHIQRAVESCPDEEEGPFSLPEEERKVVEARATRLRDFQERLSMKDQLIAQSLLEKQQIYLEMAEMGGLEDLPQPRGLFRGGDPSETLQGELILKSAMSEIEGIQSLICRQLGSANGQAEDGGSSTGPPRRAETFAGYDCTNSPTKNGSFKKKVSSTDPRPRDWRGPPNSPDLKLSDSDIPGSSEESPQVVEAPGTESDPRLPTVLESELVQRIQTLSQLLLNLQAVIAHQDSYVETQRAAIQEREKQFRLQSTRGNLLLEQERQRNFEKQREERAALEKLQSQLRHEQQRWERERQWQHQELERAGARLQEREGEARQLRERLEQERAELERQRQAYQHDLERLREAQRAVERERERLELLRRLKKQNTAPGALPPDTLAEAQPPSHPPSFNGEGLEGPRVSMLPSGVGPEYAERPEVARRDSAPTENRLAKSDVPIQLLSATNQFQRQAAVQQQIPTKLAASTKGGKDKGGKSRGSQRWESSASFDLKQQLLLNKLMGKDESTSRNRRSLSPILPGRHSPAPPPDPGFPAPSPPPADSPSEGFSLKAGGTALLPGPPAPSPLP

SEQ ID NO: 25906 - protein, 235 aa, Homo sapiens
ASSVYEIHCDRTRHTLTIREVPASLHGAQLKFVANGIESSIRMEVRAAPGLTANKPPAAAAREVLARLHEEAQLLAELSDQAAAVTWLKDGRTLSPGPKYEVQASAGRRVLLVRDVARDDAGLYECVSRGGRIAYQLSVQGLARFLHKDMAGSCVDAVAGGPAQFECETSEAHVHVHWYKDGMELGHSGERFLQEDVGTRHRLVAATVTRQDEGTYSCRVGEDSVDFRLRVSANG

SEQ ID NO: 25907 - protein, 512 aa, Homo sapiens
KAQVAGGQVQSPEADGLLTLERPGSGTPAQAGDDAAEATPGHPCPVLELPPAWPMGCGVDDVPAFCFVCFHREEEEELLEEVPLRREKMSVGCPEPEPPRSLTCCGPGTAPGPGAGVPLLTEDMQALTLRTLAASDVTKHYELVRELGKGTYGKVDLVVYKGTGTKMALKFVNKSKTKLKNFLREVSITNSLSSSPFIIKVFDVVFETEDCYVFAQEYAPAGDLFDIIPPQVGLPEDTVKRCVQQLGLALDFMHGRQLVHRDIKPENVLLFDRECRRVKLADFGMTRRVGCRVKRVSGTIPYTAPEVCQAGRADGLAVDTGVDVWAFGVLIFCVLTGNFPWEAASGADAFFEEFVRWQRGRLPGLPSQWRRFTEPALRMFQRLLALEPERRGPAKEVFRFLKHELTSELRRRPSHRARKPPGDRPPAAGPLRLEAPGPLKRTVLTESGSGSRPAPPAVGSVPLPVPVPVPVPVPVPVPEPGLAPQGPPGRTDGRADKSKGQVVLATAIEICV

SEQ ID NO: 25908 - protein, 939 aa, Homo sapiens [sequence omitted]

SEQ ID NO: 25909 - protein, 1027 aa, Homo sapiens
MANLLKTVVTGCSCPLLSNLGSCKGLRVKKDFLRTFYTHQELWCKAPVKPGIPYKQLTVGVPKEIFQNEKRVALSPAGVQNLVKQGFNVVVESGAGEASKFSDDHYRVAGAQIQGAKEVLASDLVVKVRAPMVNPTLGVHEADLLKTSGTLISFIYPAQNPELLNKLSQRKTTVLAMDQVPRVTIAQGYDALSSMANIAGAAALEQFKSLGAEPLEVDLKESGEGQGGYAKEMSKEFIEAEMKLFAQQCKEVDILISTALIPGKKAPVLFNKEMIESMKEGSVVVDLAAEAGGNFETTKPGELYIHKGITHIGYTDLPSRMATQASTLYSNNITKLLKAISPDKDNFYFDVKDDFDFGTMGHVIRGTVVMKDGKVIFPAPTPKNIPQGAPVKQKTVAELEAEKAATITPFRKTMSTASAYTAGLTGILGLGIAAPNLAFSQMVTTFGLAGIVGYHTVWGVTPALHSPLMSVTNAISGLTAVGGLALMGGHLYPSTTSQGLAALAAFISSVNIAGGFLVTQRMLDMFKRPTDPPEYNYLYLLPAGTFVGGYLAALYSGYNIEQIMYLGSGLCCVGALAGLSTQGTARLGNALGMIGVAGGLAATLGVLKPGPELLAQMSGAMALGGTIGLTIAKRIQISDLPQLVAAFHSLVGLAAVLTCIAEYIIEYPHFATDAAANLTKIVAYLGTYIGGVTFSGSLIAYGKLQGLLKSAPLLLPGRHLLNAGLLAASVGGIIPFMVDPSFTTGITCLGSVSALSAVMGVTLTAAIGGADMPVVITVLNSYSGWALCAEGFLLNNNLLTIVGALIGSSGAILSYIMCVAMNRSLANVILGGYGTTSTAGGKPMEISGTHTEINLDNAIDMIREANSIIITPGYGLCAAKAQYPIADLVKMLTEQGKKVRFGIHPVAGRMPGQLNVLLAEAGVPYDIVLEMDEINHDFPDTDLVLVIGANDTVNSAAQEDPNSIIAGMPVLEVWKSKQVIVMKRSLGVGYAAVDNPIFYKPNTAMLLGDAKKTCDALQAKVRESYQK

SEQ ID NO: 25910 - protein, 1025 aa, Homo sapiens
MSAAPAYSEDKGGSAGPGEPEYGHDPASGGIFSSDYKRHDDLKEMLDTNKDSLKLEAMKRIVADPNQLIRASALRVLSSIRVPIIVPIMMLAIKEAASDMSPYVRKTAAHAIPKLYSLDSDQKDQLIEVIEKLLADKTTLVAGSVVMAFEEVCPERIDLIHKNYRKLCNLLIDVEEWGQVVIISMLTRYARTQFLSPTQNESLLEENAEKAFYGSEEDEAKGAGSEETAAAAAPSRKPYVMDPDHRLLLRNTKPLLQSRSAAVVMAVAQLYFHLAPKAEVGVIAKALVRLLRSHSEVQYVVLQNVATMSIKRRGMFEPYLKSFYIRSTDPTQIKILKLEVLTNLANETNIPTVLREFQTYIRSMDKDFVAATIQAIGRCATNIGRVRDTCLNGLVQLLSNRDELVVAESVVVIKKLLQMQPAQHGEIIKHLAKLTDNIQVPMARASILWLIGEYCEHVPRIAPDVLRKMAKSFTAEEDIVKLQVINLAAKLYLTNSKQTKLLTQYVLSLAKYDQNYDIRDRARFTRQLIVPSEQGGALSRHAKKLFLAPKPAPVLESSFKDRDHFQLGSLSHLLNAKATGYQELPDWPEEAPDPSVRNVEVPEWTKCSNREKRKEKEKPFYSDSEGESGPTESADSDPESESESDSKSSSESGSGESSSESDNEDQDEDEEKGRGSESEQSEEDGKRKTKKKVPERKGEASSSDEGSDSSSSSSESEMTSESEEEQLEPASWSRKTPPSSKSAPATKEISLLDLEDFTPPSVQPVSPPAIVSTSLAADLEGLTLTDSTLVPSLLSPVSGVGRQELLHRVAGEGLAVDYTFSRQPFSGDPHMVSVHIHFSNSSDTPIKGLHVGTPKLPAGISIQEFPEIESLAPGESATAVMGINFCDSTQAANFQLCTQTRQFYVSIQPPVGELMAPVFMSENEFKKEQGKLMGMNEITEKLMLPDTCRSDHIVVQKVTATANLGRVPCGTSDEYRFAGRTLTGGSLVLLTLDARPAGAAQLTVNSEKMVIGTMLVKDVIQALTQ

SEQ ID NO: 25911 - protein, 720 aa, Homo sapiens
MSSTRSQNPHGLKQIGLDQIWDDLRAGIQQVYTRQSMAKSRYMELYTHVYNYCTSVHQSNQARGAGVPPSKSKKGQTPGGAQFVGLELYKRLKEFLKNYLTNLLKDGEDLMDESVLKFYTQQWEDYRFSSKVLNGICAYLNRHWVRRECDEGRKGIYEIYSLALVTWRDCLFRPLNKQVTNAVLKLIEKERNGETINTRLISGVVQSYEARLLEEQRRVQVYLHESTQDELARKCEQVLIEKHLEIFHTEFQNLLDADKNEDLGRMYNLVSRIQDGLGELKKLLETHIHNQGLAAIEKCGEAALNDPKMYVQTVLDVHKKYNALVMSAFNNDAGFVAALDKACGRFINNNAVTKMAQSSSKSPELLARYCDSLLKKSSKNPEEAELEDTLNQVMVVFKYIEDKDVFQKFYAKMLAKRLVHQNSASDDAEASMISKLKQACGFEYTSKLQRMFQDIGVSKDLNEQFKKHLTNSEPLDLDFSIQVLSSGSWPFQQSCTFALPSELERSYQRFTAFYASRHSGRKLTWLYQLSKGELVTNCFKNRYTLQASTFQMAILLQYNTEDAYTVQQLTDSTQIKMDILAQVLQILLKSKLLVLEDENANVDEVELKPDTLIKLYLGYKNKKLRVNINVPMKTEQKQEQETTHKNIEEDRKLLIQAAIVRIMKMRKVLKHQQLLGEVLTQLSSRFKPRVPVIKKCIDILIEKEYLERVDGEKDTYSYLA

SEQ ID NO: 25912 - protein, 1406 aa, Homo sapiens
MKRLLAAAGKGVRGPEPPNPFSERVYTEKDYGTIYFGDLGKIHTAASRGQVQKLEKMTVGKKPVNLNKRDMKKRTALHWACVNGHAEVVTFLVDRKCQLNVLDGEGRTPLMKALQCEREACANILIDAGADLNYVDVYGNTALHYAVYSENLLMVATLLSYGAVIEVQNKASLTPLLLAIQKRSKQTVEFLLTKNANANAFNESKCTALMLAICEGSSEIVGMLLQQNVDVFAEDIHGITAERYAAACGVNYIHQQLLEHIRKLPKNPQNTNPEGTSTGTPDEAAPLAERTPDTAESLLEKTPDEAARLVEGTSAKIQCLGKATSGKFEQSTEETPRKILRPTKETSEKFSWPAKERSRKITWEEKETSVKTECVAGVTPNKTEVLEKGTSNMIACPTKETSTKASTNVDVSSVEPIFSLFGTRTIENSQCTKVEEDFNLATKIISKSAAQNYTCLPDATYQKDIKTINHKIEDQMFPSESKREEDEEYSWDSGSLFESSAKTQVCIPESMYQKVMEINREVEELPEKPSAFKPAVEMQKTVPNKAFELKNEQTLRAAQMFPSESKQKDDEENSWDSESPCETVSQKDVYLPKATHQKEFDTLSGKLEESPVKDGLLKPTCGRKVSLPNKALELKDRETFKAESPDKDGLLKPTCGRKVSLPNKALELKDRETLKAESPDNDGLLKPTCGRKVSLPNKALELKDRETFKAAQMFPSESKQKDDEENSWDFESFLETLLQNDVCLPKATHQKEFDTLSGKLEESPDKDGLLKPTCGMKISLPNKALELKDRETFKAEDVSSVESTFSLFGKPTTENSQSTKVEEDFNLTTKEGATKTVTGQQERDIGIIERAPQDQTNKMPTSELGRKEDTKSTSDSEIISVSDTQNYECLPEATYQKEIKTTNGKIEESPEKPSHFEPATEMQNSVPNKGLEWKNKQTLRADSTTLSKILDALPSCERGRELKKDNCEQITAKMEQTKNKFCVLQKELSEAKEIKSQLENQKAKWEQELCSVRLTLNQEEEKRRNVDILKEKIRPEEQLRKKLEVKQQLEQTLRIQDIELKSVTSNLNQVSHTHESENDLFHENCMLKKEIAMLKLEVATLKHQHQVKENKYFEDIKILQEKNAELQMTLKLKQKTVTKRASQYREQLKVLTAENTMLTSKLKEKQDKEILETEIESHHPRLASALQDHDQSVTSRKNQELAFHSAGDAPLQGIMNVDVSNTIYNNEVLHQPLYEAQRKSKSPKINLNYAGDDLRENALVSEHAQRDRCETQCQMKKAEHMYQNEQDNVDKHTEQQESLEQKLFQLESKNRWLRQQLVYAHKKVNKSKVTINIQFPEMKMQRHLNEKNEEVFNYGNHLKERIDQYEKEKAEREVIVRQLQKKLADLNKQCEASLKVTSHSHSLRHQ

SEQ ID NO: 25913 - protein, 212 aa, Homo sapiens
MLAGRPGTRSAVGELGTESSDNLDRAPLGPRESGGHHRPGSYLDMKIHLEKNLEEERQILLQQQKICRNRARKYFVESNRRKKAFEEKRKEQEEKEHQIREQILQQRKQKFEEVTEKFQRAHVPLSQRRKAVSRKPVPPLEEALKQIQESNLKSEVNLPFSRRPTINWSSTGCFPNPFGTSPCFEAFLFIQSPPLSTSPHSFLCHSVACTSC

SEQ ID NO: 25914 - protein, 779 aa, Homo sapiens
MSDSGSQLGSMGSLTMKSQLQITVISAKLKENKKNWFGPSPYVEVTVDGQSKKTEKCNNTNSPKWKQPLTVIVTPVSKLHFRVWSHQTLKSDVLLGTAALDIYETLKSNNMKLEEVVVTLQLGGDKEPTETIGDLSICLDGLQLESEVVTNGETTCSESASQNDDGSRSKDETRVSTNGSDDPEDAGAGENRRVSGNNSPSLSNGGFKPSRPPRPSRPPPPTPRRPASVNGSPSATSESDGSSTGSLPPTNTNTNTSEGATSGLIIPLTISGGSGPRPLNPVTQAPLPPGWEQRVDQHGRVYYVDHVEKRTTWDRPEPLPPGWERRVDNMGRIYYVDHFTRTTTWQRPTLESVRNYEQWQLQRSQLQGAMQQFNQRFIYGNQDLFATSQSKEFDPLGPLPPGWEKRTDSNGRVYFVNHNTRITQWEDPRSQGQLNEKPLPEGWEMRFTVDGIPYFVDHNRRTTTYIDPRTGKSALDNGPQIAYVRDFKAKVQYFRFWCQQLAMPQHIKITVTRKTLFEDSFQQALFHGKFIDTGFSLPFYKRILNKPVGLKDLESIDPEFYNSLIWVKENNIEECDLEMYFSVDKEILGEIKSHDLKPNGGNILVTEENKEEYIRMVAEWRLSRGVEEQTQAFFEGFNEILPQQYLQYFDAKELEVLLCGMQEIDLNDWQRHAIYRHYARTSKQIMWFWQFVKEIDNEKRMRLLQFVTGTCRLPVGGFADLMGSNGPQKFCIEKVGKENWLPRSHTCFNRLDLPPYKSYEQLKEKLLFAIEETEGFGQE

SEQ ID NO: 25915 - protein, 532 aa, Homo sapiens
MAAPPAPAAKGSPQPEPHAPEPGPGSAKRGREDSRAGRLSFCTKVCYGIGGVPNQIASSATAFYLQLFLLDIAQIPAAQVSLVLFGGKVSGAAADPVAGFFINRSQRTGSGRLMPWVLGCTPFIALAYFFLWFLPPFTSLRGLWYTTFYCLFQALATFFQVPYTALTMLLTPCPRERDSATAYRMTVEMAGTLMGATVHGLIVSGAHRPHRCEATATPGPVTVSPNAVEQSYLALFCTHASQLHDHVQDLVLAVLAHLYCIAAAVVVVTYPVCISLLCLGVKERPDPSAPASGPGLSFLAGLSLTTRHPPYLKLVISFLFISAAVQVEQSYLVLFCTHASQLHDHVQGLVLTVLVSAVLSTPLWEWVLQRFGKKTSAFGIFAMVPFAILLAAVPTAPVAYVVAFVSGVSIAVSLLLPWSMLPDVVDDFQLQHRHGPGLETIFYSSYVFFTKLSGACALGISTLSLEFSGYKAGVCKQAEEVVVTLKVLIGAVPTCMILAGLCILMVGSTPKTPSRDASSRLSLRRRTSYSLA

SEQ ID NO: 25916 - protein, 1939 aa, Homo sapiens
MAARLLAPPGPDSFKPFTPESLANIERRIAESKLKKPPKADGSHREDDEDSKPKPNSDLEAGKSLPFIYGDIPQGLVAVPLEDFDPYYLTQKTFVVLNRGKTLFRFSATPALYILSPFNLIRRIAIKILIHSVFSMIIMCTILTNCVFMTFSNPPDWSKNVEYTFTGIYTFESLVKIIARGFCIDGFTFLRDPWNWLDFSVIMMAYVTEFVDLGNVSALRTFRVLRALKTISVIPGLKTIVGALIQSVKKLSDVMILTVFCLSVFALIGLQLFMGNLRNKCVVWPINFNESYLENGTKGFDWEEYINNKTNFYTVPGMLEPLLCGNSSDAGQCPEGYQCMKAGRNPNYGYTSFDTFSWAFLALFRLMTQDYWENLYQLTLRAAGKTYMIFFVLVIFVGSFYLVNLILAVVAMAYEEQNQATLEEAEQKEAEFKAMLEQLKKQQEEAQAAAMATSAGTVSEDAIEEEGEEGGGSPRSSSEISKLSSKSAKERRNRRKKRKQKELSEGEEKGDPEKVFKSESEDGMRRKAFRLPDNRIGRKFSIMNQSLLSIPGSPFLSRHNSKSSIFSFRGPGRFRDPGSENEFADDEHSTVEESEGRRDSLFIPIRARERRSSYSGYSGYSQGSRSSRIFPSLRRSVKRNSTVDCNGVVSLIGGPGSHIGGRLLPEATTEVEIKKKGPGSLLVSMDQLASYGRKDRINSIMSVVTNTLVEELEESQRKCPPCWYKFANTFLIWECHPYWIKLKEIVNLIVMDPFVDLAITICIVLNTLFMAMEHHPMTPQFEHVLAVGNLVFTGIFTAEMFLKLIAMDPYYYFQEGWNIFDGFIVSLSLMELSLADVEGLSVLRSFRLLRVFKLAKSWPTLNMLIKIIGNSVGALGNLTLVLAIIVFIFAVVGMQLFGKSYKECVCKINQDCELPRWHMHDFFHSFLIVFRVLCGEWIETMWDCMEVAGQAMCLIVFMMVMVIGNLVVLNLFLALLLSSFSADNLAATDDDGEMNNLQISVIRIKKGVAWTKLKVHAFMQAHFKQREADEVKPLDELYEKKANCIANHTGADIHRNGDFQKNGNGTTSGIGSSVEKYIIDEDHMSFINNPNLTVRVPIAVGESDFENLNTEDVSSESDPEGSKDKLDDTSSSEGSTIDIKPEVEEVPVEQPEEYLDPDACFTEGCVQRFKCCQVNIEEGLGKSWWILRKTCFLIVEHNWFETFIIFMILLSSGALAFEDIYIEQRKTIRTILEYADKVFTYIFILEMLLKWTAYGFVKFFTNAWCWLDFLIVAVVVNALVGAIPSIMNVLLVCLIFWLIFSIMGVNLFAGKYHYCFNETSEIRFEIEDVNNKTECEKLMEGNNTEIRWKNVKINFDNVGAGYLALLQVATFKGWMDIMYAAVDSRKPDEQPKYEDNIYMYIYFVIFIIFGSFFTLNLFIGVIIDNFNQQKKKFGGQDIFMTEEQKKYYNAMKKLGSKKPQKPIPRPLNKIQGIVFDFVTQQAFDIVIMMLICLNMVTMMVETDTQSKQMENILYWINLVFVIFFTCECVLKMFALRHYYFTIGWNIFDFVVVILSIVGMFLADIIEKYFVSPTLFRVIRLARIGRILRLIKGAKGIRTLLFALMMSLPALFNIGLLLFLVMFIFSIFGMSNFAYVKHEAGIDDMFNFETFGNSMICLFQITTSAGWDGLLLPILNRPPDCSLDKEHPGSGFKGDCGNPSVGIFFFVSYIIISFLIVVNMYIAIILENFSVATEESADPLSEDDFETFYEIWEKFDPDATQFIEYCKLADFADALEHPLRVPKPNTIELIAMDLPMVSGDRIHCLDILFAFTKRVLGDSGELDILRQQMEERFVASNPSKVSYEPITTTLRRKQEEVSAVVLQRAYRGHLARRGFICKKTTSNKLENGGTHREKKESTPSTASLPSYDSVTKPEKEKQQRAEEGRRERAKRQKEVRESKC

SEQ ID NO: 25917 - protein, 821 aa, Homo sapiens
MNYIFGNNTLLYSRGSRGGNTSSSHGSAGPKQKHWAKKGSSDELQAEPEPSRWQQIVAFFTRRHSFIDCISVATSSTQPTEAVLPSPPTVPVIPVLPVPAENTVILPTIPQANPPPVLVNTDSLETPTYVNGTDADYEYEEITLERGNSGLGFSIAGGTDNPHIGDDSSIFITKIITGGAAAQDGRLRVNDCILRVNEVDVRDVTHSKAVEALKEAGSIVRLYVKRRKPVSEKIMEIKLIKGPKGLGFSIAGGVGNQHIPGDNSIYVTKIIEGGAAHKDGKLQIGDKLLAVNNVCLEEVTHEEAVTALKNTSDFVYLKVAKPTSMYMNDGYAPPDITNSSSQPVDNHVSPSSFLGQTPASPARYSPVSKAVLGDDEITREPRKVVLHRGSTGLGFNIVGGEDGEGIFISFILAGGPADLSGELRKGDRIISVNSVDLRAASHEQAAAALKNAGQAVTIVAQYRPEEYSRFEAKIHDLREQMMNSSISSGSGSLRTSQKRSLYVRALFDYDKTKDSGLPSQGLNFKFGDILHVINASDDEWWQARQVTPDGESDEVGVIPSKRRVEKKERARLKTVKFNSKTRDKGEIPDDMGSKGLKHVTSNASDSESSYRGQEEYVLSYEPVNQQEVNYTRPVIILGPMKDRINDDLISEFPDKFGSCVPHTTRPKRDYEVDGRDYHFVTSREQMEKDIQEHKFIEAGQYNNHLYGTSVQSVREVAEKGKHCILDVSGNAIKRLQIAQLYPISIFIKPKSMENIMEMNKRLTEEQARKTFERAMKLEQEFTEHFTAIVQGDTLEDIYNQVKQIIEEQSGSYIWVPAKEKL

SEQ ID NO: 25918 - protein, 253 aa, Homo sapiens
MSPGAMRRSLPSTSSTSSTKRLKSVEDEMDSPGEEPFYTGQGRSPGSGSQSSGWHEVEPGMPSPTTLKKSEKSGFSSPSPSQTSSLGTAFTQHHRPVITGPRASPHATPSTLHFPTSPIIQQPGPYFSHPAIRYHPQETLKEFVQLVCPDAGQQAGQVGFLNPNGSSQGKVHNPFLPTPMLPPPPPPPMARPVPLPVPDTKPPTTSTEGGAASPTSPTYSTPSTSPANRFVSVGPRDPSFVNIPQQTQSWYLG

SEQ ID NO: 25919 - protein, 878 aa, Homo sapiens
MEDGKPVWAPHPTDGFQMGNIVDIGPDSLTIEPLNQKGKTFLALINQVFPAEEDSKKDVEDNCSLMYLNEATLLHNIKVRYSKDRIYTYVANILIAVNPYFDIPKIYSSEAIKSYQGKSLGTRPPHVFAIADKAFRDMKVLKMSQSIIVSGESGAGKTENTKFVLRYLTESYGTGQDIDDRIVEANPLLEAFGNAKTVRNNNSSRFGKFVEIHFNEKSSVVGGFVSHYLLEKSRICVQGKEERNYHIFYRLCAGASEDIREKLHLSSPDNFRYLNRGCTRYFANKETDKQILQNRKSPEYLKAGSMKDPLLDDHGDFIRMCTAMKKIGLDDEEKLDLFRVVAGVLHLGNIDFEEAGSTSGGCNLKNKSAQSLEYCAELLGLDQDDLRVSLTTRVMLTTAGGTKGTVIKVPLKVEQANNARDALAKTVYSHLFDHVVNRVNQCFPFETSSYFIGVLDIAGFEYFEHNSFEQFCINYCNEKLQQFFNERILKEEQELYQKEGLGVNEVHYVDNQDCIDLIEAKLVGILDILDEENRLPQPSDQHFTSAVHQKHKDHFRLTIPRKSKLAVHRNIRDDEGFIIRHFAGAVCYETTQFVEKNNDALHMSLESLICESRDKFIRELFESSTNNNKDTKQKAGKLSFISVGNKFKTQLNLLLDKLRSTGASFIRCIKPNLKMTSHHFEGAQILSQLQCSGMVSVLDLMQGGYPSRASFHELYNMYKKYMPDKLARLDPRLFCKALFKALGLNENDYKFGLTKVFFRPGKFAEFDQIMKSDPDHLAELVKRVNHWLTCSRWKKVQWCSLSVIKLKNKIKYRAEACIKMQKTIRMWLCKRRHKPRIDGLVKVGTLKKRLDKFNEVVSVLKDGKPEMNKQIKNLEISI

SEQ ID NO: 25920 - protein, 668 aa, Homo sapiens
VIKIKDNENQRLQALLSALRDGGPEKVKTVLLSEAKEEAKKGFEVEKVKMQQEISELKGAKRQVEEALTLVIQADKIKAAEIRSVYHLHQEEITRIKKECEREIRRLEQQLDEKDARRFQLKIAELSAIIRKLEDRNALLSEERNELLKRVREAESQYKPLLDKNKRLSRKNEDLSHALRRMENKLKFVTQENIEMRQRAGIIRRPSSLNDLDQSQDEREVDFLKLQIVEQQNLIDELSKTLETAGYVKSVLERDKLLRFRKQRKKMAKLPKPVVVETFFGYDEEASLESDGSSVSYQTDRTDQTPCTPDDDLEEGMAKEETELRFRQLTMEYQALQRAYALLQEQVGGTLDAEREVKTREQLQAEVQRAQARIEDLEKALAEQGQDMKWIEEKQALYRRNQELVEKIKQMETEEARLRHEVQDARDQNELLEFRILELEERERKSPAISFHHTPFVDGKSPLQVYCEAEGVTDIVVAELMKKLDILGDNANLTNEEQVVVIQARTVLTLAEKWLQQIEETEAALQRKMVDLESEKELFSKQKGYLDEELDYRKQALDQANKHILELEAMLYDALQQEAGAKVAELLSEEEREKLKVAVEQWKRQVMSELRERDAQILRERMELLQLAQQRIKELEERIEAQKRQIKELEEKFLFLFLFFSLAFILWS

SEQ ID NO: 25921 - protein, 402 aa, Homo sapiens
MTADKDKDKDKEKDRDRDRDREREKRDKARESENSRPRRSCTLEGGAKNYAESDHSEDEDNDNNSATAEESTKKNKKKPPKKKSRYERTDTGEITSYITEDDVVYRPGDCVYIESRRPNTPYFICSIQDFKLVHNSQACCRSPTPALCDPPACSLPVASQPPQHLSEAGRGPVGSKRDHLLMNVKWYYRQSEVPDSVYQHLVQDRHNENDSGRELVITDPVIKNRELFISDYVDTYHAAALRGKCNISHFSDIFAAREFKARVDSFFYILGYNPETRRLNSTQGEIRVGPSHQAKLPDLQPFPSPDGDTVTQHEELVWMPGVNDCDLLMYLRAARSMAAFAGMCDGGSTEDGCVAASRDDTTLNALNTLHESGYDAGKALQRLVKKPVPKLIEKCWTEDEVE

SEQ ID NO: 25922 - protein, 1296 aa, Homo sapiens
MLCLEKLVGLLLKNQRKSDACKKGPWKSQRYTVTGNRVAYGRLNPDGIWTRKRSRRLPMVPQDIYSSMPEAQPVETNSPKALLVLGELSNTDNDINESVFIWGISDKAAQRKTISVDEGLFHLQQEKQQQQQQQQRLEPVHRLGRGKGRLRLPHRLLFKDRHFTCSKIIGRRFACFAQRLSHRRKQSQCDLLNESTGQLPTTCSSAASNSINWNCRVKMTQQMQNLHLCQSKKHSAPSSPNAAKRLYRNLSEKLKGSHSSFDEAYFRTRTDRLSLRKTSVNFQGNEAMFEAVEQQDMDAVQILLYQYTPEELDLNTPNSEGLTPLDIAIMTNNVPIARILLRTGARESPHFVSLESRAMHLNTLVQEAQERVSELSAQVENEGFTLDNTEKEKQLKAWEWRYRLYRRMKTGFEHARAPEMPTNVCLMVTSSTSLTVSFQEPLSVNAAVVTRYKVEWSMSEDFSPLAGEIIMDNLQTLRCTITGLTMGQQYFVQVSAYNMKGWGPAQTTTPACASPSNWKDYDDREPRHKGQSEVLEGLLQQVRALHQHYSCRESTKLQTTGRKQSVSRSLKHLFHSSNKFVKTLKRGLYIAVIFYYKDNILVTNEDQVPIVEIDDSHTSSITQDFLWFTKLSCMWEDIRWLRQSIPISSSSSTVLQTRQKMLAATAQLQNLLGTHNLGRVYYEPIKDRHGNILIVTIREVEMLYSFFNGKWMQISKLQSQRKSLSTPEEPTALDILLITIQDILSYHKRSHQRLFPGLYLGYLKLCSSVDQIKVLVTQKLPNILCHVKIRENNNISREEWEWIQKLSGSESMESVDHTSDCPMQLFFYELQMAVKALLQQINIPLHQARNFRLYTQEVLEMGHNVSFLLLLPASDDVCTAPGQNNPYTPHSGFLNLPLQMFELVHFCSYREKFISLYCRLSAVVELDSLNTQQSLREAISDSEVAAAKQRHQQVLDFIQQIDEVWREMRWIMDALQYARYKQPVSGLPITKLIDPSDEQSLKKINSTSSSHIDCLPSPPPSPEMHRRKTVSDSQPCSDEEACSEVFLPTNSDYDSSDALSPRDLDLVYLSSHDIAQQTLSGLSGSAPDVLQVHDVKTPLGPGQDPQGEGPNPDHSCAEFLHSLTLTGFTPKNHAKTVSGGRPPLGFLGKRKPGKHPHYGGFSRHHRWLRIHSETQSLSLSEGIYTQHLSQACGLAQEPKEAKRAGPALDDPRGLTLAHAASLPEERNSSLQDARPSVRRLYVEPYAAAVVAQDEKPWASLSPPSGGRITLPSPTGPDVSQEGPTASPMSEILSSML

SEQ ID NO: 25923 - protein, 820 aa, Homo sapiens
MQFFGRLVNTFSGVTNLFSNPFRVKEVAVADYTSSDRVREEGQLILFQNTPNRTWDCVLVNPRNSQSGFRLFQLELEADALVNFHQYSSQLLPFYESSPQVLHTEVLQHLTDLIRNHPSWSVAHLAVELGIRECFHHSRIISCANCAENEEGCTPLHLACRKGDGEILVELVQYCHTQMDVTDYKGETVFHYAVQGDNSQVLQLLGRNAVAGLNQVNNQGLTPLHLACQLGKQEMVRVLLLCNARCNIMGPNGYPIHSAMKFSQKGCAEMIISMDSSQIHSKDPRYGASPLHWAKNAEMARMLLKRGCNVNSTSSAGNTALHVAVMRNRFDCAIVLLTHGANADARGEHGNTPLHLAMSKDNVEMIKALIVFGAEVDTPNDFGETPTFLASKIGRQLQDLMHISRARKPAFILGSMRDEKRTHDHLLCLDGGGVKGLIIIQLLIAIEKASGVATKDLFDWVAGTSTGGILALAILHSKSMAYMRGMYFRMKDEVFRGSRPYESGPLEEFLKREFGEHTKMTDVRKPKVMLTGTLSDRQPAELHLFRNYDAPETVREPRFNQNVNLRPPAQPSDQLVWRAARSSGAAPTYFRPNGRFLDGGLLANNPTLDAMTEIHEYNQDLIRKAAETVRLSDTSQSNSPIACGWGAWDPEWEASPKIIQQIGSRACSEANKRGSGRAQRLTPVIPALWEAEGQANKVKKLSIVVSLGTGRSPQVPVTCVDVFRPSNPWELAKTVFGAKELGKMVVDCCTDPDGRAVDRARAWCEMVGIQYFRLNPQLGTDIMLDEVSDTVLVNALWETEVYIYEHREEFQKLIQLLLSP

SEQ ID NO: 25924 - protein, 503 aa, Homo sapiens
MLELQYHNEDLEKDKTSQNCLGRGMEQVAKKLGVAHEEIQRLTDELQVKEKEQCKLDSALKKAQLEIDKLKENLVKLKENDAADLQKAKEQNQRLDEEILALRNRVRSLDSEKKVLGEMVERLKGEVCESQENKQLGNHSPGKTVGGEQREQILKMSQEKNEMFESEWSKEREREKQLASGLDTAEKALKVESEHPSSGEKLKYNQQGEVQQLHQNLHRLQILCNSAENELRYERGQNLDLKQHNSLLQEENIKIKIELKHAQQKLLDSTKMCSSLTAEYKHCQQKIKELELEVLKHTQSIKSQNNLQEKLVQEKSKVADAEEKILDLQRKLEHAHKVCLTDTCISEKQQLEEKIKEATQNEAKVKQQYQEEQQKRKLLYQNVDELHRQVRTLQDKENLLEMTCSQQQSRIQQQEALLKQLENEKRKYDEHVKSNQELSEKLSKLQQEKEALREEYLRLLKLLNVHVRNYNEKHHQQKVKLQKVKYRLTNEVELRDKRINQFE

SEQ ID NO: 25925 - protein, 1434 aa, Homo sapiens
MSAPVGPRGRLAPIPAASQPPLQPEMPDLSHLTEEERKIILAVMDRQKKEEEKEQSVLKVKEEHKPQLTQWFPFSGITELVNNVLQPQQKQQNEKEPQTKLHQQFEMYKEQVKKMGEESQQQQEQKGDAPTCGICHKTKFADGCGHNCSYCQTKFCARCGGRVSLRSNKVMWVCNLCRKQQEILTKSGAWFYNSGSNTPQQPDQKVLRGLRNEEAPQEKKPKLHEQTQFQGPSGDLSVPAVEKSRSHGLTRQHSIKNGSGVKHHIASDIASDRKTSSELLNSKIISRKRSPSVSRDQNRRYDQREEREEYSQYATSDTAMPRSPSDYADRRSQHEPQFYEDSDHLSYRDSNRRSHRHSKEYIVDDEDVESRDEYERQRREEEYQSRYRSDPNLARYPVKPQPYEEQMRIHAEVSRARHERRHSDVSLANADLEDSRISMLRMDRPSRQRSISERRAAMENQRSYSMERTREAQGPSSYAQRTTNHSPPTPRRSPLPIDRPDLRRTDSLRKQHHLDPSSAVRKTKREKMETMLRNDSLSSDQSESVRPPPPKPHKSKKGGKMRQISLSSSEEELASTPEYTSCDDVEIESESVSEKGDSQKGKRKTSEQAVLSDSNTRSERQKEMMYFGGHSLEEDLEWSEPQIKDSGVDTCSSTTLNEEHSHSDKHPVTWQPSKDGDRLIGRILLNKRLKDGSVPRDSGAMLGLKVVGGKMTESGRLCAFITKVKKGSLADTVGHLRPGDEVLEWNGRLLQGATFEEVYNIILESKPEPQVELVVSRPIGDIPRIPDSTHAQLESSSSSFESQKMDRPSISVTSPMSPGMLRDVPQFLSGQLSIKLWFDKVGHQLIVTILGAKDLPSREDGRPRNPYVKIYFLPDRSDKNKRRTKTVKKTLEPKWNQTFIYSPVHRREFRERMLEITLWDQARVREEESEFLGEILIELETALLDDEPHWYKLQTHDVSSLPLPHPSPYMPRRQLHGESPTRRLQRSKRISDSEVSDYDCDDGIGVVSDYRHDGRDLQSSTLSVPEQVMSSNHCSPSGSPHRVDVIGRTRSWSPSVPPPQSRNVEQGLRGTRTMTGHYNTISRMDRHRVMDDHYSPDRDRDCEAADRQPYHRSRSTEQRPLLERTTTRSRSTERPDTNLMRSMPSLMTGRSAPPSPALSRSHPRTGSVQTSPSSTPVAGRRGRQLPQLPPKGTLDRKAGGKKLRSTVQRSTETGLAVEMRNWMTRQASRESTDGSMNSYSSEGNLIFPGVRLASDSQFSDFLDGLGPAQLVGRQTLATPAMGDIQVGMMDKKGQLEVEIIRARGLVVKPGSKTLPAPYVKVYLLDNGVCIAKKKTKVARKTLEPLYQQLLSFEESPQGKVLQIIVWGDYGRMDHKSFMGVAQILLDELELSNMVIGWFKLFPPSSLVDPTLAPLTRRASQSSLESSTGPSYSRS

SEQ ID NO: 25926 - protein, 308 aa, Homo sapiens
MATPEENSNPHDRATPQLPAQLQELEHRVARRRLSQARHRATLAALFNNLRKTVYSQSDLIASKWQVLNKAKSHIPELEQTLDNLLKLKASFNLEDGHASSLEEVKKEYASMYSGNDSFPQNGSSPWYLNFYKQTMDLLTGSGIITPQEAALPIVSAAISHLWQNLSEERKASLRQAWAQKHRGPATLAEACREPACAEGSVKDSGVDSQGASCSLVSTPEEILFEDAFDVASFLDKSEVPSTSSSSSVLASCNPENPEEKFQLYMQIINFFKGLSCANTQVKQEASFPVDEEMIMLQCTETFDDEDL

SEQ ID NO: 25927 - protein, 883 aa, Homo sapiens
MPVRKQDTQRALHLLEEYRSKLSQTEDRQLRSSIERVINIFQSNLFQALIDIQEFYEVTLLDNPKCIDRSKPSEPIQPVNTWEISSLPSSTVTSETLPSSLSPSVEKYRYQDEDTPPQEHISPQITNEVIGPELVHVSEKNLSEIENVHGFVSHSHISPIKANPPPVLVNTDSLETPTYVNGTDADYEYEEITLERGNSGLGFSIAGGTDNPHIGDDSSIFITKIITGGAAAQDGRLRVNDCILRVNEVDVRDVTHSKAVEALKEAGSIVRLYVKRRKPVSEKIMEIKLIKGPKGLGFSIAGGVGNQHIPGDNSIYVTKIIEGGAAHKDGKLQIGDKLLAVNNVCLEEVTHEEAVTALKNTSDFVYLKVAKPTSMYMNDGYAPPDITNSSSQPVDNHVSPSSFLGQTPASPARYSPVSKAVLGDDEITREPRKVVLHRGSTGLGFNIVGGEDGEGIFISFILAGGPADLSGELRKGDRIISVNSVDLRAASHEQAAAALKNAGQAVTIVAQYRPEEYSRFEAKIHDLREQMMNSSISSGSGSLRTSQKRSLYVRALFDYDKTKDSGLPSQGLNFKFGDILHVINASDDEWWQARQVTPDGESDEVGVIPSKRRVEKKERARLKTVKFNSKTRDKGEIPDDMGSKGLKHVTSNASDSESSYLILITDEYGCSKGGQEEYVLSYEPVNQQEVNYTRPVIILGPMKDRINDDLISEFPDKFGSCVPHTTRPKRDYEVDGRDYHFVTSREQMEKDIQEHKFIEAGQYNNHLYGTSVQSVREVAEKGKHCILDVSGNAIKRLQIAQLYPISIFIKPKSMENIMEMNKRLTEEQARKTFERAMKLEQEFTEHFTAIVQGDTLEDIYNQVKQIIEEQSGSYIWVPAKEKL

SEQ ID NO: 25928 - protein, 759 aa, Homo sapiens
MAARLLAPPGPDSFKPFTPESLANIERRIAESKLKKPPKADGSHREDDEDSKPKPNSDLEAGKSLPFIYGDIPQGLVAVPLEDFDPYYLTQKTFVVLNRGKTLFRFSATPALYILSPFNLIRRIAIKILIHSVFSMIIMCTILTNCVFMTFSNPPDWSKNVEYTFTGIYTFESLVKIIARGFCIDGFTFLRDPWNWLDFSVIMMAYITEFVNLGNVSALRTFRVLRALKTISVIPGLKTIVGALIQSVKKLSDVMILTVFCLSVFALIGLQLFMGNLRNKCVVWPINFNESYLENGTKGFDWEEYINNKTNFYTVPGMLEPLLCGNSSDAGQCPEGYQCMKAGRNPNYGYTSFDTFSWAFLALFRLMTQDYWENLYQLTLRAAGKTYMIFFVLVIFVGSFYLVNLILAVVAMAYEEQNQATLEEAEQKEAEFKAMLEQLKKQQEEAQAAAMATSAGTVSEDAIEEEGEEGGGSPRSSSEISKLSSKSAKERRNRRKKRKQKELSEGEEKGDPEKVFKSESEDGMRRKAFRLPDNRIGRKFSIMNQSLLSIPGSPFLSRHNSKSSIFSFRGPGRFRDPGSENEFADDEHSTVEESEGRRDSLFIPIRARERRSSYSGYSGYSQGSRSSRIFPSLRRSVKRNSTVDCNGVVSLIGGPGSHIGGRLLPEVKIDKAATDDSVRKNTNRSRLGMAVSPAPSPPLSLLCPSHLVCLDPTPVNTPAISVFFLAYFYFSLQFSPYYSPCLLLSFILCSIFPIFPPCF

SEQ ID NO: 25929 - protein, 298 aa, Homo sapiens
MTKLEYEEIALDLTPVIEELTNAGFLQTESELQELSEVLELLSAPELKSLAKTFHLVNPNGQKQQLVDAFLKLAKQRSVCTWGKNKPGIGAVILKRAKALAGQSVRICKGPRAVFSRILLLFSLTDSMEDEDAACGGQGQLSTVLLVNLGRMEFPSYTINRKTHIFQDRDDLIRYAAATHMLSDISSAMANGNWEEAKELAQCAKRDWNRLKNHPSLRCHEDLPLFLRCFTVGWIYTRILSRFVEILQRLHMYEEAVRELESLLSQRIYCPDSRGRWWDRLALNLHQHLKRLEPEPDV

SEQ ID NO: 25930 - protein, 434 aa, Homo sapiens
MLEAHMQSYKGNDPLGEWERYIQWVEENFPENKEYLITLLEHLMKEFLDKKKYHNDPRFISYCLKFAEYNSDLHQFFEFLYNHGIGTLSSPLYIAWAGHLEAQGELQHASAVLQRGIQNQAEPREFLQQQYRLFQTRLTETHLPAQARTSEPLHNVQVLNQMITSKSNPGNNMACISKNQGSELSGVISSACDKESNMERRVITISKSEYSVHSSLASKVDVEQVVMYCKEKLIRGESEFSFEELRAQKYNQRRKHEQWVNEDRHYMKRKEANAFEEQLLKQKMDELHKKLHQVVETSHEDLPASQERSEVNPARMGPSVGSQQELRAPCLPVTYQQTPVNMEKNPREAPPVVPPLANAISAALVSPATSQSIAPPVPLKAQTVTDSMFAVASKDAGCVNKSTHEFKPQSGAEIKEGCETHKVANTSSFHTTPN

SEQ ID NO: 25931 - protein, 326 aa, Homo sapiens
MYSPLCLTQDEFHPFIEALLPHVRAFAYTWFNLQARKRKYFKKHEKRMSKEEERAVKDELLSEKPEVKQKWASRLLAKLRKDIRPEYREDFVLTVTGKKPPCCVLSNPDQKGKMRRIDCLRQADKVWRLDLVMVILFKGIPLESTDGERLVKSPQCSNPGLCVQPHHIGVSVKELDLYLAYFVHAADSSQSESPSQPSDADIKDQPENGHLGFQDSFVTSGVFSVTELVRVSQTPIAAGTGPNFSLSDLESSSYYSMSPGAMRRSLPSTSSTSSTKRLKSVEDEMDSPGEEPFYTGQGRSPGSGSQSSGWHEVEPVFNSSVVLLHP

SEQ ID NO: 25932 - protein, 772 aa, Homo sapiens
MDCLCIVTTKKYRYQDEDTPPQEHISPQITNEVIGPELVHVSEKNLSEIENVHGFVSHSHISPIKANPPPVLVNTDSLETPTYVNGTDADYEYEEITLERGNSGLGFSIAGGTDNPHIGDDSSIFITKIITGGAAAQDGRLRVNDCILRVNEVDVRDVTHSKAVEALKEAGSIVRLYVKRRKPVSEKIMEIKLIKGPKGLGFSIAGGVGNQHIPGDNSIYVTKIIEGGAAHKDGKLQIGDKLLAVNNVCLEEVTHEEAVTALKNTSDFVYLKVAKPTSMYMNDGYAPPDITNSSSQPVDNHVSPSSFLGQTPASPARYSPVSKAVLGDDEITREPRKVVLHRGSTGLGFNIVGGEDGEGIFISFILAGGPADLSGELRKGDRIISVNSVDLRAASHEQAAAALKNAGQAVTIVAQYRPEEYSRFEAKIHDLREQMMNSSISSGSGSLRTSQKRSLYVRALFDYDKTKDSGLPSQGLNFKFGDILHVINASDDEWWQARQVTPDGESDEVGVIPSKRRVEKKERARLKTVKFNSKTRDKGEIPDDMGSKGLKHVTSNASDSESSYLILITDEYGCSKGGQEEYVLSYEPVNQQEVNYTRPVIILGPMKDRINDDLISEFPDKFGSCVPHTTRPKRDYEVDGRDYHFVTSREQMEKDIQEHKFIEAGQYNNHLYGTSVQSVREVAEKGKHCILDVSGNAIKRLQIAQLYPISIFIKPKSMENIMEMNKRLTEEQARKTFERAMKLEQEFTEHFTVPGNHLSVSMSSTFLDSTYK

SEQ ID NO: 25933 - protein, 634 aa, Homo sapiens
MEDGKPVWAPHPTDGFQMGNIVDIGPDSLTIEPLNQKGKTFLALINQVFPAEEDSKKDVEDNCSLMYLNEATLLHNIKVRYSKDRIYTYVANILIAVNPYFDIPKIYSSEAIKSYQGKSLGTRPPHVFAIADKAFRDMKVLKMSQSIIVSGESGAGKTENTKFVLRYLTESYGTGQDIDDRIVEANPLLEAFGNAKTVRNNNSSRFGKFVEIHFNEKSSVVGGFVSHYLLEKSRICVQGKEERNYHIFYRLCAGASEDIREKLHLSSPDNFRYLKAGSMKDPLLDDHGDFIRMCTAMKKIGLDDEEKLDLFRVVAGVLHLGNIDFEEAGSTSGGCNLKNKSAQSLEYCAELLGLDQDDLRVSLTTRVMLTTAGGTKGTVIKVPLKVEQANNARDALAKTVYSHLFDHVVNRVNQCFPFETSSYFIGVLDIAGFEYFEHNSFEQFCINYCNEKLQQFFNERILKEEQELYQKEGLGVNEVHYVDNQDCIDLIEAKLVGILDILDEENRLPQPSDQHFTSAVHQKHKDHFRLTIPRKSKLAVHRNIRDDEGFIIRHFAGAVCYETTQFVEKNNDALHMSLESLICESRDKFIRELFESSTNNNKDTKQKAGKLSFISVGNKFKRFCFSWSSPARDG

SEQ ID NO: 25934 - protein, 1089 aa, Homo sapiens
RLSYNVREKDIQRFFSGYGRLLEVDLKNGYGFVEFEDSRDADDAVYELNGKELCGERVIVEHARGPRRDRDGYSYGSRSGGGGYSSRRTSGRDKYGPPVRTEYRLIVENLSSRCSWQDLKDFMRQAGEVTYADAHKERTNEGVIEFRSYSDMKRALDKLDGTEINGRNIRLIEDKPRTSHRRSYSGSRSRSRSRRRSRSRSRRSSRSRSRSISKSRSRPARMEGHAGMEGHAEMEMLRTLKGPSTGEVSMHLVAGDSPGSGPHLPATAFIIPASSATLGLPSSALDVSCFPREPIHVGAPEQVAGCEPVSATVLPQLSAGPASSSTSTVRLLEWTEAAAPPPGGGLRFRISEYKPLNMAGVEQPPSPELRQEGVTEYEDGGAPAGDGEAGPQQAEDHPQNPPEDPNQDPPEDDSTCQCQACGPHQAAGPDLGSSNDGCPQLFQERSVIVENSSGSTSASELLKPMKKRKRREYQSPSEEESEPEAMEKQEEGKDPEGQPTASTPESEEWSSSQPATGEKKECWSWESYLEEQKAITAPVSLFQDSQAVTHNKNGFKLGMKLEGIDPQHPSMYFILTVAEVCGYRLRLHFDGYSECHDFWVNANSPDIHPAGWFEKTGHKLQPPKGYKEEEFSWSQYLRSTRAQAAPKHLFVSQSHSPPPLGFQVGMKLEAVDRMNPSLVCVASVTDVVDSRFLVHFDNWDDTYDYWCDPSSPYIHPVGWCQKQGKPLTPPQDYPDPDNFCWEKYLEETGASAVPTWAFKVRPPHSFLVNMKLEAVDRRNPALIRVASVEDVEDHRIKIHFDGWSHGYDFWIDADHPDIHPAGWCSKTGHPLQPPLGPREPSSASPGGCPPLSYRSLPHTRTSKYSFHHRKCPTPGCDGSGHVTGKFTAHHCLSGCPLAERNQSRLKAELSDSEASARKKNLSGFSPRKKPRHHGRIGRPPKYRKIPQEDFQTLTPDVVHQSLFMSALSAHPDRSLSVCWEQHCKLLPGVAGISASTVAKWTIDEVFGFVQTLTGCEDQARLFKDEARIVRVTHVSGKTLVWTVAQLGDLVCSDHLQEGKGILETGVHSLLCSLPTHLLAKLSFASDSQY

SEQ ID NO: 25935 - protein, 238 aa, Homo sapiens
MSIVIPLGVDTAETSYLEMAAGSEPESVEASPVVVEKSNSYPHQLYTSSSHHSHSYIGLPYADHNYGARPPPTPPASPPPSVLISKNEVGIFTTPNFDETSSATTISTSEDGSYGTDVTRCICGFTHDDGYMICCDKCSVWQHIDCMGIDRQHIPDTYLCERCQPRQDLTLSNRLRVTTAHCSLSLLGSGIWIKRGQCYYNAGKGKICQMVIPVQLRVVMRFLWNYILHFSILQHQLL

SEQ ID NO: 25936 - protein, 690 aa, Homo sapiens
MEDGKPVWAPHPTDGFQMGNIVDIGPDSLTIEPLNQKGKTFLALINQVFPAEEDSKKDVEDNCSLMYLNEATLLHNIKVRYSKDRIYTYVANILIAVNPYFDIPKIYSSEAIKSYQGKSLGTRPPHVFAIADKAFRDMKVLKMSQSIIVSGESGAGKTENTKFVLRYLTESYGTGQDIDDRIVEANPLLEAFGNAKTVRNNNSSRFGKFVEIHFNEKSSVVGGFVSHYLLEKSRICVQGKEERNYHIFYRLCAGASEDIREKLHLSSPDNFRYLNRGCTRYFANKETDKQILQNRKSPEYLKAGSMKDPLLDDHGDFIRMCTAMKKIGLDDEEKLDLFRVVAGVLHLGNIDFEEAGSTSGGCNLKNKSAQSLEYCAELLGLDQDDLRVSLTTRVMLTTAGGTKGTVIKVPLKVEQANNARDALAKTVYSHLFDHVVNRVNQCFPFETSSYFIGVLDIAGFEYFEHNSFEQFCINYCNEKLQQFFNERILKEEQELYQKEGLGVNEVHYVDNQDCIDLIEAKLVGILDILDEENRLPQPSDQHFTSAVHQKHKDHFRLTIPRKSKLAVHRNIRDDEGFIIRHFAGAVCYETTQFVEKNNDALHMSLESLICESRDKFIRELFESSTNNNKDTKQKAGKLSFISVGNKFKTQLNLLLDKLRSTAGVQWCNHNSLQPPPLWLKWSSHLSLPTS

SEQ ID NO: 25937 - protein, 804 aa, Homo sapiens
MGRMSSKQATSPFACAADGEDAMTQDLTSREKEEGSDQHVASHLPLHPIMHNKPHSEELPTLVSTIQQDADWDSVLSSQQRMESENNKLCSLYSFRNTSTSPHKPDEGSRDREIMTSVTFGTPERRKGSLADVVDTLKQKKLEEMTRTEQEDSSCMEKLLSKDWKEKMERLNTSELLGEIKGTPESLAEKERQLSTMITQLISLREQLLAAHDEQKKLAASQIEKQRQQMDLARQQQEQIARQQQQLLQQQHKINLLQQQIQVQGHMPPLMIPIFPHDQRTLAAAAAAQQGFLFPPGITYKPGDNYPVQFIPSTMAAAAASGLSPLQLQQLYAAQLASMQVSPGAKMPSTPQPPNTAGTVSPTGIKNEKRGTSPVTQVKDEAAAQPLNLSSRPKTAEPVKSPTSPTQNLFPASKTSPVNLPNKSSIPSPIGGSLGRGSSLGKWKSQHQEETYELDILSSLNSPALFGDQDTVMKAIQEARKMREQIQREQQQQQPHGVDGKLSSINNMGLNSCRNEKERTRFENLGPQLTGKSNEDGKLGPGVIDLTRPEDAEGSKAMNGSAAKLQQYYCWPTGGATVAEARVYRDARGRASSEPHIKRPMNAFMVWAKDERRKILQAFPDMHNSNISKILGSRWKSMSNQEKQPYYEEQARLSKIHLEKYPNYKYKPRPKRTCIVDGKKLRIGEYKQLMRSRRQEMRQFFTVGQQPQIPITTGTGVVYPGAITMATTTPSPQMTSDCSSTSASPEPSLPVIQSTYGMKTDGGSLAGNEMINGEDEMEMYDDYEDDPKSDYSSENEAPEAVSAN

SEQ ID NO: 25938 - protein, 220 aa, Homo sapiens
MRILHVNGFNGEGGEEDPQAARSNSDGEKATKVQDIKNNLKEAIETIVAAMSNLVPPVELANPENQFRVDYILSVMNVPDFDFPPEFYEHAKALWEDEGVRACYERSNEYQLIDCAQYFLDKIDVIKQADYVPSDQDLLRCRVLTSGIFETKFQVDKVNFHMFDVGGQRDERRKWIQCFNDVTAIIFVVASSSYNMVIREDNQTNRLQEALNLFKSIWNN

SEQ ID NO: 25939 - protein, 924 aa, Homo sapiens
MEDGKPVWAPHPTDGFQMGNIVDIGPDSLTIEPLNQKGKTFLALINQVFPAEEDSKKDVEDNCSLMYLNEATLLHNIKVRYSKDRIYTYVANILIAVNPYFDIPKIYSSEAIKSYQGKSLGTRPPHVFAIADKAFRDMKVLKMSQSIIVSGESGAGKTENTKFVLRYLTESYGTGQDIDDRIVEANPLLEAFGNAKTVRNNNSSRFGKFVEIHFNEKSSVVGGFVSHYLLEKSRICVQGKEERNYHIFYRLCAGASEDIREKLHLSSPDNFRYLNRGCTRYFANKETDKQILQNRKSPEYLKAGSMKDPLLDDHGDFIRMCTAMKKIGLDDEEKLDLFRVVAGVLHLGNIDFEEAGSTSGGCNLKNKSAQSLEYCAELLGLDQDDLRVSLTTRVMLTTAGGTKGTVIKVPLKVEQANNARDALAKTVYSHLFDHVVNRVNQCFPFETSSYFIGVLDIAGFEYFEHNSFEQFCINYCNEKLQQFFNERILKEEQELYQKEGLGVNEVHYVDNQDCIDLIEAKLVGILDILDEENRLPQPSDQHFTSAVHQKHKDHFRLTIPRKSKLAVHRNIRDDEGFIIRHFAGAVCYETTQFVEKNNDALHMSLESLICESRDKFIRELFESSTNNNKDTKQKAGKLSFISVGNKFKTQLNLLLDKLRSTGASFIRCIKPNLKMTSHHFEGAQILSQLQCSGMVSVLDLMQGGYPSRASFHELYNMYKKYMPDKLARLDPRLFCKALFKALGLNENDYKFGLTKVFFRPGKFAEFDQIMKSDPDHLAELVKRVNHWLTCSRWKKVQWCSLSVIKLKNKIKYRAEACIKMQKTIRMWLCKRRHKPRIDGLVKVGTLKKRLDKFNEVVSVLKDGKPEMNKQIKNLEISIDTLMAKIKSTMMTQEQIQKEYDALVKSSEELLSALQKKKQQEEEAE

SEQ ID NO: 25940 - protein, 925 aa, Homo sapiens
MKGKERSPVKAKRSRGGEDSTSRGERSKKLGGSGGSNGSSSGKTDSGGGSRRSLHLDKSSSRGGSREYDTGGGSSSSRLHSYSSPSTKNSSGGGESRSSSRGGGGESRSSGAASSAPGGGDGAEYKTLKISELGSQLSDEAVEDGLFHEFKRFGDVSVKISHLSGSGSGDERVAFVNFRRPEDARAAKHARGRLVLYDRPLKIEAVYVSRRRSRSPLDKDTYPPSASVVGASVGGHRHPPGGGGGQRSLSPGGAALGYRDYRLQQLALGRLPPPPPPPLPRDLERERDYPFYERVRPAYSLEPRVGAGAGAAPFREVDEISPEDDQRANRTLFLGNLDITVTESDLRRAFDRFGVITEVDIKRPSRGQTSTYGFLKFENLDMSHRAKLAMSGKIIIRNPIKIGYGKATPTTRLWVGGLGPWVPLAALAREFDRFGTIRTIDYRKGDSWAYIQYESLDAAHAAWTHMRGFPLGGPDRRLRVDFADTEHRYQQQYLQPLPLTHYELVTDAFGHRAPDPLRGARDRTPPLLYRDRDRDLYPDSDWVPPPPPVRERSTRTAATSVPAYEPLDSLDRRRDGWSLDRDRGDRDLPSSRDQPRKRRLPEESGGRHLDRSPESDRPRKRHCAPSPDRSPELSSSRDRYNSDNDRSSRLLLERPSPIRDRRGSLEKSQGDKRDRKNSASAERDRKHRTTAPTEGKSPLKKEDRSDGSAPSTSTASSKLKSPSQKQDGGTAPVASASPKLCLAWQGMLLLKNSNFPSNMHLLQGDLQVASSLLVEGSTGGKVAQLKITQRLRLDQPKLDEVTRRIKVAGPNGYAILLAVPGSSDSRSSSSSAASDTATSTQRPLRNLVSYLKQKQAAGVISLPVGGNKDKENTGVLHAFPPCEFSQQFLDSPAKALAKSEEDYLVMIIVRAKLVEQRMKIWNSKL

SEQ ID NO: 25941 - protein, 955 aa, Homo sapiens
MGENEDEKQAQAGQVFENFVQASTCKGTLQAFNILTRHLDLDPLDHRNFYSKLKSKVTTWKAKALWYKLDKRGSHKEYKRGKSCTNTKCLIVGGGPCGLRTAIELAYLGAKVVVVEKRDSFSRNNVLHLWPFTIHDLRGLGAKKFYGKFCAGSIDHISIRQLQLILFKVALMLGVEIHVNVEFVKVLEPPEDQENQKIGWRAEFLPTDHSLSEFEFDVIIGADGRRNTLEGFRRKEFRGKLAIAITANFINRNSTAEAKVEEISGVAFIFNQKFFQDLKEETGIDLENIVYYKDCTHYFVMTAKKQSLLDKGVIINDYIDTEMLLCAENVNQDNLLSYAREAADFATNYQLPSLDFAMNHYGQPDVAMFDFTCMYASENAALVRERQAHQLLVALVGDSLLEPFWPMGTGCARGFLAAFDTAWMVKSWNQGTPPLELLAERESLYRLLPQTTPENINKNFEQYTLDPGTRYPNLNSHCVRPHQVKHLYITKELEHYPLERLGSVRRSVNLSRKESDIRPSKLLTWCQQQTEGYQHVNVTDLTTSWRSGLALCAIIHRFRPELINFDSLNEDDAVENNQLAFDVAEREFGIPPVTTGKEMASAQEPDKLSMVMYLSKFYELFRGTPLRPVDSWRKNYGENADLSLAKSSISNNYLNLTFPRKRTPRVDGQTGENDMNKRRRKGFTNLDEPSNFSSRSLGSNQECGSSKEGGNQNKVKSMANQLLAKFEESTRNPSLMKQESMRKSFPLNLGGSDTCYFCKKRVYVMERLSAEGHFFHRECFRCSICATTLRLAAYTFDCDEGKFYCKPHFIHCKTNSKQRKRRAELKQQREEEATWQEQEAPRRDTPTESSCAVAAIGTLEGSPPGISTSFFRKVLGWPLRLPRDLCNWMQGLLQAAGLHIRDNAYNYCYMYELLSLGLPLLWAFSEVLAAMYRESEGSLESICNWVLRCFPVKLR

SEQ ID NO: 25942 - protein, 587 aa, Homo sapiens
MTKLEYEEIALDLTPVIEELTNAGFLQTESELQELSEVLELLSAPELKSLAKTFHLVNPNGQKQQLVDAFLKLAKQRSVCTWGKNKPGIGAVILKRAKALAGQSVRICKGPRAVFSRILLLFSLTDSMEDEDAACGGQGQLSTVLLVNLGRMEFPSYTINRKTHIFQDRDDLIRYAAATHMLSDISSAMANGNWEEAKELAQCAKRDWNRLKNHPSLRCHEDLPLFLRCFTVGWIYTRILSRFVEILQRLHMYEEAVRELESLLSQRIYCPDSRGRWWDRLALNLHQHLKRLEPTIKCITEGLADPEVRTGHRLSLYQRAVRLRESPSCKKFKHLFQQLPEMAVQDVKHVTITGRLCPQRGMCKSVFVMEAGEAADPTTVLCSVEELALAHYRRSGFDQGIHGEGSTFSTLYGLLLWDIIFMDGIPDVFRNACQAFPLDLCTDSFFTSRRPALEARLQLIHDAPEESLRAWVAATWHEQEGRVASLVSWDRFTSLQQAQDLVSCLGGPVLSGVCRHLAADFRHCRGGLPDLVVWNSQSRHFKLVEVKGPNDRLSHKQMIWLAELQKLGAEVEVCHVVAVGAKSQSLS

SEQ ID NO: 25943 - protein, 1130 aa, Homo sapiens
MSAAPAYSEDKGGSAGPGEPEYGHDPASGGIFSSDYKRHDDLKEMLDTNKDSLKLEAMKRIVAMIARGKNASDLFPAVVKNVACKNIEVKKLVYVYLVRYAEEQQDLALLSISTFQRGLKDPNQLIRASALRVLSSIRVPIIVPIMMLAIKEAASDMSPYVRKTAAHAIPKLYSLDSDQKDQLIEVIEKLLADKTTLVAGSVVMAFEEVCPERIDLIHKNYRKLCNLLIDVEEWGQVVIISMLTRYARTQFLSPTQNESLLEENAEKAFYGSEEDEAKGAGSEETAAAAAPSRKPYVMDPDHRLLLRNTKPLLQSRSAAVVMAVAQLYFHLAPKAEVGVIAKALVRLLRSHSEVQYVVLQNVATMSIKRRGMFEPYLKSFYIRSTDPTQIKILKLEVLTNLANETNIPTVLREFQTYIRSMDKDFVAATIQAIGRCATNIGRVRDTCLNGLVQLLSNRDELVVAESVVVIKKLLQMQPAQHGEIIKHLAKLTDNIQVPMARASILWLIGEYCEHVPRIAPDVLRKMAKSFTAEEDIVKLQVINLAAKLYLTNSKQTKLLTQYVLSLAKYDQNYDIRDRARFTRQLIVPSEQGGALSRHAKKLFLAPKPAPVLESSFKDRDHFQLGSLSHLLNAKATGYQELPDWPEEAPDPSVRNVEVPEWTKCSNREKRKEKEKPFYSDSEGESGPTESADSDPESESESDSKSSSESGSGESSSESDNEDQDEDEEKGRGSESEQSEEDGKRKTKKKVPERKGEASSSDEGSDSSSSSSESEMTSESEEEQLEPASWSRKTPPSSKSAPATKEISLLDLEDFTPPSVQPVSPPAIVSTSLAADLEGLTLTDSTLVPSLLSPVSGVGRQELLHRVAGEGLAVDYTFSRQPFSGDPHMVSVHIHFSNSSDTPIKGLHVGTPKLPAGISIQEFPEIESLAPGESATAVMGINFCDSTQAANFQLCTQTRQFYVSIQPPVGELMAPVFMSENEFKKEQGKLMGMNEITEKLMLPDTCRSDHIVVQKVTATANLGRVPCGTSDEYSSSSPLLFPPQVCREDTDWWKPRSADPGCPASWSCPADCQQRENGDWHHAGKGCDTGSDPVTSKCCDLFGSHLYLPMTPRLSVSLIFLSLSHHPPHAR

SEQ ID NO: 25944 - protein, 1326 aa, Homo sapiens
EKLKKKAATVVSEEDHLKAEARGDMSEAELLILDEFTTLARDLYAFYPLLIRFVDYNRAKWLKEPNPEAEELFRMVAEVFIYWSKSHNFKREEQNFVVQNEINNMSFLITDTKSKMSKAAVSDQERKKMKRKGDRYSMQTSLIVAALKRLLPIGLNICAPGDQELIALAKNRFSLKDTEDEVRDIIRSNIHLQGKLEDPAIRWQMALYKDLPNRTDDTSDPEKTVERVLDIANVLFHLEQVEHPQRSKKAVWHKLLSKQRKRAVVACFRMAPLYNLPRHRAVNLFLQGYEKSWIETEEHYFEDKLIEDLAKPGAEPPEEDEGTKRVDPLHQLILLFSRTALTEKCKLEEDFLYMAYADIMAKSCHDEEDDDGEEEVKSFEVTGSQRSKEKEMEKQKLLYQQARLHDRGAAEMVLQTISASKGETGPMVAATLKLGIAILNGGNSTVQQKMLDYLKEKKDVGFFQSLAGLMQSCSVLDLNAFERQNKAEGLGMVTEEGSASHFESHRLRTGEKVLQDDEFTCDLFRFLQLLCEGHNSDFQNYLRTQTGNNTTVNIIISTVDYLLRVQESISDFYWYYSGKDVIDEQGQRNFSKAIQVAKQVFNTLTEYIQGPCTGNQQSLAHSRLWDAVVGFLHVFAHMQMKLSQDSSQIELLKELMDLQKDMVVMLLSMLEGNVVNGTIGKQMVDMLVESSNNVEMILKFFDMFLKLKDLTSSDTFKEYDPDGKGVISKRDFHKAMESHKHYTQSETEFLLSCAETDENETLDYEEFVKRFHEPAKDIGFNVAVLLTNLSEHMPNDTRLQTFLELAESVLNYFQPFLGRIEIMGSAKRIERVYFEISESSRTQWEKPQVKESKRQFIFDVVNEGGEKEKMELFVNFCEDTIFEMQLAAQISESDLNERSANKEESEKERPEEQGPRMAFFSILTVRSALFALRYNILTLMRMLSLKSLKKQMKKVKKMTVKDMVTAFFSSYWSIFMTLLHFVASVFRGFFRIICSLLLGGSLVEGAKKIKVAELLANMPDPTQDEVRGDGEEGERKPLEAALPSEDLTDLKELTEESDLLSDIFGLDLKREGGQYKLIPHNPNAGLSDLMSNPVPMPEVQEKFQEQKAKEEEKEEKEETKSEPEKAEGEDGEKEEKAKEDKGKQKLRQLHTHRYGEPEVPESAFWKKIIAYQQKLLNYFARNFYNMRMLALFVAFAINFILLFYKVSTSSVVEGKELPTRSSSENAKVTSLDSSSHRIIAVHYVLEESSGYMEPTLRILAILHTVISFFCIIGYYCLKVPLVIFKREKEVARKLEFDGLYITEQPSEDDIKGQWDRLVINTQSFPN

SEQ ID NO: 25945 - protein, 772 aa, Homo sapiens
MSKRGMSSRAKGDKAEALAALQAANEDLRAKLTDIQIELQQEKSKVSKVEREKNQELRQVREHEQHKTAVLLTELKTKLHEEKMKELQAVRETLLRQHEAELLRVIKIKDNENQRLQALLSALRDGGPEKVKTVLLSEAKEEAKKGFEVEKVKMQQEISELKGAKRQVEEALTLVIQADKIKAAEIRSVYHLHQEEITRIKKECEREIRRLEQQLDEKDARRFQLKIAELSAIIRKLEDRNALLSEERNELLKRVREAESQYKPLLDKNKRLSRKNEDLSHALRRMENKLKFVTQENIEMRQRAGIIRRPSSLNDLDQSQDEREVDFLKLQIVEQQNLIDELSKTLETAGYVKSVLERDKLLRFRKQRKKMAKLPKPVVVETFFGYDEEASLESDGSSVSYQTDRTDQTPCTPDDDLEEGMAKEETELRFRQLTMEYQALQRAYALLQEQVGGTLDAEREVKTREQLQAEVQRAQARIEDLEKALAEQGQDMKWIEEKQALYRRNQELVEKIKQMETEEARLRHEVQDARDQNELLEFRILELEERERKSPAISFHHTPFVDGKSPLQVYCEAEGVTDIVVAELMKKLDILGDNANLTNEEQVVVIQARTVLTLAEKWLQQIEETEAALQRKMVDLESEKELFSKQKGYLDEELDYRKQALDQANKHILELEAMLYDALQQEAGAKVAELLSEEEREKLKVAVEQWKRQVMSELRERDAQILRERMELLQLAQQRIKELEERIEAQKRQIKELEEKFLFLFLFFSLAFILWS

SEQ ID NO: 25946 - protein, 946 aa, Homo sapiens
MSRRKPASGGLAASSSAPARQAVLSRFFQSTGSLKSTSSSTGAADQVDPGAAAAAAAAAAAAPPAPPAPAFPPQLPPHIATEIDRRKKRPLENDGPVKKKVKKVQQKEGGSDLGMSGNSEPKKCLRTRNVSKSLEKLKEFCCDSALPQSRVQTESLQERFAVLPKCTDFDDISLLHAKNAVSSEDSKRQINQKDTTLFDLSQFGSSNTSHENLQKTASKSANKRSKSIYTPLELQYIEMKQQHKDAVLCVECGYKYRFFGEDAEIAARELNIYCHLDHNFMTASIPTHRLFVHVRRLVAKGYKVGVVKQTETAALKAIGDNRSSLFSRKLTALYTKSTLIGEDVNPLIKLDDAVNVDEIMTDTSTSYLLCISENKENVRDKKKGNIFIGIVGVQPATGEVVFDSFQDSASRSELETRMSSLQPVELLLPSALSEQTEALIHRATSVSVQDDRIRVERMDNIYFEYSHAFQAVTEFYAKDTVDIKGSQIISGIVNLEKPVICSLAAIIKYLKEFNLEKMLSKPENFKQLSSKMEFMTINGTTLRNLEILQNQTDMKTKGSLLWVLDHTKTSFGRRKLKKWVTQPLLKLREINARLDAVSEVLHSESSVFGQIENHLRKLPDIERGLCSIYHKKCSTQEFFLIVKTLYHLKSEFQAIIPAVNSHIQSDLLRTVILEIPELLSPVEHYLKILNEQAAKVGDKTELFKDLSDFPLIKKRKDEIQGVIDEIRMHLQEIRKILKNPSAQYVTVSGQEFMIEIKNSAVSCIPTDWVKVGSTKAVSRFHSPFIVENYRHLNQLREQLVLDCSAEWLDFLEKFSEHYHSLCKAVHHLATVDCIFSLAKVAKQGDYCRPTVQEERKIVIKNGRHPVIDVLLGEQDQYVPNNTDLSEDSERVMIITGPNMGGKSSYIKQVALITIMAQIGSYVPAEEATIGIVDGIFTSSISPFSHC

SEQ ID NO: 25947 - protein, 136 aa, Homo sapiens
MRILHVNGFNGDEKATKVQDIKNNLKEAIETIVAAMSNLVPPVELANPENQFRVDYILSVMNVPDFDFPPEFYEHAKALWEDEGVRACYERSNEYQLIDCAQYFLDKIDVIKQADYVPSDQDLLRCRVLTSGIFET

SEQ ID NO: 25948 - protein, 528 aa, Homo sapiens
MSAAPAYSEDKGGSAGPGEPEYGHDPASGGIFSSDYKRHDDLKEMLDTNKDSLKLEAMKRIVAMIARGKNASDLFPAVVKNVACKNIEDPNQLIRASALRVLSSIRVPIIVPIMMLAIKEAASDMSPYVRKTAAHAIPKLYSLDSDQKDQLIEVIEKLLADKTTLVAGSVVMAFEEVCPERIDLIHKNYRKLCNLLIDVEEWGQVVIISMLTRYARTQFLSPTQNESLLEENAEKAFYGSEEDEAKGAGSEETAAAAAPSRKPYVMDPDHRLLLRNTKPLLQSRSAAVVMAVAQLYFHLAPKAEVGVIAKALVRLLRSHSEVQYVVLQNVATMSIKRRGMFEPYLKSFYIRSTDPTQIKILKLEVLTNLANETNIPTVLREFQTYIRSMDKDFVAATIQAIGRCATNIGRVRDTCLNGLVQLLSNRDELVVAESVVVIKKLLQMQPAQHGEIIKHLAKLTDNIQVPMARASILWLIGEYCEHVPRIAPDVLRKMAKSFTAEEDIVKLQVINLAAKLYLTNSKQVKIKR

SEQ ID NO: 25949 - protein, 1827 aa, Homo sapiens
MTTMLQKSDSNASFLRAARAGNLDKVVEYLKGGIDINTCNQNGLNALHLAAKEGHVGLVQELLGRGSSVDSATKKGNTALHIASLAGQAEVVKVLVKEGANINAQSQNGFTPLYMAAQENHIDVVKYLLENGANQSTATEDGFTPLAVALQQGHNQAVAILLENDTKGKVRLPALHIAARKDDTKSAALLLQNDHNADVQSKMMVNRTTESGFTPLHIAAHYGNVNVATLLLNRGAAVDFTARNGITPLHVASKRGNTNMVKLLLDRGGQIDAKTRDGLTPLHCAARSGHDQVVELLLERGAPLLARTKNGLSPLHMAAQGDHVECVKHLLQHKAPVDDVTLDYLTALHVAAHCGHYRVTKLLLDKRANPNARALNGFTPLHIACKKNRIKVMELLVKYGASIQAITESGLTPIHVAAFMGHLNIVLLLLQNGASPDVTNIRGETALHMAARAGQVEVVRCLLRNGALVDARAREEQTPLHIASRLGKTEIVQLLLQHMAHPDAATTNGYTPLHISAREGQVDVASVLLEAGAAHSLATKKGFTPLHVAAKYGSLDVAKLLLQRRAAADSAGKNGLTPLHVAAHYDNQKVALLLLEKGASPHATAKNGYTPLHIAAKKNQMQIASTLLNYGAETNIVTKQGVTPLHLASQEGHTDMVTLLLDKGANIHMSTKSGLTSLHLAAQEDKVNVADILTKHGADQDAHTKLGYTPLIVACHYGNVKMVNFLLKQGANVNAKTKNGYTPLHQAAQQGHTHIINVLLQHGAKPNATTANGNTALAIAKRLGYISVVDTLKVVTEEVTTTTTTITEKHKLNVPETMTEVLDVSDEEGDDTMTGDGGEYLRPEDLKELGDDSLPSSQFLDGMNYLRYSLEGGRSDSLRSFSSDRSHTLSHASYLRDSAVMDDSVVIPSHQVSTLAKEAERNSYRLSWGTENLDNVALSSSPIHSGFLVSFMVDARGGAMRGCRHNGLRIIIPPRKCTAPTRVTCRLVKRHRLATMPPMVEGEGLASRLIEVGPSGAQFLGKLHLPTAPPPLNEGESLVSRILQLGPPGTKFLGPVIVEIPHFAALRGKERELVVLRSENGDSWKEHFCDYTEDELNEILNGMDEVLDSPEDLEKKRICRIITRDFPQYFAVVSRIKQDSNLIGPEGGVLSSTVVPQVQAVFPEGALTKRIRVGLQAQPMHSELVKKILGNKATFSPIVTLEPRRRKFHKPITMTIPVPKASSDVMLNGFGGDAPTLRLLCSITGGTTPAQWEDITGTTPLTFVNECVSFTTNVSARFWLIDCRQIQESVTFASQVYREIICVPYMAKFVVFAKSHDPIEARLRCFCMTDDKVDKTLEQQENFAEVARSRDVEVLEGKPIYVDCFGNLVPLTKSGQHHIFSFFAFKENRLPLFVKVRDTTQEPCGRLSFMKEPKSTRGLVHQAICNLNITLPIYTKESESDQEQEEEIDMTSEKNPQDEQERIEERLAYIADHLGFSWTELARELDFTEEQIHQIRIENPNSLQDQSHALLKYWLERDGKHATDTNLVECLTKINRMDIVHLMETNTEPLQERISHSYAEIEQTITLDHSEGFSVLQEELCTAQHKQKEEQAVSKESETCDHPPIVSEEDISVGYSTFQDGVPKTEGDSSATALFPQTHKEQVQQDFSGKMQDLPEESSLEYQQEYFVTTPGTETSETQKAMIVPSSPSKTPEEVSTPAEEEKLYLQTPTSSERGGSPIIQEPEEPSEHREESSPRKTSLVIVESADNQPETCERLDEDAAFEKELTEELGELEASSDEEAMVTTRVVRRRVIIQGDDMPEIPPETVTEEEYIDEHGHTVVKKDNNE

SEQ ID NO: 25950 - protein, 3972 aa, Homo sapiens
MAHAAASIKKVREADLDEKEKNLERDRKKQRKIPRERMERKRKSDSNASFLRAARAGNLDKVVEYLKGGIDINTCNQNGLNALHLAAKEGHVGLVQELLGRGSSVDSATKKGNTALHIASLAGQAEVVKVLVKEGANINAQSQNGFTPLYMAAQENHIDVVKYLLENGANQSTATEDGFTPLAVALQQGHNQAVAILLENDTKGKVRLPALHIAARKDDTKSAALLLQNDHNADVQSKMMVNRTTESGFTPLHIAAHYGNVNVATLLLNRGAAVDFTARNGITPLHVASKRGNTNMVKLLLDRGGQIDAKTRDGLTPLHCAARSGHDQVVELLLERGAPLLARTKNGLSPLHMAAQGDHVECVKHLLQHKAPVDDVTLDYLTALHVAAHCGHYRVTKLLLDKRANPNARALNGFTPLHIACKKNRIKVMELLVKYGASIQAITESGLTPIHVAAFMGHLNIVLLLLQNGASPDVTNIRGETALHMAARAGQVEVVRCLLRNGALVDARAREEQTPLHIASRLGKTEIVQLLLQHMAHPDAATTNGYTPLHISAREGQVDVASVLLEAGAAHSLATKKGFTPLHVAAKYGSLDVAKLLLQRRAAADSAGKNGLTPLHVAAHYDNQKVALLLLEKGASPHATAKNGYTPLHIAAKKNQMQIASTLLNYGAETNIVTKQGVTPLHLASQEGHTDMVTLLLDKGANIHMSTKSGLTSLHLAAQEDKVNVADILTKHGADQDAHTKLGYTPLIVACHYGNVKMVNFLLKQGANVNAKTKNGYTPLHQAAQQGHTHIINVLLQHGAKPNATTANGNTALAIAKRLGYISVVDTLKVVTEEVTTTTTTITEKHKLNVPETMTEVLDVSDEEGDDTMTGDGGEYLRPEDLKELGDDSLPSSQFLDGMNYLRYSLEGGRSDSLRSFSSDRSHTLSHASYLRDSAVMDDSVVIPSHQVSTLAKEAERNSYRLSWGTENLDNVALSSSPIHSGFLVSFMVDARGGAMRGCRHNGLRIIIPPRKCTAPTRVTCRLVKRHRLATMPPMVEGEGLASRLIEVGPSGAQFLGKLHLPTAPPPLNEGESLVSRILQLGPPGTKFLGPVIVEIPHFAALRGKERELVVLRSENGDSWKEHFCDYTEDELNEILNGMDEVLDSPEDLEKKRICRIITRDFPQYFAVVSRIKQDSNLIGPEGGVLSSTVVPQVQAVFPEGALTKRIRVGLQAQPMHSELVKKILGNKATFSPIVTLEPRRRKFHKPITMTIPVPKASSDVMLNGFGGDAPTLRLLCSITGGTTPAQWEDITGTTPLTFVNECVSFTTNVSARFWLIDCRQIQESVTFASQVYREIICVPYMAKFVVFAKSHDPIEARLRCFCMTDDKVDKTLEQQENFAEVARSRDVEVLEGKPIYVDCFGNLVPLTKSGQHHIFSFFAFKENRLPLFVKVRDTTQEPCGRLSFMKEPKSTRGLVHQAICNLNITLPIYTKESESDQEQEEEIDMTSEKNDETESTETSVLKSHLVNEVPVLASPDLLSEVSEMKQDLIKMTAILTTDVSDKAGSIKVKELVKAAEEEPGEPFEIVERVKEDLEKVNEILRSGTCTRDESSVQSSRSERGLVEEEWVIVSDEEIEEARQKAPLEITEYPCVEVRIDKEIKGKVEKDSTGLVNYLTDDLNTCVPLPKEQLQTVQDKAGKKCEALAVGRSSEKEGKDIPPDETQSTQKQHKPSLGIKKPVRRKLKEKQKQKEEGLQASAEKAELKKGSSEESLGEDPGLAPEPLPTVKATSPLIEETPIGSIKDKVKALQKRVEDEQKGRSKLPIRVKGKEDVPKKTTHRPHPAASPSLKSERHAPGSPSPKTERHSTLSSSAKTERHPPVSPSSKTEKHSPVSPSAKTERHSPASSSSKTEKHSPVSPSTKTERHSPVSSTKTERHPPVSPSGKTDKRPPVSPSGRTEKHPPVSPGRTEKRLPVSPSGRTDKHQPVSTAGKTEKHLPVSPSGKTEKQPPVSPTSKTERIEETMSVRELMKAFQSGQDPSKHKTGLFEHKSAKQKQPQEKGKVRVEKEKGPILTQREAQKTENQTIKRGQRLPVTGTAESKRGVRVSSIGVKKEDAAGGKEKVLSHKIPEPVQSVPEEESHRESEVPKEKMADEQGDMDLQISPDRKTSTDFSEVIKQELEDNDKYQQFRLSEETEKAQLHLDQVLTSPFNTTFPLDYMKDEFLPALSLQSGALDGSSESLKNEGVAGSPCGSLMEGTPQISSEESYKHEGLAETPETSPESLSFSPKKSEEQTGETKESTKTETTTEIRSEKEHPTTKDITGGSEERGATVTEDSETSTESFQKEATLGSPKDTSPKRQDDCTGSCSVALAKETPTGLTEEAACDEGQRTFGSSAHKTQTDSEVQESTATSDETKALPLPEASVKTDTGTESKPQGVIRSPQGLELALPSRDSEVLSAVADDSLAVSHKDSLEASPVLEDNSSHKTPDSLEPSPLKESPCRDSLESSPVEPKMKAGIFPSHFPLPAAVAKTELLTEVASVRSRLLRDPDGSAEDDSLEQTSLMESSGKSPLSPDTPSSEEVSYEVTPKTTDVSTPKPAVIHECAEEDDSENGEKKRFTPEEEMFKMVTKIKMFDELEQEAKQKRDYKKEPKQEESSSSSDPDADCSVDVDEPKHTGSGEDESGVPVLVTSESRKVSSSSESEPELAQLKKGADSGLLPEPVIRVQPPSPLPSSMDSNSSPEEVQFQPVVSKQYTFKMNEDTQEEPGKSEEEKDSESHLAEDRHAVSTEAEDRSYDKLNRDTDQPKICDGHGCEAMSPSSSAAPVSSGLQSPTGDDVDEQPVIYKESLALQGTHEKDTEGEELDVSRAESPQADCPSESFSSSSSLPHCLVSEGKELDEDISATSSIQKTEVTKTDETFENLPKDCPSQDSSITTQTDRFSMDVPVSDLAENDEIYDPQITSPYENVPSQSFFSSEESKTQTDANHTTSFHSSEVYSVTITSPVEDVVVASSSSGTVLSKESNFEGQDIKMESQQESTLWEMQSDSVSSSFEPTMSATTTVVGEQISKVIITKTDVDSDSWSEIREDDEAFEARVKEEEQKIFGLMVDRQSQGTTPDTTPARTPTEEGTPTSEQNPFLFQEGKLFEMTRSGAIDMTKRSYADESFHFFQIGQESREETLSEDVKEGATGADPLPLETSAESLALSESKETVDDEADLLPDDVSEEVEEIPASDAQLNSQMGISASTETPTKEAVSVGTKDLPTVQTGDIPPLSGVKQISCPDSSEPAVQVQLDFSTLTRSVYSDRGDDSPDSSPEEQKSVIEIPTAPMENVPFTESKSKIPVRTMPTSTPAPPSAEYESSVSEDFLSSVDEENKADEAKPKSKLPVKVPLQRVEQQLSDLDTSVQKTVAPQGQDMASIAPDNRSKSESDASSLDSKTKCPVKTRSYTETETESRERAEELELESEEGATRPKILTSRLPVKSRSTTSSCRGGTSPTKESKEHFFDLYRNSIEFFEEISDEASKLVDRLTQSEREQEIVSDDESSSALEVSVIENLPPVETEHSVPEDIFDTRPIWDESIETLIERIPDENGHDHAEDPQDEQERIEERLAYIADHLGFSWTELARELDFTEEQIHQIRIENPNSLQDQSHALLKYWLERDGKHATDTNLVECLTKINRMDIVHLMETNTEPLQERISHSYAEIEQTITLDHSEGFSVLQEELCTAQHKQKEEQAVSKESETCDHPPIVSEEDISVGYSTFQDGVPKTEGDSSATALFPQTHKEQVQQDFSGKMQDLPEESSLEYQQEYFVTTPGTETSETQKAMIVPSSPSKTPEEVSTPAEEEKLYLQTPTSSERGGSPIIQEPEEPSEHREESSPRKTSLVIVESADNQPETCERLDEDAAFEKGDDMPEIPPETVTEEEYIDEHGHTVVKKVTRKIIRRYVSSEGTEKEEIMVQGMPQEPVNIEEGDGYSKVIKRVVLKSDTEQSEDNNE

SEQ ID NO: 25951 - protein, 1871 aa, Homo sapiens
MTTMLQKSDSNASFLRAARAGNLDKVVEYLKGGIDINTCNQNGLNALHLAAKEGHVGLVQELLGRGSSVDSATKKGNTALHIASLAGQAEVVKVLVKEGANINAQSQNGFTPLYMAAQENHIDVVKYLLENGANQSTATEDGFTPLAVALQQGHNQAVAILLENDTKGKVRLPALHIAARKDDTKSAALLLQNDHNADVQSKSGFTPLHIAAHYGNVNVATLLLNRGAAVDFTARNGITPLHVASKRGNTNMVKLLLDRGGQIDAKTRDGLTPLHCAARSGHDQVVELLLERGAPLLARTKNGLSPLHMAAQGDHVECVKHLLQHKAPVDDVTLDYLTALHVAAHCGHYRVTKLLLDKRANPNARALNGFTPLHIACKKNRIKVMELLVKYGASIQAITESGLTPIHVAAFMGHLNIVLLLLQNGASPDVTNIRGETALHMAARAGQVEVVRCLLRNGALVDARAREEQTPLHIASRLGKTEIVQLLLQHMAHPDAATTNGYTPLHISAREGQVDVASVLLEAGAAHSLATKKGFTPLHVAAKYGSLDVAKLLLQRRAAADSAGKNGLTPLHVAAHYDNQKVALLLLEKGASPHATAKNGYTPLHIAAKKNQMQIASTLLNYGAETNIVTKQGVTPLHLASQEGHTDMVTLLLDKGANIHMSTKSGLTSLHLAAQEDKVNVADILTKHGADQDAHTKLGYTPLIVACHYGNVKMVNFLLKQGANVNAKTKNGYTPLHQAAQQGHTHIINVLLQHGAKPNATTANGNTALAIAKRLGYISVVDTLKVVTEEVTTTTTTITEKHKLNVPETMTEVLDVSDEEGDDTMTGDGGEYLRPEDLKELGDDSLPSSQFLDGMNYLRYSLEGGRSDSLRSFSSDRSHTLSHASYLRDSAVMDDSVVIPSHQVSTLAKEAERNSYRLSWGTENLDNVALSSSPIHSGFLVSFMVDARGGAMRGCRHNGLRIIIPPRKCTAPTRVTCRLVKRHRLATMPPMVEGEGLASRLIEVGPSGAQFLGPVIVEIPHFAALRGKERELVVLRSENGDSWKEHFCDYTEDELNEILNGMDEVLDSPEDLEKKRICRIITRDFPQYFAVVSRIKQDSNLIGPEGGVLSSTVVPQVQAVFPEGALTKRIRVGLQAQPMHSELVKKILGNKATFSPIVTLEPRRRKFHKPITMTIPVPKASSDVMLNGFGGDAPTLRLLCSITGGTTPAQWEDITGTTPLTFVNECVSFTTNVSARFWLIDCRQIQESVTFASQVYREIICVPYMAKFVVFAKSHDPIEARLRCFCMTDDKVDKTLEQQENFAEVARSRDVEVLEGKPIYVDCFGNLVPLTKSGQHHIFSFFAFKENRLPLFVKVRDTTQEPCGRLSFMKEPKSTRGLVHQAICNLNITLPIYTKESESDQEQEEEIDMTSEKNPQDEQERIEERLAYIADHLGFSWTELARELDFTEEQIHQIRIENPNSLQDQSHALLKYWLERDGKHATDTNLVECLTKINRMDIVHLMETNTEPLQERISHSYAEIEQTITLDHSEGFSVLQEELCTAQHKQKEEQAVSKESETCDHPPIVSEEDISVGYSTFQDGVPKTEGDSSATALFPQTHKEQVQQDFSGKMQDLPEESSLEYQQEYFVTTPGTETSETQKAMIVPSSPSKTPEEVSTPAEEEKLYLQTPTSSERGGSPIIQEPEEPSEHREESSPRKTSLVIVESADNQPETCERLDEDAAFEKGDDMPEIPPETVTEEEYIDEHGHTVVKKVTRKIIRRYVSSEGTEKEEIMVQGMPQEPVNIEEGDGYSKVIKRVVLKSDTEQSEVTLCEPSILSSTSQFQAEPVEGRRVSKVVKTTVVLGERMEKHLGDSSLATDLPSAKDDFEEDNNE

SEQ ID NO: 25952 - protein, 525 aa, Homo sapiens
PSEYVANSASALFSQDISVKMASDFLMKLSAANQKEPMNLNFKVKEEPKEGESLSTTLPRSSYVFSPESEVSAPGVSEDALKPQEGKGSVLRRDVSVKAASELLMKLSAESYKETQMVKIKEEPMEVDIQDSHVSISPSRNVGYSTLIGREKTEPLQKMPEGRVPPERNLFSQDISVKMASELLFQLSEKVSKEHNHTKENTIRTTTSPFFSEDTFRQSPFTSNSKELLPSDSVLHGRISAPETEKIVLEAGNGLPSWKFNDQLFPCDVCGKVFGRQQTLSRHLSLHTEERKYKCHLCPYAAKCRANLNQHLTVHSVKLVSTDTEDIVSAVTSEGSDGKKHPYYYSCHVCGFETELNVQFVSHMSLHVDKEQWMFSICCTACDFVTMEEAEIKTHIGTKHTGEDRKTPSESNSPSSSSLSALSDSANSKDDSDGSQKNKGGNNLLVISVMPGSQPSLNSEEKPEKGFECVFCNFVCKTKNMFERHLQIHLITRMFECDVCHKFMKTPEQLLEHKKCHTVPTGGLK

SEQ ID NO: 25953 - protein, 398 aa, Homo sapiens
VIERTFHVDTPEEREEWTEAIQAVADRLQRQEEERMNCSPTSQIDNIGEEEMDASTTHHKRKTMNDFDYLKLLGKGTFGKVILVREKASGKYYAMKILKKEVIIAKDEVAHTLTESRVLKNTRHPFLTSLKYSFQTKDRLCFVMEYVNGGELFFHLSRERVFSEDRTRFYGAEIVSALDYLHSGKIVYRDLKLENLMLDKDGHIKITDFGLCKEGITDAATMKTFCGTPEYLAPEVLEDNDYGRAVDWWGLGVVMYEMMCGRLPFYNQDHEKLFELILMEDIKFPRTLSSDAKSLLSGLLIKDPNKRLGGGPDDAKEIMRHSFFSGVNWQDVYDKKLVPPFKPQVTSETDTRYFDEEFTAQTITITPPEKYDEDGMDCMDNERRPHFPQFSYSASGRE

SEQ ID NO: 25954 - protein, 899 aa, Homo sapiens
MEPVTKWSPKQVVDWTRGLDDCLQQYVHKFEREKINGEQLLQISHQDLEELGVTRIGHQELVLEAVDLLCALNYGLETDNMKNLVLKLRASSHNLQNYISSRRKSPAYDGNTSRKAPNEFLTSVVELIGAAKALLAWLDRAPFTGITDFSVTKNKIIQLCLDLTTTVQKDCFVAEMEDKVLTVVKVLNGICDKTIRSTTDPVMSQCACLEEVHLPNIKPGEGLGMYIKSTYDGLHVITGTTENSPADRSQKIHAGDEVIQVNQQTVVGWQLKNLVKKLRENPTGVVLLLKKRPTGSFNFTPAPLKNLRWKPPLVQTSPPPATTQSPESTMDTSLKKEKSAILDLYIPPPPAVPYSPRDENGSFVYGGSSKCKQPLPGPKGSESPNSFLDQESRRRRFTIADSDQLPGYSVETNILPTKMREKTPSYGKPRPLSMPADGNWMGIVDPFARPRGHGRKAFVSTKMTSYMAIDGSALVPLRQKPRRKTQGFLTMSRRRISCKDLGHADCQGWLYKKKEKGSFLSNKWKKFWVILKGSSLYWYSNQMAEKADGFVNLPDFTVERASECKKKHAFKISHPQIKTFYFAAENVQEMNVWLNKLGSAVIHQESTTKDEECYSESEQEDPEIAAETPPPPHASQTQSLTAQQASSSSPSLSGTSYSFSSLENTVKTPSSFPSSLSKERQSLPDTVNSLSAAEDEGQPITFAVQVHSPVPSEAGIHKALENSFVTSESGFLNSLSSDDTSSLSSNHDHLTVPDKPAGSKIMDKEETKVSEDDEMEKLYKSLEQASLSPLGDRRPSTKKELRKSFVKRCKNPSINEKLHKIRTLNSTLKCKEHDLAMINQLLDDPKLTARKYREWKVMNTLLIQDIYQQQRASPAPDDTDDTPQELKKSPSSPSVENSI

SEQ ID NO: 25955 - protein, 456 aa, Homo sapiens
MLDDRARMEAAKKEKVEQILAEFQLQEEDLKKVMRRMQKEMDRGLRLETHEEASVKMLPTYVRSTPEGSEVGDFLSLDLGGTNFRVMLVKVGEGEEGQWSVKTKHQMYSIPEDAMTGTAEMLFDYISECISDFLDKHQMKHKKLPLGFTFSFPVRHEDIDKGILLNWTKGFKASGAEGNNVVGLLRDAIKRRGDFEMDVVAMVNDTVATMISCYYEDHQCEVGMIVGTGCNACYMEEMQNVELVEGDEGRMCVNTEWGAFGDSGELDEFLLEYDRLVDESSANPGQQLYEKLIGGKYMGELVRLVLLRLVDENLLFHGEASEQLRTRGAFETRFVSQVESDTGDRKQIYNILSTLGLRPSTTDCDIVRRACESVSTRAAHMCSAGLAGVINRMRESRSEDVMRITVGVDGSVYKLHPSFKERFHASVRRLTPSCEITFIESEEGSGRGAALVSAVA

SEQ ID NO: 25956 - protein, 1047 aa, Homo sapiens
MGERSAYQRLAGGEEGPQRLGGGRMQPEEGTGWLLELLSEVQLQQYFLRLRDDLNVTRLSHFEYVKNEDLEKIGMGRPGQRRLWEAVKRRKALCKRKSWMSKVFSGKRLEAEFPPHHSQSTFRKTSPAPGGPAGEGPLQSLTCLIGEKDLRLLEKLGDGSFGVVRRGEWDAPSGKTVSVAVKCLKPDVLSQPEAMDDFIREVNAMHSLDHRNLIRLYGVVLTPPMKMVTELAPLGSLLDRLRKHQGHFLLGTLSRYAVQVAEGMGYLESKRFIHRDLAARNLLLATRDLVKIGDFGLMRALPQNDDHYVMQEHRKVPFAWCAPESLKTRTFSHASDTWMFGVTLWEMFTYGQEPWIGLNGSQILHKIDKEGERLPRPEDCPQDIYNVMVQCWAHKPEDRPTFVALRDFLLEAQPTDMRALQDFEEPDKLHIQMNDVITVIEGRAENYWWRGQNTRTLCVGPFPRNVVTSVAGLSAQDISQPLQNSFIHTGHGDSDPRHCWGFPDRIDELYLGNPMDPPDLLSVELSTSRPPQHLGGVKREPPPRPPQPAFFTQKPTYDPVSEDQDPLSSDFKRLGLRKPGLPRGLWLAKPSARVPGTKASRGSGAEVTLIDFGEEPVVPALRPCAPSLAQLAMDACSLLDETPPQSPTRALPRPLHPTPVVDWDARPLPPPPAYDDVAQDEDDFEICSINSTLVGAGVPAGPSQGQTNYAFVPEQARPPPPLEDNLFLPPQGGGKPPSSAQTAEIFQALQQECMRQLQAPAGSPAPSPSPGGDDKPQVPPRVPIPPRPTRPHVQLSPAPPGEEETSQWPGPASPPRVPPREPLSPQGSRTPSPLVPPGSSPLPPRLSSSPGKTMPTTQSFASDPKYATPQVIQAPGPRAGPCILPIVRDGKKVSSTHYYLLPERPSYLERYQRFLREAQSPEEPTPLPVPLLLPPPSTPAPAAPTATVRPMPQAALDPKANFSTNNSNPGARPPPPRATARLPQRGCPGDGPEAGRPADKIQMVEQLFGLGLRPRGECHKVLEMFDWNLEQAGCHLLGSWGPAHHKR

SEQ ID NO: 25957 - protein, 153 aa, Homo sapiens
MFVWLPPSPCLQADGSVAENYWWRGQNTRTLCVGPFPRNVVTSVAGLSAQDISQPLQNSFIHTGHGDSDPRHCWGFPDRIDELYLGNPMDPPDLLSVELSTSRPPQHLGGVKKPTYDPVSEDQDPLSSDFKRLGLRKPGLPRGLWLAKPSARV

SEQ ID NO: 25958 - protein, 1887 aa, Homo sapiens
MMNEDAAQKSDSGEKFNGSSQRRKRPKKVTCPQMKPEAANIEKSDSNASFLRAARAGNLDKVVEYLKGGIDINTCNQNGLNALHLAAKEGHVGLVQELLGRGSSVDSATKKGNTALHIASLAGQAEVVKVLVKEGANINAQSQNGFTPLYMAAQENHIDVVKYLLENGANQSTATEDGFTPLAVALQQGHNQAVAILLENDTKGKVRLPALHIAARKDDTKSAALLLQNDHNADVQSKMMVNRTTESGFTPLHIAAHYGNVNVATLLLNRGAAVDFTARNGITPLHVASKRGNTNMVKLLLDRGGQIDAKTRDGLTPLHCAARSGHDQVVELLLERGAPLLARTKNGLSPLHMAAQGDHVECVKHLLQHKAPVDDVTLDYLTALHVAAHCGHYRVTKLLLDKRANPNARALNGFTPLHIACKKNRIKVMELLVKYGASIQAITESGLTPIHVAAFMGHLNIVLLLLQNGASPDVTNIRGETALHMAARAGQVEVVRCLLRNGALVDARAREEQTPLHIASRLGKTEIVQLLLQHMAHPDAATTNGYTPLHISAREGQVDVASVLLEAGAAHSLATKKGFTPLHVAAKYGSLDVAKLLLQRRAAADSAGKNGLTPLHVAAHYDNQKVALLLLEKGASPHATAKNGYTPLHIAAKKNQMQIASTLLNYGAETNIVTKQGVTPLHLASQEGHTDMVTLLLDKGANIHMSTKSGLTSLHLAAQEDKVNVADILTKHGADQDAHTKLGYTPLIVACHYGNVKMVNFLLKQGANVNAKTKNGYTPLHQAAQQGHTHIINVLLQHGAKPNATTANGNTALAIAKRLGYISVVDTLKVVTEEVTTTTTTITEKHKLNVPETMTEVLDVSDEEGDDTMTGDGGEYLRPEDLKELGDDSLPSSQFLDGMNYLRYSLEGGRSDSLRSFSSDRSHTLSHASYLRDSAVMDDSVVIPSHQVSTLAKEAERNSYRLSWGTENLDNVALSSSPIHSGFLVSFMVDARGGAMRGCRHNGLRIIIPPRKCTAPTRVTCRLVKRHRLATMPPMVEGEGLASRLIEVGPSGAQFLGKLHLPTAPPPLNEGESLVSRILQLGPPGTKFLGPVIVEIPHFAALRGKERELVVLRSENGDSWKEHFCDYTEDELNEILNGMDEVLDSPEDLEKKRICRIITRDFPQYFAVVSRIKQDSNLIGPEGGVLSSTVVPQVQAVFPEGALTKRIRVGLQAQPMHSELVKKILGNKATFSPIVTLEPRRRKFHKPITMTIPVPKASSDVMLNGFGGDAPTLRLLCSITGGTTPAQWEDITGTTPLTFVNECVSFTTNVSARFWLIDCRQIQESVTFASQVYREIICVPYMAKFVVFAKSHDPIEARLRCFCMTDDKVDKTLEQQENFAEVARSRDVEVLEGKPIYVDCFGNLVPLTKSGQHHIFSFFAFKENRLPLFVKVRDTTQEPCGRLSFMKEPKSTRGLVHQAICNLNITLPIYTKESESDQEQEEEIDMTSEKNPQDEQERIEERLAYIADHLGFSWTELARELDFTEEQIHQIRIENPNSLQDQSHALLKYWLERDGKHATDTNLVECLTKINRMDIVHLMETNTEPLQERISHSYAEIEQTITLDHSEGFSVLQEELCTAQHKQKEEQAVSKESETCDHPPIVSEEDISVGYSTFQDGVPKTEGDSSATALFPQTHKEQVQQDFSGKMQDLPEESSLEYQQEYFVTTPGTETSETQKAMIVPSSPSKTPEEVSTPAEEEKLYLQTPTSSERGGSPIIQEPEEPSEHREESSPRKTSLVIVESADNQPETCERLDEDAAFEKGDDMPEIPPETVTEEEYIDEHGHTVVKKVTRKIIRRYVSSEGTEKEEIMVQGMPQEPVNIEEGDGYSKVIKRVVLKSDTEQSEDNNE

SEQ ID NO: 25959 - protein, 459 aa, Homo sapiens
CKSEFNVYSQEVITVLGEIDFMLENLPEWVTAKPVKKNVLTMLDEAYIQPQPLGVVLIIGAWNYPFVLTIQPLIGAIAAGNAVIIKPSELSENTAKILAKLLPQYLDQDLYIVINGGVEETTELLKQRFDHIFYTGNTAVGKIVMEAAAKHLTPVTLELGGKSPCYIDKDCDLDIVCRRITWGKYMNCGQTCIAPDYILCEASLQNQIVWKIKETVKEFYGENIKESPDYERIINLRHFKRILSLLEGQKIAFGGETDEATRYIAPTVLTDVDPKTKVMQEEIFGPILPIVPVKNVDEAINFINEREKPLALYVFSHNHKLIKRMIDETSSGGVTGNDVIMHFTLNSFPFGGVGSSGMGAYHGKHSFDTFSHQRPCLLKSLKREGANKLRYPPNSQSKVDWGKFFLLKRFNKEKLGLLLLTFLGIVAAVLVKKYQAVLRRKALLIFLVVHRLRWSSKQR

SEQ ID NO: 25960 - protein, 1777 aa, Homo sapiens
MTTMLQKSDSNASFLRAARAGNLDKVVEYLKGGIDINTCNQNGLNALHLAAKEGHVGLVQELLGRGSSVDSATKKGNTALHIASLAGQAEVVKVLVKEGANINAQSQNGFTPLYMAAQENHIDVVKYLLENGANQSTATEDGFTPLAVALQQGHNQAVAILLENDTKGKVRLPALHIAARKDDTKSAALLLQNDHNADVQSKSGFTPLHIAAHYGNVNVATLLLNRGAAVDFTARNGITPLHVASKRGNTNMVKLLLDRGGQIDAKTRDGLTPLHCAARSGHDQVVELLLERGAPLLARTKNGLSPLHMAAQGDHVECVKHLLQHKAPVDDVTLDYLTALHVAAHCGHYRVTKLLLDKRANPNARALNGFTPLHIACKKNRIKVMELLVKYGASIQAITESGLTPIHVAAFMGHLNIVLLLLQNGASPDVTNIRGETALHMAARAGQVEVVRCLLRNGALVDARAREEQTPLHIASRLGKTEIVQLLLQHMAHPDAATTNGYTPLHISAREGQVDVASVLLEAGAAHSLATKKGFTPLHVAAKYGSLDVAKLLLQRRAAADSAGKNGYTPLHIAAKKNQMQIASTLLNYGAETNIVTKQGVTPLHLASQEGHTDMVTLLLDKGANIHMSTKSGLTSLHLAAQEDKVNVADILTKHGADQDAHTKLGYTPLIVACHYGNVKMVNFLLKQGANVNAKTKNGYTPLHQAAQQGHTHIINVLLQHGAKPNATTANGNTALAIAKRLGYISVVDTLKVVTEEVTTTTTTITEKHKLNVPETMTEVLDVSDEEGDDTMTGDGGEYLRPEDLKELGDDSLPSSQFLDGMNYLRYSLEGGRSDSLRSFSSDRSHTLSHASYLRDSAVMDDSVVIPSHQVSTLAKEAERNSYRLSWGTENLDNVALSSSPIHSGFLVSFMVDARGGAMRGCRHNGLRIIIPPRKCTAPTRVTCRLVKRHRLATMPPMVEGEGLASRLIEVGPSGAQFLGPVIVEIPHFAALRGKERELVVLRSENGDSWKEHFCDYTEDELNEILNGMDEVLDSPEDLEKKRICRIITRDFPQYFAVVSRIKQDSNLIGPEGGVLSSTVVPQVQAVFPEGALTKRIRVGLQAQPMHSELVKKILGNKATFSPIVTLEPRRRKFHKPITMTIPVPKASSDVMLNGFGGDAPTLRLLCSITGGTTPAQWEDITGTTPLTFVNECVSFTTNVSARFWLIDCRQIQESVTFASQVYREIICVPYMAKFVVFAKSHDPIEARLRCFCMTDDKVDKTLEQQENFAEVARSRDVEVLEGKPIYVDCFGNLVPLTKSGQHHIFSFFAFKENRLPLFVKVRDTTQEPCGRLSFMKEPKSTRGLVHQAICNLNITLPIYTKESESDQEQEEEIDMTSEKNPQDEQERIEERLAYIADHLGFSWTELARELDFTEEQIHQIRIENPNSLQDQSHALLKYWLERDGKHATDTNLVECLTKINRMDIVHLMETNTEPLQERISHSYAEIEQTITLDHSEGFSVLQEELCTAQHKQKEEQAVSKESETCDHPPIVSEEDISVGYSTFQDGVPKTEGDSSATALFPQTHKEQVQQDFSGKMQDLPEESSLEYQQEYFVTTPGTETSETQKAMIVPSSPSKTPEEVSTPAEEEKLYLQTPTSSERGGSPIIQEPEEPSEHREESSPRKTSLVIVESADNQPETCERLDEDAAFEKGDDMPEIPPETVTEEEYIDEHGHTVVKKVTRKIIRRYVSSEGTEKEEIMVQGMPQEPVNIEEGDGYSKVIKRVVLKSDTEQSEDNNE

SEQ ID NO: 25961 - protein, 3874 aa, Homo sapiens
SDSNASFLRAARAGNLDKVVEYLKGGIDINTCNQNGLNALHLAAKEGHVGLVQELLGRGSSVDSATKKGNTALHIASLAGQAEVVKVLVKEGANINAQSQNGFTPLYMAAQENHIDVVKYLLENGANQSTATEDGFTPLAVALQQGHNQAVAILLENDTKGKVRLPALHIAARKDDTKSAALLLQNDHNADVQSKMMVNRTTESGFTPLHIAAHYGNVNVATLLLNRGAAVDFTARNGITPLHVASKRGNTNMVKLLLDRGGQIDAKTRDGLTPLHCAARSGHDQVVELLLERGAPLLARTKNGLSPLHMAAQGDHVECVKHLLQHKAPVDDVTLDYLTALHVAAHCGHYRVTKLLLDKRANPNARALNGFTPLHIACKKNRIKVMELLVKYGASIQAITESGLTPIHVAAFMGHLNIVLLLLQNGASPDVTNIRGETALHMAARAGQVEVVRCLLRNGALVDARAREEQTPLHIASRLGKTEIVQLLLQHMAHPDAATTNGYTPLHISAREGQVDVASVLLEAGAAHSLATKKGFTPLHVAAKYGSLDVAKLLLQRRAAADSAGKNGLTPLHVAAHYDNQKVALLLLEKGASPHATAKNGYTPLHIAAKKNQMQIASTLLNYGAETNIVTKQGVTPLHLASQEGHTDMVTLLLDKGANIHMSTKSGLTSLHLAAQEDKVNVADILTKHGADQDAHTKLGYTPLIVACHYGNVKMVNFLLKQGANVNAKTKNGYTPLHQAAQQGHTHIINVLLQHGAKPNATTANGNTALAIAKRLGYISVVDTLKVVTEEVTTTTTTITEKHKLNVPETMTEVLDVSDEEGDDTMTGDGGEYLRPEDLKELGDDSLPSSQFLDGMNYLRYSLEGGRSDSLRSFSSDRSHTLSHASYLRDSAVMDDSVVIPSHQVSTLAKEAERNSYRLSWGTENLDNVALSSSPIHSGFLVSFMVDARGGAMRGCRHNGLRIIIPPRKCTAPTRVTCRLVKRHRLATMPPMVEGEGLASRLIEVGPSGAQFLGPVIVEIPHFAALRGKERELVVLRSENGDSWKEHFCDYTEDELNEILNGMDEVLDSPEDLEKKRICRIITRDFPQYFAVVSRIKQDSNLIGPEGGVLSSTVVPQVQAVFPEGALTKRIRVGLQAQPMHSELVKKILGNKATFSPIVTLEPRRRKFHKPITMTIPVPKASSDVMLNGFGGDAPTLRLLCSITGGTTPAQWEDITGTTPLTFVNECVSFTTNVSARFWLIDCRQIQESVTFASQVYREIICVPYMAKFVVFAKSHDPIEARLRCFCMTDDKVDKTLEQQENFAEVARSRDVEVLEGKPIYVDCFGNLVPLTKSGQHHIFSFFAFKENRLPLFVKVRDTTQEPCGRLSFMKEPKSTRGLVHQAICNLNITLPIYTKESESDQEQEEEIDMTSEKNDETESTETSVLKSHLVNEVPVLASPDLLSEVSEMKQDLIKMTAILTTDVSDKAGSIKVKELVKAAEEEPGEPFEIVERVKEDLEKVNEILRSGTCTRDESSVQSSRSERGLVEEEWVIVSDEEIEEARQKAPLEITEYPCVEVRIDKEIKGKVEKDSTGLVNYLTDDLNTCVPLPKEQLQTVQDKAGKKCEALAVGRSSEKEGKDIPPDETQSTQKQHKPSLGIKKPVRRKLKEKQKQKEEGLQASAEKAELKKGSSEESLGEDPGLAPEPLPTVKATSPLIEETPIGSIKDKVKALQKRVEDEQKGRSKLPIRVKGKEDVPKKTTHRPHPAASPSLKSERHAPGSPSPKTERHSTLSSSAKTERHPPVSPSSKTEKHSPVSPSAKTERHSPASSSSKTEKHSPVSPSTKTERHSPVSSTKTERHPPVSPSGKTDKRPPVSPSGRTEKHPPVSPGRTEKRLPVSPSGRTDKHQPVSTAGKTEKHLPVSPSGKTEKQPPVSPTSKTERIEETMSVRELMKAFQSGQDPSKHKTGLFEHKSAKQKQPQEKGKVRVEKEKGPILTQREAQKTENQTIKRGQRLPVTGTAESKRGVRVSSIGVKKEDAAGGKEKVLSHKIPEPVQSVPEEESHRESEVPKEKMADEQGDMDLQISPDRKTSTDFSEVIKQELEDNDKYQQFRLSEETEKAQLHLDQVLTSPFNTTFPLDYMKDEFLPALSLQSGALDGSSESLKNEGVAGSPCGSLMEGTPQISSEESYKHEGLAETPETSPESLSFSPKKSEEQTGETKESTKTETTTEIRSEKEHPTTKDITGGSEERGATVTEDSETSTESFQKEATLGSPKDTSPKRQDDCTGSCSVALAKETPTGLTEEAACDEGQRTFGSSAHKTQTDSEVQESTATSDETKALPLPEASVKTDTGTESKPQGVIRSPQGLELALPSRDSEVLSAVADDSLAVSHKDSLEASPVLEDNSSHKTPDSLEPSPLKESPCRDSLESSPVEPKMKAGIFPSHFPLPAAVAKTELLTEVASVRSRLLRDPDGSAEDDSLEQTSLMESSGKSPLSPDTPSSEEVSYEVTPKTTDVSTPKPAVIHECAEEDDSENGEKKRFTPEEEMFKMVTKIKMFDELEQEAKQKRDYKKEPKQEESSSSSDPDADCSVDVDEPKHTGSGEDESGVPVLVTSESRKVSSSSESEPELAQLKKGADSGLLPEPVIRVQPPSPLPSSMDSNSSPEEVQFQPVVSKQYTFKMNEDTQEEPGKSEEEKDSESHLAEDRHAVSTEAEDRSYDKLNRDTDQPKICDGHGCEAMSPSSSAAPVSSGLQSPTGDDVDEQPVIYKESLALQGTHEKDTEGEELDVSRAESPQADCPSESFSSSSSLPHCLVSEGKELDEDISATSSIQKTEVTKTDETFENLPKDCPSQDSSITTQTDRFSMDVPVSDLAENDEIYDPQITSPYENVPSQSFFSSEESKTQTDANHTTSFHSSEVYSVTITSPVEDVVVASSSSGTVLSKESNFEGQDIKMESQQESTLWEMQSDSVSSSFEPTMSATTTVVGEQISKVIITKTDVDSDSWSEIREDDEAFEARVKEEEQKIFGLMVDRQSQGTTPDTTPARTPTEEGTPTSEQNPFLFQEGKLFEMTRSGAIDMTKRSYADESFHFFQIGQESREETLSEDVKEGATGADPLPLETSAESLALSESKETVDDEADLLPDDVSEEVEEIPASDAQLNSQMGISASTETPTKEAVSVGTKDLPTVQTGDIPPLSGVKQISCPDSSEPAVQVQLDFSTLTRSVYSDRGDDSPDSSPEEQKSVIEIPTAPMENVPFTESKSKIPVRTMPTSTPAPPSAEYESSVSEDFLSSVDEENKADEAKPKSKLPVKVPLQRVEQQLSDLDTSVQKTVAPQGQDMASIAPDNRSKSESDASSLDSKTKCPVKTRSYTETETESRERAEELELESEEGATRPKILTSRLPVKSRSTTSSCRGGTSPTKESKEHFFDLYRNSIEFFEEISDEASKLVDRLTQSEREQEIVSDDESSSALEVSVIENLPPVETEHSVPEDIFDTRPIWDESIETLIERIPDENGHDHAEDPQDEQERIEERLAYIADHLGFSWTELARELDFTEEQIHQIRIENPNSLQDQSHALLKYWLERDGKHATDTNLVECLTKINRMDIVHLMETNTEPLQERISHSYAEIEQTITLDHSEGFSVLQEELCTAQHKQKEEQAVSKESETCDHPPIVSEEDISVGYSTFQDGVPKTEGDSSATALFPQTHKEQVQQDFSGKMQDLPEESSLEYQQEYFVTTPGTETSETQKAMIVPSSPSKTPEEVSTPAEEEKLYLQTPTSSERGGSPIIQEPEEPSEHREESSPRKTSLVIVESADNQPETCERLDEDAAFEKVTLCEPSILSSTSQFQAEPVEGRRVSKVVKTTVVLGERMEKHLGDSSLATDLPSAKDDFEEDNNE

SEQ ID NO: 25962 - protein, 2146 aa, Homo sapiens
MNAYKYQKFLEGLNNLRDERDRVQKKTFTKWVNKHLMKVRKHINDLYEDLRDGHNLISLLEVLSGIKLPREKGRMRFHRLQNVQIALDFLKQRQVKLVNIRNDDITDGNPKLTLGLIWTIILHFQISDIYISGESGDMSAKEKLLLWTQKVTAGYTGIKCTNFSSCWSDGKMFNALIHRYRPDLVDMERVQIQSNRENLEQAFEVAERLGVTRLLDAEDVDVPSPDEKSVITYVSSIYDAFPKVPEGGEGISATEVDSRWQEYQSRVDSLIPWIKQHTILMSDKTFPQNPVELKALYNQYIHFKETEILAKEREKGRIEELYKLLEVWIEFGRIKLPQGYHPNDVEEEWGKLIIEMLEREKSLRPAVERLELLLQIANKIQNGALNCEEKLTLAKNTLQADAAHLESGQPVQCESDVIMYIQECEGLIRQLQVDLQILRDENYYQLEELAFRVMRLQDELVTLRLECTNLYRKGHFTSLELVPPSTLTTTHLKAEPLTKATHSSSTSWFRKPMTRAELVAISSSEDEGNLRFVYELLSWVEEMQMKLERAEWGNDLPSVELQLETQQHIHTSVEELGSSVKEARLYEGKMSQNFHTSYAETLGKLETQYCKLKETSSFRMRHLQSLHKFVSRATAELIWLNEKEEEELAYDWSDNNSNISAKRNYFSELTMELEEKQDVFRSLQDTAELLSLENHPAKQTVEAYSAAVQSQLQWMKQLCLCVEQHVKENTAYFQFFSDARELESFLRNLQDSIKRKYSCDHNTSLSRLEDLLQDSMDEKEQLIQSKSSVASLVGRSKTIVQLKPRSPDHVLKNTISVKAVCDYRQIEITICKNDECVLEDNSQRTKWKVISPTGNEAMVPSVCFLIPPPNKDAIEMASRVEQSYQKVMALWHQLHVNTKSLISWNYLRKDLDLVQTWNLEKLRSSAPGECHQIMKNLQAHYEDFLQDSRDSVLFSVADRLRLEEEVEACKARFQHLMKSMENEDKEETVAKMYISELKNIRLRLEEYEQRVVKRIQSLASSRTDRDAWQDNALRIAEQEHTQEDLQQLRSDLDAVSMKCDSFLHQSPSSSSVPTLRSELNLLVEKMDHVYGLSTVYLNKLKTVDVIVRSIQDAELLVKGYEIKLSQEEVVLADLSALEAHWSTLRHWLSDVKDKNSVFSVLDEEIAKAKVVAEQMSRLTPERNLDLERYQEKGSQLQERWHRVIAQLEIRQSELESIQEVLGDYRACHGTLIKWIEETTAQQEMMKPGQAEDSRVLSEQLSQQTALFAEIERNQTKLDQCQKFSQQYSTIVKDYELQLMTYKAFVESQQKSPGKRRRMLSSSDAITQEFMDLRTRYTALVTLTTQHVKYISDALRRLEEEEKVVEEEKQEHVEKVKELLGWVSTLARNTQGKATSSETKESTDIEKAILEQQVLSEELTTKKEQVSEAIKTSQIFLAKHGHKLSEKEKKQISEQLNALNKAYHDLCDGSANQLQQLQSQLAHQTEQKECRAVAGVIDLGTVEIFPIFKAMQKGLLDQDTGLVLLESQVIMSGLIAPETGENLSLEEGIARNLINPQMYQQLRELQDALALISRLTESRGPLSVVEAIEKRIISETVGLKILEAHLATGGFSLSPSENCINLEEAFHQGLISAWLHSVLESYLRTSKNLIDPNTAEKIGLLDLMQRCIVHQESGFKLLPVKQLAGGMVSLKSGRKVSIFRAVQEGLIDRQVTVRLLEAQLFAGGIVDPRTGHRLTVEEAVRHNLIDQDMACAILIRQLQTGGIIDTVTGQRLTIDEAVSNDLVAAKIALVILESLWSFMGLLWPESGEILPITDALEQGIVSTELAHKILSNRQHIKALFLPATTEILSWKKAIESGILDRDLANNLKSICIPDVMPHMQLADSAEQNINPGAAVLPCSKSHPKATASQSENLLFQLMTHSYINVQNGQRLLLLDKELMETLTSRDEYQTSPPKVVEIGHQRQKTPEGLQESANVKISGTFSSGWTVRLPEFQFSSQNKEYPDREDCTTEKGKKTTVETEDSSVENPEQDLFVEQKERNPNIDALKVINKVKLEVQRQLIGTQREDQTAVSVRENASRGHLLTIPPAEAEGVPLVVDKDVFSVETPKKEHQPLRNTSFTCQNEQAHTLETEYIHDETGGSHIKPQSK

SEQ ID NO: 25963 - protein, 1830 aa, Homo sapiens
MTTMLQKSDSNASFLRAARAGNLDKVVEYLKGGIDINTCNQNGLNALHLAAKEGHVGLVQELLGRGSSVDSATKKGNTALHIASLAGQAEVVKVLVKEGANINAQSQNGFTPLYMAAQENHIDVVKYLLENGANQSTATEDGFTPLAVALQQGHNQAVAILLENDTKGKVRLPALHIAARKDDTKSAALLLQNDHNADVQSKMMVNRTTESGFTPLHIAAHYGNVNVATLLLNRGAAVDFTARNGITPLHVASKRGNTNMVKLLLDRGGQIDAKTRDGLTPLHCAARSGHDQVVELLLERGAPLLARTKNGLSPLHMAAQGDHVECVKHLLQHKAPVDDVTLDYLTALHVAAHCGHYRVTKLLLDKRANPNARALNGFTPLHIACKKNRIKVMELLVKYGASIQAITESGLTPIHVAAFMGHLNIVLLLLQNGASPDVTNIRGETALHMAARAGQVEVVRCLLRNGALVDARAREEQTPLHIASRLGKTEIVQLLLQHMAHPDAATTNGYTPLHISAREGQVDVASVLLEAGAAHSLATKKGFTPLHVAAKYGSLDVAKLLLQRRAAADSAGKNGLTPLHVAAHYDNQKVALLLLEKGASPHATAKNGYTPLHIAAKKNQMQIASTLLNYGAETNIVTKQGVTPLHLASQEGHTDMVTLLLDKGANIHMSTKSGLTSLHLAAQEDKVNVADILTKHGADQDAHTKLGYTPLIVACHYGNVKMVNFLLKQGANVNAKTKNGYTPLHQAAQQGHTHIINVLLQHGAKPNATTANGNTALAIAKRLGYISVVDTLKVVTEEVTTTTTTITEKHKLNVPETMTEVLDVSDEEGDDTMTGDGGEYLRPEDLKELGDDSLPSSQFLDGMNYLRYSLEGGRSDSLRSFSSDRSHTLSHASYLRDSAVMDDSVVIPSHQVSTLAKEAERNSYRLSWGTENLDNVALSSSPIHSGRASPCLERDNSSFLVSFMVDARGGAMRGCRHNGLRIIIPPRKCTAPTRVTCRLVKRHRLATMPPMVEGEGLASRLIEVGPSGAQFLGPVIVEIPHFAALRGKERELVVLRSENGDSWKEHFCDYTEDELNEILNGMDEVLDSPEDLEKKRICRIITRDFPQYFAVVSRIKQDSNLIGPEGGVLSSTVVPQVQAVFPEGALTKRIRVGLQAQPMHSELVKKILGNKATFSPIVTLEPRRRKFHKPITMTIPVPKASSDVMLNGFGGDAPTLRLLCSITGGTTPAQWEDITGTTPLTFVNECVSFTTNVSARFWLIDCRQIQESVTFASQVYREIICVPYMAKFVVFAKSHDPIEARLRCFCMTDDKVDKTLEQQENFAEVARSRDVEVLEGKPIYVDCFGNLVPLTKSGQHHIFSFFAFKENRLPLFVKVRDTTQEPCGRLSFMKEPKSTRGLVHQAICNLNITLPIYTKESESDQEQEEEIDMTSEKNPQDEQERIEERLAYIADHLGFSWTELARELDFTEEQIHQIRIENPNSLQDQSHALLKYWLERDGKHATDTNLVECLTKINRMDIVHLMETNTEPLQERISHSYAEIEQTITLDHSEGFSVLQEELCTAQHKQKEEQAVSKESETCDHPPIVSEEDISVGYSTFQDGVPKTEGDSSATALFPQTHKEQVQQDFSGKMQDLPEESSLEYQQEYFVTTPGTETSETQKAMIVPSSPSKTPEEVSTPAEEEKLYLQTPTSSERGGSPIIQEPEEPSEHREESSPRKTSLVIVESADNQPETCERLDEDAAFEKGDDMPEIPPETVTEEEYIDEHGHTVVKKVTRKIIRRYVSSEGTEKEEIMVQGMPQEPVNIEEGDGYSKVIKRVVLKSDTEQSEDNNE

SEQ ID NO: 25964 - protein, 221 aa, Homo sapiens
MLSATPLYGNVHSWMNSERVRMCGASEDRKILVNDGDASKARLELREENPLNHNVVDASTAHRIDGLAALSMDRTGLIREGLRVPGNIVYSSLCGLGSEKGREAATSTLGGLGFSSERNPEMQFKPNTPETVEASAVSGKPPNGFSAIYKTPPGIQKSAVATAEALGLDRPASDKQSPLNINGASYLRLPWVNPYMEGATPAIYPFLDSPNKYSLNMYKAL

SEQ ID NO: 25965 - protein, 674 aa, Homo sapiens
MDRSKRNSIAGFPPRVERLEEFEGGGGGEGNVSQVGRVWPSSYRALISAFSRLTRLDDFTCEKIGSGFFSEVFKVRHRASGQVMALKMNTLSSNRANMLKEVQLMNRLSHPNILRFMGVCVHQGQLHALTEYINSGNLEQLLDSNLHLPWTVRVKLAYDIAVGLSYLHFKGIFHRDLTSKAIMRKPRAAVGSGHRKQAASQEGRQKHAKNNSQAKPSACDACAGMIAECPGAPAGLARQPEEVVLQASVSSYHLFRDVAEVTAFRGSLLSWYDQEKRDLPWRRRAEDEMDLDRRAYAVWVSEVMLQQTQVATVINYYTGWMQKWPTLQDLASASLEEVNQLWAGLGYYSRGRRLQEGARKVVEELGGHMPRTAETLQQLLPGVGRYTAGAIASIAFGQATGVVDGNVARVLCRVRAIGADPSSTLVSQQLWGLAQQLVDPARPGDFNQAAMELGATVCTPQRPLCSQCPVESLCRARQRVEQEQLLASGSLSGSPDVEECAPNTGQCHLCLPPSEPWDQTLGVVNFPRKASRKPPREESSATCVLEQPGALGAQILLVQRPNSGLLAGLWEFPSVTWEPSEQLQRKALLQELQRWAGPLPATHLRHLGEVVHTFSHIKLTYQVYGLALEGQTPVTTVPPGARWLTQEEFHTAAVSTAMKKVFRVYQGQQPGTCM

SEQ ID NO: 25966 - protein, 1055 aa, Homo sapiens
MQPEEGTGWLLELLSEVQLQQYFLRLRDDLNVTRLSHFEYVKNEDLEKIGMGRPGQRRLWEAVKRRKALCKRKSWMSKVFSGKRLEAEFPPHHSQSTFRKTSPAPGGPAGEGPLQSLTCLIGEKDLRLLEKLGDGSFGVVRRGEWDAPSGKTVSVAVKCLKPDVLSQPEAMDDFIREVNAMHSLDHRNLIRLYGVVLTPPMKMVTELAPLGSLLDRLRKHQGHFLLGTLSRYAVQVAEGMGYLESKRFIHRDLAARNLLLATRDLVKIGDFGLMRALPQNDDHYVMQEHRKVPFAWCAPESLKTRTFSHASDTWMFGVTLWEMFTYGQEPWIGLNGSQILHKIDKEGERLPRPEDCPQDIYNVMVQCWAHKPEDRPTFVALRDFLLEAQPTDMRALQDFEEPDKLHIQMNDVITVIEGRAENYWWRGQNTRTLCVGPFPRNVVTSVAGLSAQDISQPLQNSFIHTGHGDSDPRHCWGFPDRIDELYLGNPMDPPDLLSVELSTSRPPQHLGGVKREPPPRPPQPAFFTQKPTYDPVSEDQDPLSSDFKRLGLRKPGLPRGLWLAKPSARVPGTKASRGSGAEVTLIDFGEEPVVPALRPCAPSLAQLAMDACSLLDETPPQSPTRALPRPLHPTPVVDWDARPLPPPPAYDDVAQDEDDFEICSINSTLVGAGVPAGPSQGQTNYAFVPEQARPPPPLEDNLFLPPQGGGKPPSSAQTAEIFQALQQECMRQLQAPAGSPAPSPSPGGDDKPQVPPRVPIPPRPTRPHVQLSPAPPGEEETSQWPGPASPPRVPPREPLSPQGSRTPSPLVPPGSSPLPPRLSSSPGKTMPTTQSFASDPKYATPQVIQAPGPRAGPCILPIVRDGKKVSSTHYYLLPERPSYLERYQRFLREAQSPEEPTPLPVPLLLPPPSTPAPAAPTATVRPMPQAALDPKANFSTNNSNPGARPPPPRATARLPQRGCPGDGPEAGRPADKIQMLQAMVHGVTTEECQAALQCHGWSVQRAAQYLKVEQLFGLGLRPRGECHKVLEMFDWNLEQAGCHLLGSWGPAHHKR

SEQ ID NO: 25967 - protein, 3934 aa, Homo sapiens
MTTMLQKSDSNASFLRAARAGNLDKVVEYLKGGIDINTCNQNGLNALHLAAKEGHVGLVQELLGRGSSVDSATKKGNTALHIASLAGQAEVVKVLVKEGANINAQSQNGFTPLYMAAQENHIDVVKYLLENGANQSTATEDGFTPLAVALQQGHNQAVAILLENDTKGKVRLPALHIAARKDDTKSAALLLQNDHNADVQSKMMVNRTTESGFTPLHIAAHYGNVNVATLLLNRGAAVDFTARNGITPLHVASKRGNTNMVKLLLDRGGQIDAKTRDGLTPLHCAARSGHDQVVELLLERGAPLLARTKNGLSPLHMAAQGDHVECVKHLLQHKAPVDDVTLDYLTALHVAAHCGHYRVTKLLLDKRANPNARALNGFTPLHIACKKNRIKVMELLVKYGASIQAITESGLTPIHVAAFMGHLNIVLLLLQNGASPDVTNIRGETALHMAARAGQVEVVRCLLRNGALVDARAREEQTPLHIASRLGKTEIVQLLLQHMAHPDAATTNGYTPLHISAREGQVDVASVLLEAGAAHSLATKKGFTPLHVAAKYGSLDVAKLLLQRRAAADSAGKNGLTPLHVAAHYDNQKVALLLLEKGASPHATAKNGYTPLHIAAKKNQMQIASTLLNYGAETNIVTKQGVTPLHLASQEGHTDMVTLLLDKGANIHMSTKSGLTSLHLAAQEDKVNVADILTKHGADQDAHTKLGYTPLIVACHYGNVKMVNFLLKQGANVNAKTKNGYTPLHQAAQQGHTHIINVLLQHGAKPNATTANGNTALAIAKRLGYISVVDTLKVVTEEVTTTTTTITEKHKLNVPETMTEVLDVSDEEGDDTMTGDGGEYLRPEDLKELGDDSLPSSQFLDGMNYLRYSLEGGRSDSLRSFSSDRSHTLSHASYLRDSAVMDDSVVIPSHQVSTLAKEAERNSYRLSWGTENLDNVALSSSPIHSGFLVSFMVDARGGAMRGCRHNGLRIIIPPRKCTAPTRVTCRLVKRHRLATMPPMVEGEGLASRLIEVGPSGAQFLGPVIVEIPHFAALRGKERELVVLRSENGDSWKEHFCDYTEDELNEILNGMDEVLDSPEDLEKKRICRIITRDFPQYFAVVSRIKQDSNLIGPEGGVLSSTVVPQVQAVFPEGALTKRIRVGLQAQPMHSELVKKILGNKATFSPIVTLEPRRRKFHKPITMTIPVPKASSDVMLNGFGGDAPTLRLLCSITGGTTPAQWEDITGTTPLTFVNECVSFTTNVSARFWLIDCRQIQESVTFASQVYREIICVPYMAKFVVFAKSHDPIEARLRCFCMTDDKVDKTLEQQENFAEVARSRDVEVLEGKPIYVDCFGNLVPLTKSGQHHIFSFFAFKENRLPLFVKVRDTTQEPCGRLSFMKEPKSTRGLVHQAICNLNITLPIYTKESESDQEQEEEIDMTSEKNDETESTETSVLKSHLVNEVPVLASPDLLSEVSEMKQDLIKMTAILTTDVSDKAGSIKVKELVKAAEEEPGEPFEIVERVKEDLEKVNEILRSGTCTRDESSVQSSRSERGLVEEEWVIVSDEEIEEARQKAPLEITEYPCVEVRIDKEIKGKVEKDSTGLVNYLTDDLNTCVPLPKEQLQTVQDKAGKKCEALAVGRSSEKEGKDIPPDETQSTQKQHKPSLGIKKPVRRKLKEKQKQKEEGLQASAEKAELKKGSSEESLGEDPGLAPEPLPTVKATSPLIEETPIGSIKDKVKALQKRVEDEQKGRSKLPIRVKGKEDVPKKTTHRPHPAASPSLKSERHAPGSPSPKTERHSTLSSSAKTERHPPVSPSSKTEKHSPVSPSAKTERHSPASSSSKTEKHSPVSPSTKTERHSPVSSTKTERHPPVSPSGKTDKRPPVSPSGRTEKHPPVSPGRTEKRLPVSPSGRTDKHQPVSTAGKTEKHLPVSPSGKTEKQPPVSPTSKTERIEETMSVRELMKAFQSGQDPSKHKTGLFEHKSAKQKQPQEKGKVRVEKEKGPILTQREAQKTENQTIKRGQRLPVTGTAESKRGVRVSSIGVKKEDAAGGKEKVLSHKIPEPVQSVPEEESHRESEVPKEKMADEQGDMDLQISPDRKTSTDFSEVIKQELEDNDKYQQFRLSEETEKAQLHLDQVLTSPFNTTFPLDYMKDEFLPALSLQSGALDGSSESLKNEGVAGSPCGSLMEGTPQISSEESYKHEGLAETPETSPESLSFSPKKSEEQTGETKESTKTETTTEIRSEKEHPTTKDITGGSEERGATVTEDSETSTESFQKEATLGSPKDTSPKRQDDCTGSCSVALAKETPTGLTEEAACDEGQRTFGSSAHKTQTDSEVQESTATSDETKALPLPEASVKTDTGTESKPQGVIRSPQGLELALPSRDSEVLSAVADDSLAVSHKDSLEASPVLEDNSSHKTPDSLEPSPLKESPCRDSLESSPVEPKMKAGIFPSHFPLPAAVAKTELLTEVASVRSRLLRDPDGSAEDDSLEQTSLMESSGKSPLSPDTPSSEEVSYEVTPKTTDVSTPKPAVIHECAEEDDSENGEKKRFTPEEEMFKMVTKIKMFDELEQEAKQKRDYKKEPKQEESSSSSDPDADCSVDVDEPKHTGSGEDESGVPVLVTSESRKVSSSSESEPELAQLKKGADSGLLPEPVIRVQPPSPLPSSMDSNSSPEEVQFQPVVSKQYTFKMNEDTQEEPGKSEEEKDSESHLAEDRHAVSTEAEDRSYDKLNRDTDQPKICDGHGCEAMSPSSSAAPVSSGLQSPTGDDVDEQPVIYKESLALQGTHEKDTEGEELDVSRAESPQADCPSESFSSSSSLPHCLVSEGKELDEDISATSSIQKTEVTKTDETFENLPKDCPSQDSSITTQTDRFSMDVPVSDLAENDEIYDPQITSPYENVPSQSFFSSEESKTQTDANHTTSFHSSEVYSVTITSPVEDVVVASSSSGTVLSKESNFEGQDIKMESQQESTLWEMQSDSVSSSFEPTMSATTTVVGEQISKVIITKTDVDSDSWSEIREDDEAFEARVKEEEQKIFGLMVDRQSQGTTPDTTPARTPTEEGTPTSEQNPFLFQEGKLFEMTRSGAIDMTKRSYADESFHFFQIGQESREETLSEDVKEGATGADPLPLETSAESLALSESKETVDDEADLLPDDVSEEVEEIPASDAQLNSQMGISASTETPTKEAVSVGTKDLPTVQTGDIPPLSGVKQISCPDSSEPAVQVQLDFSTLTRSVYSDRGDDSPDSSPEEQKSVIEIPTAPMENVPFTESKSKIPVRTMPTSTPAPPSAEYESSVSEDFLSSVDEENKADEAKPKSKLPVKVPLQRVEQQLSDLDTSVQKTVAPQGQDMASIAPDNRSKSESDASSLDSKTKCPVKTRSYTETETESRERAEELELESEEGATRPKILTSRLPVKSRSTTSSCRGGTSPTKESKEHFFDLYRNSIEFFEEISDEASKLVDRLTQSEREQEIVSDDESSSALEVSVIENLPPVETEHSVPEDIFDTRPIWDESIETLIERIPDENGHDHAEDPQDEQERIEERLAYIADHLGFSWTELARELDFTEEQIHQIRIENPNSLQDQSHALLKYWLERDGKHATDTNLVECLTKINRMDIVHLMETNTEPLQERISHSYAEIEQTITLDHSEGFSVLQEELCTAQHKQKEEQAVSKESETCDHPPIVSEEDISVGYSTFQDGVPKTEGDSSATALFPQTHKEQVQQDFSGKMQDLPEESSLEYQQEYFVTTPGTETSETQKAMIVPSSPSKTPEEVSTPAEEEKLYLQTPTSSERGGSPIIQEPEEPSEHREESSPRKTSLVIVESADNQPETCERLDEDAAFEKELTEELGELEASSDEEAMVTTRVVRRRVIIQGDDMPEIPPETVTEEEYIDEHGHTVVKKVTRKIIRRYVSSEGTEKEEIMVQGMPQEPVNIEEGDGYSKVIKRVVLKSDTEQSEDNNE

SEQ ID NO: 25968 - protein, 518 aa, Homo sapiens
MLCASFLGLGLSVAIVGPTFQDLATNVNRNISSLSFIFVGRALGYLSGSVIGGFLVDVMNYFLLLGISMSATTVGLYLVPFCKTAILLTVMMSIFGVSIGILDTGGNVLILAIWGDKGAPHMQALHFSFALGAFLAPLLAKLALGPTASAENHTESDFHPALNQSSDADSEALFGVPNDKNLLWAYAVIGTYMFLVSVIFFCLFLKNSSKQEKARASAETFRRAKYHNALLCLLFLFFFFYVGAEVTYGSYVFSFATTHAGMKESEAAGLNSIFWGTFAACRGLAIFFATCLQPGTMIVLSNIGSLTSSLFLVLFDKNPICLWIATSVYGASMATTFPSGVSWIEQYTTIHGKSAAFFVIGASLGEMAIPAVIGILQGKYPDLPVVLYTSLGASIATGILFPVLYKLATSPLDRQRKEDRKSEDQKALLSSSGLNEYEEENEEEDAEKWNEMDFEMIETNDTMRHSIIETSRSSLTEPTAEVYNQYPSNALVFESSPFNTGSAHVKHLPETRTKGTNV

SEQ ID NO: 25969 - protein, 765 aa, Homo sapiens
MKLMYEHNLQRTACNMTYGSFGGVKGRDLICIQSMDGMLMVFEQESYAFGRFLPGFLLPGPLAYSSRTDSFLTVSSCQQVESYKYQVLAFATDADKRQETEQQKLGSGKRLVVDWTLNIGEQALDICIVSFNQSASSVFVLGERNFFCLKDNGQIRFMKKLDWSPSCFLPYCSVSEGTINTLIGNHNNMLHIYQDVTLKWATQLPHIPVAVRVGCLHDLKGVIVTLSDDGHLQCSYLGTDPSLFQAPNVQSRELNYDELDVEMKELQKIIKDVNKSQGVWPMTEREDDLNVSVVVSPNFDSVSQATDVEVGTDLVPSVTVKVTLQNRVILQKAKLSVYVQPPLELTCDQFTFEFMTPDLTRTVSFSVYLKRSYTPSELEGNAVVSYSRPTDRNPDGIPRVIQCKFRLPLKLICLPGQPSKTASHKITIDTNKSPVSLLSLFPGFASQSDDDQVNVMGFHFLGGARITVLASKTSQRYRIQSEQFEDLWLITNELILRLQEYFEKQGVKDFACSFSGSIPLQEYFELIDHHFELRINGEKLEELLSERAVQFRAIQRRLLARFKDKTPAPLQHLDTLLDGTYKQVIALADAVEENQGNLFQSFTRLKSATHLVILLIALWQKLSADQVAILEAAFLPLQEDTQELGWEETVDAAISHLLKTCLSKSSKEQALNLNSQLNIPKDTSQLKKHITLLCDRLSKGGRLCLSTDAAAPQTMVMPGGCTTIPESDLEERSVEQDSTELFTNHRHLTAETPRPEVSPLQGVSE

SEQ ID NO: 25970 - protein, 489 aa, Homo sapiens
MHSYNIVKNKVIISWHQQATPGMWATVTSATGEWGMLWVNQEDEVEEGPSDVQNGHLDPNSDCLCLGRPLQNRDQMRANVINEIMSTERHYIKHLKDICEGYLKQCRKRRDMFSDEQLKVIFGNIEDIYRFQMGFVRDLEKQYNNDDPHLSEIGPCFLEHQDGFWIYSEYCNNHLDACMELSKLMKDSRYQHFFEACRLLQQMIDIAIDGFLLTPVQKICKYPLQLAELLKYTAQDHSDYRYVAAALAVMRNVTQQINERKRRLENIDKIAQWQASVLDWEGEDILDRSSELIYTGEMAWIYQPYGRNQQRVFFLFDHQMVLCKKDLIRRDILYYKGRIDMDKYEVVDIEDGRDDDFNVSMKNAFKLHNKETEEIHLFFAKKLEEKIRWLRAFREERKMVQEDEKIGFEISENQKRQAAMTVRKVPKQKGVNSARSVPPSYPPPQDPLNHGQYLVPDGIAQSQVFEFTEPKRSQSPFWQNFSRLTPFKK

SEQ ID NO: 25971 - protein, 928 aa, Homo sapiens
MSLFKARDWWSTILGDKEEFDQGCLCLANVDNSGNGQDKIIVGSFMGYLRIFSPHPAKTGDGAQAEDLLLEVDLRDPVLQVEVGKFVSRSFTLVAQTGVQWRDLSLLQPPPPRFKQFSCLSLPSSWDYRGTEMLHLAVLHSRKLCVYSVSGTLGNVEHGNQCQMKLMYEHNLQRTACNMTYGSFGGVKGRDLICIQSMDGMLMVFEQESYAFGRFLPGFLLPGPLAYSSRTDSFLTVSSCQQVESYKYQVLAFATDADKRQETEQQKLGSGKRLVVDWTLNIGEQALDICIVSFNQSASSVFVLGERNFFCLKDNGQIRFMKKLDWSPSCFLPYCSVSEGTINTLIGNHNNMLHIYQDVTLKWATQLPHIPVAVRVGCLHDLKGVIVTLSDDGHLQCSYLGTDPSLFQAPNVQSRELNYDELDVEMKELQKIIKDVNKSQGVWPMTEREDDLNVSVVVSPNFDSVSQATDVEVGTDLVPSVTVKVTLQNRVILQKAKLSVYVQPPLELTCDQFTFEFMTPDLTRTVSFSVYLKRSYTPSELEGNAVVSYSRPTDRNPDGIPRVIQCKFRLPLKLICLPGQPSKTASHKITIDTNKSPVSLLSLFPGFASQSDDDQVNVMGFHFLGGARITVLASKTSQRYRIQSEQFEDLWLITNELILRLQEYFEKQGVKDFACSFSGSIPLQEYFELIDHHFELRINGEKLEELLSERAVQFRAIQRRLLARFKDKTPAPLQHLDTLLDGTYKQVIALADAVEENQGNLFQSFTRLKSATHLVILLIALWQKLSADQVAILEAAFLPLQEDTQELGWEETVDAAISHLLKTCLSKSSKEQALNLNSQLNIPKDTSQLKKHITLLCDRLSKGGRLCLSTDAAAPQTMVMPGGCTTIPESDLEERSVEQDSTELFTNHRHLTAETPRPEVSPLQGVSE

SEQ ID NO: 25972 - protein, 3848 aa, Homo sapiens
MTTMLQKSDSNASFLRAARAGNLDKVVEYLKGGIDINTCNQNGLNALHLAAKEGHVGLVQELLGRGSSVDSATKKGNTALHIASLAGQAEVVKVLVKEGANINAQSQNGFTPLYMAAQENHIDVVKYLLENGANQSTATEDGFTPLAVALQQGHNQAVAILLENDTKGKVRLPALHIAARKDDTKSAALLLQNDHNADVQSKMMVNRTTESGFTPLHIAAHYGNVNVATLLLNRGAAVDFTARNGITPLHVASKRGNTNMVKLLLDRGGQIDAKTRDGLTPLHCAARSGHDQVVELLLERGAPLLARTKNGLSPLHMAAQGDHVECVKHLLQHKAPVDDVTLDYLTALHVAAHCGHYRVTKLLLDKRANPNARALNGFTPLHIACKKNRIKVMELLVKYGASIQAITESGLTPIHVAAFMGHLNIVLLLLQNGASPDVTNIRGETALHMAARAGQVEVVRCLLRNGALVDARAREEQTPLHIASRLGKTEIVQLLLQHMAHPDAATTNGYTPLHISAREGQVDVASVLLEAGAAHSLATKKGFTPLHVAAKYGSLDVAKLLLQRRAAADSAGKNGLTPLHVAAHYDNQKVALLLLEKGASPHATAKNGYTPLHIAAKKNQMQIASTLLNYGAETNIVTKQGVTPLHLASQEGHTDMVTLLLDKGANIHMSTKSGLTSLHLAAQEDKVNVADILTKHGADQDAHTKLGYTPLIVACHYGNVKMVNFLLKQGANVNAKTKNGYTPLHQAAQQGHTHIINVLLQHGAKPNATTANGNTALAIAKRLGYISVVDTLKVVTEEVTTTTTTITEKHKLNVPETMTEVLDVSDEEGDDTMTGDGGEYLRPEDLKELGDDSLPSSQFLDGMNYLRYSLEGGRSDSLRSFSSDRSHTLSHASYLRDSAVMDDSVVIPSHQVSTLAKEAERNSYRLSWGTENLDNVALSSSPIHSGFLVSFMVDARGGAMRGCRHNGLRIIIPPRKCTAPTRVTCRLVKRHRLATMPPMVEGEGLASRLIEVGPSGAQFLGPVIVEIPHFAALRGKERELVVLRSENGDSWKEHFCDYTEDELNEILNGMDEVLDSPEDLEKKRICRIITRDFPQYFAVVSRIKQDSNLIGPEGGVLSSTVVPQVQAVFPEGALTKRIRVGLQAQPMHSELVKKILGNKATFSPIVTLEPRRRKFHKPITMTIPVPKASSDVMLNGFGGDAPTLRLLCSITGGTTPAQWEDITGTTPLTFVNECVSFTTNVSARFWLIDCRQIQESVTFASQVYREIICVPYMAKFVVFAKSHDPIEARLRCFCMTDDKVDKTLEQQENFAEVARSRDVEVLEGKPIYVDCFGNLVPLTKSGQHHIFSFFAFKENRLPLFVKVRDTTQEPCGRLSFMKEPKSTRGLVHQAICNLNITLPIYTKESESDQEQEEEIDMTSEKNDETESTETSVLKSHLVNEVPVLASPDLLSEVSEMKQDLIKMTAILTTDVSDKAGSIKVKELVKAAEEEPGEPFEIVERVKEDLEKVNEILRSGTCTRDESSVQSSRSERGLVEEEWVIVSDEEIEEARQKAPLEITEYPCVEVRIDKEIKGKVEKDSTGLVNYLTDDLNTCVPLPKEQLQTVQDKAGKKCEALAVGRSSEKEGKDIPPDETQSTQKQHKPSLGIKKPVRRKLKEKQKQKEEGLQASAEKAELKKGSSEESLGEDPGLAPEPLPTVKATSPLIEETPIGSIKDKVKALQKRVEDEQKGRSKLPIRVKGKEDVPKKTTHRPHPAASPSLKSERHAPGSPSPKTERHSTLSSSAKTERHPPVSPSSKTEKHSPVSPSAKTERHSPASSSSKTEKHSPVSPSTKTERHSPVSSTKTERHPPVSPSGKTDKRPPVSPSGRTEKHPPVSPGRTEKRLPVSPSGRTDKHQPVSTAGKTEKHLPVSPSGKTEKQPPVSPTSKTERIEETMSVRELMKAFQSGQDPSKHKTGLFEHKSAKQKQPQEKGKVRVEKEKGPILTQREAQKTENQTIKRGQRLPVTGTAESKRGVRVSSIGVKKEDAAGGKEKVLSHKIPEPVQSVPEEESHRESEVPKEKMADEQGDMDLQISPDRKTSTDFSEVIKQELEDNDKYQQFRLSEETEKAQLHLDQVLTSPFNTTFPLDYMKDEFLPALSLQSGALDGSSESLKNEGVAGSPCGSLMEGTPQISSEESYKHEGLAETPETSPESLSFSPKKSEEQTGETKESTKTETTTEIRSEKEHPTTKDITGGSEERGATVTEDSETSTESFQKEATLGSPKDTSPKRQDDCTGSCSVALAKETPTGLTEEAACDEGQRTFGSSAHKTQTDSEVQESTATSDETKALPLPEASVKTDTGTESKPQGVIRSPQGLELALPSRDSEVLSAVADDSLAVSHKDSLEASPVLEDNSSHKTPDSLEPSPLKESPCRDSLESSPVEPKMKAGIFPSHFPLPAAVAKTELLTEVASVRSRLLRDPDGSAEDDSLEQTSLMESSGKSPLSPDTPSSEEVSYEVTPKTTDVSTPKPAVIHECAEEDDSENGEKKRFTPEEEMFKMVTKIKMFDELEQEAKQKRDYKKEPKQEESSSSSDPDADCSVDVDEPKHTGSGEDESGVPVLVTSESRKVSSSSESEPELAQLKKGADSGLLPEPVIRVQPPSPLPSSMDSNSSPEEVQFQPVVSKQYTFKMNEDTQEEPGKSEEEKDSESHLAEDRHAVSTEAEDRSYDKLNRDTDQPKICDGHGCEAMSPSSSAAPVSSGLQSPTGDDVDEQPVIYKESLALQGTHEKDTEGEELDVSRAESPQADCPSESFSSSSSLPHCLVSEGKELDEDISATSSIQKTEVTKTDETFENLPKDCPSQDSSITTQTDRFSMDVPVSDLAENDEIYDPQITSPYENVPSQSFFSSEESKTQTDANHTTSFHSSEVYSVTITSPVEDVVVASSSSGTVLSKESNFEGQDIKMESQQESTLWEMQSDSVSSSFEPTMSATTTVVGEQISKVIITKTDVDSDSWSEIREDDEAFEARVKEEEQKIFGLMVDRQSQGTTPDTTPARTPTEEGTPTSEQNPFLFQEGKLFEMTRSGAIDMTKRSYADESFHFFQIGQESREETLSEDVKEGATGADPLPLETSAESLALSESKETVDDEADLLPDDVSEEVEEIPASDAQLNSQMGISASTETPTKEAVSVGTKDLPTVQTGDIPPLSGVKQISCPDSSEPAVQVQLDFSTLTRSVYSDRGDDSPDSSPEEQKSVIEIPTAPMENVPFTESKSKIPVRTMPTSTPAPPSAEYESSVSEDFLSSVDEENKADEAKPKSKLPVKVPLQRVEQQLSDLDTSVQKTVAPQGQDMASIAPDNRSKSESDASSLDSKTKCPVKTRSYTETETESRERAEELELESEEGATRPKILTSRLPVKSRSTTSSCRGGTSPTKESKEHFFDLYRNSIEFFEEISDEASKLVDRLTQSEREQEIVSDDESSSALEVSVIENLPPVETEHSVPEDIFDTRPIWDESIETLIERIPDENGHDHAEDPQDEQERIEERLAYIADHLGFSWTELARELDFTEEQIHQIRIENPNSLQDQSHALLKYWLERDGKHATDTNLVECLTKINRMDIVHLMETNTEPLQERISHSYAEIEQTITLDHSEGFSVLQEELCTAQHKQKEEQAVSKESETCDHPPIVSEEDISVGYSTFQDGVPKTEGDSSATALFPQTHKEQVQQDFSGKMQDLPEESSLEYQQEYFVTTPGTETSETQKAMIVPSSPSKTPEEVSTPAEEEKLYLQTPTSSERGGSPIIQEPEEPSEHREESSPRKTSLVIVESADNQPETCERLDEDAAFEKGDDMPEIPPETVTEEEYIDEHGHTVVKKDNNE

SEQ ID NO: 25973 - protein, 1943 aa, Homo sapiens
MTTMLQKSDSNASFLRAARAGNLDKVVEYLKGGIDINTCNQNGLNALHLAAKEGHVGLVQELLGRGSSVDSATKKGNTALHIASLAGQAEVVKVLVKEGANINAQSQNGFTPLYMAAQENHIDVVKYLLENGANQSTATEDGFTPLAVALQQGHNQAVAILLENDTKGKVRLPALHIAARKDDTKSAALLLQNDHNADVQSKMMVNRTTESGFTPLHIAAHYGNVNVATLLLNRGAAVDFTARNGITPLHVASKRGNTNMVKLLLDRGGQIDAKTRDGLTPLHCAARSGHDQVVELLLERGAPLLARTKNGLSPLHMAAQGDHVECVKHLLQHKAPVDDVTLDYLTALHVAAHCGHYRVTKLLLDKRANPNARALNGFTPLHIACKKNRIKVMELLVKYGASIQAITESGLTPIHVAAFMGHLNIVLLLLQNGASPDVTNIRGETALHMAARAGQVEVVRCLLRNGALVDARAREEQTPLHIASRLGKTEIVQLLLQHMAHPDAATTNGYTPLHISAREGQVDVASVLLEAGAAHSLATKKGFTPLHVAAKYGSLDVAKLLLQRRAAADSAGKNGLTPLHVAAHYDNQKVALLLLEKGASPHATAKNGYTPLHIAAKKNQMQIASTLLNYGAETNIVTKQGVTPLHLASQEGHTDMVTLLLDKGANIHMSTKSGLTSLHLAAQEDKVNVADILTKHGADQDAHTKLGYTPLIVACHYGNVKMVNFLLKQGANVNAKTKNGYTPLHQAAQQGHTHIINVLLQHGAKPNATTANGNTALAIAKRLGYISVVDTLKVVTEEVTTTTTTITEKHKLNVPETMTEVLDVSDEEGDDTMTGDGGEYLRPEDLKELGDDSLPSSQFLDGMNYLRYSLEGGRSDSLRSFSSDRSHTLSHASYLRDSAVMDDSVVIPSHQVSTLAKEAERNSYRLSWGTENLDNVALSSSPIHSGFLVSFMVDARGGAMRGCRHNGLRIIIPPRKCTAPTRVTCRLVKRHRLATMPPMVEGEGLASRLIEVGPSGAQFLGKLHLPTAPPPLNEGESLVSRILQLGPPGTKFLGPVIVEIPHFAALRGKERELVVLRSENGDSWKEHFCDYTEDELNEILNGMDEVLDSPEDLEKKRICRIITRDFPQYFAVVSRIKQDSNLIGPEGGVLSSTVVPQVQAVFPEGALTKRIRVGLQAQPMHSELVKKILGNKATFSPIVTLEPRRRKFHKPITMTIPVPKASSDVMLNGFGGDAPTLRLLCSITGGTTPAQWEDITGTTPLTFVNECVSFTTNVSARFWLIDCRQIQESVTFASQVYREIICVPYMAKFVVFAKSHDPIEARLRCFCMTDDKVDKTLEQQENFAEVARSRDVEVLEGKPIYVDCFGNLVPLTKSGQHHIFSFFAFKENRLPLFVKVRDTTQEPCGRLSFMKEPKSTRGLVHQAICNLNITLPIYTKESESDQEQEEEIDMTSEKNPQDEQERIEERLAYIADHLGFSWTELARELDFTEEQIHQIRIENPNSLQDQSHALLKYWLERDGKHATDTNLVECLTKINRMDIVHLMETNTEPLQERISHSYAEIEQTITLDHSEGFSVLQEELCTAQHKQKEEQAVSKESETCDHPPIVSEEDISVGYSTFQDGVPKTEGDSSATALFPQTHKEQVQQDFSGKMQDLPEESSLEYQQEYFVTTPGTETSETQKAMIVPSSPSKTPEEVSTPAEEEKLYLQTPTSSERGGSPIIQEPEEPSEHREESSPRKTSLVIVESADNQPETCERLDEDAAFEKELTEELGELEASSDEEAMVTTRVVRRRVIIQGDDMPEIPPETVTEEEYIDEHGHTVVKKVTRKIIRRYVSSEGTEKEEIMVQGMPQEPVNIEEGDGYSKVIKRVVLKSDTEQSEVTLCEPSILSSTSQFQAEPVEGRRVSKVVKTTVVLGERMEKHLGDSSLATDLPSAKDDFEEDNNE

SEQ ID NO: 25974 - protein, 992 aa, Homo sapiens
NDNEQSVWRHSPKKQKNGYEKKKIPDATPLLDASSLEYLFAQGQYDLVKCLAPIRDPKTEQDGHDIENECLGMAVLAISHYAMMKKMQLPELPKDISSVSTHDLKVKYLATLETLTKHYGAEIFETSMLLISSENEMNWFHSNDGGNVLYYEVMVTGNLGIQWRHKPNVVSVEKEKNKLKRKKLENKHKKDEEKNKIREEWNNFSYFPEITHIVIKESVVSINKQDNKKMELKLSSHEEALSFVSLVDGYFRLTADAHHYLCTDVAPPLIVHNIQNGCHGPICTEYAINKLRQEGSEEGMYVLRWSCTDFDNILMTVTCFEKSEQVQGAQKQFKNFQIEVQKGRYSLHGSDRSFPSLGDLMSHLKKQILRTDNISFMLKRCCQPKPREISNLLVATKKAQEWQPVYPMSQLSFDRILKKDLVQGEHLGRGTRTHIYSGTLMDYKDDEGTSEEKKIKVILKVLDPSHRDISLAFFEAASMMRQVSHKHIVYLYGVCVRDVENIMVEEFVEGGPLDLFMHRKSDVLTTPWKFKVAKQLASALSYLEDKDLVHGNVCTKNLLLAREGIDSECGPFIKLSDPGIPITVLSRQECIERIPWIAPECVEDSKNLSVAADKWSFGTTLWEICYNGEIPLKDKTLIEKERFYESRCRPVTPSCKELADLMTRCMNYDPNQRPFFRAIMRDINKLEEQNPDIVSEKKPATEVDPTHFEKRFLKRIRDLGEGHFGKVELCRYDPEGDNTGEQVAVKSLKPESGGNHIADLKKEIEILRNLYHENIVKYKGICTEDGGNGIKLIMEFLPSGSLKEYLPKNKNKINLKQQLKYAVQICKGMDYLGSRQYVHRDLAARNVLVESEHQVKIGDFGLTKAIETDKEYYTVKDDRDSPVFWYAPECLMQSKFYIASDVWSFGVTLHELLTYCDSDSSPMALFLKMIGPTHGQMTVTRLVNTLKEGKRLPCPPNCPDEVYQLMRKCWEFQPSNRTSFQNLIEGFEALLK

SEQ ID NO: 25975 - protein, 1785 aa, Homo sapiens
MTTMLQKSDSNASFLRAARAGNLDKVVEYLKGGIDINTCNQNGLNALHLAAKEGHVGLVQELLGRGSSVDSATKKGNTALHIASLAGQAEVVKVLVKEGANINAQSQNGFTPLYMAAQENHIDVVKYLLENGANQSTATEDGFTPLAVALQQGHNQAVAILLENDTKGKVRLPALHIAARKDDTKSAALLLQNDHNADVQSKMMVNRTTESGFTPLHIAAHYGNVNVATLLLNRGAAVDFTARNGITPLHVASKRGNTNMVKLLLDRGGQIDAKTRDGLTPLHCAARSGHDQVVELLLERGAPLLARTKNGLSPLHMAAQGDHVECVKHLLQHKAPVDDVTLDYLTALHVAAHCGHYRVTKLLLDKRANPNARALNGFTPLHIACKKNRIKVMELLVKYGASIQAITESGLTPIHVAAFMGHLNIVLLLLQNGASPDVTNIRGETALHMAARAGQVEVVRCLLRNGALVDARAREEQTPLHIASRLGKTEIVQLLLQHMAHPDAATTNGYTPLHISAREGQVDVASVLLEAGAAHSLATKKGFTPLHVAAKYGSLDVAKLLLQRRAAADSAGKNGYTPLHIAAKKNQMQIASTLLNYGAETNIVTKQGVTPLHLASQEGHTDMVTLLLDKGANIHMSTKSGLTSLHLAAQEDKVNVADILTKHGADQDAHTKLGYTPLIVACHYGNVKMVNFLLKQGANVNAKTKNGYTPLHQAAQQGHTHIINVLLQHGAKPNATTANGNTALAIAKRLGYISVVDTLKVVTEEVTTTTTTITEKHKLNVPETMTEVLDVSDEEGDDTMTGDGGEYLRPEDLKELGDDSLPSSQFLDGMNYLRYSLEGGRSDSLRSFSSDRSHTLSHASYLRDSAVMDDSVVIPSHQVSTLAKEAERNSYRLSWGTENLDNVALSSSPIHSGFLVSFMVDARGGAMRGCRHNGLRIIIPPRKCTAPTRVTCRLVKRHRLATMPPMVEGEGLASRLIEVGPSGAQFLGPVIVEIPHFAALRGKERELVVLRSENGDSWKEHFCDYTEDELNEILNGMDEVLDSPEDLEKKRICRIITRDFPQYFAVVSRIKQDSNLIGPEGGVLSSTVVPQVQAVFPEGALTKRIRVGLQAQPMHSELVKKILGNKATFSPIVTLEPRRRKFHKPITMTIPVPKASSDVMLNGFGGDAPTLRLLCSITGGTTPAQWEDITGTTPLTFVNECVSFTTNVSARFWLIDCRQIQESVTFASQVYREIICVPYMAKFVVFAKSHDPIEARLRCFCMTDDKVDKTLEQQENFAEVARSRDVEVLEGKPIYVDCFGNLVPLTKSGQHHIFSFFAFKENRLPLFVKVRDTTQEPCGRLSFMKEPKSTRGLVHQAICNLNITLPIYTKESESDQEQEEEIDMTSEKNPQDEQERIEERLAYIADHLGFSWTELARELDFTEEQIHQIRIENPNSLQDQSHALLKYWLERDGKHATDTNLVECLTKINRMDIVHLMETNTEPLQERISHSYAEIEQTITLDHSEGFSVLQEELCTAQHKQKEEQAVSKESETCDHPPIVSEEDISVGYSTFQDGVPKTEGDSSATALFPQTHKEQVQQDFSGKMQDLPEESSLEYQQEYFVTTPGTETSETQKAMIVPSSPSKTPEEVSTPAEEEKLYLQTPTSSERGGSPIIQEPEEPSEHREESSPRKTSLVIVESADNQPETCERLDEDAAFEKGDDMPEIPPETVTEEEYIDEHGHTVVKKVTRKIIRRYVSSEGTEKEEIMVQGMPQEPVNIEEGDGYSKVIKRVVLKSDTEQSEDNNE

SEQ ID NO: 25976 - protein, 1245 aa, Homo sapiens
DFDVKTFCHNLRATKPPYECPVETCRKVYKSYSGIEYHLYHYDHDNPPPPQQTPLRKHKKKGRQSRPANKQSPSPSEVSQSPGREVMSYAQAQRMVEVDLHGRVHRISIFDNLDVVSEDEEAPEEAPENGSNKENTETPAATPKSGKHKNKEKRKDSNHHHHHNVSASTTPKLPEVVYRELEQDTPDAPPRPTSYYRYIEKSAEELDEEVEYDMDEEDYIWLDIMNERRKTEGVSPIPQEIFEYLMDRLEKESYFESHNKGDPNALVDEDAVCCICNDGECQNSNVILFCDMCNLAVHQECYGVPYIPEGQWLCRRCLQSPSRAVDCALCPNKGGAFKQTDDGRWAHVVCALWIPEVCFANTVFLEPIDSIEHIPPARWKLTCYICKQRGSGACIQCHKANCYTAFHVTCAQQAGLYMKMEPVRETGANGTSFSVRKTAYCDIHTPPGSARRLPALSHSEGEEDEDEEEDEGKGWSSEKVKKAKAKSRIKMKKARKILAEKRAAAPVVSVPCIPPHRLSKITNRLTIQRKSQFMQRLHSYWTLKRQSRNGVPLLRRLQTHLQSQRNCDQVGRDSEDKNWALKEQLKSWQRLRHDLERARLLVELIRKREKLKRETIKVQQIAMEMQLTPFLILLRKTLEQLQEKDTGNIFSEPVPLSEVPDYLDHIKKPMDFFTMKQNLEAYRYLNFDDFEEDFNLIVSNCLKYNAKDTIFYRAAVRLREQGGAVLRQARRQAEKMGIDFETGMHIPHSLAGDEATHHTEDAAEEERLVLLENQKHLPVEEQLKLLLERLDEVNASKQSVGRSRRAKMIKKEMTALRRKLAHQRETGRDGPERHGPSSRGSLTPHPAACDKDGQTDSAAEESSSQETSKGLGPNMSSTPAHEVGRRTSVLFSKKNPKTAGPPKRPGRPPKNRESQMTPSHGGSPVGPPQLPIMSSLRQRKRGRSPRPSSSSDSDSDKSTEDPPMDLPANGFSGGNQPVKKSFLVYRNDCSLPRSSSDSESSSSSSSSAASDRTSTTPSKQGRGKPSFSRGTFPEDSSEDTSGTENEAYSVGTGRGVGHSSKFPCPRPGMLGTQCQGLASPPAADPPPLPHSCEVVRKSLGRGAGWLSEDEDSPLDALDLVWAKCRGYPSYPALIIDPKMPREGMFHHGVPIPVPPLEVLKLGEQMTQEAREHLYLVLFFDNKRTWQWLPRTKLVPLGVNQDLDKEKMLEGRKSNIRKSVQIAYHRALQHRSKVQGEQSSETSDSD

SEQ ID NO: 25977 - protein, 3895 aa, Homo sapiens
MTTMLQKSDSNASFLRAARAGNLDKVVEYLKGGIDINTCNQNGLNALHLAAKEGHVGLVQELLGRGSSVDSATKKGNTALHIASLAGQAEVVKVLVKEGANINAQSQNGFTPLYMAAQENHIDVVKYLLENGANQSTATEDGFTPLAVALQQGHNQAVAILLENDTKGKVRLPALHIAARKDDTKSAALLLQNDHNADVQSKSGFTPLHIAAHYGNVNVATLLLNRGAAVDFTARNGITPLHVASKRGNTNMVKLLLDRGGQIDAKTRDGLTPLHCAARSGHDQVVELLLERGAPLLARTKNGLSPLHMAAQGDHVECVKHLLQHKAPVDDVTLDYLTALHVAAHCGHYRVTKLLLDKRANPNARALNGFTPLHIACKKNRIKVMELLVKYGASIQAITESGLTPIHVAAFMGHLNIVLLLLQNGASPDVTNIRGETALHMAARAGQVEVVRCLLRNGALVDARAREEQTPLHIASRLGKTEIVQLLLQHMAHPDAATTNGYTPLHISAREGQVDVASVLLEAGAAHSLATKKGFTPLHVAAKYGSLDVAKLLLQRRAAADSAGKNGLTPLHVAAHYDNQKVALLLLEKGASPHATAKNGYTPLHIAAKKNQMQIASTLLNYGAETNIVTKQGVTPLHLASQEGHTDMVTLLLDKGANIHMSTKSGLTSLHLAAQEDKVNVADILTKHGADQDAHTKLGYTPLIVACHYGNVKMVNFLLKQGANVNAKTKNGYTPLHQAAQQGHTHIINVLLQHGAKPNATTANGNTALAIAKRLGYISVVDTLKVVTEEVTTTTTTITEKHKLNVPETMTEVLDVSDEEGDDTMTGDGGEYLRPEDLKELGDDSLPSSQFLDGMNYLRYSLEGGRSDSLRSFSSDRSHTLSHASYLRDSAVMDDSVVIPSHQVSTLAKEAERNSYRLSWGTENLDNVALSSSPIHSGFLVSFMVDARGGAMRGCRHNGLRIIIPPRKCTAPTRVTCRLVKRHRLATMPPMVEGEGLASRLIEVGPSGAQFLGPVIVEIPHFAALRGKERELVVLRSENGDSWKEHFCDYTEDELNEILNGMDEVLDSPEDLEKKRICRIITRDFPQYFAVVSRIKQDSNLIGPEGGVLSSTVVPQVQAVFPEGALTKRIRVGLQAQPMHSELVKKILGNKATFSPIVTLEPRRRKFHKPITMTIPVPKASSDVMLNGFGGDAPTLRLLCSITGGTTPAQWEDITGTTPLTFVNECVSFTTNVSARFWLIDCRQIQESVTFASQVYREIICVPYMAKFVVFAKSHDPIEARLRCFCMTDDKVDKTLEQQENFAEVARSRDVEVLEGKPIYVDCFGNLVPLTKSGQHHIFSFFAFKENRLPLFVKVRDTTQEPCGRLSFMKEPKSTRGLVHQAICNLNITLPIYTKESESDQEQEEEIDMTSEKNDETESTETSVLKSHLVNEVPVLASPDLLSEVSEMKQDLIKMTAILTTDVSDKAGSIKVKELVKAAEEEPGEPFEIVERVKEDLEKVNEILRSGTCTRDESSVQSSRSERGLVEEEWVIVSDEEIEEARQKAPLEITEYPCVEVRIDKEIKGKVEKDSTGLVNYLTDDLNTCVPLPKEQLQTVQDKAGKKCEALAVGRSSEKEGKDIPPDETQSTQKQHKPSLGIKKPVRRKLKEKQKQKEEGLQASAEKAELKKGSSEESLGEDPGLAPEPLPTVKATSPLIEETPIGSIKDKVKALQKRVEDEQKGRSKLPIRVKGKEDVPKKTTHRPHPAASPSLKSERHAPGSPSPKTERHSTLSSSAKTERHPPVSPSSKTEKHSPVSPSAKTERHSPASSSSKTEKHSPVSPSTKTERHSPVSSTKTERHPPVSPSGKTDKRPPVSPSGRTEKHPPVSPGRTEKRLPVSPSGRTDKHQPVSTAGKTEKHLPVSPSGKTEKQPPVSPTSKTERIEETMSVRELMKAFQSGQDPSKHKTGLFEHKSAKQKQPQEKGKVRVEKEKGPILTQREAQKTENQTIKRGQRLPVTGTAESKRGVRVSSIGVKKEDAAGGKEKVLSHKIPEPVQSVPEEESHRESEVPKEKMADEQGDMDLQISPDRKTSTDFSEVIKQELEDNDKYQQFRLSEETEKAQLHLDQVLTSPFNTTFPLDYMKDEFLPALSLQSGALDGSSESLKNEGVAGSPCGSLMEGTPQISSEESYKHEGLAETPETSPESLSFSPKKSEEQTGETKESTKTETTTEIRSEKEHPTTKDITGGSEERGATVTEDSETSTESFQKEATLGSPKDTSPKRQDDCTGSCSVALAKETPTGLTEEAACDEGQRTFGSSAHKTQTDSEVQESTATSDETKALPLPEASVKTDTGTESKPQGVIRSPQGLELALPSRDSEVLSAVADDSLAVSHKDSLEASPVLEDNSSHKTPDSLEPSPLKESPCRDSLESSPVEPKMKAGIFPSHFPLPAAVAKTELLTEVASVRSRLLRDPDGSAEDDSLEQTSLMESSGKSPLSPDTPSSEEVSYEVTPKTTDVSTPKPAVIHECAEEDDSENGEKKRFTPEEEMFKMVTKIKMFDELEQEAKQKRDYKKEPKQEESSSSSDPDADCSVDVDEPKHTGSGEDESGVPVLVTSESRKVSSSSESEPELAQLKKGADSGLLPEPVIRVQPPSPLPSSMDSNSSPEEVQFQPVVSKQYTFKMNEDTQEEPGKSEEEKDSESHLAEDRHAVSTEAEDRSYDKLNRDTDQPKICDGHGCEAMSPSSSAAPVSSGLQSPTGDDVDEQPVIYKESLALQGTHEKDTEGEELDVSRAESPQADCPSESFSSSSSLPHCLVSEGKELDEDISATSSIQKTEVTKTDETFENLPKDCPSQDSSITTQTDRFSMDVPVSDLAENDEIYDPQITSPYENVPSQSFFSSEESKTQTDANHTTSFHSSEVYSVTITSPVEDVVVASSSSGTVLSKESNFEGQDIKMESQQESTLWEMQSDSVSSSFEPTMSATTTVVGEQISKVIITKTDVDSDSWSEIREDDEAFEARVKEEEQKIFGLMVDRQSQGTTPDTTPARTPTEEGTPTSEQNPFLFQEGKLFEMTRSGAIDMTKRSYADESFHFFQIGQESREETLSEDVKEGATGADPLPLETSAESLALSESKETVDDEADLLPDDVSEEVEEIPASDAQLNSQMGISASTETPTKEAVSVGTKDLPTVQTGDIPPLSGVKQISCPDSSEPAVQVQLDFSTLTRSVYSDRGDDSPDSSPEEQKSVIEIPTAPMENVPFTESKSKIPVRTMPTSTPAPPSAEYESSVSEDFLSSVDEENKADEAKPKSKLPVKVPLQRVEQQLSDLDTSVQKTVAPQGQDMASIAPDNRSKSESDASSLDSKTKCPVKTRSYTETETESRERAEELELESEEGATRPKILTSRLPVKSRSTTSSCRGGTSPTKESKEHFFDLYRNSIEFFEEISDEASKLVDRLTQSEREQEIVSDDESSSALEVSVIENLPPVETEHSVPEDIFDTRPIWDESIETLIERIPDENGHDHAEDPQDEQERIEERLAYIADHLGFSWTELARELDFTEEQIHQIRIENPNSLQDQSHALLKYWLERDGKHATDTNLVECLTKINRMDIVHLMETNTEPLQERISHSYAEIEQTITLDHSEGFSVLQEELCTAQHKQKEEQAVSKESETCDHPPIVSEEDISVGYSTFQDGVPKTEGDSSATALFPQTHKEQVQQDFSGKMQDLPEESSLEYQQEYFVTTPGTETSETQKAMIVPSSPSKTPEEVSTPAEEEKLYLQTPTSSERGGSPIIQEPEEPSEHREESSPRKTSLVIVESADNQPETCERLDEDAAFEKGDDMPEIPPETVTEEEYIDEHGHTVVKKVTRKIIRRYVSSEGTEKEEIMVQGMPQEPVNIEEGDGYSKVIKRVVLKSDTEQSEDNNE

SEQ ID NO: 25978 - protein, 1879 aa, Homo sapiens
MMNEDAAQKSDSGEKFNGSSQRRKRPKKSDSNASFLRAARAGNLDKVVEYLKGGIDINTCNQNGLNALHLAAKEGHVGLVQELLGRGSSVDSATKKGNTALHIASLAGQAEVVKVLVKEGANINAQSQNGFTPLYMAAQENHIDVVKYLLENGANQSTATEDGFTPLAVALQQGHNQAVAILLENDTKGKVRLPALHIAARKDDTKSAALLLQNDHNADVQSKMMVNRTTESGFTPLHIAAHYGNVNVATLLLNRGAAVDFTARNGITPLHVASKRGNTNMVKLLLDRGGQIDAKTRDGLTPLHCAARSGHDQVVELLLERGAPLLARTKNGLSPLHMAAQGDHVECVKHLLQHKAPVDDVTLDYLTALHVAAHCGHYRVTKLLLDKRANPNARALNGFTPLHIACKKNRIKVMELLVKYGASIQAITESGLTPIHVAAFMGHLNIVLLLLQNGASPDVTNIRGETALHMAARAGQVEVVRCLLRNGALVDARAREEQTPLHIASRLGKTEIVQLLLQHMAHPDAATTNGYTPLHISAREGQVDVASVLLEAGAAHSLATKKGFTPLHVAAKYGSLDVAKLLLQRRAAADSAGKNGYTPLHIAAKKNQMQIASTLLNYGAETNIVTKQGVTPLHLASQEGHTDMVTLLLDKGANIHMSTKSGLTSLHLAAQEDKVNVADILTKHGADQDAHTKLGYTPLIVACHYGNVKMVNFLLKQGANVNAKTKNGYTPLHQAAQQGHTHIINVLLQHGAKPNATTANGNTALAIAKRLGYISVVDTLKVVTEEVTTTTTTITEKHKLNVPETMTEVLDVSDEEGDDTMTGDGGEYLRPEDLKELGDDSLPSSQFLDGMNYLRYSLEGGRSDSLRSFSSDRSHTLSHASYLRDSAVMDDSVVIPSHQVSTLAKEAERNSYRLSWGTENLDNVALSSSPIHSGRASPCLERDNSSFLVSFMVDARGGAMRGCRHNGLRIIIPPRKCTAPTRVTCRLVKRHRLATMPPMVEGEGLASRLIEVGPSGAQFLGPVIVEIPHFAALRGKERELVVLRSENGDSWKEHFCDYTEDELNEILNGMDEVLDSPEDLEKKRICRIITRDFPQYFAVVSRIKQDSNLIGPEGGVLSSTVVPQVQAVFPEGALTKRIRVGLQAQPMHSELVKKILGNKATFSPIVTLEPRRRKFHKPITMTIPVPKASSDVMLNGFGGDAPTLRLLCSITGGTTPAQWEDITGTTPLTFVNECVSFTTNVSARFWLIDCRQIQESVTFASQVYREIICVPYMAKFVVFAKSHDPIEARLRCFCMTDDKVDKTLEQQENFAEVARSRDVEVLEGKPIYVDCFGNLVPLTKSGQHHIFSFFAFKENRLPLFVKVRDTTQEPCGRLSFMKEPKSTRGLVHQAICNLNITLPIYTKESESDQEQEEEIDMTSEKNPQDEQERIEERLAYIADHLGFSWTELARELDFTEEQIHQIRIENPNSLQDQSHALLKYWLERDGKHATDTNLVECLTKINRMDIVHLMETNTEPLQERISHSYAEIEQTITLDHSEGFSVLQEELCTAQHKQKEEQAVSKESETCDHPPIVSEEDISVGYSTFQDGVPKTEGDSSATALFPQTHKEQVQQDFSGKMQDLPEESSLEYQQEYFVTTPGTETSETQKAMIVPSSPSKTPEEVSTPAEEEKLYLQTPTSSERGGSPIIQEPEEPSEHREESSPRKTSLVIVESADNQPETCERLDEDAAFEKGDDMPEIPPETVTEEEYIDEHGHTVVKKVTRKIIRRYVSSEGTEKEEIMVQGMPQEPVNIEEGDGYSKVIKRVVLKSDTEQSEVTLCEPSILSSTSQFQAEPVEGRRVSKVVKTTVVLGERMEKHLGDSSLATDLPSAKDDFEEDNNE

SEQ ID NO: 25979 - protein, 1319 aa, Homo sapiens
MAATWSLLCLSHRTKSSGWPPPSGTWGLSQVPPYGWEMTANRDGRDYFINHMTQAIPFDDPRLESCQIIPPAPRKVEMRRDPVLGFGFVAGSEKPVVVRSVTPGGPSEGKLIPGDQIVMINDEPVSAAPRERVIDLVRSCKESILLTVIQPYPSPKSAFISAAKKARLKSNPVKVRFSEEVIINGQVSETVKDNSLLFMPNVLKVYLENGQTKSFRFDCSTSIKDVILTLQEKLSIKGIEHFSLMLEQRTEGAGTKLLLLHEQETLTQVTQRPSSHKMRCLFRISFVPKDPIDLLRRDPVAFEYLYVQSCNDVVQERFGPELKYDIALRLAALQMYIATVTTKQTQKISLKYIEKEWGLETFLPSAVLQSMKEKNIKKALSHLVKANQNLVPPGKKLSALQAKVHYLKFLSDLRLYGGRVFKATLVQAEKRSEVTLLVGPRYGISHVINTKTNLVALLADFSHVNRIEMFSEEESLVRVELHVLDVKPITLLMESSDAMNLACLTAGYYRLLVDSRRSIFNMANKKNTATQETGPENKGKHNLLGPDWNCIPQMTTFIGEGEQEAQITYIDSKQKTVEITDSTMCPKEHRHLYIDNAYSSDGLNQQLSQPGEAPCEADYRSLAQRSLLTLSGPETLKKAQESPRGAKVSFIFGDFALDDGISPPTLGYETLLDEGPEMLEKQRNLYIGSANDMKGLDLTPEAEGIQFVENSVYANIGDVKSFQAAEGIEEPLLHDICYAENTDDAEDEDEVSCEEDLVVGEMNQPAILNLSGSSDDIIDLTSLPPPEGDDNEDDFLLRSLNMAIAAPPPGFRDSSDEEDSQSQAASFPEDKEKGSSLQNDEIPVSLIDAVPTSAEGKCEKGLDNAVVSTLGALEALSVSEEQQTSDNSGVAILRAYSPESSSDSGNETNSSEMTESSELATAQKQSENLSRMFLATHEGYHPLAEEQTEFPASKTPAGGLPPKSSHALAARPATDLPPKVVPSKQLLHSDHMEMEPETMETKSVTDYFSKLHMGSVAYSCTSKRKSKLADGEGKAPPNGNTTGKKQQGTKTAEMEEEASGKFGTVSSRDSQHLSTFNLERTAFRKDSQRWYVATEGGMAEKSGLEAATGKTFPRASGLGAREAEGKEEGAPDGETSDGSGLGQGDRFLTDVTCASSAKDLDNPEDADSSTCDHPSKLPEADESVARLCDYHLAKRMSSLQSEGHFSLQSSQGSSVDAGCGTGSSGSACATPVESPLCPSLGKHLIPDASGKGVNYIPSEERAPGLPNHGATFKELHPQTEGMCPRMTVPALHTAINTEPLFGTLRDGCHRLPKIKETTV

SEQ ID NO: 25980 - protein, 1739 aa, Homo sapiens
MTTMLQKSDSNASFLRAARAGNLDKVVEYLKGGIDINTCNQNGLNALHLAAKEGHVGLVQELLGRGSSVDSATKKGNTALHIASLAGQAEVVKVLVKEGANINAQSQNGFTPLYMAAQENHIDVVKYLLENGANQSTATEDGFTPLAVALQQGHNQAVAILLENDTKGKVRLPALHIAARKDDTKSAALLLQNDHNADVQSKSGFTPLHIAAHYGNVNVATLLLNRGAAVDFTARNGITPLHVASKRGNTNMVKLLLDRGGQIDAKTRDGLTPLHCAARSGHDQVVELLLERGAPLLARTKRGETALHMAARAGQVEVVRCLLRNGALVDARAREEQTPLHIASRLGKTEIVQLLLQHMAHPDAATTNGYTPLHISAREGQVDVASVLLEAGAAHSLATKKGFTPLHVAAKYGSLDVAKLLLQRRAAADSAGKNGLTPLHVAAHYDNQKVALLLLEKGASPHATAKNGYTPLHIAAKKNQMQIASTLLNYGAETNIVTKQGVTPLHLASQEGHTDMVTLLLDKGANIHMSTKSGLTSLHLAAQEDKVNVADILTKHGADQDAHTKLGYTPLIVACHYGNVKMVNFLLKQGANVNAKTKNGYTPLHQAAQQGHTHIINVLLQHGAKPNATTANGNTALAIAKRLGYISVVDTLKVVTEEVTTTTTTITEKHKLNVPETMTEVLDVSDEEGDDTMTGDGGEYLRPEDLKELGDDSLPSSQFLDGMNYLRYSLEGGRSDSLRSFSSDRSHTLSHASYLRDSAVMDDSVVIPSHQVSTLAKEAERNSYRLSWGTENLDNVALSSSPIHSGFLVSFMVDARGGAMRGCRHNGLRIIIPPRKCTAPTRVTCRLVKRHRLATMPPMVEGEGLASRLIEVGPSGAQFLGPVIVEIPHFAALRGKERELVVLRSENGDSWKEHFCDYTEDELNEILNGMDEVLDSPEDLEKKRICRIITRDFPQYFAVVSRIKQDSNLIGPEGGVLSSTVVPQVQAVFPEGALTKRIRVGLQAQPMHSELVKKILGNKATFSPIVTLEPRRRKFHKPITMTIPVPKASSDVMLNGFGGDAPTLRLLCSITGGTTPAQWEDITGTTPLTFVNECVSFTTNVSARFWLIDCRQIQESVTFASQVYREIICVPYMAKFVVFAKSHDPIEARLRCFCMTDDKVDKTLEQQENFAEVARSRDVEVLEGKPIYVDCFGNLVPLTKSGQHHIFSFFAFKENRLPLFVKVRDTTQEPCGRLSFMKEPKSTRGLVHQAICNLNITLPIYTKESESDQEQEEEIDMTSEKNPQDEQERIEERLAYIADHLGFSWTELARELDFTEEQIHQIRIENPNSLQDQSHALLKYWLERDGKHATDTNLVECLTKINRMDIVHLMETNTEPLQERISHSYAEIEQTITLDHSEGFSVLQEELCTAQHKQKEEQAVSKESETCDHPPIVSEEDISVGYSTFQDGVPKTEGDSSATALFPQTHKEQVQQDFSGKMQDLPEESSLEYQQEYFVTTPGTETSETQKAMIVPSSPSKTPEEVSTPAEEEKLYLQTPTSSERGGSPIIQEPEEPSEHREESSPRKTSLVIVESADNQPETCERLDEDAAFEKGDDMPEIPPETVTEEEYIDEHGHTVVKKVTRKIIRRYVSSEGTEKEEIMVQGMPQEPVNIEEGDGYSKVIKRVVLKSDTEQSEVTLCEPSILSSTSQFQAEPVEGRRVSKVVKTTVVLGERMEKHLGDSSLATDLPSAKDDFEEDNNE

SEQ ID NO: 25981 - protein, 289 aa, Homo sapiens
MDVGFSGLPDVSQSHSKTLWGARGRGPSIRRQREFMPEEKKDTVYWEKRRKNNEAAKRSREKRRLNDAAIEGRLAALMEENALLKGELKALKLRFGLLPLTGGPRALPLQALLLEAPWTGDPRPGAEALSSLSGSHSCLLRPRSLDAGIPGCRGCLLAPRWTGLATSPRSPQESASPTLNRIDMALQTALPPALFSCHLLEGHVGSRPELRPCWGLWSPVPSGCRASGPSDVLLTPTADPMGLSPGVTCPAPGNSPEGLGQPSLPHKLRIKSRASGRVPRGWEGGQAPL

SEQ ID NO: 25982 - protein, 536 aa, Homo sapiens
MLCASFLGLGLSVAIVGPTFQDLATNVNRNISSLSFIFVGRALGYLSGSVIGGFLVDVMNYFLLLGISMSATTVGLYLVPFCKTAILLTVMMSIFGVSIGILDTESWLFRFLDVCFASVTYISGNVLILAIWGDKGAPHMQALHFSFALGAFLAPLLAKLALGPTASAENHTESDFHPALNQSSDADSEALFGVPNDKNLLWAYAVIGTYMFLVSVIFFCLFLKNSSKQEKARASAETFRRAKYHNALLCLLFLFFFFYVGAEVTYGSYVFSFATTHAGMKESEAAGLNSIFWGTFAACRGLAIFFATCLQPGTMIVLSNIGSLTSSLFLVLFDKNPICLWIATSVYGASMATTFPSGVSWIEQYTTIHGKSAAFFVIGASLGEMAIPAVIGILQGKYPDLPVVLYTSLGASIATGILFPVLYKLATSPLDRQRKEDRKSEDQKALLSSSGLNEYEEENEEEDAEKWNEMDFEMIETNDTMRHSIIETSRSSLTEPTAEVYNQYPSNALVFESSPFNTGSAHVKHLPETRTKGTNV

SEQ ID NO: 25983 - protein, 3837 aa, Homo sapiens
MARYQAAVSRGDCRSFSANMMEESEMCAVPGGLAKVKKQFEDEITSSRNTFAQYQYQHQNRSEQEAIHSSQVGTSRSSQEMARNEQEGSKVQKIDVHGTEMVSHLEKHTEEVNQASQFHQYVQETVIDTPEDEEIPKVSTKLLKEQFEKSAQEKILYSDKEMTTPAKQIKTESEYEETFKPSSVVSTSSTSCVSTSQRKETSTTRYSDHSVTSSTLAQINATSSGMTEEFPPPPPDVLQTSVDVTAFSQSPELPSPPRRLPVPKDVYSKQRNLYELNRLYKHIHPELRKNLEKDYISEVSEIVSSQMNSGSSVSADVQQARYVFENTNDSSQKDLNSEREYLEWDEILKGEVQSIRWIFENQPLDSINNGSPDEGDISRGIADQEIIAGGDVKYTTWMFETQPIDTLGAYSSDTVENAEKIPELARGDVCTARWMFETRPLDSMNKMHQSQEESAVTISKDITGGDVKTVRYMFETQHLDQLGQLHSVDEVHLLQLRSELKEIKGNVKRSIKCFETQPLYVIRDGSGQMLEIKTVHREDVEKGDVRTARWMFETQPLDTINKDITEIKVVRGISMEENVKGGVSKAKWLFETQPLEKIKESEEVIIEKEKIIGTDVSRKCWMFETQPLDILKEVPDADSLQREEIIGGDVQTTKHLFETLPIEALKDSPDIGKLQKITASEEEKGDVRHQKWIFETQPLEDIRKDKKEYTRTVKLEEVDRGDVKNYTHIFESNNLIKFDASHKIEVEGVTRGAVELNKSLFETTPLYAIQDPLGKYHQVKTVQQEEIVRGDVRSCRWLFETRPIDQFDESIHKFQIIRGISAQEIQTGNVKSAKWLFETQPLDSIKYFSDVEETESKTEQTRDIVKGDVKTCKWLFETQPMESLYEKVSLMTSSEEIHKGDVKTCTWLFETQPLDTIKDDSETAVKLQTVKQEEIQGGDVRTACFLFETENLDSIQGEEVKEIKPVEMDIQAGDVSSMRYKFENQSLDSISSSSEEVLKKIKTLKTEDIQKGNVLNCRWLFENQPIDKIKESQEGDECVKTVTDIQGGDVRKGCFIFETFSLDEIKEESDYISTKKTITEEVIQGDVKSYRMLFETQPLYAIQDREGSYHEVTTVKKEEVIHGDVRGTRWLFETKPLDSINKSETVYVIKSVTQEDIQKGDVSSVRYRFETQPLDQISEESHNIMPSIDHIQGGNVKTSRQFFESENFDKNNYIRTVSVNEIQKGNVKTSTWLFETHTMDELRGEGLEYENIKTVTQEDVQKGDVKQAVWLFENRTFDSIMEAHKGITKMTKEEIPPSDVKTTTWLFETTPLHEFNETRVEKIEIIGKSIKETLEDLYSQKVIQAPGIIIEADEIGDVRMAKYKLMNQASPEIQKEEIIRADLRNIMVNLLSKRDCTEREILISEEEKGNVNLTKTQLLNRSTEFHAEKEEIVKGDVQQAIKNLFSEERSVKKGILIQEDEKGDINMTIYCLLHENDGDTIEREEVIGGDVKRTIHNLLSSTSNNKISERAKIDASERGNVQFFTTCIEAGALDYLKQLHTESNETLTAKKQEGEKEIIGGDVEGTKLLLKKRQSLVERTVSETDIIPGDVHNTVKVFMTEPQSTFGKIPKEEIIKGDLTSTLNSLSQAVNQKTVTKTEEIIKGNMLATLKSLKESSHRWKESKQPDAIPGDIEKAIECLEKATNTKTEILKKELLKDDLETSLRSLKEAQRSFKEVHKEGVIKKDAKAVMAGSSGEQKTDIHQVAVQRNKNSLLQPKPGPFEPAAKWQGGADTLSQTMGKSCHGNLVEERTEVNLPKAPKGTVKIVIDREQNNDALEKSLRRLSNSHHKSNVLESGDKTGVWTDTTGEQHLRDEYMSRQLTSTVSVKNNLTTKESDRAVRELKKDDVFNSIQSAGKTVGKQQTYELRNDHQKMEGFHIKSPKKTKNIKILTDTQSSKPSPTQHPVSMPVGGTYDLSGDFQKQTLLKQETKYSNKDIKKKNINLQPMWQLLPVEQDTSNVTEMKVSEKSHNTFKATNKKRETDVHLKSQDFLMKTNTSTGLKMAMERSLNPINFNPENNVKESECPLPPPSPPPPPPSNASSEIEFPLPPPPPLMMFPEKNGFLPSLSTEKIKAEFESFPGLPLPPPPVDEKSERESSSMFLPPPPPPTPSQKPAHLLSSSAPEKHSGDFMQQYSQKEASNSQNSQAKIITGKTGVLPPPTLPKPKLPKHIKDNKNDFSPKVELATSLSDMECKITTSKDQKKVMVMTSSEHTETKQNVISKSLDERKQLSIDSANCLSHTVPGTSAPRKKQIAPLIKSHSFPESSGQQNPKPYMRKFKTPLMIAEEKYRQQKEEIEKQKQESSYYNIVKTQSQNQHITEVEKEMPLQKTNEEVSLSGIDSECTVVQPSPGSQSNARILGVCSDNQLSTTSPETVAAKRLHHVLAASEDKDKMKKEVLQSSRDIMQSKSACEIKQSHQECSTQQTQQKKYLEQLHLPQSKPISPNFKVKTIKLPTLDHTLNETDHSYESHKQQSEIDVQTFTKKQYLKTKKTEASTECSHKQSLAERHYQLPKKEKRVTVQLPTESIQKNQEDKLKMVPRKQREFSGSDRGKLPGSEEKNQGPSMIGRKEERLITERKHEHLKNKSAPKVVKQKVIDAHLDSQTQNFQQTQIQTAESKAEHKKLPQPYNSLQEEKCLEVKGIQEKQVFSNTKDSKQEITQNKSFFSSVKESQRDDGKGALNIVEFLRKREELQQILSRVKQFEAEPNKSGLKTFQTLLNTIPGWLISEDKREYAVHIAMENNLEKVKEEITHIKTQAEDMLVSYENIIQTAMMSSKTGKPGNKPTSLDETSSKVSNVHVSNNKNSEQKENKIAKEKTVQHQVAAHHEATVRSHVKTHQEIKLDDSNIPPPSLKTRPPSPTFITIESTARRTENPTKNELSQSPKKDSYVEPPPRRPMSQKSEIHRANTSPSPPRSRSEQLVRLKDTTAKLSKGAIPCPAATPVPIVEKRSEIIMSPATLRRQIKIETRGRDSPPTITIPVNINHAASGSFRESVDAQEEIRKVEKRATYVHKDGLNSTDHMVPDTESYDAVEIIRKVAVPPRLSEHTQRYEAANRTVQMAENFVNDPENEINRWFREFEHGPVSEAKSNRRVYAKGETNHNIQQESRTFCKEEFGLTSLGNTSFTDFSCKHPRELREKIPVKQPRICSETRSLSEHFSGMDAFESQIVESKMKTSSSHSSEAGKSGCDFKHAPPTYEDVIAGHILDISDSPKEVRKNFQKTWQESGRVFKGLGYATADASATEMRTTFQEESAFISDKEICILCQKTVYPMECLVADKQNFHKSCFRCHHCNSKLSLGNYASLHGQIYCKPHFKQLFKSKGNYDEGFGHKQHKDRWNCKNQSRSVDFIPNEEPNMCKNIAENTLVPGDRNEHLDAGNSEGQRNDLRKLGERGKLKVIWPPSKEIPKKTLPFEEELKMSKPKWPPEMTTLLSPEFKSESLLEDVRTPENKGQRQDHFPFLQPYLQSTHVCQKEDVIGIKEMKMPEGRKDEKKEGRKNVQDRPSEAEDTKSNRKSAMDLNDNNNVIVQSAEKEKNEKTNQTNGAEVLQVTNTDDEMMPENHKENLNKNNNNNYVAVSYLNNCRQKTSILEFLDLLPLSSEANDTANEYEIEKLENTSRISELLGIFESEKTYSRNVLAMALKKQTDRAAAGSPVQPAPKPSLSRGLMVKGGSSIISPDTNLLNIKGSHSKSKNLHFFFSNTVKITAFSKKNENIFNCDLIDSVDQIKNMPCLDLREFGKDVKPWHVETTEAARNNENTGFDALSHECTAKPLFPRVEVQSEQLTVEEQIKRNRCYSDTE

SEQ ID NO: 25984 - protein, 1005 aa, Homo sapiens
MNGNTALAIAKRLGYISVVDTLKVVTEEVTTTTTTITEKHKLNVPETMTEVLDVSDEEGDDTMTGDGGEYLRPEDLKELGDDSLPSSQFLDGMNYLRYSLEGGRSDSLRSFSSDRSHTLSHASYLRDSAVMDDSVVIPSHQVSTLAKEAERNSYRLSWGTENLDNVALSSSPIHSGRASPCLERDNSSFLVSFMVDARGGAMRGCRHNGLRIIIPPRKCTAPTRVTCRLVKRHRLATMPPMVEGEGLASRLIEVGPSGAQFLGPVIVEIPHFAALRGKERELVVLRSENGDSWKEHFCDYTEDELNEILNGMDEVLDSPEDLEKKRICRIITRDFPQYFAVVSRIKQDSNLIGPEGGVLSSTVVPQVQAVFPEGALTKRIRVGLQAQPMHSELVKKILGNKATFSPIVTLEPRRRKFHKPITMTIPVPKASSDVMLNGFGGDAPTLRLLCSITGGTTPAQWEDITGTTPLTFVNECVSFTTNVSARFWLIDCRQIQESVTFASQVYREIICVPYMAKFVVFAKSHDPIEARLRCFCMTDDKVDKTLEQQENFAEVARSRDVEVLEGKPIYVDCFGNLVPLTKSGQHHIFSFFAFKENRLPLFVKVRDTTQEPCGRLSFMKEPKSTRGLVHQAICNLNITLPIYTKESESDQEQEEEIDMTSEKNPQDEQERIEERLAYIADHLGFSWTELARELDFTEEQIHQIRIENPNSLQDQSHALLKYWLERDGKHATDTNLVECLTKINRMDIVHLMETNTEPLQERISHSYAEIEQTITLDHSEGFSVLQEELCTAQHKQKEEQAVSKESETCDHPPIVSEEDISVGYSTFQDGVPKTEGDSSATALFPQTHKEQVQQDFSGKMQDLPEESSLEYQQEYFVTTPGTETSETQKAMIVPSSPSKTPEEVSTPAEEEKLYLQTPTSSERGGSPIIQEPEEPSEHREESSPRKTSLVIVESADNQPETCERLDEDAAFEKGDDMPEIPPETVTEEEYIDEHGHTVVKKDNNE

SEQ ID NO: 25985 - protein, 3995 aa, Homo sapiens
MTTMLQKSDSNASFLRAARAGNLDKVVEYLKGGIDINTCNQNGLNALHLAAKEGHVGLVQELLGRGSSVDSATKKGNTALHIASLAGQAEVVKVLVKEGANINAQSQNGFTPLYMAAQENHIDVVKYLLENGANQSTATEDGFTPLAVALQQGHNQAVAILLENDTKGKVRLPALHIAARKDDTKSAALLLQNDHNADVQSKMMVNRTTESGFTPLHIAAHYGNVNVATLLLNRGAAVDFTARNGITPLHVASKRGNTNMVKLLLDRGGQIDAKTRDGLTPLHCAARSGHDQVVELLLERGAPLLARTKNGLSPLHMAAQGDHVECVKHLLQHKAPVDDVTLDYLTALHVAAHCGHYRVTKLLLDKRANPNARALNGFTPLHIACKKNRIKVMELLVKYGASIQAITESGLTPIHVAAFMGHLNIVLLLLQNGASPDVTNIRGETALHMAARAGQVEVVRCLLRNGALVDARAREEQTPLHIASRLGKTEIVQLLLQHMAHPDAATTNGYTPLHISAREGQVDVASVLLEAGAAHSLATKKGFTPLHVAAKYGSLDVAKLLLQRRAAADSAGKNGLTPLHVAAHYDNQKVALLLLEKGASPHATAKNGYTPLHIAAKKNQMQIASTLLNYGAETNIVTKQGVTPLHLASQEGHTDMVTLLLDKGANIHMSTKSGLTSLHLAAQEDKVNVADILTKHGADQDAHTKLGYTPLIVACHYGNVKMVNFLLKQGANVNAKTKNGYTPLHQAAQQGHTHIINVLLQHGAKPNATTANGNTALAIAKRLGYISVVDTLKVVTEEVTTTTTTITEKHKLNVPETMTEVLDVSDEEGDDTMTGDGGEYLRPEDLKELGDDSLPSSQFLDGMNYLRYSLEGGRSDSLRSFSSDRSHTLSHASYLRDSAVMDDSVVIPSHQVSTLAKEAERNSYRLSWGTENLDNVALSSSPIHSGFLVSFMVDARGGAMRGCRHNGLRIIIPPRKCTAPTRVTCRLVKRHRLATMPPMVEGEGLASRLIEVGPSGAQFLGPVIVEIPHFAALRGKERELVVLRSENGDSWKEHFCDYTEDELNEILNGMDEVLDSPEDLEKKRICRIITRDFPQYFAVVSRIKQDSNLIGPEGGVLSSTVVPQVQAVFPEGALTKRIRVGLQAQPMHSELVKKILGNKATFSPIVTLEPRRRKFHKPITMTIPVPKASSDVMLNGFGGDAPTLRLLCSITGGTTPAQWEDITGTTPLTFVNECVSFTTNVSARFWLIDCRQIQESVTFASQVYREIICVPYMAKFVVFAKSHDPIEARLRCFCMTDDKVDKTLEQQENFAEVARSRDVEVLEGKPIYVDCFGNLVPLTKSGQHHIFSFFAFKENRLPLFVKVRDTTQEPCGRLSFMKEPKSTRGLVHQAICNLNITLPIYTKESESDQEQEEEIDMTSEKNDETESTETSVLKSHLVNEVPVLASPDLLSEVSEMKQDLIKMTAILTTDVSDKAGSIKVKELVKAAEEEPGEPFEIVERVKEDLEKVNEILRSGTCTRDESSVQSSRSERGLVEEEWVIVSDEEIEEARQKAPLEITEYPCVEVRIDKEIKGKVEKDSTGLVNYLTDDLNTCVPLPKEQLQTVQDKAGKKCEALAVGRSSEKEGKDIPPDETQSTQKQHKPSLGIKKPVRRKLKEKQKQKEEGLQASAEKAELKKGSSEESLGEDPGLAPEPLPTVKATSPLIEETPIGSIKDKVKALQKRVEDEQKGRSKLPIRVKGKEDVPKKTTHRPHPAASPSLKSERHAPGSPSPKTERHSTLSSSAKTERHPPVSPSSKTEKHSPVSPSAKTERHSPASSSSKTEKHSPVSPSTKTERHSPVSSTKTERHPPVSPSGKTDKRPPVSPSGRTEKHPPVSPGRTEKRLPVSPSGRTDKHQPVSTAGKTEKHLPVSPSGKTEKQPPVSPTSKTERIEETMSVRELMKAFQSGQDPSKHKTGLFEHKSAKQKQPQEKGKVRVEKEKGPILTQREAQKTENQTIKRGQRLPVTGTAESKRGVRVSSIGVKKEDAAGGKEKVLSHKIPEPVQSVPEEESHRESEVPKEKMADEQGDMDLQISPDRKTSTDFSEVIKQELEDNDKYQQFRLSEETEKAQLHLDQVLTSPFNTTFPLDYMKDEFLPALSLQSGALDGSSESLKNEGVAGSPCGSLMEGTPQISSEESYKHEGLAETPETSPESLSFSPKKSEEQTGETKESTKTETTTEIRSEKEHPTTKDITGGSEERGATVTEDSETSTESFQKEATLGSPKDTSPKRQDDCTGSCSVALAKETPTGLTEEAACDEGQRTFGSSAHKTQTDSEVQESTATSDETKALPLPEASVKTDTGTESKPQGVIRSPQGLELALPSRDSEVLSAVADDSLAVSHKDSLEASPVLEDNSSHKTPDSLEPSPLKESPCRDSLESSPVEPKMKAGIFPSHFPLPAAVAKTELLTEVASVRSRLLRDPDGSAEDDSLEQTSLMESSGKSPLSPDTPSSEEVSYEVTPKTTDVSTPKPAVIHECAEEDDSENGEKKRFTPEEEMFKMVTKIKMFDELEQEAKQKRDYKKEPKQEESSSSSDPDADCSVDVDEPKHTGSGEDESGVPVLVTSESRKVSSSSESEPELAQLKKGADSGLLPEPVIRVQPPSPLPSSMDSNSSPEEVQFQPVVSKQYTFKMNEDTQEEPGKSEEEKDSESHLAEDRHAVSTEAEDRSYDKLNRDTDQPKICDGHGCEAMSPSSSAAPVSSGLQSPTGDDVDEQPVIYKESLALQGTHEKDTEGEELDVSRAESPQADCPSESFSSSSSLPHCLVSEGKELDEDISATSSIQKTEVTKTDETFENLPKDCPSQDSSITTQTDRFSMDVPVSDLAENDEIYDPQITSPYENVPSQSFFSSEESKTQTDANHTTSFHSSEVYSVTITSPVEDVVVASSSSGTVLSKESNFEGQDIKMESQQESTLWEMQSDSVSSSFEPTMSATTTVVGEQISKVIITKTDVDSDSWSEIREDDEAFEARVKEEEQKIFGLMVDRQSQGTTPDTTPARTPTEEGTPTSEQNPFLFQEGKLFEMTRSGAIDMTKRSYADESFHFFQIGQESREETLSEDVKEGATGADPLPLETSAESLALSESKETVDDEADLLPDDVSEEVEEIPASDAQLNSQMGISASTETPTKEAVSVGTKDLPTVQTGDIPPLSGVKQISCPDSSEPAVQVQLDFSTLTRSVYSDRGDDSPDSSPEEQKSVIEIPTAPMENVPFTESKSKIPVRTMPTSTPAPPSAEYESSVSEDFLSSVDEENKADEAKPKSKLPVKVPLQRVEQQLSDLDTSVQKTVAPQGQDMASIAPDNRSKSESDASSLDSKTKCPVKTRSYTETETESRERAEELELESEEGATRPKILTSRLPVKSRSTTSSCRGGTSPTKESKEHFFDLYRNSIEFFEEISDEASKLVDRLTQSEREQEIVSDDESSSALEVSVIENLPPVETEHSVPEDIFDTRPIWDESIETLIERIPDENGHDHAEDPQDEQERIEERLAYIADHLGFSWTELARELDFTEEQIHQIRIENPNSLQDQSHALLKYWLERDGKHATDTNLVECLTKINRMDIVHLMETNTEPLQERISHSYAEIEQTITLDHSEGFSVLQEELCTAQHKQKEEQAVSKESETCDHPPIVSEEDISVGYSTFQDGVPKTEGDSSATALFPQTHKEQVQQDFSGKMQDLPEESSLEYQQEYFVTTPGTETSETQKAMIVPSSPSKTPEEVSTPAEEEKLYLQTPTSSERGGSPIIQEPEEPSEHREESSPRKTSLVIVESADNQPETCERLDEDAAFEKELTEELGELEASSDEEAMVTTRVVRRRVIIQGDDMPEIPPETVTEEEYIDEHGHTVVKKVTRKIIRRYVSSEGTEKEEIMVQGMPQEPVNIEEGDGYSKVIKRVVLKSDTEQSEVTLCEPSILSSTSQFQAEPVEGRRVSKVVKTTVVLGERMEKHLGDSSLATDLPSAKDDFEEDNNE

SEQ ID NO: 25986 - protein, 736 aa, Homo sapiens
MSKLGISFSEDQQKEKDQLGKAPKKEEAAALRKDISGSDKRSLEKNQINFWRNQMTKRWEPSLNWKTTVNYKGKGSAKEIQEDKHTGKLEKPRPSVSHGRAQLLRKSAEKIEETVSDSSSESEEDEEPPDHRQEASADLPSEYWQIQKLVKYLKGGNQTATVIALCSMRDFSLAQETCQLAIRDVGGLEVLINLLETDEVKCKIGSLKILKEISHNPQIRQNIVDLGGLPIMVNILDSPHKSLKCLAAETIANVAKFKRARRVVRQHGGITKLVALLDCAHDSTKPAQSSLYEARDVEVARCGALALWSCSKSHTNKEAIRKAGGIPLLARLLKTSHENMLIPVVGTLQECASEENYRAAIKAERIIENLVKNLNSENEQLQEHCAMAIYQCAEDKETRDLVRLHGGLKPLASLLNNTDNKERLAAVTGAIWKCSISKENVTKFREYKAIETLVGLLTDQPEEVLVNVVGALGECCQERENRVIVRKCGGIQPLVNLLVGINQALLVNVTKAVGACAVEPESMMIIDRLDGVRLLWSLLKNPHPDVKASAAWALCPCIKNAKDAGEMVRSFVGGLELIVNLLKSDNKEVLASVCAAITNIAKDQENLAVITDHGVVPLLSKLANTNNNKLRHHLAEAISRCCMWGRNRVAFGEHKAVAPLVRYLKSNDTNVHRATAQALYQLSEDADNCITMHENGAVKLLLDMVGSPDQDLQEAAAGCISNIRRLALATEKARYT

SEQ ID NO: 25987 - protein, 1689 aa, Homo sapiens
MTTMLQKSDSNASFLRAARAGNLDKVVEYLKGGIDINTCNQNGLNALHLAAKEGHVGLVQELLGRGSSVDSATKKGNTALHIASLAGQAEVVKVLVKEGANINAQSQNGFTPLYMAAQENHIDVVKYLLENGANQSTATEDGFTPLAVALQQGHNQAVAILLENDTKGKVRLPALHIAARKDDTKSAALLLQNDHNADVQSKSGFTPLHIAAHYGNVNVATLLLNRGAAVDFTARNGITPLHVASKRGNTNMVKLLLDRGGQIDAKTRDGLTPLHCAARSGHDQVVELLLERGAPLLARTKNGLSPLHMAAQGDHVECVKHLLQHKAPVDDVTLDYLTALHVAAHCGHYRVTKLLLDKRANPNARALRGETALHMAARAGQVEVVRCLLRNGALVDARAREEQTPLHIASRLGKTEIVQLLLQHMAHPDAATTNGYTPLHISAREGQVDVASVLLEAGAAHSLATKKGFTPLHVAAKYGSLDVAKLLLQRRAAADSAGKNGLTPLHVAAHYDNQKVALLLLEKGASPHATAKNGYTPLHIAAKKNQMQIASTLLNYGAETNIVTKQGVTPLHLASQEGHTDMVTLLLDKGANIHMSTKSGLTSLHLAAQEDKVNVADILTKHGADQDAHTKLGYTPLIVACHYGNVKMVNFLLKQGANVNAKTKNGYTPLHQAAQQGHTHIINVLLQHGAKPNATTANGNTALAIAKRLGYISVVDTLKVVTEEVTTTTTTITEKHKLNVPETMTEVLDVSDEEGDDTMTGDGGEYLRPEDLKELGDDSLPSSQFLDGMNYLRYSLEGGRSDSLRSFSSDRSHTLSHASYLRDSAVMDDSVVIPSHQVSTLAKEAERNSYRLSWGTENLDNVALSSSPIHSGFLVSFMVDARGGAMRGCRHNGLRIIIPPRKCTAPTRVTCRLVKRHRLATMPPMVEGEGLASRLIEVGPSGAQFLGPVIVEIPHFAALRGKERELVVLRSENGDSWKEHFCDYTEDELNEILNGMDEVLDSPEDLEKKRICRIITRDFPQYFAVVSRIKQDSNLIGPEGGVLSSTVVPQVQAVFPEGALTKRIRVGLQAQPMHSELVKKILGNKATFSPIVTLEPRRRKFHKPITMTIPVPKASSDVMLNGFGGDAPTLRLLCSITGGTTPAQWEDITGTTPLTFVNECVSFTTNVSARFWLIDCRQIQESVTFASQVYREIICVPYMAKFVVFAKSHDPIEARLRCFCMTDDKVDKTLEQQENFAEVARSRDVEVLEGKPIYVDCFGNLVPLTKSGQHHIFSFFAFKENRLPLFVKVRDTTQEPCGRLSFMKEPKSTRGLVHQAICNLNITLPIYTKESESDQEQEEEIDMTSEKNPQDEQERIEERLAYIADHLGFSWTELARELDFTEEQIHQIRIENPNSLQDQSHALLKYWLERDGKHATDTNLVECLTKINRMDIVHLMETNTEPLQERISHSYAEIEQTITLDHSEGFSVLQEELCTAQHKQKEEQAVSKESETCDHPPIVSEEDISVGYSTFQDGVPKTEGDSSATALFPQTHKEQVQQDFSGKMQDLPEESSLEYQQEYFVTTPGTETSETQKAMIVPSSPSKTPEEVSTPAEEEKLYLQTPTSSERGGSPIIQEPEEPSEHREESSPRKTSLVIVESADNQPETCERLDEDAAFEKGDDMPEIPPETVTEEEYIDEHGHTVVKKDNNE

SEQ ID NO: 25988 - protein, 908 aa, Homo sapiens
MSLFKARDWWSTILGDKEEFDQGCLCLANVDNSGNGQDKIIVGSFMGYLRIFSPHPAKTGDGAQAEDLLLEVDLRDPVLQVEVGKFVSGTEMLHLAVLHSRKLCVYSVSGTLGNVEHGNQCQMKLMYEHNLQRTACNMTYGSFGGVKGRDLICIQSMDGMLMVFEQESYAFGRFLPGFLLPGPLAYSSRTDSFLTVSSCQQVESYKYQVLAFATDADKRQETEQQKLGSGKRLVVDWTLNIGEQALDICIVSFNQSASSVFVLGERNFFCLKDNGQIRFMKKLDWSPSCFLPYCSVSEGTINTLIGNHNNMLHIYQDVTLKWATQLPHIPVAVRVGCLHDLKGVIVTLSDDGHLQCSYLGTDPSLFQAPNVQSRELNYDELDVEMKELQKIIKDVNKSQGVWPMTEREDDLNVSVVVSPNFDSVSQATDVEVGTDLVPSVTVKVTLQNRVILQKAKLSVYVQPPLELTCDQFTFEFMTPDLTRTVSFSVYLKRSYTPSELEGNAVVSYSRPTDRNPDGIPRVIQCKFRLPLKLICLPGQPSKTASHKITIDTNKSPVSLLSLFPGFASQSDDDQVNVMGFHFLGGARITVLASKTSQRYRIQSEQFEDLWLITNELILRLQEYFEKQGVKDFACSFSGSIPLQEYFELIDHHFELRINGEKLEELLSERAVQFRAIQRRLLARFKDKTPAPLQHLDTLLDGTYKQVIALADAVEENQGNLFQSFTRLKSATHLVILLIALWQKLSADQVAILEAAFLPLQEDTQELGWEETVDAAISHLLKTCLSKSSKEQALNLNSQLNIPKDTSQLKKHITLLCDRLSKGGRLCLSTDAAAPQTMVMPGGCTTIPESDLEERSVEQDSTELFTNHRHLTAETPRPDPRTGQRIEAWTLRIPHSLSQHLQLMEGPKS

SEQ ID NO: 25989 - protein, 1758 aa, Homo sapiens
MTTMLQKSDSNASFLRAARAGNLDKVVEYLKGGIDINTCNQNGLNALHLAAKEGHVGLVQELLGRGSSVDSATKKGNTALHIASLAGQAEVVKVLVKEGANINAQSQNGFTPLYMAAQENHIDVVKYLLENGANQSTATEDGFTPLAVALQQGHNQAVAILLENDTKGKVRLPALHIAARKDDTKSAALLLQNDHNADVQSKMMVNRTTESGFTPLHIAAHYGNVNVATLLLNRGAAVDFTARNGITPLHVASKRGNTNMVKLLLDRGGQIDAKTRDGLTPLHCAARSGHDQVVELLLERGAPLLARTKNGLSPLHMAAQGDHVECVKHLLQHKAPVDDVTLDYLTALHVAAHCGHYRVTKLLLDKRANPNARALNGFTPLHIACKKNRIKVMELLVKYGASIQAITESGLTPIHVAAFMGHLNIVLLLLQNGASPDVTNIRGETALHMAARAGQVEVVRCLLRNGALVDARAREEQTPLHIASRLGKTEIVQLLLQHMAHPDAATTNGYTPLHISAREGQVDVASVLLEAGAAHSLATKKGFTPLHVAAKYGSLDVAKLLLQRRAAADSAGKNGLTPLHVAAHYDNQKVALLLLEKGASPHATAKNGYTPLHIAAKKNQMQIASTLLNYGAETNIVTKQGVTPLHLASQEGHTDMVTLLLDKGANIHMSTKSGLTSLHLAAQEDKVNVADILTKHGADQDAHTKLGYTPLIVACHYGNVKMVNFLLKQGANVNAKTKNGYTPLHQAAQQGHTHIINVLLQHGAKPNATTANGNTALAIAKRLGYISVVDTLKVVTEEVTTTTTTITEKHKLNVPETMTEVLDVSDEEGDDTMTGDGGEYLRPEDLKELGDDSLPSSQFLDGMNYLRYSLEGGRSDSSDRSHTLSHASYLRDSAVMDDSVVIPSHQVSTLAKEAERNSYRLSWGTENLDNVALSSSPIHSGFLVSFMVDARGGAMRGCRHNGLRIIIPPRKCTAPTRVTCRLVKRHRLATMPPMVEGEGLASRLIEVGPSGAQFLGPVIVEIPHFAALRGKERELVVLRSENGDSWKEHFCDYTEDELNEILNGMDEVLDSPEDLEKKRICRIITRDFPQYFAVVSRIKQDSNLIGPEGGVLSSTVVPQVQAVFPEGALTKRIRVGLQAQPMHSELVKKILGNKATFSPIVTLEPRRRKFHKPITMTIPVPKASSDVMLNGFGGDAPTLRLLCSITGGTTPAQWEDITGTTPLTFVNECVSFTTNVSARFWLIDCRQIQESVTFASQVYREIICVPYMAKFVVFAKSHDPIEARLRCFCMTDDKVDKTLEQQENFAEVARSRDVEVLEGKPIYVDCFGNLVPLTKSGQHHIFSFFAFKENRLPLFVKVRDTTQEPCGRLSFMKEPKSTRGLVHQAICNLNITLPIYTKESESDQEQEEEIDMTSEKNPQDEQERIEERLAYIADHLGFSWTELARELDFTEEQIHQIRIENPNSLQDQSHALLKYWLERDGKHATDTNLVECLTKINRMDIVHLMETNTEPLQERISHSYAEIEQTITLDHSEGFSVLQEELCTAQHKQKEEQAVSKESETCDHPPIVSEEDISVGYSTFQDGVPKTEGDSSATALFPQTHKEQVQQDFSGKMQDLPEESSLEYQQEYFVTTPGTETSETQKAMIVPSSPSKTPEEVSTPAEEEKLYLQTPTSSERGGSPIIQEPEEPSEHREESSPRKTSLVIVESADNQPETCERLDEDAAFEKGDDMPEIPPETVTEEEYIDEHGHTVVKKDNNE

SEQ ID NO: 25990 - protein, 1887 aa, Homo sapiens
MAHAAASIKKVREADLDEKEKNLERDRKKQRKIPRERMERKRKSDSNASFLRAARAGNLDKVVEYLKGGIDINTCNQNGLNALHLAAKEGHVGLVQELLGRGSSVDSATKKGNTALHIASLAGQAEVVKVLVKEGANINAQSQNGFTPLYMAAQENHIDVVKYLLENGANQSTATEDGFTPLAVALQQGHNQAVAILLENDTKGKVRLPALHIAARKDDTKSAALLLQNDHNADVQSKMMVNRTTESGFTPLHIAAHYGNVNVATLLLNRGAAVDFTARNGITPLHVASKRGNTNMVKLLLDRGGQIDAKTRDGLTPLHCAARSGHDQVVELLLERGAPLLARTKNGLSPLHMAAQGDHVECVKHLLQHKAPVDDVTLDYLTALHVAAHCGHYRVTKLLLDKRANPNARALNGFTPLHIACKKNRIKVMELLVKYGASIQAITESGLTPIHVAAFMGHLNIVLLLLQNGASPDVTNIRGETALHMAARAGQVEVVRCLLRNGALVDARAREEQTPLHIASRLGKTEIVQLLLQHMAHPDAATTNGYTPLHISAREGQVDVASVLLEAGAAHSLATKKGFTPLHVAAKYGSLDVAKLLLQRRAAADSAGKNGLTPLHVAAHYDNQKVALLLLEKGASPHATAKNGYTPLHIAAKKNQMQIASTLLNYGAETNIVTKQGVTPLHLASQEGHTDMVTLLLDKGANIHMSTKSGLTSLHLAAQEDKVNVADILTKHGADQDAHTKLGYTPLIVACHYGNVKMVNFLLKQGANVNAKTKNGYTPLHQAAQQGHTHIINVLLQHGAKPNATTANGNTALAIAKRLGYISVVDTLKVVTEEVTTTTTTITEKHKLNVPETMTEVLDVSDEEGDDTMTGDGGEYLRPEDLKELGDDSLPSSQFLDGMNYLRYSLEGGRSDSLRSFSSDRSHTLSHASYLRDSAVMDDSVVIPSHQVSTLAKEAERNSYRLSWGTENLDNVALSSSPIHSGFLVSFMVDARGGAMRGCRHNGLRIIIPPRKCTAPTRVTCRLVKRHRLATMPPMVEGEGLASRLIEVGPSGAQFLGKLHLPTAPPPLNEGESLVSRILQLGPPGTKFLGPVIVEIPHFAALRGKERELVVLRSENGDSWKEHFCDYTEDELNEILNGMDEVLDSPEDLEKKRICRIITRDFPQYFAVVSRIKQDSNLIGPEGGVLSSTVVPQVQAVFPEGALTKRIRVGLQAQPMHSELVKKILGNKATFSPIVTLEPRRRKFHKPITMTIPVPKASSDVMLNGFGGDAPTLRLLCSITGGTTPAQWEDITGTTPLTFVNECVSFTTNVSARFWLIDCRQIQESVTFASQVYREIICVPYMAKFVVFAKSHDPIEARLRCFCMTDDKVDKTLEQQENFAEVARSRDVEVLEGKPIYVDCFGNLVPLTKSGQHHIFSFFAFKENRLPLFVKVRDTTQEPCGRLSFMKEPKSTRGLVHQAICNLNITLPIYTKESESDQEQEEEIDMTSEKNPQDEQERIEERLAYIADHLGFSWTELARELDFTEEQIHQIRIENPNSLQDQSHALLKYWLERDGKHATDTNLVECLTKINRMDIVHLMETNTEPLQERISHSYAEIEQTITLDHSEGFSVLQEELCTAQHKQKEEQAVSKESETCDHPPIVSEEDISVGYSTFQDGVPKTEGDSSATALFPQTHKEQVQQDFSGKMQDLPEESSLEYQQEYFVTTPGTETSETQKAMIVPSSPSKTPEEVSTPAEEEKLYLQTPTSSERGGSPIIQEPEEPSEHREESSPRKTSLVIVESADNQPETCERLDEDAAFEKGDDMPEIPPETVTEEEYIDEHGHTVVKKVTRKIIRRYVSSEGTEKEEIMVQGMPQEPVNIEEGDGYSKVIKRVVLKSDTEQSEDNNE

SEQ ID NO: 25991 - protein, 1109 aa, Homo sapiens
MNGNTALAIAKRLGYISVVDTLKVVTEEVTTTTTTITEKHKLNVPETMTEVLDVSDEEGDDTMTGDGGEYLRPEDLKELGDDSLPSSQFLDGMNYLRYSLEGGRSDSLRSFSSDRSHTLSHASYLRDSAVMDDSVVIPSHQVSTLAKEAERNSYRLSWGTENLDNVALSSSPIHSGFLVSFMVDARGGAMRGCRHNGLRIIIPPRKCTAPTRVTCRLVKRHRLATMPPMVEGEGLASRLIEVGPSGAQFLGPVIVEIPHFAALRGKERELVVLRSENGDSWKEHFCDYTEDELNEILNGMDEVLDSPEDLEKKRICRIITRDFPQYFAVVSRIKQDSNLIGPEGGVLSSTVVPQVQAVFPEGALTKRIRVGLQAQPMHSELVKKILGNKATFSPIVTLEPRRRKFHKPITMTIPVPKASSDVMLNGFGGDAPTLRLLCSITGGTTPAQWEDITGTTPLTFVNECVSFTTNVSARFWLIDCRQIQESVTFASQVYREIICVPYMAKFVVFAKSHDPIEARLRCFCMTDDKVDKTLEQQENFAEVARSRDVEVLEGKPIYVDCFGNLVPLTKSGQHHIFSFFAFKENRLPLFVKVRDTTQEPCGRLSFMKEPKSTRGLVHQAICNLNITLPIYTKESESDQEQEEEIDMTSEKNPQDEQERIEERLAYIADHLGFSWTELARELDFTEEQIHQIRIENPNSLQDQSHALLKYWLERDGKHATDTNLVECLTKINRMDIVHLMETNTEPLQERISHSYAEIEQTITLDHSEGFSVLQEELCTAQHKQKEEQAVSKESETCDHPPIVSEEDISVGYSTFQDGVPKTEGDSSATALFPQTHKEQVQQDFSGKMQDLPEESSLEYQQEYFVTTPGTETSETQKAMIVPSSPSKTPEEVSTPAEEEKLYLQTPTSSERGGSPIIQEPEEPSEHREESSPRKTSLVIVESADNQPETCERLDEDAAFEKGDDMPEIPPETVTEEEYIDEHGHTVVKKVTRKIIRRYVSSEGTEKEEIMVQGMPQEPVNIEEGDGYSKVIKRVVLKSDTEQSEVTLCEPSILSSTSQFQAEPVEGRRVSKVVKTTVVLGERMEKHLGDSSLATDLPSAKDDFEEDNNE

SEQ ID NO: 25992 - protein, 708 aa, Homo sapiens
MQYLNIKEDCNAMAFCAKMRSSKKTEVNLEAPEPGVEVIFYLSDREPLRLGSGEYTAEELCIRAAQACRISPLCHNLFALYDENTKLWYAPNRTITVDDKMSLRLHYRMRFYFTNWHGTNDNEQSVWRHSPKKQKNGYEKKKIPDATPLLDASSLEYLFAQGQYDLVKCLAPIRDPKTEQDGHDIENECLGMAVLAISHYAMMKKMQLPELPKDISYKRYIPETLNKSIRQRNLLTRMRINNVFKDFLKEFNNKTICDSSVSTHDLKVKYLATLETLTKHYGAEIFETSMLLISSENEMNWFHSNDGGNVLYYEVMVTGNLGIQWRHKPNVVSVEKEKNKLKRKKLENKHKKDEEKNKIREEWNNFSYFPEITHIVIKESVVSINKQDNKKMELKLSSHEEALSFVSLVDGYFRLTADAHHYLCTDVAPPLIVHNIQNGCHGPICTEYAINKLRQEGSEEGMYVLRWSCTDFDNILMTVTCFEKSEQVQGAQKQFKNFQIEVQKGRYSLHGSDRSFPSLGDLMSHLKKQILRTDNISFMLKRCCQPKPREISNLLVATKKAQEWQPVYPMSQLSFDRILKKDLVQGEHLGRGTRTHIYSGTLMDYKDDEGTSEEKKIKVILKVLDPSHRDISLAFFEAASMMRQVSHKHIVYLYGVCVRDVESKCVLFQRGGWPGWGAWVLWRWWRLFPPSRCPGFLPFFLQLRRLRD

SEQ ID NO: 25993 - protein, 479 aa, Homo sapiens
MLCASFLGLGLSVAIVGPTFQDLATNVNRNISSLSFIFVGRALGYLSGSVIGGFLVDVMNYFLLLGGNVLILAIWGDKGAPHMQALHFSFALGAFLAPLLAKLALGPTASAENHTESDFHPALNQSSDADSEALFGVPNDKNLLWAYAVIGTYMFLVSVIFFCLFLKNSSKQEKARASAETFRRAKYHNALLCLLFLFFFFYVGAEVTYGSYVFSFATTHAGMKESEAAGLNSIFWGTFAACRGLAIFFATCLQPGTMIVLSNIGSLTSSLFLVLFDKNPICLWIATSVYGASMATTFPSGVSWIEQYTTIHGKSAAFFVIGASLGEMAIPAVIGILQGKYPDLPVVLYTSLGASIATGILFPVLYKLATSPLDRQRKEDRKSEDQKALLSSSGLNEYEEENEEEDAEKWNEMDFEMIETNDTMRHSIIETSRSSLTEPTAEVYNQYPSNALVFESSPFNTGSAHVKHLPETRTKGTNV

SEQ ID NO: 25994 - protein, 851 aa, Homo sapiens
MSLFKARDWWSTILGDKEEFDQGCLCLANVDNSGNGQDKIIVGSFMGYLRIFSPHPAKTGDGAQAEDLLLEVDLRDPVLQVEVGKFVSGTEMLHLAVLHSRKLCVYSVSGTLGNVEHGNQCQMKLMYEHNLQRTACNMTYGSFGGVKGRDLICIQSMDGMLMVFEQESYAFGRFLPGFLLPGPLAYSSRTDSFLTVSSCQQVESYKYQVLAFATDADKRQETEQQKLGSGKRLVVDWTLNIGEQALDICIVSFNQSASSVFVLGERNFFCLKDNGQIRFMKKLDWSPSCFLPYCSVSEGTINTLIGNHNNMLHIYQDVTLKWATQLPHIPVAVRVGCLHDLKGVIVTLSDDGHLQCSYLGTDPSLFQAPNVQSRELNYDELDVEMKELQKIIKDVNKSQGVWPMTEREDDLNVSVVVSPNFDSVSQATDVEVGTDLVPSVTVKVTLQNRVILQKAKLSVYVQPPLELTCDQFTFEFMTPDLTRTVSFSVYLKRSYTPSELEGNAVVSYSRPTDRNPDGIPRVIQCKFRLPLKLICLPGQPSKTASHKITIDTNKSPVSLLSLFPGFASQSDDDQVNVMGFHFLGGARITVLASKTSQRYRIQSEQFEDLWLITNELILRLQEYFEKQGVKDFACSFSGSIPLQEYFELIDHHFELRINGEKLEELLSERAVQFRAIQRRLLARFKDKTPAPLQHLDTLLDGTYKQVIALADAVEENQGNLFQSFTRLKSATHLVILLIALWQKLSADQVAILEAAFLPLQEDTQELGWEETVDAAISHLLKTCLSKSSKEQALNLNSQLNIPKDTSQLKKHITLLCDRLSKGGRLCLSTDAAAPQTMVMPALSLSTPHTSA

SEQ ID NO: 25995 - protein, 1223 aa, Homo sapiens
MDTLRAVPLFSISGLFSFPYRVSHGIAGILLGEMAVCAKKRPPEEERRARANDREYNEKFQYASNCIKTSKYNILTFLPVNLFEQFQEVANTYFLFLLILQLIPQISSLSWFTTIVPLVLVLTITAVKDATDDYFRHKSDNQVNNRQSQVLINGILQQEQWMNVCVGDIIKLENNQFVAADLLLLSSSEPHGLCYIETAELDGETNMKVRQAIPVTSELGDISKLAKFDGEVICEPPNNKLDKFSGTLYWKENKFPLSNQNMLLRGCVLRNTEWCFGLVIFAGPDTKLMQNSGRTKFKRTSIDRLMNTLVLWIFGFLVCMGVILAIGNAIWEHEVGMRFQVYLPWDEAVDSAFFSGFLSFWSYIIILNTVVPISLYVSVEVIRLGHSYFINWDKKMFCMKKRTPAEARTTTLNEELGQVEYIFSDKTGTLTQNIMVFNKCSINGHSYGDVFDVLGHKAELGERPEPVDFSFNPLADKKFLFWDPSLLEAVKIGDPHTHEFFRLLSLCHTVMSEEKNEGELYYKAQSPDEGALVTAARNFGFVFRSRTPKTITVHEMGTAITYQLLAILDFNNIRKRMSVIVRNPEGKIRLYCKGADTILLDRLHHSTQELLNTTMDHLNEYAGEGLRTLVLAYKDLDEEYYEEWAERRLQASLAQDSREDRLASIYEEVENNMMLLGATAIEDKLQQGVPETIALLTLANIKIWVLTGDKQETAVNIGYSCKMLTDDMTEVFIVTGHTVLEVREELRKAREKMMDSSRSVGNGFTYQDKLSSSKLTSVLEAVAGEYALVINGHSLAHALEADMELEFLETACACKAVICCRVTPLQKAQVVELVKKYKKAVTLAIGDGANDVSMIKTAHIGVGISGQEGIQAVLASDYSFSQFKFLQRLLLVHGRWSYLRMCKFLCYFFYKNFAFTMVHFWFGFFCGFSAQTVYDQYFITLYNIVYTSLPVLAMGVFDQDVPEQRSMEYPKLYEPGQLNLLFNKREFFICIAQGIYTSVLMFFIPYGVFADATRDDGTQLADYQSFAVTVATSLVIVVSVQIGLDTGYWTAINHFFIWGSLAVYFAILFAMHSNGLFDMFPNQFRFVGNAQNTLAQPTVWLTIVLTTVVCIMPVVAFRFLRLNLKPDLSDTVRYTQLVRKKQKAQHRCMRRVGRTGSRRSGYAFSHQEGFGELIMSGKNMRLSSLALSSFTTRSSSSWIESLRRKKSDSASSPSGGADKPLKG

SEQ ID NO: 25996 - protein, 377 aa, Homo sapiens
MLKFRADRRVSHNERRNTFLHPVTGQVPEENKKFDLKISTLDMSNKTGGKRPATTNSDIPNHNMVSEVPPERPSVRATRTARKAVAFGKRSHSMKRNPNAPVTKAGWLFKQASSGVKQWNKRWFVLVDRCLFYYKDEKEESILGSIPLLSFRVAAVQPSDNISRKHTFKAEHAGVRTYFFSAESPEEQEAWIQAMGEAARVQIPPAQKSVPQAVRHSHEKPDSENVPPSKHHQQPPHNSLPKPEPEAKTRGEGDGRGCEKAERRPERPEVKKEPPVKANGLPAGPEPASEPGSPYPEGPRVPGGGEQPAQPNGWQYHSPSRPGSTAFPSQDGETGGHRRSFPPRTNPDKIAQRKSSMNQLQQWVNLRRGVPPPEDLR

SEQ ID NO: 25997 - protein, 346 aa, Homo sapiens
SSSSVSSSSATAPSSVVAATSGGGRPGLGRGRNSNKGLPQSTISFDGIYANMRMVHILTSVVGSKCEVQVKNGGIYEGVFKTYSPKCDLVLDAAHEKSTESSSGPKREEIMESILFKCSDFVVVQFKDMDSSYAKRDAFTDSAISAKVNGEHKEKDLEPWDAGELTANEELEALENDVSNGWDPNDMFRYNEENYGVVSTYDSSLSSYTVPLERDNSEEFLKREARANQLAEEIESSAQYKARVALENDDRSEEEKYTAVQRNSSEREGHSINTRYLKEIMMQYFGYTTQGKINIFLLDKEIEKSYPGEVGDRIHRVWASLDRAPCHQDPLLTLQISTRILVQTKE

SEQ ID NO: 25998 - protein, 1215 aa, Homo sapiens
MNKRRSQCRGKGEETWRNQGDLALRNCLLTSDLTVRIGDYGLAHSNYKEDYYLTPERLWIPLRWAAPELLGELHGTFMVVDQSRESNIWSLGVTLWELFEFGAQPYRHLSDEEVLAFVVRQQHVKLARPRLKLPYADYWYDILQSCWRPPAQRPSASDLQLQLTYLLSERPPRPPPPPPPPRDGPFPWPWPPAHSAPRPGTLSSPFPLLDGFPGADPDDVLTVTESSRGLNLECLWEKARRGAGRGGGAPAWQPASAPPAPHANPSNPFYEALSTPSVLPVISARSPSVSSEYYIRLEEHGSPPEPLFPNDWDPLDPGVPAPQAPQAPSEVPQLVSETWASPLFPAPRPFPAQSSASGSFLLSGWDPEGRGAGETLAGDPAEVLGERGTAPWVEEEEEEEEGSSPGEDSSSLGGGPSRRGPLPCPLCSREGACSCLPLERGDAVAGWGGHPALGCPHPPEDDSSLRAERGSLADLPMAPPASAPPEFLDPLMGAAAPQYPGRGPPPAPPPPPPPPRAPADPAASPDPPSAVASPGSGLSSPGPKPGDSGYETETPFSPEGAFPGGGAAEEEGVPRPRAPPEPPDPGAPRPPPDPGPLPLPGPREKPTFVVQVSTEQLLMSLREDVTRNLLGEKGATARETGPRKAGRGPGNREKVPGLNRDPTVLGNGKQAPSLSLPVNGVTVLENGDQRAPGIEEKAAENGALGSPEREEKVLENGELTPPRREEKALENGELRSPEAGEKVLVNGGLTPPKSEDKVSENGGLRFPRNTERPPETGPWRAPGPWEKTPESWGPAPTIGEPAPETSLERAPAPSAVVSSRNGGETAPGPLGPAPKNGTLEPGTERRAPETGGAPRAPGAGRLDLGSGGRAPVGTGTAPGGGPGSGVDAKAGWVDNTRPQPPPPPLPPPPEAQPRRLEPAPPRARPEVAPEGEPGAPDSRAGGDTALSGDGDPPKPERKGPEMPRLFLDLGPPQGNSEQIKARLSRLSLALPPLTLTPFPGPGPRRPPWEGADAGAAGGEAGGAGAPGPAEEDGEDEDEDEEEDEEAAAPGAAAGPRGPGRARAAPVPVVVSSADADAARPLRGLLKSPRGADEPEDSELERKRKMVSFHGDVTVYLFDQETPTNELSVQAPPEGDTDPSTPPAPPTPPHPATPGDGFPSNDSGFGGSFEWAEDFPLLPPPGPPLCFSRFSVSPALETPGPPARAPDARPAGPVEN

SEQ ID NO: 25999 - protein, 608 aa, Homo sapiens
MTKTYNDIDAVTRLLEEKERDLELAARIGQSLLKKNKTLTERNELLEEQVEHIREEVSQLRHELSMKDELLQFYTSAAEESEPESVCSTPLKRNESSSSVQNYFHLDSLQKKLKDLEEENVVLRSEASQLKTETITYEEKEQQLVNDCVKELRDANVQIASISEELAKKTEDAARQQEEITHLLSQIVDLQKKAKACAVENEELVQHLGAAKDAQRQLTAELRELEDKYAECMEMLHEAQEELKNLRNKTMPNTTSRRYHSLGLFPMDSLAAEIEGTMRKELQLEEAESPDITHQKRVFETVRNINQVVKQRSLTPSPMNIPGSNQSSAMNSLLSSCVSTPRSSFYGSDIGNVVLDNKTNSIILETEAADLGNDERSKKPGTPGTPGSHDLETALRRLSLRRENYLSERRFFEEEQERKLQELAEKGELRSGSLTPTESIMSLGTHSRFSEFTGFSGMSFSSRSYLPEKLQIVKPLEGSATLHHWQQLAQPHLGGILDPRPGVVTKGFRTLDVDLDEVYCLNDFEEDDTGDHISLPRLATSTPVQHPETSAHHPGKCMSQTNSTFTFTTCRILHPSDELTRVTPRSCEEDDEAAICPVELRGDIGQRV

SEQ ID NO: 26000 - protein, 1931 aa, Homo sapiens
MMNEDAAQKSDSGEKFNGSSQRRKRPKKSDSNASFLRAARAGNLDKVVEYLKGGIDINTCNQNGLNALHLAAKEGHVGLVQELLGRGSSVDSATKKGNTALHIASLAGQAEVVKVLVKEGANINAQSQNGFTPLYMAAQENHIDVVKYLLENGANQSTATEDGFTPLAVALQQGHNQAVAILLENDTKGKVRLPALHIAARKDDTKSAALLLQNDHNADVQSKMMVNRTTESGFTPLHIAAHYGNVNVATLLLNRGAAVDFTARNGITPLHVASKRGNTNMVKLLLDRGGQIDAKTRDGLTPLHCAARSGHDQVVELLLERGAPLLARTKNGLSPLHMAAQGDHVECVKHLLQHKAPVDDVTLDYLTALHVAAHCGHYRVTKLLLDKRANPNARALNGFTPLHIACKKNRIKVMELLVKYGASIQAITESGLTPIHVAAFMGHLNIVLLLLQNGASPDVTNIRGETALHMAARAGQVEVVRCLLRNGALVDARAREEQTPLHIASRLGKTEIVQLLLQHMAHPDAATTNGYTPLHISAREGQVDVASVLLEAGAAHSLATKKGFTPLHVAAKYGSLDVAKLLLQRRAAADSAGKNGLTPLHVAAHYDNQKVALLLLEKGASPHATAKNGYTPLHIAAKKNQMQIASTLLNYGAETNIVTKQGVTPLHLASQEGHTDMVTLLLDKGANIHMSTKSGLTSLHLAAQEDKVNVADILTKHGADQDAHTKLGYTPLIVACHYGNVKMVNFLLKQGANVNAKTKNGYTPLHQAAQQGHTHIINVLLQHGAKPNATTANGNTALAIAKRLGYISVVDTLKVVTEEVTTTTTTITEKHKLNVPETMTEVLDVSDEEGDDTMTGDGGEYLRPEDLKELGDDSLPSSQFLDGMNYLRYSLEGGRSDSLRSFSSDRSHTLSHASYLRDSAVMDDSVVIPSHQVSTLAKEAERNSYRLSWGTENLDNVALSSSPIHSGFLVSFMVDARGGAMRGCRHNGLRIIIPPRKCTAPTRVTCRLVKRHRLATMPPMVEGEGLASRLIEVGPSGAQFLGPVIVEIPHFAALRGKERELVVLRSENGDSWKEHFCDYTEDELNEILNGMDEVLDSPEDLEKKRICRIITRDFPQYFAVVSRIKQDSNLIGPEGGVLSSTVVPQVQAVFPEGALTKRIRVGLQAQPMHSELVKKILGNKATFSPIVTLEPRRRKFHKPITMTIPVPKASSDVMLNGFGGDAPTLRLLCSITGGTTPAQWEDITGTTPLTFVNECVSFTTNVSARFWLIDCRQIQESVTFASQVYREIICVPYMAKFVVFAKSHDPIEARLRCFCMTDDKVDKTLEQQENFAEVARSRDVEVLEGKPIYVDCFGNLVPLTKSGQHHIFSFFAFKENRLPLFVKVRDTTQEPCGRLSFMKEPKSTRGLVHQAICNLNITLPIYTKESESDQEQEEEIDMTSEKNPQDEQERIEERLAYIADHLGFSWTELARELDFTEEQIHQIRIENPNSLQDQSHALLKYWLERDGKHATDTNLVECLTKINRMDIVHLMETNTEPLQERISHSYAEIEQTITLDHSEGFSVLQEELCTAQHKQKEEQAVSKESETCDHPPIVSEEDISVGYSTFQDGVPKTEGDSSATALFPQTHKEQVQQDFSGKMQDLPEESSLEYQQEYFVTTPGTETSETQKAMIVPSSPSKTPEEVSTPAEEEKLYLQTPTSSERGGSPIIQEPEEPSEHREESSPRKTSLVIVESADNQPETCERLDEDAAFEKELTEELGELEASSDEEAMVTTRVVRRRVIIQGDDMPEIPPETVTEEEYIDEHGHTVVKKVTRKIIRRYVSSEGTEKEEIMVQGMPQEPVNIEEGDGYSKVIKRVVLKSDTEQSEVTLCEPSILSSTSQFQAEPVEGRRVSKVVKTTVVLGERMEKHLGDSSLATDLPSAKDDFEEDNNE

SEQ ID NO: 26001 - protein, 535 aa, Homo sapiens
MLHLHHSWTPNIDRLAEDGVKLTQHISAASLCTPSRAAFLTGRYPVRSGMVSSIGYRVLQWTGASGGLPTNETTFAKILKEKGYATGLIGKWHLGLNCESASDHCHHPLHHGFDHFYGMPFSLMGDCARWELSEKRVNLEQKLNFLFQVLALVALTLVAGKLTHLIPVSWMPVIWSALSAVLLLASSYFVGALIVHADCFLMRNHTITEQPMCFQRTTPLILQEVASFLKRNKHGPFLLFVSFLHVHIPLITMENFLGKSLHGLYGDNVEEMDWMVGRILDTLDVEGLSNSTLIYFTSDHGGSLENQLGNTQYGGWNGIYKGGKGMGGWEGGIRVPGIFRWPGVLPAGRVIGEPTSLMDVFPTVVRLAGGEVPQDRVIDGQDLLPLLLGTAQHSDHEFLMHYCERFLHAARWHQRDRGTMWKVHFVTPVFQPEGAGACYGRKVCPCFGEKVVHHDPPLLFDLSRDPSETHILTPASEPVFYQVMERVQQAVWEHQRTLSPVPLQLDRLGNIWRPWLQPCCGPFPLCWCLREDDPQ

SEQ ID NO: 26002 - protein, 1060 aa, Homo sapiens
MNGNTALAIAKRLGYISVVDTLKVVTEEVTTTTTTITEKHKLNVPETMTEVLDVSDEEGDDTMTGDGGEYLRPEDLKELGDDSLPSSQFLDGMNYLRYSLEGGRSDSLRSFSSDRSHTLSHASYLRDSAVMDDSVVIPSHQVSTLAKEAERNSYRLSWGTENLDNVALSSSPIHSGRASPCLERDNSSFLVSFMVDARGGAMRGCRHNGLRIIIPPRKCTAPTRVTCRLVKRHRLATMPPMVEGEGLASRLIEVGPSGAQFLGPVIVEIPHFAALRGKERELVVLRSENGDSWKEHFCDYTEDELNEILNGMDEVLDSPEDLEKKRICRIITRDFPQYFAVVSRIKQDSNLIGPEGGVLSSTVVPQVQAVFPEGALTKRIRVGLQAQPMHSELVKKILGNKATFSPIVTLEPRRRKFHKPITMTIPVPKASSDVMLNGFGGDAPTLRLLCSITGGTTPAQWEDITGTTPLTFVNECVSFTTNVSARFWLIDCRQIQESVTFASQVYREIICVPYMAKFVVFAKSHDPIEARLRCFCMTDDKVDKTLEQQENFAEVARSRDVEVLEGKPIYVDCFGNLVPLTKSGQHHIFSFFAFKENRLPLFVKVRDTTQEPCGRLSFMKEPKSTRGLVHQAICNLNITLPIYTKESESDQEQEEEIDMTSEKNPQDEQERIEERLAYIADHLGFSWTELARELDFTEEQIHQIRIENPNSLQDQSHALLKYWLERDGKHATDTNLVECLTKINRMDIVHLMETNTEPLQERISHSYAEIEQTITLDHSEGFSVLQEELCTAQHKQKEEQAVSKESETCDHPPIVSEEDISVGYSTFQDGVPKTEGDSSATALFPQTHKEQVQQDFSGKMQDLPEESSLEYQQEYFVTTPGTETSETQKAMIVPSSPSKTPEEVSTPAEEEKLYLQTPTSSERGGSPIIQEPEEPSEHREESSPRKTSLVIVESADNQPETCERLDEDAAFEKGDDMPEIPPETVTEEEYIDEHGHTVVKKVTRKIIRRYVSSEGTEKEEIMVQGMPQEPVNIEEGDGYSKVIKRVVLKSDTEQSEDNNE

SEQ ID NO: 26003 - protein, 1770 aa, Homo sapiens
MTTMLQKSDSNASFLRAARAGNLDKVVEYLKGGIDINTCNQNGLNALHLAAKEGHVGLVQELLGRGSSVDSATKKGNTALHIASLAGQAEVVKVLVKEGANINAQSQNGFTPLYMAAQENHIDVVKYLLENGANQSTATEDGFTPLAVALQQGHNQAVAILLENDTKGKVRLPALHIAARKDDTKSAALLLQNDHNADVQSKSGFTPLHIAAHYGNVNVATLLLNRGAAVDFTARNGITPLHVASKRGNTNMVKLLLDRGGQIDAKTRDGLTPLHCAARSGHDQVVELLLERGAPLLARTKNGLSPLHMAAQGDHVECVKHLLQHKAPVDDVTLDYLTALHVAAHCGHYRVTKLLLDKRANPNARALNGFTPLHIACKKNRIKVMELLVKYGASIQAITESGLTPIHVAAFMGHLNIVLLLLQNGASPDVTNIRGETALHMAARAGQVEVVRCLLRNGALVDARAREEQTPLHIASRLGKTEIVQLLLQHMAHPDAATTNGYTPLHISAREGQVDVASVLLEAGAAHSLATKKGFTPLHVAAKYGSLDVAKLLLQRRAAADSAGKNGLTPLHVAAHYDNQKVALLLLEKGASPHATAKNGYTPLHIAAKKNQMQIASTLLNYGAETNIVTKQGVTPLHLASQEGHTDMVTLLLDKGANIHMSTKSGLTSLHLAAQEDKVNVADILTKHGADQDAHTKLGYTPLIVACHYGNVKMVNFLLKQGANVNAKTKNGYTPLHQAAQQGHTHIINVLLQHGAKPNATTANGNTALAIAKRLGYISVVDTLKVVTEEVTTTTTTITEKHKLNVPETMTEVLDVSDEEGDDTMTGDGGEYLRPEDLKELGDDSLPSSQFLDGMNYLRYSLEGGRSDSSDRSHTLSHASYLRDSAVMDDSVVIPSHQVSTLAKEAERNSYRLSWGTENLDNVALSSSPIHSGFLVSFMVDARGGAMRGCRHNGLRIIIPPRKCTAPTRVTCRLVKRHRLATMPPMVEGEGLASRLIEVGPSGAQFLGPVIVEIPHFAALRGKERELVVLRSENGDSWKEHFCDYTEDELNEILNGMDEVLDSPEDLEKKRICRIITRDFPQYFAVVSRIKQDSNLIGPEGGVLSSTVVPQVQAVFPEGALTKRIRVGLQAQPMHSELVKKILGNKATFSPIVTLEPRRRKFHKPITMTIPVPKASSDVMLNGFGGDAPTLRLLCSITGGTTPAQWEDITGTTPLTFVNECVSFTTNVSARFWLIDCRQIQESVTFASQVYREIICVPYMAKFVVFAKSHDPIEARLRCFCMTDDKVDKTLEQQENFAEVARSRDVEVLEGKPIYVDCFGNLVPLTKSGQHHIFSFFAFKENRLPLFVKVRDTTQEPCGRLSFMKEPKSTRGLVHQAICNLNITLPIYTKIDMTSEKNPQDEQERIEERLAYIADHLGFSWTELARELDFTEEQIHQIRIENPNSLQDQSHALLKYWLERDGKHATDTNLVECLTKINRMDIVHLMETNTEPLQERISHSYAEIEQTITLDHSEGFSVLQEELCTAQHKQKEEQAVSKESETCDHPPIVSEEDISVGYSTFQDGVPKTEGDSSATALFPQTHKEQVQQDFSGKMQDLPEESSLEYQQEYFVTTPGTETSETQKAMIVPSSPSKTPEEVSTPAEEEKLYLQTPTSSERGGSPIIQEPEEPSEHREESSPRKTSLVIVESADNQPETCERLDEDAAFEKELTEELGELEASSDEEAMVTTRVVRRRVIIQGDDMPEIPPETVTEEEYIDEHGHTVVKKDNNE

SEQ ID NO: 26004 - protein, 297 aa, Homo sapiens
MMSYLKQPPYAVNGLSLTTSGMDLLHPSVGYPGPWASCPAATPRKQRRERTTFTRAQLDVLEALFAKTRYPDIFMREEVALKINLPESRVQVWFKNRRAKCRQQQQQQQNGGQNKVRPAKKKTSPAREVSSESGTSGQFTPPSSTSVPTIASSSAPVSIWSPASISPLSDPLSTSSSCMQRSYPMTYTQASGYSQGYAGSTSYFGGMDCGSYLTPMHHQLPGPGATLSPMGTNAVTSHLNQSPASLSTQGYGASSLGFNSTTDCLDYKDQTASWKLNFNADCLDYKDQTSSWKFQVL

SEQ ID NO: 26005 - protein, 612 aa, Homo sapiens
MRDFSLAQETCQLAIRDVGGLEVLINLLETDEVKCKIGSLKILKEISHNPQIRQNIVDLGGLPIMVNILDSPHKSLKCLAAETIANVAKFKRARRVVRQHGGITKLVALLDCAHDSTKPAQSSLYEARDVEVARCGALALWSCSKSHTNKEAIRKAGGIPLLARLLKTSHENMLIPVVGTLQECASEENYRAAIKAERIIENLVKNLNSENEQLQEHCAMAIYQCAEDKETRDLVRLHGGLKPLASLLNNTDNKERLAAVTGAIWKCSISKENVTKFREYKAIETLVGLLTDQPEEVLVNVVGALGECCQERENRVIVRKCGGIQPLVNLLVGINQALLVNVTKAVGACAVEPESMMIIDRLDGVRLLWSLLKNPHPDVKASAAWALCPCIKNAKDAGEMVRSFVGGLELIVNLLKSDNKEVLASVCAAITNIAKDQENLAVITDHGVVPLLSKLANTNNNKLRHHLAEAISRCCMWGRNRVAFGEHKAVAPLVRYLKSNDTNVHRATAQALYQLSEDADNCITMHENGAVKTESRHVARLECSDNDLGSLQPPPPGFKRFSCLSLLSSWDYSFYWIWLGPLTRISRKLQLVVYPISAGWLLLQRRQDTLEI

SEQ ID NO: 26006 - protein, 509 aa, Homo sapiens
IEQIIAQGEQLIEKSEPLDAAIIEEELDELRRYCQEVFGRVERYHKKLIRLPPSSNLSLSLAQPLRSERSGRDTPASVDSIPLEWDHDYDLSRDLESAMSRALPSEDEEGQDDKDFYLRGAVGLSGDHSALESQIRQLGKALDDSRFQIQQTENIIRSKTPTGPELDTSYKGYMKLLGECSSSIDSVKRLEHKLKEEEESLPGFVNLHSTETQTAGVIDRWELLQAQALSKELRMKQNLQKWQQFNSDLNSIWAWLGDTEEELEQLQRLELSTDIQTIELQIKKLKELQKAVDHRKAIILSINLCSPEFTQADSKESRDLQDRLSQMNGRWDRVCSLLEEWRGLLQDALMQCQGFHEMSHGLLLMLENIDRRKNEIVPIDSNLDAEILQDHHKQLMQIKHELLESQLRVASLQDMSCQLLVNAEGTDCLEAKEKVHVIGNRLKLLLKEVSRHIKELEKLLDVSSSQQDLSSWSSADELDTSGSVSPTSGRSTPNRQKTVHKRWLRFLPF

SEQ ID NO: 26007 - protein, 460 aa, Homo sapiens
MNYFLLLGISMSATTVGLYLVPFCKTAILLTVMMSIFGVSIGILDTGGNVLILAIWGDKGAPHMQALHFSFALGAFLAPLLAKLALGPTASAENHTESDFHPALNQSSDADSEALFGVPNDKNLLWAYAVIGTYMFLVSVIFFCLFLKNSSKQEKARASAETFRRAKYHNALLCLLFLFFFFYVGAEVTYGSYVFSFATTHAGMKESEAAGLNSIFWGTFAACRGLAIFFATCLQPGTMIVLSNIGSLTSSLFLVLFDKNPICLWIATSVYGASMATTFPSGVSWIEQYTTIHGKSAAFFVIGASLGEMAIPAVIGILQGKYPDLPVVLYTSLGASIATGILFPVLYKLATSPLDRQRKEDRKSEDQKALLSSSGLNEYEEENEEEDAEKWNEMDFEMIETNDTMRHSIIETSRSSLTEPTAEVYNQYPSNALVFESSPFNTGSAHVKHLPETRTKGTNV

SEQ ID NO: 26008 - protein, 842 aa, Homo sapiens
MGYLRIFSPHPAKTGDGAQAEDLLLEVDLRDPVLQVEVGKFVSGTEMLHLAVLHSRKLCVYSVSGTLGNVEHGNQCQMKLMYEHNLQRTACNMTYGSFGGVKGRDLICIQSMDGMLMVFEQESYAFGRFLPGFLLPGPLAYSSRTDSFLTVSSCQQVESYKYQVLAFATDADKRQETEQQKLGSGKRLVVDWTLNIGEQALDICIVSFNQSASSVFVLGERNFFCLKDNGQIRFMKKLDWSPSCFLPYCSVSEGTINTLIGNHNNMLHIYQDVTLKWATQLPHIPVAVRVGCLHDLKGVIVTLSDDGHLQCSYLGTDPSLFQAPNVQSRELNYDELDVEMKELQKIIKDVNKSQGVWPMTEREDDLNVSVVVSPNFDSVSQATDVEVGTDLVPSVTVKVTLQNRVILQKAKLSVYVQPPLELTCDQFTFEFMTPDLTRTVSFSVYLKRSYTPSELEGNAVVSYSRPTDRNPDGIPRVIQCKFRLPLKLICLPGQPSKTASHKITIDTNKSPVSLLSLFPGFASQSDDDQVNVMGFHFLGGARITVLASKTSQRYRIQSEQFEDLWLITNELILRLQEYFEKQGVKDFACSFSGSIPLQEYFELIDHHFELRINGEKLEELLSERAVQFRAIQRRLLARFKDKTPAPLQHLDTLLDGTYKQVIALADAVEENQGNLFQSFTRLKSATHLVILLIALWQKLSADQVAILEAAFLPLQEDTQELGWEETVDAAISHLLKTCLSKSSKEQALNLNSQLNIPKDTSQLKKHITLLCDRLSKGGRLCLSTDAAAPQTMVMPGGCTTIPESDLEERSVEQDSTELFTNHRHLTAETPRPEVSPLQGVSE

SEQ ID NO: 26009 - protein, 1849 aa, Homo sapiens
MTTMLQKSDSNASFLRAARAGNLDKVVEYLKGGIDINTCNQNGLNALHLAAKEGHVGLVQELLGRGSSVDSATKKGNTALHIASLAGQAEVVKVLVKEGANINAQSQNGFTPLYMAAQENHIDVVKYLLENGANQSTATEDGFTPLAVALQQGHNQAVAILLENDTKGKVRLPALHIAARKDDTKSAALLLQNDHNADVQSKMMVNRTTESGFTPLHIAAHYGNVNVATLLLNRGAAVDFTARNGITPLHVASKRGNTNMVKLLLDRGGQIDAKTRDGLTPLHCAARSGHDQVVELLLERGAPLLARTKNGLSPLHMAAQGDHVECVKHLLQHKAPVDDVTLDYLTALHVAAHCGHYRVTKLLLDKRANPNARALNGFTPLHIACKKNRIKVMELLVKYGASIQAITESGLTPIHVAAFMGHLNIVLLLLQNGASPDVTNIRGETALHMAARAGQVEVVRCLLRNGALVDARAREEQTPLHIASRLGKTEIVQLLLQHMAHPDAATTNGYTPLHISAREGQVDVASVLLEAGAAHSLATKKGFTPLHVAAKYGSLDVAKLLLQRRAAADSAGKNGLTPLHVAAHYDNQKVALLLLEKGASPHATAKNGYTPLHIAAKKNQMQIASTLLNYGAETNIVTKQGVTPLHLASQEGHTDMVTLLLDKGANIHMSTKSGLTSLHLAAQEDKVNVADILTKHGADQDAHTKLGYTPLIVACHYGNVKMVNFLLKQGANVNAKTKNGYTPLHQAAQQGHTHIINVLLQHGAKPNATTANGNTALAIAKRLGYISVVDTLKVVTEEVTTTTTTITEKHKLNVPETMTEVLDVSDEEGDDTMTGDGGEYLRPEDLKELGDDSLPSSQFLDGMNYLRYSLEGGRSDSLRSFSSDRSHTLSHASYLRDSAVMDDSVVIPSHQVSTLAKEAERNSYRLSWGTENLDNVALSSSPIHSGFLVSFMVDARGGAMRGCRHNGLRIIIPPRKCTAPTRVTCRLVKRHRLATMPPMVEGEGLASRLIEVGPSGAQFLGPVIVEIPHFAALRGKERELVVLRSENGDSWKEHFCDYTEDELNEILNGMDEVLDSPEDLEKKRICRIITRDFPQYFAVVSRIKQDSNLIGPEGGVLSSTVVPQVQAVFPEGALTKRIRVGLQAQPMHSELVKKILGNKATFSPIVTLEPRRRKFHKPITMTIPVPKASSDVMLNGFGGDAPTLRLLCSITGGTTPAQWEDITGTTPLTFVNECVSFTTNVSARFWLIDCRQIQESVTFASQVYREIICVPYMAKFVVFAKSHDPIEARLRCFCMTDDKVDKTLEQQENFAEVARSRDVEVLEGKPIYVDCFGNLVPLTKSGQHHIFSFFAFKENRLPLFVKVRDTTQEPCGRLSFMKEPKSTRGLVHQAICNLNITLPIYTKESESDQEQEEEIDMTSEKNPQDEQERIEERLAYIADHLGFSWTELARELDFTEEQIHQIRIENPNSLQDQSHALLKYWLERDGKHATDTNLVECLTKINRMDIVHLMETNTEPLQERISHSYAEIEQTITLDHSEGFSVLQEELCTAQHKQKEEQAVSKESETCDHPPIVSEEDISVGYSTFQDGVPKTEGDSSATALFPQTHKEQVQQDFSGKMQDLPEESSLEYQQEYFVTTPGTETSETQKAMIVPSSPSKTPEEVSTPAEEEKLYLQTPTSSERGGSPIIQEPEEPSEHREESSPRKTSLVIVESADNQPETCERLDEDAAFEKELTEELGELEASSDEEAMVTTRVVRRRVIIQGDDMPEIPPETVTEEEYIDEHGHTVVKKVTRKIIRRYVSSEGTEKEEIMVQGMPQEPVNIEEGDGYSKVIKRVVLKSDTEQSEDNNE

SEQ ID NO: 26010 - protein, 459 aa, Homo sapiens
METFDPTELPELLKLYYRRLFPYSQYYRWLNYGGVIKNYFQHREFSFTLKDDIYIRYQSFNNQSDLEKEMQKMNPYKIDIGAVYSHRPNQHNTVKLGAFQAQEKELVFDIDMTDYDDVRRCCSSADICPKCWTLMTMAIRIIDRALKEDFGFKHRLWVYSGRRGVHCWVCDESVRKLSSAVRSGIVEYLSLVKGGQDVKKKVHLSEKIHPFIRKSINIIKKYFEEYALVNQDILENKESWDKILALVPETIHDELQQSFQKSHNSLQRWEHLKKVASRYQNNIKNDKYGPWLEWEIMLQYCFPRLDINVSKGINHLLKSPFSVHPKTESHSVTQAGVQWRDLGSLQPLPSRFKQFSASPSQVAGITGRISVPIDLQKVDQFDPFTVPTISFICRELDAISTNEEEKEENEAESDVKHRTRDYKKTSLAPYVKVFEHFLENLDKSRKGELLKKSDLQKDF

SEQ ID NO: 26011 - protein, 78 aa, Homo sapiens
MFASIWYAKKLGRRFVHNARKAKSEKASPAPIIVNTDTLDTIPYVNGTEIEYEFEEITLERGNSGLGFSIAGGTDNPH

SEQ ID NO: 26012 - protein, 590 aa, Homo sapiens
VIYTVAKEELKKFEAFQRQVHECLTQLELINKQYRRLARENRTDSACSLKQMVHEGNQRWDNLQKRVTSILRRLKHFIGQREEFETARDSILVWLTEMDLQLTNIEHFSECDVQAKIKQLKAFQQEISLNHNKIEQIIAQGEQLIEKSEPLDAAIIEEELDELRRYCQEVFGRVERYHKKLIRLPLPDDEHDLSDRELELEDSAALSDLHWHDRSADSLLSPQPSSNLSLSLAQPLRSERSGRDTPASVDSIPLEWDHDYDLSRDLESAMSRALPSEDEEGQDDKDFYLRGAVGLSGVIDRWELLQAQALSKELRMKQNLQKWQQFNSDLNSIWAWLGDTEEELEQLQRLELSTDIQTIELQIKKLKELQKAVDHRKAIILSINLCSPEFTQADSKESRDLQDRLSQMNGRWDRVCSLLEEWRGLLQDALMQCQGFHEMSHGLLLMLENIDRRKNEIVPIDSNLDAEILQDHHKQLMQIKHELLESQLRVASLQDMSCQLLVNAEGTDCLEAKEKVHVIGNRLKLLLKEVSRHIKELEKLLDVSSSQQDLSSWSSADELDTSGSVSPTSGRSTPNRQKTVHKRWLRFLPF

SEQ ID NO: 26013 - protein, 174 aa, Homo sapiens
DAEMEFNCEMKWKGKDLFDLVCRTLGLRETWFFGLQYTIKDTVAWLKMDKKVLDHDVSKEEPVTFHFLAKFYPENAEEELVQEITQHLFFLQVKKQILDEKIYCPPEASVLLASYAVQAKYGDYDPSVHKRGFLAQEELLPKRMQLSIIDSQRGGWSRVYSAWGIELFAVARGG

SEQ ID NO: 26014 - protein, 542 aa, Homo sapiens
SLKQMVHEGNQRWDNLQKRVTSILRRLKHFIGQREEFETARDSILVWLTEMDLQLTNIEHFSECDVQAKIKQLKAFQQEISLNHNKIEQIIAQGEQLIEKSEPLDAAIIEEELDELRRYCQEVFGRVERYHKKLIRLPLPDDEHDLSDRELELEDSAALSDLHWHDRSADSLLSPQPSSNLSLSLAQPLRSERSGRDTPASVDSIPLEWDHDYDLSRDLESAMSRALPSEDEEGQDDKDFYLRGAVGLSGDHSALESQIRQLGKALDDSRFQIQQTENIIRSKTPTGPELDTSYKGYMKLLGECSSSIDSVKRLEHKLKEEEESLPGFVNLHSTETQTAGVIDRWELLQAQALSKELRMKQNLQKWQQFNSDLNSIWAWLGDTEEELEQLQRLELSTDIQTIELQIKKLKELQKAVDHRKAIILSINLCSPEFTQADSKESRDLQDRLSQMNGRWDRVCSLLEEWRGLLQDALMQCQGFHEMSHGLLLMLENIDRRKNEIVPIDSNLDAEILQDHHKQLMVRCVNSGSLQLFLAGLHFIYRK

SEQ ID NO: 26015 - protein, 3936 aa, Homo sapiens
MTTMLQKSDSNASFLRAARAGNLDKVVEYLKGGIDINTCNQNGLNALHLAAKEGHVGLVQELLGRGSSVDSATKKGNTALHIASLAGQAEVVKVLVKEGANINAQSQNGFTPLYMAAQENHIDVVKYLLENGANQSTATEDGFTPLAVALQQGHNQAVAILLENDTKGKVRLPALHIAARKDDTKSAALLLQNDHNADVQSKMMVNRTTESGFTPLHIAAHYGNVNVATLLLNRGAAVDFTARNGITPLHVASKRGNTNMVKLLLDRGGQIDAKTRDGLTPLHCAARSGHDQVVELLLERGAPLLARTKNGLSPLHMAAQGDHVECVKHLLQHKAPVDDVTLDYLTALHVAAHCGHYRVTKLLLDKRANPNARALNGFTPLHIACKKNRIKVMELLVKYGASIQAITESGLTPIHVAAFMGHLNIVLLLLQNGASPDVTNIRGETALHMAARAGQVEVVRCLLRNGALVDARAREEQTPLHIASRLGKTEIVQLLLQHMAHPDAATTNGYTPLHISAREGQVDVASVLLEAGAAHSLATKKGFTPLHVAAKYGSLDVAKLLLQRRAAADSAGKNGLTPLHVAAHYDNQKVALLLLEKGASPHATAKNGYTPLHIAAKKNQMQIASTLLNYGAETNIVTKQGVTPLHLASQEGHTDMVTLLLDKGANIHMSTKSGLTSLHLAAQEDKVNVADILTKHGADQDAHTKLGYTPLIVACHYGNVKMVNFLLKQGANVNAKTKNGYTPLHQAAQQGHTHIINVLLQHGAKPNATTANGNTALAIAKRLGYISVVDTLKVVTEEVTTTTTTITEKHKLNVPETMTEVLDVSDEEGDDTMTGDGGEYLRPEDLKELGDDSLPSSQFLDGMNYLRYSLEGGRSDSLRSFSSDRSHTLSHASYLRDSAVMDDSVVIPSHQVSTLAKEAERNSYRLSWGTENLDNVALSSSPIHSGFLVSFMVDARGGAMRGCRHNGLRIIIPPRKCTAPTRVTCRLVKRHRLATMPPMVEGEGLASRLIEVGPSGAQFLGKLHLPTAPPPLNEGESLVSRILQLGPPGTKFLGPVIVEIPHFAALRGKERELVVLRSENGDSWKEHFCDYTEDELNEILNGMDEVLDSPEDLEKKRICRIITRDFPQYFAVVSRIKQDSNLIGPEGGVLSSTVVPQVQAVFPEGALTKRIRVGLQAQPMHSELVKKILGNKATFSPIVTLEPRRRKFHKPITMTIPVPKASSDVMLNGFGGDAPTLRLLCSITGGTTPAQWEDITGTTPLTFVNECVSFTTNVSARFWLIDCRQIQESVTFASQVYREIICVPYMAKFVVFAKSHDPIEARLRCFCMTDDKVDKTLEQQENFAEVARSRDVEVLEGKPIYVDCFGNLVPLTKSGQHHIFSFFAFKENRLPLFVKVRDTTQEPCGRLSFMKEPKSTRGLVHQAICNLNITLPIYTKESESDQEQEEEIDMTSEKNDETESTETSVLKSHLVNEVPVLASPDLLSEVSEMKQDLIKMTAILTTDVSDKAGSIKVKELVKAAEEEPGEPFEIVERVKEDLEKVNEILRSGTCTRDESSVQSSRSERGLVEEEWVIVSDEEIEEARQKAPLEITEYPCVEVRIDKEIKGKVEKDSTGLVNYLTDDLNTCVPLPKEQLQTVQDKAGKKCEALAVGRSSEKEGKDIPPDETQSTQKQHKPSLGIKKPVRRKLKEKQKQKEEGLQASAEKAELKKGSSEESLGEDPGLAPEPLPTVKATSPLIEETPIGSIKDKVKALQKRVEDEQKGRSKLPIRVKGKEDVPKKTTHRPHPAASPSLKSERHAPGSPSPKTERHSTLSSSAKTERHPPVSPSSKTEKHSPVSPSAKTERHSPASSSSKTEKHSPVSPSTKTERHSPVSSTKTERHPPVSPSGKTDKRPPVSPSGRTEKHPPVSPGRTEKRLPVSPSGRTDKHQPVSTAGKTEKHLPVSPSGKTEKQPPVSPTSKTERIEETMSVRELMKAFQSGQDPSKHKTGLFEHKSAKQKQPQEKGKVRVEKEKGPILTQREAQKTENQTIKRGQRLPVTGTAESKRGVRVSSIGVKKEDAAGGKEKVLSHKIPEPVQSVPEEESHRESEVPKEKMADEQGDMDLQISPDRKTSTDFSEVIKQELEDNDKYQQFRLSEETEKAQLHLDQVLTSPFNTTFPLDYMKDEFLPALSLQSGALDGSSESLKNEGVAGSPCGSLMEGTPQISSEESYKHEGLAETPETSPESLSFSPKKSEEQTGETKESTKTETTTEIRSEKEHPTTKDITGGSEERGATVTEDSETSTESFQKEATLGSPKDTSPKRQDDCTGSCSVALAKETPTGLTEEAACDEGQRTFGSSAHKTQTDSEVQESTATSDETKALPLPEASVKTDTGTESKPQGVIRSPQGLELALPSRDSEVLSAVADDSLAVSHKDSLEASPVLEDNSSHKTPDSLEPSPLKESPCRDSLESSPVEPKMKAGIFPSHFPLPAAVAKTELLTEVASVRSRLLRDPDGSAEDDSLEQTSLMESSGKSPLSPDTPSSEEVSYEVTPKTTDVSTPKPAVIHECAEEDDSENGEKKRFTPEEEMFKMVTKIKMFDELEQEAKQKRDYKKEPKQEESSSSSDPDADCSVDVDEPKHTGSGEDESGVPVLVTSESRKVSSSSESEPELAQLKKGADSGLLPEPVIRVQPPSPLPSSMDSNSSPEEVQFQPVVSKQYTFKMNEDTQEEPGKSEEEKDSESHLAEDRHAVSTEAEDRSYDKLNRDTDQPKICDGHGCEAMSPSSSAAPVSSGLQSPTGDDVDEQPVIYKESLALQGTHEKDTEGEELDVSRAESPQADCPSESFSSSSSLPHCLVSEGKELDEDISATSSIQKTEVTKTDETFENLPKDCPSQDSSITTQTDRFSMDVPVSDLAENDEIYDPQITSPYENVPSQSFFSSEESKTQTDANHTTSFHSSEVYSVTITSPVEDVVVASSSSGTVLSKESNFEGQDIKMESQQESTLWEMQSDSVSSSFEPTMSATTTVVGEQISKVIITKTDVDSDSWSEIREDDEAFEARVKEEEQKIFGLMVDRQSQGTTPDTTPARTPTEEGTPTSEQNPFLFQEGKLFEMTRSGAIDMTKRSYADESFHFFQIGQESREETLSEDVKEGATGADPLPLETSAESLALSESKETVDDEADLLPDDVSEEVEEIPASDAQLNSQMGISASTETPTKEAVSVGTKDLPTVQTGDIPPLSGVKQISCPDSSEPAVQVQLDFSTLTRSVYSDRGDDSPDSSPEEQKSVIEIPTAPMENVPFTESKSKIPVRTMPTSTPAPPSAEYESSVSEDFLSSVDEENKADEAKPKSKLPVKVPLQRVEQQLSDLDTSVQKTVAPQGQDMASIAPDNRSKSESDASSLDSKTKCPVKTRSYTETETESRERAEELELESEEGATRPKILTSRLPVKSRSTTSSCRGGTSPTKESKEHFFDLYRNSIEFFEEISDEASKLVDRLTQSEREQEIVSDDESSSALEVSVIENLPPVETEHSVPEDIFDTRPIWDESIETLIERIPDENGHDHAEDPQDEQERIEERLAYIADHLGFSWTELARELDFTEEQIHQIRIENPNSLQDQSHALLKYWLERDGKHATDTNLVECLTKINRMDIVHLMETNTEPLQERISHSYAEIEQTITLDHSEGFSVLQEELCTAQHKQKEEQAVSKESETCDHPPIVSEEDISVGYSTFQDGVPKTEGDSSATALFPQTHKEQVQQDFSGKMQDLPEESSLEYQQEYFVTTPGTETSETQKAMIVPSSPSKTPEEVSTPAEEEKLYLQTPTSSERGGSPIIQEPEEPSEHREESSPRKTSLVIVESADNQPETCERLDEDAAFEKGDDMPEIPPETVTEEEYIDEHGHTVVKKVTRKIIRRYVSSEGTEKEEIMVQGMPQEPVNIEEGDGYSKVIKRVVLKSDTEQSEDNNE

SEQ ID NO: 26016 - protein, 752 aa, Homo sapiens
MIKTIYKTPGMIKDEQEIVQKRTFTKWINSHLAKRKPPMVVDDLFEDMKDGVKLLALLEVLSGQKLPCEQGRRMKRIHAVANIGTALKFLEGRKSMHRGSPIKLVNINSTDIADGRPSIVLGLMWTIILYFQIEELTSNLPQLQSLSSSASSVDSIVSSETPSPPSKRKVTTKIQGNAKKALLKWVQYTAGKQTGIEVKDFGKSWRSGVAFHSVIHAIRPELVDLETVKGRSNRENLEDAFTIAETELGIPRLLDPEDVDVDKPDEKSIMTYVAQFLKHYPDIHNASTDGQEDDEILPGFPSFANSVQNFKREDRVIFKEMKVWIEQFERDLTRAQMVESNLQDKYQSFKHFRVQYEMKRKQIEHLIQPLHRDGKLSLDQALVKQSWDRVTSRLFDWHIQLDKSLPAPLGTIGAWLYRAEVALREEITVQQVHEETANTIQRKLEQHKDLLQNTDAHKRAFHEIYRTRSVNGIPVPPDQLEDMAERFHFVSSTSELHLMKMEFLELKYRLLSLLVLAESKLKSWIIKYGRRESVEQLLQNYVSFIENSKFFEQYEVTYQILKQTAEMYVKADGSVEEAENVMKFMNETTAQWRNLSVEVRSVRSMLEEVISNWDRYGNTVASLQAWLEDAEKMLNQSENAKKDFFRNLPHWIQQHTAMNDAGNFLIETCDEMVSRDLKQQLLLLNGRWRELFMEVKQYAQADEMDRMKKEYTDCVVTLSAFATEAHKKLSEPLEVSFMNVKLLIQDLEVRGF

SEQ ID NO: 26017 - protein, 513 aa, Homo sapiens
MIRTPLSASAHRLLLPGSRGRPPRNMQPTGREGSRALSRRYLRRLLLLLLLLLLRQPVTRAETTPGAPRALSTLGSPSLFTTPGVPSALTTPGLTTPGTPKTLDLRGRAQALMRSFPLVDGHNDLPQVLRQRYKNVLQDVNLRNFSHGQTSLDRLRDGLVGAQFWSASVSCQSQDQTAVRLALEQIDLIHRMCASYSELELVTSAEGLNSSQKLACLIGVEGGHSLDSSLSVLRSFYVLGVRYLTLTFTCSTPWAESSTKFRHHMYTNVSGLTSFGEKVVEELNRLGMMIDLSYASDTLIRRVLEVSQAPVIFSHSAARAVCDNLLNVPDDILQLLKKNGGIVMVTLSMGVLQCNLLANVSTVADHFDHIRAVIGSEFIGIGGNYDGTGRFPQGLEDVSTYPVLIEELLSRSWSEEELQGVLRGNLLRVFRQVEKVREESRAQSPVEAEFPYGQLSTSCHSHLVPQNGHQATHLEVTKQPTNRVPWRSSNASPYLVPGLVAAATIPTFTQWLC

SEQ ID NO: 26018 - protein, 550 aa, Homo sapiens
MDPPDLLSVELSTSRPPQHLGGVKKPTYDPVSEDQDPLSSDFKRLGLRKPGLPRGLWLAKPSARVPGTKASRGSGAEVTLIDFGEEPVVPALRPCAPSLAQLAMDACSLLDETPPQSPTRALPRPLHPTPVVDWDARPLPPPPAYDDVAQDEDDFEICSINSTLVGAGVPAGPSQGQTNYAFVPEQARPPPPLEDNLFLPPQGGGKPPSSAQTAEIFQALQQECMRQLQAPAGSPAPSPSPGGDDKPQVPPRVPIPPRPTRPHVQLSPAPPGEEETSQWPGPASPPRVPPREPLSPQGSRTPSPLVPPGSSPLPPRLSSSPGKTMPTTQSFASDPKYATPQVIQAPGPRAGPCILPIVRDGKKVSSTHYYLLPERPSYLERYQRFLREAQSPEEPTPLPVPLLLPPPSTPAPAAPTATVRPMPQAALDPKANFSTNNSNPGARPPPPRATARLPQRGCPGDGPEAGRPADKIQMLQAMVHGVTTEECQAALQCHGWSVQRAAQYLKVEQLFGLGLRPRGECHKVLEMFDWNLEQAGCHLLGSWGPAHHKR

SEQ ID NO: 26019 - protein, 871 aa, Homo sapiens
MSLFKARDWWSTILGDKEEFDQGCLCLANVDNSGNGQDKIIVGSFMGYLRIFSPHPAKTGDGAQAEDLLLEVDLRDPVLQVEVGKFVSGTEMLHLAVLHSRKLCVYSVSGTLGNVEHGNQCQMKLMYEHNLQRTACNMTYGSFGGVKGRDLICIQSMDGMLMVFEQESYAFGRFLPGFLLPGPLAYSSRTDSFLTVSSCQQVESYKYQVLAFATDADKRQETEQQKLGSGKRLVVDWTLNIGEQALDICIVSFNQSASSVFVLGERNFFCLKDNGQIRFMKKLDWSPSCFLPYCSVSEGTINTLIGNHNNMLHIYQDVTLKWATQLPHIPVAVRVGCLHDLKGVIVTLSDDGHLQCSYLGTDPSLFQAPNVQSRELNYDELDVEMKELQKIIKDVNKSQGVWPMTEREDDLNVSVVVSPNFDSVSQATDVEVGTDLVPSVTVKVTLQNRVILQKAKLSVYVQPPLELTCDQFTFEFMTPDLTRTVSFSVYLKRSYTPSELEGNAVVSYSRPTDRNPDGIPRVIQCKFRLPLKLICLPGQPSKTASHKITIDTNKSPVSLLSLFPGFASQSDDDQVNVMGFHFLGGARITVLASKTSQRYRIQSEQFEDLWLITNELILRLQEYFEKQGVKDFACSFSGSIPLQEYFELIDHHFELRINGEKLEELLSERAVQFRAIQRRLLARFKDKTPAPLQHLDTLLDGTYKQVIALADAVEENQGNLFQSFTRLKSATHLVILLIALWQKLSADQVAILEAAFLPLQEDTQELGWEETVDAAISHLLKTCLSKSSKEQALNLNSQLNIPKDTSQLKKHITLLCDRLSKGGRLCLSTDAAAPQTMVMPDPRTGQRIEAWTLRIPHSLSQHLQLMEGPKS

SEQ ID NO: 26020 - protein, 3964 aa, Homo sapiens
MTTMLQKSDSNASFLRAARAGNLDKVVEYLKGGIDINTCNQNGLNALHLAAKEGHVGLVQELLGRGSSVDSATKKGNTALHIASLAGQAEVVKVLVKEGANINAQSQNGFTPLYMAAQENHIDVVKYLLENGANQSTATEDGFTPLAVALQQGHNQAVAILLENDTKGKVRLPALHIAARKDDTKSAALLLQNDHNADVQSKMMVNRTTESGFTPLHIAAHYGNVNVATLLLNRGAAVDFTARNGITPLHVASKRGNTNMVKLLLDRGGQIDAKTRDGLTPLHCAARSGHDQVVELLLERGAPLLARTKNGLSPLHMAAQGDHVECVKHLLQHKAPVDDVTLDYLTALHVAAHCGHYRVTKLLLDKRANPNARALNGFTPLHIACKKNRIKVMELLVKYGASIQAITESGLTPIHVAAFMGHLNIVLLLLQNGASPDVTNIRGETALHMAARAGQVEVVRCLLRNGALVDARAREEQTPLHIASRLGKTEIVQLLLQHMAHPDAATTNGYTPLHISAREGQVDVASVLLEAGAAHSLATKKGFTPLHVAAKYGSLDVAKLLLQRRAAADSAGKNGLTPLHVAAHYDNQKVALLLLEKGASPHATAKNGYTPLHIAAKKNQMQIASTLLNYGAETNIVTKQGVTPLHLASQEGHTDMVTLLLDKGANIHMSTKSGLTSLHLAAQEDKVNVADILTKHGADQDAHTKLGYTPLIVACHYGNVKMVNFLLKQGANVNAKTKNGYTPLHQAAQQGHTHIINVLLQHGAKPNATTANGNTALAIAKRLGYISVVDTLKVVTEEVTTTTTTITEKHKLNVPETMTEVLDVSDEEGDDTMTGDGGEYLRPEDLKELGDDSLPSSQFLDGMNYLRYSLEGGRSDSLRSFSSDRSHTLSHASYLRDSAVMDDSVVIPSHQVSTLAKEAERNSYRLSWGTENLDNVALSSSPIHSGFLVSFMVDARGGAMRGCRHNGLRIIIPPRKCTAPTRVTCRLVKRHRLATMPPMVEGEGLASRLIEVGPSGAQFLGPVIVEIPHFAALRGKERELVVLRSENGDSWKEHFCDYTEDELNEILNGMDEVLDSPEDLEKKRICRIITRDFPQYFAVVSRIKQDSNLIGPEGGVLSSTVVPQVQAVFPEGALTKRIRVGLQAQPMHSELVKKILGNKATFSPIVTLEPRRRKFHKPITMTIPVPKASSDVMLNGFGGDAPTLRLLCSITGGTTPAQWEDITGTTPLTFVNECVSFTTNVSARFWLIDCRQIQESVTFASQVYREIICVPYMAKFVVFAKSHDPIEARLRCFCMTDDKVDKTLEQQENFAEVARSRDVEVLEGKPIYVDCFGNLVPLTKSGQHHIFSFFAFKENRLPLFVKVRDTTQEPCGRLSFMKEPKSTRGLVHQAICNLNITLPIYTKESESDQEQEEEIDMTSEKNDETESTETSVLKSHLVNEVPVLASPDLLSEVSEMKQDLIKMTAILTTDVSDKAGSIKVKELVKAAEEEPGEPFEIVERVKEDLEKVNEILRSGTCTRDESSVQSSRSERGLVEEEWVIVSDEEIEEARQKAPLEITEYPCVEVRIDKEIKGKVEKDSTGLVNYLTDDLNTCVPLPKEQLQTVQDKAGKKCEALAVGRSSEKEGKDIPPDETQSTQKQHKPSLGIKKPVRRKLKEKQKQKEEGLQASAEKAELKKGSSEESLGEDPGLAPEPLPTVKATSPLIEETPIGSIKDKVKALQKRVEDEQKGRSKLPIRVKGKEDVPKKTTHRPHPAASPSLKSERHAPGSPSPKTERHSTLSSSAKTERHPPVSPSSKTEKHSPVSPSAKTERHSPASSSSKTEKHSPVSPSTKTERHSPVSSTKTERHPPVSPSGKTDKRPPVSPSGRTEKHPPVSPGRTEKRLPVSPSGRTDKHQPVSTAGKTEKHLPVSPSGKTEKQPPVSPTSKTERIEETMSVRELMKAFQSGQDPSKHKTGLFEHKSAKQKQPQEKGKVRVEKEKGPILTQREAQKTENQTIKRGQRLPVTGTAESKRGVRVSSIGVKKEDAAGGKEKVLSHKIPEPVQSVPEEESHRESEVPKEKMADEQGDMDLQISPDRKTSTDFSEVIKQELEDNDKYQQFRLSEETEKAQLHLDQVLTSPFNTTFPLDYMKDEFLPALSLQSGALDGSSESLKNEGVAGSPCGSLMEGTPQISSEESYKHEGLAETPETSPESLSFSPKKSEEQTGETKESTKTETTTEIRSEKEHPTTKDITGGSEERGATVTEDSETSTESFQKEATLGSPKDTSPKRQDDCTGSCSVALAKETPTGLTEEAACDEGQRTFGSSAHKTQTDSEVQESTATSDETKALPLPEASVKTDTGTESKPQGVIRSPQGLELALPSRDSEVLSAVADDSLAVSHKDSLEASPVLEDNSSHKTPDSLEPSPLKESPCRDSLESSPVEPKMKAGIFPSHFPLPAAVAKTELLTEVASVRSRLLRDPDGSAEDDSLEQTSLMESSGKSPLSPDTPSSEEVSYEVTPKTTDVSTPKPAVIHECAEEDDSENGEKKRFTPEEEMFKMVTKIKMFDELEQEAKQKRDYKKEPKQEESSSSSDPDADCSVDVDEPKHTGSGEDESGVPVLVTSESRKVSSSSESEPELAQLKKGADSGLLPEPVIRVQPPSPLPSSMDSNSSPEEVQFQPVVSKQYTFKMNEDTQEEPGKSEEEKDSESHLAEDRHAVSTEAEDRSYDKLNRDTDQPKICDGHGCEAMSPSSSAAPVSSGLQSPTGDDVDEQPVIYKESLALQGTHEKDTEGEELDVSRAESPQADCPSESFSSSSSLPHCLVSEGKELDEDISATSSIQKTEVTKTDETFENLPKDCPSQDSSITTQTDRFSMDVPVSDLAENDEIYDPQITSPYENVPSQSFFSSEESKTQTDANHTTSFHSSEVYSVTITSPVEDVVVASSSSGTVLSKESNFEGQDIKMESQQESTLWEMQSDSVSSSFEPTMSATTTVVGEQISKVIITKTDVDSDSWSEIREDDEAFEARVKEEEQKIFGLMVDRQSQGTTPDTTPARTPTEEGTPTSEQNPFLFQEGKLFEMTRSGAIDMTKRSYADESFHFFQIGQESREETLSEDVKEGATGADPLPLETSAESLALSESKETVDDEADLLPDDVSEEVEEIPASDAQLNSQMGISASTETPTKEAVSVGTKDLPTVQTGDIPPLSGVKQISCPDSSEPAVQVQLDFSTLTRSVYSDRGDDSPDSSPEEQKSVIEIPTAPMENVPFTESKSKIPVRTMPTSTPAPPSAEYESSVSEDFLSSVDEENKADEAKPKSKLPVKVPLQRVEQQLSDLDTSVQKTVAPQGQDMASIAPDNRSKSESDASSLDSKTKCPVKTRSYTETETESRERAEELELESEEGATRPKILTSRLPVKSRSTTSSCRGGTSPTKESKEHFFDLYRNSIEFFEEISDEASKLVDRLTQSEREQEIVSDDESSSALEVSVIENLPPVETEHSVPEDIFDTRPIWDESIETLIERIPDENGHDHAEDPQDEQERIEERLAYIADHLGFSWTELARELDFTEEQIHQIRIENPNSLQDQSHALLKYWLERDGKHATDTNLVECLTKINRMDIVHLMETNTEPLQERISHSYAEIEQTITLDHSEGFSVLQEELCTAQHKQKEEQAVSKESETCDHPPIVSEEDISVGYSTFQDGVPKTEGDSSATALFPQTHKEQVQQDFSGKMQDLPEESSLEYQQEYFVTTPGTETSETQKAMIVPSSPSKTPEEVSTPAEEEKLYLQTPTSSERGGSPIIQEPEEPSEHREESSPRKTSLVIVESADNQPETCERLDEDAAFEKGDDMPEIPPETVTEEEYIDEHGHTVVKKVTRKIIRRYVSSEGTEKEEIMVQGMPQEPVNIEEGDGYSKVIKRVVLKSDTEQSEVTLCEPSILSSTSQFQAEPVEGRRVSKVVKTTVVLGERMEKHLGDSSLATDLPSAKDDFEEDNNE

SEQ ID NO: 26021 - protein, 462 aa, Homo sapiens
MEAAHFFEGTEKLLEVWFSRQQPDANQGSGDLRTIPRSEWDILLKDVQCSIISVTKTDKQEAYVLSESSMFVSKRRFILKTCGTTLLLKALVPLLKLARDYSGFDSIQSFFYSRKNFMKPSHQGYPHRNFQEEIEFLNAIFPNGAAYCMGRMNSDCWYLYTLDFPESRVISQPDQTLEILMSELDPAVMDQFYMKDGVTAKDVTRESGIRDLIPGSVIDATMFNPCGYSMNGMKSDGTYWTIHITPEPEFSYVSFETNLSQTSYDDLIRKVVEVFKPGKFVTTLFVNQSSKCRTVLASPQKIEGFKRLDCQSAMFNDYNFVFTSFAKKQQQQQSULRKMKKKRKKRTHVEGGGCFLDVDAGGSAFHNHHCVVAESPRCNDSVIILNCMHYYIKELDILHECSLLCLGILCHSCCEIEVHVEKTFYYMKLYNTCESNSIWFMHSVIFLQVSSKIPHRQGFRPH

SEQ ID NO: 26022 - protein, 486 aa, Homo sapiens
MLDDRARMEAAKKEKVEQILAEFQLQEEDLKKVMRRMQKEMDRGLRLETHEEASVKMLPTYVRSTPEGSEVGDFLSLDLGGTNFRVMLVKVGEGEEGQWSVKTKHQMYSIPEDAMTGTAEMLFDYISECISDFLDKHQMKHKKLPLGFTFSFPVRHEDIDKGILLNWTKGFKASGAEGNNVVGLLRDAIKRRGDFEMDVVAMVNDTVATMISCYYEDHQCEVGMIVGTGCNACYMEEMQNVELVEGDEGRMCVNTEWGAFGDSGELDEFLLEYDRLVDESSANPGDRACRGGSETPPARFLGLTQHSPKYEKLIGGKYMGELVRLVLLRLVDENLLFHGEASEQLRTRGAFETRFVSQVESDTGDRKQIYNILSTLGLRPSTTDCDIVRRACESVSTRAAHMCSAGLAGVINRMRESRSEDVMRITVGVDGSVYKLHPSFKERFHASVRRLTPSCEITFIESEEGSGRGAALVSAVACKKACMLGQ

SEQ ID NO: 26023 - protein, 3862 aa, Homo sapiens
MTTMLQKSDSNASFLRAARAGNLDKVVEYLKGGIDINTCNQNGLNALHLAAKEGHVGLVQELLGRGSSVDSATKKGNTALHIASLAGQAEVVKVLVKEGANINAQSQNGFTPLYMAAQENHIDVVKYLLENGANQSTATEDGFTPLAVALQQGHNQAVAILLENDTKGKVRLPALHIAARKDDTKSAALLLQNDHNADVQSKSGFTPLHIAAHYGNVNVATLLLNRGAAVDFTARNGITPLHVASKRGNTNMVKLLLDRGGQIDAKTRDGLTPLHCAARSGHDQVVELLLERGAPLLARTKNGLSPLHMAAQGDHVECVKHLLQHKAPVDDVTLDYLTALHVAAHCGHYRVTKLLLDKRANPNARALNGFTPLHIACKKNRIKVMELLVKYGASIQAITESGLTPIHVAAFMGHLNIVLLLLQNGASPDVTNIRGETALHMAARAGQVEVVRCLLRNGALVDARAREEQTPLHIASRLGKTEIVQLLLQHMAHPDAATTNGYTPLHISAREGQVDVASVLLEAGAAHSLATKKGFTPLHVAAKYGSLDVAKLLLQRRAAADSAGKNGYTPLHIAAKKNQMQIASTLLNYGAETNIVTKQGVTPLHLASQEGHTDMVTLLLDKGANIHMSTKSGLTSLHLAAQEDKVNVADILTKHGADQDAHTKLGYTPLIVACHYGNVKMVNFLLKQGANVNAKTKNGYTPLHQAAQQGHTHIINVLLQHGAKPNATTANGNTALAIAKRLGYISVVDTLKVVTEEVTTTTTTITEKHKLNVPETMTEVLDVSDEEGDDTMTGDGGEYLRPEDLKELGDDSLPSSQFLDGMNYLRYSLEGGRSDSLRSFSSDRSHTLSHASYLRDSAVMDDSVVIPSHQVSTLAKEAERNSYRLSWGTENLDNVALSSSPIHSGFLVSFMVDARGGAMRGCRHNGLRIIIPPRKCTAPTRVTCRLVKRHRLATMPPMVEGEGLASRLIEVGPSGAQFLGPVIVEIPHFAALRGKERELVVLRSENGDSWKEHFCDYTEDELNEILNGMDEVLDSPEDLEKKRICRIITRDFPQYFAVVSRIKQDSNLIGPEGGVLSSTVVPQVQAVFPEGALTKRIRVGLQAQPMHSELVKKILGNKATFSPIVTLEPRRRKFHKPITMTIPVPKASSDVMLNGFGGDAPTLRLLCSITGGTTPAQWEDITGTTPLTFVNECVSFTTNVSARFWLIDCRQIQESVTFASQVYREIICVPYMAKFVVFAKSHDPIEARLRCFCMTDDKVDKTLEQQENFAEVARSRDVEVLEGKPIYVDCFGNLVPLTKSGQHHIFSFFAFKENRLPLFVKVRDTTQEPCGRLSFMKEPKSTRGLVHQAICNLNITLPIYTKESESDQEQEEEIDMTSEKNDETESTETSVLKSHLVNEVPVLASPDLLSEVSEMKQDLIKMTAILTTDVSDKAGSIKVKELVKAAEEEPGEPFEIVERVKEDLEKVNEILRSGTCTRDESSVQSSRSERGLVEEEWVIVSDEEIEEARQKAPLEITEYPCVEVRIDKEIKGKVEKDSTGLVNYLTDDLNTCVPLPKEQLQTVQDKAGKKCEALAVGRSSEKEGKDIPPDETQSTQKQHKPSLGIKKPVRRKLKEKQKQKEEGLQASAEKAELKKGSSEESLGEDPGLAPEPLPTVKATSPLIEETPIGSIKDKVKALQKRVEDEQKGRSKLPIRVKGKEDVPKKTTHRPHPAASPSLKSERHAPGSPSPKTERHSTLSSSAKTERHPPVSPSSKTEKHSPVSPSAKTERHSPASSSSKTEKHSPVSPSTKTERHSPVSSTKTERHPPVSPSGKTDKRPPVSPSGRTEKHPPVSPGRTEKRLPVSPSGRTDKHQPVSTAGKTEKHLPVSPSGKTEKQPPVSPTSKTERIEETMSVRELMKAFQSGQDPSKHKTGLFEHKSAKQKQPQEKGKVRVEKEKGPILTQREAQKTENQTIKRGQRLPVTGTAESKRGVRVSSIGVKKEDAAGGKEKVLSHKIPEPVQSVPEEESHRESEVPKEKMADEQGDMDLQISPDRKTSTDFSEVIKQELEDNDKYQQFRLSEETEKAQLHLDQVLTSPFNTTFPLDYMKDEFLPALSLQSGALDGSSESLKNEGVAGSPCGSLMEGTPQISSEESYKHEGLAETPETSPESLSFSPKKSEEQTGETKESTKTETTTEIRSEKEHPTTKDITGGSEERGATVTEDSETSTESFQKEATLGSPKDTSPKRQDDCTGSCSVALAKETPTGLTEEAACDEGQRTFGSSAHKTQTDSEVQESTATSDETKALPLPEASVKTDTGTESKPQGVIRSPQGLELALPSRDSEVLSAVADDSLAVSHKDSLEASPVLEDNSSHKTPDSLEPSPLKESPCRDSLESSPVEPKMKAGIFPSHFPLPAAVAKTELLTEVASVRSRLLRDPDGSAEDDSLEQTSLMESSGKSPLSPDTPSSEEVSYEVTPKTTDVSTPKPAVIHECAEEDDSENGEKKRFTPEEEMFKMVTKIKMFDELEQEAKQKRDYKKEPKQEESSSSSDPDADCSVDVDEPKHTGSGEDESGVPVLVTSESRKVSSSSESEPELAQLKKGADSGLLPEPVIRVQPPSPLPSSMDSNSSPEEVQFQPVVSKQYTFKMNEDTQEEPGKSEEEKDSESHLAEDRHAVSTEAEDRSYDKLNRDTDQPKICDGHGCEAMSPSSSAAPVSSGLQSPTGDDVDEQPVIYKESLALQGTHEKDTEGEELDVSRAESPQADCPSESFSSSSSLPHCLVSEGKELDEDISATSSIQKTEVTKTDETFENLPKDCPSQDSSITTQTDRFSMDVPVSDLAENDEIYDPQITSPYENVPSQSFFSSEESKTQTDANHTTSFHSSEVYSVTITSPVEDVVVASSSSGTVLSKESNFEGQDIKMESQQESTLWEMQSDSVSSSFEPTMSATTTVVGEQISKVIITKTDVDSDSWSEIREDDEAFEARVKEEEQKIFGLMVDRQSQGTTPDTTPARTPTEEGTPTSEQNPFLFQEGKLFEMTRSGAIDMTKRSYADESFHFFQIGQESREETLSEDVKEGATGADPLPLETSAESLALSESKETVDDEADLLPDDVSEEVEEIPASDAQLNSQMGISASTETPTKEAVSVGTKDLPTVQTGDIPPLSGVKQISCPDSSEPAVQVQLDFSTLTRSVYSDRGDDSPDSSPEEQKSVIEIPTAPMENVPFTESKSKIPVRTMPTSTPAPPSAEYESSVSEDFLSSVDEENKADEAKPKSKLPVKVPLQRVEQQLSDLDTSVQKTVAPQGQDMASIAPDNRSKSESDASSLDSKTKCPVKTRSYTETETESRERAEELELESEEGATRPKILTSRLPVKSRSTTSSCRGGTSPTKESKEHFFDLYRNSIEFFEEISDEASKLVDRLTQSEREQEIVSDDESSSALEVSVIENLPPVETEHSVPEDIFDTRPIWDESIETLIERIPDENGHDHAEDPQDEQERIEERLAYIADHLGFSWTELARELDFTEEQIHQIRIENPNSLQDQSHALLKYWLERDGKHATDTNLVECLTKINRMDIVHLMETNTEPLQERISHSYAEIEQTITLDHSEGFSVLQEELCTAQHKQKEEQAVSKESETCDHPPIVSEEDISVGYSTFQDGVPKTEGDSSATALFPQTHKEQVQQDFSGKMQDLPEESSLEYQQEYFVTTPGTETSETQKAMIVPSSPSKTPEEVSTPAEEEKLYLQTPTSSERGGSPIIQEPEEPSEHREESSPRKTSLVIVESADNQPETCERLDEDAAFEKGDDMPEIPPETVTEEEYIDEHGHTVVKKVTRKIIRRYVSSEGTEKEEIMVQGMPQEPVNIEEGDGYSKVIKRVVLKSDTEQSEDNNE

SEQ ID NO: 26024 - protein, 1910 aa, Homo sapiens
MTTMLQKSDSNASFLRAARAGNLDKVVEYLKGGIDINTCNQNGLNALHLAAKEGHVGLVQELLGRGSSVDSATKKGNTALHIASLAGQAEVVKVLVKEGANINAQSQNGFTPLYMAAQENHIDVVKYLLENGANQSTATEDGFTPLAVALQQGHNQAVAILLENDTKGKVRLPALHIAARKDDTKSAALLLQNDHNADVQSKMMVNRTTESGFTPLHIAAHYGNVNVATLLLNRGAAVDFTARNGITPLHVASKRGNTNMVKLLLDRGGQIDAKTRDGLTPLHCAARSGHDQVVELLLERGAPLLARTKNGLSPLHMAAQGDHVECVKHLLQHKAPVDDVTLDYLTALHVAAHCGHYRVTKLLLDKRANPNARALNGFTPLHIACKKNRIKVMELLVKYGASIQAITESGLTPIHVAAFMGHLNIVLLLLQNGASPDVTNIRGETALHMAARAGQVEVVRCLLRNGALVDARAREEQTPLHIASRLGKTEIVQLLLQHMAHPDAATTNGYTPLHISAREGQVDVASVLLEAGAAHSLATKKGFTPLHVAAKYGSLDVAKLLLQRRAAADSAGKNGLTPLHVAAHYDNQKVALLLLEKGASPHATAKNGYTPLHIAAKKNQMQIASTLLNYGAETNIVTKQGVTPLHLASQEGHTDMVTLLLDKGANIHMSTKSGLTSLHLAAQEDKVNVADILTKHGADQDAHTKLGYTPLIVACHYGNVKMVNFLLKQGANVNAKTKNGYTPLHQAAQQGHTHIINVLLQHGAKPNATTANGNTALAIAKRLGYISVVDTLKVVTEEVTTTTTTITEKHKLNVPETMTEVLDVSDEEGDDTMTGDGGEYLRPEDLKELGDDSLPSSQFLDGMNYLRYSLEGGRSDSLRSFSSDRSHTLSHASYLRDSAVMDDSVVIPSHQVSTLAKEAERNSYRLSWGTENLDNVALSSSPIHSGFLVSFMVDARGGAMRGCRHNGLRIIIPPRKCTAPTRVTCRLVKRHRLATMPPMVEGEGLASRLIEVGPSGAQFLGPVIVEIPHFAALRGKERELVVLRSENGDSWKEHFCDYTEDELNEILNGMDEVLDSPEDLEKKRICRIITRDFPQYFAVVSRIKQDSNLIGPEGGVLSSTVVPQVQAVFPEGALTKRIRVGLQAQPMHSELVKKILGNKATFSPIVTLEPRRRKFHKPITMTIPVPKASSDVMLNGFGGDAPTLRLLCSITGGTTPAQWEDITGTTPLTFVNECVSFTTNVSARFWLIDCRQIQESVTFASQVYREIICVPYMAKFVVFAKSHDPIEARLRCFCMTDDKVDKTLEQQENFAEVARSRDVEVLEGKPIYVDCFGNLVPLTKSGQHHIFSFFAFKENRLPLFVKVRDTTQEPCGRLSFMKEPKSTRGLVHQAICNLNITLPIYTKESESDQEQEEEIDMTSEKNPQDEQERIEERLAYIADHLGFSWTELARELDFTEEQIHQIRIENPNSLQDQSHALLKYWLERDGKHATDTNLVECLTKINRMDIVHLMETNTEPLQERISHSYAEIEQTITLDHSEGFSVLQEELCTAQHKQKEEQAVSKESETCDHPPIVSEEDISVGYSTFQDGVPKTEGDSSATALFPQTHKEQVQQDFSGKMQDLPEESSLEYQQEYFVTTPGTETSETQKAMIVPSSPSKTPEEVSTPAEEEKLYLQTPTSSERGGSPIIQEPEEPSEHREESSPRKTSLVIVESADNQPETCERLDEDAAFEKELTEELGELEASSDEEAMVTTRVVRRRVIIQGDDMPEIPPETVTEEEYIDEHGHTVVKKVTRKIIRRYVSSEGTEKEEIMVQGMPQEPVNIEEGDGYSKVIKRVVLKSDTEQSEVTLCEPSILSSTSQFQAEPVEGRRVSKVVKTTVVLGERMEKHLGDSSLATDLPSAKDDFEEDNNE

SEQ ID NO: 26025 - protein, 1891 aa, Homo sapiens
MTTMLQKSDSNASFLRAARAGNLDKVVEYLKGGIDINTCNQNGLNALHLAAKEGHVGLVQELLGRGSSVDSATKKGNTALHIASLAGQAEVVKVLVKEGANINAQSQNGFTPLYMAAQENHIDVVKYLLENGANQSTATEDGFTPLAVALQQGHNQAVAILLENDTKGKVRLPALHIAARKDDTKSAALLLQNDHNADVQSKMMVNRTTESGFTPLHIAAHYGNVNVATLLLNRGAAVDFTARNGITPLHVASKRGNTNMVKLLLDRGGQIDAKTRDGLTPLHCAARSGHDQVVELLLERGAPLLARTKNGLSPLHMAAQGDHVECVKHLLQHKAPVDDVTLDYLTALHVAAHCGHYRVTKLLLDKRANPNARALNGFTPLHIACKKNRIKVMELLVKYGASIQAITESGLTPIHVAAFMGHLNIVLLLLQNGASPDVTNIRGETALHMAARAGQVEVVRCLLRNGALVDARAREEQTPLHIASRLGKTEIVQLLLQHMAHPDAATTNGYTPLHISAREGQVDVASVLLEAGAAHSLATKKGFTPLHVAAKYGSLDVAKLLLQRRAAADSAGKNGLTPLHVAAHYDNQKVALLLLEKGASPHATAKNGYTPLHIAAKKNQMQIASTLLNYGAETNIVTKQGVTPLHLASQEGHTDMVTLLLDKGANIHMSTKSGLTSLHLAAQEDKVNVADILTKHGADQDAHTKLGYTPLIVACHYGNVKMVNFLLKQGANVNAKTKNGYTPLHQAAQQGHTHIINVLLQHGAKPNATTANGNTALAIAKRLGYISVVDTLKVVTEEVTTTTTTITEKHKLNVPETMTEVLDVSDEEGDDTMTGDGGEYLRPEDLKELGDDSLPSSQFLDGMNYLRYSLEGGRSDSLRSFSSDRSHTLSHASYLRDSAVMDDSVVIPSHQVSTLAKEAERNSYRLSWGTENLDNVALSSSPIHSGRASPCLERDNSSFLVSFMVDARGGAMRGCRHNGLRIIIPPRKCTAPTRVTCRLVKRHRLATMPPMVEGEGLASRLIEVGPSGAQFLGPVIVEIPHFAALRGKERELVVLRSENGDSWKEHFCDYTEDELNEILNGMDEVLDSPEDLEKKRICRIITRDFPQYFAVVSRIKQDSNLIGPEGGVLSSTVVPQVQAVFPEGALTKRIRVGLQAQPMHSELVKKILGNKATFSPIVTLEPRRRKFHKPITMTIPVPKASSDVMLNGFGGDAPTLRLLCSITGGTTPAQWEDITGTTPLTFVNECVSFTTNVSARFWLIDCRQIQESVTFASQVYREIICVPYMAKFVVFAKSHDPIEARLRCFCMTDDKVDKTLEQQENFAEVARSRDVEVLEGKPIYVDCFGNLVPLTKSGQHHIFSFFAFKENRLPLFVKVRDTTQEPCGRLSFMKEPKSTRGLVHQAICNLNITLPIYTKESESDQEQEEEIDMTSEKNPQDEQERIEERLAYIADHLGFSWTELARELDFTEEQIHQIRIENPNSLQDQSHALLKYWLERDGKHATDTNLVECLTKINRMDIVHLMETNTEPLQERISHSYAEIEQTITLDHSEGFSVLQEELCTAQHKQKEEQAVSKESETCDHPPIVSEEDISVGYSTFQDGVPKTEGDSSATALFPQTHKEQVQQDFSGKMQDLPEESSLEYQQEYFVTTPGTETSETQKAMIVPSSPSKTPEEVSTPAEEEKLYLQTPTSSERGGSPIIQEPEEPSEHREESSPRKTSLVIVESADNQPETCERLDEDAAFEKGDDMPEIPPETVTEEEYIDEHGHTVVKKVTRKIIRRYVSSEGTEKEEIMVQGMPQEPVNIEEGDGYSKVIKRVVLKSDTEQSEVTLCEPSILSSTSQFQAEPVEGRRVSKVVKTTVVLGERMEKHLGDSSLATDLPSAKDDFEEDNNE

SEQ ID NO: 26026 - protein, 98 aa, Homo sapiens
MDPPDLLSVELSTSRPPQHLGGVKKPTYDPVSEDQDPLSSDFKRLGLRKPGLPRGLWLAKPSARVPGTKASRGSGAEVTLIDFGEEPVVPALRPCAPS

SEQ ID NO: 26027 - protein, 843 aa, Homo sapiens
MVIIGPRGPGSQRLLLSLLLLAAWEVGSGQLHYSVYEEAKHGTFVGRIAQDLGLELAELVPRLFRVASKRHGDLLEVNLQNGILFVNSRIDREKLCGRSAECSIHLEVIVDRPLQVFHVDVEVKDINDNPPVFREREQKVPVSESAPLDSHFPLEGASDADIGVNSLLTYALSLNENFELKIKTKKDKSILPELVLRKLLDREQTPKLNLLLMVIDGGKPELTGSVQIQITVLDVNDNGPAFDKPSYKVVLSENVQNDTRVIQLNASDPDEGLNGEISYGIKMILPVSEKCMFSINPDTGEIRIYGELDFEENNAYEIQVNAIDKGIPSMAGHSMVLVEVLDVNDNVPEVMVTSLSLPVQEDAQVGTVIALISVSDRDSGANGQVICSLTPHVPFKLVSTYKNYYSLVLDSALDRESVSAYELVVTARDGGSPSLWATARVSVEVADVNDNAPAFAQPEYTVFVKENNPPGCHIFTVSAWDADAQKNALVSYSLVERRVGEHALSSYVSVHAESGKVYALQPLDHEELELLQFQVSARDAGVPPLGSNVTLQVFVLDENDNAPALLATPAGSAGGAVSELVPRSVGAGHVVAKVRAVDADSGYNAWLSYELQPAAVGAHIPFHVGLYTGEISTTRILDEADAPRHRLLVLVKDHGEPALTSTATVLVSLVENGQAPKTSSRASVGAVDPEAALVDINVYLIIAICAVSSLLVLTLLLYTALRCSAPPTVSRCAPGKPTLVCSSAVGSWSYSQQRRQRVCSAESPPKTDLMAFSPSLQLSREDCLNPPSEPRQPNPDWRYSASLRAGMHSSVHLEEAGILRAGPGGPDQQWPTVSSATPVPTME

SEQ ID NO: 26028 - protein, 280 aa, Homo sapiens
MNELNISSLQIATRNGHASLVNFLLSENVDLHQKVEPKESPLHLVVINNHITVVNSLLSAQHDIDILNQKQQTPLHVAADRGNVELVETLLKAGCDLKAVDKQGKTALAVASRSNHSLVVGMLIKAERYYAWREEHHESIRDPSTGFTLTFKQDHSLETRHIRTLLWDLAYHQLKANEWQRLARSWNFTDDQIRAIEEQWSGNESFREHGHRALLIWLHGTLMTQGDPAKQLYEELVHAGFPKLAAHFAKEKSSFESYFCIIKIYCKQWNDHIKKYYQLL

SEQ ID NO: 26029 - protein, 634 aa, Homo sapiens
DNLQKRVTSILRRLKHFIGQREEFETARDSILVWLTEMDLQLTNIEHFSECDVQAKIKQLKAFQQEISLNHNKIEQIIAQGEQLIEKSEPLDAAIIEEELDELRRYCQEVFGRVERYHKKLIRLPLPDDEHDLSDRELELEDSAALSDLHWHDRSADSLLSPQPSSNLSLSLAQPLRSERSGRDTPASVDSIPLEWDHDYDLSRDLESAMSRALPSEDEEGQDDKDFYLRGAVGLSGDHSALESQIRQLGKALDDSRFQIQQTENIIRSKTPTGPELDTSYKGYMKLLGECSSSIDSVKRLEHKLKEEEESLPGFVNLHSTETQTAGVIDRWELLQAQALSKELRMKQNLQKWQQFNSDLNSIWAWLGDTEEELEQLQRLELSTDIQTIELQIKKLKELQKAVDHRKAIILSINLCSPEFTQADSKESRDLQDRLSQMNGRWDRVCSLLEEWRGLLQDALMQCQIFTGQVGRPFLNIKGFHEMSHGLLLMLENIDRRKNEIVPIDSNLDAEILQDHHKQLMQIKHELLESQLRVASLQDMSCQLLVNAEGTDCLEAKEKVHVIGNRLKLLLKEVSRHIKELEKLLDVSSSQQDLSSWSSADELDTSGSVSPTSGRSTPNRQKTVHKRWLRFLPF

SEQ ID NO: 26030 - protein, 379 aa, Homo sapiens
MDSFDLALLQEWDLESLWGEDILNQRNDSLVVEFQSSASRCRSVYEPDRNALRRKERERRNQETQQDDGTFNSSYSLFSEPYKTNKGDELSNRIQNTLGNYDEMKDFLTDRSNQSHLVGVPKPGVPQTPVNKIDEHFVADSRAQNQPSSICSTTTSTPAAVPVQQSKRGTMGWQKAGHPPSDGQQRATQQGSLRTLLGDGVGRQQPRAKQVCNVEVGLQTQERPPAMAAKHSSSGHCVQNFPPSLASKPSLVQQKPTAYVRPMDGQDQAPDESPKLKSSSETSVHCTSYRGVPASKPEPARAKAKLSKFSIPKQGEESRSGETNSCVEEIIRYPRVCFSNAVQTEPALPGPGCTGHSLWRICSVGPPGAGRRQPTCLCA

SEQ ID NO: 26031 - protein, 1806 aa, Homo sapiens
MMNEDAAQKSDSGEKFNGSSQRRKRPKKSDSNASFLRAARAGNLDKVVEYLKGGIDINTCNQNGLNALHLAAKEGHVGLVQELLGRGSSVDSATKKGNTALHIASLAGQAEVVKVLVKEGANINAQSQNGFTPLYMAAQENHIDVVKYLLENGANQSTATEDGFTPLAVALQQGHNQAVAILLENDTKGKVRLPALHIAARKDDTKSAALLLQNDHNADVQSKMMVNRTTESGFTPLHIAAHYGNVNVATLLLNRGAAVDFTARNGITPLHVASKRGNTNMVKLLLDRGGQIDAKTRDGLTPLHCAARSGHDQVVELLLERGAPLLARTKNGLSPLHMAAQGDHVECVKHLLQHKAPVDDVTLDYLTALHVAAHCGHYRVTKLLLDKRANPNARALNGFTPLHIACKKNRIKVMELLVKYGASIQAITESGLTPIHVAAFMGHLNIVLLLLQNGASPDVTNIRGETALHMAARAGQVEVVRCLLRNGALVDARAREEQTPLHIASRLGKTEIVQLLLQHMAHPDAATTNGYTPLHISAREGQVDVASVLLEAGAAHSLATKKGFTPLHVAAKYGSLDVAKLLLQRRAAADSAGKNGYTPLHIAAKKNQMQIASTLLNYGAETNIVTKQGVTPLHLASQEGHTDMVTLLLDKGANIHMSTKSGLTSLHLAAQEDKVNVADILTKHGADQDAHTKLGYTPLIVACHYGNVKMVNFLLKQGANVNAKTKNGYTPLHQAAQQGHTHIINVLLQHGAKPNATTANGNTALAIAKRLGYISVVDTLKVVTEEVTTTTTTITEKHKLNVPETMTEVLDVSDEEGDDTMTGDGGEYLRPEDLKELGDDSLPSSQFLDGMNYLRYSLEGGRSDSLRSFSSDRSHTLSHASYLRDSAVMDDSVVIPSHQVSTLAKEAERNSYRLSWGTENLDNVALSSSPIHSGFLVSFMVDARGGAMRGCRHNGLRIIIPPRKCTAPTRVTCRLVKRHRLATMPPMVEGEGLASRLIEVGPSGAQFLGPVIVEIPHFAALRGKERELVVLRSENGDSWKEHFCDYTEDELNEILNGMDEVLDSPEDLEKKRICRIITRDFPQYFAVVSRIKQDSNLIGPEGGVLSSTVVPQVQAVFPEGALTKRIRVGLQAQPMHSELVKKILGNKATFSPIVTLEPRRRKFHKPITMTIPVPKASSDVMLNGFGGDAPTLRLLCSITGGTTPAQWEDITGTTPLTFVNECVSFTTNVSARFWLIDCRQIQESVTFASQVYREIICVPYMAKFVVFAKSHDPIEARLRCFCMTDDKVDKTLEQQENFAEVARSRDVEVLEGKPIYVDCFGNLVPLTKSGQHHIFSFFAFKENRLPLFVKVRDTTQEPCGRLSFMKEPKSTRGLVHQAICNLNITLPIYTKESESDQEQEEEIDMTSEKNPQDEQERIEERLAYIADHLGFSWTELARELDFTEEQIHQIRIENPNSLQDQSHALLKYWLERDGKHATDTNLVECLTKINRMDIVHLMETNTEPLQERISHSYAEIEQTITLDHSEGFSVLQEELCTAQHKQKEEQAVSKESETCDHPPIVSEEDISVGYSTFQDGVPKTEGDSSATALFPQTHKEQVQQDFSGKMQDLPEESSLEYQQEYFVTTPGTETSETQKAMIVPSSPSKTPEEVSTPAEEEKLYLQTPTSSERGGSPIIQEPEEPSEHREESSPRKTSLVIVESADNQPETCERLDEDAAFEKGDDMPEIPPETVTEEEYIDEHGHTVVKKVTRKIIRRYVSSEGTEKEEIMVQGMPQEPVNIEEGDGYSKVIKRVVLKSDTEQSEDNNE

SEQ ID NO: 26032 - protein, 1065 aa, Homo sapiens
MSLKPQQQQQQQQQQQQQQQQQQQQQQQPPPAAANVRKPGGSGLLASPAAAPSPSSSSVSSSSATAPSSVVAATSGGGRPGLGRGRNSNKGLPQSTISFDGIYANMRMVHILTSVVGSKCEVQVKNGGIYEGVFKTYSPKCDLVLDAAHEKSTESSSGPKREEIMESILFKCSDFVVVQFKDMDSSYAKRDAFTDSAISAKVNGEHKEKDLEPWDAGELTANEELEALENDVSNGWDPNDMFRYNEENYGVVSTYDSSLSSYTVPLERDNSEEFLKREARANQLAEEIESSAQYKARVALENDDRSEEEKYTAVQRNSSEREGHSINTRENKYIPPGQRNREVISWGSGRQNSPRMGQPGSGSMPSRSTSHTSDFNPNSGSDQRVVNGGPPRMSPKAQRHPRNHRVSAGRGSISSGLEFVSHNPPSEAATPPVARTSPSGGTWSSVVSGVPRLSPKTHRPRSPRQNSIGNTPSGPVLASPQAGIIPTEAVAMPIPAASPTPASPASNRAVTPSSEAKDSRLQDQRQNSPAGNKENIKPNETSPSFSKAENKGISPVVSEHRKQIDDLKKFKNDFRLQPSSTSESMDQLLNKNREGEKSRDLIKDKIEPSAKDSFIENSSSNCTSGSSKPNSPSISPSILSNTEHKRGPEVTSQGVQTSSPACKQEKDDKEEKKDAAEQVRKSTLNPNAKEFNPRSFSQPKPSTTPTSPRPQAQPSPSMVGHQQPTPVYTQPVCFAPNMMYPVPVSPGVQPLYPIPMTPMPVNQAKTYRAVPNMPQQRQDQHHQSAMMHPASAAGPPIAATPPAYSTQYVAYSPQQFPNQPLVQHVPHYQSQHPHVYSPVIQGNARMMAPPTHAQPGLVSSSATQYGAHEQTHAMYVSTGSLAQQYAHPNATLHPHTPHPQPSATPTGQQQSQHGGSHPAPSPVQHHQHQAAQALHLASPQQQSAIYHAGLAPTPPSMTPASNTQSPQNSFPAAQQTVFTIHPSHVQPAYTNPPHMAHVPQAHVQSGMVPSHPTAHAPMMLMTTQPPGGPQAALAQSALQPIPVSTTAHFPYMTHPSVQAHHQQQL

SEQ ID NO: 26033 - protein, 542 aa, Homo sapiens
ALFKQKHQSMVKKTGDWKKHVETNSRLMKKFEESRAELEKVLRIAQEGLEEKGDPEELLRRHTEFFSQLDQRVLNAFLKACDELTDILPEQEQQGLQEAVRKLHKQWKDLQGEAPYHLLHLKIDVEKNRFLASVEECRTELDRETKLMPQEGSEKIIKEHRVFFSDKGPHHLCEKRLQLIEELCVKLPVRDPVRDTPGTCHVTLKELRAAIDSTYRKLMEDPDKWKDYTSRFSEFSSWISTNETQLKGIKGEAIDTANHGEVKRAVEEIRNGVTKRGETLSWLKSRLKVLTEVSSENEAQKQGDELAKLSSSFKALVTLLSEVEKMLSNFGDCVQYKEIVKNSLEELISGSKEVQEQAEKILDTENLFEAQQLLLHHQQKTKRISAKKRDVQQQIAQAQQGEGGLPDRGHEELRKLESTLDGLERSRERQERRIQVTLRKWERFETNKETVVRYLFQTGSSHERFLSFSSLESLSSELEQTKEFSKRTESIAVQAENLVKEASEIPLGPQNKQLLQQQAKSIKEQVKKLEDTLEEEYVIDKS

SEQ ID NO: 26034 - protein, 307 aa, Homo sapiens
MPFMRKILSNMIDSEAHEKRPPILTSSKQDISPHITNVGEMKHYLCGCCAAFNNVAITYPIQKVLFRQQLYGIKTRDAVLQLRRDGFRNLYRGILPPLMQKTTTLALMFGLYEDLSCLLRKHVRAPEFATHGVAAVLAGTAEAIFTPLERVQTLLQNHKHHDKFTNTYQAFKALKCHGIGEYYRGLVPILFRNGLSNVLFFGLRGPIKEHLPTATTHSAHLVNDFIGGGLLGAMLGFLCFPINVVKTRLQSQIGGEFQSFPKVFQKIWLERDRKLINLFRGAHLNYHRSLISWGIINATYEFLLKFI

SEQ ID NO: 26035 - protein, 629 aa, Homo sapiens
MEQTVLVPPGPDSFNFFTRESLAAIERRIAEEKAKNPKPDKKDDDENGPKPNSDLEAGKNLPFIYGDIPPEMVSEPLEDLDPYYINKKTFIVLNKGKAIFRFSATSALYILTPFNPLRKIAIKILVHSLFSMLIMCTILTNCVFMTMSNPPDWTKNVEYTFTGIYTFESLIKIIARGFCLEDFTFLRDPWNWLDFTVITFAYVTEFVDLGNVSALRTFRVLRALKTISVIPGLKTIVGALIQSVKKLSDVMILTVFCLSVFALIGLQLFMGNLRNKCIQWPPTNASLEEHSIEKNITVNYNGTLINETVFEFDWKSYIQDSRYHYFLEGFLDALLCGNSSDAGQCPEGYMCVKAGRNPNYGYTSFDTFSWAFLSLFRLMTQDFWENLYQLTLRAAGKTYMIFFVLVIFLGSFYLINLILAVVAMAYEEQNQATLEEAEQKEAEFQQMIEQLKKQQEAAQQAATATASEHSREPSAAGRLSDSSSEASKLSSKSAKERRNRRKKRKQKEQSGGEEKDEDEFQKSESEDSIRRKGFRFSIEGNRLTYEKRYSSPHQSLLSIRGSLFSPRRNSRTSLFSFRGRAKDVGSENDFADDEHSTFEDNESRRDSLFVPRRHGERRNSNLSQTRNNH

SEQ ID NO: 26036 - protein, 820 aa, Homo sapiens
MLKGGSKGPALLALRSGTDPRAQMSDDPAEGTLDPCSAPGLTDEKVKAYLSLHPQVLDEFVSESVSAETVEKWLKRKNNKSEDESAPKEVSRYQDTNMQGVVYELNSYIEQRLDTGGDNQLLLYELSSIIKIATKADGFALYFLGECNNSLCIFTPPGIKEGKPRLIPAGPITQGTTVSAYVAKSRKTLLVEDILGDERFPRGTGLESGTRIQSVLCLPIVTAIGDLIGILELYRHWGKEAFCLSHQEVATANLAWASVAIHQVQVCRGLAKQTELNDFLLDVSKTYFDNIVAIDSLLEHIMIYAKNLVNADRCALFQVDHKNKELYSDLFDIGEEKEGKPVFKKTKEIRFSIEKGIAGQVARTGEVLNIPDAYADPRFNREVDLYTGYTTRNILCMPIVSRGSVIGVVQMVNKISGSAFSKTDENNFKMFAVFCALALHCANMYHRIRHSECIYRVTMEKLSYHSICTSEEWQGLMQFTLPVRLCKEIELFHFDIGPFENMWPGIFVYMVHRSCGTSCFELEKLCRFIMSVKKNYRRVPYHNWKHAVTVAHCMYAILQNNHTLFTDLERKGLLIACLCHDLDHRGFSNSYLQKFDHPLAALYSTSTMEQHHFSQTVSILQLEGHNIFSTLSSSEYEQVLEIIRKAIIATDLALYFGNRKQLEEMYQTGSLNLNNQSHRDRVIGLMMTACDLCSVTKLWPVTKLTANDIYAEFWAEGDEMKKLGIQPIPMMDRDKKDEVPQGQLGFYNAVAIPCYTTLTQILPPTEPLLKACSHHRNLPGHVVLVTMSEGPTQCRCAELCHRTVWLVFKTKSRNPLFSFS

SEQ ID NO: 26037 - protein, 1818 aa, Homo sapiens
MTTMLQKSDSNASFLRAARAGNLDKVVEYLKGGIDINTCNQNGLNALHLAAKEGHVGLVQELLGRGSSVDSATKKGNTALHIASLAGQAEVVKVLVKEGANINAQSQNGFTPLYMAAQENHIDVVKYLLENGANQSTATEDGFTPLAVALQQGHNQAVAILLENDTKGKVRLPALHIAARKDDTKSAALLLQNDHNADVQSKMMVNRTTESGFTPLHIAAHYGNVNVATLLLNRGAAVDFTARNGITPLHVASKRGNTNMVKLLLDRGGQIDAKTRDGLTPLHCAARSGHDQVVELLLERGAPLLARTKNGLSPLHMAAQGDHVECVKHLLQHKAPVDDVTLDYLTALHVAAHCGHYRVTKLLLDKRANPNARALNGFTPLHIACKKNRIKVMELLVKYGASIQAITESGLTPIHVAAFMGHLNIVLLLLQNGASPDVTNIRGETALHMAARAGQVEVVRCLLRNGALVDARAREEQTPLHIASRLGKTEIVQLLLQHMAHPDAATTNGYTPLHISAREGQVDVASVLLEAGAAHSLATKKGFTPLHVAAKYGSLDVAKLLLQRRAAADSAGKNGLTPLHVAAHYDNQKVALLLLEKGASPHATAKNGYTPLHIAAKKNQMQIASTLLNYGAETNIVTKQGVTPLHLASQEGHTDMVTLLLDKGANIHMSTKSGLTSLHLAAQEDKVNVADILTKHGADQDAHTKLGYTPLIVACHYGNVKMVNFLLKQGANVNAKTKNGYTPLHQAAQQGHTHIINVLLQHGAKPNATTANGNTALAIAKRLGYISVVDTLKVVTEEVTTTTTTITEKHKLNVPETMTEVLDVSDEEGDDTMTGDGGEYLRPEDLKELGDDSLPSSQFLDGMNYLRYSLEGGRSDSLRSFSSDRSHTLSHASYLRDSAVMDDSVVIPSHQVSTLAKEAERNSYRLSWGTENLDNVALSSSPIHSGFLVSFMVDARGGAMRGCRHNGLRIIIPPRKCTAPTRVTCRLVKRHRLATMPPMVEGEGLASRLIEVGPSGAQFLGPVIVEIPHFAALRGKERELVVLRSENGDSWKEHFCDYTEDELNEILNGMDEVLDSPEDLEKKRICRIITRDFPQYFAVVSRIKQDSNLIGPEGGVLSSTVVPQVQAVFPEGALTKRIRVGLQAQPMHSELVKKILGNKATFSPIVTLEPRRRKFHKPITMTIPVPKASSDVMLNGFGGDAPTLRLLCSITGGTTPAQWEDITGTTPLTFVNECVSFTTNVSARFWLIDCRQIQESVTFASQVYREIICVPYMAKFVVFAKSHDPIEARLRCFCMTDDKVDKTLEQQENFAEVARSRDVEVLEGKPIYVDCFGNLVPLTKSGQHHIFSFFAFKENRLPLFVKVRDTTQEPCGRLSFMKEPKSTRGLVHQAICNLNITLPIYTKESESDQEQEEEIDMTSEKNPQDEQERIEERLAYIADHLGFSWTELARELDFTEEQIHQIRIENPNSLQDQSHALLKYWLERDGKHATDTNLVECLTKINRMDIVHLMETNTEPLQERISHSYAEIEQTITLDHSEGFSVLQEELCTAQHKQKEEQAVSKESETCDHPPIVSEEDISVGYSTFQDGVPKTEGDSSATALFPQTHKEQVQQDFSGKMQDLPEESSLEYQQEYFVTTPGTETSETQKAMIVPSSPSKTPEEVSTPAEEEKLYLQTPTSSERGGSPIIQEPEEPSEHREESSPRKTSLVIVESADNQPETCERLDEDAAFEKGDDMPEIPPETVTEEEYIDEHGHTVVKKVTRKIIRRYVSSEGTEKEEIMVQGMPQEPVNIEEGDGYSKVIKRVVLKSDTEQSEDNNE

SEQ ID NO: 26038 - protein, 1267 aa, Homo sapiens
MPLDFLPLCSALVHSDIFMYYRFINCPHVVLGQFVCIAQQDYWRILNHVEKNTHKVEEEGEIVMVHEHRELDRSGTRKGHIVIKATPERLIMHLIEEHSIVDPTYIEDFLLTYRTFLESPLDVGIKLLEWFKIDSLRDKVTRIVLLWVNNHFNDFEGDPAMTRFLEEFEKNLEDTKMNGHLRLLNIACAAKAKWRQVVLQKASRESPLQFSLNGGSEKGFGIFVEGVEPGSKAADSGLKRGDQIMEVNGQNFENITFMKAVEILRNNTHLALTVKTNIFVFKELLFRTEQEKSGVPHIPKIAEKKSNRHSIQHVPGDIEQTSQEKGSKKVKANTVSGGRNKIRKILDKTRFSILPPKLFSDGGLSQSQDDSIVGTRHCRHSLAIMPIPGTLSSSSPDLLQPTTSMLDFSNPSDIPDQVIRVFKVDQQSCYIIISKDTTAKEVVFHAVHEFGLTGASDTYSLCEVSVTPEGVIKQRRLPDQFSKLADRIQLNGRYYLKNNMETETLCSDEDAQELVKESQLSMLQLSTIEVATQLSMRDFDLFRNIEPTEYIDDLFKLNSKTGNTHLKRFEDIVNQETFWVASEILTEANQLKRMKIIKHFIKIALHCRECKNFNSMFAIISGLNLASVARLRGTWEKLPSKYEKHLQDLQDIFDPSRNMAKYRNILSSQSMQPPIIPLFPVVKKDMTFLHEGNDSKVDGLVNFEKLRMISKEIRQVVRMTSANMDPAMMFRQRSLSQGSTNSNMLDVQGGAHKKRARRSSLLNAKKLYEDAQMARKVKQYLSSLDVETDEEKFQMMSLQWEPAYGTLTKNLSEKRSAKSSEMSPVPMRSAGQTTKAHLHQPHRVSQVLQVPAVNLHPIRKKGQTKDPALNTSLPQKVLGTTEEISGKKHTEDTISVASSLHSSPPASPQGSPHKGYTLIPSAKSDNLSDSSHSEISSRSSIVSNCSVDSMSAALQDERCSSQALAVPESTGALEKTEHASGIGDHSQHGPGWTLLKPSLIKCLAVSSSVSNEEISQEHIIIEAADSGRGSWTSCSSSSHDNFQSLPNPKSWDFLNSYRHTHLDDPIAEVEPTDSEPYSCSKSCSRTCGQCKGSLERKSWTSSSSLSDTYEPNYGTVKQRVLESTPAESSEGLDPKDATDPVYKTVTSSTEKGLIVYCVTSPKKDDRYREPPPTPPGYLGISLADLKEGPHTHLKPPDYSVAVQRSKMMHNSLSRLPPASLSSNLVACVPSKIVTQPQRHNLQPFHPKLGDVTDADSEADENEQVSAV

SEQ ID NO: 26039 - protein, 435 aa, Homo sapiens
MAAPSLHPSLGPGIGSPGQLHSPISTLSSPINGMGPPFSVISSPMGPHSMSVPTTPTLGFSTGSPQLSSPMNPVSSSEDIKPPLGLNGVLKVPAHPSGNMASFTKHICAICGDRSSGKHYGVYSCEGCKGFFKRTVRKDLTYTCRDNKDCLIDKRQRNRCQYCRYQKCLAMGMKREAVQEERQRGKDRNENEVESTSSANEDMPVERILEAELAVEPKTETYVEANMGLNPSSPNDPVTNICQAADKQLFTLVEWAKRIPHFSELPLDDQVILLRAGWNELLIASFSHRSIAVKDGILLATGLHVHRNSAHSAGVGAIFDRVLTELVSKMRDMQMDKTELGCLRAIVLFNPDSKGLSNPAEVEALREKVYASLEAYCKHKYPEQPGRFAKLLLRLPALRSIGLKCLEHLFFFKLIGDTPIDTFLMEMLEAPHQMT

SEQ ID NO: 26040 - protein, 1858 aa, Homo sapiens
MTTMLQKSDSNASFLRAARAGNLDKVVEYLKGGIDINTCNQNGLNALHLAAKEGHVGLVQELLGRGSSVDSATKKGNTALHIASLAGQAEVVKVLVKEGANINAQSQNGFTPLYMAAQENHIDVVKYLLENGANQSTATEDGFTPLAVALQQGHNQAVAILLENDTKGKVRLPALHIAARKDDTKSAALLLQNDHNADVQSKMMVNRTTESGFTPLHIAAHYGNVNVATLLLNRGAAVDFTARNGITPLHVASKRGNTNMVKLLLDRGGQIDAKTRDGLTPLHCAARSGHDQVVELLLERGAPLLARTKNGLSPLHMAAQGDHVECVKHLLQHKAPVDDVTLDYLTALHVAAHCGHYRVTKLLLDKRANPNARALNGFTPLHIACKKNRIKVMELLVKYGASIQAITESGLTPIHVAAFMGHLNIVLLLLQNGASPDVTNIRGETALHMAARAGQVEVVRCLLRNGALVDARAREEQTPLHIASRLGKTEIVQLLLQHMAHPDAATTNGYTPLHISAREGQVDVASVLLEAGAAHSLATKKGFTPLHVAAKYGSLDVAKLLLQRRAAADSAGKNGYTPLHIAAKKNQMQIASTLLNYGAETNIVTKQGVTPLHLASQEGHTDMVTLLLDKGANIHMSTKSGLTSLHLAAQEDKVNVADILTKHGADQDAHTKLGYTPLIVACHYGNVKMVNFLLKQGANVNAKTKNGYTPLHQAAQQGHTHIINVLLQHGAKPNATTANGNTALAIAKRLGYISVVDTLKVVTEEVTTTTTTITEKHKLNVPETMTEVLDVSDEEGDDTMTGDGGEYLRPEDLKELGDDSLPSSQFLDGMNYLRYSLEGGRSDSLRSFSSDRSHTLSHASYLRDSAVMDDSVVIPSHQVSTLAKEAERNSYRLSWGTENLDNVALSSSPIHSGRASPCLERDNSSFLVSFMVDARGGAMRGCRHNGLRIIIPPRKCTAPTRVTCRLVKRHRLATMPPMVEGEGLASRLIEVGPSGAQFLGPVIVEIPHFAALRGKERELVVLRSENGDSWKEHFCDYTEDELNEILNGMDEVLDSPEDLEKKRICRIITRDFPQYFAVVSRIKQDSNLIGPEGGVLSSTVVPQVQAVFPEGALTKRIRVGLQAQPMHSELVKKILGNKATFSPIVTLEPRRRKFHKPITMTIPVPKASSDVMLNGFGGDAPTLRLLCSITGGTTPAQWEDITGTTPLTFVNECVSFTTNVSARFWLIDCRQIQESVTFASQVYREIICVPYMAKFVVFAKSHDPIEARLRCFCMTDDKVDKTLEQQENFAEVARSRDVEVLEGKPIYVDCFGNLVPLTKSGQHHIFSFFAFKENRLPLFVKVRDTTQEPCGRLSFMKEPKSTRGLVHQAICNLNITLPIYTKESESDQEQEEEIDMTSEKNPQDEQERIEERLAYIADHLGFSWTELARELDFTEEQIHQIRIENPNSLQDQSHALLKYWLERDGKHATDTNLVECLTKINRMDIVHLMETNTEPLQERISHSYAEIEQTITLDHSEGFSVLQEELCTAQHKQKEEQAVSKESETCDHPPIVSEEDISVGYSTFQDGVPKTEGDSSATALFPQTHKEQVQQDFSGKMQDLPEESSLEYQQEYFVTTPGTETSETQKAMIVPSSPSKTPEEVSTPAEEEKLYLQTPTSSERGGSPIIQEPEEPSEHREESSPRKTSLVIVESADNQPETCERLDEDAAFEKGDDMPEIPPETVTEEEYIDEHGHTVVKKVTRKIIRRYVSSEGTEKEEIMVQGMPQEPVNIEEGDGYSKVIKRVVLKSDTEQSEVTLCEPSILSSTSQFQAEPVEGRRVSKVVKTTVVLGERMEKHLGDSSLATDLPSAKDDFEEDNNE

SEQ ID NO: 26041 - protein, 1872 aa, Homo sapiens
MTTMLQKSDSNASFLRAARAGNLDKVVEYLKGGIDINTCNQNGLNALHLAAKEGHVGLVQELLGRGSSVDSATKKGNTALHIASLAGQAEVVKVLVKEGANINAQSQNGFTPLYMAAQENHIDVVKYLLENGANQSTATEDGFTPLAVALQQGHNQAVAILLENDTKGKVRLPALHIAARKDDTKSAALLLQNDHNADVQSKMMVNRTTESGFTPLHIAAHYGNVNVATLLLNRGAAVDFTARNGITPLHVASKRGNTNMVKLLLDRGGQIDAKTRDGLTPLHCAARSGHDQVVELLLERGAPLLARTKNGLSPLHMAAQGDHVECVKHLLQHKAPVDDVTLDYLTALHVAAHCGHYRVTKLLLDKRANPNARALNGFTPLHIACKKNRIKVMELLVKYGASIQAITESGLTPIHVAAFMGHLNIVLLLLQNGASPDVTNIRGETALHMAARAGQVEVVRCLLRNGALVDARAREEQTPLHIASRLGKTEIVQLLLQHMAHPDAATTNGYTPLHISAREGQVDVASVLLEAGAAHSLATKKGFTPLHVAAKYGSLDVAKLLLQRRAAADSAGKNGLTPLHVAAHYDNQKVALLLLEKGASPHATAKNGYTPLHIAAKKNQMQIASTLLNYGAETNIVTKQGVTPLHLASQEGHTDMVTLLLDKGANIHMSTKSGLTSLHLAAQEDKVNVADILTKHGADQDAHTKLGYTPLIVACHYGNVKMVNFLLKQGANVNAKTKNGYTPLHQAAQQGHTHIINVLLQHGAKPNATTANGNTALAIAKRLGYISVVDTLKVVTEEVTTTTTTITEKHKLNVPETMTEVLDVSDEEGDDTMTGDGGEYLRPEDLKELGDDSLPSSQFLDGMNYLRYSLEGGRSDSLRSFSSDRSHTLSHASYLRDSAVMDDSVVIPSHQVSTLAKEAERNSYRLSWGTENLDNVALSSSPIHSGFLVSFMVDARGGAMRGCRHNGLRIIIPPRKCTAPTRVTCRLVKRHRLATMPPMVEGEGLASRLIEVGPSGAQFLGPVIVEIPHFAALRGKERELVVLRSENGDSWKEHFCDYTEDELNEILNGMDEVLDSPEDLEKKRICRIITRDFPQYFAVVSRIKQDSNLIGPEGGVLSSTVVPQVQAVFPEGALTKRIRVGLQAQPMHSELVKKILGNKATFSPIVTLEPRRRKFHKPITMTIPVPKASSDVMLNGFGGDAPTLRLLCSITGGTTPAQWEDITGTTPLTFVNECVSFTTNVSARFWLIDCRQIQESVTFASQVYREIICVPYMAKFVVFAKSHDPIEARLRCFCMTDDKVDKTLEQQENFAEVARSRDVEVLEGKPIYVDCFGNLVPLTKSGQHHIFSFFAFKENRLPLFVKVRDTTQEPCGRLSFMKEPKSTRGLVHQAICNLNITLPIYTKESESDQEQEEEIDMTSEKNPQDEQERIEERLAYIADHLGFSWTELARELDFTEEQIHQIRIENPNSLQDQSHALLKYWLERDGKHATDTNLVECLTKINRMDIVHLMETNTEPLQERISHSYAEIEQTITLDHSEGFSVLQEELCTAQHKQKEEQAVSKESETCDHPPIVSEEDISVGYSTFQDGVPKTEGDSSATALFPQTHKEQVQQDFSGKMQDLPEESSLEYQQEYFVTTPGTETSETQKAMIVPSSPSKTPEEVSTPAEEEKLYLQTPTSSERGGSPIIQEPEEPSEHREESSPRKTSLVIVESADNQPETCERLDEDAAFEKGDDMPEIPPETVTEEEYIDEHGHTVVKKVTRKIIRRYVSSEGTEKEEIMVQGMPQEPVNIEEGDGYSKVIKRVVLKSDTEQSETLSIVCPSIIRSLCVSPAFCPVPHNFRLSQWKAVESAKLLKQLWYLERGWRNIWGILV

SEQ ID NO: 26042 - protein, 567 aa, Homo sapiens
MLGFLSRGPSMKLCMGLACVLSLWNTVSGIKGEAKKEKGMTFLPTTGKWVIRAPFQLTCLEIKMLRRKKMGHSRAALNPDLLLSGLREEERKEKGVAFLATTELPARSIDLSALNLTELVNGMLSRALKDSKKFFSLLSVTSYSSFAFHKFSVAVYNISNLKTVDPAKFPTRYCYCLNNRTNDLSDFTALLVDIIGNSTSYLTEIFKSTSILSVNQSNESDCIFICVMTGKSGRNLSDFWEIEEKYPIINYTFTSGLSGVLGAATRGTARTSKPTTKSQKTLPSTSPGHWTQSTPWASALRSSPWTETAAPSETEETLNTGRPPELPARATATWFSASHTLPALATRRVARTQWLTADRQTWASISSVPWAQTISEKKPGGSLWETRSSPPTTAGTEEAMNTTSLLAPAAEIMATPGSPSQASPTLGAFTHGTQTPSPTKATAPRYPQTGDLSAEWPFTAGEEPVLVPRPHQVSRCPQPLFKVGAMAAAPLTLAIQRLNPCLMELCQFFQQCLCMSQRSPRTEDMRYCLEYYSWFLKNATYICQRVKRVSHSHTLKQKCLENICKSV

SEQ ID NO: 26043 - protein, 1072 aa, Homo sapiens
MPAARRFPGLELSFPLLARLRRRLYTRLGGGRMQPEEGTGWLLELLSEVQLQQYFLRLRDDLNVTRLSHFEYVKNEDLEKIGMGRPGQRRLWEAVKRRKALCKRKSWMSKVFSGKRLEAEFPPHHSQSTFRKTSPAPGGPAGEGPLQSLTCLIGEKDLRLLEKLGDGSFGVVRRGEWDAPSGKTVSVAVKCLKPDVLSQPEAMDDFIREVNAMHSLDHRNLIRLYGVVLTPPMKMVTELAPLGSLLDRLRKHQGHFLLGTLSRYAVQVAEGMGYLESKRFIHRDLAARNLLLATRDLVKIGDFGLMRALPQNDDHYVMQEHRKVPFAWCAPESLKTRTFSHASDTWMFGVTLWEMFTYGQEPWIGLNGSQILHKIDKEGERLPRPEDCPQDIYNVMVQCWAHKPEDRPTFVALRDFLLEAQPTDMRALQDFEEPDKLHIQMNDVITVIEGRAENYWWRGQNTRTLCVGPFPRNVVTSVAGLSAQDISQPLQNSFIHTGHGDSDPRHCWGFPDRIDELYLGNPMDPPDLLSVELSTSRPPQHLGGVKKPTYDPVSEDQDPLSSDFKRLGLRKPGLPRGLWLAKPSARVPGTKASRGSGAEVTLIDFGEEPVVPALRPCAPSLAQLAMDACSLLDETPPQSPTRALPRPLHPTPVVDWDARPLPPPPAYDDVAQDEDDFEICSINSTLVGAGVPAGPSQGQTNYAFVPEQARPPPPLEDNLFLPPQGGGKPPSSAQTAEIFQALQQECMRQLQAPAGSPAPSPSPGGDDKPQVPPRVPIPPRPTRPHVQLSPAPPGEEETSQWPGPASPPRVPPREPLSPQGSRTPSPLVPPGSSPLPPRLSSSPGKTMPTTQSFASDPKYATPQVIQAPGPRAGPCILPIVRDGKKVSSTHYYLLPERPSYLERYQRFLREAQSPEEPTPLPVPLLLPPPSTPAPAAPTATVRPMPQAALDPKANFSTNNSNPGARPPPPRATARLPQRGCPGDGPEAGRPADKIQMLQAMVHGVTTEECQAALQCHGWSVQRAAQYLKVEQLFGLGLRPRGECHKVLEMFDWNLEQAGCHLLGSWGPAHHKR

SEQ ID NO: 26044 - protein, 1353 aa, Homo sapiens
MEELSADEIRRRRLARLAGGQTSQPTTPLTSPQRENPPGPPIAASAPGPSQSLGLNVHNMTPATSPIGASGVAHRSQSSEGVSSLSSSPSNSLETQSQSLSRSQSMDIDGVSCEKSMSQVDVDSGIENMEVDENDRREKRSLSDKEPSSGPEVSEEQALQLVCKIFRVSWKDRDRDVIFLSSLSAQFKQNPKEVFSDFKDLIGQILMEVLMMSTQTRDENPFASLTATSQPIAAAARSPDRNLLLNTGSNPGTSPMFCSVASFGASSLSSLYESSPAPTPSFWSSVPVMGPSLASPSRAASQLAVPSTPLSPHSAASGTAAGSQPSSPRYRPYTVTHPWASSGVSILSSSPSPPALASSPQAVPASSSRQRPSSTGPPLPPASPSATSRRPSSLRISPSMYDNPFSFLFLALSGDSSDEEDEEEDDDDGDGDDEGGGGGDDFSCVQFGSSLGASGGASNWDSYSDHFTIETCKETDMLNYLIECFDRVGIEEKKAPKMCSQPAVSQLLSNIRSQCISHTALVLQGSLTQPRSLQQPSFLVPYMLCRNLPYGFIQELVRTTHQDEEVFKQIFIPILQGLALAAKECSLDSDYFKYPLMALGELCETKFGKTHPVCNLVASLRLWLPKSLSPGCGRELQRLSYLGAFFSFSVFAEDDVKVVEKYFSGPAITLENTRVVSQSLQHYLELGRQELFKILHSILLNGETREAALSYMAAVVNANMKKAQMQTDDRLVSTDGFMLNFLWVLQQLSTKIKLETVDPTYIFHPRCRITLPNDETRVNATMEDVNDWLTELYGDQPPFSEPKFPTECFFLTLHAHHLSILPSCRRYIRRLRAIRELNRTVEDLKNNESQWKDSPLATRHREMLKRCKTQLKKLVRCKACADAGLLDESFLRRCLNFYGLLIQLLLRILDPAYPDITLPLNSDVPKVFAALPEFYVEDVAEFLFFIVQYSPQALYEPCTQDIVMFLVVMLCNQNYIRNPYLVAKLVEVMFMTNPAVQPRTQKFFEMIENHPLSTKLLVPSLMKFYTDVEHTGATSEFYDKFTIRYHISTIFKSLWQNIAHHGTFMEEFNSGKQFVRYINMLINDTTFLLDESLESLKRIHEVQEEMKNKEQWDQLPRDQQQARQSQLAQDERVSRSYLALATETVDMFHILTKQVQKPFLRPELGPRLAAMLNFNLQQLCGPKCRDLKVENPEKYGFEPKKLLDQLTDIYLQLDCARFAKAIADDQRSYSKELFEEVISKMRKAGIKSTIAIEKFKLLAEKVEEIVAKNARAEIDYSDAPDEFRDPLMDTLMTDPVRLPSGTIMDRSIILRHLLNSPTDPFNRQTLTESMLEPVPELKEQIQAWMREKQNSDH

SEQ ID NO: 26045 - protein, 128 aa, Homo sapiens
MVQNVILVFFRRRLSQRPAVEELERRNILKQRNDQTEQEERREIKQRLTRKLNQRPTVDELRDRKILIRFSDYVEVAKAQDYDRRADKPWTRLSAADKAAIRKELNEYKSNEMEVHASSKHLTRFHRP

SEQ ID NO: 26046 - protein, 1851 aa, Homo sapiens
MTTMLQKSDSNASFLRAARAGNLDKVVEYLKGGIDINTCNQNGLNALHLAAKEGHVGLVQELLGRGSSVDSATKKGNTALHIASLAGQAEVVKVLVKEGANINAQSQNGFTPLYMAAQENHIDVVKYLLENGANQSTATEDGFTPLAVALQQGHNQAVAILLENDTKGKVRLPALHIAARKDDTKSAALLLQNDHNADVQSKMMVNRTTESGFTPLHIAAHYGNVNVATLLLNRGAAVDFTARNGITPLHVASKRGNTNMVKLLLDRGGQIDAKTRDGLTPLHCAARSGHDQVVELLLERGAPLLARTKNGLSPLHMAAQGDHVECVKHLLQHKAPVDDVTLDYLTALHVAAHCGHYRVTKLLLDKRANPNARALNGFTPLHIACKKNRIKVMELLVKYGASIQAITESGLTPIHVAAFMGHLNIVLLLLQNGASPDVTNIRGETALHMAARAGQVEVVRCLLRNGALVDARAREEQTPLHIASRLGKTEIVQLLLQHMAHPDAATTNGYTPLHISAREGQVDVASVLLEAGAAHSLATKKGFTPLHVAAKYGSLDVAKLLLQRRAAADSAGKNGLTPLHVAAHYDNQKVALLLLEKGASPHATAKNGYTPLHIAAKKNQMQIASTLLNYGAETNIVTKQGVTPLHLASQEGHTDMVTLLLDKGANIHMSTKSGLTSLHLAAQEDKVNVADILTKHGADQDAHTKLGYTPLIVACHYGNVKMVNFLLKQGANVNAKTKNGYTPLHQAAQQGHTHIINVLLQHGAKPNATTANGNTALAIAKRLGYISVVDTLKVVTEEVTTTTTTITEKHKLNVPETMTEVLDVSDEEGDDTMTGDGGEYLRPEDLKELGDDSLPSSQFLDGMNYLRYSLEGGRSDSLRSFSSDRSHTLSHASYLRDSAVMDDSVVIPSHQVSTLAKEAERNSYRLSWGTENLDNVALSSSPIHSGFLVSFMVDARGGAMRGCRHNGLRIIIPPRKCTAPTRVTCRLVKRHRLATMPPMVEGEGLASRLIEVGPSGAQFLGKLHLPTAPPPLNEGESLVSRILQLGPPGTKFLGPVIVEIPHFAALRGKERELVVLRSENGDSWKEHFCDYTEDELNEILNGMDEVLDSPEDLEKKRICRIITRDFPQYFAVVSRIKQDSNLIGPEGGVLSSTVVPQVQAVFPEGALTKRIRVGLQAQPMHSELVKKILGNKATFSPIVTLEPRRRKFHKPITMTIPVPKASSDVMLNGFGGDAPTLRLLCSITGGTTPAQWEDITGTTPLTFVNECVSFTTNVSARFWLIDCRQIQESVTFASQVYREIICVPYMAKFVVFAKSHDPIEARLRCFCMTDDKVDKTLEQQENFAEVARSRDVEVLEGKPIYVDCFGNLVPLTKSGQHHIFSFFAFKENRLPLFVKVRDTTQEPCGRLSFMKEPKSTRGLVHQAICNLNITLPIYTKESESDQEQEEEIDMTSEKNPQDEQERIEERLAYIADHLGFSWTELARELDFTEEQIHQIRIENPNSLQDQSHALLKYWLERDGKHATDTNLVECLTKINRMDIVHLMETNTEPLQERISHSYAEIEQTITLDHSEGFSVLQEELCTAQHKQKEEQAVSKESETCDHPPIVSEEDISVGYSTFQDGVPKTEGDSSATALFPQTHKEQVQQDFSGKMQDLPEESSLEYQQEYFVTTPGTETSETQKAMIVPSSPSKTPEEVSTPAEEEKLYLQTPTSSERGGSPIIQEPEEPSEHREESSPRKTSLVIVESADNQPETCERLDEDAAFEKGDDMPEIPPETVTEEEYIDEHGHTVVKKVTRKIIRRYVSSEGTEKEEIMVQGMPQEPVNIEEGDGYSKVIKRVVLKSDTEQSEDNNE

SEQ ID NO: 26047 - protein, 526 aa, Homo sapiens
MKRTKCADIDVETPDSILVNTNLRALINKHTFSVLPGDCQQRLLLLLPEVDRQVGPDGLMKLNGSALNNEFFTSAAQGWKERLSEGEFTPEMQVRIRQEIEKEKKVEPWKEQFFESYYGQSSGLSLEDSKKLTASPSDPKVKKTPAEQPKSMPVSEASLIRIVPVVSQSECKEEALQMSSPGRKEECESQGEVQPNFSTSSEPLLSSALNTHELSSILPIKCPKDEDLLEQKPVTSAEQESEKNHLTTASNYNKSESQESLVTSPSKPKSPGVEKPIVKPTAGAGPQETNMKEPLATLVDQSPESLKRKSSLTQEEAPVSWEKRPRVTENRQHQQPFQVSPQPFLNRGDRIQVRKVPPLKIPVSRISPMPFHPSQVSPRARFPVSITSPNRTGARTLADIKAKAQLVKAQRAAAAAAAAAAAAASVGGTIPGPGPGGGQGPGEGGEGQTARGGSPGSDRVSETGKGPTLELAGTGSRGGTRELLPCGPETQPQSETKTTPSQAQPHSVSGAQLQQTPPVPPTPAVS

SEQ ID NO: 26048 - protein, 386 aa, Homo sapiens
MESPISTSFYTDTKGRKPFLLAAERGHVEMIEKLTFLNLHTSEKDKIQWSTLWTAALTKMKTSRNSIAALTIEGACSPGTGVSTSSVSLLQGGNTALHLAAKHGHSPAVQVLLAQWQDINEMNELNISSLQIATRNGHASLVNFLLSENVDLHQKVEPKESPLHLVVINNHITVVNSLLSAQHDIDILNQKQQTPLHVAADRGNVELVETLLKAGCDLKAVDKQGKTALAVASRSNHSLVVGMLIKAERYYAWREEHHESIRDPSTGFTLTFKQDHSLETRHIRTLLWDLAYHQLKANEWQRLARSWNFTDDQIRAIEEQWSGNESFREHGHRALLIWLHGTLMTQGDPAKQLYEELVHAGFPKLAEKTRHFKSKTDSNSKKCVVS

SEQ ID NO: 26049 - protein, 1817 aa, Homo sapiens
MTTMLQKSDSNASFLRAARAGNLDKVVEYLKGGIDINTCNQNGLNALHLAAKEGHVGLVQELLGRGSSVDSATKKGNTALHIASLAGQAEVVKVLVKEGANINAQSQNGFTPLYMAAQENHIDVVKYLLENGANQSTATEDGFTPLAVALQQGHNQAVAILLENDTKGKVRLPALHIAARKDDTKSAALLLQNDHNADVQSKSGFTPLHIAAHYGNVNVATLLLNRGAAVDFTARNGITPLHVASKRGNTNMVKLLLDRGGQIDAKTRDGLTPLHCAARSGHDQVVELLLERGAPLLARTKNGLSPLHMAAQGDHVECVKHLLQHKAPVDDVTLDYLTALHVAAHCGHYRVTKLLLDKRANPNARALNGFTPLHIACKKNRIKVMELLVKYGASIQAITESGLTPIHVAAFMGHLNIVLLLLQNGASPDVTNIRGETALHMAARAGQVEVVRCLLRNGALVDARAREEQTPLHIASRLGKTEIVQLLLQHMAHPDAATTNGYTPLHISAREGQVDVASVLLEAGAAHSLATKKGFTPLHVAAKYGSLDVAKLLLQRRAAADSAGKNGLTPLHVAAHYDNQKVALLLLEKGASPHATAKNGYTPLHIAAKKNQMQIASTLLNYGAETNIVTKQGVTPLHLASQEGHTDMVTLLLDKGANIHMSTKSGLTSLHLAAQEDKVNVADILTKHGADQDAHTKLGYTPLIVACHYGNVKMVNFLLKQGANVNAKTKNGYTPLHQAAQQGHTHIINVLLQHGAKPNATTANGNTALAIAKRLGYISVVDTLKVVTEEVTTTTTTITEKHKLNVPETMTEVLDVSDEEGDDTMTGDGGEYLRPEDLKELGDDSLPSSQFLDGMNYLRYSLEGGRSDSLRSFSSDRSHTLSHASYLRDSAVMDDSVVIPSHQVSTLAKEAERNSYRLSWGTENLDNVALSSSPIHSGFLVSFMVDARGGAMRGCRHNGLRIIIPPRKCTAPTRVTCRLVKRHRLATMPPMVEGEGLASRLIEVGPSGAQFLGPVIVEIPHFAALRGKERELVVLRSENGDSWKEHFCDYTEDELNEILNGMDEGGSFLVLVLDSPEDLEKKRICRIITRDFPQYFAVVSRIKQDSNLIGPEGGVLSSTVVPQVQAVFPEGALTKRIRVGLQAQPMHSELVKKILGNKATFSPIVTLEPRRRKFHKPITMTIPVPKASSDVMLNGFGGDAPTLRLLCSITGGTTPAQWEDITGTTPLTFVNECVSFTTNVSARFWLIDCRQIQESVTFASQVYREIICVPYMAKFVVFAKSHDPIEARLRCFCMTDDKVDKTLEQQENFAEVARSRDVEVLEGKPIYVDCFGNLVPLTKSGQHHIFSFFAFKENRLPLFVKVRDTTQEPCGRLSFMKEPKSTRGLVHQAICNLNITLPIYTKESESDQEQEEEIDMTSEKNPQDEQERIEERLAYIADHLGFSWTELARELDFTEEQIHQIRIENPNSLQDQSHALLKYWLERDGKHATDTNLVECLTKINRMDIVHLMETNTEPLQERISHSYAEIEQTITLDHSEGFSVLQEELCTAQHKQKEEQAVSKESETCDHPPIVSEEDISVGYSTFQDGVPKTEGDSSATALFPQTHKEQVQQDFSGKMQDLPEESSLEYQQEYFVTTPGTETSETQKAMIVPSSPSKTPEEVSTPAEEEKLYLQTPTSSERGGSPIIQEPEEPSEHREESSPRKTSLVIVESADNQPETCERLDEDAAFEKGDDMPEIPPETVTEEEYIDEHGHTVVKKVTRKIIRRYVSSEGTEKEEIMVQGMPQEPVNIEEGDGYSKVIKRVVLKSDTEQSEDNNE

SEQ ID NO: 26050 - protein, 1110 aa, Homo sapiens
MQYLNIKEDCNAMAFCAKMRSSKKTEVNLEAPEPGVEVIFYLSDREPLRLGSGEYTAEELCIRAAQACRISPLCHNLFALYDENTKLWYAPNRTITVDDKMSLRLHYRMRFYFTNWHGTNDNEQSVWRHSPKKQKNGYEKKKIPDATPLLDASSLEYLFAQGQYDLVKCLAPIRDPKTEQDGHDIENECLGMAVLAISHYAMMKKMQLPELPKDISVSTHDLKVKYLATLETLTKHYGAEIFETSMLLISSENEMNWFHSNDGGNVLYYEVMVTGNLGIQWRHKPNVVSVEKEKNKLKRKKLENKHKKDEEKNKIREEWNNFSYFPEITHIVIKESVVSINKQDNKKMELKLSSHEEALSFVSLVDGYFRLTADAHHYLCTDVAPPLIVHNIQNGCHGPICTEYAINKLRQEGSEEGMYVLRWSCTDFDNILMTVTCFEKSEQVQGAQKQFKNFQIEVQKGRYSLHGSDRSFPSLGDLMSHLKKQILRTDNISFMLKRCCQPKPREISNLLVATKKAQEWQPVYPMSQLSFDRILKKDLVQGEHLGRGTRTHIYSGTLMDYKDDEGTSEEKKIKVILKVLDPSHRDISLAFFEAASMMRQVSHKHIVYLYGVCVRDVENIMVEEFVEGGPLDLFMHRKSDVLTTPWKFKVAKQLASALSYLEDKDLVHGNVCTKNLLLAREGIDSECGPFIKLSDPGIPITVLSRQECIERIPWIAPECVEDSKNLSVAADKWSFGTTLWEICYNGEIPLKDKTLIEKERFYESRCRPVTPSCKELADLMTRCMNYDPNQRPFFRAIMRDINKLEEQNPDIVSEKKPATEVDPTHFEKRFLKRIRDLGEGHFGKVELCRYDPEGDNTGEQVAVKSLKPESGGNHIADLKKEIEILRNLYHENIVKYKGICTEDGGNGIKLIMEFLPSGSLKEYLPKNKNKINLKQQLKYAVQICKGMDYLGSRQYVHRDLAARNVLVESEHQVKIGDFGLTKAIETDKEYYTVKDDRDSPVFWYAPECLMQSKFYIASDVWSFGVTLHELLTYCDSDSSPMALFLKMIGPTHGQMTVTRLVNTLKEGKRLPCPPNCPDEVYQLMRKCWEFQPSNRTSFQNLIEGFEALLK

SEQ ID NO: 26051 - protein, 92 aa, Homo sapiens
MDPPDLLSVELSTSRPPQHLGGVKKPTYDPVSEDQDPLSSDFKRLGLRKPGLPRGLWLAKPSARVPGTKASRGSGAEVTLIDFGEEPVVPAL

SEQ ID NO: 26052 - protein, 341 aa, Homo sapiens
MATLKEKLIAPVAEEEATVPNNKITVVGVGQVGMACAISILGKSLADELALVDVLEDKLKGEMMDLQHGSLFLQTPKIVADKDYSVTANSKIVVVTAGVRQQEGESRLNLVQRNVNVFKFIIPQIVKYSPDCIIIVVSNPVDILTYVTWKLSGLPKHRVIGSGCNLDSARFRYLMAEKLGIHPSSCHGWILGEHGDSSVAVWSGVNVAGVSLQELNPEMGTDNDSENWKEVHKMVVESAYEVIKLKGYTNWAIGLSVADLIESMLKNLSRIHPVSTMVKGMYGIENEVFLSLPCILNARGLTSVINQKLKDDEVAQLKKSADTLWDIQKDLKDLULVSSRL

SEQ ID NO: 26053 - protein, 1008 aa, Homo sapiens
MQPEEGTGWLLELLSEVQLQQYFLRLRDDLNVTRLSHFEYVKNEDLEKIGMGRPGQRRLWEAVKRRKALCKRKSWMSKVFSGKRLEAEFPPHHSQSTFRKTSPAPGGPAGEGPLQSLTCLIGEKDLRLLEKLGDGSFGVVRRGEWDAPSGKTVSVAVKCLKPDVLSQPEAMDDFIREVNAMHSLDHRNLIRLYGVVLTPPMKMVTELAPLGSLLDRLRKHQGHFLLGTLSRYAVQVAEGMGYLESKRFIHRDLAARNLLLATRDLVKIGDFGLMRALPQNDDHYVMQEHRKVPFAWCAPESLKTRTFSHASDTWMFGVTLWEMFTYGQEPWIGLNGSQILHKIDKEGERLPRPEDCPQDIYNVMVQCWAHKPEDRPTFVALRDFLLEAQPTDMRALQDFEEPDKLHIQMNDVITVIEGRAENYWWRGQNTRTLCVGPFPRNVVTSVAGLSAQDISQPLQNSFIHTGHGDSDPRHCWGFPDRIDELYLGNPMDPPDLLSVELSTSRPPQHLGGVKKPTYDPVSEDQDPLSSDFKRLGLRKPGLPRGLWLAKPSARVPGTKASRGSGAEVTLIDFGEEPVVPALRPCAPSLAQLAMDACSLLDETPPQSPTRALPRPLHPTPVVDWDARPLPPPPAYDDVAQDEDDFEICSINSTLVGAGVPAGPSQGQTNYAFVPEQARPPPPLEDNLFLPPQGGGKPPSSAQTAEIFQALQQECMRQLQAPAGSPAPSPSPGGDDKPQVPPRVPIPPRPTRPHVQLSPAPPGEEETSQWPGPASPPRVPPREPLSPQGSRTPSPLVPPGSSPLPPRLSSSPGKTMPTTQSFASDPKYATPQVIQAPGPRAGPCILPIVRDGKKVSSTHYYLLPERPSYLERYQRFLREAQSPEEPTPLPVPLLLPPPSTPAPAAPTATVRPMPQAALDPKANFSTNNSNPGARPPPPRATARLPQRGCPGDGPEAGRPADKIQMVEQLFGLGLRPRGECHKVLEMFDWNLEQAGCHLLGSWGPAHHKR

SEQ ID NO: 26054 - protein, 1042 aa, Homo sapiens
MSVLKFELDNFSPEGFRHEHASNSCFALPCLTELSGDSSQLELQHSSSVPTGLQKLCFSHRELEKSVWAAKGKYNEGMNISKSEITKETSLKPSRRSLPCLAQSYAYSKSLSQSTSLFQSTESESQAPTSITLISTDKAEQVNTEENKNDSVLRCSFADLSDFCLALGKDKDYTDESEHATYDRSRLINDFVIKDKSEFKTKLSKNDMNYIASSGPLFKDGKKRIDYILVYRKTNIQYDKRNTFEKNLRAEGLMLEKEPAIASPDIMFIKIHIPWDTLCKYAERLNIRMPFRKKCYYTDGRSKSMGRMQTYFRRIKNWMAQNPMVLDKSAFPDLEESDCYTGPFSRARIHHFIINNKDTFFSNATRSRIVYHMLERTKYENGISKVGIRKLINNGSYIAAFPPHEGAYKSSQPIKTHGPQNNRHLLYERWARWGMWYKHQPLDLIRLYFGEKIGLYFAWLGWYTGMLIPAAIVGLCVFFYGLFTMNNSQVSQEICKATEVFMCPLCDKNCSLQRLNDSCIYAKVTYLFDNGGTVFFAIFMAIWATVFLEFWKRRRSILTYTWDLIEWEEEEETLRPQFEAKYYKMEIVNPITGKPEPHQPSSDKVTRLLVSVSGIFFMISLVITAVFGVVVYRLVVMEQFASFKWNFIKQYWQFATSAAAVCINFIIIMLLNLAYEKIAYLLTNLEYPRTESEWENSFALKMFLFQFVNLNSSIFYIAFFLGRFVGHPGKYNKLFDRWRLEECHPSGCLIDLCLQMGVIMFLKQIWNNFMELGYPLIQNWWSRHKIKRGIHDASIPQWENDWNLQPMNLHGLMDEYLEMVLQFGFTTIFVAAFPLAPLLALLNNIIEIRLDAYKFVTQWRRPLPARATDIGIWLGILEGIGILAVITNAFVIAITSDYIPRFVYEYKYGPCANHVEPSENCLKGYVNNSLSFFDLSELGMGKSGYCRYRDYRGPPWSSKPYEFTLQYWHILAARLAFIIVFEHLVFGIKSFIAYLIPDVPKGLHDRIRREKYLVQEMMYEAELEHLQQQRRKSGQPVHHEWP

SEQ ID NO: 26055 - protein, 188 aa, Homo sapiens
MRPLIAKKNPKIPMSKMMTILGAKWREFSANNPFKGSAAAVAAAAAAAAAAVAEQVSAAVSSATPIAPSGPPALPPPPAADIQPPPIRRAKTKEGKGPGHKRRSKSPRVPDGRKKLRGKKMAPLKIKLGLLGGKRKKGGSYVFQSDEGPEPEAEESDLDSGSVHSASGRPDGPVRTKKLKRGRPGRKK

SEQ ID NO: 26056 - protein, 521 aa, Homo sapiens
MELEVRRVRQAFLSGRSRPLRFRLQQLEALRRMVQEREKDILTAIAADLCKSEFNVYSQEVITVLGEIDFMLENLPEWVTAKPVKKNVLTMLDEAYIQPQPLGVVLIIGAWNYPFVLTIQPLIGAIAAGNAVIIKPSELSENTAKILAKLLPQYLDQDLYIVINGGVEETTELLKQRFDHIFYTGNTAVGKIVMEAAAKHLTPVTLELGGKSPCYIDKDCDLDIVCRRITWGKYMNCGQTCIAPDYILCEASLQNQIVWKIKETVKEFYGENIKESPDYERIINLRHFKRILSLLEGQKIAFGGETDEATRYIAPTVLTDVDPKTKVMQEEIFGPILPIVPVKNVDEAINFINEREKPLALYVFSHNHKLIKRMIDETSSGGVTGNDVIMHFTLNSFPFGGVGSSGMGAYHGKHSFDTFSHQRPCLLKSLKREGANKLRYPPNSQSKVDWGKFFLLKRFNKEKLGLLLLTFLGIVAAVLVKEVSSVSAWLPIVWDVRSPCAWPPHLGSEARLCLAATTSRK

SEQ ID NO: 26057 - protein, 935 aa, Homo sapiens
MSCGNEFVETLKKIGYPKADNLNGEDFDWLFEGVEDESFLKWFCGNVNEQNVLSERELEAFSILQKSGKPILEGAALDEALKTCKTSDLKTPRLDDKELEKLEDEVQTLLKLKNLKIQRRNKCQLMASVTSHKSLRLNAKEEEATKKLKQSQGILNAMITKISNELQALTDEVTQLMMFFRHSNLGQGTNPLVFLSQFSLEKYLSQEEQSTAALTLYTKKQFFQGIHEVVESSNEDNFQLLDIQTPSICDNQEILEERRLEMARLQLAYICAQHQLIHLKASNSSMKSSIKWAEESLHSLTSKAVDKENLDAKISSLTSEIMKLEKEVTQIKDRSLPAVVRENAQLLNMPVVKGDFDLQIAKQDYYTARQELVLNQLIKQKASFELLQLSYEIELRKHRDIYRQLENLVQELSQSNMMLYKQLEMLTDPSVSQQINPRNTIDTKDYSTHRLYQVLEGENKKKELFLTHGNLEEVAEKLKQNISLVQDQLAVSAQEHSFFLSKRNKDVDMLCDTLYQGGNQLLLSDQDFVKMENYEALVGFDLCNTPLSSVAQKIMSAMHSGDLVDSKTWGKSTETMEVINKSSVKYSVQLEDRKTQSPEKKDLKSLRSQTSRGSAKLSPQSFSVRLTDQLSADQKQKSISSLTLSSCLIPQYNQEASVLQKKGHKRKHFLMENINNENKGSINLKRKHITYNNLSEKTSKQMALEEDTDDAEGYLNSGNSGALKKHFCDIRHLDDWAKSQLIEMLKQAAALVITVMYTDGSTQLGADQTPVSSVRGIVVLVKRQAEGGHGCPDAPACGPVLEGFVSDDPCIYIQIEHSAIWDQEQEAHQQFARNVLFQTMKCKCPVICFNAKDFVRIVLQFFGNDGSWKHGLWFMATISYFGASSDTNFGSDGKPCHSGEQRGDGEDVSTSWGSSQGIGARSSFCCRRTVSYNEQ

SEQ ID NO: 26058 - protein, 1894 aa, Homo sapiens
MTTMLQKSDSNASFLRAARAGNLDKVVEYLKGGIDINTCNQNGLNALHLAAKEGHVGLVQELLGRGSSVDSATKKGNTALHIASLAGQAEVVKVLVKEGANINAQSQNGFTPLYMAAQENHIDVVKYLLENGANQSTATEDGFTPLAVALQQGHNQAVAILLENDTKGKVRLPALHIAARKDDTKSAALLLQNDHNADVQSKMMVNRTTESGFTPLHIAAHYGNVNVATLLLNRGAAVDFTARNGITPLHVASKRGNTNMVKLLLDRGGQIDAKTRDGLTPLHCAARSGHDQVVELLLERGAPLLARTKNGLSPLHMAAQGDHVECVKHLLQHKAPVDDVTLDYLTALHVAAHCGHYRVTKLLLDKRANPNARALNGFTPLHIACKKNRIKVMELLVKYGASIQAITESGLTPIHVAAFMGHLNIVLLLLQNGASPDVTNIRGETALHMAARAGQVEVVRCLLRNGALVDARAREEQTPLHIASRLGKTEIVQLLLQHMAHPDAATTNGYTPLHISAREGQVDVASVLLEAGAAHSLATKKGFTPLHVAAKYGSLDVAKLLLQRRAAADSAGKNGLTPLHVAAHYDNQKVALLLLEKGASPHATAKNGYTPLHIAAKKNQMQIASTLLNYGAETNIVTKQGVTPLHLASQEGHTDMVTLLLDKGANIHMSTKSGLTSLHLAAQEDKVNVADILTKHGADQDAHTKLGYTPLIVACHYGNVKMVNFLLKQGANVNAKTKNGYTPLHQAAQQGHTHIINVLLQHGAKPNATTANGNTALAIAKRLGYISVVDTLKVVTEEVTTTTTTITEKHKLNVPETMTEVLDVSDEEGDDTMTGDGGEYLRPEDLKELGDDSLPSSQFLDGMNYLRYSLEGGRSDSLRSFSSDRSHTLSHASYLRDSAVMDDSVVIPSHQVSTLAKEAERNSYRLSWGTENLDNVALSSSPIHSGRASPCLERDNSSFLVSFMVDARGGAMRGCRHNGLRIIIPPRKCTAPTRVTCRLVKRHRLATMPPMVEGEGLASRLIEVGPSGAQFLGKLHLPTAPPPLNEGESLVSRILQLGPPGTKFLGPVIVEIPHFAALRGKERELVVLRSENGDSWKEHFCDYTEDELNEILNGMDEVLDSPEDLEKKRICRIITRDFPQYFAVVSRIKQDSNLIGPEGGVLSSTVVPQVQAVFPEGALTKRIRVGLQAQPMHSELVKKILGNKATFSPIVTLEPRRRKFHKPITMTIPVPKASSDVMLNGFGGDAPTLRLLCSITGGTTPAQWEDITGTTPLTFVNECVSFTTNVSARFWLIDCRQIQESVTFASQVYREIICVPYMAKFVVFAKSHDPIEARLRCFCMTDDKVDKTLEQQENFAEVARSRDVEVLEGKPIYVDCFGNLVPLTKSGQHHIFSFFAFKENRLPLFVKVRDTTQEPCGRLSFMKEPKSTRGLVHQAICNLNITLPIYTKESESDQEQEEEIDMTSEKNPQDEQERIEERLAYIADHLGFSWTELARELDFTEEQIHQIRIENPNSLQDQSHALLKYWLERDGKHATDTNLVECLTKINRMDIVHLMETNTEPLQERISHSYAEIEQTITLDHSEGFSVLQEELCTAQHKQKEEQAVSKESETCDHPPIVSEEDISVGYSTFQDGVPKTEGDSSATALFPQTHKEQVQQDFSGKMQDLPEESSLEYQQEYFVTTPGTETSETQKAMIVPSSPSKTPEEVSTPAEEEKLYLQTPTSSERGGSPIIQEPEEPSEHREESSPRKTSLVIVESADNQPETCERLDEDAAFEKELTEELGELEASSDEEAMVTTRVVRRRVIIQGDDMPEIPPETVTEEEYIDEHGHTVVKKVTRKIIRRYVSSEGTEKEEIMVQGMPQEPVNIEEGDGYSKVIKRVVLKSDTEQSEDNNE

SEQ ID NO: 26059 - protein, 1708 aa, Homo sapiens
MAAQENHIDVVKYLLENGANQSTATEDGFTPLAVALQQGHNQAVAILLENDTKGKVRLPALHIAARKDDTKSAALLLQNDHNADVQSKSGFTPLHIAAHYGNVNVATLLLNRGAAVDFTARNGITPLHVASKRGNTNMVKLLLDRGGQIDAKTRDGLTPLHCAARSGHDQVVELLLERGAPLLARTKNGLSPLHMAAQGDHVECVKHLLQHKAPVDDVTLDYLTALHVAAHCGHYRVTKLLLDKRANPNARALNGFTPLHIACKKNRIKVMELLVKYGASIQAITESGLTPIHVAAFMGHLNIVLLLLQNGASPDVTNIRGETALHMAARAGQVEVVRCLLRNGALVDARAREEQTPLHIASRLGKTEIVQLLLQHMAHPDAATTNGYTPLHISAREGQVDVASVLLEAGAAHSLATKKGFTPLHVAAKYGSLDVAKLLLQRRAAADSAGKNGLTPLHVAAHYDNQKVALLLLEKGASPHATAKNGYTPLHIAAKKNQMQIASTLLNYGAETNIVTKQGVTPLHLASQEGHTDMVTLLLDKGANIHMSTKSGLTSLHLAAQEDKVNVADILTKHGADQDAHTKLGYTPLIVACHYGNVKMVNFLLKQGANVNAKTKNGYTPLHQAAQQGHTHIINVLLQHGAKPNATTANGNTALAIAKRLGYISVVDTLKVVTEEVTTTTTTITEKHKLNVPETMTEVLDVSDEEGDDTMTGDGGEYLRPEDLKELGDDSLPSSQFLDGMNYLRYSLEGGRSDSLRSFSSDRSHTLSHASYLRDSAVMDDSVVIPSHQVSTLAKEAERNSYRLSWGTENLDNVALSSSPIHSGRASPCLERDNSSFLVSFMVDARGGAMRGCRHNGLRIIIPPRKCTAPTRVTCRLVKRHRLATMPPMVEGEGLASRLIEVGPSGAQFLGPVIVEIPHFAALRGKERELVVLRSENGDSWKEHFCDYTEDELNEILNGMDEVLDSPEDLEKKRICRIITRDFPQYFAVVSRIKQDSNLIGPEGGVLSSTVVPQVQAVFPEGALTKRIRVGLQAQPMHSELVKKILGNKATFSPIVTLEPRRRKFHKPITMTIPVPKASSDVMLNGFGGDAPTLRLLCSITGGTTPAQWEDITGTTPLTFVNECVSFTTNVSARFWLIDCRQIQESVTFASQVYREIICVPYMAKFVVFAKSHDPIEARLRCFCMTDDKVDKTLEQQENFAEVARSRDVEVLEGKPIYVDCFGNLVPLTKSGQHHIFSFFAFKENRLPLFVKVRDTTQEPCGRLSFMKEPKSTRGLVHQAICNLNITLPIYTKESESDQEQEEEIDMTSEKNPQDEQERIEERLAYIADHLGFSWTELARELDFTEEQIHQIRIENPNSLQDQSHALLKYWLERDGKHATDTNLVECLTKINRMDIVHLMETNTEPLQERISHSYAEIEQTITLDHSEGFSVLQEELCTAQHKQKEEQAVSKESETCDHPPIVSEEDISVGYSTFQDGVPKTEGDSSATALFPQTHKEQVQQDFSGKMQDLPEESSLEYQQEYFVTTPGTETSETQKAMIVPSSPSKTPEEVSTPAEEEKLYLQTPTSSERGGSPIIQEPEEPSEHREESSPRKTSLVIVESADNQPETCERLDEDAAFEKGDDMPEIPPETVTEEEYIDEHGHTVVKKVTRKIIRRYVSSEGTEKEEIMVQGMPQEPVNIEEGDGYSKVIKRVVLKSDTEQSEDNNE

SEQ ID NO: 26060 - protein, 1810 aa, Homo sapiens
MTTMLQKSDSNASFLRAARAGNLDKVVEYLKGGIDINTCNQNGLNALHLAAKEGHVGLVQELLGRGSSVDSATKKGNTALHIASLAGQAEVVKVLVKEGANINAQSQNGFTPLYMAAQENHIDVVKYLLENGANQSTATEDGFTPLAVALQQGHNQAVAILLENDTKGKVRLPALHIAARKDDTKSAALLLQNDHNADVQSKSGFTPLHIAAHYGNVNVATLLLNRGAAVDFTARNGITPLHVASKRGNTNMVKLLLDRGGQIDAKTRDGLTPLHCAARSGHDQVVELLLERGAPLLARTKNGLSPLHMAAQGDHVECVKHLLQHKAPVDDVTLDYLTALHVAAHCGHYRVTKLLLDKRANPNARALNGFTPLHIACKKNRIKVMELLVKYGASIQAITESGLTPIHVAAFMGHLNIVLLLLQNGASPDVTNIRGETALHMAARAGQVEVVRCLLRNGALVDARAREEQTPLHIASRLGKTEIVQLLLQHMAHPDAATTNGYTPLHISAREGQVDVASVLLEAGAAHSLATKKGFTPLHVAAKYGSLDVAKLLLQRRAAADSAGKNGLTPLHVAAHYDNQKVALLLLEKGASPHATAKNGYTPLHIAAKKNQMQIASTLLNYGAETNIVTKQGVTPLHLASQEGHTDMVTLLLDKGANIHMSTKSGLTSLHLAAQEDKVNVADILTKHGADQDAHTKLGYTPLIVACHYGNVKMVNFLLKQGANVNAKTKNGYTPLHQAAQQGHTHIINVLLQHGAKPNATTANGNTALAIAKRLGYISVVDTLKVVTEEVTTTTTTITEKHKLNVPETMTEVLDVSDEEGDDTMTGDGGEYLRPEDLKELGDDSLPSSQFLDGMNYLRYSLEGGRSDSLRSFSSDRSHTLSHASYLRDSAVMDDSVVIPSHQVSTLAKEAERNSYRLSWGTENLDNVALSSSPIHSGFLVSFMVDARGGAMRGCRHNGLRIIIPPRKCTAPTRVTCRLVKRHRLATMPPMVEGEGLASRLIEVGPSGAQFLGPVIVEIPHFAALRGKERELVVLRSENGDSWKEHFCDYTEDELNEILNGMDEVLDSPEDLEKKRICRIITRDFPQYFAVVSRIKQDSNLIGPEGGVLSSTVVPQVQAVFPEGALTKRIRVGLQAQPMHSELVKKILGNKATFSPIVTLEPRRRKFHKPITMTIPVPKASSDVMLNGFGGDAPTLRLLCSITGGTTPAQWEDITGTTPLTFVNECVSFTTNVSARFWLIDCRQIQESVTFASQVYREIICVPYMAKFVVFAKSHDPIEARLRCFCMTDDKVDKTLEQQENFAEVARSRDVEVLEGKPIYVDCFGNLVPLTKSGQHHIFSFFAFKENRLPLFVKVRDTTQEPCGRLSFMKEPKSTRGLVHQAICNLNITLPIYTKESESDQEQEEEIDMTSEKNPQDEQERIEERLAYIADHLGFSWTELARELDFTEEQIHQIRIENPNSLQDQSHALLKYWLERDGKHATDTNLVECLTKINRMDIVHLMETNTEPLQERISHSYAEIEQTITLDHSEGFSVLQEELCTAQHKQKEEQAVSKESETCDHPPIVSEEDISVGYSTFQDGVPKTEGDSSATALFPQTHKEQVQQDFSGKMQDLPEESSLEYQQEYFVTTPGTETSETQKAMIVPSSPSKTPEEVSTPAEEEKLYLQTPTSSERGGSPIIQEPEEPSEHREESSPRKTSLVIVESADNQPETCERLDEDAAFEKGDDMPEIPPETVTEEEYIDEHGHTVVKKVTRKIIRRYVSSEGTEKEEIMVQGMPQEPVNIEEGDGYSKVIKRVVLKSDTEQSEDNNE

SEQ ID NO: 26061 - protein, 440 aa, Homo sapiens
RIPKREGLGEEDTAVAGHELLLPNERSFQNAAKSNNLDLMEKLFEKKVNINVVNNMNRTALHFAVGRNHLSAVDFLLKHKARVDVADKHGLTVIHLAAWSGSLEVMLMLVKAGADQRAKNQDGMSALHFATQSNHVRIVEYLIQDLHLKDLNQPDEKGRKPFLLAAERGHVEMIEKLTFLNLHTSEKDKGGNTALHLAAKHGHSPAVQVLLAQWQDINEMNELNISSLQIATRNGHASLVNFLLSENVDLHQKVEPKESPLHLVVINNHITVVNSLLSAQHDIDILNQKQQTPLHVAADRGNVELVETLLKAGCDLKAVDKQGKTALAVASRSNHSLVVGMLIKAERYYAWREEHHESIRDPSTGFTLTFKQDHSLETRHIRTLLWDLAYHQLKANEWQRLARSWNFTDDQIRAIEEQWSEKTRHFKSKTDSNSKKCVVS

SEQ ID NO: 26062 - protein, 275 aa, Homo sapiens
MESPISTSFYTDTLNISSLQIATRNGHASLVNFLLSENVDLHQKVEPKESPLHLVVINNHITVVNSLLSAQHDIDILNQKQQTPLHVAADRGNVELVETLLKAGCDLKAVDKQGKTALAVASRSNHSLVVGMLIKAERYYAWREEHHESIRDPSTGFTLTFKQDHSLETRHIRTLLWDLAYHQLKANEWQRLARSWNFTDDQIRAIEEQWSGNESFREHGHRALLIWLHGTLMTQGDPAKQLYEELVHAGFPKLAEKTRHFKSKTDSNSKKCVVS

SEQ ID NO: 26063 - protein, 3939 aa, Homo sapiens
MAHAAASIKKVREADLDEKEKNLERDRKKQRKIPRERMERKRKSDSNASFLRAARAGNLDKVVEYLKGGIDINTCNQNGLNALHLAAKEGHVGLVQELLGRGSSVDSATKKGNTALHIASLAGQAEVVKVLVKEGANINAQSQNGFTPLYMAAQENHIDVVKYLLENGANQSTATEDGFTPLAVALQQGHNQAVAILLENDTKGKVRLPALHIAARKDDTKSAALLLQNDHNADVQSKMMVNRTTESGFTPLHIAAHYGNVNVATLLLNRGAAVDFTARNGITPLHVASKRGNTNMVKLLLDRGGQIDAKTRDGLTPLHCAARSGHDQVVELLLERGAPLLARTKNGLSPLHMAAQGDHVECVKHLLQHKAPVDDVTLDYLTALHVAAHCGHYRVTKLLLDKRANPNARALNGFTPLHIACKKNRIKVMELLVKYGASIQAITESGLTPIHVAAFMGHLNIVLLLLQNGASPDVTNIRGETALHMAARAGQVEVVRCLLRNGALVDARAREEQTPLHIASRLGKTEIVQLLLQHMAHPDAATTNGYTPLHISAREGQVDVASVLLEAGAAHSLATKKGFTPLHVAAKYGSLDVAKLLLQRRAAADSAGKNGLTPLHVAAHYDNQKVALLLLEKGASPHATAKNGYTPLHIAAKKNQMQIASTLLNYGAETNIVTKQGVTPLHLASQEGHTDMVTLLLDKGANIHMSTKSGLTSLHLAAQEDKVNVADILTKHGADQDAHTKLGYTPLIVACHYGNVKMVNFLLKQGANVNAKTKNGYTPLHQAAQQGHTHIINVLLQHGAKPNATTANGNTALAIAKRLGYISVVDTLKVVTEEVTTTTTTITEKHKLNVPETMTEVLDVSDEEGDDTMTGDGGEYLRPEDLKELGDDSLPSSQFLDGMNYLRYSLEGGRSDSLRSFSSDRSHTLSHASYLRDSAVMDDSVVIPSHQVSTLAKEAERNSYRLSWGTENLDNVALSSSPIHSGFLVSFMVDARGGAMRGCRHNGLRIIIPPRKCTAPTRVTCRLVKRHRLATMPPMVEGEGLASRLIEVGPSGAQFLGPVIVEIPHFAALRGKERELVVLRSENGDSWKEHFCDYTEDELNEILNGMDEVLDSPEDLEKKRICRIITRDFPQYFAVVSRIKQDSNLIGPEGGVLSSTVVPQVQAVFPEGALTKRIRVGLQAQPMHSELVKKILGNKATFSPIVTLEPRRRKFHKPITMTIPVPKASSDVMLNGFGGDAPTLRLLCSITGGTTPAQWEDITGTTPLTFVNECVSFTTNVSARFWLIDCRQIQESVTFASQVYREIICVPYMAKFVVFAKSHDPIEARLRCFCMTDDKVDKTLEQQENFAEVARSRDVEVLEGKPIYVDCFGNLVPLTKSGQHHIFSFFAFKENRLPLFVKVRDTTQEPCGRLSFMKEPKSTRGLVHQAICNLNITLPIYTKESESDQEQEEEIDMTSEKNDETESTETSVLKSHLVNEVPVLASPDLLSEVSEMKQDLIKMTAILTTDVSDKAGSIKVKELVKAAEEEPGEPFEIVERVKEDLEKVNEILRSGTCTRDESSVQSSRSERGLVEEEWVIVSDEEIEEARQKAPLEITEYPCVEVRIDKEIKGKVEKDSTGLVNYLTDDLNTCVPLPKEQLQTVQDKAGKKCEALAVGRSSEKEGKDIPPDETQSTQKQHKPSLGIKKPVRRKLKEKQKQKEEGLQASAEKAELKKGSSEESLGEDPGLAPEPLPTVKATSPLIEETPIGSIKDKVKALQKRVEDEQKGRSKLPIRVKGKEDVPKKTTHRPHPAASPSLKSERHAPGSPSPKTERHSTLSSSAKTERHPPVSPSSKTEKHSPVSPSAKTERHSPASSSSKTEKHSPVSPSTKTERHSPVSSTKTERHPPVSPSGKTDKRPPVSPSGRTEKHPPVSPGRTEKRLPVSPSGRTDKHQPVSTAGKTEKHLPVSPSGKTEKQPPVSPTSKTERIEETMSVRELMKAFQSGQDPSKHKTGLFEHKSAKQKQPQEKGKVRVEKEKGPILTQREAQKTENQTIKRGQRLPVTGTAESKRGVRVSSIGVKKEDAAGGKEKVLSHKIPEPVQSVPEEESHRESEVPKEKMADEQGDMDLQISPDRKTSTDFSEVIKQELEDNDKYQQFRLSEETEKAQLHLDQVLTSPFNTTFPLDYMKDEFLPALSLQSGALDGSSESLKNEGVAGSPCGSLMEGTPQISSEESYKHEGLAETPETSPESLSFSPKKSEEQTGETKESTKTETTTEIRSEKEHPTTKDITGGSEERGATVTEDSETSTESFQKEATLGSPKDTSPKRQDDCTGSCSVALAKETPTGLTEEAACDEGQRTFGSSAHKTQTDSEVQESTATSDETKALPLPEASVKTDTGTESKPQGVIRSPQGLELALPSRDSEVLSAVADDSLAVSHKDSLEASPVLEDNSSHKTPDSLEPSPLKESPCRDSLESSPVEPKMKAGIFPSHFPLPAAVAKTELLTEVASVRSRLLRDPDGSAEDDSLEQTSLMESSGKSPLSPDTPSSEEVSYEVTPKTTDVSTPKPAVIHECAEEDDSENGEKKRFTPEEEMFKMVTKIKMFDELEQEAKQKRDYKKEPKQEESSSSSDPDADCSVDVDEPKHTGSGEDESGVPVLVTSESRKVSSSSESEPELAQLKKGADSGLLPEPVIRVQPPSPLPSSMDSNSSPEEVQFQPVVSKQYTFKMNEDTQEEPGKSEEEKDSESHLAEDRHAVSTEAEDRSYDKLNRDTDQPKICDGHGCEAMSPSSSAAPVSSGLQSPTGDDVDEQPVIYKESLALQGTHEKDTEGEELDVSRAESPQADCPSESFSSSSSLPHCLVSEGKELDEDISATSSIQKTEVTKTDETFENLPKDCPSQDSSITTQTDRFSMDVPVSDLAENDEIYDPQITSPYENVPSQSFFSSEESKTQTDANHTTSFHSSEVYSVTITSPVEDVVVASSSSGTVLSKESNFEGQDIKMESQQESTLWEMQSDSVSSSFEPTMSATTTVVGEQISKVIITKTDVDSDSWSEIREDDEAFEARVKEEEQKIFGLMVDRQSQGTTPDTTPARTPTEEGTPTSEQNPFLFQEGKLFEMTRSGAIDMTKRSYADESFHFFQIGQESREETLSEDVKEGATGADPLPLETSAESLALSESKETVDDEADLLPDDVSEEVEEIPASDAQLNSQMGISASTETPTKEAVSVGTKDLPTVQTGDIPPLSGVKQISCPDSSEPAVQVQLDFSTLTRSVYSDRGDDSPDSSPEEQKSVIEIPTAPMENVPFTESKSKIPVRTMPTSTPAPPSAEYESSVSEDFLSSVDEENKADEAKPKSKLPVKVPLQRVEQQLSDLDTSVQKTVAPQGQDMASIAPDNRSKSESDASSLDSKTKCPVKTRSYTETETESRERAEELELESEEGATRPKILTSRLPVKSRSTTSSCRGGTSPTKESKEHFFDLYRNSIEFFEEISDEASKLVDRLTQSEREQEIVSDDESSSALEVSVIENLPPVETEHSVPEDIFDTRPIWDESIETLIERIPDENGHDHAEDPQDEQERIEERLAYIADHLGFSWTELARELDFTEEQIHQIRIENPNSLQDQSHALLKYWLERDGKHATDTNLVECLTKINRMDIVHLMETNTEPLQERISHSYAEIEQTITLDHSEGFSVLQEELCTAQHKQKEEQAVSKESETCDHPPIVSEEDISVGYSTFQDGVPKTEGDSSATALFPQTHKEQVQQDFSGKMQDLPEESSLEYQQEYFVTTPGTETSETQKAMIVPSSPSKTPEEVSTPAEEEKLYLQTPTSSERGGSPIIQEPEEPSEHREESSPRKTSLVIVESADNQPETCERLDEDAAFEKGDDMPEIPPETVTEEEYIDEHGHTVVKKVTRKIIRRYVSSEGTEKEEIMVQGMPQEPVNIEEGDGYSKVIKRVVLKSDTEQSEDNNE

SEQ ID NO: 26064 - protein, 3903 aa, Homo sapiens
MTTMLQKSDSNASFLRAARAGNLDKVVEYLKGGIDINTCNQNGLNALHLAAKEGHVGLVQELLGRGSSVDSATKKGNTALHIASLAGQAEVVKVLVKEGANINAQSQNGFTPLYMAAQENHIDVVKYLLENGANQSTATEDGFTPLAVALQQGHNQAVAILLENDTKGKVRLPALHIAARKDDTKSAALLLQNDHNADVQSKMMVNRTTESGFTPLHIAAHYGNVNVATLLLNRGAAVDFTARNGITPLHVASKRGNTNMVKLLLDRGGQIDAKTRDGLTPLHCAARSGHDQVVELLLERGAPLLARTKNGLSPLHMAAQGDHVECVKHLLQHKAPVDDVTLDYLTALHVAAHCGHYRVTKLLLDKRANPNARALNGFTPLHIACKKNRIKVMELLVKYGASIQAITESGLTPIHVAAFMGHLNIVLLLLQNGASPDVTNIRGETALHMAARAGQVEVVRCLLRNGALVDARAREEQTPLHIASRLGKTEIVQLLLQHMAHPDAATTNGYTPLHISAREGQVDVASVLLEAGAAHSLATKKGFTPLHVAAKYGSLDVAKLLLQRRAAADSAGKNGLTPLHVAAHYDNQKVALLLLEKGASPHATAKNGYTPLHIAAKKNQMQIASTLLNYGAETNIVTKQGVTPLHLASQEGHTDMVTLLLDKGANIHMSTKSGLTSLHLAAQEDKVNVADILTKHGADQDAHTKLGYTPLIVACHYGNVKMVNFLLKQGANVNAKTKNGYTPLHQAAQQGHTHIINVLLQHGAKPNATTANGNTALAIAKRLGYISVVDTLKVVTEEVTTTTTTITEKHKLNVPETMTEVLDVSDEEGDDTMTGDGGEYLRPEDLKELGDDSLPSSQFLDGMNYLRYSLEGGRSDSLRSFSSDRSHTLSHASYLRDSAVMDDSVVIPSHQVSTLAKEAERNSYRLSWGTENLDNVALSSSPIHSGFLVSFMVDARGGAMRGCRHNGLRIIIPPRKCTAPTRVTCRLVKRHRLATMPPMVEGEGLASRLIEVGPSGAQFLGPVIVEIPHFAALRGKERELVVLRSENGDSWKEHFCDYTEDELNEILNGMDEVLDSPEDLEKKRICRIITRDFPQYFAVVSRIKQDSNLIGPEGGVLSSTVVPQVQAVFPEGALTKRIRVGLQAQPMHSELVKKILGNKATFSPIVTLEPRRRKFHKPITMTIPVPKASSDVMLNGFGGDAPTLRLLCSITGGTTPAQWEDITGTTPLTFVNECVSFTTNVSARFWLIDCRQIQESVTFASQVYREIICVPYMAKFVVFAKSHDPIEARLRCFCMTDDKVDKTLEQQENFAEVARSRDVEVLEGKPIYVDCFGNLVPLTKSGQHHIFSFFAFKENRLPLFVKVRDTTQEPCGRLSFMKEPKSTRGLVHQAICNLNITLPIYTKESESDQEQEEEIDMTSEKNDETESTETSVLKSHLVNEVPVLASPDLLSEVSEMKQDLIKMTAILTTDVSDKAGSIKVKELVKAAEEEPGEPFEIVERVKEDLEKVNEILRSGTCTRDESSVQSSRSERGLVEEEWVIVSDEEIEEARQKAPLEITEYPCVEVRIDKEIKGKVEKDSTGLVNYLTDDLNTCVPLPKEQLQTVQDKAGKKCEALAVGRSSEKEGKDIPPDETQSTQKQHKPSLGIKKPVRRKLKEKQKQKEEGLQASAEKAELKKGSSEESLGEDPGLAPEPLPTVKATSPLIEETPIGSIKDKVKALQKRVEDEQKGRSKLPIRVKGKEDVPKKTTHRPHPAASPSLKSERHAPGSPSPKTERHSTLSSSAKTERHPPVSPSSKTEKHSPVSPSAKTERHSPASSSSKTEKHSPVSPSTKTERHSPVSSTKTERHPPVSPSGKTDKRPPVSPSGRTEKHPPVSPGRTEKRLPVSPSGRTDKHQPVSTAGKTEKHLPVSPSGKTEKQPPVSPTSKTERIEETMSVRELMKAFQSGQDPSKHKTGLFEHKSAKQKQPQEKGKVRVEKEKGPILTQREAQKTENQTIKRGQRLPVTGTAESKRGVRVSSIGVKKEDAAGGKEKVLSHKIPEPVQSVPEEESHRESEVPKEKMADEQGDMDLQISPDRKTSTDFSEVIKQELEDNDKYQQFRLSEETEKAQLHLDQVLTSPFNTTFPLDYMKDEFLPALSLQSGALDGSSESLKNEGVAGSPCGSLMEGTPQISSEESYKHEGLAETPETSPESLSFSPKKSEEQTGETKESTKTETTTEIRSEKEHPTTKDITGGSEERGATVTEDSETSTESFQKEATLGSPKDTSPKRQDDCTGSCSVALAKETPTGLTEEAACDEGQRTFGSSAHKTQTDSEVQESTATSDETKALPLPEASVKTDTGTESKPQGVIRSPQGLELALPSRDSEVLSAVADDSLAVSHKDSLEASPVLEDNSSHKTPDSLEPSPLKESPCRDSLESSPVEPKMKAGIFPSHFPLPAAVAKTELLTEVASVRSRLLRDPDGSAEDDSLEQTSLMESSGKSPLSPDTPSSEEVSYEVTPKTTDVSTPKPAVIHECAEEDDSENGEKKRFTPEEEMFKMVTKIKMFDELEQEAKQKRDYKKEPKQEESSSSSDPDADCSVDVDEPKHTGSGEDESGVPVLVTSESRKVSSSSESEPELAQLKKGADSGLLPEPVIRVQPPSPLPSSMDSNSSPEEVQFQPVVSKQYTFKMNEDTQEEPGKSEEEKDSESHLAEDRHAVSTEAEDRSYDKLNRDTDQPKICDGHGCEAMSPSSSAAPVSSGLQSPTGDDVDEQPVIYKESLALQGTHEKDTEGEELDVSRAESPQADCPSESFSSSSSLPHCLVSEGKELDEDISATSSIQKTEVTKTDETFENLPKDCPSQDSSITTQTDRFSMDVPVSDLAENDEIYDPQITSPYENVPSQSFFSSEESKTQTDANHTTSFHSSEVYSVTITSPVEDVVVASSSSGTVLSKESNFEGQDIKMESQQESTLWEMQSDSVSSSFEPTMSATTTVVGEQISKVIITKTDVDSDSWSEIREDDEAFEARVKEEEQKIFGLMVDRQSQGTTPDTTPARTPTEEGTPTSEQNPFLFQEGKLFEMTRSGAIDMTKRSYADESFHFFQIGQESREETLSEDVKEGATGADPLPLETSAESLALSESKETVDDEADLLPDDVSEEVEEIPASDAQLNSQMGISASTETPTKEAVSVGTKDLPTVQTGDIPPLSGVKQISCPDSSEPAVQVQLDFSTLTRSVYSDRGDDSPDSSPEEQKSVIEIPTAPMENVPFTESKSKIPVRTMPTSTPAPPSAEYESSVSEDFLSSVDEENKADEAKPKSKLPVKVPLQRVEQQLSDLDTSVQKTVAPQGQDMASIAPDNRSKSESDASSLDSKTKCPVKTRSYTETETESRERAEELELESEEGATRPKILTSRLPVKSRSTTSSCRGGTSPTKESKEHFFDLYRNSIEFFEEISDEASKLVDRLTQSEREQEIVSDDESSSALEVSVIENLPPVETEHSVPEDIFDTRPIWDESIETLIERIPDENGHDHAEDPQDEQERIEERLAYIADHLGFSWTELARELDFTEEQIHQIRIENPNSLQDQSHALLKYWLERDGKHATDTNLVECLTKINRMDIVHLMETNTEPLQERISHSYAEIEQTITLDHSEGFSVLQEELCTAQHKQKEEQAVSKESETCDHPPIVSEEDISVGYSTFQDGVPKTEGDSSATALFPQTHKEQVQQDFSGKMQDLPEESSLEYQQEYFVTTPGTETSETQKAMIVPSSPSKTPEEVSTPAEEEKLYLQTPTSSERGGSPIIQEPEEPSEHREESSPRKTSLVIVESADNQPETCERLDEDAAFEKGDDMPEIPPETVTEEEYIDEHGHTVVKKVTRKIIRRYVSSEGTEKEEIMVQGMPQEPVNIEEGDGYSKVIKRVVLKSDTEQSEDNNE

SEQ ID NO: 26065 - protein, 1838 aa, Homo sapiens
MTTMLQKSDSNASFLRAARAGNLDKVVEYLKGGIDINTCNQNGLNALHLAAKEGHVGLVQELLGRGSSVDSATKKGNTALHIASLAGQAEVVKVLVKEGANINAQSQNGFTPLYMAAQENHIDVVKYLLENGANQSTATEDGFTPLAVALQQGHNQAVAILLENDTKGKVRLPALHIAARKDDTKSAALLLQNDHNADVQSKSGFTPLHIAAHYGNVNVATLLLNRGAAVDFTARNGITPLHVASKRGNTNMVKLLLDRGGQIDAKTRDGLTPLHCAARSGHDQVVELLLERGAPLLARTKNGLSPLHMAAQGDHVECVKHLLQHKAPVDDVTLDYLTALHVAAHCGHYRVTKLLLDKRANPNARALNGFTPLHIACKKNRIKVMELLVKYGASIQAITESGLTPIHVAAFMGHLNIVLLLLQNGASPDVTNIRGETALHMAARAGQVEVVRCLLRNGALVDARAREEQTPLHIASRLGKTEIVQLLLQHMAHPDAATTNGYTPLHISAREGQVDVASVLLEAGAAHSLATKKGFTPLHVAAKYGSLDVAKLLLQRRAAADSAGKNGYTPLHIAAKKNQMQIASTLLNYGAETNIVTKQGVTPLHLASQEGHTDMVTLLLDKGANIHMSTKSGLTSLHLAAQEDKVNVADILTKHGADQDAHTKLGYTPLIVACHYGNVKMVNFLLKQGANVNAKTKNGYTPLHQAAQQGHTHIINVLLQHGAKPNATTANGNTALAIAKRLGYISVVDTLKVVTEEVTTTTTTITEKHKLNVPETMTEVLDVSDEEGDDTMTGDGGEYLRPEDLKELGDDSLPSSQFLDGMNYLRYSLEGGRSDSLRSFSSDRSHTLSHASYLRDSAVMDDSVVIPSHQVSTLAKEAERNSYRLSWGTENLDNVALSSSPIHSGFLVSFMVDARGGAMRGCRHNGLRIIIPPRKCTAPTRVTCRLVKRHRLATMPPMVEGEGLASRLIEVGPSGAQFLGPVIVEIPHFAALRGKERELVVLRSENGDSWKEHFCDYTEDELNEILNGMDEVLDSPEDLEKKRICRIITRDFPQYFAVVSRIKQDSNLIGPEGGVLSSTVVPQVQAVFPEGALTKRIRVGLQAQPMHSELVKKILGNKATFSPIVTLEPRRRKFHKPITMTIPVPKASSDVMLNGFGGDAPTLRLLCSITGGTTPAQWEDITGTTPLTFVNECVSFTTNVSARFWLIDCRQIQESVTFASQVYREIICVPYMAKFVVFAKSHDPIEARLRCFCMTDDKVDKTLEQQENFAEVARSRDVEVLEGKPIYVDCFGNLVPLTKSGQHHIFSFFAFKENRLPLFVKVRDTTQEPCGRLSFMKEPKSTRGLVHQAICNLNITLPIYTKESESDQEQEEEIDMTSEKNPQDEQERIEERLAYIADHLGFSWTELARELDFTEEQIHQIRIENPNSLQDQSHALLKYWLERDGKHATDTNLVECLTKINRMDIVHLMETNTEPLQERISHSYAEIEQTITLDHSEGFSVLQEELCTAQHKQKEEQAVSKESETCDHPPIVSEEDISVGYSTFQDGVPKTEGDSSATALFPQTHKEQVQQDFSGKMQDLPEESSLEYQQEYFVTTPGTETSETQKAMIVPSSPSKTPEEVSTPAEEEKLYLQTPTSSERGGSPIIQEPEEPSEHREESSPRKTSLVIVESADNQPETCERLDEDAAFEKGDDMPEIPPETVTEEEYIDEHGHTVVKKVTRKIIRRYVSSEGTEKEEIMVQGMPQEPVNIEEGDGYSKVIKRVVLKSDTEQSEVTLCEPSILSSTSQFQAEPVEGRRVSKVVKTTVVLGERMEKHLGDSSLATDLPSAKDDFEEDNNE

SEQ ID NO: 26066 - protein, 3984 aa, Homo sapiens
MAHAAASIKKVREADLDEKEKNLERDRKKQRKIPRERMERKRKSDSNASFLRAARAGNLDKVVEYLKGGIDINTCNQNGLNALHLAAKEGHVGLVQELLGRGSSVDSATKKGNTALHIASLAGQAEVVKVLVKEGANINAQSQNGFTPLYMAAQENHIDVVKYLLENGANQSTATEDGFTPLAVALQQGHNQAVAILLENDTKGKVRLPALHIAARKDDTKSAALLLQNDHNADVQSKMMVNRTTESGFTPLHIAAHYGNVNVATLLLNRGAAVDFTARNGITPLHVASKRGNTNMVKLLLDRGGQIDAKTRDGLTPLHCAARSGHDQVVELLLERGAPLLARTKNGLSPLHMAAQGDHVECVKHLLQHKAPVDDVTLDYLTALHVAAHCGHYRVTKLLLDKRANPNARALNGFTPLHIACKKNRIKVMELLVKYGASIQAITESGLTPIHVAAFMGHLNIVLLLLQNGASPDVTNIRGETALHMAARAGQVEVVRCLLRNGALVDARAREEQTPLHIASRLGKTEIVQLLLQHMAHPDAATTNGYTPLHISAREGQVDVASVLLEAGAAHSLATKKGFTPLHVAAKYGSLDVAKLLLQRRAAADSAGKNGLTPLHVAAHYDNQKVALLLLEKGASPHATAKNGYTPLHIAAKKNQMQIASTLLNYGAETNIVTKQGVTPLHLASQEGHTDMVTLLLDKGANIHMSTKSGLTSLHLAAQEDKVNVADILTKHGADQDAHTKLGYTPLIVACHYGNVKMVNFLLKQGANVNAKTKNGYTPLHQAAQQGHTHIINVLLQHGAKPNATTANGNTALAIAKRLGYISVVDTLKVVTEEVTTTTTTITEKHKLNVPETMTEVLDVSDEEGDDTMTGDGGEYLRPEDLKELGDDSLPSSQFLDGMNYLRYSLEGGRSDSLRSFSSDRSHTLSHASYLRDSAVMDDSVVIPSHQVSTLAKEAERNSYRLSWGTENLDNVALSSSPIHSGRASPCLERDNSSFLVSFMVDARGGAMRGCRHNGLRIIIPPRKCTAPTRVTCRLVKRHRLATMPPMVEGEGLASRLIEVGPSGAQFLGKLHLPTAPPPLNEGESLVSRILQLGPPGTKFLGPVIVEIPHFAALRGKERELVVLRSENGDSWKEHFCDYTEDELNEILNGMDEVLDSPEDLEKKRICRIITRDFPQYFAVVSRIKQDSNLIGPEGGVLSSTVVPQVQAVFPEGALTKRIRVGLQAQPMHSELVKKILGNKATFSPIVTLEPRRRKFHKPITMTIPVPKASSDVMLNGFGGDAPTLRLLCSITGGTTPAQWEDITGTTPLTFVNECVSFTTNVSARFWLIDCRQIQESVTFASQVYREIICVPYMAKFVVFAKSHDPIEARLRCFCMTDDKVDKTLEQQENFAEVARSRDVEVLEGKPIYVDCFGNLVPLTKSGQHHIFSFFAFKENRLPLFVKVRDTTQEPCGRLSFMKEPKSTRGLVHQAICNLNITLPIYTKESESDQEQEEEIDMTSEKNDETESTETSVLKSHLVNEVPVLASPDLLSEVSEMKQDLIKMTAILTTDVSDKAGSIKVKELVKAAEEEPGEPFEIVERVKEDLEKVNEILRSGTCTRDESSVQSSRSERGLVEEEWVIVSDEEIEEARQKAPLEITEYPCVEVRIDKEIKGKVEKDSTGLVNYLTDDLNTCVPLPKEQLQTVQDKAGKKCEALAVGRSSEKEGKDIPPDETQSTQKQHKPSLGIKKPVRRKLKEKQKQKEEGLQASAEKAELKKGSSEESLGEDPGLAPEPLPTVKATSPLIEETPIGSIKDKVKALQKRVEDEQKGRSKLPIRVKGKEDVPKKTTHRPHPAASPSLKSERHAPGSPSPKTERHSTLSSSAKTERHPPVSPSSKTEKHSPVSPSAKTERHSPASSSSKTEKHSPVSPSTKTERHSPVSSTKTERHPPVSPSGKTDKRPPVSPSGRTEKHPPVSPGRTEKRLPVSPSGRTDKHQPVSTAGKTEKHLPVSPSGKTEKQPPVSPTSKTERIEETMSVRELMKAFQSGQDPSKHKTGLFEHKSAKQKQPQEKGKVRVEKEKGPILTQREAQKTENQTIKRGQRLPVTGTAESKRGVRVSSIGVKKEDAAGGKEKVLSHKIPEPVQSVPEEESHRESEVPKEKMADEQGDMDLQISPDRKTSTDFSEVIKQELEDNDKYQQFRLSEETEKAQLHLDQVLTSPFNTTFPLDYMKDEFLPALSLQSGALDGSSESLKNEGVAGSPCGSLMEGTPQISSEESYKHEGLAETPETSPESLSFSPKKSEEQTGETKESTKTETTTEIRSEKEHPTTKDITGGSEERGATVTEDSETSTESFQKEATLGSPKDTSPKRQDDCTGSCSVALAKETPTGLTEEAACDEGQRTFGSSAHKTQTDSEVQESTATSDETKALPLPEASVKTDTGTESKPQGVIRSPQGLELALPSRDSEVLSAVADDSLAVSHKDSLEASPVLEDNSSHKTPDSLEPSPLKESPCRDSLESSPVEPKMKAGIFPSHFPLPAAVAKTELLTEVASVRSRLLRDPDGSAEDDSLEQTSLMESSGKSPLSPDTPSSEEVSYEVTPKTTDVSTPKPAVIHECAEEDDSENGEKKRFTPEEEMFKMVTKIKMFDELEQEAKQKRDYKKEPKQEESSSSSDPDADCSVDVDEPKHTGSGEDESGVPVLVTSESRKVSSSSESEPELAQLKKGADSGLLPEPVIRVQPPSPLPSSMDSNSSPEEVQFQPVVSKQYTFKMNEDTQEEPGKSEEEKDSESHLAEDRHAVSTEAEDRSYDKLNRDTDQPKICDGHGCEAMSPSSSAAPVSSGLQSPTGDDVDEQPVIYKESLALQGTHEKDTEGEELDVSRAESPQADCPSESFSSSSSLPHCLVSEGKELDEDISATSSIQKTEVTKTDETFENLPKDCPSQDSSITTQTDRFSMDVPVSDLAENDEIYDPQITSPYENVPSQSFFSSEESKTQTDANHTTSFHSSEVYSVTITSPVEDVVVASSSSGTVLSKESNFEGQDIKMESQQESTLWEMQSDSVSSSFEPTMSATTTVVGEQISKVIITKTDVDSDSWSEIREDDEAFEARVKEEEQKIFGLMVDRQSQGTTPDTTPARTPTEEGTPTSEQNPFLFQEGKLFEMTRSGAIDMTKRSYADESFHFFQIGQESREETLSEDVKEGATGADPLPLETSAESLALSESKETVDDEADLLPDDVSEEVEEIPASDAQLNSQMGISASTETPTKEAVSVGTKDLPTVQTGDIPPLSGVKQISCPDSSEPAVQVQLDFSTLTRSVYSDRGDDSPDSSPEEQKSVIEIPTAPMENVPFTESKSKIPVRTMPTSTPAPPSAEYESSVSEDFLSSVDEENKADEAKPKSKLPVKVPLQRVEQQLSDLDTSVQKTVAPQGQDMASIAPDNRSKSESDASSLDSKTKCPVKTRSYTETETESRERAEELELESEEGATRPKILTSRLPVKSRSTTSSCRGGTSPTKESKEHFFDLYRNSIEFFEEISDEASKLVDRLTQSEREQEIVSDDESSSALEVSVIENLPPVETEHSVPEDIFDTRPIWDESIETLIERIPDENGHDHAEDPQDEQERIEERLAYIADHLGFSWTELARELDFTEEQIHQIRIENPNSLQDQSHALLKYWLERDGKHATDTNLVECLTKINRMDIVHLMETNTEPLQERISHSYAEIEQTITLDHSEGFSVLQEELCTAQHKQKEEQAVSKESETCDHPPIVSEEDISVGYSTFQDGVPKTEGDSSATALFPQTHKEQVQQDFSGKMQDLPEESSLEYQQEYFVTTPGTETSETQKAMIVPSSPSKTPEEVSTPAEEEKLYLQTPTSSERGGSPIIQEPEEPSEHREESSPRKTSLVIVESADNQPETCERLDEDAAFEKGDDMPEIPPETVTEEEYIDEHGHTVVKKVTRKIIRRYVSSEGTEKEEIMVQGMPQEPVNIEEGDGYSKVIKRVVLKSDTEQSEDNNE

SEQ ID NO: 26067 - protein, 795 aa, Homo sapiens
MGYLRIFSPHPAKTGDGAQAEDLLLEVDLRDPVLQVEVGKFVSGTEMLHLAVLHSRKLCVYSVSGTLGNVEHGNQCQMKLMYEHNLQRTACNMTYGSFGGVKGRDLICIQSMDGMLMVFEQESYAFGRFLPGFLLPGPLAYSSRTDSFLTVSSCQQVESYKYQVLAFATDADKRQETEQQKLGSGKRLVVDWTLNIGEQALDICIVSFNQSASSVFVLGERNFFCLKDNGQIRFMKKLDWSPSCFLPYCSVSEGTINTLIGNHNNMLHIYQDVTLKWATQLPHIPVAVRVGCLHDLKGVIVTLSDDGHLQCSYLGTDPSLFQAPNVQSRELNYDELDVEMKELQKIIKDVNKSQGVWPMTEREDDLNVSVVVSPNFDSVSQATDVEVGTDLVPSVTVKVTLQNRVILQKAKLSVYVQPPLELTCDQFTFEFMTPDLTRTVSFSVYLKRSYTPSELEGNAVVSYSRPTDRNPDGIPRVIQCKFRLPLKLICLPGQPSKTASHKITIDTNKSPVSLLSLFPGFASQSDDDQVNVMGFHFLGGARITVLASKTSQRYRIQSEQFEDLWLITNELILRLQEYFEKQGVKDFACSFSGSIPLQEYFELIDHHFELRINGEKLEELLSERAVQFRAIQRRLLARFKDKTPAPLQHLDTLLDGTYKQVIALADAVEENQGNLFQSFTRLKSATHLVILLIALWQKLSADQVAILEAAFLPLQEDTQELGWEETVDAAISHLLKTCLSKSSKEQALNLNSQLNIPKDTSQLKKHITLLCDRLSKGGRLCLSTDAAAPQTMVMP

SEQ ID NO: 26068 - protein, 1424 aa, Homo sapiens
MIKTIYKTPGMIKDEQEIVQKRTFTKWINSHLAKRKPPMVVDDLFEDMKDGVKLLALLEVLSGQKLPCEQGRRMKRIHAVANIGTALKFLEGRKSMHRGSPIKLVNINSTDIADGRPSIVLGLMWTIILYFQIEELTSNLPQLQSLSSSASSVDSIVSSETPSPPSKRKVTTKIQGNAKKALLKWVQYTAGKQTGIEVKDFGKSWRSGVAFHSVIHAIRPELVDLETVKGRSNRENLEDAFTIAETELGIPRLLDPEDVDVDKPDEKSIMTYVAQFLKHYPDIHNASTDGQEDDREDRVIFKEMKVWIEQFERDLTRAQMVESNLQDKYQSFKHFRVQYEMKRKQIEHLIQPLHRDGKLSLDQALVKQSWDRVTSRLFDWHIQLDKSLPAPLGTIGAWLYRAEVALREEITVQQVHEETANTIQRKLEQHKDLLQNTDAHKRAFHEIYRTRSVNGIPVPPDQLEDMAERFHFVSSTSELHLMKMEFLELKYRLLSLLVLAESKLKSWIIKYGRRESVEQLLQNYVSFIENSKFFEQYEVTYQILKQTAEMYVKADGSVEEAENVMKFMNETTAQWRNLSVEVRSVRSMLEEVISNWDRYGNTVASLQAWLEDAEKMLNQSENAKKDFFRNLPHWIQQHTAMNDAGNFLIETCDEMVSRDLKQQLLLLNGRWRELFMEVKQYAQADEMDRMKKEYTDCVVTLSAFATEAHKKLSEPLEVSFMNVKLLIQDLEDIEQRVPVMDAQYKIITKTAHLITKESPQEEGKEMFATMSKLKEQLTKVKECYSPLLYESQQLLIPLEELEKQMTSFYDSLGKINEIITVLEREAQSSALFKQKHQELLACQENCKKTLTLIEKGSQSVQKFVTLSNVLKHFDQTRLQRQIADIHVAFQSMVKKTGDWKKHVETNSRLMKKFEESRAELEKVLRIAQEGLEEKGDPEELLRRHTEFFSQLDQRVLNAFLKACDELTDILPEQEQQGLQEAVRKLHKQWKDLQGEAPYHLLHLKIDVEKNRFLASVEECRTELDRETKLMPQEGSEKIIKEHRVFFSDKGPHHLCEKRLQLIEELCVKLPVRDPVRDTPGTCHVTLKELRAAIDSTYRKLMEDPDKWKDYTSRFSEFSSWISTNETQLKGIKGEAIDTANHGEVKRAVEEIRNGVTKRGETLSWLKSRLKVLTEVSSENEAQKQGDELAKLSSSFKALVTLLSEVEKMLSNFGDCVQYKEIVKNSLEELISGSKEVQEQAEKILDTENLFEAQQLLLHHQQKTKRISAKKRDVQQQIAQAQQGEGGLPDRGHEELRKLESTLDGLERSRERQERRIQVTLRKWERFETNKETVVRYLFQTGSSHERFLSFSSLESLSSELEQTKEFSKRTESIAVQAENLVKEASEIPLGPQNKQLLQQQAKSIKEQVKKLEDTLEEEYVIDKS

SEQ ID NO: 26069 - protein, 1311 aa, Homo sapiens [sequence omitted]

SEQ ID NO: 26070 - protein, 3891 aa, Homo sapiens
MMNEDAAQKSDSGEKFNGSSQRRKRPKKSDSNASFLRAARAGNLDKVVEYLKGGIDINTCNQNGLNALHLAAKEGHVGLVQELLGRGSSVDSATKKGNTALHIASLAGQAEVVKVLVKEGANINAQSQNGFTPLYMAAQENHIDVVKYLLENGANQSTATEDGFTPLAVALQQGHNQAVAILLENDTKGKVRLPALHIAARKDDTKSAALLLQNDHNADVQSKMMVNRTTESGFTPLHIAAHYGNVNVATLLLNRGAAVDFTARNGITPLHVASKRGNTNMVKLLLDRGGQIDAKTRDGLTPLHCAARSGHDQVVELLLERGAPLLARTKNGLSPLHMAAQGDHVECVKHLLQHKAPVDDVTLDYLTALHVAAHCGHYRVTKLLLDKRANPNARALNGFTPLHIACKKNRIKVMELLVKYGASIQAITESGLTPIHVAAFMGHLNIVLLLLQNGASPDVTNIRGETALHMAARAGQVEVVRCLLRNGALVDARAREEQTPLHIASRLGKTEIVQLLLQHMAHPDAATTNGYTPLHISAREGQVDVASVLLEAGAAHSLATKKGFTPLHVAAKYGSLDVAKLLLQRRAAADSAGKNGYTPLHIAAKKNQMQIASTLLNYGAETNIVTKQGVTPLHLASQEGHTDMVTLLLDKGANIHMSTKSGLTSLHLAAQEDKVNVADILTKHGADQDAHTKLGYTPLIVACHYGNVKMVNFLLKQGANVNAKTKNGYTPLHQAAQQGHTHIINVLLQHGAKPNATTANGNTALAIAKRLGYISVVDTLKVVTEEVTTTTTTITEKHKLNVPETMTEVLDVSDEEGDDTMTGDGGEYLRPEDLKELGDDSLPSSQFLDGMNYLRYSLEGGRSDSLRSFSSDRSHTLSHASYLRDSAVMDDSVVIPSHQVSTLAKEAERNSYRLSWGTENLDNVALSSSPIHSGFLVSFMVDARGGAMRGCRHNGLRIIIPPRKCTAPTRVTCRLVKRHRLATMPPMVEGEGLASRLIEVGPSGAQFLGPVIVEIPHFAALRGKERELVVLRSENGDSWKEHFCDYTEDELNEILNGMDEVLDSPEDLEKKRICRIITRDFPQYFAVVSRIKQDSNLIGPEGGVLSSTVVPQVQAVFPEGALTKRIRVGLQAQPMHSELVKKILGNKATFSPIVTLEPRRRKFHKPITMTIPVPKASSDVMLNGFGGDAPTLRLLCSITGGTTPAQWEDITGTTPLTFVNECVSFTTNVSARFWLIDCRQIQESVTFASQVYREIICVPYMAKFVVFAKSHDPIEARLRCFCMTDDKVDKTLEQQENFAEVARSRDVEVLEGKPIYVDCFGNLVPLTKSGQHHIFSFFAFKENRLPLFVKVRDTTQEPCGRLSFMKEPKSTRGLVHQAICNLNITLPIYTKESESDQEQEEEIDMTSEKNDETESTETSVLKSHLVNEVPVLASPDLLSEVSEMKQDLIKMTAILTTDVSDKAGSIKVKELVKAAEEEPGEPFEIVERVKEDLEKVNEILRSGTCTRDESSVQSSRSERGLVEEEWVIVSDEEIEEARQKAPLEITEYPCVEVRIDKEIKGKVEKDSTGLVNYLTDDLNTCVPLPKEQLQTVQDKAGKKCEALAVGRSSEKEGKDIPPDETQSTQKQHKPSLGIKKPVRRKLKEKQKQKEEGLQASAEKAELKKGSSEESLGEDPGLAPEPLPTVKATSPLIEETPIGSIKDKVKALQKRVEDEQKGRSKLPIRVKGKEDVPKKTTHRPHPAASPSLKSERHAPGSPSPKTERHSTLSSSAKTERHPPVSPSSKTEKHSPVSPSAKTERHSPASSSSKTEKHSPVSPSTKTERHSPVSSTKTERHPPVSPSGKTDKRPPVSPSGRTEKHPPVSPGRTEKRLPVSPSGRTDKHQPVSTAGKTEKHLPVSPSGKTEKQPPVSPTSKTERIEETMSVRELMKAFQSGQDPSKHKTGLFEHKSAKQKQPQEKGKVRVEKEKGPILTQREAQKTENQTIKRGQRLPVTGTAESKRGVRVSSIGVKKEDAAGGKEKVLSHKIPEPVQSVPEEESHRESEVPKEKMADEQGDMDLQISPDRKTSTDFSEVIKQELEDNDKYQQFRLSEETEKAQLHLDQVLTSPFNTTFPLDYMKDEFLPALSLQSGALDGSSESLKNEGVAGSPCGSLMEGTPQISSEESYKHEGLAETPETSPESLSFSPKKSEEQTGETKESTKTETTTEIRSEKEHPTTKDITGGSEERGATVTEDSETSTESFQKEATLGSPKDTSPKRQDDCTGSCSVALAKETPTGLTEEAACDEGQRTFGSSAHKTQTDSEVQESTATSDETKALPLPEASVKTDTGTESKPQGVIRSPQGLELALPSRDSEVLSAVADDSLAVSHKDSLEASPVLEDNSSHKTPDSLEPSPLKESPCRDSLESSPVEPKMKAGIFPSHFPLPAAVAKTELLTEVASVRSRLLRDPDGSAEDDSLEQTSLMESSGKSPLSPDTPSSEEVSYEVTPKTTDVSTPKPAVIHECAEEDDSENGEKKRFTPEEEMFKMVTKIKMFDELEQEAKQKRDYKKEPKQEESSSSSDPDADCSVDVDEPKHTGSGEDESGVPVLVTSESRKVSSSSESEPELAQLKKGADSGLLPEPVIRVQPPSPLPSSMDSNSSPEEVQFQPVVSKQYTFKMNEDTQEEPGKSEEEKDSESHLAEDRHAVSTEAEDRSYDKLNRDTDQPKICDGHGCEAMSPSSSAAPVSSGLQSPTGDDVDEQPVIYKESLALQGTHEKDTEGEELDVSRAESPQADCPSESFSSSSSLPHCLVSEGKELDEDISATSSIQKTEVTKTDETFENLPKDCPSQDSSITTQTDRFSMDVPVSDLAENDEIYDPQITSPYENVPSQSFFSSEESKTQTDANHTTSFHSSEVYSVTITSPVEDVVVASSSSGTVLSKESNFEGQDIKMESQQESTLWEMQSDSVSSSFEPTMSATTTVVGEQISKVIITKTDVDSDSWSEIREDDEAFEARVKEEEQKIFGLMVDRQSQGTTPDTTPARTPTEEGTPTSEQNPFLFQEGKLFEMTRSGAIDMTKRSYADESFHFFQIGQESREETLSEDVKEGATGADPLPLETSAESLALSESKETVDDEADLLPDDVSEEVEEIPASDAQLNSQMGISASTETPTKEAVSVGTKDLPTVQTGDIPPLSGVKQISCPDSSEPAVQVQLDFSTLTRSVYSDRGDDSPDSSPEEQKSVIEIPTAPMENVPFTESKSKIPVRTMPTSTPAPPSAEYESSVSEDFLSSVDEENKADEAKPKSKLPVKVPLQRVEQQLSDLDTSVQKTVAPQGQDMASIAPDNRSKSESDASSLDSKTKCPVKTRSYTETETESRERAEELELESEEGATRPKILTSRLPVKSRSTTSSCRGGTSPTKESKEHFFDLYRNSIEFFEEISDEASKLVDRLTQSEREQEIVSDDESSSALEVSVIENLPPVETEHSVPEDIFDTRPIWDESIETLIERIPDENGHDHAEDPQDEQERIEERLAYIADHLGFSWTELARELDFTEEQIHQIRIENPNSLQDQSHALLKYWLERDGKHATDTNLVECLTKINRMDIVHLMETNTEPLQERISHSYAEIEQTITLDHSEGFSVLQEELCTAQHKQKEEQAVSKESETCDHPPIVSEEDISVGYSTFQDGVPKTEGDSSATALFPQTHKEQVQQDFSGKMQDLPEESSLEYQQEYFVTTPGTETSETQKAMIVPSSPSKTPEEVSTPAEEEKLYLQTPTSSERGGSPIIQEPEEPSEHREESSPRKTSLVIVESADNQPETCERLDEDAAFEKGDDMPEIPPETVTEEEYIDEHGHTVVKKVTRKIIRRYVSSEGTEKEEIMVQGMPQEPVNIEEGDGYSKVIKRVVLKSDTEQSEDNNE

SEQ ID NO: 26071 - protein, 652 aa, Homo sapiens
MGLKAAQKTLFPLRSIDDVVRLFAAELGREEPDLVLLSLVLGFVEHFLAVNRVIPTNVPELTFQPSPAPDPPGGLTYFPVADLSIIAALYARFTAQIRGAVDLSLYPREGGVSSRELVKKVSDVIWNSLSRSYFKDRAHIQSLFSFITGTKLDSSGVAFAVVGACQALGLRDVHLALSEDHAWVVFGPNGEQTAEVTWHGKGNEDRRGQTVNAGVAERSWLYLKGSYMRCDRKMEVAFMVCAINPSIDLHTDSLELLQLQQKLLWLLYDLGHLERYPMALGNLADLEELEPTPGRPDPLTLYHKGIASAKTYYRDEHIYPYMYLAGYHCRNRNVREALQAWADTATVIQETVSNLQCLTTIIQQWDFHPRPHAPLLILAFFLWADPDSIILHYNYCREDEEIYKEFFEVANDVIPNLLKEAASLLEAGEERPGEQSQGTQSQGSALQDPECFAHLLRFYDGICKWEEGSPTPVLHVGWATFLVQSLGRFEGQVRQKVRIVSREAEAAEAEEPWGEEAREGRRRGPRRESKPEEPPPPKKPALDKGLGTGQGAVSGPPRKPPGTVAGTARGPEGGSTAQVPAPTASPPPEGPVLTFQSEKMKGMKELLVATKINSSAIKLQLTAQSQVQMKKQKVSTPSDYTLSFLKRQRKGL

SEQ ID NO: 26072 - protein, 418 aa, Homo sapiens
MKTERPKPNTFIIRCLQWTTVIERTFHVDTPEEREEWTEAIQAVADRLQRQEEERMNCSPTSQIDNIGEEEMDASTTHHKRKTMNDFDYLKLLGKGTFGKVILVREKASGKYYAMKILKKEVIIAKDEVAHTLTESRVLKNTRHPFLTSLKYSFQTKDRLCFVMEYVNGGELFFHLSRERVFSEDRTRFYGAEIVSALDYLHSGKIVYRDLKLENLMLDKDGHIKITDFGLCKEGITDAATMKTFCGTPEYLAPEVLEDNDYGRAVDWWGLGVVMYEMMCGRLPFYNQDHEKLFELILMEDIKFPRTLSSDAKSLLSGLLIKDPNKRLGGGPDDAKEIMRHSFFSGVNWQDVYDKKLVPPFKPQVTSETDTRYFDEEFTAQTITITPPEKYDEDGMDCMDNERRPHFPQFSYSASGRE

SEQ ID NO: 26073 - protein, 143 aa, Homo sapiens
MDSFDLALLQEWDLESLWGEDILNQRNDSLVVEFQSSASRCRSVYEPDRNALRRKERERRNQETQQDDGTFNSSYSLFSEPYKTNKGDELSNRIQNTLGNYDEMKDFLTDRSNQSHLVGVPKPGVPQTPVNKIDEHFVADSRA

SEQ ID NO: 26074 - protein, 1061 aa, Homo sapiens
MPHLPLASFRPPFWGLRHSRGLPRFHSVSTQSEPHGSPISRRNREAKQKRLREKQATLEAEIAGESKSPAESIKAWRPKELVLYEIPTKPGEKKDVSGPLPPAYSPRYVEAAWYPWWVREGFFKPEYQARLPQATGETFSMCIPPPNVTGSLHIGHALTVAIQDALVRWHRMRGDQVLWVPGSDHAGIATQAVVEKQLWKERGVRRHELSREAFLREVWQWKEAKGGEICEQLRALGASLDWDRECFTMDVGSSVAVTEAFVRLYKAGLLYRNHQLVNWSCALRSAISDIEVENRPLPGHTQLRLPGCPTPVSFGLLFSVAFPVDGEPDAEVVVGTTRPETLPGDVAVAVHPDDSRYTHLHGRQLRHPLMGQPLPLITDYAVQPHVGTVKVTPAHSPADAEMGARHGLSPLNVIAEDGTMTSLCGDWLQGLHRFVAREKIMSVLSEWGLFRGLQNHPMVLPICSRSGDVIEYLLKNQWFVRCQEMGARAAKAVESGALELSPSFHQKNWQHWFSHIGDWCVSRQLWWGHQIPAYLVVEDHAQGEEDCWVVGRSEAEAREVAAELTGRPGAELTLERDPDVLDTWFSSALFPFSALGWPQETPDLARFYPLSLLETGSDLLLFWVGRMVMLGTQLTGQLPFSKVLLHPMVRDRQGRKMSKSLGNVLDPRDIISGVEMQVLQEKLRSGNLDPAELAIVAAAQKKDFPHGIPECGTDALRFTLCSHGVQAGDLHLSVSEVQSCRHFCNKIWNALRFILNALGEKFVPQPAEELSPSSPMDAWILSRLALAAQECERGFLTRELSLVTHALHHFWLHNLCDVYLEAVKPVLWHSPRPLGPPQVLFSCADLGLRLLAPLMPFLAEELWQRLPPRPGCPPAPSISVAPYPSACSLEHWRQPELERRFSRVQEVVQVLRALRATYQLTKARPRVLLQSSEPGDQGLFEAFLEPLGTLGYCGAVGLLPPGAAAPSGWAQAPLSDTAQVYMELQGLVDPQIQLPLLAARRYKLQKQLDSLTARTPSEGEAGTQRQQKLSSLQLELSKLDKAASHLRQLMDEPPAPGSPEL

SEQ ID NO: 26075 - protein, 608 aa, Homo sapiens
MDSFDLALLQEWDLESLCVYEPDRNALRRKERERRNQETQQDDGTFNSSYSLFSEPYKTNKGDELSNRIQNTLGNYDEMKDFLTDRSNQSHLVGVPKPGVPQTPVNKIDEHFVADSRAQNQPSSICSTTTSTPAAVPVQQSKRGTMGWQKAGHPPSDGQQRATQQGSLRTLLGDGVGRQQPRAKQVCNVEVGLQTQERPPAMAAKHSSSGHCVQNFPPSLASKPSLVQQKPTAYVRPMDGQDQAPDESPKLKSSSETSVHCTSYRGVPASKPEPARAKAKLSKFSIPKQGEESRSGETNSCVEEIIREMTWLPPLSAIQAPGKVEPTKFPFPNKDSQLVSSGHNNPKKGDAEPESPDNGTSNTSMLEDDLKLSSDEEENEQQAAQRTALRALSDSAVVQQPNCRTSVPSSKGSSSSSSSGSSSSSSDSESSSGSDSETESSSSESEGSKPPHFSSPEAEPASSNKWQLDKWLNKVNPHKPPILIQNESHGSESNQYYNPVKEDVQDCGKVPDVCQPSLREKEIKSTCKEEQRPRTANKAPGSKGVKQKSPPAAVAVAVSAAAPPPAVPCAPAENAPAPARRSAGKKPTRRTERTSAGDGANCHRPEEP

SEQ ID NO: 26076 - protein, 284 aa, Homo sapiens
MSRIYLDSGWCEVPWGDGDLGSWADRSPLHEAASQGRLLALRTLLSQGYNVNAVTLDHVTPLHEACLGDHVACARTLLEAGANVNAITIDGVTPLFNACSQGSPSCAELLLEYGAKAQLESCLPSPTHEAASKGHHECLDILISWGIDVDQEIPHLGTPLYVACMSQQFHCIWKLLYAGADVQKGKYWDTPLHAAAQQSSTEIVNLLLEFGADINAKNTELLRPIDVATSSSMVERILLQHEATPSSLYQLCRLCIRSYIGKPRLHLIPQLQLPTLLKNFLQYR

SEQ ID NO: 26077 - protein, 1001 aa, Homo sapiens
MTEVLDVSDEEGDDTMTGDGGEYLRPEDLKELGDDSLPSSQFLDGMNYLRYSLEGGRSDSLRSFSSDRSHTLSHASYLRDSAVMDDSVVIPSHQVSTLAKEAERNSYRLSWGTENLDNVALSSSPIHSGFLVSFMVDARGGAMRGCRHNGLRIIIPPRKCTAPTRVTCRLVKRHRLATMPPMVEGEGLASRLIEVGPSGAQFLGPVIVEIPHFAALRGKERELVVLRSENGDSWKEHFCDYTEDELNEILNGMDEVLDSPEDLEKKRICRIITRDFPQYFAVVSRIKQDSNLIGPEGGVLSSTVVPQVQAVFPEGALTKRIRVGLQAQPMHSELVKKILGNKATFSPIVTLEPRRRKFHKPITMTIPVPKASSDVMLNGFGGDAPTLRLLCSITGGTTPAQWEDITGTTPLTFVNECVSFTTNVSARFWLIDCRQIQESVTFASQVYREIICVPYMAKFVVFAKSHDPIEARLRCFCMTDDKVDKTLEQQENFAEVARSRDVEVLEGKPIYVDCFGNLVPLTKSGQHHIFSFFAFKENRLPLFVKVRDTTQEPCGRLSFMKEPKSTRGLVHQAICNLNITLPIYTKESESDQEQEEEIDMTSEKNPQDEQERIEERLAYIADHLGFSWTELARELDFTEEQIHQIRIENPNSLQDQSHALLKYWLERDGKHATDTNLVECLTKINRMDIVHLMETNTEPLQERISHSYAEIEQTITLDHSEGFSVLQEELCTAQHKQKEEQAVSKESETCDHPPIVSEEDISVGYSTFQDGVPKTEGDSSATALFPQTHKEQVQQDFSGKMQDLPEESSLEYQQEYFVTTPGTETSETQKAMIVPSSPSKTPEEVSTPAEEEKLYLQTPTSSERGGSPIIQEPEEPSEHREESSPRKTSLVIVESADNQPETCERLDEDAAFEKGDDMPEIPPETVTEEEYIDEHGHTVVKKVTRKIIRRYVSSEGTEKEEIMVQGMPQEPVNIEEGDGYSKVIKRVVLKSDTEQSEDNNE

SEQ ID NO: 26078 - protein, 452 aa, Homo sapiens
MLCGRPRSSSDNRNFLRERAGLSSAAVQTRIGNSAASRRSPAARPPVPAPPALPRGRPGTEGSTSLSAPAVLVVAVAVVVVVVSAVAWAMANYIHVPPGSPEVPKLNVTVQDQEEHRCREGALSLLQHLRPHWDPQEVTLQLFTDGITNKLIGCYVGNTMEDVVLVRIYGNKTELLVDRDEEVKSFRVLQAHGCAPQLYCTFNNGLCYEFIQGEALDPKHVCNPAIFRLIARQLAKIHAIHAHNGWIPKSNLWLKMGKYFSLIPTGFADEDINKRFLSDIPSSQILQEEMTWMKEILSNLGSPVVLCHNDLLCKNIIYNEKQGDVQFIDYEYSGYNYLAYDIGNHFNEFAGVSDVDYSLYPDRELQSQWLRAYLEAYKEFKGFGTEVTEKEVEILFIQVNQFALASHFFWGLWALIQAKYSTIEFDFLGYAIVRFNQYFKMKPEVTALKVPE

SEQ ID NO: 26079 - protein, 115 aa, Homo sapiens
MDSFDLALLQEWDLESLWGEDILNQRNDSLVVEFQSSASRCRSVYEPDRNALRRKERERRNQETQQDDGTFNSSYSLFSEPYKTNKGDELSNRIQNTLGNYDEMKDFLTDRSNQS

SEQ ID NO: 26080 - protein, 3870 aa, Homo sapiens
MTTMLQKSDSNASFLRAARAGNLDKVVEYLKGGIDINTCNQNGLNALHLAAKEGHVGLVQELLGRGSSVDSATKKGNTALHIASLAGQAEVVKVLVKEGANINAQSQNGFTPLYMAAQENHIDVVKYLLENGANQSTATEDGFTPLAVALQQGHNQAVAILLENDTKGKVRLPALHIAARKDDTKSAALLLQNDHNADVQSKMMVNRTTESGFTPLHIAAHYGNVNVATLLLNRGAAVDFTARNGITPLHVASKRGNTNMVKLLLDRGGQIDAKTRDGLTPLHCAARSGHDQVVELLLERGAPLLARTKNGLSPLHMAAQGDHVECVKHLLQHKAPVDDVTLDYLTALHVAAHCGHYRVTKLLLDKRANPNARALNGFTPLHIACKKNRIKVMELLVKYGASIQAITESGLTPIHVAAFMGHLNIVLLLLQNGASPDVTNIRGETALHMAARAGQVEVVRCLLRNGALVDARAREEQTPLHIASRLGKTEIVQLLLQHMAHPDAATTNGYTPLHISAREGQVDVASVLLEAGAAHSLATKKGFTPLHVAAKYGSLDVAKLLLQRRAAADSAGKNGYTPLHIAAKKNQMQIASTLLNYGAETNIVTKQGVTPLHLASQEGHTDMVTLLLDKGANIHMSTKSGLTSLHLAAQEDKVNVADILTKHGADQDAHTKLGYTPLIVACHYGNVKMVNFLLKQGANVNAKTKNGYTPLHQAAQQGHTHIINVLLQHGAKPNATTANGNTALAIAKRLGYISVVDTLKVVTEEVTTTTTTITEKHKLNVPETMTEVLDVSDEEGDDTMTGDGGEYLRPEDLKELGDDSLPSSQFLDGMNYLRYSLEGGRSDSLRSFSSDRSHTLSHASYLRDSAVMDDSVVIPSHQVSTLAKEAERNSYRLSWGTENLDNVALSSSPIHSGFLVSFMVDARGGAMRGCRHNGLRIIIPPRKCTAPTRVTCRLVKRHRLATMPPMVEGEGLASRLIEVGPSGAQFLGPVIVEIPHFAALRGKERELVVLRSENGDSWKEHFCDYTEDELNEILNGMDEVLDSPEDLEKKRICRIITRDFPQYFAVVSRIKQDSNLIGPEGGVLSSTVVPQVQAVFPEGALTKRIRVGLQAQPMHSELVKKILGNKATFSPIVTLEPRRRKFHKPITMTIPVPKASSDVMLNGFGGDAPTLRLLCSITGGTTPAQWEDITGTTPLTFVNECVSFTTNVSARFWLIDCRQIQESVTFASQVYREIICVPYMAKFVVFAKSHDPIEARLRCFCMTDDKVDKTLEQQENFAEVARSRDVEVLEGKPIYVDCFGNLVPLTKSGQHHIFSFFAFKENRLPLFVKVRDTTQEPCGRLSFMKEPKSTRGLVHQAICNLNITLPIYTKESESDQEQEEEIDMTSEKNDETESTETSVLKSHLVNEVPVLASPDLLSEVSEMKQDLIKMTAILTTDVSDKAGSIKVKELVKAAEEEPGEPFEIVERVKEDLEKVNEILRSGTCTRDESSVQSSRSERGLVEEEWVIVSDEEIEEARQKAPLEITEYPCVEVRIDKEIKGKVEKDSTGLVNYLTDDLNTCVPLPKEQLQTVQDKAGKKCEALAVGRSSEKEGKDIPPDETQSTQKQHKPSLGIKKPVRRKLKEKQKQKEEGLQASAEKAELKKGSSEESLGEDPGLAPEPLPTVKATSPLIEETPIGSIKDKVKALQKRVEDEQKGRSKLPIRVKGKEDVPKKTTHRPHPAASPSLKSERHAPGSPSPKTERHSTLSSSAKTERHPPVSPSSKTEKHSPVSPSAKTERHSPASSSSKTEKHSPVSPSTKTERHSPVSSTKTERHPPVSPSGKTDKRPPVSPSGRTEKHPPVSPGRTEKRLPVSPSGRTDKHQPVSTAGKTEKHLPVSPSGKTEKQPPVSPTSKTERIEETMSVRELMKAFQSGQDPSKHKTGLFEHKSAKQKQPQEKGKVRVEKEKGPILTQREAQKTENQTIKRGQRLPVTGTAESKRGVRVSSIGVKKEDAAGGKEKVLSHKIPEPVQSVPEEESHRESEVPKEKMADEQGDMDLQISPDRKTSTDFSEVIKQELEDNDKYQQFRLSEETEKAQLHLDQVLTSPFNTTFPLDYMKDEFLPALSLQSGALDGSSESLKNEGVAGSPCGSLMEGTPQISSEESYKHEGLAETPETSPESLSFSPKKSEEQTGETKESTKTETTTEIRSEKEHPTTKDITGGSEERGATVTEDSETSTESFQKEATLGSPKDTSPKRQDDCTGSCSVALAKETPTGLTEEAACDEGQRTFGSSAHKTQTDSEVQESTATSDETKALPLPEASVKTDTGTESKPQGVIRSPQGLELALPSRDSEVLSAVADDSLAVSHKDSLEASPVLEDNSSHKTPDSLEPSPLKESPCRDSLESSPVEPKMKAGIFPSHFPLPAAVAKTELLTEVASVRSRLLRDPDGSAEDDSLEQTSLMESSGKSPLSPDTPSSEEVSYEVTPKTTDVSTPKPAVIHECAEEDDSENGEKKRFTPEEEMFKMVTKIKMFDELEQEAKQKRDYKKEPKQEESSSSSDPDADCSVDVDEPKHTGSGEDESGVPVLVTSESRKVSSSSESEPELAQLKKGADSGLLPEPVIRVQPPSPLPSSMDSNSSPEEVQFQPVVSKQYTFKMNEDTQEEPGKSEEEKDSESHLAEDRHAVSTEAEDRSYDKLNRDTDQPKICDGHGCEAMSPSSSAAPVSSGLQSPTGDDVDEQPVIYKESLALQGTHEKDTEGEELDVSRAESPQADCPSESFSSSSSLPHCLVSEGKELDEDISATSSIQKTEVTKTDETFENLPKDCPSQDSSITTQTDRFSMDVPVSDLAENDEIYDPQITSPYENVPSQSFFSSEESKTQTDANHTTSFHSSEVYSVTITSPVEDVVVASSSSGTVLSKESNFEGQDIKMESQQESTLWEMQSDSVSSSFEPTMSATTTVVGEQISKVIITKTDVDSDSWSEIREDDEAFEARVKEEEQKIFGLMVDRQSQGTTPDTTPARTPTEEGTPTSEQNPFLFQEGKLFEMTRSGAIDMTKRSYADESFHFFQIGQESREETLSEDVKEGATGADPLPLETSAESLALSESKETVDDEADLLPDDVSEEVEEIPASDAQLNSQMGISASTETPTKEAVSVGTKDLPTVQTGDIPPLSGVKQISCPDSSEPAVQVQLDFSTLTRSVYSDRGDDSPDSSPEEQKSVIEIPTAPMENVPFTESKSKIPVRTMPTSTPAPPSAEYESSVSEDFLSSVDEENKADEAKPKSKLPVKVPLQRVEQQLSDLDTSVQKTVAPQGQDMASIAPDNRSKSESDASSLDSKTKCPVKTRSYTETETESRERAEELELESEEGATRPKILTSRLPVKSRSTTSSCRGGTSPTKESKEHFFDLYRNSIEFFEEISDEASKLVDRLTQSEREQEIVSDDESSSALEVSVIENLPPVETEHSVPEDIFDTRPIWDESIETLIERIPDENGHDHAEDPQDEQERIEERLAYIADHLGFSWTELARELDFTEEQIHQIRIENPNSLQDQSHALLKYWLERDGKHATDTNLVECLTKINRMDIVHLMETNTEPLQERISHSYAEIEQTITLDHSEGFSVLQEELCTAQHKQKEEQAVSKESETCDHPPIVSEEDISVGYSTFQDGVPKTEGDSSATALFPQTHKEQVQQDFSGKMQDLPEESSLEYQQEYFVTTPGTETSETQKAMIVPSSPSKTPEEVSTPAEEEKLYLQTPTSSERGGSPIIQEPEEPSEHREESSPRKTSLVIVESADNQPETCERLDEDAAFEKGDDMPEIPPETVTEEEYIDEHGHTVVKKVTRKIIRRYVSSEGTEKEEIMVQGMPQEPVNIEEGDGYSKVIKRVVLKSDTEQSEDNNE

SEQ ID NO: 26081 - protein, 1178 aa, Homo sapiens
MSLKPQQQQQQQQQQQQQQQQQQQQQQQPPPAAANVRKPGGSGLLASPAAAPSPSSSSVSSSSATAPSSVVAATSGGGRPGLGRGRNSNKGLPQSTISFDGIYANMRMVHILTSVVGSKCEVQVKNGGIYEGVFKTYSPKCDLVLDAAHEKSTESSSGPKREEIMESILFKCSDFVVVQFKDMDSSYAKRDAFTDSAISAKVNGEHKEKDLEPWDAGELTANEELEALENDVSNGWDPNDMFRYNEENYGVVSTYDSSLSSYTVPLERDNSEEFLKREARANQLAEEIESSAQYKARVALENDDRSEEEKYTAVQRNSSEREGHSINTRENKYIPPGQRNREVISWGSGRQNSPRMGQPGSGSMPSRSTSHTSDFNPNSGSDQRVVNGGVPWPSPCPSPSSRPPSRYQSGPNSLPPRAATPTRPPSRPPSRPSRPPSHPSAHGSPAPVSTMPKRMSSEGPPRMSPKAQRHPRNHRVSAGRGSISSGLEFVSHNPPSEAATPPVARTSPSGGTWSSVVSGVPRLSPKTHRPRSPRQNSIGNTPSGPVLASPQAGIIPTEAVAMPIPAASPTPASPASNRAVTPSSEAKDSRLQDQRQNSPAGNKENIKPNETSPSFSKAENKGISPVVSEHRKQIDDLKKFKNDFRLQPSSTSESMDQLLNKNREGEKSRDLIKDKIEPSAKDSFIENSSSNCTSGSSKPNSPSISPSILSNTEHKRGPEVTSQGVQTSSPACKQEKDDKEEKKDAAEQVRKSTLNPNAKEFNPRSFSQPKPSTTPTSPRPQAQPSPSMVGHQQPTPVYTQPVCFAPNMMYPVPVSPGVQPLYPIPMTPMPVNQAKTYRAVPNMPQQRQDQHHQSAMMHPASAAGPPIAATPPAYSTQYVAYSPQQFPNQPLVQHVPHYQSQHPHVYSPVIQGNARMMAPPTHAQPGLVSSSATQYGAHEQTHAMYACPKLPYNKETSPSFYFAISTGSLAQQYAHPNATLHPHTPHPQPSATPTGQQQSQHGGSHPAPSPVQHHQHQAAQALHLASPQQQSAIYHAGLAPTPPSMTPASNTQSPQNSFPAAQQTVFTIHPSHVQPAYTNPPHMAHVPQCASEALARCGLEMRLSWIYLSEGYLAHVQSGMVPSHPTAHAPMMLMTTQPPGGPQAALAQSALQPIPVSTTAHFPYMTHPSVQAHHQQQL

SEQ ID NO: 26082 - protein, 841 aa, Homo sapiens
MFTTGSPPFGTMGACYHCSPRYGQSISVPRIWKCRHRRSVTPEEGISSEGFPWDGFNEQTPKDLPNRDGGAWVLGYRAGPACPFLLHEEREKSNRSELYLDLHPDHSLTEQDDRTPGRLQAVWPPPKTKDTEEKVGLKYTEAEYQAAILHLKREHKEEIENLQAQFELRAFHIRGEHAMITARLEETIENLKHELEHRWRGGCEERKDVCISTDDDCPPKTFRNVCVQTDRETFLKPCESESKTTRSNQLVPKKLNISSLSQLSPPNDHKDIHAALQPMEGMASNQQKALPPPPASIPPPPPLPSGLGSLSPAPPMPPVSAGPPLPPPPPPPPPLPPPSSAGPPPPPPPPPLPNSPAPPNPGGPPPAPPPPGLAPPPPPGLFFGLGSSSSQCPRKPAIEPSCPMKPLYWTRIQISDRSQNATPTLWDSLEEPDIRDPSEFEYLFSKDTTQQKKKPLSETYEKKNKVKKIIKLLDGKRSQTVGILISSLHLEMKDIQQAIFNVDDSVVDLETLAALYENRAQEDELVKIRKYYETSKEEELKLLDKPEQFLHELAQIPNFAERAQCIIFRSVFSEGITSLHRKVEIITRASKDLLHVKSVKDILALILAFGNYMNGGNRTRGQADGYSLEILPKLKDVKSRDNGINLVDYVVKYYLRYYDQEAGTEKSVFPLPEPQDFFLASQVKFEDLIKDLRKLKRQLEASEKQMVVVCKESPKEYLQPFKDKLEEFFQKAKKEHKMEESHLENAQKSFETTVRYFGMKPKSGEKEITPSYVFMVWYEFCSDFKTIWKRESKNISKERLKMAQESVSKLTSEKKVETKKINPTASLKERLRQKEASVTTN

SEQ ID NO: 26083 - protein, 153 aa, Homo sapiens
ETVAGPGEGTVAPTALQGPSPGSPGQEQAAEGAPEHHRSRRCTCFTYKDKECVYYCHLDIIWINTPEQTVPYGLSNYRGSFRGKRSAGPLPGNLQLSHRPHLRCACVGRYDKACLHFCTQTLDVSSNSRTAEKTDKEEEGKVRGANRGLCQRR

SEQ ID NO: 26084 - protein, 725 aa, Homo sapiens
ANSRAPTTTMRNLVERLKSQLALKEKQQKALSRALLELRAEMTAAAEERIISATSQKEAHLNVQQIVDRHTRELKTQVEDLNENLLKLKEALKTSKNRENSLTDNLNDLNNELQKKQKAYNKILREKEEIDQENDELKRQIKRLTSGLQGKPLTDNKQSLIEELQRKVKKLENQLEGKVEEVDLKPMKEKNAKEELIRWEEGKKWQAKIEGIRNKLKEKEGEVFTLTKQLNTLKDLFAKADKEKLTLQRKLKTTGMTVDQVLGIRALESEKELEELKKRNLDLENDILYMRAHQALPRDSVVEDLHLQNRYLQEKLHALEKQFSKDTYSKPSISGIESDDHCQREQELQKENLKLSSENIELKFQLEQANKDLPRLKNQVRDLKEMCEFLKKEKAEVQRKLGHVRGSGRSGKTIPELEKTIGLMKKVVEKVQRENEQLKKASGILTSEKMANIEQENEKLKETDAAEKLRIAKNNLEILNEKMTVQLEETGKRLQFAESRGPQLEGADSKSWKSIVVTRMYETKLKELETDIAKKNQSITDLKQLVKEATEREQKVNKYNEDLEQQIKILKHVPEGAETEQGLKRELQVLRLANHQLDKEKAELIHQIEANKDQSGAESTIPDADQLKEKIKDLETQLKMSDLEKQHLKEEIKKLKKELENFDPSFFEEIEDLKYNYKEEVKKNILLEEKVKKLSEQLGVELTSPVAASEEFEDEEESPVNFPIY

SEQ ID NO: 26085 - protein, 144 aa, Homo sapiens
MDPPDLLSVELSTSRPPQHLGGVKKPTYDPVSEDQDPLSSDFKRLGLRKPGLPRGLWLAKPSARVPGTKASRGSGAEVTLIDFGEEPVVPALRPCAPSLAQLAMDACSLLDETPPQSPTRALPRPLHPTPVVDWDARPLPPPPA

SEQ ID NO: 26086 - protein, 1046 aa, Homo sapiens
MEERKHETMNPAHVLFDRFVQATTCKGTLKAFQELCDHLELKPKDYRSFYHKLKSKLNYWKAKALWAKLDKRGSHKDYKKGKACTNTKCLIIGAGPCGLRTAIDLSLLGAKVVVIEKRDAFSRNNVLHLWPFTIHDLRGLGAKKFYGKFCAGAIDHISIRQLQLILLKVALILGIEIHVNVEFQGLIQPPEDQENERIGWRALVHPKTHPVSEYEFEVIIGGDGRRNTLEGFRRKEFRGKLAIAITANFINRNTTAEAKVEEISGVAFIFNQKFFQELREATGIDLENIVYYKDDTHYFVMTAKKQSLLDKGVILHDYADTELLLSRENVDQEALLSYAREAADFSTQQQLPSLDFAINHYGQPDVAMFDFTCMYASENAALVREQNGHQLLVALVGDSLLEPFWPMGTGIARGFLAAMDSAWMVRSWSLGTSPLEVLAERESIYRLLPQTTPENVSKNFSQYSIDPVTRYPNINVNFLRPSQVRHLYDTGETKDIHLEMESLVNSRTTPKLTRNESVARSSKLLGWCQRQTDGYAGVNVTDLTMSWKSGLALCAIIHRYRPDLIDFDSLDEQNVEKNNQLAFDIAEKELGISPIMTGKEMASVGEPDKLSMVMYLTQFYEMFKDSLPSSDTLDLNAEEKAVLIASTRSPISFLSKLGQTISRKRSPKDKKEKDLDGAGKRRKTSQSEEEEAPRGHRGERPTLVSTLTDRRMDVAVGNQNKVKYMATQLLAKFEENAPAQSIGIRRQGSMKKEFPQNLGGSDTCYFCQKRVYVMERLSAEGKFFHRSCFKCEYCATTLRLSAYAYDIEDGKFYCKPHYCYRLSGYAQRKRPAVAPLSGKEAKGPLQDGATTDANGRANAVASSTERTPGSGVNGLEEPSIAKRLRGTPERIELENYRLSLRQAEALQEVPEETQAEHNLSSVLDTGAEEDVASSSSESEMEEEGEEEEEEPRLPPSDLGGVPWKEAVRIHALLKGKSEEELEASKSFGPGNEEEEEEEEEYEEEEEEDYDEEEEESSEEGEYCPWDTELQGQWRQVPPTGRRFEDI

SEQ ID NO: 26087 - protein, 595 aa, Homo sapiens
MEFSGRKWRKLRLAGDQRNASYPHCLQFYLQPPSENISLIEFENLAIDRVKLLKSVENLGVSYVKGTEQYQSKLESELRKLKFSYRENLEDEYEPRRRDHISHFILRLAYCQSEELRRWFIQQEMDLLRFRFSILPKDKIQDFLKDSQLQFEAISDEEKTLREQEIVASSPSLSGLKLGFESIYKIPFADALDLFRGRKVYLEDGFAYVPLKDIVAIILNEFRAKLSKALAAGVQWRDLGSLQPLPPGFKRFSYLSLLSCWDYRCTPPHPGLLWYPGGPLQSLVTLDFPVPGGINSEDCETAKMVVCSFLWELCASKLTARSLPAVQSDERLQPLLNHLSHSYTGQDYSTQGNVGKISLDQIDLLSTKSFPPCMRQLHKALRENHHLRHGGRMQYGLFLKGIGLTLEQALQFWKQEFIKGKMDPDKFDKGYSYNIRHSFGKEGKRTDYTPFSCLKIILSNPPSQGDYHGCPFRHSDPELLKQKLQSYKISPGGISQILDLVKGTHYQVACQKYFEMIHNVDDCGFSLNHPNQFFCESQRILNGGKDIKKEPIQPETPQPKPSVQKTKDASSALASLNSSLEMDMEGLEDYFSEDS

SEQ ID NO: 26088 - protein, 1285 aa, Homo sapiens
MEDGKPVWAPHPTDGFQMGNIVDIGPDSLTIEPLNQKGKTFLALINQVFPAEEDSKKDVEDNCSLMYLNEATLLHNIKVRYSKDRIYTYVANILIAVNPYFDIPKIYSSEAIKSYQGKSLGTRPPHVFAIADKAFRDMKVLKMSQSIIVSGESGAGKTENTKFVLRYLTESYGTGQDIDDRIVEANPLLEAFGNAKTVRNNNSSRFGKFVEIHFNEKSSVVGGFVSHYLLEKSRICVQGKEERNYHIFYRLCAGASEDIREKLHLSSPDNFRYLNRGCTRYFANKETDKQILQNRKSPEYLKAGSMKDPLLDDHGDFIRMCTAMKKIGLDDEEKLDLFRVVAGVLHLGNIDFEEAGSTSGGCNLKNKSAQSLEYCAELLGLDQDDLRVSLTTRVMLTTAGGTKGTVIKVPLKVEQANNARDALAKTVYSHLFDHVVNRVNQCFPFETSSYFIGVLDIAGFEYFEHNSFEQFCINYCNEKLQQFFNERILKEEQELYQKEGLGVNEVHYVDNQDCIDLIEAKLVGILDILDEENRLPQPSDQHFTSAVHQKHKDHFRLTIPRKSKLAVHRNIRDDEGFIIRHFAGAVCYETTQFVEKNNDALHMSLESLICESRDKFIRELFESSTNNNKDTKQKAGKLSFISVGNKFKTQLNLLLDKLRSTGASFIRCIKPNLKMTSHHFEGAQILSQLQCSGMVSVLDLMQGGYPSRASFHELYNMYKKYMPDKLARLDPRLFCKALFKALGLNENDYKFGLTKVFFRPGKFAEFDQIMKSDPDHLAELVKRVNHWLTCSRWKKVQWCSLSVIKLKNKIKYRAEACIKMQKTIRMWLCKRRHKPRIDGLVKVGTLKKRLDKFNEVVSVLKDGKPEMNKQIKNLEISIDTLMAKIKSTMMTQEQIQKEYDALVKSSEELLSALQKKKQQEEEAERLRRIQEEMEKERKRREEDEKRRRKEEEERRMKLEMEAKRKQEEEERKKREDDEKRIQAEVEAQLARQKEEESQQQAVLEQERRDRELALRIAQSEAELISDEAQADLALRSLDSYPVTSKNDGTRPKMTPEQMAKEMSEFLSRGPAVLATKAAAGTKKYDLSKWKYAELRDTINTSCDIELLAACREEFHRRLKVYHAWKSKNKKRNTETEQRAPKSVTDYAQQNPAAQIPARQREIEMNRQQRFFRIPFIRPADQYKDPQSKKKGWWYAHFDGPWIARQMELHPDKPPILLVAGKDDMEMCELNLEETGLTRKRGAEILPRQFEEIWERCGGIQYLQNAIESRQARPTYATAMLQSLLK

SEQ ID NO: 26089 - protein, 1763 aa, Homo sapiens
MTTMLQKSDSNASFLRAARAGNLDKVVEYLKGGIDINTCNQNGLNALHLAAKEGHVGLVQELLGRGSSVDSATKKGNTALHIASLAGQAEVVKVLVKEGANINAQSQNGFTPLYMAAQENHIDVVKYLLENGANQSTATEDGFTPLAVALQQGHNQAVAILLENDTKGKVRLPALHIAARKDDTKSAALLLQNDHNADVQSKMMVNRTTESGFTPLHIAAHYGNVNVATLLLNRGAAVDFTARNGITPLHVASKRGNTNMVKLLLDRGGQIDAKTRDGLTPLHCAARSGHDQVVELLLERGAPLLARTKNGLSPLHMAAQGDHVECVKHLLQHKAPVDDVTLDYLTALHVAAHCGHYRVTKLLLDKRANPNARALNGFTPLHIACKKNRIKVMELLVKYGASIQAITESGLTPIHVAAFMGHLNIVLLLLQNGASPDVTNIRGETALHMAARAGQVEVVRCLLRNGALVDARAREEQTPLHIASRLGKTEIVQLLLQHMAHPDAATTNGYTPLHISAREGQVDVASVLLEAGAAHSLATKKGFTPLHVAAKYGSLDVAKLLLQRRAAADSAGKNGLTPLHVAAHYDNQKVALLLLEKGASPHATAKNGYTPLHIAAKKNQMQIASTLLNYGAETNIVTKQGVTPLHLASQEGHTDMVTLLLDKGANIHMSTKSGLTSLHLAAQEDKVNVADILTKHGADQDAHTKLGYTPLIVACHYGNVKMVNFLLKQGANVNAKTKNGYTPLHQAAQQGHTHIINVLLQHGAKPNATTANGNTALAIAKRLGYISVVDTLKVVTEEVTTTTTTITEKHKLNVPETMTEVLDVSDEEGDDTMTGDGGEYLRPEDLKELGDDSLPSSQFLDGMNYLRYSLEGGRSDSLRSFSSDRSHTLSHASYLRDSAVMDDSVVIPSHQVSTLAKEAERNSYRLSWGTENLDNVALSSSPIHSGFLVSFMVDARGGAMRGCRHNGLRIIIPPRKCTAPTRVTCRLVKRHRLATMPPMVEGEGLASRLIEVGPSGAQFLGPVIVEIPHFAALRGKERELVVLRSENGDSWKEHFCDYTEDELNEILNGMDEVLDSPEDLEKKRICRIITRDFPQYFAVVSRIKQDSNLIGPEGGVLSSTVVPQVQAVFPEGALTKRIRVGLQAQPMHSELVKKILGNKATFSPIVTLEPRRRKFHKPITMTIPVPKASSDVMLNGFGGDAPTLRLLCSITGGTTPAQWEDITGTTPLTFVNECVSFTTNVSARFWLIDCRQIQESVTFASQVYREIICVPYMAKFVVFAKSHDPIEARLRCFCMTDDKVDKTLEQQENFAEVARSRDVEVLEGKPIYVDCFGNLVPLTKSGQHHIFSFFAFKENRLPLFVKVRDTTQEPCGRLSFMKEPKSTRGLVHQAICNLNITLPIYTKESESDQEQEEEIDMTSEKNPQDEQERIEERLAYIADHLGFSWTELARELDFTEEQIHQIRIENPNSLQDQSHALLKYWLERDGKHATDTNLVECLTKINRMDIVHLMETNTEPLQERISHSYAEIEQTITLDHSEGFSVLQEELCTAQHKQKEEQAVSKESETCDHPPIVSEEDISVGYSTFQDGVPKTEGDSSATALFPQTHKEQVQQDFSGKMQDLPEESSLEYQQEYFVTTPGTETSETQKAMIVPSSPSKTPEEVSTPAEEEKLYLQTPTSSERGGSPIIQEPEEPSEHREESSPRKTSLVIVESADNQPETCERLDEDAAFEKGDDMPEIPPETVTEEEYIDEHGHTVVKKDNNE

SEQ ID NO: 26090 - protein, 467 aa, Homo sapiens
LYGVCVRDVENIMVEEFVEGGPLDLFMHRKSDVLTTPWKFKVAKQLASALSYLEDKDLVHGNVCTKNLLLAREGIDSECGPFIKLSDPGIPITVLSRQECIERIPWIAPECVEDSKNLSVAADKWSFGTTLWEICYNGEIPLKDKTLIEKERFYESRCRPVTPSYPDIVSEKKPATEVDPTHFEKRFLKRIRDLGEGHFGKVELCRYDPEGDNTGEQVAVKSLKPESGGNHIADLKKEIEILRNLYHENIVKYKGICTEDGGNGIKLIMEFLPSGSLKEYLPKNKNKINLKQQLKYAVQICKGMDYLGSRQYVHRDLAARNVLVESEHQVKIGDFGLTKAIETDKEYYTVKDDRDSPVFWYAPECLMQSKFYIASDVWSFGVTLHELLTYCDSDSSPMALFLKMIGPTHGQMTVTRLVNTLKEGKRLPCPPNCPDEVYQLMRKCWEFQPSNRTSFQNLIEGFEALLK

SEQ ID NO: 26091 - protein, 523 aa, Homo sapiens
MQWIRGGSGMLITGDSIVSAEAVWDHVTMANRELAFKAGDVIKVLDASNKDWWWGQIDDEEGWFPASFVRLWVNQEDEVEEGPSDVQNGHLDPNSDCLCLGRPLQNRDQMRANVINEIMSTERHYIKHLKDICEGYLKQCRKRRDMFSDEQLKVIFGNIEDIYRFQMGFVRDLEKQYNNDDPHLSEIGPCFLEHQDGFWIYSEYCNNHLDACMELSKLMKDSRYQHFFEACRLLQQMIDIAIDGFLLTPVQKICKYPLQLAELLKYTAQDHSDYRYVAAALAVMRNVTQQINERKRRLENIDKIAQWQASVLDWEGEDILDRSSELIYTGEMAWIYQPYGRNQQRVFFLFDHQMVLCKKDLIRRDILYYKGRIDMDKYEVVDIEDGRDDDFNVSMKNAFKLHNKETEEIHLFFAKKLEEKIRWLRAFREERKMVQEDEKIGFEISENQKRQAAMTVRKVPKQKGVNSARSVPPSYPPPQDPLNHGQYLVPDGIAQSQVFEFTEPKRSQSPFWQNFSRLTPFKK

SEQ ID NO: 26092 - protein, 766 aa, Homo sapiens
MGVDFDVKTFCHNLRATKPPYECPVETCRKVYKSYSGIEYHLYHYDHDNPPPPQQTPLRKHKKKGRQSRPANKQSPSPSEVSQSPGREVMSYAQAQRMVEVDLHGRVHRISIFDNLDVVSEDEEAPEEAPENGSNKENTETPAATPKSGKHKNKEKRKDSNHHHHHNVSASTTPKLPEVVYRELEQDTPDAPPRPTSYYRYIEKSAEELDEEVEYDMDEEDYIWLDIMNERRKTEGVSPIPQEIFEYLMDRLEKESYFESHNKGDPNALVDEDAVCCICNDGECQNSNVILFCDMCNLAVHQECYGVPYIPEGQWLCRRCLQSPSRAVDCALCPNKGGAFKQTDDGRWAHVVCALWIPEVCFANTVFLEPIDSIEHIPPARWKLTCYICKQRGSGACIQCHKANCYTAFHVTCAQQAGLYMKMEPVRETGANGTSFSVRKTAYCDIHTPPGSARRLPALSHSEGEEDEDEEEDEGKGWSSEKVKKAKAKSRIKMKKARKILAEKRAAAPVVSVPCIPPHRLSKITNRLTIQRKSQFMQRLHSYWTLKRQSRNGVPLLRRLQTHLQSQRNCDQVGRDSEDKNWALKEQLKSWQRLRHDLERARLLVELIRKREKLKRETIKVQQIAMEMQLTPFLILLRKTLEQLQEKDTGNIFSEPVPLSEVPDYLDHIKKPMDFFTMKQNLEAYRYLNFDDFEEDFNLIVSNCLKYNAKDTIFYRAAVRLREQGGAVLRQARRQAEKMGIDFETGMHIPHSLAGDEATHHTEDGG

SEQ ID NO: 26093 - protein, 946 aa, Homo sapiens
MADNLDPSMFPMQKGSLNLLRQKWESCDYQRSECHPRDSHCTIFQPQESKLLAPEGEVVSAPQSLDPTSLPYSTGEEMWSSKPEEKDSVDKSNNTREYGRPEVLKEDSLSSRRRIERFSIALDELRSVFEAPKSGNKPAEYGGKEVEIERSLCSPAFKSHPGSQLEDSVKDSDKKGKETSFDKMSPESGHSRIFEATAGPNKPESGFAEDSAARGEGVSDLHEVVSLKERMARYQAAVSRGDCRSFSANMMEESEMCAVPGGLAKVKKQFEDEITSSRNTFAQYQYQHQNRSEQEAIHSSQVGTSRSSQEMARNEQEGSKVQKIDVHGTEMVSHLEKHTEEVNQASQFHQYVQETVIDTPEDEEIPKVSTKLLKEQFEKSAQEKILYSDKEMTTPAKQIKKLLLQDKEICILCQKTVYPMECLVADKQNFHKSCFRCHHCNSKLSLGNYASLHGQIYCKPHFKQLFKSKGNYDEGFGHKQHKDRWNCKNQSRSVDFIPNEEPNMCKNIAENTLVPGDRNEHLDAGNSEGQRNDLRKLGERGKLKVIWPPSKEIPKKTLPFEEELKMSKPKWPPEMTTLLSPEFKSESLLEDVRTPENKGQRQDHFPFLQPYLQSTHVCQKEDVIGIKEMKMPEGRKDEKKEGRKNVQDRPSEAEDTKSNRKSAMDLNDNNNVIVQSAEKEKNEKTNQTNGAEVLQVTNTDDEMMPENHKENLNKNNNNNYVAVSYLNNCRQKTSILEFLDLLPLSSEANDTANEYEIEKLENTSRISELLGIFESEKTYSRNVLAMALKKQTDRAAAGSPVQPAPKPSLSRGLMVKGGSSIISPDTNLLNIKGSHSKSKNLHFFFSNTVKITAFSKKNENIFNCDLIDSVDQIKNMPCLDLREFGKDVKPWHVETTEAARNNENTGFDALSHECTAKPLFPRVEVQSEQLTVEEQIKRNRCYSDTE

SEQ ID NO: 26094 - protein, 588 aa, Homo sapiens
MLHLHHSCLCFRSWLPAMLAVLLSLAPSASSDISASRPNILLLMADDLGIGDIGCYGNNTMRTPNIDRLAEDGVKLTQHISAASLCTPSRAAFLTGRYPVRSGMVSSIGYRVLQWTGASGGLPTNETTFAKILKEKGYATGLIGKWHLGLNCESASDHCHHPLHHGFDHFYGMPFSLMGDCARWELSEKRVNLEQKLNFLFQVLALVALTLVAGKLTHLIPVSWMPVIWSALSAVLLLASSYFVGALIVHADCFLMRNHTITEQPMCFQRTTPLILQEVASFLKRNKHGPFLLFVSFLHVHIPLITMENFLGKSLHGLYGDNVEEMDWMVGRILDTLDVEGLSNSTLIYFTSDHGGSLENQLGNTQYGGWNGIYKGGKGMGGWEGGIRVPGIFRWPGVLPAGRVIGEPTSLMDVFPTVVRLAGGEVPQDRVIDGQDLLPLLLGTAQHSDHEFLMHYCERFLHAARWHQRDRTMWKVHFVTPVFQPEGAGACYGRKVCPCFGEKVVHHDPPLLFDLSRDPSETHILTPASEPVFYQVMERVQQAVWEHQRTLSPVPLQLDRLGNIWRPWLQPCCGPFPLCWCLREDDPQ

SEQ ID NO: 26095 - protein, 707 aa, Homo sapiens; identical to SEQ ID NO: 23837

SEQ ID NO: 26096 - protein, 571 aa, Homo sapiens
MPPNINWKEIMKVDPDDLPRQEELADNLLISLSKVEVNELKSEKQENVIHLFRITQSLMKMKAQEVELALEEVEKAGEEQAKFENQLKTKVMKLENELEMAQQSAGGRDTRFLRNEICQLEKQLEQKDRELEDMEKELEKEKKVNEQLALRNEEAENENSKLRRENKRLKKKNEQLCQDIIDYQKQIDSQKETLLSRRGEDSDYRSQLSKKNYELIQYLDEIQTLTEANEKIEVQNQEMRKNLEESVQEMEKMTDEYNRMKAIVHQTDNVIDQLKKENDHYQLQVQELTDLLKSKNEEDDPIMVAVNAKVEEWKLILSSKDDEIIEYQQMLHNLREKLKNAQLDADKSNVMALQQGIQERDSQIKMLTEQVEQYTKEMEKNTCIIEDLKNELQRNKGASTLSQQTHMKIQSTLDILKEKTKEAERTAELAEADAREKDKELVEALKRLKDYESGVYGLEDAVVEIKNCKNQIKIRDREIEILTKEINKLELKISDFLDENEALRERVGLEPKTMIDLTEFRNSKHLKQQQYRAENQILLKEIESLEEERLDLKKKIRQMAQERGKRSATSE

SEQ ID NO: 26097 - protein, 1357 aa, Homo sapiens
MSDPDTPPQMTFGDKDDIRLLPSALGVKKRKRGPKKQKENKPGKPRKRKKRDSEEEFGSERDEYREKSESGGSEYGTGPGRKRRRKHREKKEKKTKRRKKGEGDGGQKQVEQKSSATLLLTWGLEDVEHVFSEEDYHTLTNYKAFSQFMRPLIAKKNPKIPMSKMMTILGAKWREFSANNPFKGSAAAVAAAAAAAAAAVAEQVSAAVSSATPIAPSGPPALPPPPAADIQPPPIRRAKTKEGKGPGHKRRSKSPRVPDGRKKLRGKKMAPLKIKLGLLGGKRKKGGSYVFQSDEGPEPEAEESDLDSGSVHSASGRPDGPVRTKKLKRGRPGRKKKKVLGCPAVAGEEEVDGYETDHQDYCEVCQQGGEIILCDTCPRAYHLVCLDPELDRAPEGKWSCPHCEKEGVQWEAKEEEEEYEEEGEEEGEKEEEDDHMEYCRVCKDGGELLCCDACISSYHIHCLNPPLPDIPNGEWLCPRCTCPVLKGRVQKILHWRWGEPPVAVPAPQQADGNPDVPPPRPLQGRSEREFFVKWVGLSYWHCSWAKELQLEIFHLVMYRNYQRKNDMDEPPPLDYGSGEDDGKSDKRKVKDPHYAEMEEKYYRFGIKPEWMTVHRIINHSVDKKGNYHYLVKWRDLPYDQSTWEEDEMNIPEYEEHKQSYWRHRELIMGEDPAQPRKYKKKKKELQGDGPPSSPTNDPTVKYETQPRFITATGGTLHMYQLEGLNWLRFSWAQGTDTILADEMGLGKTIQTIVFLYSLYKEGHTKGPFLVSAPLSTIINWEREFQMWAPKFYVVTYTGDKDSRAIIRENEFSFEDNAIKGGKKAFKMKAQVKFHVLLTSYELITIDQAALGSIRWACLVVDEAHRLKNNQSKFFRVLNGYKIDHKLLLTGTPLQNNLEELFHLLNFLTPERFNNLEGFLEEFADISKEDQIKKLHDLLGPHMLRRLKADVFKNMPAKTELIVRVELSPMQKKYYKYILTRNFEALNSRGGGNQVSLLNIMMDLKKCCNHPYLFPVAAMESPKLPSGAYEGGALIKSSGKLMLLQKMLRKLKEQGHRVLIFSQMTKMLDLLEDFLDYEGYKYERIDGGITGALRQEAIDRFNAPGAQQFCFLLSTRAGGLGINLATADTVIIFDSDWNPHNDIQAFSRAHRIGQANKVMIYRFVTRASVEERITQVAKRKMMLTHLVVRPGLGSKAGSMSKQELDDILKFGTEELFKDENEGENKEEDSSVIHYDNEAIARLLDRNQDATEDTDVQNMNEYLSSFKVAQYVVREEDKIEEIEREIIKQEENVDPDYWEKLLRHHYEQQQEDLARNLGKGKRVRKQVNYNDAAQEDQDNQSEYSVGSEEEDEDFDERPE

SEQ ID NO: 26098 - protein, 302 aa, Homo sapiens
MLSFYYYREEGNSLPVVAEHSLVLMQRGLFSDGDTSKKKKNVTMRSIKTTRDRVPTYQYNMNFEKLGKCIIINNKNFDKVTGMGVRNGTDKDAEALFKCFRSLGFDVIVYNDCSCAKMQDLLKKASEEDHTNAACFACILLSHGEENVIYGKDGVTPIKDLTAHFRGDRCKTLLEKPKLFFIQACRGTELDDGIQADSGPINDTDANPRYKIPVEADFLFAYSTVPGYYSWRSPGRGSWFVQALCSILEEHGKDLEIMQILTRVNDRVARHFESQSDDPHFHEKKQIPCVVSMLTKELYFSQ

SEQ ID NO: 26099 - protein, 168 aa, Homo sapiens
MMSYLKQPPYAVNGLSLTTSGMDLLHPSVGYPATPRKQRRERTTFTRAQLDVLEALFAKTRYPDIFMREEVALKINLPESRVQVWFKNRRAKCRQQQQQQQNGGQNKVRPAKKKTSPAREGYGASSLGFNSTTDCLDYKDQTASWKLNFNADCLDYKDQTSSWKFQVL

SEQ ID NO: 26100 - protein, 345 aa, Homo sapiens
MQYLNIKEDCNAMAFCAKMRSSKKTEVNLEAPEPGVEVIFYLSDREPLRLGSGEYTAEELCIRAAQACRISPLCHNLFALYDENTKLWYAPNRTITVDDKMSLRLHYRMRFYFTNWHGTNDNEQSVWRHSPKKQKNGYEKKKIPDATPLLDASSLEYLFAQGQYDLVKCLAPIRDPKTEQDGHDIENECLGMAVLAISHYAMMKKMQLPELPKDISYKRYIPETLNKSIRQRNLLTRMRINNVFKDFLKEFNNKTICDSSVSTHDLKVKYLATLETLTKHYGAEIFETSMLLISSENEMNWFHSNDGGNVLYYEVMVTGNLGIQWRHKPNVVSVEKEKNKLKRKK

SEQ ID NO: 26101 - protein, 1105 aa, Homo sapiens
MFLYWRKRGTYELEALPGDLAELELGTVERFSWSSTLDIIEDLGDDQSPAEKKGLRCQNPACMDKGRAAKVCHHADCQQLHRRGPLNLCEACDSKFHSTMHYDGHVRFDLPPQGSVLARNVSTRSCPPRTSPAVDLEEEEEESSVDGKGDRKSTGLKLSKKKARRRHTDDPSKECFTLKFDLNVDIETEIVPAMKKKSLGEVLLPVFERKGIALGKVDIYLDQSNTPLSLTFEAYRFGGHYLRVKAPAKPGDEGKVEQGMKDSKSLSLPILRPAGTGPPALERVDAQSRRESLDILAPGRRRKNMSEFLGEASIPGQEPPTPSSCSLPSGSSGSTNTGDSWKNRAASRFSGFFSSGPSTSAFGREVDKMEQLEGKLHTYSLFGLPRLPRGLRFDHDSWEEEYDEDEDEDNACLRLEDSWRELIDGHEKLTRRQCHQQEAVWELLHTEASYIRKLRVIINLFLCCLLNLQESGLLCEVEAERLFSNIPEIAQLHRRLWASVMAPVLEKARRTRALLQPGDFLKGFKMFGSLFKPYIRYCMEEEGCMEYMRGLLRDNDLFRAYITWAEKHPQCQRLKLSDMLAKPHQRLTKYPLLLKSVLRKTEEPRAKEAVVAMIGSVERFIHHVNACMRQRQERQRLAAVVSRIDAYEVVESSSDEVDKLLKEFLHLDLTAPIPGASPEETRQLLLEGSLRMKEGKDSKMDVYCFLFTDLLLVTKAVKKAERTRVIRPPLLVDKIVCRELRDPGSFLLIYLNEFHSAVGAYTFQASGQALCRGWVDTIYNAQNQLQQLRAQEPPGSQQPLQSLEEEEDEQEEEEEEEEEEEEGEDSGTSAASSPTIMRKSSGSPDSQHCASDGSTETLAMVVVEPGDTLSSPEFDSGPFSSQSDETSLSTTASSATPTSELLPLGPVDGRSCSMDSAYGTLSPTSLQDFVAPGPMAELVPRAPESPRVPSPPPSPRLRRRTPVQLLSCPPHLLKSKSEASLLQLLAGAGTHGTPSAPSRSLSELCLAVPAPGIRTQGSPQEAGPSWDCRGAPSPGSGPGLVGCLAGEPAGSHRKRCGDLPSGASPRVQPEPPPGVSAQHRKLTLAQLYRIRTTLLLNSTLTASEV

SEQ ID NO: 26102 - protein, 806 aa, Homo sapiens
MEFSWGSGQESRRLLLLLLLLAAWEAGNGQLHYSVSEEAKHGTFVGRIAQDLGLELAELVPRLFRVASKGRGGLLEVNLQNGILFVNSRIDREELCRRSAECSIHLEVIVDRPLQVFHVDVEVRDINDNPPVFPATQKNLSIAESRPLDSRFPLEGASDADIGENALLTYRLSPNEYFSLEKPPDDELVKGLGLILRKSLDREEAPEIFLVLTATDGGKPELTGTVQLLITVLDANDNAPAFDRTIYKVRLLENVPNGTLVIKLNASDLDEGLNGDIVYSFSNDISPNVKSKFHIDPITGQIIVKGYIDFEESKSYEIIVEGIDKGQLPLSGHCRVIVEVEDNNDNVPDLEFKSLSLPIREDAPLGTVIALISVSDKDMGVNGLVTCSLTSHVPFKLVSTFKNYYSLVLDSALDRESVSAYELVVTARDGGSPSLWATASVSVEVADVNDNAPAFAQPEYTVFVKENNPPGCHIFTVSAWDADAQENALVSYSLVERRVGERALSSYVSVHAESGKVYALQPLDHEELELLQFQVTARDAGVPPLGSNVTLQVFVLDENDNAPALLAPRAGGTGGAVSELVPWSVGVGHVVAKVRAVDADSGYNAWLSYELQPGTGGARIPFRVGLYTGEISTTRALDETDAPRHRLLVLVKDHGEPALTATATVLVSLVESGQAPKASSRALVGAVGPDAALVDVNVYLIIAICAVSSLLVLTLLLYTALRCSALPTEGACAPGKPTLVCSSAVGSWSYSQQRRPRVCSGEGPPKTDLMAFSPSLPDSRDREDQLQTTEESFAKGEDRSWEFPPV

SEQ ID NO: 26103 - protein, 409 aa, Homo sapiens
MDSPIQIFRGEPGPTCAPSACLPPNSSAWFPGWAEPDSNGSAGSEDAQLEPAHISPAIPVIITAVYSVVFVVGLVGNSLVMFVIIRYTKMKTATNIYIFNLALADALVTTTMPFQSTVYLMNSWPFGDVLCKIVISIDYYNMFTSIFTLTMMSVDRYIAVCHPVKALDFRTPLKAKIINICIWLLSSSVGISAIVLGGTKVREDVDVIECSLQFPDDDYSWWDLFMKICVFIFAFVIPVLIIIVCYTLMILRLKSVRLLSGSREKDRNLRRITRLVLVVVAVFVVCWTPIHIFILVEALGSTSHSTAALSSYYFCIALGYTNSSLNPILYAFLDENFKRCFRDFCFPLKMRMERQSTSRVRNTVQDPAYLRDIDGMNKPVULVVEMSSYSSSGREEFNDLGLTQITTAV

SEQ ID NO: 26104 - protein, 1167 aa, Homo sapiens
MSLKPQQQQQQQQQQQQQQQQQQQQQQQPPPAAANVRKPGGSGLLASPAAAPSPSSSSVSSSSATAPSSVVAATSGGGRPGLGRGRNSNKGLPQSTISFDGIYANMRMVHILTSVVGSKCEVQVKNGGIYEGVFKTYSPKCDLVLDAAHEKSTESSSGPKREEIMESILFKCSDFVVVQFKDMDSSYAKRDAFTDSAISAKVNGEHKEKDLEPWDAGELTANEELEALENDVSNGWDPNDMFRYNEENYGVVSTYDSSLSSYTVPLERDNSEEFLKREARANQLAEEIESSAQYKARVALENDDRSEEEKYTAVQRNSSEREGHSINTRENKYIPPGQRNREVISWGSGRQNSPRMGQPGSGSMPSRSTSHTSDFNPNSGSDQRVVNGVFILSFISFVLSGVPWPSPCPSPSSRPPSRYQSGPNSLPPRAATPTRPPSRPPSRPSRPPSHPSAHGSPAPVSTMPKRMSSEGPPRMSPKAQRHPRNHRVSAGRGSISSGLEFVSHNPPSEAATPPVARTSPSGGTWSSVVSGVPRLSPKTHRPRSPRQNSIGNTPSGPVLASPQAGIIPTEAVAMPIPAASPTPASPASNRAVTPSSEAKDSRLQDQRQNSPAGNKENIKPNETSPSFSKAENKGISPVVSEHRKQIDDLKKFKNDFRLQPSSTSESMDQLLNKNREGEKSRDLIKDKIEPSAKDSFIENSSSNCTSGSSKPNSPSISPSILSNTEHKRGPEVTSQGVQTSSPACKQEKDDKEEKKDAAEQVRKSTLNPNAKEFNPRSFSQPKPSTTPTSPRPQAQPSPSMVGHQQPTPVYTQPVCFAPNMMYPVPVSPGVQPLYPIPMTPMPVNQAKTYRAGKVPNMPQQRQDQHHQSAMMHPASAAGPPIAATPPAYSTQYVAYSPQQFPNQPLVQHVPHYQSQHPHVYSPVIQGNARMMAPPTHAQPGLVSSSATQYGAHEQTHAMYACPKLPYNKETSPSFYFAISTGSLAQQYAHPNATLHPHTPHPQPSATPTGQQQSQHGGSHPAPSPVQHHQHQAAQALHLASPQQQSAIYHAGLAPTPPSMTPASNTQSPQNSFPAAQQTVFTIHPSHVQPAYTNPPHMAHVPQAHVQSGMVPSHPTAHAPMMLMTTQPPGGPQAALAQSALQPIPVSTTAHFPYMTHPSVQAHHQQQL

SEQ ID NO: 26105 - protein, 1768 aa, Homo sapiens
MTTMLQKSDSNASFLRAARAGNLDKVVEYLKGGIDINTCNQNGLNALHLAAKEGHVGLVQELLGRGSSVDSATKKGNTALHIASLAGQAEVVKVLVKEGANINAQSQNGFTPLYMAAQENHIDVVKYLLENGANQSTATEDGFTPLAVALQQGHNQAVAILLENDTKGKVRLPALHIAARKDDTKSAALLLQNDHNADVQSKMMVNRTTESGFTPLHIAAHYGNVNVATLLLNRGAAVDFTARNGITPLHVASKRGNTNMVKLLLDRGGQIDAKTRDGLTPLHCAARSGHDQVVELLLERGAPLLARTKNGLSPLHMAAQGDHVECVKHLLQHKAPVDDVTLDYLTALHVAAHCGHYRVTKLLLDKRANPNARALNGFTPLHIACKKNRIKVMELLVKYGASIQAITESGLTPIHVAAFMGHLNIVLLLLQNGASPDVTNIRGETALHMAARAGQVEVVRCLLRNGALVDARAREEQTPLHIASRLGKTEIVQLLLQHMAHPDAATTNGYTPLHISAREGQVDVASVLLEAGAAHSLATKKGFTPLHVAAKYGSLDVAKLLLQRRAAADSAGKNGLTPLHVAAHYDNQKVALLLLEKGASPHATAKNGYTPLHIAAKKNQMQIASTLLNYGAETNIVTKQGVTPLHLASQEGHTDMVTLLLDKGANIHMSTKSGLTSLHLAAQEDKVNVADILTKHGADQDAHTKLGYTPLIVACHYGNVKMVNFLLKQGANVNAKTKNGYTPLHQAAQQGHTHIINVLLQHGAKPNATTANGNTALAIAKRLGYISVVDTLKVVTEEVTTTTTTITEKHKLNVPETMTEVLDVSDEEGDDTMTGDGGEYLRPEDLKELGDDSLPSSQFLDGMNYLRYSLEGGRSDSLRSFSSDRSHTLSHASYLRDSAVMDDSVVIPSHQVSTLAKEAERNSYRLSWGTENLDNVALSSSPIHSGFLVSFMVDARGGAMRGCRHNGLRIIIPPRKCTAPTRVTCRLVKRHRLATMPPMVEGEGLASRLIEVGPSGAQFLGKLHLPTAPPPLNEGESLVSRILQLGPPGTKFLGPVIVEIPHFAALRGKERELVVLRSENGDSWKEHFCDYTEDELNEILNGMDEVLDSPEDLEKKRICRIITRDFPQYFAVVSRIKQDSNLIGPEGGVLSSTVVPQVQAVFPEGALTKRIRVGLQAQPMHSELVKKILGNKATFSPIVTLEPRRRKFHKPITMTIPVPKASSDVMLNGFGGDAPTLRLLCSITGGTTPAQWEDITGTTPLTFVNECVSFTTNVSARFWLIDCRQIQESVTFASQVYREIICVPYMAKFVVFAKSHDPIEARLRCFCMTDDKVDKTLEQQENFAEVARSRDVEVLEGKPIYVDCFGNLVPLTKSGQHHIFSFFAFKENRLPLFVKVRDTTQEPCGRLSFMKEPKSTRGLVHQAICNLNITLPIYTKESESDQEQEEEIDMTSEKNPQDEQERIEERLAYIADHLGFSWTELARELDFTEEQIHQIRIENPNSLQDQSHALLKYWLERDGKHATDTNLVECLTKINRMDIVHLMETNTEPLQERISHSYAEIEQTITLDHSEGFSVLQEELCTAQHKQKEEQAVSKESETCDHPPIVSEEDISVGYSTFQDGVPKTEGDSSATALFPQTHKEQVQQDFSGKMQDLPEESSLEYQQEYFVTTPGTETSETQKAMIVPSSPSKTPEEVSTPAEEEKLYLQTPTSSERGGSPIIQEPEEPSEHREESSPRKTSLVIVESADNQPETCERLDEDAAFEKDNNE

SEQ ID NO: 26106 - protein, 1129 aa, Homo sapiens
MARMLYPSKGQGLSGPTAENKDVFRRHSWGPGRELEGPLNTRRLQASGCPGPKEALFLQIREGLDTFLGLQHQGGYASRLDQDSCHPSAGPLDHSATGMLSKSVPVSGINCLLDRSDTDGNVSQSSAIDLRKRCSQLEGHSGTRVGSSLRQTFSFLSGMTGKAKTREKEKMKEAKDARYTNGHLFTTISVSGMTMCYACNKSITAKEALICPTCNVTIHNRCKDTLANCTKVKQKQQKAALLKNNTALQSVSLRSKTTIRERPSSAIYPSDSFRQSLLGSRRGRSSLSLAKSVSTTNIAGHFNDESPLGLRRILSQSTDSLNMRNRTLSVESLIDEAEVIYSELMSDFEMDEKDFAADSWSLAVDSSFLQQHKKEVMKQQDVIYELIQTELHHVRTLKIMTRLFRTGMLEELHLEPGVVQGLFPCVDELSDIHTRFLSQLLERRRQALCPGSTRNFVIHRLGDLLISQFSGPSAEQMCKTYSEFCSRHSKALKLYKELYARDKRFQQFIRKVTRPAVLKRHGVQECILLVTQRITKYPLLISRILQHSHGIEEERQDLTTALGLVKELLSNVDEGIYQLEKGARLQEIYNRMDPRAQTPVPGKGPFGREELLRRKLIHDGCLLWKTATGRFKDVLVLLMTDVLVFLQEKDQKYIFPTLDKPSVVSLQNLIVRDIANQEKGMFLISAAPPEMYEVHTASRDDRSTWIRVIQQSVRTCPSREDFPLIETEDEAYLRRIKMELQQKDRALVELLREKVGLFAEMTHFQAEEDGGSGMALPTLPRGLFRSESLESPRGERLLQDAIREVEGLKDLLVGPGVELLLTPREPALPLEPDSGGNTSPGVTANGEARTFNGSIELCRADSDSSQRDRNGNQLRSPQEEALQRLVNLYGLLHGLQAAVAQQDTLMEARFPEGPERREKLCRANSRDGEAGRAGAAPVAPEKQATELALLQRQHALLQEELRRCRRLGEERATEAGSLEARLRESEQARALLEREAEEARRQLAALGQTEPLPAEAPWARRPVDPRRRSLPAGDALYLSFNPPQPSRGTDRLDLPVTTRSVHRNFEDRERQELGSPEERLQDSSDPDTGSEEEGSSRLSPPHSPRDFTRMQDIPEETESRDGEAVASES

SEQ ID NO: 26107 - protein, 981 aa, Homo sapiens
LDATALHDDTLANSVPPSEACNHAVLACSLGIPEEHYISEAVEDAPSYRGYRDACTITDVCNSTDLPEVEIISLLEEQLPHYKLRADTIYGYDHDDWLHTPLISPDANIDLTTEQIEETLKYFLLCAERVGQMTKTYNDIDAVTRLLEEKERDLELAARIGQSLLKKNKTLTERNELLEEQVEHIREEVSQLRHELSMKDELLQFYTSAAEESEPESVCSTPLKRNESSSSVQNYFHLDSLQKKLKDLEEENVVLRSEASQLKTETITYEEKEQQLVNDCVKELRDANVQIASISEELAKKTEDAARQQEEITHLLSQIVDLQKKAKACAVENEELVQHLGAAKDAQRQLTAELRELEDKYAECMEMLHEAQEELKNLRNKTMPNTTSRRYHSLGLFPMDSLAAEIEGTMRKELQLEEAESPDITHQKRVFETVRNINQVVKQRSLTPSPMNIPGSNQSSAMNSLLSSCVSTPRSSFYGSDIGNVVLDNKTNSIILETEAADLGNDERSKKPGTPGTPGSHDLETALRRLSLRRENYLSERRFFEEEQERKLQELAEKGELRSGSLTPTESIMSLGTHSRFSEFTGFSGMSFSSRSYLPEKLQIVKPLEGSATLHHWQQLAQPHLGGILDPRPGVVTKGFRTLDVDLDEVYCLNDFEEDDTGDHISLPRLATSTPVQHPETSAHHPGKCMSQTNSTFTFTTCRILHPSDELTRVTPSLNSAPTPACGSTSHLKSTPVATPCTPRRLSLAESFTNTRESTTTMSTSLGLVWLLKERGISAAVYDPQSWDRAGRGSLLHSYTPKMAVIPSTPPNSPMQTPTSSPPSFEFKCTSPPYDNFLASKPASSILREVREKNVRSSESQTDVSVSNLNLVDKVRRFGVAKVVNSGRAHVPTLTEEQGPLLCGPPGPAPALVPRGLVPEGLPLRCPTVTSAIGGLQLNSGIRRNRSFPTMVGSSMQMKAPVTLTSGILMGAKLSKQTSLR

SEQ ID NO: 26108 - protein, 451 aa, Homo sapiens
MANRELAFKAGDVIKVLDASNKDWWWGQIDDEEGWFPASFVRLWVNQEDEVEEGPSDVQNGHLDPNSDCLCLGRPLQNRDQMRANVINEIMSTERHYIKHLKDICEGYLKQCRKRRDMFSDEQLKVIFGNIEDIYRFQMGFVRDLEKQYNNDDPHLSEIGPCFLEHQDGFWIYSEYCNNHLDACMELSKLMKDSRYQHFFEACRLLQQMIDIAIDGFLLTPVQKICKYPLQLAELLKYTAQDHSDYRYVAAALAVMRNVTQQINERKRRLENIDKIAQWQASVLDWEDLIRRDILYYKGRIDMDKYEVVDIEDGRDDDFNVSMKNAFKLHNKETEEIHLFFAKKLEEKIRWLRAFREERKMVQEDEKIGFEISENQKRQAAMTVRKVPKQKGVNSARSVPPSYPPPQDPLNHGQYLVPDGIAQSQVFEFTEPKRSQSPFWQNFSRLTPFKK

SEQ ID NO: 26109 - protein, 1055 aa, Homo sapiens
MNGNTALAIAKRLGYISVVDTLKVVTEEVTTTTTTITEKHKLNVPETMTEVLDVSDEEGDDTMTGDGGEYLRPEDLKELGDDSLPSSQFLDGMNYLRYSLEGGRSDSLRSFSSDRSHTLSHASYLRDSAVMDDSVVIPSHQVSTLAKEAERNSYRLSWGTENLDNVALSSSPIHSGFLVSFMVDARGGAMRGCRHNGLRIIIPPRKCTAPTRVTCRLVKRHRLATMPPMVEGEGLASRLIEVGPSGAQFLGPVIVEIPHFAALRGKERELVVLRSENGDSWKEHFCDYTEDELNEILNGMDEGGSFLVLVLDSPEDLEKKRICRIITRDFPQYFAVVSRIKQDSNLIGPEGGVLSSTVVPQVQAVFPEGALTKRIRVGLQAQPMHSELVKKILGNKATFSPIVTLEPRRRKFHKPITMTIPVPKASSDVMLNGFGGDAPTLRLLCSITGGTTPAQWEDITGTTPLTFVNECVSFTTNVSARFWLIDCRQIQESVTFASQVYREIICVPYMAKFVVFAKSHDPIEARLRCFCMTDDKVDKTLEQQENFAEVARSRDVEVLEGKPIYVDCFGNLVPLTKSGQHHIFSFFAFKENRLPLFVKVRDTTQEPCGRLSFMKEPKSTRGLVHQAICNLNITLPIYTKESESDQEQEEEIDMTSEKNPQDEQERIEERLAYIADHLGFSWTELARELDFTEEQIHQIRIENPNSLQDQSHALLKYWLERDGKHATDTNLVECLTKINRMDIVHLMETNTEPLQERISHSYAEIEQTITLDHSEGFSVLQEELCTAQHKQKEEQAVSKESETCDHPPIVSEEDISVGYSTFQDGVPKTEGDSSATALFPQTHKEQVQQDFSGKMQDLPEESSLEYQQEYFVTTPGTETSETQKAMIVPSSPSKTPEEVSTPAEEEKLYLQTPTSSERGGSPIIQEPEEPSEHREESSPRKTSLVIVESADNQPETCERLDEDAAFEKGDDMPEIPPETVTEEEYIDEHGHTVVKKVTRKIIRRYVSSEGTEKEEIMVQGMPQEPVNIEEGDGYSKVIKRVVLKSDTEQSEDNNE

SEQ ID NO: 26110 - protein, 1846 aa, Homo sapiens
MTTMLQKSDSNASFLRAARAGNLDKVVEYLKGGIDINTCNQNGLNALHLAAKEGHVGLVQELLGRGSSVDSATKKGNTALHIASLAGQAEVVKVLVKEGANINAQSQNGFTPLYMAAQENHIDVVKYLLENGANQSTATEDGFTPLAVALQQGHNQAVAILLENDTKGKVRLPALHIAARKDDTKSAALLLQNDHNADVQSKMMVNRTTESGFTPLHIAAHYGNVNVATLLLNRGAAVDFTARNGITPLHVASKRGNTNMVKLLLDRGGQIDAKTRDGLTPLHCAARSGHDQVVELLLERGAPLLARTKNGLSPLHMAAQGDHVECVKHLLQHKAPVDDVTLDYLTALHVAAHCGHYRVTKLLLDKRANPNARALNGFTPLHIACKKNRIKVMELLVKYGASIQAITESGLTPIHVAAFMGHLNIVLLLLQNGASPDVTNIRGETALHMAARAGQVEVVRCLLRNGALVDARAREEQTPLHIASRLGKTEIVQLLLQHMAHPDAATTNGYTPLHISAREGQVDVASVLLEAGAAHSLATKKGFTPLHVAAKYGSLDVAKLLLQRRAAADSAGKNGYTPLHIAAKKNQMQIASTLLNYGAETNIVTKQGVTPLHLASQEGHTDMVTLLLDKGANIHMSTKSGLTSLHLAAQEDKVNVADILTKHGADQDAHTKLGYTPLIVACHYGNVKMVNFLLKQGANVNAKTKNGYTPLHQAAQQGHTHIINVLLQHGAKPNATTANGNTALAIAKRLGYISVVDTLKVVTEEVTTTTTTITEKHKLNVPETMTEVLDVSDEEGDDTMTGDGGEYLRPEDLKELGDDSLPSSQFLDGMNYLRYSLEGGRSDSLRSFSSDRSHTLSHASYLRDSAVMDDSVVIPSHQVSTLAKEAERNSYRLSWGTENLDNVALSSSPIHSGFLVSFMVDARGGAMRGCRHNGLRIIIPPRKCTAPTRVTCRLVKRHRLATMPPMVEGEGLASRLIEVGPSGAQFLGPVIVEIPHFAALRGKERELVVLRSENGDSWKEHFCDYTEDELNEILNGMDEVLDSPEDLEKKRICRIITRDFPQYFAVVSRIKQDSNLIGPEGGVLSSTVVPQVQAVFPEGALTKRIRVGLQAQPMHSELVKKILGNKATFSPIVTLEPRRRKFHKPITMTIPVPKASSDVMLNGFGGDAPTLRLLCSITGGTTPAQWEDITGTTPLTFVNECVSFTTNVSARFWLIDCRQIQESVTFASQVYREIICVPYMAKFVVFAKSHDPIEARLRCFCMTDDKVDKTLEQQENFAEVARSRDVEVLEGKPIYVDCFGNLVPLTKSGQHHIFSFFAFKENRLPLFVKVRDTTQEPCGRLSFMKEPKSTRGLVHQAICNLNITLPIYTKESESDQEQEEEIDMTSEKNPQDEQERIEERLAYIADHLGFSWTELARELDFTEEQIHQIRIENPNSLQDQSHALLKYWLERDGKHATDTNLVECLTKINRMDIVHLMETNTEPLQERISHSYAEIEQTITLDHSEGFSVLQEELCTAQHKQKEEQAVSKESETCDHPPIVSEEDISVGYSTFQDGVPKTEGDSSATALFPQTHKEQVQQDFSGKMQDLPEESSLEYQQEYFVTTPGTETSETQKAMIVPSSPSKTPEEVSTPAEEEKLYLQTPTSSERGGSPIIQEPEEPSEHREESSPRKTSLVIVESADNQPETCERLDEDAAFEKGDDMPEIPPETVTEEEYIDEHGHTVVKKVTRKIIRRYVSSEGTEKEEIMVQGMPQEPVNIEEGDGYSKVIKRVVLKSDTEQSEVTLCEPSILSSTSQFQAEPVEGRRVSKVVKTTVVLGERMEKHLGDSSLATDLPSAKDDFEEDNNE

SEQ ID NO: 26111 - protein, 661 aa, Homo sapiens
MEDGKPVWAPHPTDGFQMGNIVDIGPDSLTIEPLNQKGKTFLALINQVFPAEEDSKKDVEDNCSLMYLNEATLLHNIKVRYSKDRIYTYVANILIAVNPYFDIPKIYSSEAIKSYQGKSLGTRPPHVFAIADKAFRDMKVLKMSQSIIVSGESGAGKTENTKFVLRYLTESYGTGQDIDDRIVEANPLLEAFGNAKTVRNNNSSRFGKFVEIHFNEKSSVVGGFVSHYLLEKSRICVQGKEERNYHIFYRLCAGASEDIREKLHLSSPDNFRYLNRGCTRYFANKETDKQILQNRKSPEYLKAGSMKDPLLDDHGDFIRMCTAMKKIGLDDEEKLDLFRVVAGVLHLGNIDFEEAGSTSGGCNLKNKSAQSLEYCAELLGLDQDDLRVSLTTRVMLTTAGGTKGTVIKVPLKVEQANNARDALAKTVYSHLFDHVVNRVNQCFPFETSSYFIGVLDIAGFEYFEHNSFEQFCINYCNEKLQQFFNERILKEEQELYQKEGLGVNEVHYVDNQDCIDLIEAKLVGILDILDEENRLPQPSDQHFTSAVHQKHKDHFRLTIPRKSKLAVHRNIRDDEGFIIRHFAGAVCYETTQFVEKNNDALHMSLESLICESRDKFIRELFESSTNNNKDTKQKAGKLSFISVGNKFKRFCFSWSSPARDG

SEQ ID NO: 26112 - protein, 670 aa, Homo sapiens
MNGNTALAIAKRLGYISVVDTLKVVTEEVTTTTTTITEKHKLNVPETMTEVLDVSDEEGDDTMTGDGGEYLRPEDLKELGDDSLPSSQFLDGMNYLRYSLEGGRSDSLRSFSSDRSHTLSHASYLRDSAVMDDSVVIPSHQVSTLAKEAERNSYRLSWGTENLDNVALSSSPIHSGFLVSFMVDARGGAMRGCRHNGLRIIIPPRKCTAPTRVTCRLVKRHRLATMPPMVEGEGLASRLIEVGPSGAQFLGPVIVEIPHFAALRGKERELVVLRSENGDSWKEHFCDYTEDELNEILNGMDEVLDSPEDLEKKRICRIITRDFPQYFAVVSRIKQDSNLIGPEGGVLSSTVVPQVQAVFPEGALTKRIRVGLQAQPMHSELVKKILGNKATFSPIVTLEPRRRKFHKPITMTIPVPKASSDVMLNGFGGDAPTLRLLCSITGGTTPAQWEDITGTTPLTFVNECVSFTTNVSARFWLIDCRQIQESVTFASQVYREIICVPYMAKFVVFAKSHDPIEARLRCFCMTDDKVDKTLEQQENFAEVARSRDVEVLEGKPIYVDCFGNLVPLTKSGQHHIFSFFAFKENRLPLFVKVRDTTQEPCGRLSFMKEPKSTRGLVHQAICNLNITLPIYTKESESDQEQEEEIHRMSRNGSRKGWLILLITLASAGQN

SEQ ID NO: 26113 - protein, 1797 aa, Homo sapiens
MTTMLQKSDSNASFLRAARAGNLDKVVEYLKGGIDINTCNQNGLNALHLAAKEGHVGLVQELLGRGSSVDSATKKGNTALHIASLAGQAEVVKVLVKEGANINAQSQNGFTPLYMAAQENHIDVVKYLLENGANQSTATEDGFTPLAVALQQGHNQAVAILLENDTKGKVRLPALHIAARKDDTKSAALLLQNDHNADVQSKMMVNRTTESGFTPLHIAAHYGNVNVATLLLNRGAAVDFTARNGITPLHVASKRGNTNMVKLLLDRGGQIDAKTRDGLTPLHCAARSGHDQVVELLLERGAPLLARTKNGLSPLHMAAQGDHVECVKHLLQHKAPVDDVTLDYLTALHVAAHCGHYRVTKLLLDKRANPNARALNGFTPLHIACKKNRIKVMELLVKYGASIQAITESGLTPIHVAAFMGHLNIVLLLLQNGASPDVTNIRGETALHMAARAGQVEVVRCLLRNGALVDARAREEQTPLHIASRLGKTEIVQLLLQHMAHPDAATTNGYTPLHISAREGQVDVASVLLEAGAAHSLATKKGFTPLHVAAKYGSLDVAKLLLQRRAAADSAGKNGYTPLHIAAKKNQMQIASTLLNYGAETNIVTKQGVTPLHLASQEGHTDMVTLLLDKGANIHMSTKSGLTSLHLAAQEDKVNVADILTKHGADQDAHTKLGYTPLIVACHYGNVKMVNFLLKQGANVNAKTKNGYTPLHQAAQQGHTHIINVLLQHGAKPNATTANGNTALAIAKRLGYISVVDTLKVVTEEVTTTTTTITEKHKLNVPETMTEVLDVSDEEGDDTMTGDGGEYLRPEDLKELGDDSLPSSQFLDGMNYLRYSLEGGRSDSLRSFSSDRSHTLSHASYLRDSAVMDDSVVIPSHQVSTLAKEAERNSYRLSWGTENLDNVALSSSPIHSGRASPCLERDNSSFLVSFMVDARGGAMRGCRHNGLRIIIPPRKCTAPTRVTCRLVKRHRLATMPPMVEGEGLASRLIEVGPSGAQFLGPVIVEIPHFAALRGKERELVVLRSENGDSWKEHFCDYTEDELNEILNGMDEVLDSPEDLEKKRICRIITRDFPQYFAVVSRIKQDSNLIGPEGGVLSSTVVPQVQAVFPEGALTKRIRVGLQAQPMHSELVKKILGNKATFSPIVTLEPRRRKFHKPITMTIPVPKASSDVMLNGFGGDAPTLRLLCSITGGTTPAQWEDITGTTPLTFVNECVSFTTNVSARFWLIDCRQIQESVTFASQVYREIICVPYMAKFVVFAKSHDPIEARLRCFCMTDDKVDKTLEQQENFAEVARSRDVEVLEGKPIYVDCFGNLVPLTKSGQHHIFSFFAFKENRLPLFVKVRDTTQEPCGRLSFMKEPKSTRGLVHQAICNLNITLPIYTKESESDQEQEEEIDMTSEKNPQDEQERIEERLAYIADHLGFSWTELARELDFTEEQIHQIRIENPNSLQDQSHALLKYWLERDGKHATDTNLVECLTKINRMDIVHLMETNTEPLQERISHSYAEIEQTITLDHSEGFSVLQEELCTAQHKQKEEQAVSKESETCDHPPIVSEEDISVGYSTFQDGVPKTEGDSSATALFPQTHKEQVQQDFSGKMQDLPEESSLEYQQEYFVTTPGTETSETQKAMIVPSSPSKTPEEVSTPAEEEKLYLQTPTSSERGGSPIIQEPEEPSEHREESSPRKTSLVIVESADNQPETCERLDEDAAFEKGDDMPEIPPETVTEEEYIDEHGHTVVKKVTRKIIRRYVSSEGTEKEEIMVQGMPQEPVNIEEGDGYSKVIKRVVLKSDTEQSEDNNE

SEQ ID NO: 26114 - protein, 3820 aa, Homo sapiens
MTTMLQKSDSNASFLRAARAGNLDKVVEYLKGGIDINTCNQNGLNALHLAAKEGHVGLVQELLGRGSSVDSATKKGNTALHIASLAGQAEVVKVLVKEGANINAQSQNGFTPLYMAAQENHIDVVKYLLENGANQSTATEDGFTPLAVALQQGHNQAVAILLENDTKGKVRLPALHIAARKDDTKSAALLLQNDHNADVQSKMMVNRTTESGFTPLHIAAHYGNVNVATLLLNRGAAVDFTARNGITPLHVASKRGNTNMVKLLLDRGGQIDAKTRDGLTPLHCAARSGHDQVVELLLERGAPLLARTKNGLSPLHMAAQGDHVECVKHLLQHKAPVDDVTLDYLTALHVAAHCGHYRVTKLLLDKRANPNARALNGFTPLHIACKKNRIKVMELLVKYGASIQAITESGLTPIHVAAFMGHLNIVLLLLQNGASPDVTNIRGETALHMAARAGQVEVVRCLLRNGALVDARAREEQTPLHIASRLGKTEIVQLLLQHMAHPDAATTNGYTPLHISAREGQVDVASVLLEAGAAHSLATKKGFTPLHVAAKYGSLDVAKLLLQRRAAADSAGKNGLTPLHVAAHYDNQKVALLLLEKGASPHATAKNGYTPLHIAAKKNQMQIASTLLNYGAETNIVTKQGVTPLHLASQEGHTDMVTLLLDKGANIHMSTKSGLTSLHLAAQEDKVNVADILTKHGADQDAHTKLGYTPLIVACHYGNVKMVNFLLKQGANVNAKTKNGYTPLHQAAQQGHTHIINVLLQHGAKPNATTANGNTALAIAKRLGYISVVDTLKVVTEEVTTTTTTITEKHKLNVPETMTEVLDVSDEEGDDTMTGDGGEYLRPEDLKELGDDSLPSSQFLDGMNYLRYSLEGGRSDSLRSFSSDRSHTLSHASYLRDSAVMDDSVVIPSHQVSTLAKEAERNSYRLSWGTENLDNVALSSSPIHSGFLVSFMVDARGGAMRGCRHNGLRIIIPPRKCTAPTRVTCRLVKRHRLATMPPMVEGEGLASRLIEVGPSGAQFLGPVIVEIPHFAALRGKERELVVLRSENGDSWKEHFCDYTEDELNEILNGMDEVLDSPEDLEKKRICRIITRDFPQYFAVVSRIKQDSNLIGPEGGVLSSTVVPQVQAVFPEGALTKRIRVGLQAQPMHSELVKKILGNKATFSPIVTLEPRRRKFHKPITMTIPVPKASSDVMLNGFGGDAPTLRLLCSITGGTTPAQWEDITGTTPLTFVNECVSFTTNVSARFWLIDCRQIQESVTFASQVYREIICVPYMAKFVVFAKSHDPIEARLRCFCMTDDKVDKTLEQQENFAEVARSRDVEVLEGKPIYVDCFGNLVPLTKSGQHHIFSFFAFKENRLPLFVKVRDTTQEPCGRLSFMKEPKSTRGLVHQAICNLNITLPIYTKESESDQEQEEEIDMTSEKNDETESTETSVLKSHLVNEVPVLASPDLLSEVSEMKQDLIKMTAILTTDVSDKAGSIKVKELVKAAEEEPGEPFEIVERVKEDLEKVNEILRSGTCTRDESSVQSSRSERGLVEEEWVIVSDEEIEEARQKAPLEITEYPCVEVRIDKEIKGKVEKDSTGLVNYLTDDLNTCVPLPKEQLQTVQDKAGKKCEALAVGRSSEKEGKDIPPDETQSTQKQHKPSLGIKKPVRRKLKEKQKQKEEGLQASAEKAELKKGSSEESLGEDPGLAPEPLPTVKATSPLIEETPIGSIKDKVKALQKRVEDEQKGRSKLPIRVKGKEDVPKKTTHRPHPAASPSLKSERHAPGSPSPKTERHSTLSSSAKTERHPPVSPSSKTEKHSPVSPSAKTERHSPASSSSKTEKHSPVSPSTKTERHSPVSSTKTERHPPVSPSGKTDKRPPVSPSGRTEKHPPVSPGRTEKRLPVSPSGRTDKHQPVSTAGKTEKHLPVSPSGKTEKQPPVSPTSKTERIEETMSVRELMKAFQSGQDPSKHKTGLFEHKSAKQKQPQEKGKVRVEKEKGPILTQREAQKTENQTIKRGQRLPVTGTAESKRGVRVSSIGVKKEDAAGGKEKVLSHKIPEPVQSVPEEESHRESEVPKEKMADEQGDMDLQISPDRKTSTDFSEVIKQELEDNDKYQQFRLSEETEKAQLHLDQVLTSPFNTTFPLDYMKDEFLPALSLQSGALDGSSESLKNEGVAGSPCGSLMEGTPQISSEESYKHEGLAETPETSPESLSFSPKKSEEQTGETKESTKTETTTEIRSEKEHPTTKDITGGSEERGATVTEDSETSTESFQKEATLGSPKDTSPKRQDDCTGSCSVALAKETPTGLTEEAACDEGQRTFGSSAHKTQTDSEVQESTATSDETKALPLPEASVKTDTGTESKPQGVIRSPQGLELALPSRDSEVLSAVADDSLAVSHKDSLEASPVLEDNSSHKTPDSLEPSPLKESPCRDSLESSPVEPKMKAGIFPSHFPLPAAVAKTELLTEVASVRSRLLRDPDGSAEDDSLEQTSLMESSGKSPLSPDTPSSEEVSYEVTPKTTDVSTPKPAVIHECAEEDDSENGEKKRFTPEEEMFKMVTKIKMFDELEQEAKQKRDYKKEPKQEESSSSSDPDADCSVDVDEPKHTGSGEDESGVPVLVTSESRKVSSSSESEPELAQLKKGADSGLLPEPVIRVQPPSPLPSSMDSNSSPEEVQFQPVVSKQYTFKMNEDTQEEPGKSEEEKDSESHLAEDRHAVSTEAEDRSYDKLNRDTDQPKICDGHGCEAMSPSSSAAPVSSGLQSPTGDDVDEQPVIYKESLALQGTHEKDTEGEELDVSRAESPQADCPSESFSSSSSLPHCLVSEGKELDEDISATSSIQKTEVTKTDETFENLPKDCPSQDSSITTQTDRFSMDVPVSDLAENDEIYDPQITSPYENVPSQSFFSSEESKTQTDANHTTSFHSSEVYSVTITSPVEDVVVASSSSGTVLSKESNFEGQDIKMESQQESTLWEMQSDSVSSSFEPTMSATTTVVGEQISKVIITKTDVDSDSWSEIREDDEAFEARVKEEEQKIFGLMVDRQSQGTTPDTTPARTPTEEGTPTSEQNPFLFQEGKLFEMTRSGAIDMTKRSYADESFHFFQIGQESREETLSEDVKEGATGADPLPLETSAESLALSESKETVDDEADLLPDDVSEEVEEIPASDAQLNSQMGISASTETPTKEAVSVGTKDLPTVQTGDIPPLSGVKQISCPDSSEPAVQVQLDFSTLTRSVYSDRGDDSPDSSPEEQKSVIEIPTAPMENVPFTESKSKIPVRTMPTSTPAPPSAEYESSVSEDFLSSVDEENKADEAKPKSKLPVKVPLQRVEQQLSDLDTSVQKTVAPQGQDMASIAPDNRSKSESDASSLDSKTKCPVKTRSYTETETESRERAEELELESEEGATRPKILTSRLPVKSRSTTSSCRGGTSPTKESKEHFFDLYRNSIEFFEEISDEASKLVDRLTQSEREQEIVSDDESSSALEVSVIENLPPVETEHSVPEDIFDTRPIWDESIETLIERIPDENGHDHAEDPQDEQERIEERLAYIADHLGFSWTELARELDFTEEQIHQIRIENPNSLQDQSHALLKYWLERDGKHATDTNLVECLTKINRMDIVHLMETNTEPLQERISHSYAEIEQTITLDHSEGFSVLQEELCTAQHKQKEEQAVSKESETCDHPPIVSEEDISVGYSTFQDGVPKTEGDSSATALFPQTHKEQVQQDFSGKMQDLPEESSLEYQQEYFVTTPGTETSETQKAMIVPSSPSKTPEEVSTPAEEEKLYLQTPTSSERGGSPIIQEPEEPSEHREESSPRKTSLVIVESADNQPETCERLDEDAAFEKDNNE

SEQ ID NO: 26115 - protein, 1440 aa, Homo sapiens
MTTMLQKSDSNASFLRAARAGNLDKVVEYLKGGIDINTCNQNGLNALHLAAKEGHVGLVQELLGRGSSVDSATKKGNTALHIASLAGQAEVVKVLVKEGANINAQSQNGFTPLYMAAQENHIDVVKYLLENGANQSTATEDGFTPLAVALQQGHNQAVAILLENDTKGKVRLPALHIAARKDDTKSAALLLQNDHNADVQSKMMVNRTTESGFTPLHIAAHYGNVNVATLLLNRGAAVDFTARNGITPLHVASKRGNTNMVKLLLDRGGQIDAKTRDGLTPLHCAARSGHDQVVELLLERGAPLLARTKNGLSPLHMAAQGDHVECVKHLLQHKAPVDDVTLDYLTALHVAAHCGHYRVTKLLLDKRANPNARALNGFTPLHIACKKNRIKVMELLVKYGASIQAITESGLTPIHVAAFMGHLNIVLLLLQNGASPDVTNIRGETALHMAARAGQVEVVRCLLRNGALVDARAREEQTPLHIASRLGKTEIVQLLLQHMAHPDAATTNGYTPLHISAREGQVDVASVLLEAGAAHSLATKKGFTPLHVAAKYGSLDVAKLLLQRRAAADSAGKNGLTPLHVAAHYDNQKVALLLLEKGASPHATAKNGYTPLHIAAKKNQMQIASTLLNYGAETNIVTKQGVTPLHLASQEGHTDMVTLLLDKGANIHMSTKSGLTSLHLAAQEDKVNVADILTKHGADQDAHTKLGYTPLIVACHYGNVKMVNFLLKQGANVNAKTKNGYTPLHQAAQQGHTHIINVLLQHGAKPNATTANGNTALAIAKRLGYISVVDTLKVVTEEVTTTTTTITEKHKLNVPETMTEVLDVSDEEGDDTMTGDGGEYLRPEDLKELGDDSLPSSQFLDGMNYLRYSLEGGRSDSLRSFSSDRSHTLSHASYLRDSAVMDDSVVIPSHQVSTLAKEAERNSYRLSWGTENLDNVALSSSPIHSGFLVSFMVDARGGAMRGCRHNGLRIIIPPRKCTAPTRVTCRLVKRHRLATMPPMVEGEGLASRLIEVGPSGAQFLGPVIVEIPHFAALRGKERELVVLRSENGDSWKEHFCDYTEDELNEILNGMDEVLDSPEDLEKKRICRIITRDFPQYFAVVSRIKQDSNLIGPEGGVLSSTVVPQVQAVFPEGALTKRIRVGLQAQPMHSELVKKILGNKATFSPIVTLEPRRRKFHKPITMTIPVPKASSDVMLNGFGGDAPTLRLLCSITGGTTPAQWEDITGTTPLTFVNECVSFTTNVSARFWLIDCRQIQESVTFASQVYREIICVPYMAKFVVFAKSHDPIEARLRCFCMTDDKVDKTLEQQENFAEVARSRDVEVLEGKPIYVDCFGNLVPLTKSGQHHIFSFFAFKENRLPLFVKVRDTTQEPCGRLSFMKEPKSTRGLVHQAICNLNITLPIYTKESESDQEQEEEIHRMSRNGSRKGWLILLITLASAGQN

SEQ ID NO: 26116 - protein, 705 aa, Homo sapiens
MSKLGISFSEDQQKEKDQLGKAPKKEEAAALRKDISGSDKRSLEKNQINFWRNQMTKRWEPSLNWKTTVNYKGKGSAKEIQEDKHTGKLEKPRPSVSHGRAQLLRKSAEKIEETVSDSSSESEEDEEPPDHRQEASADLPSEYWQIQKLVKYLKGGNQTATVIALCSMRDFSLAQETCQLAIRDVGGLEVLINLLETDEVKCKIGSLKILKEISHNPQIRQNIVDLGGLPIMVNILDSPHKSLKCLAAETIANVAKFKRARRVVRQHGGITKLVALLDCAHDSTKPAQSSLYEARDVEVARCGALALWSCSKSHTNKEAIRKAGGIPLLARLLKTSHENMLIPVVGTLQECASEENYRAAIKAERIIENLVKNLNSENEQLQEHCAMAIYQCAEDKETRDLVRLHGGLKPLASLLNNTDNKERLAAVTGAIWKCSISKENVTKFREYKAIETLVGLLTDQPEEVLVNVVGALGECCQERENRVIVRKCGGIQPLVNLLVGINQALLVNVTKAVGACAVEPESMMIIDRLDGVRLLWSLLKNPHPDVKASAAWALCPCIKNAKDAGEMVRSFVGGLELIVNLLKSDNKEVLASVCAAITNIAKDQENLAVITDHGVVPLLSKLANTNNNKLRHHLAEAISRCCMWGRNRVAFGEHKAVAPLVRYLKSNDTNVHRATAQALYQLSEDADNCITMHENGAVKKNIFIS

SEQ ID NO: 26117 - protein, 1879 aa, Homo sapiens
MTTMLQKSDSNASFLRAARAGNLDKVVEYLKGGIDINTCNQNGLNALHLAAKEGHVGLVQELLGRGSSVDSATKKGNTALHIASLAGQAEVVKVLVKEGANINAQSQNGFTPLYMAAQENHIDVVKYLLENGANQSTATEDGFTPLAVALQQGHNQAVAILLENDTKGKVRLPALHIAARKDDTKSAALLLQNDHNADVQSKMMVNRTTESGFTPLHIAAHYGNVNVATLLLNRGAAVDFTARNGITPLHVASKRGNTNMVKLLLDRGGQIDAKTRDGLTPLHCAARSGHDQVVELLLERGAPLLARTKNGLSPLHMAAQGDHVECVKHLLQHKAPVDDVTLDYLTALHVAAHCGHYRVTKLLLDKRANPNARALNGFTPLHIACKKNRIKVMELLVKYGASIQAITESGLTPIHVAAFMGHLNIVLLLLQNGASPDVTNIRGETALHMAARAGQVEVVRCLLRNGALVDARAREEQTPLHIASRLGKTEIVQLLLQHMAHPDAATTNGYTPLHISAREGQVDVASVLLEAGAAHSLATKKGFTPLHVAAKYGSLDVAKLLLQRRAAADSAGKNGLTPLHVAAHYDNQKVALLLLEKGASPHATAKNGYTPLHIAAKKNQMQIASTLLNYGAETNIVTKQGVTPLHLASQEGHTDMVTLLLDKGANIHMSTKSGLTSLHLAAQEDKVNVADILTKHGADQDAHTKLGYTPLIVACHYGNVKMVNFLLKQGANVNAKTKNGYTPLHQAAQQGHTHIINVLLQHGAKPNATTANGNTALAIAKRLGYISVVDTLKVVTEEVTTTTTTITEKHKLNVPETMTEVLDVSDEEGDDTMTGDGGEYLRPEDLKELGDDSLPSSQFLDGMNYLRYSLEGGRSDSLRSFSSDRSHTLSHASYLRDSAVMDDSVVIPSHQVSTLAKEAERNSYRLSWGTENLDNVALSSSPIHSGFLVSFMVDARGGAMRGCRHNGLRIIIPPRKCTAPTRVTCRLVKRHRLATMPPMVEGEGLASRLIEVGPSGAQFLGPVIVEIPHFAALRGKERELVVLRSENGDSWKEHFCDYTEDELNEILNGMDEVLDSPEDLEKKRICRIITRDFPQYFAVVSRIKQDSNLIGPEGGVLSSTVVPQVQAVFPEGALTKRIRVGLQAQPMHSELVKKILGNKATFSPIVTLEPRRRKFHKPITMTIPVPKASSDVMLNGFGGDAPTLRLLCSITGGTTPAQWEDITGTTPLTFVNECVSFTTNVSARFWLIDCRQIQESVTFASQVYREIICVPYMAKFVVFAKSHDPIEARLRCFCMTDDKVDKTLEQQENFAEVARSRDVEVLEGKPIYVDCFGNLVPLTKSGQHHIFSFFAFKENRLPLFVKVRDTTQEPCGRLSFMKEPKSTRGLVHQAICNLNITLPIYTKESESDQEQEEEIDMTSEKNPQDEQERIEERLAYIADHLGFSWTELARELDFTEEQIHQIRIENPNSLQDQSHALLKYWLERDGKHATDTNLVECLTKINRMDIVHLMETNTEPLQERISHSYAEIEQTITLDHSEGFSVLQEELCTAQHKQKEEQAVSKESETCDHPPIVSEEDISVGYSTFQDGVPKTEGDSSATALFPQTHKEQVQQDFSGKMQDLPEESSLEYQQEYFVTTPGTETSETQKAMIVPSSPSKTPEEVSTPAEEEKLYLQTPTSSERGGSPIIQEPEEPSEHREESSPRKTSLVIVESADNQPETCERLDEDAAFEKGDDMPEIPPETVTEEEYIDEHGHTVVKKVTRKIIRRYVSSEGTEKEEIMVQGMPQEPVNIEEGDGYSKVIKRVVLKSDTEQSEVTLCEPSILSSTSQFQAEPVEGRRVSKVVKTTVVLGERMEKHLGDSSLATDLPSAKDDFEEDNNE

SEQ ID NO: 26118 - protein, 3915 aa, Homo sapiens
MTTMLQKSDSNASFLRAARAGNLDKVVEYLKGGIDINTCNQNGLNALHLAAKEGHVGLVQELLGRGSSVDSATKKGNTALHIASLAGQAEVVKVLVKEGANINAQSQNGFTPLYMAAQENHIDVVKYLLENGANQSTATEDGFTPLAVALQQGHNQAVAILLENDTKGKVRLPALHIAARKDDTKSAALLLQNDHNADVQSKMMVNRTTESGFTPLHIAAHYGNVNVATLLLNRGAAVDFTARNGITPLHVASKRGNTNMVKLLLDRGGQIDAKTRDGLTPLHCAARSGHDQVVELLLERGAPLLARTKNGLSPLHMAAQGDHVECVKHLLQHKAPVDDVTLDYLTALHVAAHCGHYRVTKLLLDKRANPNARALNGFTPLHIACKKNRIKVMELLVKYGASIQAITESGLTPIHVAAFMGHLNIVLLLLQNGASPDVTNIRGETALHMAARAGQVEVVRCLLRNGALVDARAREEQTPLHIASRLGKTEIVQLLLQHMAHPDAATTNGYTPLHISAREGQVDVASVLLEAGAAHSLATKKGFTPLHVAAKYGSLDVAKLLLQRRAAADSAGKNGLTPLHVAAHYDNQKVALLLLEKGASPHATAKNGYTPLHIAAKKNQMQIASTLLNYGAETNIVTKQGVTPLHLASQEGHTDMVTLLLDKGANIHMSTKSGLTSLHLAAQEDKVNVADILTKHGADQDAHTKLGYTPLIVACHYGNVKMVNFLLKQGANVNAKTKNGYTPLHQAAQQGHTHIINVLLQHGAKPNATTANGNTALAIAKRLGYISVVDTLKVVTEEVTTTTTTITEKHKLNVPETMTEVLDVSDEEGDDTMTGDGGEYLRPEDLKELGDDSLPSSQFLDGMNYLRYSLEGGRSDSLRSFSSDRSHTLSHASYLRDSAVMDDSVVIPSHQVSTLAKEAERNSYRLSWGTENLDNVALSSSPIHSGRASPCLERDNSSFLVSFMVDARGGAMRGCRHNGLRIIIPPRKCTAPTRVTCRLVKRHRLATMPPMVEGEGLASRLIEVGPSGAQFLGPVIVEIPHFAALRGKERELVVLRSENGDSWKEHFCDYTEDELNEILNGMDEVLDSPEDLEKKRICRIITRDFPQYFAVVSRIKQDSNLIGPEGGVLSSTVVPQVQAVFPEGALTKRIRVGLQAQPMHSELVKKILGNKATFSPIVTLEPRRRKFHKPITMTIPVPKASSDVMLNGFGGDAPTLRLLCSITGGTTPAQWEDITGTTPLTFVNECVSFTTNVSARFWLIDCRQIQESVTFASQVYREIICVPYMAKFVVFAKSHDPIEARLRCFCMTDDKVDKTLEQQENFAEVARSRDVEVLEGKPIYVDCFGNLVPLTKSGQHHIFSFFAFKENRLPLFVKVRDTTQEPCGRLSFMKEPKSTRGLVHQAICNLNITLPIYTKESESDQEQEEEIDMTSEKNDETESTETSVLKSHLVNEVPVLASPDLLSEVSEMKQDLIKMTAILTTDVSDKAGSIKVKELVKAAEEEPGEPFEIVERVKEDLEKVNEILRSGTCTRDESSVQSSRSERGLVEEEWVIVSDEEIEEARQKAPLEITEYPCVEVRIDKEIKGKVEKDSTGLVNYLTDDLNTCVPLPKEQLQTVQDKAGKKCEALAVGRSSEKEGKDIPPDETQSTQKQHKPSLGIKKPVRRKLKEKQKQKEEGLQASAEKAELKKGSSEESLGEDPGLAPEPLPTVKATSPLIEETPIGSIKDKVKALQKRVEDEQKGRSKLPIRVKGKEDVPKKTTHRPHPAASPSLKSERHAPGSPSPKTERHSTLSSSAKTERHPPVSPSSKTEKHSPVSPSAKTERHSPASSSSKTEKHSPVSPSTKTERHSPVSSTKTERHPPVSPSGKTDKRPPVSPSGRTEKHPPVSPGRTEKRLPVSPSGRTDKHQPVSTAGKTEKHLPVSPSGKTEKQPPVSPTSKTERIEETMSVRELMKAFQSGQDPSKHKTGLFEHKSAKQKQPQEKGKVRVEKEKGPILTQREAQKTENQTIKRGQRLPVTGTAESKRGVRVSSIGVKKEDAAGGKEKVLSHKIPEPVQSVPEEESHRESEVPKEKMADEQGDMDLQISPDRKTSTDFSEVIKQELEDNDKYQQFRLSEETEKAQLHLDQVLTSPFNTTFPLDYMKDEFLPALSLQSGALDGSSESLKNEGVAGSPCGSLMEGTPQISSEESYKHEGLAETPETSPESLSFSPKKSEEQTGETKESTKTETTTEIRSEKEHPTTKDITGGSEERGATVTEDSETSTESFQKEATLGSPKDTSPKRQDDCTGSCSVALAKETPTGLTEEAACDEGQRTFGSSAHKTQTDSEVQESTATSDETKALPLPEASVKTDTGTESKPQGVIRSPQGLELALPSRDSEVLSAVADDSLAVSHKDSLEASPVLEDNSSHKTPDSLEPSPLKESPCRDSLESSPVEPKMKAGIFPSHFPLPAAVAKTELLTEVASVRSRLLRDPDGSAEDDSLEQTSLMESSGKSPLSPDTPSSEEVSYEVTPKTTDVSTPKPAVIHECAEEDDSENGEKKRFTPEEEMFKMVTKIKMFDELEQEAKQKRDYKKEPKQEESSSSSDPDADCSVDVDEPKHTGSGEDESGVPVLVTSESRKVSSSSESEPELAQLKKGADSGLLPEPVIRVQPPSPLPSSMDSNSSPEEVQFQPVVSKQYTFKMNEDTQEEPGKSEEEKDSESHLAEDRHAVSTEAEDRSYDKLNRDTDQPKICDGHGCEAMSPSSSAAPVSSGLQSPTGDDVDEQPVIYKESLALQGTHEKDTEGEELDVSRAESPQADCPSESFSSSSSLPHCLVSEGKELDEDISATSSIQKTEVTKTDETFENLPKDCPSQDSSITTQTDRFSMDVPVSDLAENDEIYDPQITSPYENVPSQSFFSSEESKTQTDANHTTSFHSSEVYSVTITSPVEDVVVASSSSGTVLSKESNFEGQDIKMESQQESTLWEMQSDSVSSSFEPTMSATTTVVGEQISKVIITKTDVDSDSWSEIREDDEAFEARVKEEEQKIFGLMVDRQSQGTTPDTTPARTPTEEGTPTSEQNPFLFQEGKLFEMTRSGAIDMTKRSYADESFHFFQIGQESREETLSEDVKEGATGADPLPLETSAESLALSESKETVDDEADLLPDDVSEEVEEIPASDAQLNSQMGISASTETPTKEAVSVGTKDLPTVQTGDIPPLSGVKQISCPDSSEPAVQVQLDFSTLTRSVYSDRGDDSPDSSPEEQKSVIEIPTAPMENVPFTESKSKIPVRTMPTSTPAPPSAEYESSVSEDFLSSVDEENKADEAKPKSKLPVKVPLQRVEQQLSDLDTSVQKTVAPQGQDMASIAPDNRSKSESDASSLDSKTKCPVKTRSYTETETESRERAEELELESEEGATRPKILTSRLPVKSRSTTSSCRGGTSPTKESKEHFFDLYRNSIEFFEEISDEASKLVDRLTQSEREQEIVSDDESSSALEVSVIENLPPVETEHSVPEDIFDTRPIWDESIETLIERIPDENGHDHAEDPQDEQERIEERLAYIADHLGFSWTELARELDFTEEQIHQIRIENPNSLQDQSHALLKYWLERDGKHATDTNLVECLTKINRMDIVHLMETNTEPLQERISHSYAEIEQTITLDHSEGFSVLQEELCTAQHKQKEEQAVSKESETCDHPPIVSEEDISVGYSTFQDGVPKTEGDSSATALFPQTHKEQVQQDFSGKMQDLPEESSLEYQQEYFVTTPGTETSETQKAMIVPSSPSKTPEEVSTPAEEEKLYLQTPTSSERGGSPIIQEPEEPSEHREESSPRKTSLVIVESADNQPETCERLDEDAAFEKGDDMPEIPPETVTEEEYIDEHGHTVVKKVTRKIIRRYVSSEGTEKEEIMVQGMPQEPVNIEEGDGYSKVIKRVVLKSDTEQSEDNNE

SEQ ID NO: 26119 - protein, 408 aa, Homo sapiens
DPASGAALGMVADCGVREARAAVRAAYEAFCRWREVSAKERSSLLRKWYNLMIQNKDDLARIITAESGKPLKEAHGEILYSAFFLEWFSEEARRVYGDIIHTPAKDRRALVLKQPIGVAAVITPWNFPSAMITRKVGAALAAGCTVVVKPAEDTPFSALALAEILLHHAANSVKRVSMELGGLAPFIVFDSANVDQAVAGAMASKFRNTGQTCVCSNQFLVQRGIHDAFVKAFAEAMKKNLRVGNGFEEGTTQGPLINEKAVEKVEKQVNDAVSKGATVVTGGKRHQLGKNFFEPTLLCNVTQDMLCTHEETFGPLAPVIKFDTEEEAIAIANAADVGLAGYFYSQDPAQIWRVAEQLEVGMVGVNEGLISSVECPFGGVKQSGLGREGSKYGIDEYLELKYVCYGGL

SEQ ID NO: 26120 - protein, 1152 aa, Homo sapiens
MQYLNIKEDCNAMAFCAKMRSSKKTEVNLEAPEPGVEVIFYLSDREPLRLGSGEYTAEELCIRAAQACRISPLCHNLFALYDENTKLWYAPNRTITVDDKMSLRLHYRMRFYFTNWHGTNDNEQSVWRHSPKKQKNGYEKKKIPDATPLLDASSLEYLFAQGQYDLVKCLAPIRDPKTEQDGHDIENECLGMAVLAISHYAMMKKMQLPELPKDISYKRYIPETLNKSIRQRNLLTRMRINNVFKDFLKEFNNKTICDSSVSTHDLKVKYLATLETLTKHYGAEIFETSMLLISSENEMNWFHSNDGGNVLYYEVMVTGNLGIQWRHKPNVVSVEKEKNKLKRKKLENKHKKDEEKNKIREEWNNFSYFPEITHIVIKESVVSINKQDNKKMELKLSSHEEALSFVSLVDGYFRLTADAHHYLCTDVAPPLIVHNIQNGCHGPICTEYAINKLRQEGSEEGMYVLRWSCTDFDNILMTVTCFEKSEQVQGAQKQFKNFQIEVQKGRYSLHGSDRSFPSLGDLMSHLKKQILRTDNISFMLKRCCQPKPREISNLLVATKKAQEWQPVYPMSQLSFDRILKKDLVQGEHLGRGTRTHIYSGTLMDYKDDEGTSEEKKIKVILKVLDPSHRDISLAFFEAASMMRQVSHKHIVYLYGVCVRDVENIMVEEFVEGGPLDLFMHRKSDVLTTPWKFKVAKQLASALSYLEDKDLVHGNVCTKNLLLAREGIDSECGPFIKLSDPGIPITVLSRQECIERIPWIAPECVEDSKNLSVAADKWSFGTTLWEICYNGEIPLKDKTLIEKERFYESRCRPVTPSCKELADLMTRCMNYDPNQRPFFRAIMRDINKLEEQNIVSEKKPATEVDPTHFEKRFLKRIRDLGEGHFGKVELCRYDPEGDNTGEQVAVKSLKPESGGNHIADLKKEIEILRNLYHENIVKYKGICTEDGGNGIKLIMEFLPSGSLKEYLPKNKNKINLKQQLKYAVQICKGMDYLGSRQYVHRDLAARNVLVESEHQVKIGDFGLTKAIETDKEYYTVKDDRDSPVFWYAPECLMQSKFYIASDVWSFGVTLHELLTYCDSDSSPMALFLKMIGPTHGQMTVTRLVNTLKEGKRLPCPPNCPDEVYQLMRKCWEFQPSNRTSFQNLIEGFEALLK

SEQ ID NO: 26121 - protein, 1882 aa, Homo sapiens
MTTMLQKSDSNASFLRAARAGNLDKVVEYLKGGIDINTCNQNGLNALHLAAKEGHVGLVQELLGRGSSVDSATKKGNTALHIASLAGQAEVVKVLVKEGANINAQSQNGFTPLYMAAQENHIDVVKYLLENGANQSTATEDGFTPLAVALQQGHNQAVAILLENDTKGKVRLPALHIAARKDDTKSAALLLQNDHNADVQSKMMVNRTTESGFTPLHIAAHYGNVNVATLLLNRGAAVDFTARNGITPLHVASKRGNTNMVKLLLDRGGQIDAKTRDGLTPLHCAARSGHDQVVELLLERGAPLLARTKNGLSPLHMAAQGDHVECVKHLLQHKAPVDDVTLDYLTALHVAAHCGHYRVTKLLLDKRANPNARALNGFTPLHIACKKNRIKVMELLVKYGASIQAITESGLTPIHVAAFMGHLNIVLLLLQNGASPDVTNIRGETALHMAARAGQVEVVRCLLRNGALVDARAREEQTPLHIASRLGKTEIVQLLLQHMAHPDAATTNGYTPLHISAREGQVDVASVLLEAGAAHSLATKKGFTPLHVAAKYGSLDVAKLLLQRRAAADSAGKNGLTPLHVAAHYDNQKVALLLLEKGASPHATAKNGYTPLHIAAKKNQMQIASTLLNYGAETNIVTKQGVTPLHLASQEGHTDMVTLLLDKGANIHMSTKSGLTSLHLAAQEDKVNVADILTKHGADQDAHTKLGYTPLIVACHYGNVKMVNFLLKQGANVNAKTKNGYTPLHQAAQQGHTHIINVLLQHGAKPNATTANGNTALAIAKRLGYISVVDTLKVVTEEVTTTTTTITEKHKLNVPETMTEVLDVSDEEGDDTMTGDGGEYLRPEDLKELGDDSLPSSQFLDGMNYLRYSLEGGRSDSLRSFSSDRSHTLSHASYLRDSAVMDDSVVIPSHQVSTLAKEAERNSYRLSWGTENLDNVALSSSPIHSGFLVSFMVDARGGAMRGCRHNGLRIIIPPRKCTAPTRVTCRLVKRHRLATMPPMVEGEGLASRLIEVGPSGAQFLGKLHLPTAPPPLNEGESLVSRILQLGPPGTKFLGPVIVEIPHFAALRGKERELVVLRSENGDSWKEHFCDYTEDELNEILNGMDEVLDSPEDLEKKRICRIITRDFPQYFAVVSRIKQDSNLIGPEGGVLSSTVVPQVQAVFPEGALTKRIRVGLQAQPMHSELVKKILGNKATFSPIVTLEPRRRKFHKPITMTIPVPKASSDVMLNGFGGDAPTLRLLCSITGGTTPAQWEDITGTTPLTFVNECVSFTTNVSARFWLIDCRQIQESVTFASQVYREIICVPYMAKFVVFAKSHDPIEARLRCFCMTDDKVDKTLEQQENFAEVARSRDVEVLEGKPIYVDCFGNLVPLTKSGQHHIFSFFAFKENRLPLFVKVRDTTQEPCGRLSFMKEPKSTRGLVHQAICNLNITLPIYTKESESDQEQEEEIDMTSEKNPQDEQERIEERLAYIADHLGFSWTELARELDFTEEQIHQIRIENPNSLQDQSHALLKYWLERDGKHATDTNLVECLTKINRMDIVHLMETNTEPLQERISHSYAEIEQTITLDHSEGFSVLQEELCTAQHKQKEEQAVSKESETCDHPPIVSEEDISVGYSTFQDGVPKTEGDSSATALFPQTHKEQVQQDFSGKMQDLPEESSLEYQQEYFVTTPGTETSETQKAMIVPSSPSKTPEEVSTPAEEEKLYLQTPTSSERGGSPIIQEPEEPSEHREESSPRKTSLVIVESADNQPETCERLDEDAAFEKELTEELGELEASSDEEAMVTTRVVRRRVIIQGDDMPEIPPETVTEEEYIDEHGHTVVKKVTRKIIRRYVSSEGTEKEEIMVQGMPQEPVNIEEGDGYSKVIKRVVLKSDTEQSEDNNE

SEQ ID NO: 26122 - protein, 3882 aa, Homo sapiens
MTTMLQKSDSNASFLRAARAGNLDKVVEYLKGGIDINTCNQNGLNALHLAAKEGHVGLVQELLGRGSSVDSATKKGNTALHIASLAGQAEVVKVLVKEGANINAQSQNGFTPLYMAAQENHIDVVKYLLENGANQSTATEDGFTPLAVALQQGHNQAVAILLENDTKGKVRLPALHIAARKDDTKSAALLLQNDHNADVQSKMMVNRTTESGFTPLHIAAHYGNVNVATLLLNRGAAVDFTARNGITPLHVASKRGNTNMVKLLLDRGGQIDAKTRDGLTPLHCAARSGHDQVVELLLERGAPLLARTKNGLSPLHMAAQGDHVECVKHLLQHKAPVDDVTLDYLTALHVAAHCGHYRVTKLLLDKRANPNARALNGFTPLHIACKKNRIKVMELLVKYGASIQAITESGLTPIHVAAFMGHLNIVLLLLQNGASPDVTNIRGETALHMAARAGQVEVVRCLLRNGALVDARAREEQTPLHIASRLGKTEIVQLLLQHMAHPDAATTNGYTPLHISAREGQVDVASVLLEAGAAHSLATKKGFTPLHVAAKYGSLDVAKLLLQRRAAADSAGKNGYTPLHIAAKKNQMQIASTLLNYGAETNIVTKQGVTPLHLASQEGHTDMVTLLLDKGANIHMSTKSGLTSLHLAAQEDKVNVADILTKHGADQDAHTKLGYTPLIVACHYGNVKMVNFLLKQGANVNAKTKNGYTPLHQAAQQGHTHIINVLLQHGAKPNATTANGNTALAIAKRLGYISVVDTLKVVTEEVTTTTTTITEKHKLNVPETMTEVLDVSDEEGDDTMTGDGGEYLRPEDLKELGDDSLPSSQFLDGMNYLRYSLEGGRSDSLRSFSSDRSHTLSHASYLRDSAVMDDSVVIPSHQVSTLAKEAERNSYRLSWGTENLDNVALSSSPIHSGRASPCLERDNSSFLVSFMVDARGGAMRGCRHNGLRIIIPPRKCTAPTRVTCRLVKRHRLATMPPMVEGEGLASRLIEVGPSGAQFLGPVIVEIPHFAALRGKERELVVLRSENGDSWKEHFCDYTEDELNEILNGMDEVLDSPEDLEKKRICRIITRDFPQYFAVVSRIKQDSNLIGPEGGVLSSTVVPQVQAVFPEGALTKRIRVGLQAQPMHSELVKKILGNKATFSPIVTLEPRRRKFHKPITMTIPVPKASSDVMLNGFGGDAPTLRLLCSITGGTTPAQWEDITGTTPLTFVNECVSFTTNVSARFWLIDCRQIQESVTFASQVYREIICVPYMAKFVVFAKSHDPIEARLRCFCMTDDKVDKTLEQQENFAEVARSRDVEVLEGKPIYVDCFGNLVPLTKSGQHHIFSFFAFKENRLPLFVKVRDTTQEPCGRLSFMKEPKSTRGLVHQAICNLNITLPIYTKESESDQEQEEEIDMTSEKNDETESTETSVLKSHLVNEVPVLASPDLLSEVSEMKQDLIKMTAILTTDVSDKAGSIKVKELVKAAEEEPGEPFEIVERVKEDLEKVNEILRSGTCTRDESSVQSSRSERGLVEEEWVIVSDEEIEEARQKAPLEITEYPCVEVRIDKEIKGKVEKDSTGLVNYLTDDLNTCVPLPKEQLQTVQDKAGKKCEALAVGRSSEKEGKDIPPDETQSTQKQHKPSLGIKKPVRRKLKEKQKQKEEGLQASAEKAELKKGSSEESLGEDPGLAPEPLPTVKATSPLIEETPIGSIKDKVKALQKRVEDEQKGRSKLPIRVKGKEDVPKKTTHRPHPAASPSLKSERHAPGSPSPKTERHSTLSSSAKTERHPPVSPSSKTEKHSPVSPSAKTERHSPASSSSKTEKHSPVSPSTKTERHSPVSSTKTERHPPVSPSGKTDKRPPVSPSGRTEKHPPVSPGRTEKRLPVSPSGRTDKHQPVSTAGKTEKHLPVSPSGKTEKQPPVSPTSKTERIEETMSVRELMKAFQSGQDPSKHKTGLFEHKSAKQKQPQEKGKVRVEKEKGPILTQREAQKTENQTIKRGQRLPVTGTAESKRGVRVSSIGVKKEDAAGGKEKVLSHKIPEPVQSVPEEESHRESEVPKEKMADEQGDMDLQISPDRKTSTDFSEVIKQELEDNDKYQQFRLSEETEKAQLHLDQVLTSPFNTTFPLDYMKDEFLPALSLQSGALDGSSESLKNEGVAGSPCGSLMEGTPQISSEESYKHEGLAETPETSPESLSFSPKKSEEQTGETKESTKTETTTEIRSEKEHPTTKDITGGSEERGATVTEDSETSTESFQKEATLGSPKDTSPKRQDDCTGSCSVALAKETPTGLTEEAACDEGQRTFGSSAHKTQTDSEVQESTATSDETKALPLPEASVKTDTGTESKPQGVIRSPQGLELALPSRDSEVLSAVADDSLAVSHKDSLEASPVLEDNSSHKTPDSLEPSPLKESPCRDSLESSPVEPKMKAGIFPSHFPLPAAVAKTELLTEVASVRSRLLRDPDGSAEDDSLEQTSLMESSGKSPLSPDTPSSEEVSYEVTPKTTDVSTPKPAVIHECAEEDDSENGEKKRFTPEEEMFKMVTKIKMFDELEQEAKQKRDYKKEPKQEESSSSSDPDADCSVDVDEPKHTGSGEDESGVPVLVTSESRKVSSSSESEPELAQLKKGADSGLLPEPVIRVQPPSPLPSSMDSNSSPEEVQFQPVVSKQYTFKMNEDTQEEPGKSEEEKDSESHLAEDRHAVSTEAEDRSYDKLNRDTDQPKICDGHGCEAMSPSSSAAPVSSGLQSPTGDDVDEQPVIYKESLALQGTHEKDTEGEELDVSRAESPQADCPSESFSSSSSLPHCLVSEGKELDEDISATSSIQKTEVTKTDETFENLPKDCPSQDSSITTQTDRFSMDVPVSDLAENDEIYDPQITSPYENVPSQSFFSSEESKTQTDANHTTSFHSSEVYSVTITSPVEDVVVASSSSGTVLSKESNFEGQDIKMESQQESTLWEMQSDSVSSSFEPTMSATTTVVGEQISKVIITKTDVDSDSWSEIREDDEAFEARVKEEEQKIFGLMVDRQSQGTTPDTTPARTPTEEGTPTSEQNPFLFQEGKLFEMTRSGAIDMTKRSYADESFHFFQIGQESREETLSEDVKEGATGADPLPLETSAESLALSESKETVDDEADLLPDDVSEEVEEIPASDAQLNSQMGISASTETPTKEAVSVGTKDLPTVQTGDIPPLSGVKQISCPDSSEPAVQVQLDFSTLTRSVYSDRGDDSPDSSPEEQKSVIEIPTAPMENVPFTESKSKIPVRTMPTSTPAPPSAEYESSVSEDFLSSVDEENKADEAKPKSKLPVKVPLQRVEQQLSDLDTSVQKTVAPQGQDMASIAPDNRSKSESDASSLDSKTKCPVKTRSYTETETESRERAEELELESEEGATRPKILTSRLPVKSRSTTSSCRGGTSPTKESKEHFFDLYRNSIEFFEEISDEASKLVDRLTQSEREQEIVSDDESSSALEVSVIENLPPVETEHSVPEDIFDTRPIWDESIETLIERIPDENGHDHAEDPQDEQERIEERLAYIADHLGFSWTELARELDFTEEQIHQIRIENPNSLQDQSHALLKYWLERDGKHATDTNLVECLTKINRMDIVHLMETNTEPLQERISHSYAEIEQTITLDHSEGFSVLQEELCTAQHKQKEEQAVSKESETCDHPPIVSEEDISVGYSTFQDGVPKTEGDSSATALFPQTHKEQVQQDFSGKMQDLPEESSLEYQQEYFVTTPGTETSETQKAMIVPSSPSKTPEEVSTPAEEEKLYLQTPTSSERGGSPIIQEPEEPSEHREESSPRKTSLVIVESADNQPETCERLDEDAAFEKGDDMPEIPPETVTEEEYIDEHGHTVVKKVTRKIIRRYVSSEGTEKEEIMVQGMPQEPVNIEEGDGYSKVIKRVVLKSDTEQSEDNNE

SEQ ID NO: 26123 - protein, 1040 aa, Homo sapiens
MQPEEGTGWLLELLSEVQLQQYFLRLRDDLNVTRLSHFEYVKNEDLEKIGMGRPGQRRLWEAVKRRKALCKRKSWMSKVFSGKRLEAEFPPHHSQSTFRKTSPAPGGPAGEGPLQSLTCLIGEKDLRLLEKLGDGSFGVVRRGEWDAPSGKTVSVAVKCLKPDVLSQPEAMDDFIREVNAMHSLDHRNLIRLYGVVLTPPMKMVTELAPLGSLLDRLRKHQGHFLLGTLSRYAVQVAEGMGYLESKRFIHRDLAARNLLLATRDLVKIGDFGLMRALPQNDDHYVMQEHRKVPFAWCAPESLKTRTFSHASDTWMFGVTLWEMFTYGQEPWIGLNGSQILHKIDKEGERLPRPEDCPQDIYNVMVQCWAHKPEDRPTFVALRDFLLEAQPTDMRALQDFEEPDKLHIQMNDVITVIEGRAENYWWRGQNTRTLCVGPFPRNVVTSVAGLSAQDISQPLQNSFIHTGHGDSDPRHCWGFPDRIDELYLGNPMDPPDLLSVELSTSRPPQHLGGVKKPTYDPVSEDQDPLSSDFKRLGLRKPGLPRGLWLAKPSARVPGTKASRGSGAEVTLIDFGEEPVVPALRPCAPSLAQLAMDACSLLDETPPQSPTRALPRPLHPTPVVDWDARPLPPPPAYDDVAQDEDDFEICSINSTLVGAGVPAGPSQGQTNYAFVPEQARPPPPLEDNLFLPPQGGGKPPSSAQTAEIFQALQQECMRQLQAPAGSPAPSPSPGGDDKPQVPPRVPIPPRPTRPHVQLSPAPPGEEETSQWPGPASPPRVPPREPLSPQGSRTPSPLVPPGSSPLPPRLSSSPGKTMPTTQSFASDPKYATPQVIQAPGPRAGPCILPIVRDGKKVSSTHYYLLPERPSYLERYQRFLREAQSPEEPTPLPVPLLLPPPSTPAPAAPTATVRPMPQAALDPKANFSTNNSNPGARPPPPRATARLPQRGCPGDGPEAGRPADKIQMLQAMVHGVTTEECQAALQCHGWSVQRAAQYLKVEQLFGLGLRPRGECHKVLEMFDWNLEQAGCHLLGSWGPAHHKR

SEQ ID NO: 26124 - protein, 1528 aa, Homo sapiens
MIKTIYKTPGMIKDEQEIVQKRTFTKWINSHLAKRKPPMVVDDLFEDMKDGVKLLALLEVLSGQKLPCEQGRRMKRIHAVANIGTALKFLEGRKSMHRGSPIKLVNINSTDIADGRPSIVLGLMWTIILYFQIEELTSNLPQLQSLSSSASSVDSIVSSETPSPPSKRKVTTKIQGNAKKALLKWVQYTAGKQTGIEVKDFGKSWRSGVAFHSVIHAIRPELVDLETVKGRSNRENLEDAFTIAETELGIPRLLDPEDVDVDKPDEKSIMTYVAQFLKHYPDIHNASTDGQEDDEILPGFPSFANSVQNFKREDRVIFKEMKVWIEQFERDLTRAQMVESNLQDKYQSFKHFRVQYEMKRKQIEHLIQPLHRDGKLSLDQALVKQSWDRVTSRLFDWHIQLDKSLPAPLGTIGAWLYRAEVALREEITVQQVHEETANTIQRKLEQHKDLLQNTDAHKRAFHEIYRTRSVNGIPVPPDQLEDMAERFHFVSSTSELHLMKMEFLELKYRLLSLLVLAESKLKSWIIKYGRRESVEQLLQNYVSFIENSKFFEQYEVTYQILKQTAEMYVKADGSVEEAENVMKFMNETTAQWRNLSVEVRSVRSMLEEVISNWDRYGNTVASLQAWLEDAEKMLNQSENAKKDFFRNLPHWIQQHTAMNDAGNFLIETCDEMVSRDLKQQLLLLNGRWRELFMEVKQYAQADEMDRMKKEYTDCVVTLSAFATEAHKKLSEPLEVSFMNVKLLIQDLEDIEQRVPVMDAQYKIITKTAHLITKESPQEEGKEMFATMSKLKEQLTKVKECYSPLLYESQQLLIPLEELEKQMTSFYDSLGKINEIITVLEREAQSSALFKQKHQELLACQENCKKTLTLIEKGSQSVQKFVTLSNVLKHFDQTRLQRQIADIHVAFQSMVKKTGDWKKHVETNSRLMKKFEESRAELEKVLRIAQEGLEEKGDPEELLRRHTEFFSQLDQRVLNAFLKACDELTDILPEQEQQGLQEAVRKLHKQWKDLQGEAPYHLLHLKIDVEKNRFLASVEECRTELDRETKLMPQEGSEKIIKEHRVFFSDKGPHHLCEKRLQLIEELCVKLPVRDPVRDTPGTCHVTLKELRAAIDSTYRKLMEDPDKWKDYTSRFSEFSSWISTNETQLKGIKGEAIDTANHGEVKRAVEEIRNGVTKRGETLSWLKSRLKVLTEVSSENEAQKQGDELAKLSSSFKALVTLLSEVEKMLSNFGDCVQYKEIVKNSLEELISGSKEVQEQAEKILDTENLFEAQQLLLHHQQKTKRISAKKRDVQQQIAQAQQGEGGLPDRGHEELRKLESTLDGLERSRERQERRIQVTLRKWERFETNKETVVRYLFQTGSSHERFLSFSSLESLSSELEQTKEFSKRTESIAVQAENLVKEASEIPLGPQNKQLLQQQAKSIKEQVKKLEDTLEEDIKTMEMVKTKWDHFGSNFETLSVWITEKEKELNALETSSSAMDMQISQIKVTIQEIESKLSSIVGLEEEAQSFAQFVTTGESARIKAKLTQIR

SEQ ID NO: 26125 - protein, 806 aa, Homo sapiens
MLKGGSKGPALLALRSGTDPRAQMSDDPAEGTLDPCSAPGLTDEKVKAYLSLHPQVLDEFVSESVSAETVEKWLKRKNNKSEDESAPKEVSRYQDTNMQGVVYELNSYIEQRLDTGGDNQLLLYELSSIIKIATKADGFALYFLGECNNSLCIFTPPGIKEGKPRLIPAGPITQGTTVSAYVAKSRKTLLVEDILGDERFPRGTGLESGTRIQSVLCLPIVTAIGDLIGILELYRHWGKEAFCLSHQEVATANLAWASVAIHQVQVCRGLAKQTELNDFLLDVSKTYFDNIVAIDSLLEHIMIYAKNLVNADRCALFQVDHKNKELYSDLFDIGEEKEGKPVFKKTKEIRFSIEKGIAGQVARTGEVLNIPDAYADPRFNREVDLYTGYTTRNILCMPIVSRGSVIGVVQMVNKISGSAFSKTDENNFKMFAVFCALALHCANMYHRIRHSECIYRVTMEKLSYHSICTSEEWQGLMQFTLPVRLCKEIELFHFDIGPFENMWPGIFVYMVHRSCGTSCFELEKLCRFIMSVKKNYRRVPYHNWKHAVTVAHCMYAILQNNHTLFTDLERKGLLIACLCHDLDHRGFSNSYLQKFDHPLAALYSTSTMEQHHFSQTVSILQLEGHNIFSTLSSSEYEQVLEIIRKAIIATDLALYFGNRKQLEEMYQTGSLNLNNQSHRDRVIGLMMTACDLCSVTKLWPVTKLTANDIYAEFWAEGDEMKKLGIQPIPMMDRDKKDEVPQGQLGFYNAVAIPCYTTLTQILPPTEPLLKACRDNLSQWEKVIRGEETATWISSPSVAQKAAASED

SEQ ID NO: 26126 - protein, 1755 aa, Homo sapiens
MTTMLQKSDSNASFLRAARAGNLDKVVEYLKGGIDINTCNQNGLNALHLAAKEGHVGLVQELLGRGSSVDSATKKGNTALHIASLAGQAEVVKVLVKEGANINAQSQNGFTPLYMAAQENHIDVVKYLLENGANQSTATEDGFTPLAVALQQGHNQAVAILLENDTKGKVRLPALHIAARKDDTKSAALLLQNDHNADVQSKSGFTPLHIAAHYGNVNVATLLLNRGAAVDFTARNGITPLHVASKRGNTNMVKLLLDRGGQIDAKTRDGLTPLHCAARSGHDQVVELLLERGAPLLARTKNGLSPLHMAAQGDHVECVKHLLQHKAPVDDVTLDYLTALHVAAHCGHYRVTKLLLDKRANPNARALNGFTPLHIACKKNRIKVMELLVKYGASIQAITESGLTPIHVAAFMGHLNIVLLLLQNGASPDVTNIRGETALHMAARAGQVEVVRCLLRNGALVDARAREEQTPLHIASRLGKTEIVQLLLQHMAHPDAATTNGYTPLHISAREGQVDVASVLLEAGAAHSLATKKGFTPLHVAAKYGSLDVAKLLLQRRAAADSAGKNGLTPLHVAAHYDNQKVALLLLEKGASPHATAKNGYTPLHIAAKKNQMQIASTLLNYGAETNIVTKQGVTPLHLASQEGHTDMVTLLLDKGANIHMSTKSGLTSLHLAAQEDKVNVADILTKHGADQDAHTKLGYTPLIVACHYGNVKMVNFLLKQGANVNAKTKNGYTPLHQAAQQGHTHIINVLLQHGAKPNATTANGNTALAIAKRLGYISVVDTLKVVTEEVTTTTTTITEKHKLNVPETMTEVLDVSDEEGDDTMTGDGGEYLRPEDLKELGDDSLPSSQFLDGMNYLRYSLEGGRSDSLRSFSSDRSHTLSHASYLRDSAVMDDSVVIPSHQVSTLAKEAERNSYRLSWGTENLDNVALSSSPIHSGFLVSFMVDARGGAMRGCRHNGLRIIIPPRKCTAPTRVTCRLVKRHRLATMPPMVEGEGLASRLIEVGPSGAQFLGPVIVEIPHFAALRGKERELVVLRSENGDSWKEHFCDYTEDELNEILNGMDEVLDSPEDLEKKRICRIITRDFPQYFAVVSRIKQDSNLIGPEGGVLSSTVVPQVQAVFPEGALTKRIRVGLQAQPMHSELVKKILGNKATFSPIVTLEPRRRKFHKPITMTIPVPKASSDVMLNGFGGDAPTLRLLCSITGGTTPAQWEDITGTTPLTFVNECVSFTTNVSARFWLIDCRQIQESVTFASQVYREIICVPYMAKFVVFAKSHDPIEARLRCFCMTDDKVDKTLEQQENFAEVARSRDVEVLEGKPIYVDCFGNLVPLTKSGQHHIFSFFAFKENRLPLFVKVRDTTQEPCGRLSFMKEPKSTRGLVHQAICNLNITLPIYTKESESDQEQEEEIDMTSEKNPQDEQERIEERLAYIADHLGFSWTELARELDFTEEQIHQIRIENPNSLQDQSHALLKYWLERDGKHATDTNLVECLTKINRMDIVHLMETNTEPLQERISHSYAEIEQTITLDHSEGFSVLQEELCTAQHKQKEEQAVSKESETCDHPPIVSEEDISVGYSTFQDGVPKTEGDSSATALFPQTHKEQVQQDFSGKMQDLPEESSLEYQQEYFVTTPGTETSETQKAMIVPSSPSKTPEEVSTPAEEEKLYLQTPTSSERGGSPIIQEPEEPSEHREESSPRKTSLVIVESADNQPETCERLDEDAAFEKGDDMPEIPPETVTEEEYIDEHGHTVVKKDNNE

SEQ ID NO: 26127 - protein, 1822 aa, Homo sapiens
MTTMLQKSDSNASFLRAARAGNLDKVVEYLKGGIDINTCNQNGLNALHLAAKEGHVGLVQELLGRGSSVDSATKKGNTALHIASLAGQAEVVKVLVKEGANINAQSQNGFTPLYMAAQENHIDVVKYLLENGANQSTATEDGFTPLAVALQQGHNQAVAILLENDTKGKVRLPALHIAARKDDTKSAALLLQNDHNADVQSKSGFTPLHIAAHYGNVNVATLLLNRGAAVDFTARNGITPLHVASKRGNTNMVKLLLDRGGQIDAKTRDGLTPLHCAARSGHDQVVELLLERGAPLLARTKNGLSPLHMAAQGDHVECVKHLLQHKAPVDDVTLDYLTALHVAAHCGHYRVTKLLLDKRANPNARALNGFTPLHIACKKNRIKVMELLVKYGASIQAITESGLTPIHVAAFMGHLNIVLLLLQNGASPDVTNIRGETALHMAARAGQVEVVRCLLRNGALVDARAREEQTPLHIASRLGKTEIVQLLLQHMAHPDAATTNGYTPLHISAREGQVDVASVLLEAGAAHSLATKKGFTPLHVAAKYGSLDVAKLLLQRRAAADSAGKNGLTPLHVAAHYDNQKVALLLLEKGASPHATAKNGYTPLHIAAKKNQMQIASTLLNYGAETNIVTKQGVTPLHLASQEGHTDMVTLLLDKGANIHMSTKSGLTSLHLAAQEDKVNVADILTKHGADQDAHTKLGYTPLIVACHYGNVKMVNFLLKQGANVNAKTKNGYTPLHQAAQQGHTHIINVLLQHGAKPNATTANGNTALAIAKRLGYISVVDTLKVVTEEVTTTTTTITEKHKLNVPETMTEVLDVSDEEGDDTMTGDGGEYLRPEDLKELGDDSLPSSQFLDGMNYLRYSLEGGRSDSLRSFSSDRSHTLSHASYLRDSAVMDDSVVIPSHQVSTLAKEAERNSYRLSWGTENLDNVALSSSPIHSGRASPCLERDNSSFLVSFMVDARGGAMRGCRHNGLRIIIPPRKCTAPTRVTCRLVKRHRLATMPPMVEGEGLASRLIEVGPSGAQFLGPVIVEIPHFAALRGKERELVVLRSENGDSWKEHFCDYTEDELNEILNGMDEVLDSPEDLEKKRICRIITRDFPQYFAVVSRIKQDSNLIGPEGGVLSSTVVPQVQAVFPEGALTKRIRVGLQAQPMHSELVKKILGNKATFSPIVTLEPRRRKFHKPITMTIPVPKASSDVMLNGFGGDAPTLRLLCSITGGTTPAQWEDITGTTPLTFVNECVSFTTNVSARFWLIDCRQIQESVTFASQVYREIICVPYMAKFVVFAKSHDPIEARLRCFCMTDDKVDKTLEQQENFAEVARSRDVEVLEGKPIYVDCFGNLVPLTKSGQHHIFSFFAFKENRLPLFVKVRDTTQEPCGRLSFMKEPKSTRGLVHQAICNLNITLPIYTKESESDQEQEEEIDMTSEKNPQDEQERIEERLAYIADHLGFSWTELARELDFTEEQIHQIRIENPNSLQDQSHALLKYWLERDGKHATDTNLVECLTKINRMDIVHLMETNTEPLQERISHSYAEIEQTITLDHSEGFSVLQEELCTAQHKQKEEQAVSKESETCDHPPIVSEEDISVGYSTFQDGVPKTEGDSSATALFPQTHKEQVQQDFSGKMQDLPEESSLEYQQEYFVTTPGTETSETQKAMIVPSSPSKTPEEVSTPAEEEKLYLQTPTSSERGGSPIIQEPEEPSEHREESSPRKTSLVIVESADNQPETCERLDEDAAFEKGDDMPEIPPETVTEEEYIDEHGHTVVKKVTRKIIRRYVSSEGTEKEEIMVQGMPQEPVNIEEGDGYSKVIKRVVLKSDTEQSEDNNE

SEQ ID NO: 26128 - protein, 1155 aa, Homo sapiens
MSLKPQQQQQQQQQQQQQQQQQQQQQQQPPPAAANVRKPGGSGLLASPAAAPSPSSSSVSSSSATAPSSVVAATSGGGRPGLGRGRNSNKGLPQSTISFDGIYANMRMVHILTSVVGSKCEVQVKNGGIYEGVFKTYSPKCDLVLDAAHEKSTESSSGPKREEIMESILFKCSDFVVVQFKDMDSSYAKRDAFTDSAISAKVNGEHKEKDLEPWDAGELTANEELEALENDVSNGWDPNDMFRYNEENYGVVSTYDSSLSSYTVPLERDNSEEFLKREARANQLAEEIESSAQYKARVALENDDRSEEEKYTAVQRNSSEREGHSINTRENKYIPPGQRNREVISWGSGRQNSPRMGQPGSGSMPSRSTSHTSDFNPNSGSDQRVVNGGVPWPSPCPSPSSRPPSRYQSGPNSLPPRAATPTRPPSRPPSRPSRPPSHPSAHGSPAPVSTMPKRMSSEGPPRMSPKAQRHPRNHRVSAGRGSISSGLEFVSHNPPSEAATPPVARTSPSGGTWSSVVSGVPRLSPKTHRPRSPRQNSIGNTPSGPVLASPQAGIIPTEAVAMPIPAASPTPASPASNRAVTPSSEAKDSRLQDQRQNSPAGNKENIKPNETSPSFSKAENKGISPVVSEHRKQIDDLKKFKNDFRLQPSSTSESMDQLLNKNREGEKSRDLIKDKIEPSAKDSFIENSSSNCTSGSSKPNSPSISPSILSNTEHKRGPEVTSQGVQTSSPACKQEKDDKEEKKDAAEQVRKSTLNPNAKEFNPRSFSQPKPSTTPTSPRPQAQPSPSMVGHQQPTPVYTQPVCFAPNMMYPVPVSPGVQPLYPIPMTPMPVNQAKTYRAGKVPNMPQQRQDQHHQSAMMHPASAAGPPIAATPPAYSTQYVAYSPQQFPNQPLVQHVPHYQSQHPHVYSPVIQGNARMMAPPTHAQPGLVSSSATQYGAHEQTHAMYACPKLPYNKETSPSFYFAISTGSLAQQYAHPNATLHPHTPHPQPSATPTGQQQSQHGGSHPAPSPVQHHQHQAAQALHLASPQQQSAIYHAGLAPTPPSMTPASNTQSPQNSFPAAQQTVFTIHPSHVQPAYTNPPHMAHVPQAHVQSGMVPSHPTAHAPMMLMTTQPPGGPQAALAQSALQPIPVSTTAHFPYMTHPSVQAHHQQQL

SEQ ID NO: 26129 - protein, 1839 aa, Homo sapiens
MMNEDAAQKSDSGEKFNGSSQRRKRPKKSDSNASFLRAARAGNLDKVVEYLKGGIDINTCNQNGLNALHLAAKEGHVGLVQELLGRGSSVDSATKKGNTALHIASLAGQAEVVKVLVKEGANINAQSQNGFTPLYMAAQENHIDVVKYLLENGANQSTATEDGFTPLAVALQQGHNQAVAILLENDTKGKVRLPALHIAARKDDTKSAALLLQNDHNADVQSKMMVNRTTESGFTPLHIAAHYGNVNVATLLLNRGAAVDFTARNGITPLHVASKRGNTNMVKLLLDRGGQIDAKTRDGLTPLHCAARSGHDQVVELLLERGAPLLARTKNGLSPLHMAAQGDHVECVKHLLQHKAPVDDVTLDYLTALHVAAHCGHYRVTKLLLDKRANPNARALNGFTPLHIACKKNRIKVMELLVKYGASIQAITESGLTPIHVAAFMGHLNIVLLLLQNGASPDVTNIRGETALHMAARAGQVEVVRCLLRNGALVDARAREEQTPLHIASRLGKTEIVQLLLQHMAHPDAATTNGYTPLHISAREGQVDVASVLLEAGAAHSLATKKGFTPLHVAAKYGSLDVAKLLLQRRAAADSAGKNGLTPLHVAAHYDNQKVALLLLEKGASPHATAKNGYTPLHIAAKKNQMQIASTLLNYGAETNIVTKQGVTPLHLASQEGHTDMVTLLLDKGANIHMSTKSGLTSLHLAAQEDKVNVADILTKHGADQDAHTKLGYTPLIVACHYGNVKMVNFLLKQGANVNAKTKNGYTPLHQAAQQGHTHIINVLLQHGAKPNATTANGNTALAIAKRLGYISVVDTLKVVTEEVTTTTTTITEKHKLNVPETMTEVLDVSDEEGDDTMTGDGGEYLRPEDLKELGDDSLPSSQFLDGMNYLRYSLEGGRSDSLRSFSSDRSHTLSHASYLRDSAVMDDSVVIPSHQVSTLAKEAERNSYRLSWGTENLDNVALSSSPIHSGFLVSFMVDARGGAMRGCRHNGLRIIIPPRKCTAPTRVTCRLVKRHRLATMPPMVEGEGLASRLIEVGPSGAQFLGPVIVEIPHFAALRGKERELVVLRSENGDSWKEHFCDYTEDELNEILNGMDEVLDSPEDLEKKRICRIITRDFPQYFAVVSRIKQDSNLIGPEGGVLSSTVVPQVQAVFPEGALTKRIRVGLQAQPMHSELVKKILGNKATFSPIVTLEPRRRKFHKPITMTIPVPKASSDVMLNGFGGDAPTLRLLCSITGGTTPAQWEDITGTTPLTFVNECVSFTTNVSARFWLIDCRQIQESVTFASQVYREIICVPYMAKFVVFAKSHDPIEARLRCFCMTDDKVDKTLEQQENFAEVARSRDVEVLEGKPIYVDCFGNLVPLTKSGQHHIFSFFAFKENRLPLFVKVRDTTQEPCGRLSFMKEPKSTRGLVHQAICNLNITLPIYTKESESDQEQEEEIDMTSEKNPQDEQERIEERLAYIADHLGFSWTELARELDFTEEQIHQIRIENPNSLQDQSHALLKYWLERDGKHATDTNLVECLTKINRMDIVHLMETNTEPLQERISHSYAEIEQTITLDHSEGFSVLQEELCTAQHKQKEEQAVSKESETCDHPPIVSEEDISVGYSTFQDGVPKTEGDSSATALFPQTHKEQVQQDFSGKMQDLPEESSLEYQQEYFVTTPGTETSETQKAMIVPSSPSKTPEEVSTPAEEEKLYLQTPTSSERGGSPIIQEPEEPSEHREESSPRKTSLVIVESADNQPETCERLDEDAAFEKGDDMPEIPPETVTEEEYIDEHGHTVVKKVTRKIIRRYVSSEGTEKEEIMVQGMPQEPVNIEEGDGYSKVIKRVVLKSDTEQSEDNNE

SEQ ID NO: 26130 - protein, 3879 aa, Homo sapiens
MTTMLQKSDSNASFLRAARAGNLDKVVEYLKGGIDINTCNQNGLNALHLAAKEGHVGLVQELLGRGSSVDSATKKGNTALHIASLAGQAEVVKVLVKEGANINAQSQNGFTPLYMAAQENHIDVVKYLLENGANQSTATEDGFTPLAVALQQGHNQAVAILLENDTKGKVRLPALHIAARKDDTKSAALLLQNDHNADVQSKMMVNRTTESGFTPLHIAAHYGNVNVATLLLNRGAAVDFTARNGITPLHVASKRGNTNMVKLLLDRGGQIDAKTRDGLTPLHCAARSGHDQVVELLLERGAPLLARTKNGLSPLHMAAQGDHVECVKHLLQHKAPVDDVTLDYLTALHVAAHCGHYRVTKLLLDKRANPNARALNGFTPLHIACKKNRIKVMELLVKYGASIQAITESGLTPIHVAAFMGHLNIVLLLLQNGASPDVTNIRGETALHMAARAGQVEVVRCLLRNGALVDARAREEQTPLHIASRLGKTEIVQLLLQHMAHPDAATTNGYTPLHISAREGQVDVASVLLEAGAAHSLATKKGFTPLHVAAKYGSLDVAKLLLQRRAAADSAGKNGLTPLHVAAHYDNQKVALLLLEKGASPHATAKNGYTPLHIAAKKNQMQIASTLLNYGAETNIVTKQGVTPLHLASQEGHTDMVTLLLDKGANIHMSTKSGLTSLHLAAQEDKVNVADILTKHGADQDAHTKLGYTPLIVACHYGNVKMVNFLLKQGANVNAKTKNGYTPLHQAAQQGHTHIINVLLQHGAKPNATTANGNTALAIAKRLGYISVVDTLKVVTEEVTTTTTTITEKHKLNVPETMTEVLDVSDEEGDDTMTGDGGEYLRPEDLKELGDDSLPSSQFLDGMNYLRYSLEGGRSDSLRSFSSDRSHTLSHASYLRDSAVMDDSVVIPSHQVSTLAKEAERNSYRLSWGTENLDNVALSSSPIHSGFLVSFMVDARGGAMRGCRHNGLRIIIPPRKCTAPTRVTCRLVKRHRLATMPPMVEGEGLASRLIEVGPSGAQFLGPVIVEIPHFAALRGKERELVVLRSENGDSWKEHFCDYTEDELNEILNGMDEVLDSPEDLEKKRICRIITRDFPQYFAVVSRIKQDSNLIGPEGGVLSSTVVPQVQAVFPEGALTKRIRVGLQAQPMHSELVKKILGNKATFSPIVTLEPRRRKFHKPITMTIPVPKASSDVMLNGFGGDAPTLRLLCSITGGTTPAQWEDITGTTPLTFVNECVSFTTNVSARFWLIDCRQIQESVTFASQVYREIICVPYMAKFVVFAKSHDPIEARLRCFCMTDDKVDKTLEQQENFAEVARSRDVEVLEGKPIYVDCFGNLVPLTKSGQHHIFSFFAFKENRLPLFVKVRDTTQEPCGRLSFMKEPKSTRGLVHQAICNLNITLPIYTKESESDQEQEEEIDMTSEKNDETESTETSVLKSHLVNEVPVLASPDLLSEVSEMKQDLIKMTAILTTDVSDKAGSIKVKELVKAAEEEPGEPFEIVERVKEDLEKVNEILRSGTCTRDESSVQSSRSERGLVEEEWVIVSDEEIEEARQKAPLEITEYPCVEVRIDKEIKGKVEKDSTGLVNYLTDDLNTCVPLPKEQLQTVQDKAGKKCEALAVGRSSEKEGKDIPPDETQSTQKQHKPSLGIKKPVRRKLKEKQKQKEEGLQASAEKAELKKGSSEESLGEDPGLAPEPLPTVKATSPLIEETPIGSIKDKVKALQKRVEDEQKGRSKLPIRVKGKEDVPKKTTHRPHPAASPSLKSERHAPGSPSPKTERHSTLSSSAKTERHPPVSPSSKTEKHSPVSPSAKTERHSPASSSSKTEKHSPVSPSTKTERHSPVSSTKTERHPPVSPSGKTDKRPPVSPSGRTEKHPPVSPGRTEKRLPVSPSGRTDKHQPVSTAGKTEKHLPVSPSGKTEKQPPVSPTSKTERIEETMSVRELMKAFQSGQDPSKHKTGLFEHKSAKQKQPQEKGKVRVEKEKGPILTQREAQKTENQTIKRGQRLPVTGTAESKRGVRVSSIGVKKEDAAGGKEKVLSHKIPEPVQSVPEEESHRESEVPKEKMADEQGDMDLQISPDRKTSTDFSEVIKQELEDNDKYQQFRLSEETEKAQLHLDQVLTSPFNTTFPLDYMKDEFLPALSLQSGALDGSSESLKNEGVAGSPCGSLMEGTPQISSEESYKHEGLAETPETSPESLSFSPKKSEEQTGETKESTKTETTTEIRSEKEHPTTKDITGGSEERGATVTEDSETSTESFQKEATLGSPKDTSPKRQDDCTGSCSVALAKETPTGLTEEAACDEGQRTFGSSAHKTQTDSEVQESTATSDETKALPLPEASVKTDTGTESKPQGVIRSPQGLELALPSRDSEVLSAVADDSLAVSHKDSLEASPVLEDNSSHKTPDSLEPSPLKESPCRDSLESSPVEPKMKAGIFPSHFPLPAAVAKTELLTEVASVRSRLLRDPDGSAEDDSLEQTSLMESSGKSPLSPDTPSSEEVSYEVTPKTTDVSTPKPAVIHECAEEDDSENGEKKRFTPEEEMFKMVTKIKMFDELEQEAKQKRDYKKEPKQEESSSSSDPDADCSVDVDEPKHTGSGEDESGVPVLVTSESRKVSSSSESEPELAQLKKGADSGLLPEPVIRVQPPSPLPSSMDSNSSPEEVQFQPVVSKQYTFKMNEDTQEEPGKSEEEKDSESHLAEDRHAVSTEAEDRSYDKLNRDTDQPKICDGHGCEAMSPSSSAAPVSSGLQSPTGDDVDEQPVIYKESLALQGTHEKDTEGEELDVSRAESPQADCPSESFSSSSSLPHCLVSEGKELDEDISATSSIQKTEVTKTDETFENLPKDCPSQDSSITTQTDRFSMDVPVSDLAENDEIYDPQITSPYENVPSQSFFSSEESKTQTDANHTTSFHSSEVYSVTITSPVEDVVVASSSSGTVLSKESNFEGQDIKMESQQESTLWEMQSDSVSSSFEPTMSATTTVVGEQISKVIITKTDVDSDSWSEIREDDEAFEARVKEEEQKIFGLMVDRQSQGTTPDTTPARTPTEEGTPTSEQNPFLFQEGKLFEMTRSGAIDMTKRSYADESFHFFQIGQESREETLSEDVKEGATGADPLPLETSAESLALSESKETVDDEADLLPDDVSEEVEEIPASDAQLNSQMGISASTETPTKEAVSVGTKDLPTVQTGDIPPLSGVKQISCPDSSEPAVQVQLDFSTLTRSVYSDRGDDSPDSSPEEQKSVIEIPTAPMENVPFTESKSKIPVRTMPTSTPAPPSAEYESSVSEDFLSSVDEENKADEAKPKSKLPVKVPLQRVEQQLSDLDTSVQKTVAPQGQDMASIAPDNRSKSESDASSLDSKTKCPVKTRSYTETETESRERAEELELESEEGATRPKILTSRLPVKSRSTTSSCRGGTSPTKESKEHFFDLYRNSIEFFEEISDEASKLVDRLTQSEREQEIVSDDESSSALEVSVIENLPPVETEHSVPEDIFDTRPIWDESIETLIERIPDENGHDHAEDPQDEQERIEERLAYIADHLGFSWTELARELDFTEEQIHQIRIENPNSLQDQSHALLKYWLERDGKHATDTNLVECLTKINRMDIVHLMETNTEPLQERISHSYAEIEQTITLDHSEGFSVLQEELCTAQHKQKEEQAVSKESETCDHPPIVSEEDISVGYSTFQDGVPKTEGDSSATALFPQTHKEQVQQDFSGKMQDLPEESSLEYQQEYFVTTPGTETSETQKAMIVPSSPSKTPEEVSTPAEEEKLYLQTPTSSERGGSPIIQEPEEPSEHREESSPRKTSLVIVESADNQPETCERLDEDAAFEKELTEELGELEASSDEEAMVTTRVVRRRVIIQGDDMPEIPPETVTEEEYIDEHGHTVVKKDNNE

SEQ ID NO: 26131 - protein, 1915 aa, Homo sapiens
MMNEDAAQKSDSGEKFNGSSQRRKRPKKSDSNASFLRAARAGNLDKVVEYLKGGIDINTCNQNGLNALHLAAKEGHVGLVQELLGRGSSVDSATKKGNTALHIASLAGQAEVVKVLVKEGANINAQSQNGFTPLYMAAQENHIDVVKYLLENGANQSTATEDGFTPLAVALQQGHNQAVAILLENDTKGKVRLPALHIAARKDDTKSAALLLQNDHNADVQSKMMVNRTTESGFTPLHIAAHYGNVNVATLLLNRGAAVDFTARNGITPLHVASKRGNTNMVKLLLDRGGQIDAKTRDGLTPLHCAARSGHDQVVELLLERGAPLLARTKNGLSPLHMAAQGDHVECVKHLLQHKAPVDDVTLDYLTALHVAAHCGHYRVTKLLLDKRANPNARALNGFTPLHIACKKNRIKVMELLVKYGASIQAITESGLTPIHVAAFMGHLNIVLLLLQNGASPDVTNIRGETALHMAARAGQVEVVRCLLRNGALVDARAREEQTPLHIASRLGKTEIVQLLLQHMAHPDAATTNGYTPLHISAREGQVDVASVLLEAGAAHSLATKKGFTPLHVAAKYGSLDVAKLLLQRRAAADSAGKNGLTPLHVAAHYDNQKVALLLLEKGASPHATAKNGYTPLHIAAKKNQMQIASTLLNYGAETNIVTKQGVTPLHLASQEGHTDMVTLLLDKGANIHMSTKSGLTSLHLAAQEDKVNVADILTKHGADQDAHTKLGYTPLIVACHYGNVKMVNFLLKQGANVNAKTKNGYTPLHQAAQQGHTHIINVLLQHGAKPNATTANGNTALAIAKRLGYISVVDTLKVVTEEVTTTTTTITEKHKLNVPETMTEVLDVSDEEGDDTMTGDGGEYLRPEDLKELGDDSLPSSQFLDGMNYLRYSLEGGRSDSLRSFSSDRSHTLSHASYLRDSAVMDDSVVIPSHQVSTLAKEAERNSYRLSWGTENLDNVALSSSPIHSGRASPCLERDNSSFLVSFMVDARGGAMRGCRHNGLRIIIPPRKCTAPTRVTCRLVKRHRLATMPPMVEGEGLASRLIEVGPSGAQFLGKLHLPTAPPPLNEGESLVSRILQLGPPGTKFLGPVIVEIPHFAALRGKERELVVLRSENGDSWKEHFCDYTEDELNEILNGMDEVLDSPEDLEKKRICRIITRDFPQYFAVVSRIKQDSNLIGPEGGVLSSTVVPQVQAVFPEGALTKRIRVGLQAQPMHSELVKKILGNKATFSPIVTLEPRRRKFHKPITMTIPVPKASSDVMLNGFGGDAPTLRLLCSITGGTTPAQWEDITGTTPLTFVNECVSFTTNVSARFWLIDCRQIQESVTFASQVYREIICVPYMAKFVVFAKSHDPIEARLRCFCMTDDKVDKTLEQQENFAEVARSRDVEVLEGKPIYVDCFGNLVPLTKSGQHHIFSFFAFKENRLPLFVKVRDTTQEPCGRLSFMKEPKSTRGLVHQAICNLNITLPIYTKESESDQEQEEEIDMTSEKNPQDEQERIEERLAYIADHLGFSWTELARELDFTEEQIHQIRIENPNSLQDQSHALLKYWLERDGKHATDTNLVECLTKINRMDIVHLMETNTEPLQERISHSYAEIEQTITLDHSEGFSVLQEELCTAQHKQKEEQAVSKESETCDHPPIVSEEDISVGYSTFQDGVPKTEGDSSATALFPQTHKEQVQQDFSGKMQDLPEESSLEYQQEYFVTTPGTETSETQKAMIVPSSPSKTPEEVSTPAEEEKLYLQTPTSSERGGSPIIQEPEEPSEHREESSPRKTSLVIVESADNQPETCERLDEDAAFEKELTEELGELEASSDEEAMVTTRVVRRRVIIQGDDMPEIPPETVTEEEYIDEHGHTVVKKVTRKIIRRYVSSEGTEKEEIMVQGMPQEPVNIEEGDGYSKVIKRVVLKSDTEQSEDNNE

SEQ ID NO: 26132 - protein, 219 aa, Homo sapiens
VCLTLTAKRMARKNCLVKNLEAVETLGSTSTICSDKTGTLTQNRMTVAHMWFDMTVYEADTTEEQTGKTFTKSSDTWFMLARIAGLCNRADFKANQEILPIAKRATTGDASESALLKFIEQSYSSVAEMREKNPKVAEIPFNSTNKYQVQNPQRRPSGHFLSITRGTPWRAPFHTSEIKRKCKTHISLSLLRVVPSGSFHECALSLPHHSHKDSHAQPH

SEQ ID NO: 26133 - protein, 1887 aa, Homo sapiens
MGWGSRCCCPGRLDLLCVLALLGGCLLPVCRTRVYTNHWAVKIAGGFPEANRIASKYGFINIGQIGALKDYYHFYHSRTIKRSVISSRGTHSFISMEPKVEWIQQQVVKKRTKRDYDFSRAQSTYFNDPKWPSMWYMHCSDNTHPCQSDMNIEGAWKRGYTGKNIVVTILDDGIERTHPDLMQNYDALASCDVNGNDLDPMPRYDASNENKHGTRCAGEVAAAANNSHCTVGIAFNAKIGGVRMLDGDVTDMVEAKSVSFNPQHVHIYSASWGPDDDGKTVDGPAPLTRQAFENGVRMGRRGLGSVFVWASGNGGRSKDHCSCDGYTNSIYTISISSTAESGKKPWYLEECSSTLATTYSSGESYDKKIITTDLRQRCTDNHTGTSASAPMAAGIIALALEANPFLTWRDVQHVIVRTSRAGHLNANDWKTNAAGFKVSHLYGFGLMDAEAMVMEAEKWTTVPRQHVCVESTDRQIKTIRPNSAVRSIYKASGCSDNPNRHVNYLEHVVVRITITHPRRGDLAIYLTSPSGTRSQLLANRLFDHSMEGFKNWEFMTIHCWGERAAGDWVLEVYDTPSQLRNFKTPGKLKEWSLVLYGTSVQPYSPTNEFPKVERFRYSRVEDPTDDYGTEDYAGPCDPECSEVGCDGPGPDHCNDCLHYYYKLKNNTRICVSSCPPGHYHADKKRCRKCAPNCESCFGSHGDQCMSCKYGYFLNEETNSCVTHCPDGSYQDTKKNLCRKCSENCKTCTEFHNCTECRDGLSLQGSRCSVSCEDGRYFNGQDCQPCHRFCATCAGAGADGCINCTEGYFMEDGRCVQSCSISYYFDHSSENGYKSCKKCDISCLTCNGPGFKNCTSCPSGYLLDLGMCQMGAICKDGEYVDEHGHCQTCEASCAKCQGPTQEDCTTCPMTRIFDDGRCVSNCPSWKFEFENQCHPCHHTCQRCQGSGPTHCTSCGADNYGREHFLYQGECGDSCPEGHYATEGNTCLPCPDNCELCHSVHVCTRCMKGYFIAPTNHTCQKLECGQGEVQDPDYEECVPCEEGCLGCSLDDPGTCTSCAMGYYRFDHHCYKTCPEKTYSEEVECKACDSNCGSCDQNGCYWCEEGFFLLGGSCVRKCGPGFYGDQEMGECESCHRACETCTGPGHDECSSCQEGLQLLRGMCVHATKTQEEGKFWNEAVSTANLSVVKSLLQERRRWKVQIKRDILRKLQPCHSSCKTCNGSATLCTSCPKGAYLLAQACVSSCPQGTWPSVRSGSCENCTEACAICSGADLCKKCQMQPGHPLFLHEGRCYSKCPEGSYAEDGICERCSSPCRTCEGNATNCHSCEGGHVLHHGVCQENCPERHVAVKGVCKHCPEMCQDCIHEKTCKECTPEFFLHDDMCHQSCPRGFYADSRHCVPCHKDCLECSGPKADDCELCLESSWVLYDGLCLEECPAGTYYEKETKECRDCHKSCLTCSSSGTCTTCQKGLIMNPRGSCMANEKCSPSEYWDEDAPGCKPCHVKCFHCMGPAEDQCQTCPMNSLLLNTTCVKDCPEGYYADEDSNRCAHCHSSCRTCEGRHSRQCHSCRPGWFQLGKECLLQCREGYYADNSTGRCERCNRSCKGCQGPRPTDCLSCDRFFFLLRSKGECHRSCPDHYYVEQSTQTCERCHPTCDQCKGKGALNCLSCVWSYHLMGGICTSDCLVGEYRVGEGEKFNCEKCHESCMECKGPGAKNCTLCPANLVLHMDDSHCLHCCNTSDPPSAQECCDCQDTTDECILRTSKVRPATEHFKTALFITSSMMLVLLLGAAVVVWKKSRGRVQPAAKAGYEKLADPNKSYSSYKSSYRESTSFEEDQVIEYRDRDYDEDDDDDIVYMGQDGTVYRKFKYGLLDDDDIDELEYDDESYSYYQ

SEQ ID NO: 26134 - protein, 656 aa, Homo sapiens
MLGEEKKYVNRFWKEIHVGDFVRLRCNEIFPADILLLSSSDPDGLCHIETANLDGETNLKRRQVVRGFSELVSEFNPLTFTSVIECEKPNNDLSRFRGCIIHDNGKKAGLYKENLLLRGCTLRNTDAVVGIVIYAGHETKALLNNSGPRYKRSKLERQMNCDVLWCVLLLVCMSLFSAVGHGLWIWRYQEKKSLFYVPKSDGSSLSPVTAAVYSFLTMIIVLQVLIPISLYVSIEIVKACQVYFINQDMQLYDEETDSQLQCRALNITEDLGQIQYIFSDKTGTLTENKMVFRRCTVSGVEYSHDANAQRLARYQEADSEEEEVVPRGGSVSQRGSIGSHQSVRVVHRTQSTKSHRRTGSRAEAKRASMLSKHTAFSSPMEKDITPDPKLLEKVSECDKSLAVARHQEHLLAHLSPELSDVFDFFIALTICNTVVVTSPDQPRTKVRVRFELKSPVKTIEDFLRRFTPSCLTSGCSSIGSLAANKSSHKLGSSFPSTPSSDGMLLRLEERLGQPTSAIASNGYSSQADNWASELAQEQESERELRYEAESPDEAALVYAARAYNCVLVERLHDQVSVELPHLGRLTFELLHTLGFDSVRKRMSVVIRHPLTDEINVYTKGADSVVMDLLQPCSSEMPIGELHGFFRSVFACLKGLD

SEQ ID NO: 26135 - protein, 417 aa, Homo sapiens
LEESRQKCPPCWYKFANMCLIWDCCKPWLKVKHLVNLVVMDPFVDLAITICIVLNTLFMAMEHYPMTEQFSSVLSVGNLVFTGIFTAEMFLKIIAMDPYYYFQEGWNIFDGFIVSLSLMELGLANVEGLSVLRSFRLLRVFKLAKSWPTLNMLIKIIGNSVGALGNLTLVLAIIVFIFAVVGMQLFGKSYKECVCKISNDCELPRWHMHDFFHSFLIVFRVLCGEWIETMWDCMEVAGQTMCLTVFMMVMVIGNLVVLNLFLALLLSSFSSDNLAATDDDNEMNNLQIAVGRMQKGIDFVKRKIREFIQKAFVRKQKALDEIKPLEDLNNKKDSCISNHTTIEIGKDLNYLKDGNGTTSGIGSSVEKYVVDESDYMSFINNPSLTVTVPIAVGESDFENLNTEEFSSESDMEESKEE

SEQ ID NO: 26136 - protein, 748 aa, Homo sapiens
MSQWYELQQLDSKFLEQVHQLYDDSFPMEIRQYLAQWLEKQDWEHAANDVSFATIRFHDLLSQLDDQYSRFSLENNFLLQHNIRKSKRNLQDNFQEDPIQMSMIIYSCLKEERKILENAQRFNQAQSGNIQSTVMLDKQKELDSKVRNVKDKVMCIEHEIKSLEDLQDEYDFKCKTLQNREHETNGVAKSDQKQEQLLLKKMYLMLDNKRKEVVHKIIELLNVTELTQNALINDELVEWKRRQQSACIGGPPNACLDQLQNWFTIVAESLQQVRQQLKKLEELEQKYTYEHDPITKNKQVLWDRTFSLFQQLIQSSFVVERQPCMPTHPQRPLVLKTGVQFTVKLRLLVKLQELNYNLKVKVLFDKDVNERNTVKGKFNILGTHTKVMNMEESTNGSLAAEFRHLQLKEQKNAGTRTNEGPLIVTEELHSLSFETQLCQPGLVIDLETTSLPVVVISNVSQLPSGWASILWYNMLVAEPRNLSFFLTPPCARWAQLSEVLSWQFSSVTKRGLNVDQLNMLGEKLLGPNASPDGLIPWTRFCKENINDKNFPFWLWIESILELIKKHLLPLWNDGCIMGFISKERERALLKDQQPGTFLLRFSESSREGAITFTWVERSQNGGEPDFHAVEPYTKKELSAVTFPDIIRNYKVMAAENIPENPLKYLYPNIDKDHAFGKYYSRPKEAPEPMELDGPKGTGYIKTELISVSEVHPSRLQTTDNLLPMSPEEFDEVSRIVGSVEFDSMMNTV

SEQ ID NO: 26137 - protein, 900 aa, Homo sapiens
MNYPGRGSPRSPEHNGRGGGGGAWELGSDARPAFGGGVCCFEHLPGGDPDDGDVPLALLRGEPGLHLAPGTDDHNHHLALDPCLSDENYDFSSAESGSSLRYYSEGESGGGGSSLSLHPPQQPPLVPTNSGGGGATGGSPGERKRTRLGGPAARHRYEVVTELGPEEVRWFYKEDKKTWKPFIGYDSLRIELAFRTLLQTTGARPQGGDRDGDHVCSPTGPASSSGEDDDEDRACGFCQSTTGHEPEMVELVNIEPVCVRGGLYEVDVTQGECYPVYWNQADKIPVMRGQWFIDGTWQPLEEEESNLIEQEHLNCFRGQQMQENFDIEVSKSIDGKDAVHSFKLSRNHVDWHSVDEVYLYSDATTSKIARTVTQKLGFSKASSSGTRLHRGYVEEATLEDKPSQTTHIVFVVHGIGQKMDQGRIIKNTAMMREAARKIEERHFSNHATHVEFLPVEWRSKLTLDGDTVDSITPDKVRGLRDMLNSSAMDIMYYTSPLYRDELVKGLQQELNRLYSLFCSRNPDFEEKGGKVSIVSHSLGCVITYDIMTGWNPVRLYEQLLQKEEELPDERWMSYEERHLLDELYITKRRLKEIEERLHGLKASSMTQTPALKFKVENFFCMGSPLAVFLALRGIRPGNTGSQDHILPREICNRLLNIFHPTDPVAYRLEPLILKHYSNISPVQIHWYNTSNPLPYEHMKPSFLNPAKEPTSVSENEGISTIPSPVTSPVLSRRHYGESITNIGKASILGAASIGKGLGGMLFSRFGRSSTTQSSETSKDSMEDEKKPVASPSATTVGTQTLPHSSSGFLDSAYFRLQESFFNLPQLLFPENVMQNKDNALVELDHRIDFELREGLVESRYWSAVTSHTAYWSSLDVALFLLTFMYKHEHDDDAKPNLDPI

SEQ ID NO: 26138 - protein, 442 aa, Homo sapiens
MSNKDRHIDSSCSSFIKTEPSSPASLTDSVNHHSPGGSSDASGSYSSTMNGHQNGLDSPPLYPSAPILGGSGPVRKLYDDCSSTIVEDPQTKCEYMLNSMPKRLCLVCGDIASGYHYGVASCEACKAFFKRTIQGNIEYSCPATNECEITKRRRKSCQACRFMKCLKVGMLKEGVRLDRVRGGRQKYKRRIDAENSPYLNPQLVQPAKKPLLWSDPADNKIVSHLLVAEPEKIYAMPDPTVPDSDIKALTTLCDLADRELVVIIGWAKHIPGFSTLSLADQMSLLQSAWMEILILGVVYRSLSFEDELVYADDYIMDEDQSKLAGLLDLNNAILQLVKKYKSMKLEKEEFVTLKAIALANSDSMHIEDVEAVQKLQDVLHEALQDYEAGQHMEDPRRAGKMLMTLPLLRQTSTKAVQHFYNIKLEGKVPMHKLFLEMLEAKV

SEQ ID NO: 26139 - protein, 1889 aa, Homo sapiens
MEGSLAGSLAAPDRPQGPERLPGPAPRENIEGGAEAAEGEGGIFRSTRYLPVTKEGPRDILDGRGGISDGQPHPGLSEALPRVTSATHRISSCCWDGGSLDFRPGSPPPHLLGHFPGTPDGRGPWEHPLVQEAGEGILSERRFEDSVIVRTMKPHAELEGSRRFLHHRGEPRLLEKHAQGRPRFDWLQDEDEQGSPQDAGLHLDLPAQPPPLAPFRRVFVPVEDTPKTLDMAVVGGREDLEDLEGLAQPSEWGLPTSASEVATQTWTVNSEASVERLQPLLPPIRTGPYLCELLEEVAEGVASPDEDEDEEPAVFPCIECSIYFKQKEHLLEHMSQHRRAPGQEPPADLAPLACGECGWAFADPTALEQHRQLHQASREKIIEEIQKLKQVPGDEGREARLQCPKCVFGTNSSRAYVQHAKLHMREPPGQTTKEPFGGSSGAGSPSPEASALLYQPYGAAVGLSACVFCGFPAPSESLLREHVRLVHAHPHWEEDGEAYEEDPASQPGTSQDAHACFPDTAVDYFGKAEPSLAPMWRENPAGYDPSLAFGPGCQQLSIRDFPLSKPLLHGTGQRPLGRLAFPSTLASTPYSLQLGRNKSTVHPQGLGERRRPWSEEEEEEEEEEDVVLTSEMDFSPENGVFSPLATPSLIPQAALELKQAFREALQAVEATQGQQQQLRGMVPIVLVAKLGPQVMAAARVPPRLQPEELGLAGAHPLDFLLLDAPLGGPLGLDTLLDGDPAMALKHEERKCPYCPDRFHNGIGLANHVRGHLNRVGVSYNVRHFISAEEVKAIERRFSFQKKKKKVANFDPGTFSLMRCDFCGAGFDTRAGLSSHARAHLRDFGITNWELTVSPINILQELLATSAAEQPPSPLGREPGGPPGSFLTSRRPRLPLTVPFPPTWAEDPGPAYGDGLGSEENAMVAMDLGSPSLPKKSLPVPGALEQVASRLSSKVAAEVPHGSKQELQDLKAQSLTTCEVCGACFETRKGLSSHARSHLRQLGVAESESSGAPIDLLYELVKQKGLPDAHLGLPPGLAKKSSSLKEVVAGAPRPGLLSLAKPLDAPAVNKAIKSPPGFSAKGLGHPPSSPLLKKTPLALAGSPTPKNPEDKSPQLSLSPRPASPKAQWPQSEDEGPLNLTLDSDGGRELDCQLCGAWFETRKGLSSHARAHLRHLGVSDPDAKGSPIDVLHGLIRRDGVQIRLPPRRGALAHPGRPPPTSAALSLLPPPPPAKKAKLKAAGMASPWGKQDLSAAAAAGIFWASDVEPSPLNLSSGPEPARDIRCEFCGEFFENRKGLSSHARSHLRQMGVTEWYVNGSPIDTLREILKRRTQSRPGGPPNPPGPSPKALAKMMGGAGPGSSLEARSPSDLHISPLAKKLPPPPGSPLGHSPTASPPPTARKMFPGLAAPSLPKKLKPEQIRVEIKREMLPGALHGELHPSEGPWGAPREDMTPLNLSSRAEPVRDIRCEFCGEFFENRKGLSSHARSHLRQMGVTEWSVNGSPIDTLREILKKKSKPCLIKKEPPAGDLAPALAEDGPPTVAPGPVQSPLPLSPLAGRPGKPGAGPAQVPRELSLTPITGAKPSATGYLGSVAAKRPLQEDRLLPAEVKAKTYIQTELPFKAKTLHEKTSHSSTEACCELCGLYFENRKALASHARAHLRQFGVTEWCVNGSPIETLSEWIKHRPQKVGAYRSYIQGGRPFTKKFRSAGHGRDSDKRPSLGLAPGGLAVVGRSAGGEPGPEAGRAADGGERPLAASPPGTVKAEEHQRQNINKFERRQARPPDASAARGGEDTNDLQQKLEEVRQPPPRVRPVPSLVPRPPQTSLVKFVGNIYTLKCRFCEVEFQGPLSIQEEWVRHLQRHILEMNFSKADPPPEESQAPQAQTAAAEAP

SEQ ID NO: 26140 - protein, 358 aa, Homo sapiens
MKTDLNLLLECLKYQMDNAFSQKEALVTIHSICQQNSNASVYFREIGGLMFVKNLAKSSEHSMVKEAALYTLGAIAEKNVYCQQTLCTSELFEDLTWFLSNDSNINLKRMSVYVILVLVSNNRTGQTLVRETGCITVLSRLFRTVISKHELDLSDKNVFQSYQLWSSVCSTLCVCVNNPQNDENQMFCCSLFPHANEWLKNCTTPEIIRPICSFIGLTLANNTYVQKYFVSVGGLDVLSQVLMQLESDSHETLSSAKLAVVVTKTVDACIADNPTFGIVLSKYHIVSKLLALLLHESLDSGEKFSIMLTLGHCTEDCEENQYDLFKNNGLPLMIQALTESQNEELNKAATFVLHNCKK

SEQ ID NO: 26141 - protein, 481 aa, Homo sapiens
MKSDCMQTTICQERKKDPIEMFHSGQLVKVCAPMVRYSKLAFRTLVRKYSCDLCYTPMIVAADFVKSIKARDSEFTTNQGDCPLIVQFAANDARLLSDAARIVCPYANGIDINCGCPQRWAMAEGYGACLINKPELVQDMVKQVRNQVETPGFSVSIKIRIHDDLKRTVDLCQKAEATGVSWITVHGRTAEERHQPVHYDSIKIIKENMSIPVIANGDIRSLKEAENVWRITGTDGVKKKMTLQWAAVATFLYAEIGLILIFCLPFIPPQRWQKIFSFNVWGKIATFWNKAFLTIIILLIVLFLDAVREVRKYSSVHTIEKSSTSRPDAYEHTQMKLFRSQRNLYISGFSLFFWLVLRRLVTLITQLAKELSNKGVLKTQAENTNKAAKKFMEENEKLKRILKSHGKDEECVLEAENKKLVEDQEKLKTELRKTSDALSKAQNDVMEMKMQSERLSKEYDQLLKEHSELQDRLERGNKKRL

SEQ ID NO: 26142 - protein, 204 aa, Homo sapiens
MGTVSSRRSWWPLPLLLLLLLLLGPAGARAQEDEDGDYEELVLALRSEEDGLAEAPEHGTTATFHRCAKDPWRLPGTYVVVLKEETHLSQSERTARRLQAQAARRGYLTKILHVFHGLLPGFLVKMSGDLLELALKLPHVDYIEEDSSVFAQSIPWNLERITPPRYRADEYQPPGVPGPGHFRWRRTLLAATCLKSSFGLAESF

SEQ ID NO: 26143 - protein, 915 aa, Homo sapiens
MDDSEVESTASILASVKEQEAQFEKLTRALEEERRHVSAQLERVRVSPQDANPLMANGTLTRRHQDHSHLLYSTIPRMQEPGQIVETYTEEDPEGAMSVVSVETSDDGTTRRTETTVKKVVKTVTTRTVQPVAMGPDGLPVDASSVSNNYIQTLGRDFRKNGNGGPGPYVGQAGTATLPRNFHYPPDGYSRHYEDGYPGGSDNYGSLSRVTRIEERYRPSMEGYRAPSRQDVYGPQPQVRVGGSSVDLHRFHPEPYGLEDDQRSMGYDDLDYGMMSDYGTARRTGTPSDPRRRLRSYEDMIGEEVPSDQYYWAPLAQHERGSLASLDSLRKGGPPPPNWRQPELPEVIAMLGFRLDAVKSNAAAYLQHLCYRNDKVKTDVRKLKGIPVLVGLLDHPKKEVHLGACGALKNISFGRDQDNKIAIKNCDGVPALVRLLRKARDMDLTEVITGTLWNLSSHDSIKMEIVDHALHALTDEVIIPHSGWEREPNEDCKPRHIEWESVLTNTAGCLRNVSSERSEARRKLRECDGLVDALIFIVQAEIGQKDSDSKLVENCVCLLRNLSYQVHREIPQAERYQEAAPNVANNTGPHAASCFGAKKGKDEWFSRGKKPIEDPANDTVDFPKRTSPARGYELLFQPEVVRIYISLLKESKTPAILEASAGAIQNLCAGRWTYGRYIRSALRQEKALSAIADLLTNEHERVVKAASGALRNLAVDARNKELIGKHAIPNLVKNLPGGQQNSSWNFSEDTVISILNTINEVIAENLEAAKKLRETQGIEKLVLINKSGNRSEKEVRAAALVLQTIWGYKELRKPLEKEGWKKSDFQVNLNNASRSQSSHSYDDSTLPLIDRNQKSDKKPDREEIQMSNMGSNTKSLDNNYSTPNERGDHNRTLDRSGDLGDMEPLKGTTPLMQKI

SEQ ID NO: 26144 - protein, 231 aa, Homo sapiens
MLRLSYPLELQVSAGCEVHPGNASNNFFHVAFQGKDILSFQGTSWEPTQEAPLWVNLAIQVLNQDKWTRETVQWLLNGTCPQFVSGLLESGKSELKKQVKPKAWLSRGPSPGPGRLLLVCHVSGFYPKPVWVKWMRGEQEQQGTQPGDILPNADETWYLRATLDVVAGEAAGLSCRVKHSSLEGQDIVLYWGGSYTSMGLIALAVLACLLFLLIVGFTSRFKRQTSYQGVL

SEQ ID NO: 26145 - protein, 193 aa, Homo sapiens
FAKGTLANSASKDYTLHLWNLLSGQEKFTIWDGGSKNPAEPQIWNLHVDEAHKVVYSASGSKINAWNLETAEPVFHILGDASDPWMCMAVLASQATLLTVSRDGVVSLWSSATGKLQGKQHMSSIKEETPTCAVSVQKQGKLVTGFSNGSISLALEDRCGYSWRTRGAFADSWPWIWNMKTWWRRLFLVLRTT

SEQ ID NO: 26146 - protein, 3256 aa, Homo sapiens
MVKRKSSEGQEQDGGRGIPLPIQTFLWRQTSAFLRPKLGKQYEASCVSFERVLVENKLHGLSPALSEAIQSISRWELVQAALPHVLHCTATLLSNRNKLGHQDKLGVAETKLLHTLHWMLLEAPQDCNNERFGGTDRGSSWGGSSSAFIHQVENQGSPGQPCQSSSNDEEENNRRKIFQNSMATVELFVFLFAPLVHRIKESDLTFRLASGLVIWQPMWEHRQPGVSGFTALVKPIRNIITAKRSSPINSQSRTCESPNQDARHLEGLQVVCETFQSDSISPKATISGCHRGNSFDGSLSSQTSQERGPSHSRASLVIPPCQRSRYATYFDVAVLRCLLQPHWSEEGTQWSLMYYLQRLRHMLEEKPEKPPEPDIPLLPRPRSSSMVAAAPSLVNTHKTQDLTMKCNEEEKSLSSEAFSKVSLTNLRRSAVPDLSSDLGMNIFKKFKSRKEDRERKGSIPFHHTGKRRPRRMGVPFLLHEDHLDVSPTRSTFSFGSFSGLGEDRRGIEKGGWQTTILGKLTRRGSSDAATEMESLSARHSHSHHTLVSDLPDPSNSHGENTVKEVRSQISTITVATFNTTLASFNVGYADFFNEHMRKLCNQVPIPEMPHEPLACANLPRSLTDSCINYSYLEDTEHIDGTNNFVHKNGMLDLSVVLKAVYLVLNHDISSRICDVALNIVECLLQLGVVPCVEKNRKKSENKENETLEKRPSEGAFQFKGVSGSSTCGFGGPAVSGAGDGGGEEGGGGDGGGGGGDGGGGGGGGGGPYEKNDKNQEKDESTPVSNHRLALTMLIKIVKSLGCAYGCGEGHRGLSGDRLRHQVFRENAQNCLTKLYKLDKMQFRQTMRDYVNKDSLNNVVDFLHALLGFCMEPVTDNKAGFGNNFTTVDNKSTAQNVEGIIVSAMFKSLITRCASTTHELHSPENLGLYCDIRQLVQFIKEAHGNVFRRVALSALLDSAEKLAPGKKVEENEQESKPAGSKRSEAGSIVDKGQVSSAPEECRSFMSGRPSQTPEHDEQMQGANLGRKDFWRKMFKSQSAASDTSSQSEQDTSECTTAHSGTTSDRRARSRSRRISLRKKLKLPIGNWLKRSSLSGLADGVEDLLDISSVDRLSFIRQSSKVKFTSAVKLSEGGPGSGMENGRDEEENFFKRLGCHSFDDHLSPNQDGGKSKNVVNLGAIRQGMKRFQFLLNCCEPGTIPDASILAAALDLEAPVVARAALFLECARFVHRCNRGNWPEWMKGHHVNITKKGLSRGRSPIVGNKRNQKLQWNAAKLFYQWGDAIGVRLNELCHGESESPANLLGLIYDEETKRRLRKEDEEEDFLDDSTVNPSKCGCPFALKMAACQLLLEITTFLRETFSCLPRPRTEPLVDLESCRLRLDPELDRHRYERKISFAGVLDENEDSKDSLHSSSHTLKSDAGVEEKKEGSPWSASEPSIEPEGMSNAGAEENYHRNMSWLHVMILLCNQQSFICTHVDYCHPHCYLHHSRSCARLVRAIKLLYGDSVDSLRESSNISSVALRGKKQKECSDKSCLRTPSLKKRVSDANLEGKKDSGMLKYIRLQVMSLSPAPLSLLIKAAPILTEEMYGDIQPAAWELLLSMDEHMAGAAAAMFLLCAVKVPEAVSDMLMSEFHHPETVQRLNAVLKFHTLWRFRYQVWPRMEEGAQQIFKIPPPSINFTLPSPVLGMPSVPMFDPPWVPQCSGSVQDPINEDQSKSFSARAVSRSHQRAEHILKNLQQEEEKKRLGREASLITAIPITQEACYEPTCTPNSEPEEEVEEVTNLASRRLSVSPSCTSSTSHRNYSFRRGSVWSVRSAVSAEDEEHTTEHTPNHHVPQPPQAVFPACICAAVLPIVHLMEDGEVREDGVAVSAVAQQVLWNCLIEDPSTVLRHFLEKLTISNRQDELMYMLRKLLLNIGDFPAQTSHILFNYLVGLIMYFVRTPCEWGMDAISATLTFLWEVVGYVEGLFFKDLKQTMKKEQCEVKLLVTASMPGTKTLVVHGQNECDIPTQLPVHEDTQFEALLKECLEFFNIPESQSTHYFLMDKRWNLIHYNKTYVRDIYPFRRSVSPQLNLVHMHPEKGQELIQKQVFTRKLEEVGRVLFLISLTQKIPTAHKQSHVSMLQEDLLRLPSFPRSAIDAEFSLFSDPQAGKELFGLDTLQKSLWIQLLEEMFLGMPSEFPWGDEIMLFLNVFNGALILHPEDSALLRQYAATVINTAVHFNHLFSLSGYQWILPTMLQVYSDYESNPQLRQAIEFACHQFYILHRKPFVLQLFASVAPLLEFPDAANNGPSKGVSAQCLFDLLQSLEGETTDILDILELVKAEKPLKSLDFCYGNEDLTFSISEAIKLCVTVVAYAPESFRSLQMLMVLEALVPCYLQKLKRQTSQVETVPAAREEIAATAALATSLQALLYSVEVLTRPMTAPQMSRCDQGHKGTTTANHTMSSGVNTRYQEQGAKLHFIRENLHLLEEGQGIPREELDERIAREEFRRPRESLLNICTEFYKHCGPRLKILQNLAGEPRVIALELLDVKSHMRLAEIAHSLLKLAPYDTQTMESRGLRRYIMEMLPITDWTAEAVRPALILILKRLDRMFNKIHKMPTLRRQVEWEPASNLIEGVCLTLQRQPIISFLPHLRSLINVCVNLVMGVVGPSSVADGLPLLHLSPYLSPPLPFSTAVVRLVALQIQALKEDFPLSHVISPFTNQERREGMLLNLLIPFVLTVGSGSKDSPWLEQPEVQLLLQTVINVLLPPRIISTSRSKNFMLESSPAHCSTPGDAGKDLRREGLAESTSQAAYLALKVILVCFERQLGSQWYWLSLQVKEMALRKVGGLALWDFLDFIVRTRIPIFVLLRPFIQCKLLAQPAENHEELSARQHIADQLERRFIPRPLCKSSLIAEFNSELKILKEAVHSGSAYQGKTSISTVGTSTSAYRLSLATMSRSNTGTGTVWEQDSEPSQQASQDTLSRTDEEDEENDSISMPSVVSEQEAYLLSAIGRRRFSSHVSSMSVPQAEVGMLPSQSEPNVLDDSQGLAAEGSLSRVASIQSEPGQQNLLVQQPLGRKRGLRQLRRPLLSRQKTQTEPRNRQGARLSTTRRSIQPKTKPSADQKRSVTFIEAQPEPAAAPTDALPATGQLQGCSPAPSRKPEAMDEPVLTSSPAIVVADLHSVSPKQSENFPTEEGEKEEDTEAQGATAHSPLSAQLSDPDDFTGLETSSLLQHGDTVLHISEENGMENPLLSSQFTFTPTELGKTDAVLDESHV

SEQ ID NO: 26147 - protein, 588 aa, Homo sapiens
MKSDCMQTTICQERKKDPIEMFHSGQLVKVCAPMVRYSKLAFRTLVRKYSCDLCYTPMIVAADFVKSIKARDSEFTTNQGDCPLIVQFAANDARLLSDAARIVCPYANGIDINCGCPQRWAMAEGYGACLINKPELVQDMVKQVRNQVETPGFSVSIKIRIHDDLKRTVDLCQKAEATGVSWITVHGRTAEERHQPVHYDSIKIIKENMSIPVIANGDIRSLKEAENVWRITGTDGVKKKMTLQWAAVATFLYAEIGLILIFCLPFIPPQRWQKIFSFNVWGKIATFWNKAFLTIIILLIVLFLDAVREVRKYSSVHTIEKSSTSRPDAYEHTQMKLFRSQRNLYISGFSLFFWLVLRRLVTLITQLAKELSNKGVLKTQAENTNKAAKKFMEENEKLKRILKSHGKDEECVLEAENKKLVEDQEKLKTELRKTSDALSKAQNDVMEMKMQSERLSKEYDQLLKEHSELQHSSFGEFLSKRSHKNGSIGKQTGSRKGSFRKRQQEKTVNFIKDTCNILCQNDNFVMLASRKFKFRKMHYDRFVIFLMPHIGCIVMALSKYLMMFQIYCKVCIPALKKNISMLNTIFTY

SEQ ID NO: 26148 - protein, 495 aa, Homo sapiens
MEREPAGTEEPGPPGRRRRREGRTRTVRSNLLPPPGAEDPAAGAAKGERRRRRGCAQHLADNRLKTTKYTLLSFLPKNLFEQFHRPANVYFVFIALLNFVPAVNAFQPGLALAPVLFILAITAFRDLWEDYSRHRSDHKINHLGCLVFSREEKKYVNRFWKEIHVGDFVRLRCNEIFPADILLLSSSDPDGLCHIETANLDGETNLKRRQVVRGFSELVSEFNPLTFTSVIECEKPNNDLSRFRGCIIHDNGKKAGLYKENLLLRGCTLRNTDAVVGIVIYAGHETKALLNNSGPRYKRSKLERQMNCDVLWCVLLLVCMSLFSAVGHGLWIWRYQEKKSLFYVPKSDGSSLSPVTAAVYSFLTMIIVLQVLIPISLYVSIEIVKACQVYFINQDMQLYDEETDSQLQCRALNITEDLGQIQYIFSDKTGTLTENKMVFRRCTVSGVEYSHDANEGLLRDAQWSTRLAGSISISFSGLLTGPCCFDSAPCLCLKF

SEQ ID NO: 26149 - protein, 70 aa, Homo sapiens
MLPPMALPSVSWMLLSCLMLLSQVQGEEPQRELPSARIRCPKGSKAYGSHCYALFLSPKSWTDADLACQK

SEQ ID NO: 26150 - protein, 902 aa, Homo sapiens
MDSNTAPLGPSCPQPPPAPQPQARSRLNATASLEQERSERPRAPGPQAGPGPGVRDAAAPAEPQAQHTRSRERADGTGPTKGDMEIPFEEVLERAKAGDPKAQTEVGKHYLQLAGDTDEELNSCTAVDWLVLAAKQGRREAVKLLRRCLADRRGITSENEREVRQLSSETDLERAVRKAALVMYWKLNPKKKKQVAVAELLENVGQVNEHDGGAQPGPVPKSLQKQRRMLERLVSSELWGAHAVFSHASAKNYIALDDFVEITKKYAKGVIPSSLFLQDDEDDDELAGKSPEDLPLRLKVVKYPLHAIMEIKEYLIDMASRAGMHWLSTIIPTHHINALIFFFIVSNLTIDFFAFFIPLVIFYLSFISMVICTLKVFQDSKAWENFRTLTDLLLRFEPNLDVEQAEVNFGWNHLEPYAHFLLSVFFVIFSFPIASKDCIPCSELAVITGFFTVTSYLSLSTHAEPYTRRALATEVTAGLLSLLPSMPLNWPYLKVLGQTFITVPVGHLVVLNVSVPCLLYVYLLYLFFRMAQLRNFKGTYCYLVPYLVCFMWCELSVVILLESTGLGLLRASIGYFLFLFALPILVAGLALVGVLQFARWFTSLELTKIAVTVAVCSVPLLLRWWTKASFSVVGMVKSLTRSSMVKLILVWLTAIVLFCWFYVYRSEGMKVYNSTLTWQQYGALCGPRAWKETNMARTQILCSHLEGHRVTWTGRFKYVRVTDIDNSAESAINMLPFFIGDWMRCLYGEAYPACSPGNTSTAEEELCRLKLLAKHPCHIKKFDRYKFEITVGMPFSSGADGSRSREEDDVTKDIVLRASSEFKSVLLSLRQGSLIEFSTILEGRLGSKWPVFELKAISCLNCMAQLSPTRRHVKIEHDWRSTVHGAVKFAFDFFFFPFLSAA

SEQ ID NO: 26151 - protein, 273 aa, Homo sapiens
MSQWYELQQLDSKFLEQVHQLYDDSFPMEIRQYLAQWLEKQDWEHAANDVSFATIRFHDLLSQLDDQYSRFSLENNFLLQHNIRKSKRNLQDNFQEDPIQMSMIIYSCLKEERKILENAQRFNQAQSGNIQSTVMLDKQKELDSKVRNVKDKVMCIEHEIKSLEDLQDEYDFKCKTLQNREHETNGVAKSDQKQEQLLLKKMYLMLDNKRKEVVHKIIELLNVTELTQNALINDELVEWKRRQQSACIGGPPNACLDQLQNCCGESAASSAAA

SEQ ID NO: 26152 - protein, 183 aa, Homo sapiens
MKSDCMQTTICQERKKDPIEMFHSGQLVKVCAPMVRYSKWAMAEGYGACLINKPELVQDMVKQVRNQVETPGFSVSIKIRIHDDLKRTVDLCQKAEATGVSWITVHGRTAEERHQPVHYDSIKIIKENMSIPVIANGDIRSLKEAENVWRITGTDDGRRFFHLMSGVKLQLFGTRLSLPLSSY

SEQ ID NO: 26153 - protein, 614 aa, Homo sapiens
RLPSPGSCGLLTLALCSLALSLLAHFRTAELQARVLRLEAERGEQQMETAILGRVNQLLDEKWKLHSRRRREAPKTSPGCNCPPGPPGPTGRPGLPGVKGQPGEKGSPGDAGLSIIGPRGPPGQPGTRGFPGFPGPIGLDGKPGHPGPKGDMGLTGPPGQPGPQGQKGEKGQCGEYPHRLLPLLNSVRLAPPPVIKRRTFQGEQSQASIQGPPGPPGPPGPSGPLGHPGLPGPMGPPGLPGPPGPKGDPGIQGYHGRKGERGMPGMPGKHGAKGAPGIAVAGMKGEPGIPGTKGEKGAEGSPGLPGLLGQKGEKGDAGNSIGGGRGEPGPPGLPGPPGPKGEAGVDGQVGPPGQPGDKGERGAAGEQGPDGPKGSKGEPGKGEMVDYNGNINEALQEIRTLALMGPPGLPGQIGPPGAPGIPGQKGEIGLPGPPGHDGEKGPRGKPGDMGPPGPQGPPGKDGPPGVKGENGHPGSPGEKGEKGETGQAGSPGLQGVPGPKGEAGLDGAKGEKGFQGEKGDRGPLGLPGTPGPIGVPGPAGPKGERGSKGDPGMTGPTGAAGLPGLHGPPGDKGNRGHRGFKGEKGEPGLPGLDGLDAPCPLGEDGLPVQGCWNK

SEQ ID NO: 26154 - protein, 658 aa, Homo sapiens
MVAERTHKAAATGARGPGELGAPGTVALVAARAERGARLPSPGSCGLLTLALCSLALSLLAHFRTAELQARVLRLEAERGEQQMETAILGRVNQLLDEKWKLHSRRRREAPKTSPGCNCPPGPPGPTGRPGLPGVKGQPGEKGQPGTRGFPGFPGPIGLDGKPGHPGPKGDMGLTGPPGQPGPQGQKGEKGQCGEYPHRLLPLLNSVRLAPPPVIKRRTFQGEQSQASIQGPPGPPGPPGPSGPLGHPGLPGPMGPPGLPGPPGPKGDPGIQGYHGRKGERGMPGMPGKHGAKGAPGIAVAGMKGEPGIPGTKGDPGAEGKPGPPGLLGKRGQRGEKGAEGSPGLPGLLGQKGEKGDAGNSIGGGRGEPGPPGLPGPPGPKGEAGVDGQVGPPGQPGDKGERGAAGEQGPDGPKGSKGEPGKGEMVDYNGNINEALQEIRTLALMGPPGLPGQIGPPGAPGIPGQKGEIGLPGPPGHDGEKGPRGKPGDMGPPGPQGPPGKDGPPGVKGENGHPGSPGEKGEKGETGQAGSPGLQGVPGPKGEAGLDGAKGEKGFQGEKGDRGPLGLPGTPGPIGVPGPAGPKGERGSKGDPGMTGPTGAAGLPGLHGPPGDKGNRGERGKKGSRGPKGDKGDQGAPGLDAPCPLGEDGLPVQGCWNK

SEQ ID NO: 26155 - protein, 1884 aa, Homo sapiens
MVDKNIYIIQGEINIVVGAIKRNARWSTHTPLDEERDPLLHSFGHLKEVLNSITELSEIEPNVFLRPFLEVIRSEDTTGPITGLALTSVNKFLSYALIDPTHEGTAEGMENMADAVTHARFVGTDPASDEVVLMKILQVLRTLLLTPVGAHLTNESVCEIMQSCFRICFEMRLSELLRKSAEHTLVDMVQLLFTRLPQFKEEPKNYVGTNMKKISPCLLNKLELSSGEQTKALNQLERLKMRAGGMSDSSKWKKQKRSPRPPRHMTKVTPGSELPTPNGTTLSSNLTGGMPFIDVPTPISSASSEAASAVVSPSTDSGLEFSSQTTSKEDLTDLEQPGSPGYSTATEPGSSELGVPEQPDLQEGTHVEKSQSASVESIPEVLEECTSPADHSDSASVHDMDYVNPRGVRFTQSSQKEGTALVPYGLPCIRELFRFLISLTNPHDRHNSEVMIHMGLHLLTVALESAPVAQCQTLLGLIKDEMCRHLFQLLSIERLNLYAASLRVCFLLFESMREHLKFQMEMYIKKLMEIITVENPKMPYEMKEMALEAIVQLWRIPSFVTELYINYDCDYYCSNLFEELTKLLSKNAFPVSGQLYTTHLLSLDALLTVIDSTEAHCQAKVLNSLTQQEKKETARPSCEIVDGTREASNTERTASDGKAVGMASDIPGLHLPGGGRLPPEHGKSGCSDLEEAVDSGADKKFARKPPRFSCLLPDPRELIEIKNKKKLLITGTEQFNQKPKKGIQFLQEKGLLTIPMDNTEVAQWLRENPRLDKKMIGEFVSDRKNIDLLESFVSTFSFQGLRLDEALRLYLEAFRLPGEAPVIQRLLEAFTERWMNCNGSPFANSDACFSLAYAVIMLNTDQHNHNVRKQNAPMTLEEFRKNLKGVNGGKDFEQDILEDMYHAIKNEEIVMPEEQTGLVRENYVWNVLLHRGATPEGIFLRVPTASYDLDLFTMTWGPTIAALSYVFDKSLEETIIQKAISGFRKCAMISAHYGLSDVFDNLIISLCKFTALSSESIENLPSVFGSNPKAHIAAKTVFHLAHRHGDILREGWKNIMEAMLQLFRAQLLPKAMIEVEDFVDPNGKISLQREETPSNRGESTVLSFVSWLTLSGPEQSSVRGPSTENQEAKRVALECIKQCDPEKMITESKFLQLESLQELMKALVSVTPDEETYDEEDAAFCLEMLLRIVLENRDRVGCVWQTVRDHLYHLCVQAQDFCFLVERAVVGLLRLAIRLLRREEISAQVLLSLRILLLMKPSVLSRVSHQVAYGLHELLKTNAANIHSGDDWATLFTLLECIGSGVKPPAALQATARADAPDAGAQSDSELPSYHQNDVSLDRGYTSDSEVYTDHGRPGKIHRSATDADVVNSGWLVVGKDDVDNSKPGPSRPGPSPLINQYSLTVGLDLGPHDTKSLLKCVESLSFIVRDAAHITPDNFELCVKTLRIFVEASLNGGCKSQEKRGKSHKYDSKGNRFKKKSKEGSMLRRPRTSSQHASRGGQSDDDEDEGVPASYHTVSLQVSQDLLDLMHTLHTRAASIYSSWAEEQRHLETGGQKIEADSRTLWAHCWCPLLQGIACLCCDARRQVRMQALTYLQRALLVHDLQKLDALEWESCFNKVLFPLLTKLLENISPADVGGMEETRMRASTLLSKVFLQHLSPLLSLSTFAALWLTILDFMDKYMHAGSSDLLSEAIPESLKNMLLVMDTAEIFHSADARGGGPSALWEITWERIDCFLPHLRDELFKQTVIQDPMPMEPQGQKPLASAHLTSAAGDTRTPGHPPPPEIPSELGACDFEKPESPRAASSSSPGSPVASSPSRLSPTPDGPPPLAQPPLILQPLASPLQVGVPPMTLPIILNPALIEATSPVPLLATPRPTDPIPTSEVN

SEQ ID NO: 26156 - protein, 1322 aa, Homo sapiens
MVPGALGVPADLAPVDVEFSFPKFSRLRRGLKAEAVKGPVPAAPARRRLQLPRLRVREVAEEAQAARLAAAAPPPRKAKVEAEVAAGARFTAPQVELVGPRLPGAEVGVPQVSAPKAAPSAEAAGGFALHLPTLGLGAPAPPAVEAPAVGIQVPQVELPALPSLPTLPTLPCLETREGAVSVVVPTLDVAAPTVGVDLALPGAEVEARGEAPEVALKMPRLSFPRFGARAKEVAEAKVAKVSPEARVKGPRLRMPTFGLSLLEPRPAAPEVVESKLKLPTIKMPSLGIGVSGPEVKVPKGPEVKLPKAPEVKLPKVPEAALPEVRLPEVELPKVSEMKLPKVPEMAVPEVRLPEVELPKVSEMKLPKVPEMAVPEVRLPEVQLLKVSEMKLPKVPEMAVPEVRLPEVQLPKVSEMKLPEVSEVAVPEVRLPEVQLPKVPEMKVPEMKLPKVPEMKLPEMKLPEVQLPKVPEMAVPDVHLPEVQLPKVPEMKLPEMKLPEVKLPKVPEMAVPDVHLPEVQLPKVPEMKLPKMPEMAVPEVRLPEVQLPKVSEMKLPKVPEMAVPDVHLPEVQLPKVCEMKVPDMKLPEIKLPKVPEMAVPDVHLPEVQLPKVSEIRLPEMQVPKVPDVHLPKAPEVKLPRAPEVQLKATKAEQAEGMEFGFKMPKMTMPKLGRAESPSRGKPGEAGAEVSGKLVTLPCLQPEVDGEAHVGVPSLTLPSVELDLPGALGLQGQVPAAKMGKGERVEGPEVAAGVREVGFRVPSVEIVTPQLPAVEIEEGRLEMIETKVKPSSKFSLPKFGLSGPKVAKAEAEGAGRATKLKVSKFAISLPKARVGAEAEAKGAGEAGLLPALDLSIPQLSLDAHLPSGKVEVAGADLKFKGPRFALPKFGVRGRDTEAAELVPGVAELEGKGWGWDGRVKMPKLKMPSFGLARGKEAEVQGDRASPGEKAESTAVQLKIPEVELVTLGAQEEGRAEGAVAVSGMQLSGLKVSTAGQVVTEGHDAGLRMPPLGISLPQVELTGFGEAGTPGQQAQSTVPSAEGTAGYRVQVPQVTLSLPGAQVAGGELLVGEGVFKMPTVTVPQLELDVGLSREAQAGEAATGEGGLRLKLPTLGARARVGGEGAEEQPPGAERTFCLSLPDVELSPSGGNHAEYQVAEGEGEAGHKLKVRLPRFGLVRAKEGAEEGEKAKSPKLRLPRVGFSQSEMVTGEGSPSPEEEEEEEEEGSGEGASGRRGRVRVRLPRVGLAAPSKASRGQEGDAAPKSPVREKSPKFRFPRVSLSPKARSGSGDQEEGGLRVRLPSVGFSETGAPGPARMEGAQAAAV

SEQ ID NO: 26157 - protein, 485 aa, Homo sapiens [sequence omitted]

SEQ ID NO: 26158 - protein, 2388 aa, Homo sapiens
MAENVVEPGPPSAKRPKLSSPALSASASDGTDFGSLFDLEHDLPDELINSTELGLTNGGDINQLQTSLGMVQDAASKHKQLSELLRSGSSPNLNMGVGGPGQVMASQAQQSSPGLGLINSMVKSPMTQAGLTSPNMGMGTSGPNQGPTQSTGMMNSPVNQPAMGMNTGMNAGMNPGMLAAGNGQGIMPNQVMNGSIGAGRGRQNMQYPNPGMGSAGNLLTEPLQQGSPQMGGQTGLRGPQPLKMGMMNNPNPYGSPYTQNPGQQIGASGLGLQIQTKTVLSNNLSPFAMDKKAVPGGGMPNMGQQPAPQVQQPGLVTPVAQGMGSGAHTADPEKRKLIQQQLVLLLHAHKCQRREQANGEVRQCNLPHCRTMKNVLNHMTHCQSGKSCQVAHCASSRQIISHWKNCTRHDCPVCLPLKNAGDKRNQQPILTGAPVGLGNPSSLGVGQQSAPNLSTVSQIDPSSIERAYAALGLPYQVNQMPTQPQVQAKNQQNQQPGQSPQGMRPMSNMSASPMGVNGGVGVQTPSLLSDSMLHSAINSQNPMMSENASVPSLGPMPTAAQPSTTGIRKQWHEDITQDLRNHLVHKLVQAIFPTPDPAALKDRRMENLVAYARKVEGDMYESANNRAEYYHLLAEKIYKIQKELEEKRRTRLQKQNMLPNAAGMVPVSMNPGPNMGQPQPGMTSSLNQFGQMSMAQPPIVPRQTPPLQHHGQLAQPGALNPPMGYGPRMQQPSNQGQFLPQTQFPSQGMNVTNIPLAPSSGQAPVSQAQMSSSSCPVNSPIMPPGSQGSHIHCPQLPQPALHQNSPSPVPSRTPTPHHTPPSIGAQQPPATTIPAPVPTPPAMPPGPQSQALHPPPRQTPTPPTTQLPQQVQPSLPAAPSADQPQQQPRSQQSTAASVPTPTAPLLPPQPATPLSQPAVSIEGQVSNPPSTSSTEVNSQAIAEKQPSQEVKMEAKMEVDQPEPADTQPEDISESKVEDCKMESTETEERSTELKTEIKEEEDQPSTSATQSSPAPGQSKKKIFKPEELRQALMPTLEALYRQDPESLPFRQPVDPQLLGIPDYFDIVKSPMDLSTIKRKLDTGQYQEPWQYVDDIWLMFNNAWLYNRKTSRVYKYCSKLSEVFEQEIDPVMQSLGYCCGRKLEFSPQTLCCYGKQLCTIPRDATYYSYQNRYHFCEKCFNEIQGESVSLGDDPSQPQTTINKEQFSKRKNDTLDPELFVECTECGRKMHQICVLHHEIIWPAGFVCDGCLKKSARTRKENKFSAKRLPSTRLGTFLENRVNDFLRRQNHPESGEVTVRVVHASDKTVEVKPGMKARFVDSGEMAESFPYRTKALFAFEEIDGVDLCFFGMHVQEYGSDCPPPNQRRVYISYLDSVHFFRPKCLRTAVYHEILIGYLEYVKKLGYTTGHIWACPPSEGDDYIFHCHPPDQKIPKPKRLQEWYKKMLDKAVSERIVHDYKDIFKQATEDRLTSAKELPYFEGDFWPNVLEESIKELEQEEEERKREENTSNESTDVTKGDSKNAKKKNNKKTSKNKSSLSRGNKKKPGMPNVSNDLSQKLYATMEKHKEVFFVIRLIAGPAANSLPPIVDPDPLIPCDLMDGRDAFLTLARDKHLEFSSLRRAQWSTMCMLVELHTQSQDRFVYTCNECKHHVETRWHCTVCEDYDLCITCYNTKNHDHKMEKLGLGLDDESNNQQAAATQSPGDSRRLSIQRCIQSLVHACQCRNANCSLPSCQKMKRVVQHTKGCKRKTNGGCPICKQLIALCCYHAKHCQENKCPVPFCLNIKQKLRQQQLQHRLQQAQMLRRRMASMQRTGVVGQQQGLPSPTPATPTTPTGQQPTTPQTPQPTSQPQPTPPNSMPPYLPRTQAAGPVSQGKAAGQVTPPTPPQTAQPPLPGPPPAAVEMAMQIQRAAETQRQMAHVQIFQRPIQHQMPPMTPMAPMGMNPPPMTRGPSGHLEPGMGPTGMQQQPPWSQGGLPQPQQLQSGMPRPAMMSVAQHGQPLNMAPQPGLGQVGISPLKPGTVSQQALQNLLRTLRSPSSPLQQQQVLSILHANPQLLAAFIKQRAAKYANSNPQPIPGQPGMPQGQPGLQPPTMPGQQGVHSNPAMQNMNPMQAGVQRAGLPQQQPQQQLQPPMGGMSPQAQQMNMNHNTMPSQFRDILRRQQMMQQQQQQGAGPGIGPGMANHNQFQQPQGVGYPPQQQQRMQHHMQQMQQGNMGQIGQLPQALGAEAGASLQAYQQRLLQQQMGSPVQPNPMSPQQHMLPNQAQSPHLQGQQIPNSLSNQVRSPQPVPSPRPQSQPPHSSPSPRMQPQPSPHHVSPQTSSPHPGLVAAQANPMEQGHFASPDQNSMLSQLASNPGMANLHGASATDLGLSTDNSDLNSNLSQSTLDIH

SEQ ID NO: 26159 - protein, 628 aa, Homo sapiens
MVAERTHKAAATGARGPGELGAPGTVALVAARAERGARLPSPGSCGLLTLALCSLALSLLAHFRTAELQARVLRLEAERGEQQMETAILGRVNQLLDEKWKLHSRRRREAPKTSPGCNCPPGPPGQPGTRGFPGFPGPIGLDGKPGHPGPKGDMGLTGPPGQPGPQGQKGEKGQCGEYPHRLLPLLNSVRLAPPPVIKRRTFQGEQSQASIQGPPGPPGPPGPSGPLGHPGLPGPMGPPGLPGPPGPKGDPGIQGYHGRKGERGMPGMPGKHGAKGAPGIAVAGMKGEPGIPGTKGEKGAEGSPGLPGLLGQKGEKGDAGNSIGGGRGEPGPPGLPGPPGPKGEAGVDGQVGPPGQPGDKGERGAAGEQGPDGPKGSKGEPGKGEMVDYNGNINEALQEIRTLALMGPPGLPGQIGPPGAPGIPGQKGEIGLPGPPGHDGEKGPRGKPGDMGPPGPQGPPGKDGPPGVKGENGHPGSPGEKGEKGETGQAGSPGLQGVPGPKGEAGLDGAKGEKGFQGEKGDRGPLGLPGASGLDGRPGPPGTPGPIGVPGPAGPKGERGSKGDPGMTGPTGAAGLPGLHGPPGDKGNRGHRGFKGEKGEPGLPGLDGLDAPCPLGEDGLPVQGCWNK

SEQ ID NO: 26160 - protein, 1105 aa, Homo sapiens
AARAGNLDKVVEYLKGGIDINTCNQNGLNALHLAAKEGHVGLVQELLGRGSSVDSATKKGNTALHIASLAGQAEVVKVLVKEGANINAQSQNGFTPLYMAAQENHIDVVKYLLENGANQSTATEDGFTPLAVALQQGHNQAVAILLENDTKGKVRLPALHIAARKDDTKSAALLLQNDHNADVQSKSGFTPLHIAAHYGNVNVATLLLNRGAAVDFTARNGITPLHVASKRGNTNMVKLLLDRGGQIDAKTRDGLTPLHCAARSGHDQVVELLLERGAPLLARTKNGLSPLHMAAQGDHVECVKHLLQHKAPVDDVTLDYLTALHVAAHCGHYRVTKLLLDKRANPNARALSGLTPIHVAAFMGHLNIVLLLLQNGASPDVTNIRGETALHMAARAGQVEVVRCLLRNGALVDARAREEQTPLHIASRLGKTEIVQLLLQHMAHPDAATTNGYTPLHISAREGQVDVASVLLEAGAAHSLATKKGFTPLHVAAKYGSLDVAKLLLQRRAAADSAGKNGYTPLHIAAKKNQMQIASTLLNYGAETNIVTKQGVTPLHLASQEGHTDMVTLLLDKGANIHMSTKSGLTSLHLAAQEDKVNVADILTKHGADQDAHTKLGYTPLIVACHYGNVKMVNFLLKQGANVNAKTKNGYTPLHQAAQQGHTHIINVLLQHGAKPNATTANGNTALAIAKRLGYISVVDTLKVVTEEVTTTTTTITEKHKLNVPETMTEVLDVSDEEALKQFGDHFIDGEALSDSGDDTMTGDGGEYLRPEDLKELGDDSLPSSQFLDGMNYLRYSLEGGRSDSLRSFSSDRSHTLSHASYLRDSAVMDDSVVIPSHQVSTLAKEAERNSYRLSWGTENLDNVALSSSPIHSGRASPCLERDNSSFLVSFMVDARGGAMRGCRHNGLRIIIPPRKCTAPTRVTCRLVKRHRLATMPPMVEGEGLASRLIEVGPSGAQFLGPVIVEIPHFAALRGKERELVVLRSENGDSWKEHFCDYTEDELNEILNGMDEVLDSPEDLEKKRICRIITRDFPQYFAVVSRIKQDSNLIGPEGGVLSSTVVPQVQAVFPEGALTKRIRVGLQAQPMHSELVKKILGNKATFSPI

SEQ ID NO: 26161 - protein, 4589 aa, Homo sapiens
MDDLRVLWMRDRVYAAFGITDPQLFEDLLNRDDGQGEDLILHFLNQASEEEGPSALFIYRTMVPEEVEVEIDEIPVLSEEGEEEEETYSQKVESVDKVRAKRVSLRTESLGQPLNREDEEMDKEISEKLPSKRTAKHIMEKMHLHMLCTPLPEEFLDQNVVFFLRNTKEAISEATDMKEAMEIMPETLEYGIINANVLHFLKNIICQVFLPALSFNQHRTSTTVGVTSGEVSNSSEHESDLPPMPGEAVEYHSIQLIRDEFLMNVQKFASNIQRTMQQLEGEIKLEMPIISVEGEVSDLAADPETVDILEQCVINWLNQISTAVEAQLKKTPQGKGPLAEIEFWRERNATLSALHEQTKLPIVRKVLDVIKESDSMLVANLQPVFTELFKFHTEASDNVRFLSTVERYFKNITHGSGFHVVLDTIPAMMSALRMVWIISRHYNKDERMIPLMERIAWEIAERVCRVVNLRTLFKENRASAQSKTLEARNTLRLWKKAYFDTRAKIEASGREDRWEFDRKRLFERTDYMATICQDLSDVLQILEEFYNIFGPELKAVTGDPKRIDDVLCRVDGLVTPMENLTFDPFSIKSSQFWKYVMDEFKIEVLVIEKEAKHFIDESFKTLRSAEAAFDMLLKFKHIRSREAVNRQMMMKFNDILAQYCKEIDIINKIFVQNLENPPLYKNHPPVAGAIYWERSLFFRIKHTILRFQEVQEILDSDRGQEVKQKYLEVGRTMKEYEDRKYEQWMEVTEQVLPALMKKSLLTKSSIATEEPSTLERGAVFAINFSPALREIINETKYLEQLGFTVPELARNVALQEDKFLRYTAGIQRMLDHYHMLIGTLNDAESVLLKDHSQELLRVFRSGYKRLNWNSLGIGDYITGCKQAIGKFESLVHQIHKNADDISSRLTLIEAINLFKYPAAKSEEELPGVKEFFEHIERERASDVDHMVRWYLAIGPLLTKVEGLVVHTNTGKAPKLASYYKYWEKKIYEVLTKLILKNLQSFNSLILGNVPLFHTETILTAPEIILHPNTNEIDKMCFHCVRNCVEITKHFVRWMNGSCIECPPQKGEEEEVVIINFYNDISLNPQIIEQAVMIPQNVHRILINLMKYLQKWKRYRPLWKLDKAIVMEKFAAKKPPCVAYDEKLQFYSKIAYEVMRHPLIKDEHCIRLQLRHLANTVQENAKSWVISLGKLLNESAKEELYNLHEEMEHLAKNLRKIPNTLEDLKFVLATIAEIRSKSLVMELRYRDVQERYRTMAMYNLFPPDAEKELVDKIESIWSNLFNDSVNVEHALGDIKRTFTELTRGEIMNYRVQIEEFAKRFYSEGPGSVGDDLDKGVELLGVYERELARHEKSRQELANAEKLFDLPITMYPELLKVQKEMSGLRMIYELYEGLKVAKEEWSQTLWINLNVQILQEGIEGFLRALRKLPRPVRGLSVTYYLEAKMKAFKDSIPLLLDLKNEALRDRHWKELMEKTSVFFEMTETFTLENMFAMELHKHTDVLNEIVTAAIKEVAIEKAVKEILDTWENMKFTVVKYCKGTQERGYILGSVDEIIQSLDDNTFNLQSISGSRFVGPFLQTVHKWEKTLSLIGEVIEIWMLVQRKWMYLESIFIGGDIRSQLPEEAKKFDNIDKVFKRIMGETLKDPVIKRCCEAPNRLSDLQNVSEGLEKCQKSLNDYLDSKRNAFPRFFFISDDELLSILGSSDPLCVQEHMIKMYDNIASLRFNDGDSGEKLVSAMISAEGEVMEFRKILRAEGRVEDWMTAVLNEMRRTNRLITKEAIFRYCEDRSRVDWMLLYQGMVVLAASQVWWTWEVEDVFHKAQKGEKQAMKNYGRKMHRQIDELVTRITMPLSKNDRKKYNTVLIIDVHARDIVDSFIRGSILEAREFDWESQLRFYWDREPDELNIRQCTGTFGYGYEYMGLNGRLVITPLTDRIYLTLTQALSMYLGGAPAGPAGTGKTETTKDLAKALGLLCVVTNCGEGMDYRAVGKIFSGLAQCGAWGCFDEFNRIDASVLSVISSQIQTIRNALIHQLTTFQFEGQEISLDSRMGIFITMNPGYAGRTELPESVKALFRPVVVIVPDLQQICEIMLFSEGFLEAKTLAKKMTVLYKLAREQLSKQYHYDFGLRALKSVLVMAGELKRGSSDLREDVVLMRALRDMNLPKFVFEDVPLFLGLISDLFPGLDCPRVRYPDFNDAVEQVLEENGYAVLPIQVDKVVQMFETMLTRHTTMVVGPTRGGKSVVINTLCQAQTKLGLTTKLYILNPKAVSVIELYGILDPTTRDWTDGVLSNIFREINKPTDKKERKYILFDGDVDALWVENMNSVMDDNRLLTLANGERIRLQAHCALLFEVGDLQYASPATVSRCGMVYVDPKNLKYRPYWKKWVNQIPNKVEQYNLNSLFEKYVPYLMDVIVEGIVDGRQAEKLKTIVPQTDLNMVTQLAKMLDALLEGEIEDLDLLECYFLEALYCSLGASLLEDGRMKFDEYIKRLASLSTVDTEGVWANPGELPGQLPTLYDFHFDNKRNQWVPWSKLVPEYIHAPERKFINILVHTVDTTRTTWILEQMVKIKQPVIFVGESGTSKTATTQNFLKNLSEETNIVLMVNFSSRTTSMDIQRNLEANVEKRTKDTYGPPMGKRLLVFMDDMNMPRVDEYGTQQPIALLKLLLEKGYLYDRGKELNCKSIRDLGFIAAMGKAGGGRNEVDPRFISLFSVFNVPFPSEESLHLIYSSILKGHTSTFHESIVAVSGKLTFCTLALYKNIVQDLPPTPSKFHYIFNLRDLSRVFNGLVLTNPERFQTVAQMVRVWRNECLRVFHDRLISETDKQLVQQHIGSLVVEHFKDDVEVVMRDPILFGDFQMALHEGEPRIYEDIQDYEAAKALFQEILEEYNESNTKMNLVLFDDALEHLTRVHRIIRMDRGHALLVGVGGSGKQSLSRLAAFTASCEVFEILLSRGYSENSFREDLKSLYLKLGIENKAMIFLFTDAHVAEEGFLELINNMLTSGIVPALFSEEEKESILSQIGQEALKQGMGPAKESVWQYFVNKSANNLHIVLGMSPVGDTLRTWCRNFPGMVNNTGIDWFMPWPPQALHAVAKSFLGYNPMIPAENIENVVKHVVLVHQSVDHYSQQFLQKLRRSNYVTPKNYLDFINTYSKLLDEKTQCNIAQCKRLDGGLDKLKEATIQLDELNQKLAEQKIVLAEKSAACEALLEEIAVNTAVAEEKKKLAEEKAMEIEEQNKVIAMEKAEAETTLAEVMPILEAAKLELQKLDKSDVTEIRSFAKPPKQVQTVCECILIMKGYKELNWKTAKGVMSDPNFLRSLMEIDFDSITQSQVKNIKGLLKTLNTTTEEMEAVSKAGLGMLKFVEAVMGYCDVFREIKPKREKVARLERNFYLTKRELERIQNELAAIQKELETLGAKYEAAILEKQKLQEEAEIMERRLIAADKLISGLGSENIRWLNDLDELMHRRVKLLGDCLLCAAFLSYEGAFTWEFRDEMVNRIWQNDILEREIPLSQPFRLESLLTDDVEISRWGSQGLPPDELSVQNGILTTRASRFPLCIDPQQQALNWIKRKEEKNNLRVASFNDPDFLKQLEMSIKYGTPFLFRDVDEYIDPVIDNVLEKNIKVSQGRQFIILGDKEVDYDSNFRLYLNTKLANPRYSPSVFGKAMVINYTVTLKGLEDQLLSVLVAYERRELEEQREHLIQETSENKNLLKDLEDSLLRELATSTGNMLDNVDLVHTLEETKSKATEVSEKLKLAEKTALDIDRLRDGYRPAARRGAILFFVLSEMALVNSMYQYSLIAFLEVFRLSLKKSLPDSILMKRLRNIMDTLTFSIYNHGCTGLFERHKLLFSFNMTIKIEQAEGRVPQEELDFFLKGNISLEKSKRKKPCAWLSDQGWEDIILLSEMFSDNFGQLPDDVENNQTVWQEWYDLDSLEQFPVPLGYDNNITPFQKLLILRCFRVDRVYRAVTDYVTVTMGEKYVQPPMISFEAIFEQSTPHSPIVFILSPGSDPATDLMKLAERSGFGGNRLKFLAMGQGQEKVALQLLETAVARGQWLMLQNCHLLVKWLKDLEKSLERITKPHPDFRLWLTTDPTKGFPIGILQKSLKVVTEPPNGLKLNMRATYFKISHEMLDQCPHPAFKPLVYVLAFFHAVVQERRKFGKIGWNVYYDFNESDFQVCMEILNTYLTKAFQQRDPRIPWGSLKYLIGEVMYGGRAIDSFDRRILTIYMDEYLGDFIFDTFQPFHFFRNKEVDYKIPVGDEKEKFVEAIEALPLANTPEVFGLHPNAEIGYYTQAARDMWAHLLELQPQTGESSSGISRDDYIGQVAKEIENKMPKVFDLDQVRKRLGTGLSPTSVVLLQELERFNKLVVRMTKSLAELQRALAGEVGMSNELDDVARSLFIGHIPNIWRRLAPDTLKSLGNWMVYFLRRFSQYMLWVTESEPSVMWLSGLHIPESYLTALVQATCRKNGWPLDRSTLFTQVTKFQDADEVNERAGQGCFVSGLYLEGADWDIEKGCLIKSKPKVLVVDLPILKIIPIEAHRLKLQNTFRTPVYTTSMRRNAMGVGLVFEADLFTTRHISHWVLQGVCLTLNSD

SEQ ID NO: 26162 - protein, 1344 aa, Homo sapiens
MMEIQMDEGGGVVVYQDDYCSGSVMSERVSGLAGSIYREFERLIHCYDEEVVKELMPLVVNVLENLDSVLSENQEHEVELELLREDNEQLLTQYEREKALRRQAEEKFIEFEDALEQEKKELQIQVEHYEFQTRQLELKAKNYADQISRLEERESEMKKEYNALHQRHTEMIQTYVEHIERSKMQQVGGNSQTESSLPGRSPRQSWRKRKERPTSLNVFPLADGTVRAQIGGKLVPAGDHWHLSDLGQLQSSSSYQCPQDEMSESGQSSAAATPSTTGTKSNTPTSSVPSAAVTPLNESLQPLGDYGVGSKNSKRAREKRDSRNMEVQVTQEMRNVSIGMGSSDEWSDVQDIIDSTPELDMCPETRLDRTGSSPTQGIVNKAFGINTDSLYHELSTAGSEVIGDVDEGADLLGEFSVRDDFFGMGKEVGNLLLENSQLLETKNALNVVKNDLIAKVDQLSGEQEVLRGELEAAKQAKVKLENRIKELEEELKRVKSEAIIARREPKEEAEDVSSYLCTESDKIPMAQRRRFTRVEMARVLMERNQYKERLMELQEAVRWTEMIRASREHPSVQEKKKSTIWQFFSRLFSSSSSPPPAKRPYPSVNIHYKSPTTAGFSQRRNHAMCPISAGSRPLEFFPDDDCTSSARREQKREQYRQVREHVRNDDGRLQACGWSLPAKYKQLSPNGGQEDTRMKNVPVPVYCRPLVEKDPTMKLWCAAGVNLSGWRPNEDDAGNGVKPAPGRDPLTCDREGDGEPKSAHTSPEKKKAKELPEMDATSSRVWILTSTLTTSKVVIIDANQPGTVVDQFTVCNAHVLCISSIPAASDSDYPPGEMFLDSDVNPEDPGADGVLAGITLVGCATRCNVPRSNCSSRGDTPVLDKGQGEVATIANGKVNPSQSTEEATEATEVPDPGPSEPETATLRPGPLTEHVFTDPAPTPSSGPQPGSENGPEPDSSSTRPEPEPSGDPTGAGSSAAPTMWLGAQNGWLYVHSAVANWKKCLHSIKLKDSVLSLVHVKGRVLVALADGTLAIFHRGEDGQWDLSNYHLMDLGHPHHSIRCMAVVYDRVWCGYKNKVHVIQPKTMQIEKSFDAHPRRESQVRQLAWIGDGVWVSIRLDSTLRLYHAHTHQHLQDVDIEPYVSKMLGTGKLGFSFVRITALLVAGSRLWVGTGNGVVISIPLTETVVLHRGQLLGLRANKTSPTSGEGARPGGIIHVYGDDSSDRAASSFIPYCSMAQAQLCFHGHRDAVKFFVSVPGNVLATLNGSVLDSPAEGPGPAAPASEVEGQKLRNVLVLSGGEGYIDFRIGDGEDDETEEGAGDMSQVKPVLSKAERSHIIVWQVSYTPE

SEQ ID NO: 26163 - protein, 338 aa, Homo sapiens
TKGEKGAEGSPGLPGLLGQKGEKGDAGNSIGGGRGEPGPPGLPGPPGPKGEAGVDGQVGPPGQPGDKGERGAAGEQGPDGPKGSKGEPGKGEMVDYNGNINEALQEIRTLALMGPPGLPGQIGPPGAPGIPGQKGEIGLPGPPGHDGEKGPRGKPGDMGPPGPQGPPGKDGPPGVKGENGHPGSPGEKGEKGETGQAGSPGLQGVPGPKGEAGLDGAKGEKGFQGEKGDRGPLGLPGASGLDGRPGPPGTPGPIGVPGPAGPKGERGSKGDPGMTGPTGAAGLPGLHGPPGDKGNRGERGKKGSRGPKGDKGDQGAPGLDAPCPLGEDGLPVQGCWNK

SEQ ID NO: 26164 - protein, 353 aa, Homo sapiens
MPSSLPGSQVPHPTLDAVDLVEKTLRNEGTSSSAPVLEEGDTDPWTLPQLKDTSQPWKELRVAGRLRRVAGSVLKACGLLGSLYFFICSLDVLSSAFQLLGSKVAGDIFKDNVVLSNPVAGLVIGVLVTALVQSSSTSSSIVVSMVAAKLLTVRVSVPIIMGVNVGTSITSTLVSMAQSGDRDEFQRAFSGSAVHGIFNWLTVLVLLPLESATALLERLSELALGAASLTPRAQAPDILKVLTKPLTHLIVQLDSDMIMSSATGNATNSSLIKHWCGTTGQPTQENSSCGAFGPCTEKNSTAPADRLPCRHLFAGTELTDLAVGCILLAGSLLVLCGCLVLIVKLLNSVLRGR

SEQ ID NO: 26165 - protein, 647 aa, Homo sapiens
MEGDGSDPEPPDAGEDSKSENGENAPIYCICRKPDINCFMIGCDNCNEWFHGDCIRITEKMAKAIREWYCRECREKDPKLEIRYRHKKSRERDGNERDSSEPRDEGGGRKRPVPDPDLQRRAGSGTGVGAMLARGSASPHKSSPQPLVATPSQHHQQQQQQIKRSARMCGECEACRRTEDCGHCDFCRDMKKFGGPNKIRQKCRLRQCQLRARLSPVTPSESLPRPRRPLPTQQQPQPSQKLGRIREDEGAVASSTVKEPPEATATPEPLSDEDLPLDPDLYQDFCAGAFDDHGLPWMSDTEESPFLDPALRKRAVKVKHVKRREKKSEKKKEERYKRHRQKQKHKDKWKHPERADAKDPASLPQCLGPGCVRPAQPSSKYCSDDCGMKLAANRIYEILPQRIQQWQQSPCIAEEHGKKLLERIRREQQSARTRLQEMERRFHELEAIILRAKQQAVREDEESNEGDSDDTDLQIFCVSCGHPINPRVALRHMERCYAKYESQTSFGSMYPTRIEGATRLFCDVYNPQSKTYCKRLQVLCPEHSRDPKVPADEVCGCPLVRDVFELTGDFCRLPKRQCNRHYCWEKLRRAEVDLERVRVWYKLDELFEQERNVRTAMTNRAGLLALMLHQTIQHDPLTTDLRSSADR

SEQ ID NO: 26166 - protein, 607 aa, Homo sapiens
MEGGGKPNSSSNSRDDGNSVFPAKASATGAGPAAAEKRLGTPPGGGGAGAKEHGNSVCFKVDGGGGGGGGGGGGEEPAGGFEDAEGPRRQYGFMQRQFTSMLQPGVNKFSLRMFGSQKAVEKEQERVKTAGFWIIHPYSDFRFYWDLIMLIMMVGNLVIIPVGITFFTEQTTTPWIIFNVASDTVFLLDLIMNFRTGTVNEDSSEIILDPKVIKMNYLKSWFVVDFISSIPVDYIFLIVEKGMDSEVYKTARALRIVRFTKILSLLRLLRLSRLIRYIHQWEEIFHMTYDLASAVVRIFNLIGMMLLLCHWDGCLQFLVPLLQDFPPDCWVSLNEMVNDSWGKQYSYALFKAMSHMLCIGYGAQAPVSMSDLWITMLSMIVGATCYAMFVGHATALIQSLDSSRRQYQEKYKQVEQYMSFHKLPADMRQKIHDYYEHRYQGKIFDEENILNELNDPLREEIVNFNCRKLVATMPLFANADPNFVTAMLSKLRFEVFQPGDYIIREGAVGKKMYFIQHGVAGVITKSSKEMKLTDGSYFGEICLLTKGRRTASVRADTYCRLYSLSVDNFNEVLEEYPMMRRAFETVAIDRLDRIAKQTDFPTDAKTI

SEQ ID NO: 26167 - protein, 135 aa, Homo sapiens
RFKHLRKYTYNYEAESSSGVPGTADSRSATRINCKVELEVPQLCSFILKTSQCTLKEVYGFNPEGKALLKKTKNSEEFAAAMSRIPCMETAPLTLPSRRGRAMWQQKYPLKETWGSVIASSPSAQASAHLLSSKA

SEQ ID NO: 26168 - protein, 756 aa, Homo sapiens
MLTMGRLQLVVLGLTCCWAVASAAKLGAVYTEGGFVEGVNKKLGLLGDSVDIFKGIPFAAPTKALENPQPHPGWQGTLKAKNFKKRCLQATITQDSTYGDEDCLYLNIWVPQGRKQVSRDLPVMIWIYGGAFLMGSGHGANFLNNYLYDGEEIATRGNVIVVTFNYRVGPLGFLSTGDANLPGNYGLRDQHMAIAWVKRNIAAFGGDPNNITLFGESAGGASVSLQTLSPYNKGLIRRAISQSGVALSPWVIQKNPLFWAKKVAEKVGCPVGDAARMAQCLKVTDPRALTLAYKVPLAGLEYPMLHYVGFVPVIDGDFIPADPINLYANAADIDYIAGTNNMDGHIFASIDMPAINKGNKKVTEEDFYKLVSEFTITKGLRGAKTTFDVYTESWAQDPSQENKKKTVVDFETDVLFLVPTEIALAQHRANAKSAKTYAYLFSHPSRMPVYPKWVGADHADDIQYVFGKPFATPTGYRPQDRTVSKAMIAYWTNFAKTGDPNMGDSAVPTHWEPYTTENSGYLEITKKMGSSSMKRSLRTNFLRYWTLTYLALPTVTDQEATPVPPTGDSEATPVPPTGDSETAPVPPTGDSGAPPVPPTGDSGAPPVPPTGDSGAPPVPPTGDSGAPPVPPTGDSGAPPVPPTGDSGAPPVPPTGDSGAPPVPPTGDSGAPPVPPTGDAGPPPVPPTGDSGAPPVPPTGDSGAPPVTPTGDSETAPVPPTGDSGAPPVPPTGDSEAAPVPPTDDSKEAQMPAVIRF

SEQ ID NO: 26169 - protein, 791 aa, Homo sapiens
MSQWYELQQLDSKFLEQVHQLYDDSFPMEIRQYLAQWLEKQDWEHAANDVSFATIRFHDLLSQLDDQYSRFSLENNFLLQHNIRKSKRNLQDNFQEDPIQMSMIIYSCLKEERKILENAQRFNQAQSGNIQSTVMLDKQKELDSKVRNVKDKVMCIEHEIKSLEDLQDEYDFKCKTLQNREHETNGVAKSDQKQEQLLLKKMYLMLDNKRKEVVHKIIELLNVTELTQNALINDELVEWKRRQQSACIGGPPNACLDQLQNWFTIVAESLQQVRQQLKKLEELEQKYTYEHDPITKNKQVLWDRTFSLFQQLIQSSFVVERQPCMPTHPQRPLVLKTGVQFTVKLRLLVKLQELNYNLKVKVLFDKDVNERNTVKGFRKFNILGTHTKVMNMEESTNGSLAAEFRHLQLKEQKNAGTRTNEGPLIVTEELHSLSFETQLCQPGLVIDLETTSLPVVVISNVSQLPSGWASILWYNMLVAEPRNLSFFLTPPCARWAQLSEVLSWQFSSVTKRGLNVDQLNMLGEKLLGPNASPDGLIPWTRFCKENINDKNFPFWLWIESILELIKKHLLPLWNDGCIMGFISKERERALLKDQQPGTFLLRFSESSREGAITFTWVERSQNGGEPDFHAVEPYTKKELSAVTFPDIIRNYKVMAAENIPENPLKYLYPNIDKDHAFGKYYSRPKEAPEPMELDGPKGTGYIKTELISVSEVHPSRLQTTDNLLPMSPEEFDEVSRIVGSVEFDSMVSTTAGLCVALNKCVCSEAGSAPWQIPGLSAGGSPGGAKESAVLR

SEQ ID NO: 26170 - protein, 1990 aa, Homo sapiens
MADERKDEAKAPHWTSAPLTEASAHSHPPEIKDQGGAGEGLVRSANGFPYREDEEGAFGEHGSQGTYSNTKENGINGELTSADRETAEEVSARIVQVVTAEAVAVLKGEQEKEAQHKDQTAALPLAAEETANLPPSPPPSPASEQTVTVEEDEGAEDQVGPLHRFPSHEPATSGERRGLLAPSISVSVPDDDPYNSDEEYYEHPLFSSERTTSSVLPSVTAQSAEAHLGQEKEEETLESRMAEEEKPAALPEKECGAAKSSDQPKGLSKGQMESSAEAQIVPEESAPAGAPHEKSVKEVKEVSPEVKTPSSAGEDLLTASKMEFHDQQELTPSTAEPSDQKEKESEKQSKPGEDLKHAALVSQPETTKTYPDKKDMQGTEEEKAPLALFGHTLVASLEDMKQKTEPSLVVPGIDLPKEPPTPKEQKDWFIEMPTEAKKDEWGLVAPISPGPLTPMREKDVFDDIPKWEGKQFDSPMPSPFQGGSFTLPLDVMKNEIVTETSPFAPAFLQPDDKKSLQQTSGPATAKDSFKIEEPHEAKPDKMAEAPPSEAMTLPKDAHIPVVEEHVMGKVLEEEKEAINQETVQQRDTFTPSGQEPILTEKETELKLEEKTTISDKEAVPKESKPPKPADEEIGIIQTSTEHTFSEQKDQEPTTDMLKQDSFPVSLEQAVTDSAMTSKTLEKAMTEPSALIEKSSIQELFEMRVDDKDKIEGVGAATSAELDMPFYEDKSGMSKYFETSALKEEATKSIEPGSDYYELSDTRESVHESIDTMSPMHKNGDKEFQTGKESQPSPPAQEAGYSTLAQSYPSDLPEEPSSPQERMFTIDPKVYGEKRDLHSKNKDDLTLSRSLGLGGRSAIEQRSMSINLPMSCLDSIALGFNFGRGHDLSPLASDILTNTSGSMDEGDDYLPATTPALEKAPCFPVESKEEEQIEKVKATGEESTQAEISCESPFLAKDFYKNGTVMAPDLPEMLDLAGTRSRLASVSADAEVARRKSVPSETVVEDSRTGLPPVTDENHVIVKTDSQLEDLGYCVFNKYTVPLPSPVQDSENLSGESGTFYEGTDDKVRRDLATDLSLIEVKLAAAGRVKDEFSVDKEASAHISGDKSGLSKEFDQEKKANDRLDTVLEKSEEHADSKEHAKKTEEAGDEIETFGLGVTYEQALAKDLSIPTDASSEKAEKGLSSVPEIAEVEPSKKVEQGLDFAVQGQLDVKISDFGQMASGLNIDDRRATELKLEATQDMTPSSKAPQEADAFMGVESGHMKEGTKVSETEVKEKVAKPDLVHQEAVDKEESYESSGEHESLTMESLKADEGKKETSPESSLIQDEIAVKLSVEIPCPPAVSEADLATDERADVQMEFIQGPKEESKETPDISITPSDVAEPLHETIVSEPAEIQSEEEEIEAQGEYDKLLFRSDTLQITDLGVSGAREEFVETCPSEHKGVIESVVTIEDDFITVVQTTTDEGESGSHSVRFAALEQPEVERRPSPHDEEEFEVEEAAEAQAEPKDGSPEAPASPEREEVALSEYKTETYDDYKDETTIDDSIMDADSLWVDTQDDDRSIMTEQLETIPKEEKAEKEARRSSLEKHRKEKPFKTGRGRISTPERKVAKKEPSTVSRDEVRRKKAVYKKAELAKKTEVQAHSPSRKFILKPAIKYTRPTHLSCVKRKTTAAGGESALAPSVFKQAKDKVSDGVTKSPEKRSSLPRPSSILPPRRGVSGDRDENSFSLNSSISSSARRTTRSEPIRRAGKSGTSTPTTPGSTAITPGTPPSYSSRTPGTPGTPSYPRTPHTPGTPKSAILVPSEKKVAIIRTPPKSPATPKQLRLINQPLPDLKNVKSKIGSTDNIKYQPKGGQVQIVTKKIDLSHVTSKCGSLKNIRHRPGGGRVKIESVKLDFKEKAQAKVGSLDNAHHVPGGGNVKIDSQKLNFREHAKARVDHGAEIITQSPGRSSVASPRRLSNVSSSGSINLLESPQLATLAEDVTAALAKQGL

SEQ ID NO: 26171 - protein, 636 aa, Homo sapiens
MSQWYELQQLDSKFLEQVHQLYDDSFPMEIRQYLAQWLEKQDWEHAANDVSFATIRFHDLLSQLDDQYSRFSLENNFLLQHNIRKSKRNLQDNFQEDPIQMSMIIYSCLKEERKILENAQRFNQAQSGNIQSTVMLDKQKELDSKVRNVKDKVMCIEHEIKSLEDLQDEYDFKCKTLQNREHETNGVAKSDQKQEQLLLKKMYLMLDNKRKEVVHKIIELLNVTELTQNALINDELVEWKRRQQSACIGGPPNACLDQLQNWFTIVAESLQQVRQQLKKLEELEQKYTYEHDPITKNKQVLWDRTFSLFQQLIQSSFVVERQPCMPTHPQRPLVLKTGVQFTVKLRLLVKLQELNYNLKVKVLFDKDVNERNTVKGFRKFNILGTHTKVMNMEESTNGSLAAEFRHLQLKEQKNAGTRTNEGPLIVTEELHSLSFETQLCQPGLVIDLETTSLPVVVISNVSQLPSGWASILWYNMLVAEPRNLSFFLTPPCARWAQLSEVLSWQFSSVTKRGLNVDQLNMLGEKLLGPNASPDGLIPWTRFCKENINDKNFPFWLWIESILELIKKHLLPLWNDGCIMGFISKERERALLKDQQPGTFLLRFSESSREGAITFTWVERSQNGGGLLSADQGCESM

SEQ ID NO: 26172 - protein, 704 aa, Homo sapiens
MGDRDLRTDYNEPGTIPSAARGLDDTVSIASRSREVSGFRGGGGGPAYGPPPSLHAREGRYERRLDGASDNRERAYEHSAYGHHERGTGGFDRTRHYDQDYYRDPRERTLQHGLYYASRSRSPNRFDAHDPRYEPRAREQFTLPSVVHRDIYRDDITREVRGRRPERNYQHSRSRSPHSSQSRNQSPQRLASQASRPTRSPSGSGSRSRSSSSDSISSSSSTSSDSSDSSSSSSDDSPARSVQSAAVPAPTSQLLSSLEKDEPRKSFGIKVQNLPVRSTDTSLKDGLFHEFKKFGKVTSVQIHGTSEERYGLVFFRQQEDQEKALTASKGKLFFGMQIEVTAWIGPETESENEFRPLDERIDEFHPKATRTLFIGNLEKTTTYHDLRNIFQRFGEIVDIDIKKVNGVPQYAFLQYCDIASVCKAIKKMDGEYLGNNRLKLGFGKSMPTNCVWLDGLSSNVSDQYLTRHFCRYGPVVKVVFDRLKGMALVLYNEIEYAQAAVKETKGRKIGGNKIKVDFANRESQLAFYHCMEKSGQDIRDFYEMLAERREERRASYDYNQDRTYYESVRTPGTYPEDSRRDYPARGREFYSEWETYQGDYYESRYYDDPREYRDYRNDPYEQDIREYSYRQRERERERERFESDRDRDHERRPIERSQSPVHLRRPQSPGASPSQAERLPSDSERRLYSRSSDRSGSCSSLSPP

SEQ ID NO: 26173 - protein, 601 aa, Homo sapiens
FRTAELQARVLRLEAERGEQQMETAILGRVNQLLDEKWKLHSRRRREAPKTSPGCNCPPGPPGPTGRPGLPGVKGQPGEKGSPGDAGLSIIGPRGPPGQPGTRGFPGFPGPIGLDGKPGHPGPKGDMGLTGPPGQPGPQGQKGEKGQCGEYPHRLLPLLNSVRLAPPPVIKRRTFQGEQSQASIQGPPGPPGPPGPSGPLGHPGLPGPMGPPGLPGPPGPKGDPGIQGYHGRKGERGMPGMPGKHGAKGAPGIAVAGMKGEPGIPGTKGEKGAEGSPGLPGLLGQKGEKGDAGNSIGGGRGEPGPPGLPGPPGPKGEAGVDGQVGPPGQPGDKGERGAAGEQGPDGPKGSKGEPGKGEMVDYNGNINEALQEIRTLALMGPPGLPGQIGPPGAPGIPGQKGEIGLPGPPGHDGEKGPRGKPGDMGPPGPQGPPGKDGPPGVKGENGHPGSPGEKGEKGETGQAGSPGLQGVPGPKGEAGLDGAKGEKGFQGEKGDRGPLGLPGASGLDGRPGPPGTPGPIGVPGPAGPKGERGSKGDPGMTGPTGAAGLPGLHGPPGDKGNRGHRGFKGEKGEPGLPGLDGLDAPCPLGEDGLPVQGCWNK

SEQ ID NO: 26174 - protein, 888 aa, Homo sapiens
MDDSEVESTASILASVKEQEAQFEKLTRALEEERRHVSAQLERVRVSPQDANPLMANGTLTRRHQDHSHLLYSTIPRMQEPGQIVETYTEEDPEGAMSVVSVETSDDGTTRRTETTVKKVVKTVTTRTVQPVAMGPDGLPVDASSVSNNYIQTLGRDFRKNGNGGPGPYVGQAGTATLPRNFHYPPDGYSRHYEDGYPGGSDNYGSLSRVTRIEERYRPSMEGYRAPSRQDVYGPQPQVRVGGSSVDLHRFHPEPYGLEDDQRSMGYDDLDYGMMSDYGTARRTGTPSDPRRRLRSYEDMIGEEVPSDQYYWAPLAQHERGSLASLDSLRKGGPPPPNWRQPELPEVIAMLGFRLDAVKSNAAAYLQHLCYRNDKVKTDVRKLKGIPVLVGLLDHPKKEVHLGACGALKNISFGRDQDNKIAIKNCDGVPALVRLLRKARDMDLTEVITGTLWNLSSHDSIKMEIVDHALHALTDEVIIPHSGWEREPNEDCKPRHIEWESVLTNTAGCLRNVSSERSEARRKLRECDGLVDALIFIVQAEIGQKDSDSKLVENCVCLLRNLSYQVHREIPQAERYQEAAPNVANNTGPHAASCFGAKKGKGKKPIEDPANDTVDFPKRTSPARGYELLFQPEVVRIYISLLKESKTPAILEASAGAIQNLCAGRWTYGRYIRSALRQEKALSAIADLLTNEHERVVKAASGALRNLAVDARNKELIGKHAIPNLVKNLPGGQQNSSWNFSEDTVISILNTINEVIAENLEAAKKLRETQGIEKLVLINKSGNRSEKEVRAAALVLQTIWGYKELRKPLEKEGWKKSDFQVNLNNASRSQSSHSYDDSTLPLIDRNQKSDNNYSTPNERGDHNRTLDRSGDLGDMEPLKGTTPLMQKI

SEQ ID NO: 26175 - protein, 748 aa, Homo sapiens
MSQWYELQQLDSKFLEQVHQLYDDSFPMEIRQYLAQWLEKQDWEHAANDVSFATIRFHDLLSQLDDQYSRFSLENNFLLQHNIRKSKRNLQDNFQEDPIQMSMIIYSCLKEERKILENAQRFNQAQSGNIQSTVMLDKQKELDSKVRNVKDKVMCIEHEIKSLEDLQDEYDFKCKTLQNREHETNGVAKSDQKQEQLLLKKMYLMLDNKRKEVVHKIIELLNVTELTQNALINDELVEWKRRQQSACIGGPPNACLDQLQNWFTIVAESLQQVRQQLKKLEELEQKYTYEHDPITKNKQVLWDRTFSLFQQLIQSSFVVERQPCMPTHPQRPLVLKTGVQFTVKLRLLVKLQELNYNLKVKVLFDKDVNERNTVKGFRKFNILGTHTKVMNMEESTNGSLAAEFRHLQLKEQKNAGTRTNEGPLIVTEELHSLSFETQLCQPGLVIDLETTSLPVVVISNVSQLPSGWASILWYNMLVAEPRNLSFFLTPPCARWAQLSEVLSWQFSSVTKRGLNVDQLNMLGEKLLGPNASPDGLIPWTRFCKENINDKNFPFWLWIESILELIKKHLLPLWNDGCIMGFISKERERALLKDQQPGTFLLRFSESSREGAITFTWVERSQNGGEPDFHAVEPYTKKELSAVTFPDIIRNYKVMAAENIPENPLKYLYPNIDKDHAFGKYYSRPKEAPEPMELDGPKGTGYIKTELISVSEVHPSRLQTTDNLLPMSPEEFDEVSRIVGSVEFDSMSF

SEQ ID NO: 26176 - protein, 945 aa, Homo sapiens
MASSPELPTEDEQGSWGIDDLHISLQAEQEDTQKKAFTCWINSQLARHTSPSVISDLFTDIKKGHVLLDLLEVLSGQQLPRDKGSNTFQCRINIEHALTFLRNRSIKLINIHVTDIIDGNPSIILGLIWTIILHFHIEKLAQTLSCNYNQPSLDDVSVVDSSPASSPPAKKCSKVQARWQMSARKALLLWAQEQCATYESVNVTDFKSSWRNGMAFLAIIHALRPDLIDMKSVKHRSNKDNLREAFRIAEQELKIPRLLEPEDVDVVDPDEKSIMTYVAQFLQYSKDAPGTGEEAQGKVKDAMGWLTLQKEKLQKLLKDSENDTYFKKYNSLLSFMESFNEEKKSFLDVLSIKRDLDELDKDHLQLREAWDGLDHQINAWKIKLNYALPPPLHQTEAWLQEVEELMDEDLSASQDHSQAVTLIQEKMTLFKSLMDRFEHHSNILLTFENKDENHLPLVPPNKLEEMKRRINNILEKKFILLLEFHYYKCLVLGLVDEVKSKLDIWNIKYGSRESVELLLEDWHKFIEEKEFLARLDTSFQKCGEIYKNLAGECQNINKQYMMVKSDVCMYRKNIYNVKSTLQKVLACWATYVENLRLLRACFEETKKEEIKEVPFETLAQWNLEHATLNEAGNFLVEVSNDVVGSSISKELRRLNKRWRKLVSKTQLEMNLPLMIKKQDQPTFDNSGNILSKEEKATVEFSTDMSVELPENYNQNIKAGEKHEKENEEFTGQLKVAKDVEKLIGQVEIWEAEAKSVLDQDDVDTSMEESLKHLIAKGSMFDELMARSEDMLQMDIQNISSQESFQHVLTTGLQAKIQEAKEKVQINVVKLIAALKNLTDVSPDLDIRLKMEESQKELESYMMRAQQLLGQRESPGELISKHKEALIISNTKSLAKYLKAVEELKNNVTEDIKMSLEEKSRDVCAKWESLHHELSLYVQQLKIDIE

SEQ ID NO: 26177 - protein, 316 aa, Homo sapiens
EKGAEGSPGLPGLLGQKGEKGDAGNSIGGGRGEPGPPGLPGPPGPKGEAGVDGQVGPPGQPGDKGERGAAGEQGPDGPKGSKGEPGKGEMVDYNGNINEALQEIRTLALMGPPGLPGQIGPPGAPGIPGQKGEIGLPGPPGHDGEKGPRGKPGDMGPPGPQGPPGKDGPPGVKGENGHPGSPGEKGEKGETGQAGSPVPGLPGPEGPPGPPGLQGVPGPKGEAGLDGAKGEKGFQGEKGDRGPLGLPGTPGPIGVPGPAGPKGERGLHGPPGDKGNRGHRGFKGEKGEPGLPGLDGLDAPCPLGEDGLPVQGCWNK

SEQ ID NO: 26178 - protein, 394 aa, Homo sapiens
MASMAAVLTWALALLSAFSATQARKGFWDYFSQTSGDKGRVEQIHQQKMAREPAGSVRDDLGTKEMMEASSLTAWISVPFSRTLKDSLEQDLNNMNKFLEKLRPLSGSEAPRLPQDPVGMRRQLQEELEEVKARLQPYMAEAHELVGWNLEGLRQQLKPYTMDLMEQVALRVQELQEQLRVVGEDTKAQLLGGVDEAWALLQGLQSRVVHHTGRFKELFHPYAESLVSGIGRHVQELHRSVAPHAPASPARLSRCVQVLSRKLTLKAKALHARIQQNLDQLREELSRAFAGTGTEEGAGPDPQMLSEEVRQRLQAFRQDTYLQIAAFTRAIDQETEEVQQQLAPPPPGHSAFAPEFQQTDSGKVLSKLQARLDDLWEDITHSLHDQGHSHLGDP

SEQ ID NO: 26179 - protein, 445 aa, Homo sapiens
MDMANYSEVLDPTYTTLEFETMQILYNSSDSSAPETSMNTTDNGVNCLCAICGDRATGKHYGASSCDGCKGFFRRSIRKSHVYSCRFSRQCVVDKDKRNQCRYCRLRKCFRAGMKKEAVQNERDRISTRRSTFDGSNIPSINTLAQAEVRSRQISVSSPGSSTDINVKKIASIGDVCESMKQQLLVLVEWAKYIPAFCELPLDDQVALLRAHAGEHLLLGATKRSMMYKDILLLGNNYVIHRNSCEVEISRVANRVLDELVRPFQEIQIDDNEYACLKAIVFFDPDAKGLSDPVKIKNMRFQVQIGLEDYINDRQYDSRGRFGELLLLLPTLQSITWQMIEQIQFVKLFGMVKIDNLLQEMLLGGASNDGSHLHHPMHPHLSQDPLTGQTILLGPMSTLVHADQISTPETPLPSPPQGSGQEQYKIAANQASVISHQHLSKQKQL

SEQ ID NO: 26180 - protein, 388 aa, Homo sapiens
FRTAELQARVLRLEAERGEQQMETAILGRVNQLLDEKWKLHSRRRREAPKTSPGCNCPPGPPGPTGRPGLPGQPGTRGFPGFPGPIGLDGKPGHPGPKGDMGLTGPPGQPGPQGQKGEKGQCGEYPHRLLPLLNSVRLAPPPVIKRRTFQGEQSQASIQGPPGPPGPPGPSGPLGHPGLPGPMGPPGLPGPPGPKGDPGIQGYHGRKGERGMPGMPGKHGAKGAPGIAVAGMKGEPGIPGTKGEKGAEGSPGLPGLLGQKGEKGDAGNSIGGGRGEPGPPGLPGPPGPKGEAGVDGQVGPPGQPGDKGERGAAGEQGPDGPKGSKGEPGKGEMVDYNGNINEALQEIRTLALMGPPGLPGQIGPPGAPGIPGQKGEIGLPGPPGHDGE

SEQ ID NO: 26181 - protein, 929 aa, Homo sapiens
SDVIMYIQECEGLIRQLQVDLQILRDENYYQLEELAFRVMRLQDELVTLRLECTNLYRKGHFTSLELVPPSTLTTTHLKAEPLTKATHSSSTSWFRKPMTRAELVAISSSEDEGNLRFVYELLSWVEEMQMKLERAEWGNDLPSVELQLETQQHIHTSVEELGSSVKEARLYEGKMSQNFHTSYAETLGKLETQYCKLKETSSFRMRHLQSLHKFVSRATAELIWLNEKEEEELAYDWSDNNSNISAKRNYFSELTMELEEKQDVFRSLQDTAELLSLENHPAKQTVEAYSAAVQSQLQWMKQLCLCVEQHVKENTAYFQFFSDARELESFLRNLQDSIKRKYSCDHNTSLSRLEDLLQDSMAQDEKEQLIQSKSSVASLVGRSKTIVQLKPRSPDHVLKNTISVKAVCDYRQIEITICKNDECVLEDNSQRTKWKVISPTGNEAMVPSVCFLIPPPNKDAIEMASRVEQSYQKVMALWHQLHVNTKSLISWNYLRKDLDLVQTWNLEKLRSSAPGECHQIMKNLQAHYEDFLQDSRDSVLFSVADRLRLEEEVEACKARFQHLMKSMENEDKEETVAKMYISELKNIRLRLEEYEQRVVKRIQSLASSRTDRDAWQDNALRIAEQEHTQEDLQQLRSDLDAVSMKCDSFLHQSPSSSSVPTLRSELNLLVEKMDHVYGLSTVYLNKLKTVDVIVRSIQDAELLVKGYEIKLSQEEVVLADLSALEAHWSTLRHWLSDVKDKNSVFSVLDEEIAKAKVVAEQMSRLTPERNLDLERYQEKGSQLQERWHRVIAQLEIRQSELESIQEVLGDYRACHGTLIKWIEETTAQQEMMKPGQAEDSRVLSEQLSQQTALFAEIERNQTKLDQCQKFSQQYSTIVKDYELQLMTYKAFVESQQKSPGKRRRMLSSSDAITQEFMDLRTRYTALVT

SEQ ID NO: 26182 - protein, 572 aa, Homo sapiens
MSQWYELQQLDSKFLEQVHQLYDDSFPMEIRQYLAQWLEKQDWEHAANDVSFATIRFHDLLSQLDDQYSRFSLENNFLLQHNIRKSKRNLQDNFQEDPIQMSMIIYSCLKEERKILENAQRFNQAQSGNIQSTVMLDKQKELDSKVRNVKDKVMCIEHEIKSLEDLQDEYDFKCKTLQNREHETNGVAKSDQKQEQLLLKKMYLMLDNKRKEVVHKIIELLNVTELTQNALINDELVEWKRRQQSACIGGPPNACLDQLQNWFTIVAESLQQVRQQLKKLEELEQKYTYEHDPITKNKQVLWDRTFSLFQQLIQSSFVVERQPCMPTHPQRPLVLKTGVQFTVKLRLLVKLQELNYNLKVKVLFDKDVNERNTVKGFRKFNILGTHTKVMNMEESTNGSLAAEFRHLQLKEQKNAGTRTNEGPLIVTEELHSLSFETQLCQPGLVIDLETTSLPVVVISNVSQLPSGWASILWYNMLVAEPRNLSFFLTPPCARWAQLSEVLSWQFSSVTKRGLNVDQLNMLGEKLLGPNASPDGLIPWTRFCKVHHGLHQQGARACPVEGPAAGDLPAAVQ

SEQ ID NO: 26183 - protein, 964 aa, Homo sapiens
MLSLQDSVFFEISIKSLLKSWSSSSSAPVSKVNKYCASSNFHSTWGKKNIIMSNITIDPDVKPGEYVIKSLFAEFAVQAEKKIEVVMAEPLEKLLSRSLQRGEDLQFDQLISSMSSVAEHCLPSLLRTLFDWYRRQNGTEDESYEYRPRSSTKSKGDEQQRERDYLLERRDLAVDFIFCLVLVEVLKQIPVHPVPDPLVHEVLNLAFKHFKHKEGYSGTNTGNVHIIADLYAEVIGVLAQSKFQAVRKKFVTELKELRQKEQSPHVVQSVISLIMGMKFFRVKMYPVEDFEASFQFMQECAQYFLEVKDKDIKHALAGLFVEILIPVAAAVKNEVNVPCLKNFVEMLYQTTFELSSRKKHSLALYPLITCLLCVSQKQFFLNNWHIFLQNCLSHLKNKDPKMSRVALESLYRLLWVYVIRIKCESNTVTQSRLMSIVSALFPKGSRSVVPRDTPLNIFVKIIQFIAQERLDFAMKEIIFDLLSVGKSTKTFTINPERMNIGLRVFLVIADSLQQKDGEPPMPTTGVILPSGNTLRVKKIFLNKTLTDEEAKVIGMSVYYPQVRKALDSILRHLDKEVGRPMCMTSVQMSNKEPEDMITGERKPKIDLFRTCIAAIPRLIPDGMSRTDLIELLARLTIHMDEELRALAFNTLQALMLDFPDWREDVLSGFVYFIVREVTDVHPTLLDNAVKMLVQLINQWKQAAQMHNKNQDTQHGVANGASHPPPLERSPYSNVFHVVEGFALVILCSSRPATRRLAVSVLREIRALFALLEIPKGDDELAIDVMDRLSPSILESFIHLTGADQTTLLYCPSSIDLQTLAEWNSSPISHQFDVISPSHIWIFAHVTQGQDPWIISLSSFLKQENLPKHCSTAVSYAWMFAYTRLQLLSPQVDINSPINAKKVNTTTSSDSYIGLWRNYLILCCSAATSSSSTSAGSVRCSPPETLASTPDSGYSIDSKIIGIPS

SEQ ID NO: 26184 - protein, 169 aa, Homo sapiens
KDVINEAWFPEDQRVLTPNLVAALPPSTHGAGWQLFCRTVWSAHSGPTRMATAVARCAPDEELLSCSSFSRSGKRRGERMEAQGGKLVCRAHNAFGGEGVYAIARCCLLPQANCSVHTAPPAEASMGTRVHCHQQGHVLTGFLALASDLKERGSDGDGHWRRSIPAFHI

SEQ ID NO: 26185 - protein, 712 aa, Homo sapiens; identical to SEQ ID NO: 11290

SEQ ID NO: 26186 - protein, 1387 aa, Homo sapiens
MPEQERQITAREGASRKILSKLSLPTRAWEPAMKKSFAFDNVGYEGGLDGLGPSSQVATSTVRILGMTCQSCVKSIEDRISNLKGIISMKVSLEQGSATVKYVPSVVCLQQVCHQIGDMGFEASIAEGKAASWPSRSLPAQEAVVKLRVEGMTCQSCVSSIEGKVRKLQGVVRVKVSLSNQEAVITYQPYLIQPEDLRDHVNDMGFEAAIKSKVAPLSLGPIDIERLQSTNPKRPLSSANQNFNNSETLGHQGSHVVTLQLRIDGMHCKSCVLNIEENIGQLLGVQSIQVSLENKTAQVKYDPSCTSPVALQRAIEALPPGNFKVSLPDGAEGSGTDHRSSSSHSPGSPPRNQVQGTCSTTLIAIAGMTCASCVHSIEGMISQLEGVQQISVSLAEGTATVLYNPSVISPEELRAAIEDMGFEASVVSESCSTNPLGNHSAGNSMVQTTDGTPTSVQEVAPHTGRLPANHAPDILAKSPQSTRAVAPQKCFLQIKGMTCASCVSNIERNLQKEAGVLSVLVALMAGKAEIKYDPEVIQPLEIAQFIQDLGFEAAVMEDYAGSDGNIELTITGMTCASCVHNIESKLTRTNGITYASVALATSKALVKFDPEIIGPRDIIKIIEEIGFHASLAQRNPNAHHLDHKMEIKQWKKSFLCSLVFGIPVMALMIYMLIPSNEPHQSMVLDHNIIPGLSILNLIFFILCTFVQSKTSEALAKLMSLQATEATVVTLGEDNLIIREEQVPMELVQRGDIVKVVPGGKFPVDGKVLEGNTMADESLITGEAMPVTKKPGSTVIAGSINAHGSVLIKATHVGNDTTLAQIVKLVEEAQMSKAPIQQLADRFSGYFVPFIIIMSTLTLVVWIVIGFIDFGVVQRYFPNPNKHISQTEVIIRFAFQTSITVLCIACPCSLGLATPTAVMVGTGVAAQNGILIKGGKPLEMAHKIKTVMFDKTGTITHGVPRVMRVLLLGDVATLPLRKVLAVVGTAEASSEHPLGVAVTKYCKEELGTETLGYCTDFQAVPGCGIGCKVSNVEGILAHSERPLSAPASHLNEAGSLPAEKDAVPQTFSVLIGNREWLRRNGLTISSDVSDAMTDHEMKGQTAILVAIDGVLCGMIAIADAVKQEAALAVHTLQSMGVDVVLITGDNRKTARAIATQVGINKVFAEVLPSHKVAKVQELQNKGKKVAMVGDGVNDSPALAQADMGVAIGTGTDVAIEAADVVLIRNDLLDVVASIHLSKRTVRRIRINLVLALIYNLVGIPIAAGVFMPIGIVLQPWMGSAAMAASSVSVVLSSLQLKCYKKPDLERYEAQAHGHMKPLTASQVSVHIGMDDRWRDSPRATPWDQVSYVSQVSLSSLTSDKPSRHSAAADDDGDKWSLLLNGRDEEQYI

SEQ ID NO: 26187 - protein, 475 aa, Homo sapiens
EKGQCGEYPHRECLSSMPAALRSSQIIALKGEQSQASIQGPPGPPGPPGPSGPLGHPGLPGPMGPPGLPGPPGPKGDPGIQGYHGRKGERGMPGMPGKHGAKGAPGIAVAGMKGEPGIPGTKGEKGAEGSPGLPGLLGQKGEKGDAGNSIGGGRGEPGPPGLPGPPGPKGEAGVDGQVGPPGQPGDKGERGAAGEQGPDGPKGSKGEPGKGEMVDYNGNINEALQEIRTLALMGPPGLPGQIGPPGAPGIPGQKGEIGLPGPPGHDGEKGPRGKPGDMGPPGPQGPPGKDGPPGVKGENGHPGSPGEKGEKGETGQAGSPGEKGEAGEKGNPGAEVPGLPGPEGPPGPPGLQGVPGPKGEAGLDGAKGEKGFQGEKGDRGPLGLPGTPGPIGVPGPAGPKGERGSKGDPGMTGPTGAAGLPGLHGPPGDKGNRGERGKKGSRGPKGDKGDQGAPGLDAPCPLGEDGLPVQGCWNK

SEQ ID NO: 26188 - protein, 1001 aa, Homo sapiens
MKIPNIGNVMNKFEILGVVGEGAYGVVLKCRHKETHEIVAIKKFKDSEENEEVKETTLRELKMLRTLKQENIVELKEAFRRRGKLYLVFEYVEKNMLELLEEMPNGVPPEKVKSYIYQLIKAIHWCHKNDIVHRDIKPENLLISHNDVLKLCDFGFARNLSEGNNANYTEYVATRWYRSPELLLGAPYGKSVDMWSVGCILGELSDGQPLFPGESEIDQLFTIQKVLGPLPSEQMKLFYSNPRFHGLRFPAVNHPQSLERRYLGILNSVLLDLMKNLLKLDPADRYLTEQCLNHPTFQTQRLLDRSPSRSAKRKPYHVESSTLSNRNQAGKSTALQSHHRSNSKDIQNLSVGLPRADEGLPANESFLNGNLAGASLSPLHTKTYQASSQPGSTSKDLTNNNIPHLLSPKEAKSKTEFDFNIDPKPSEGPGTKYLKSNSRSQQNRHSFMESSQSKAGTLQPNEKQSRHSYIDTIPQSSRSPSYRTKAKSHGALSDSKSVSNLSEARAQIAEPSTSRYFPSSCLDLNSPTSPTPTRHSDTRTLLSPSGRNNRNEGTLDSRRTTTRHSKTMEELKLPEHMDSSHSHSLSAPHESFSYGLGYTSPFSSQQRPHRHSMYVTRDKVRAKGLDGSLSIGQGMAARANSLQLLSPQPGEQLPPEMTVARSSVKETSREGTSSFHTRQKSEGGVYHDPHSDDGTAPKENRHLYNDPVPRRVGSFYRVPSPRPDNSFHENNVSTRVSSLPSESSSGTNHSKRQPAFDPWKSPENISHSEQLKEKEKQGFFRSMKKKKKKSQTTDSTNGENPSIKKSLFPLFNSKNHLKHSSSLKKLPVVTPPMVPNSDSPDLLTLQKSIHSASTPSSRPKEWRPEKISDLQTQSQPLKSLRKLLHLSSASNHPASSDPRFQPLTAQQTKNSFSEIRIHPLSQASGGSSNIRQEPAPKGRPALQLPGQMDPGWHVSSVTRSATEGPSYSEQLGAKSGPNGHPYNRTNRSRMPNLNDLKETAL

SEQ ID NO: 26189 - protein, 1658 aa, Homo sapiens
MLKCIPLWRCNRHVESVDKRHCSLQAVPEEIYRYSRSLEELLLDANQLRELPKPFFRLLNLRKLGLSDNEIQRLPPEVANFMQLVELDVSRNDIPEIPESIKFCKALEIADFSGNPLSRLPDGFTQLRSLAHLALNDVSLQALPGDVGNLANLVTLELRENLLKSLPASLSFLVKLEQLDLGGNDLEVLPDTLGALPNLRELWLDRNQLSALPPELGNLRRLVCLDVSENRLEELPAELGGLVLLTDLLLSQNLLRRLPDGIGQLKQLSILKVDQNRLCEVTEAIGDCENLSELILTENLLMALPRSLGKLTKLTNLNVDRNHLEALPPEIGGCVALSVLSLRDNRLAVLPPELAHTTELHVLDVAGNRLQSLPFALTHLNLKALWLAENQAQPMLRFQTEDDARTGEKVLTCYLLPQQPPPSLEDAGQQGSLSETWSDAPPSRVSVIQFLEAPIGDEDAEEAAAEKRGLQRRATPHPSELKVMKRSIEGRRSEACPCQPDSGSPLPAEEEKRLSAESGLSEDSRPSASTVSEAEPEGPSAEAQGGSQQEATTAGGEEDAEEDYQEPTVHFAEDALLPGDDREIEEGQPEAPWTLPGGRQRLIRKDTPHYKKHFKISKLPQPEAVVALLQGMQPDGEGPVAPGGWHNGPHAPWAPRAQKEEEEEEEGSPQEEEEEEEEENRAEEEEASTEEEDKEGAVVSAPSVKGVSFDQANNLLIEPARIEEEELTLTILRQTGGLGISIAGGKGSTPYKGDDEGIFISRVSEEGPAARAGVRVGDKLLEVNGVALQGAEHHEAVEALRGAGTAVQMRVWRERMVEPENAVTITPLRPEDDYSPRERRGGGLRLPLLPPESPGPLRQRHVACLARSERGLGFSIAGGKGSTPYRAGDAGIFVSRIAEGGAAHRAGTLQVGDRVLSINGVDVTEARHDHAVSLLTAASPTIALLLEREAGGPLPPSPLPHSSPPTAAVATTSITTATPGVPGLPSLAPSLLAAALEGPYPVEEIRLPRAGGPLGLSIVGGSDHSSHPFGVQEPGVFISKVLPRGLAARSGLRVGDRILAVNGQDVRDATHQEAVSALLRPCLELSLLVRRDPAPPGLRELCIQKAPGERLGISIRGGARGHAGNPRDPTDEGIFISKVSPTGAAGRDGRLRVGLRLLEVNQQSLLGLTHGEAVQLLRSVGDTLTVLVCDGFEASTDAALEVSPGVIANPFAAGIGHRNSLESISSIDRELSPEGPGKEKELPGQTLHWGPEATEAAGRGLQPLKLDYRALAAVPSAGSVQRVPSGAAGGKMAESPCSPSGQQTKPGVIQPLAQAWPRGSPAPRGRGCPHSPPSPPSPDELPANVKQAYRAFAAVPTSHPPEDAPAQPPTPGPAASPEQLSFRERQKYFELEVRVPQAEGPPKRVSLVGADDLRKMQEEEARKLQQKRAQMLREAAEAGAEARLALDGETLGEEEQEDEQPPWASPSPTSRQSPASPPPLGGGAPVRTAKAERRHQERLRVQSPEPPAPERALSPAELRALEAEKRALWRAARMKSLEQDALRAQMVLSRSQEGRGTRGPLERLAEAPSPAPTPSPTPVEDLGPQTSTSPGRLSPDFAEELRSLEPSPSPGPQEEDGEVALVLLGRPSPGAVGPEDVALCSSRRPVRPGRRGLGPVPS

SEQ ID NO: 26190 - protein, 645 aa, Homo sapiens
MNIVENSIFLSNLMKSANTFELKYDLSCELYRMSTYSTFPAGVPVSERSLARAGFYYTGVNDKVKCFCCGLMLDNWKRGDSPTEKHKKLYPSCRFVQSLNSVNNLEATSQPTFPSSVTNSTHSLLPGTENSGYFRGSYSNSPSNPVNSRANQDFSALMRSSYHCAMNNENARLLTFQTWPLTFLSPTDLAKAGFYYIGPGDRVACFACGGKLSNWEPKDNAMSEHLRHFPKCPFIENQLQDTSRYTVSNLSMQTHAARFKTFFNWPSSVLVNPEQLASAGFYYVGNSDDVKCFCCDGGLRCWESGDDPWVQHAKWFPRWSLALLPRLECDGVMSAHCNLRLLGSGNSHASSLASSWDYRCEYLIRIKGQEFIRQVQASYPHLLEQLLSTSDSPGDENAESSIIHFEPGEDHSEDAIMMNTPVINAAVEMGFSRSLVKQTVQRKILATGENYRLVNDLVLDLLNAEDEIREEERERATEEKESNDLLLIRKNRMALFQHLTCVIPILDSLLTAGIINEQEHDVIKQKTQTSLQARELIDTILVKGNIAATVFRNSLQEAEAVLYEHLFVQQDIKYIPTEDVSDLPVEEQLRRLQEERTCKVCMDKEVSIVFIPCGHLVVCKDCAPSLRKCPICRSTIKGTVRTFLS

SEQ ID NO: 26191 - protein, 779 aa, Homo sapiens
MSQWYELQQLDSKFLEQVHQLYDDSFPMEIRQYLAQWLEKQDWEHAANDVSFATIRFHDLLSQLDDQYSRFSLENNFLLQHNIRKSKRNLQDNFQEDPIQMSMIIYSCLKEERKILENAQRFNQAQSGNIQSTVMLDKQKELDSKVRNVKDKVMCIEHEIKSLEDLQDEYDFKCKTLQNREHETNGVAKSDQKQEQLLLKKMYLMLDNKRKEVVHKIIELLNVTELTQNALINDELVEWKRRQQSACIGGPPNACLDQLQNWFTIVAESLQQVRQQLKKLEELEQKYTYEHDPITKNKQVLWDRTFSLFQQLIQSSFVVERQPCMPTHPQRPLVLKTGVQFTVKLRLLVKLQELNYNLKVKVLFDKDVNERNTVKGFRKFNILGTHTKVMNMEESTNGSLAAEFRHLQLKEQKNAGTRTNEGPLIVTEELHSLSFETQLCQPGLVIDLETTSLPVVVISNVSQLPSGWASILWYNMLVAEPRNLSFFLTPPCARWAQLSEVLSWQFSSVTKRGLNVDQLNMLGEKLLGPNASPDGLIPWTRFCKENINDKNFPFWLWIESILELIKKHLLPLWNDGCIMGFISKERERALLKDQQPGTFLLRFSESSREGAITFTWVERSQNGGEPDFHAVEPYTKKELSAVTFPDIIRNYKVMAAENIPENPLKYLYPNIDKDHAFGKYYSRPKEAPEPMELDGPKGTGYIKTELISVSEVHPSRLQTTDNLLPMSPEEFDEVSRIVGSVEFDSMALALLPRLECRAAIMAHCSLDLPSSTDPPNSAS

SEQ ID NO: 26192 - protein, 684 aa, Homo sapiens
MDGPGASAVVVRVGIPDLQQTKCLRLDPAAPVWAAKQRVLCALNHSLQDALNYGLFQPPSRGRAGKFLDEERLLQEYPPNLDTPLPYLEFRYKRRVYAQNLIDDKQFAKLHTKANLKKFMDYVQLHSTDKVARLLDKGLDPNFHDPDSGECPLSLAAQLDNATDLLKVLKNGGAHLDFRTRDGLTAVHCATRQRNAAALTTLLDLGASPDYKDSRGLTPLYHSALGGGDALCCELLLHDHAQLGITDENGWQEIHQACRFGHVQHLEHLLFYGADMGAQNASGNTALHICALYNQESCARVLLFRGANRDVRNYNSQTAFQVAIIAGNFELAEVIKTHKDSDVVPFRETPSYAKRRRLAGPSGLASPRPLQRSASDINLKGEAQPAASPGPSLRSLPHQLLLQRLQEEKDRDRDADQESNISGPLAGRAGQSKISPAPPAPPAPPPRGPKRKLYSAVPGRKFIAVKAHSPQGEGEIPLHRGEAVKVLSIGEGGFWEGTVKGRTGWFPADCVEEVQMRQHDTRPETREDRTKRLFRHYTVGSYDSLTSHSDYVIDDKVAVLQKRDHEGFGFVLRGAKAETPIEEFTPTPAFPALQYLESVDVEGVAWRAGLRTGDFLIEVNGVNVVKVGHKQVVALIRQGGNRLVMKVVSVTRKPEEDGARRRAPGVAEPSFPTPPAAAWRPGLP

SEQ ID NO: 26193 - protein, 373 aa, Homo sapiens
MDEVEQDQHEARLKELFDSFDTTGTGSLGQEELTDLCHMLSLEEVAPVLQQTLLQDNLLGRVHFDQFKEALILILSRTLSNEEHFQEPDCSLEAQPKYVRGGKRYGRRSLPEFQESVEEFPEVTVIEPLDEEARPSHIPAGDCSEHWKTQRSEEYEAEGQLRFWNPDDLNASQSGSSPPQDWIEEKLQEVCEDLGITRDGHLNRKKLVSICEQYGLQNVDGEMLEEVFHNLDPDGTMSVEDFFYGLFKNGKSLTPSASTPYRQLKRHLSMQSFDESGRRTTTSSAMTSTIGFRVFSCLDDGMGHASVERILDTWQEEGIENSQEILKALDFSLDGNINLTELTLALENELLVTKNSIHQAALASFKAEIRHLL

SEQ ID NO: 26194 - protein, 83 aa, Homo sapiens
MEPAFGEVNQLGGVFVNGRPLPNAIRLRIVELAQLGIRPCDISRQLRVSHGCVSKILARYNETGSILPGAIGGSKPRVTTPTV

SEQ ID NO: 26195 - protein, 361 aa, Homo sapiens
VFVRFNSSHGFPVEVDSDTSIFQLKEVVAKRQGVPADQLRVIFAGKELRNDWTVQNCDLDQQSIVHIVQRPWRKGQEMNATGGDDPRNAAGGCEREPQSLTRVDLSSSVLPGDSVGLAVILHTDSRKDSPPAGSPAGRSIYNSFYVYCKGPCQRVQPGKLRVQCSTCRQATLTLTQGPSCWDDVLIPNRMSGECQSPHCPGTSAEFFFKCGAHPTSDKETSVALHLIATNSRNITCITCTDVRSPVLVFQCNSRHVICLDCFHLYCVTRLNDRQFVHDPQLGYSLPCVAGCPNSLIKELHHFRILGEEQYNRYQQYGAEECVLQMGGVLCPRPGCGAGLLPEPDQRKVTCEGGNGLGCGVS

SEQ ID NO: 26196 - protein, 3324 aa, Homo sapiens
MVKRKSSEGQEQDGGRGIPLPIQTFLWRQTSAFLRPKLGKQYEASCVSFERVLVENKLHGLSPALSEAIQSISRWELVQAALPHVLHCTATLLSNRNKLGHQDKLGVAETKLLHTLHWMLLEAPQDCNNERFGGTDRGSSWGGSSSAFIHQVENQGSPGQPCQSSSNDEEENNRRKIFQNSMATVELFVFLFAPLVHRIKESDLTFRLASGLVIWQPMWEHRQPGVSGFTALVKPIRNIITAKRSSPINSQSRTCESPNQDARHLEGLQVVCETFQSDSISPKATISGCHRGNSFDGSLSSQTSQERGPSHSRASLVIPPCQRSRYATYFDVAVLRCLLQPHWSEEGTQWSLMYYLQRLRHMLEEKPEKPPEPDIPLLPRPRSSSMVAAAPSLVNTHKTQDLTMKCNEEEKSLSSEAFSKVSLTNLRRSAVPDLSSDLGMNIFKKFKSRKEDRERKGSIPFHHTGKRRPRRMGVPFLLHEDHLDVSPTRSTFSFGSFSGLGEDRRGIEKGGWQTTILGKLTRRGSSDAATEMESLSARHSHSHHTLVSDLPDPSNSHGENTVKEVRSQISTITVATFNTTLASFNVGYADFFNEHMRKLCNQVPIPEMPHEPLACANLPRSLTDSCINYSYLEDTEHIDGTNNFVHKNGMLDLSVVLKAVYLVLNHDISSRICDVALNIVECLLQLGVVPCVEKNRKKSENKENETLEKRPSEGAFQFKGVSGSSTCGFGGPAVSGAGDGGGEEGGGGDGGGGGGDGGGGGGGGGGPYEKNDKNQEKDESTPVSNHRLALTMLIKIVKSLGCAYGCGEGHRGLSGDRLRHQVFRENAQNCLTKLYKLDKMQFRQTMRDYVNKDSLNNVVDFLHALLGFCMEPVTDNKAGFGNNFTTVDNKSTAQNVEGIIVSAMFKSLITRCASTTHELHSPENLGLYCDIRQLVQFIKEAHGNVFRRVALSALLDSAEKLAPGKKVEENEQESKPAGSKRSEAGSIVDKGQVSSAPEECRSFMSGRPSQTPEHDEQMQGANLGRKDFWRKMFKSQSAASDTSSQSEQDTSECTTAHSGTTSDRRARSRSRRISLRKKLKLPIGNWLKRSSLSGLADGVEDLLDISSVDRLSFIRQSSKVKFTSAVKLSEGGPGSGMENGRDEEENFFKRLGCHSFDDHLSPNQDGGKSKNVVNLGAIRQGMKRFQFLLNCCEPGTIPDASILAAALDLEAPVVARAALFLECARFVHRCNRGNWPEWMKGHHVNITKKGLSRGRSPIVGNKRNQKLQWNAAKLFYQWGDAIGVRLNELCHGESESPANLLGLIYDEETKRRLRKEDEEEDFLDDSTVNPSKCGCPFALKMAACQLLLEITTFLRETFSCLPRPRTEPLVDLESCRLRLDPELDRHRYERKISFAGVLDENEDSKDSLHSSSHTLKSDAGVEEKKVPSRKIRIGGSRLLQIKGTRSFQVKKGGSLSSIRRVGSLKSSKLSRQDSESEAEELQLSQSRDTVTDLEGSPWSASEPSIEPEGMSNAGAEENYHRNMSWLHVMILLCNQQSFICTHVDYCHPHCYLHHSRSCARLVRAIKLLYGDSVDSLRESSNISSVALRGKKQKECSDKSCLRTPSLKKRVSDANLEGKKDSGMLKYIRLQVMSLSPAPLSLLIKAAPILTEEMYGDIQPAAWELLLSMDEHMAGAAAAMFLLCAVKVPEAVSDMLMSEFHHPETVQRLNAVLKFHTLWRFRYQVWPRMEEGAQQIFKIPPPSINFTLPSPVLGMPSVPMFDPPWVPQCSGSVQDPINEDQSKSFSARAVSRSHQRAEHILKNLQQEEEKKRLGREASLITAIPITQEACYEPTCTPNSEPEEEVEEVTNLASRRLSVSPSCTSSTSHRNYSFRRGSVWSVRSAVSAEDEEHTTEHTPNHHVPQPPQAVFPACICAAVLPIVHLMEDGEVREDGVAVSAVAQQVLWNCLIEDPSTVLRHFLEKLTISNRQDELMYMLRKLLLNIGDFPAQTSHILFNYLVGLIMYFVRTPCEWGMDAISATLTFLWEVVGYVEGLFFKDLKQTMKKEQCEVKLLVTASMPGTKTLVVHGQNECDIPTQLPVHEDTQFEALLKECLEFFNIPESQSTHYFLMDKRWNLIHYNKTYVRDIYPFRRSVSPQLNLVHMHPEKGQELIQKQVFTRKLEEVGRVLFLISLTQKIPTAHKQSHVSMLQEDLLRLPSFPRSAIDAEFSLFSDPQAGKELFGLDTLQKSLWIQLLEEMFLGMPSEFPWGDEIMLFLNVFNGALILHPEDSALLRQYAATVINTAVHFNHLFSLSGYQWILPTMLQVYSDYESNPQLRQAIEFACHQFYILHRKPFVLQLFASVAPLLEFPDAANNGPSKGVSAQCLFDLLQSLEGETTDILDILELVKAEKPLKSLDFCYGNEDLTFSISEAIKLCVTVVAYAPESFRSLQMLMVLEALVPCYLQKLKRQTSQVETVPAAREEIAATAALATSLQALLYSVEVLTRPMTAPQMSRCDQGHKGTTTANHTMSSGVNTRYQEQGAKLHFIRENLHLLEEGQGIPREELDERIAREEFRRPRESLLNICTEFYKHCGPRLKILQNLAGEPRVIALELLDVKSHMRLAEIAHSLLKLAPYDTQTMESRGLRRYIMEMLPITDWTAEAVRPALILILKRLDRMFNKIHKMPTLRRQVEWEPASNLIEGVCLTLQRQPIISFLPHLRSLINVCVNLVMGVVGPSSVADGLPLLHLSPYLSPPLPFSTAVVRLVALQIQALKEDFPLSHVISPFTNQERREGMLLNLLIPFVLTVGSGSKDSPWLEQPEVQLLLQTVINVLLPPRIISTSRSKNFMLESSPAHCSTPGDAGKDLRREGLAESTSQAAYLALKVILVCFERQLGSQWYWLSLQVKEMALRKVGGLALWDFLDFIVRTRIPIFVLLRPFIQCKLLAQPAENHEELSARQHIADQLERRFIPRPLCKSSLIAEFNSELKILKEAVHSGSAYQGKTSISTVGTSTSAYRLSLATMSRSNTGTGTVWEQDSEPSQQASQDTLSRTDEEDEENDSISMPSVVSEQEAYLLSAIGRRRFSSHVSSMSVPQAEVGMLPSQSEPNVLDDSQGLAAEGSLSRVASIQSEPGQQNLLVQQPLGRKRGLRQLRRPLLSRQKTQTEPRNRQGARLSTTRRSIQPKTKPSADQKRSVTFIEAQPEPAAAPTDALPATGQLQGCSPAPSRKPEAMDEPVLTSSPAIVVADLHSVSPKQSENFPTEEGEKEEDTEAQGATAHSPLSAQLSDPDDFTGLETSSLLQHGDTVLHISEENGMENPLLSSQFTFTPTELGKTDAVLDESHV

SEQ ID NO: 26197 - protein, 630 aa, Homo sapiens
MADQRMDISSTISDFMSPGPTDLLSSSLGTSGVDCNRKRKGSSTDYQESMDTDKDDPHGRLEYTEHQGRIKNAREAHSQIEKRRRDKMNSFIDELASLVPTCNAMSRKLDKLTVLRMAVQHMKTLRGATNPYTEANYKPTFLSDDELKHLILRAADGFLFVVGCDRGKILFVSESVFKILNYSQNDLIGQSLFDYLHPKDIAKVKEQLSSSDTAPRERLIDAKTGLPVKTDITPGPSRLCSGARRSFFCRMKCNRPSVKVEDKDFPSTCSKKKDRKSFCTIHSTGYLKSWPPTKMGLDEDNEPDNEGCNLSCLVAIGRLHSHVVPQPVNGEIRVKSMEYVSRHAIDGKFVFVDQRATAILAYLPQELLGTSCYEYFHQDDIGHLAECHRQVLQTREKITTNCYKFKIKDGSFITLRSRWFSFMNPWTKEVEYIVSTNTVVLANVLEGGDPTFPQLTASPHSMDSMLPSGEDSFVVGGPKRTHPTVPGIPGGTRAGAGKIGRMIAEEIMEIHRIRGSSPSSCGSSPLNITSTPPPDASSPGGKKILNGGTPDIPSSGLLSGQAQENPGYPYSDSSSILGENPHIGIDMIDNDQGSSSPSNDEAAMAVIMSLLEADAGLGGPVDFSDLPWPL

SEQ ID NO: 26198 - protein, 659 aa, Homo sapiens
MGGQTALNCGVELFKRGVLKEYGVKVLGTSVESIMATEDRQLFSDKLNEINEKIAPSFAVESIEDALKAADTIGYPVMIRSAYALGGLGSGICPNRETLMDLSTKAFAMTNQILVEKSVTGWKEIEYEVVRDADDNCVTVCNMENVDAMGVHTGDSVVVAPAQTLSNAEFQMLRRTSINVVRHLGIVGECNIQFALHPTSMEYCIIEVNARLSRSSALASKATGYPLAFIAAKIALGIPLPEIKNVVSGKTSACFEPSLDYMVTKIPRWDLDRFHGTSSRIGSSMKSVGEVMAIGRTFEESFQKALRMCHPSIEGFTPRLPMNKEWPSNLDLRKELSEPSSTRIYAIAKAIDDNMSLDEIEKLTYIDKWFLYKMRDILNMEKTLKGLNSESMTEETLKRAKEIGFSDKQISKCLGLTEAQTRELRLKKNIHPWVKQIDTLAAEYPSVTNYLYVTYNGQEHDVNFDDHGMMVLGCGPYHIGSSVEFDWCAVSSIRTLRQLGKKTVVVNCNPETVSTDFDECDKLYFEELSLERILDIYHQEACGGCIISVGGQIPNNLAVPLYKNGVKIMGTSPLQIDRAEDRSIFSAVLDELKVAQAPWKAVNTLNEALEFAKSVDYPCLLRPSYVLSGSAMNVVFSEDEMKKFLEEATRVSQSPLFSN

SEQ ID NO: 26199 - protein, 1089 aa, Homo sapiens
MASSPELPTEDEQGSWGIDDLHISLQAEQEDTQKKAFTCWINSQLARHTSPSVISDLFTDIKKGHVLLDLLEVLSGQQLPRDKGSNTFQCRINIEHALTFLRNRSIKLINIHVTDIIDGNPSIILGLIWTIILHFHIEKLAQTLSCNYNQPSLDDVSVVDSSPASSPPAKKCSKVQARWQMSARKALLLWAQEQCATYESVNVTDFKSSWRNGMAFLAIIHALRPDLIDMKSVKHRSNKDNLREAFRIAEQELKIPRLLEPEDVDVVDPDEKSIMTYVAQFLQYSKDAPGTGEEAQGKVKDAMGWLTLQKEKLQKLLKDSENDTYFKKYNSLLSFMESFNEEKKSFLDVLSIKRDLDELDKDHLQLREAWDGLDHQINAWKIKLNYALPPPLHQTEAWLQEVEELMDEDLSASQDHSQAVTLIQEKMTLFKSLMDRFEHHSNILLTFENKDENHLPLVPPNKLEEMKRRINNILEKKFILLLEFHYYKCLVLGLVDEVKSKLDIWNIKYGSRESVELLLEDWHKFIEEKEFLARLDTSFQKCGEIYKNLAGECQNINKQYMMVKSDVCMYRKNIYNVKSTLQKVLACWATYVENLRLLRACFEETKKEEIKEVPFETLAQWNLEHATLNEAGNFLVEVSNDVVGSSISKELRRLNKRWRKLVSKTQLEMNLPLMIKKQDQPTFDNSGNILSKEEKATVEFSTDMSVELPENYNQNIKAGEKHEKENEEFTGQLKVAKDVEKLIGQVEIWEAEAKSVLDQDDVDTSMEESLKHLIAKGSMFDELMARSEDMLQMDIQNISSQESFQHVLTTGLQAKIQEAKEKVQINVVKLIAALKNLTDVSPDLDIRLKMEESQKELESYMMRAQQLLGQRESPGELISKHKEALIISNTKSLAKYLKAVEELKNNVTEDIKMSLEEKSRDVCAKWESLHHELSLYVQQLKIDIEKGKLSDNILKLEKQINKEKKLIRRGRTKGLIKEHEACFSEEGCLYQLNHHMEVLRELCEELPSQKSQQEVKRLLKDYEQKIERLLKCASEIHMTLQPTAGGTSKNEGTITTSENRGGDPHSEAPFAKSDNQPSTEKVLNVDNVF

SEQ ID NO: 26200 - protein, 841 aa, Homo sapiens
MEREPAGTEEPGPPGRRRRREGRTRTVRSNLLPPPGAEDPAAGAAKGERRRRRGCAQHLADNRLKTTKYTLLSFLPKNLFEQFHRPANVYFVFIALLNFVPAVNAFQPGLALAPVLFILAITAFRDLWEDYSRHRSDHKINHLGCLVFSREEKKYVNRFWKEIHVGDFVRLRCNEIFPADILLLSSSDPDGLCHIETANLDGETNLKRRQVVRGFSELVSEFNPLTFTSVIECEKPNNDLSRFRGCIIHDNGKKAGLYKENLLLRGCTLRNTDAVVGIVIYAGHETKALLNNSGPRYKRSKLERQMNCDVLWCVLLLVCMSLFSAVGHGLWIWRYQEKKSLFYVPKSDGSSLSPVTAAVYSFLTMIIVLQVLIPISLYVSIEIVKACQVYFINQDMQLYDEETDSQLQCRALNITEDLGQIQYIFSDKTGTLTENKMVFRRCTVSGVEYSHDANAQRLARYQEADSEEEEVVPRGGSVSQRGSIGSHQSVRVVHRTQSTKSHRRTGSRAEAKRASMLSKHTAFSSPMEKDITPDPKLLEKVSECDKSLAVARHQEHLLAHLSPELSDVFDFFIALTICNTVVVTSPDQPRTKVRVRFELKSPVKTIEDFLRRFTPSCLTSGCSSIGSLAANKSSHKLGSSFPSTPSSDGMLLRLEERLGQPTSAIASNGYSSQADNWASELAQEQESERELRYEAESPDEAALVYAARAYNCVLVERLHDQVSVELPHLGRLTFELLHTLGFDSVRKRMSVVIRHPLTDEINVYTKGADSVVMDLLQPCSSGTPTPAQLHPSSGEEVLRNIPTQFLLLSKVIFINPFPTEMPIGELHGFFRSVFACLKGLD

SEQ ID NO: 26201 - protein, 1892 aa, Homo sapiens
MVDKNIYIIQGEINIVVGAIKRNARWSTHTPLDEERDPLLHSFGHLKEVLNSITELSEIEPNVFLRPFLEVIRSEDTTGPITGLALTSVNKFLSYALIDPTHEGTAEGMENMADAVTHARFVGTDPASDEVVLMKILQVLRTLLLTPVGAHLTNESVCEIMQSCFRICFEMRLSELLRKSAEHTLVDMVQLLFTRLPQFKEEPKNYVGTNMKKISPCLLNKLELSSGEQTKALNQLERVLLFKNLKLKMRAGGMSDSSKWKKQKRSPRPPRHMTKVTPGSELPTPNGTTLSSNLTGGMPFIDVPTPISSASSEAASAVVSPSTDSGLEFSSQTTSKEDLTDLEQPGSPGYSTATEPGSSELGVPEQPDLQEGTHVEKSQSASVESIPEVLEECTSPADHSDSASVHDMDYVNPRGVRFTQSSQKEGTALVPYGLPCIRELFRFLISLTNPHDRHNSEVMIHMGLHLLTVALESAPVAQCQTLLGLIKDEMCRHLFQLLSIERLNLYAASLRVCFLLFESMREHLKFQMEMYIKKLMEIITVENPKMPYEMKEMALEAIVQLWRIPSFVTELYINYDCDYYCSNLFEELTKLLSKNAFPVSGQLYTTHLLSLDALLTVIDSTEAHCQAKVLNSLTQQEKKETARPSCEIVDGTREASNTERTASDGKAVGMASDIPGLHLPGGGRLPPEHGKSGCSDLEEAVDSGADKKFARKPPRFSCLLPDPRELIEIKNKKKLLITGTEQFNQKPKKGIQFLQEKGLLTIPMDNTEVAQWLRENPRLDKKMIGEFVSDRKNIDLLESFVSTFSFQGLRLDEALRLYLEAFRLPGEAPVIQRLLEAFTERWMNCNGSPFANSDACFSLAYAVIMLNTDQHNHNVRKQNAPMTLEEFRKNLKGVNGGKDFEQDILEDMYHAIKNEEIVMPEEQTGLVRENYVWNVLLHRGATPEGIFLRVPTASYDLDLFTMTWGPTIAALSYVFDKSLEETIIQKAISGFRKCAMISAHYGLSDVFDNLIISLCKFTALSSESIENLPSVFGSNPKAHIAAKTVFHLAHRHGDILREGWKNIMEAMLQLFRAQLLPKAMIEVEDFVDPNGKISLQREETPSNRGESTVLSFVSWLTLSGPEQSSVRGPSTENQEAKRVALECIKQCDPEKMITESKFLQLESLQELMKALVSVTPDEETYDEEDAAFCLEMLLRIVLENRDRVGCVWQTVRDHLYHLCVQAQDFCFLVERAVVGLLRLAIRLLRREEISAQVLLSLRILLLMKPSVLSRVSHQVAYGLHELLKTNAANIHSGDDWATLFTLLECIGSGVKPPAALQATARADAPDAGAQSDSELPSYHQNDVSLDRGYTSDSEVYTDHGRPGKIHRSATDADVVNSGWLVVGKDDVDNSKPGPSRPGPSPLINQYSLTVGLDLGPHDTKSLLKCVESLSFIVRDAAHITPDNFELCVKTLRIFVEASLNGGCKSQEKRGKSHKYDSKGNRFKKKSKEGSMLRRPRTSSQHASRGGQSDDDEDEGVPASYHTVSLQVSQDLLDLMHTLHTRAASIYSSWAEEQRHLETGGQKIEADSRTLWAHCWCPLLQGIACLCCDARRQVRMQALTYLQRALLVHDLQKLDALEWESCFNKVLFPLLTKLLENISPADVGGMEETRMRASTLLSKVFLQHLSPLLSLSTFAALWLTILDFMDKYMHAGSSDLLSEAIPESLKNMLLVMDTAEIFHSADARGGGPSALWEITWERIDCFLPHLRDELFKQTVIQDPMPMEPQGQKPLASAHLTSAAGDTRTPGHPPPPEIPSELGACDFEKPESPRAASSSSPGSPVASSPSRLSPTPDGPPPLAQPPLILQPLASPLQVGVPPMTLPIILNPALIEATSPVPLLATPRPTDPIPTSEVN

SEQ ID NO: 26202 - protein, 1340 aa, Homo sapiens
MADRTAPRCQLRLEWVYGYRGHQCRNNLYYTAGKEVVYFVAGVGVVYNTREHSQKFFLGHNDDIISLALHPDKTLVATGQVGKEPYICIWDSYNVQTVSLLKDVHTHGVACLAFDSDGQRLASVGLDAKNTVCIWDWRKGKLLASATGHSDRIFDISWDPYQPNRVVSCGVKHIKFWTLCGNALTAKRGIFGKTGDLQTILCLACAKEDITYSGALNGDIYVWKGLNLVRTIQGAHSAGIFSMYACEEGFATGGRDGCIRLWDTDFKPITKIDLRETEQGYKGLSIRSVCWKADRLLAGTQDSEIFEVIVRERDKPMLILQGHCEGELWALALHPKKPLAVTGSDDRSVRLWSLADHALIARCNMEEAVRSVAFSPDGSQLALGMKDGSFIVLRVRDMTEVVHIKDRKEVIHEMKFSPDGSYLAVGSNDGPVDVYAVAQRYKKIGECSKSLSFITHIDWSLDSKYLQTNDGAGERLFYRMPSGKPLTSKEEIKGIPWASWTCVKGPEVSGIWPKYTEVTDINSVDANYNSSVLVSGDDFGLVKLFKFPCLKRGAKFRKYVGHSAHVTNVRWSHDFQWVLSTGGADHSVFQWRFIPEGVSNGMLETAPQEGGADSYSEESDSDLSDVPELDSDIEQEAQINYDRQVYKEDLPQLKQQSKEKNHAVPFLKREKAPEDSLKLQFIHGYRGYDCRNNLFYTQAGEVVYHIAAVAVVYNRQQHSQRLYLGHDDDILSLTIHPVKDYVATGQVGRDAAIHVWDTQTLKCLSLLKGQHQRGVCALDFSADGKCLVSVGLDDFHSIVFWDWKKGEKIATTRGHKDKIFVVKCNPHHVDKLVTVGIKHIKFWQQAGGGFTSKRGTFGSVGKLETMMCVSYGRMEDLVFSGAATGDIFIWKDILLLKTVKAHDGPVFAMYALDKGFVTGGKDGIVELWDDMFERCLKTYAIKRSALSTSSKGLLLEDNPSIRAITLGHGHILVGTKNGEILEIDKSGPMTLLVQGHMEGEVWGLAAHPLLPICATVSDDKTLRIWELSAQHRMLAVRKLKKGGRCCAFSPDGKALAVGLNDGSFLVVNADTVEDMVSFHHRKEMISDIKFSKDTGKYLAVASHDNFVDIYNVLTSKRVGICKGASSYITHIDWDSRGKLLQVNSGAREQLFFEAPRGKRHIIRPSEIEKIEWDTWTCVLGPTCEGIWPAHSDITDVNAASLTKDCSLLATGDDFGFVKLFSYPVKGQHARFKKYVGHSAHVTNVRWLHNDSVLLTVGGADTALMIWTREFVGTQESKLVDSEESDTDVEEDGGYDSDVAREKAIDYTTKIYAVSIREMEGTKPHQQLKEVSVEERQGIVK

SEQ ID NO: 26203 - protein, 333 aa, Homo sapiens
MFYGIFLYLGEVTKAVQPLLLGRIIASYDPDNKEERSIAIYLGIGLCLLFIVRTLLLHPAIFGLHHIGMQMRIAMFSLIYKKTLKLSSRVLDKISIGQLVSLLSNNLNKFDEGLALAHFVWIAPLQVALLMGLIWELLQASAFCGLGFLIVLALFQAGLGRMMMKYRDQRAGKISERLVITSEMIENIQSVKAYCWEEAMEKMIENLRQTELKLTRKAAYVRYFNSSAFFFSGFFVVFLSVLPYALIKGIILRKIFTTISFCIVLRMAVTRQFPWAVQTWYDSLGAINKIQDFLQKQEYKTLEYNLTTTEVVMENVTAFWEEGFGELFEKAKQ

SEQ ID NO: 26204 - protein, 325 aa, Homo sapiens
MAMNYNAKDEVDGGPPCAPGGTAKTRRPDNTAFKQQRLPAWQPILTAGTVLPIFFIIGLIFIPIGIGIFVTSNNIREIEIDYTGTEPSSPCNKCLSPDVTPCFCTINFTLEKSFENPSKECEPYRRNEDKPIAPCGAIANSMFNDTLELFLIGNDSYPIPIALKKKGIAWWTDKNVKFRNPPGGDNLEERFKGTTKPVNWLKPVYMLDSDPDNNGFINEDFIVWMRTAALPTFRKLYRLIERKSDLHPTLPAGRYSLNVTYNYPVHYFDGRKRMILSTISWMGGKNPFLGIAYIAVGSISFLLGVVLLVINHKYRNSSNTADITI

SEQ ID NO: 26205 - protein, 791 aa, Homo sapiens
METPLQFQRGFFPEQPPPPPRSSHLHCQQQQQSQDKPCPPFAPLPHPHHHPHLAHQQPASGGSSPCLRCNSCASSGAPAAGAGDNLSLLLRTSSPGGAFRTRTSSPLSGSSCCCCCCSSRRGSQLNVSELTPSSHASALRQQYAQQSAQQSASASQYHQCHSLQPAASPTGSLGSLGSGPPLSHHHHHPHPAHHQHHQPQARRESNPFTEIAMSSCRYNGGVMRPLSNLSASRRNLHEMDSEAQPLQPPASVGGGGGASSPSAAAAAAAAVSSSAPEIVVSKPEHNNSNNLALYGTGGGGSTGGGGGGGGSGHGSSSGTKSSKKKNQNIGYKLGHRRALFEKRKRLSDYALIFGMFGIVVMVIETELSWGAYDKASLYSLALKCLISLSTIILLGLIIVYHAREIQLFMVDNGADDWRIAMTYERIFFICLEILVCAIHPIPGNYTFTWTARLAFSYAPSTTTADVDIILSIPMFLRLYLIARVMLLHSKLFTDASSRSIGALNKINFNTRFVMKTLMTICPGTVLLVFSISLWIIAAWTVRACERYHDQQDVTSNFLGAMWLISITFLSIGYGDMVPNTYCGKGVCLLTGIMGAGCTALVVAVVARKLELTKAEKHVHNFMMDTQLTKRVKNAAANVLRETWLIYKNTKLVKKIDHAKVRKHQRKFLQAIHQLRSVKMEQRKLNDQANTLVDLAKTQNIMYDMISDLNERSEDFEKRIVTLETKLETLIGSIHALPGLISQTIRQQQRDFIEAQMESYDKHVTYNAERSRSSSRRRRSSSTAPPTSSESS

SEQ ID NO: 26206 - protein, 427 aa, Homo sapiens
TRSRERADGTGPTKGDMEIPFEEVLERAKAGDPKAQTEVGKHYLQLAGDTDEELNSCTAVDWLVLAAKQGRREAVKLLRRCLADRRGITSENEREVRQLSSETDLERAVRKAALVMYWKLNPKKKKQVAVAELLENVGQVNEHDGGAQPGPVPKSLQKQRRMLERLVSSESKNYIALDDFVEITKKYAKGVIPSSLFLQDDEDDDELAGKSPEDLPLRLKQPHHRLLRLLHPAGHLLPVLHLHGDLHPQGVPGQQGLGELPHPHRPAAALRAQPGCGAGRGQLRLEPPGALCPFPALCLLRHLLLPHRQQGLHPLLGAGCHHRLLYRDQLPEPEHPCRALHAQGPGHRGHRRPAIAAALHALELALPEGPWPDLHHRACRPPGRPQRQRPVPALCLPALSLLPHGTAEEFQGHLLLPCALPGVLHVV

SEQ ID NO: 26207 - protein, 360 aa, Homo sapiens
MAEGYGACLINKPELVQDMVKQVRNQVETPGFSVSIKIRIHDDLKRTVDLCQKAEATGVSWITVHGRTAEERHQPVHYDSIKIIKENMSIPVIANGDIRSLKEAENVWRITGTDGVKKKMTLQWAAVATFLYAEIGLILIFCLPFIPPQRWQKIFSFNVWGKIATFWNKAFLTIIILLIVLFLDAVREVRKYSSVHTIEKSSTSRPDAYEHTQMKLFRSQRNLYISGFSLFFWLVLRRLVTLITQLAKELSNKGVLKTQAENTNKAAKKFMEENEKLKRILKSHGKDEECVLEAENKKLVEDQEKLKTELRKTSDALSKAQNDVMEMKMQSERLSKEYDQLLKEHSELQDRLERGNKKRL

SEQ ID NO: 26208 - protein, 465 aa, Homo sapiens
MSQSGCPSGLLADKNISSSATRVIVKTAGNQKDFMVADDISVRQFKEMLLAHFQCQMDQLVLVFMGCLLKDHDTLSQRGIMDGHTIYLVIKSKQGSRSLAHSFRDLPTNDPCHRDRNTKGNSSRVHQPTGMNQAPVELAHFVGSDAPKVHTQNLEVSHPECKAQMLENPSIQRLLSNMEFMWQFISEHLDTQQLMQQNPEVSRLLLDNSEILLQTLELARNLAMIQEIMQIQQPSQNLEYPLNPQPYLGLETMPGGNNALGQNYADINDQMLNSMQDPFGGNPFTALLAGQVLEQVQSSPPPPPPSQEQQDQLTQHPATRVIYNSSGGFSSNTSANDTLNKVNHTSKANTAMISTKGQSHICATRQPAWIPALPSIELTQQLQEEYKDATVSLSSSRQTLKGDLQLSDEQSSSQITGGMMQLLMNNPYLAAQIMLFTSMPQLSEQWRQQLPTFLQQTQISDLLSA

SEQ ID NO: 26209 - protein, 1281 aa, Homo sapiens
MSSSRAQQMHAFSWIRNTLEEHPETSLPKQEVYDEYKSYCDNLGYHPLSAADFGKIMKNVFPNMKARRLGTRGKSKYCYSGLRKKAFVHMPTLPNLDFHKTGDGLEGAEPSGQLQNIDEEVISSACRLVCEWAQKVLSQPFDTVLELARFLVKSHYIGTKSMAALTVMAAAPAGMKGITQPSAFIPTAESNSFQPQVKTLPSPIDAKQQLQRKIQKKQQEQKLQSPLPGESAAKKSESATSNGVTNLPNGNPSILSPQPIGIVVAAVPSPIPVQRTRQLVTSPSPMSSSDGKVLPLNVQVVTQHMQSVKQAPKTPQNVPASPGGDRSARHRYPQILPKPANTSALTIRSPTTVLFTSSPIKTAVVPASHMSSLNVVKMTTISLTPSNSNTPLKHSASVSSATGTTEESRSVPQIKNGSVVSLQSPGSRSSSAGGTSAVEVKVEPETSSDEHPVQCQENSDEAKAPQTPSALLGQKSNTDGALQKPSNEGVIEIKATKVCDQRTKCKSRCNEMLPGTSTGNNQSTITLSVASQNLTFTSSSSPPNGDSINKDPKLCTKSPRKRLSSTLQETQVPPVKKPIVEQLSAATIEGQKQGSVKKDQKVPHSGKTEGSTAGAQIPSKVSVNVSSHIGANQPLNSSALVISDSALEQQTTPSSSPDIKVKLEGSVFLLDSDSKSVGSFNPNGWQQITKDSEFISASCEQQQDISVMTIPEHSDINDLEKSVWELEGMPQDTYSQQLHSQIQESSLNQIQAHSSDQLPLQSELKEFEPSVSQTNESYFPFDDELTQDSIVEELVLMEQQMSMNNSHSYGNCLGMTLQSQSVTPGAPMSSHTSSTHFYHPIHSNGTPIHTPTPTPTPTPTPTPTPTPTSEMIAGSQSLSRESPCSRLAQTTPVDSALGSSRHTPIGTPHSNCSSSVPPSPVECRNPFAFTPISSSMAYHDASIVSSSPVKPMQRPMATHPDKTKLEWMNNGYSGVGNSSVSGHGILPSYQELVEDRFRKPHAFAVPGQSYQSQSRHHDTHFGRLTPVSPVQHQGATVNNTNKQEGFAVPAPLDNKGTNSSASSNFRCRSVSPAVHRQRNLSGSTLYPVSNIPRSNVTPFGSPVTPEVHVFTNVHTDACANNIAQRSQSVPLTVMMQTAFPNALQKQANSKKITNVLLSKLDSDNDDAVRGLGMNNLPSNYTARMNLTQILEPSTVFPSANPQNMIDSSTSVYEFQTPSYLTKSNSTGQINFSPGDNQAQSEIGEQQLDFNSTVKDLLSGDSLQTNQQLCSCPSSLLAGMQM

SEQ ID NO: 26210 - protein, 289 aa, Homo sapiens
MAMNYNAKDEVDGGPPCAPGGTAKTRRPDNTAFKQQRLPAWQPILTAGTVLPIFFIIGLIFIPIGIGIFVTSNNIREIENPSKECEPYRRNEDKPIAPCGAIANSMFNDTLELFLIGNDSYPIPIALKKKGIAWWTDKNVKFRNPPGGDNLEERFKGTTKPVNWLKPVYMLDSDPDNNGFINEDFIVWMRTAALPTFRKLYRLIERKSDLHPTLPAGRYSLNVTYNYPVHYFDGRKRMILSTISWMGGKNPFLGIAYIAVGSISFLLGVVLLVINHKYRNSSNTADITI

SEQ ID NO: 26211 - protein, 1075 aa, Homo sapiens
MAFTERVNSSGNSLYNDDRNLLRIREKERRNQEAHQEKEAFPEKIPLFGEPYKTAKGDELSSRIQNMLGNYEEVKEFLSTKSHTHRLDASENRLGKPKYPLIPDKGSSIPSSSFHTSVHHQSIHTPASGPLSVGNISHNPKMAQPRTEPMPSLHAKSCGPPDSQHLTQDRLGQEGFGSSHHKKGDRRADGDHCASVTDSAPERELSPLISLPSPVPPLSPIHSNQQTLPRTQGSSKVHGSSNNSKGYCPAKSPKDLAVKVHDKETPQDSLVAPAQPPSQTFPPPSLPSKSVAMQQKPTAYVRPMDGQDQAPSESPELKPLPEDYRQQTFEKTDLKVPAKAKLTKLKMPSQSVEQTYSNEVHCVEEILKEMTHSWPPPLTAIHTPSTAEPSKFPFPTKDSQHVSSVTQNQKQYDTSSKTHSNSQQGTSSMLEDDLQLSDSEDSDSEQTPEKPPSSSAPPSAPQSLPEPVASAHSSSAESESTSDSDSSSDSESESSSSDSEENEPLETPAPEPEPPTTNKWQLDNWLTKVSQPAAPPEGPRSTEPPRRHPESKGSSDSATSQEHSESKDPPPKSSSKAPRAPPEAPHPGKRSCQKSPAQQEPPQRQTVGTKQPKKPVKASARAGSRTSLQGEREPGLLPYGSRDQTSKDKPKVKTKGRPRAAASNEPKPAVPPSSEKKKHKSSLPAPSKALSGPEPAKDNVEDRTPEHFALVPLTESQGPPHSGSGSRTSGCRQAVVVQEDSRKDRLPLPLRDTKLLSPLRDTPPPQSLMVKITLDLLSRIPQPPGKGSRQRKAEDKQPPAGKKHSSEKRSSDSSSKLAKKRKGEAERDCDNKKIRLEKEIKSQSSSSSSSHKESSKTKPSSQSSKKEMLPPPPVSSSSQKPAKPALKRSRREADTCGQDPPKSASSTKSNHKDSSIPKQRRVEGKGSRSSSEHKGSSGDTANPFPVPSLPNGNSKPGKPQVKFDKQQADLHMREAKKMKQKAELMTDRVGKAFKYLEAVLSFIECGIATESESQSSKSAYSVYSETVDLIKFIMSLKSFSDATAPTQEKIFAVLCMRCQSILNMAMFRCKKDIAI

SEQ ID NO: 26212 - protein, 1035 aa, Homo sapiens
MENWTGRPWLYLLLLLSLPQLCLDQEVLSGHSLQTPTEEGQGPEGVWGPWVQWASCSQPCGVGVQRRSRTCQLPTVQLHPSLPLPPRPPRHPEALLPRGQGPRPQTSPETLPLYRTQSRGRGGPLRGPASHLGREETQEIRAARRSRLRDPIKPGMFGYGRVPFALPLHRNRRHPRSPPRSELSLISSRGEEAIPSPTPRAEPFSANGSPQTELPPTELSVHTPSPQAEPLSPETAQTEVAPRTRPAPLRHHPRAQASGTEPPSPTHSLGEGGFFRASPQPRRPSSQGWASPQVAGRRPDPFPSVPRGRGQQGQGPWGTGGTPHGPRLEPDPQHPGAWLPLLSNGPHASSLWSLFAPSSPIPRCSGESEQLRACSQAPCPPEQPDPRALQCAAFNSQEFMGQLYQWEPFTEAPLLPLRHAFFLLPGAGSGDSTGVQGSQRCELNCRPRGFRFYVRHTEKVQDGTLCQPGAPDICVAGRCLSPGCDGILGSGRRPDGCGVCGGDDSTCRLVSGNLTDRGGPLGYQKILWIPAGALRLQIAQLRPSSNYLALRGPGGRSIINGNWAVDPPGSYRAGGTVFRYNRPPREEGKGESLSAEGPTTQPVDVYMIFQEENPGVFYQTPLGSPAAYWKRVGHSACSASCGKGVWRPIFLCISRESGEELDERSCAAGARPPASPEPCHGTPCPPYWEAGEWTSCSRSCGPGTQHRQLQCRQEFGGGGSSVPPERCGHLPRPNITQSCQLRLCGHWEVGSPWSQCSVRCGRGQRSRQVRCVGNNGDEVSEQECASGPPQPPSREACDMGPCTTAWFHSDWSSKCSAECGTGIQRRSVVCLGSGAALGPGQGEAGAGTGQSCPTGSRPPDMRACSLGPCERTWRWYTGPWGECSSECGSGTQRRDIICVSKLGTEFNVTSPSNCSHLPRPPALQPCQGQACQDRWFSTPWSPCSRSCQGGTQTREVQCLSTNQTLSTRCPPQLRPSRKRPCNSQPCSQRPDDQCKDSSPHCPLVVQARLCVYPYYTATCCRSCAHVLERSPQDPS

SEQ ID NO: 26213 - protein, 933 aa, Homo sapiens
MAASTAQCRVTKAESKAAAGPRAGGARERAPAGAPPPSPPSPGPAAPPAPPPPPPPPPPPPPPPPPPPPPRDGPKAEPEPGPGPASAPAPGLGSEENAMVAMDLGSPSLPKKSLPVPGALEQVASRLSSKVAAEVPHGSKQELQDLKAQSLTTCEVCGACFETRKGLSSHARSHLRQLGVAESESSGAPIDLLYELVKQKGLPDAHLGLPPGLAKKSSSLKEVVAGAPRPGLLSLAKPLDAPAVNKAIKSPPGFSAKGLGHPPSSPLLKKTPLALAGSPTPKNPEDKSPQLSLSPRPASPKAQWPQSEDEGPLNLTSGPEPARDIRCEFCGEFFENRKGLSSHARSHLRQMGVTEWYVNGSPIDTLREILKRRTQSRPGGPPNPPGPSPKALAKMMGGAGPGSSLEARSPSDLHISPLAKKLPPPPGSPLGHSPTASPPPTARKMFPGLAAPSLPKKLKPEQIRVEIKREMLPGALHGELHPSEGPWGAPREDMTPLNLSSRAEPVRDIRCEFCGEFFENRKGLSSHARSHLRQMGVTEWSVNGSPIDTLREILKKKSKPCLIKKEPPAGDLAPALAEDGPPTVAPGPVQSPLPLSPLAGRPGKPGAGPAQVPRELSLTPITGAKPSATGYLGSVAAKRPLQEDRLLPAEVKAKTYIQTELPFKAKTLHEKTSHSSTEACCELCGLYFENRKALASHARAHLRQFGVTEWCVNGSPIETLSEWIKHRPQKVGAYRSYIQGGRPFTKKFRSAGHGRDSDKRPSLGLAPGGLAVVGRSAGGEPGPEAGRAADGGERPLAASPPGTVKAEEHQRQNINKFERRQARPPDASAARGGEDTNDLQQKLEEVRQPPPRVRPVPSLVPRPPQTSLVKFVGNIYTLKCRFCEVEFQGPLSIQEEWVRHLQRHILEMNFSKADPPPEESQAPQAQTAAAEAP

SEQ ID NO: 26214 - protein, 567 aa, Homo sapiens
MSGDLLELALKLPHVDYIEEDSSVFAQSIPWNLERITPPRYRADEYQPPDGGSLVEVYLLDTSIQSDHREIEGRVMVTDFENVPEEDGTRFHRQASKCDSHGTHLAGVVSGRDAGVAKGASMRSLRVLNCQGKGTVSGTLIGLEFIRKSQLVQPVGPLVVLLPLAGGYSRVLNAACQRLARAGVVLVTAAGNFRDDACLYSPASAPEVITVGATNAQDQPVTLGTLGTNFGRCVDLFAPGEDIIGASSDCSTCFVSQSGTSQAAAHVAGIAAMMLSAEPELTLAELRQRLIHFSAKDVINEAWFPEDQRVLTPNLVAALPPSTHGAGWQLFCRTVWSAHSGPTRMATAVARCAPDEELLSCSSFSRSGKRRGERMEAQGGKLVCRAHNAFGGEGVYAIARCCLLPQANCSVHTAPPAEASMGTRVHCHQQGHVLTGCSSHWEVEDLGTHKPPVLRPRGQPNQCVGHREASIHASCCHAPGLECKVKEHGIPAPQEQVTVACEEGWTLTGCSALPGTSHVLGAYAVDNTCVVRSRDVSTTGSTSEGAVTAVAICCRSRHLAQASQELQ

SEQ ID NO: 26215 - protein, 597 aa, Homo sapiens
MDEVEQDQHEARLKELFDSFDTTGTGSLGQEELTDLCHMLSLEEVAPVLQQTLLQDNLLGRVHFDQFKEALILILSRTLSNEEHFQEPDCSLEAQPKYVRGGKRYGRRSLPEFQESVEEFPEVTVIEPLDEEARPSHIPAGDCSEHWKTQRSEEYEAEGQLRFWNPDDLNASQSGSSPPQDWIEEKLQEVCEDLGITRDGHLNRKKLVSICEQYGLQNVDGEMLEEVFHNLDPDGTMSVEDFFYGLFKNGKSLTPSASTPYRQLKRHLSMQSFDESGRRTTTSSAMTSTIGFRVFSCLDDGMGHASVERILDTWQEEGIENSQEILKALDFSLDGNINLTELTLALENELLVTKNSIHQAALASFKAEIRHLLERVDQVVREKEKLRSDLDKAEKLKSLMASEVDDHHAAIERRNEYNLRKLDEEYKERIAALKNELRKEREQILQQAGKQRLELEQEIEKAKTEENYIRDRLALSLKENSRLENELLENAEKLAEYENLTNKLQRNLENVLAEKFGDLDPSSAEFFLQEERLTQMRNEYERQCRVLQDQVDELQSELEEYRAQGRVLRLPLKNSPSEEVEANSGGIEPEHDATLCY

SEQ ID NO: 26216 - protein, 1556 aa, Homo sapiens
MWGYLCSLCRPPGSERRTQEAQGAGGDPQAARTPRKGVSPADSCAAPRAGLLLGGSACTQAAAQRQLLHAELKLVLQQKGERTQEPGVQVPPSNAMEARSRSAEELRRAELVEIIVETEAQTGVSGINVAGGGKEGIFVRELREDSPAARSLSLQEGDQLLSARVFFENFKYEDALRLLQCAEPYKVSFCLKRTVPTGDLALRPGTVSGYEIKGPRAKVAKLNIQSLSPVKKKKMVPGALGVPADLAPVDVEFSFPKFSRLRRGLKAEAVKGPVPAAPARRRLQLPRLRVREVAEEAQAARLAAAAPPPRKAKVEAEVAAGARFTAPQVELVGPRLPGAEVGVPQVSAPKAAPSAEAAGGFALHLPTLGLGAPAPPAVEAPAVGIQVPQVELPALPSLPTLPTLPCLETREGAVSVVVPTLDVAAPTVGVDLALPGAEVEARGEAPEVALKMPRLSFPRFGARAKEVAEAKVAKVSPEARVKGPRLRMPTFGLSLLEPRPAAPEVVESKLKLPTIKMPSLGIGVSGPEVKVPKGPEVKLPKAPEVKLPKVPEAALPEVRLPEVELPKVSEMKLPKVPEMAVPEVRLPEVELPKVSEMKLPKVPEMAVPEVRLPEVQLLKVSEMKLPKVPEMAVPEVRLPEVQLPKVSEMKLPEVSEVAVPEVRLPEVQLPKVPEMKVPEMKLPKVPEMKLPEMKLPEVQLPKVPEMAVPDVHLPEVQLPKVPEMKLPEMKLPEVKLPKVPEMAVPDVHLPEVQLPKVPEMKLPKMPEMAVPEVRLPEVQLPKVSEMKLPKVPEMAVPDVHLPEVQLPKVCEMKVPDMKLPEIKLPKVPEMAVPDVHLPEVQLPKVSEIRLPEMQVPKVPDVHLPKAPEVKLPRAPEVQLKATKAEQAEGMEFGFKMPKMTMPKLGRAESPSRGKPGEAGAEVSGKLVTLPCLQPEVDGEAHVGVPSLTLPSVELDLPGALGLQGQVPAAKMGKGERVEGPEVAAGVREVGFRVPSVEIVTPQLPAVEIEEGRLEMIETKVKPSSKFSLPKFGLSGPKVAKAEAEGAGRATKLKVSKFAISLPKARVGAEAEAKGAGEAGLLPALDLSIPQLSLDAHLPSGKVEVAGADLKFKGPRFALPKFGVRGRDTEAAELVPGVAELEGKGWGWDGRVKMPKLKMPSFGLARGKEAEVQGDRASPGEKAESTAVQLKIPEVELVTLGAQEEGRAEGAVAVSGMQLSGLKVSTAGQVVTEGHDAGLRMPPLGISLPQVELTGFGEAGTPGQQAQSTVPSAEGTAGYRVQVPQVTLSLPGAQVAGGELLVGEGVFKMPTVTVPQLELDVGLSREAQAGEAATGEGGLRLKLPTLGARARVGGEGAEEQPPGAERTFCLSLPDVELSPSGGNHAEYQVAEGEGEAGHKLKVRLPRFGLVRAKEGAEEGEKAKSPKLRLPRVGFSQSEMVTGEGSPSPEEEEEEEEEGSGEGASGRRGRVRVRLPRVGLAAPSKASRGQEGDAAPKSPVREKSPKFRFPRVSLSPKARSGSGDQEEGGLRVRLPSVGFSETGAPGPARMEGAQAAAV

SEQ ID NO: 26217 - protein, 313 aa, Homo sapiens
QVYNWFANYRRRQRALPQHMKPAQQATAEDPGARERGPDLLQPSGNPRVDSGFVDRPQWSEEREEKGPPQSPQTTQGPWEPLALAPDFPADETVSKPLDVRSLPGGEMYQEGPGHDPATLPLFCPGPGLCPLAAGNDMLNPSLAAPESWLMSLALASSKEVSFQTGQLVHSHGLDFMMGPADTAVAVSIATLGDPSPTVCRGISLHAGFSGPPSGHPQSVQLEEGLGTSSGRTELRVGSFLVTQPPLQAPEFILTQSPPELAPAPSAFPGPVSAMELSQALPSSQVQCSDSQASGDAFWGARMLLEFSGSSLG

SEQ ID NO: 26218 - protein, 736 aa, Homo sapiens
MWMAWCVAALSVVAVCGTSHETNTVLRVTKDVLSNAISGMLQQSDALHSALREVPLGKARGDGGGPLLGGLLGGSGSGGGGGGGLLGGLLGGGGGGGGSDLLGGGLLGGSGSSGGELLGGGGGSGGGLLGGSGGGLLGGSGGGLLGGSRGGLLGGSGGGLLGGGRHHYNDYRRIEFPRGVGDIPYNDFHVRGPPPVYTNGKKLDGIYQYGHIETNDNTAQLGGKYRYGEILESEGSIRDLRNSGYRSAENAYGGHRGLGRYRAAPVGRLHRRELQPGEIPPGVATGAVGPGGLLGTGGMLAADGILAGQGGLLGGGGLLGDGGLLGGGGVLGVLGEGGILSTVQGITGLRIVELTLPRVSVRLLPGVGVYLSLYTRVAINGKSLIGFLDIAVEVNITAKVRLTMDRTGYPRLVIERCDTLLGGIKVKLLRGLLPNLVDNLVNRVLADVLPDLLCPIVDVVLGLVNDQLGLVDSLIPLGILGSVQYTFSSLPLVTGEFLELDLNTLVGEAGGGLIDYPLGWPAVSPKPMPELPPMGDNTKSQLAMSANFLGSVLTLLQKQHALDLDITNGMFEELPPLTTATLGALIPKVFQQYPESCPLIIRIQVLNPPSVMLQKDKALVKVLATAEVMVSQPKDLETTICLIDVDTEFLASFSTEGDKLMIDAKLEKTSLNLRTSNVGNFDIGLMEVLVEKIFDLAFMPAMNAVLGSGVPLPKILNIDFSNADIDVLEDLLVLSA

SEQ ID NO: 26219 - protein, 411 aa, Homo sapiens
MSVGCACPGCSSKSFKLYSPKEPPNGNAFPPFHPGTMLDRDVGPTPMYPPTYLEPGIGRHTPYGNQTDYRIFELNKRLQNWTEECDNLWWDAFTTEFFEDDAMLTITFCLEDGPKRYTIGRTLIPRYFRSIFEGGATELYYVLKHPKEAFHSNFVSLDCDQGSMVTQHGKPMFTQVCVEGRLYLEFMFDDMMRIKTWHFSIRQHRELIPRSILAMHAQDPQMLDQLSKNITRCGLSNSTLNYLRLCVILEPMQELMSRHKTYSLSPRDCLKTCLFQKWQRMVAPPAEPTRQQPSKRRKRKMSGGSTMSSGGGNTNNSNSKKKSPASTFALSSQVPDVMVVGEPTLMGGEFGDEDERLITRLENTQFDAANGIDDEDSFNNSPALGANSPWNSKPPSSQESKSENPTSQASQ

SEQ ID NO: 26220 - protein, 2693 aa, Homo sapiens
MAAAAGGGSCPGPGSARGRFPGRPRGAGGGGGRGGRGNGAERVRVALRRGGGATGPGGAEPGEDTALLRLLGLRRGLRRLRRLWAGPRVQRGRGRGRGRGWGPSRGCVPEEESSDGESDEEEFQGFHSDEDVAPSSLRSALRSQRDVAPTPPKTPARKRGEEGTERMVQALTELLRRAQAPQAPRSRACEPSTPRRSRGRPPGRPAGPCRRKQQAVVVAEAAVTIPKPEPPPPVVPVKHQTGSWKCKEGPGPGPGTPRRGGQSSRGGRGGRGRGRGGGLPFVIKFVSRAKKVKMGQLSLGLESGQGQGQHEESWQDVPQRRVGSGQGGSPCWKKQEQKLDDEEEEKKEEEEKDKEGEEKEERAVAEEMMPAAEKEEAKLPPPPLTPPAPSPPPPLPPPSTSPPPPLCPPPPPPVSPPPLPSPPPPPAQEEQEESPPPVVPATCSRKRGRPPLTPSQRAEREAARAGPEGTSPPTPTPSTATGGPPEDSPTVAPKSTTFLKNIRQFIMPVVSARSSRVIKTPRRFMDEDPPKPPKVEVSPVLRPPITTSPPVPQEPAPVPSPPRAPTPPSTPVPLPEKRRSILREPTFRWTSLTRELPPPPPAPPPPPAPSPPPAPATSSRRPLLLRAPQFTPSEAHLKIYESVLTPPPLGAPEAPEPEPPPADDSPAEPEPRAVGRTNHLSLPRFAPVVTTPVKAEVSPHGAPALSNGPQTQAQLLQPLQALQTQLLPQALPPPQPQLQPPPSPQQMPPLEKARIAGVGSLPLSGVEEKMFSLLKRAKVQLFKIDQQQQQKVAASMPLSPGGQMEEVAGAVKQISDRGPVRSEDESVEAKRERPSGPESPVQGPRIKHVCRHAAVALGQARAMVPEDVPRLSALPLRDRQDLATEDTSSASETESVPSRSRRGKVEAAGPGGESEPTGSGGTLAHTPRRSLPSHHGKKMRMARCGHCRGCLRVQDCGSCVNCLDKPKFGGPNTKKQCCVYRKCDKIEARKMERLAKKGRTIVKTLLPWDSDESPEASPGPPGPRRGAGAGGPREEVVAHPGPEEQDSLLQRKSARRCVKQRPSYDIFEDSDDSEPGGPPAPRRRTPRENELPLPEPEEQSRPRKPTLQPVLQLKARRRLDKDALAPGPFASFPNGWTGKQKSPDGVHRVRVDFKEDCDLENVWLMGGLSVLTSVPGGPPMVCLLCASKGLHELVFCQVCCDPFHPFCLEEAERPLPQHHDTWCCRRCKFCHVCGRKGRGSKHLLECERCRHAYHPACLGPSYPTRATRKRRHWICSACVRCKSCGATPGKNWDVEWSGDYSLCPRCTQLYEKGNYCPICTRCYEDNDYESKMMQCAQCDHWVHAKCEGLSDEDYEILSGLPDSVLYTCGPCAGAAQPRWREALSGALQGGLRQVLQGLLSSKVVGPLLLCTQCGPDGKQLHPGPCGLQAVSQRFEDGHYKSVHSFMEDMVGILMRHSEEGETPDRRAGGQMKGLLLKLLESAFGWFDAHDPKYWRRSTRLPNGVLPNAVLPPSLDHVYAQWRQQEPETPESGQPPGDPSAAFQGKDPAAFSHLEDPRQCALCLKYGDADSKEAGRLLYIGQNEWTHVNCAIWSAEVFEENDGSLKNVHAAVARGRQMRCELCLKPGATVGCCLSSCLSNFHFMCARASYCIFQDDKKVFCQKHTDLLDGKEIVNPDGFDVLRRVYVDFEGINFKRKFLTGLEPDAINVLIGSIRIDSLGTLSDLSDCEGRLFPIGYQCSRLYWSTVDARRRCWYRCRILEYRPWGPREEPAHLEAAEENQTIVHSPAPSSEPPGGEDPPLDTDVLVPGAPERHSPIQNLDPPLRPDSGSAPPPAPRSFSGARIKVPNYSPSRRPLGGVSFGPLPSPGSPSSLTHHIPTVGDPDFPAPPRRSRRPSPLAPRPPPSRWASPPLKTSPQLRVPPPTSVVTALTPTSGELAPPGPAPSPPPPEDLGPDFEDMEVVSGLSAADLDFAASLLGTEPFQEEIVAAGAMGSSHGGPGDSSEEESSPTSRYIHFPVTVVSAPGLAPSATPGAPRIEQLDGVDDGTDSEAEAVQQPRGQGTPPSGPGVVRAGVLGAAGDRARPPEDLPSEIVDFVLKNLGGPGDGGAGPREESLPPAPPLANGSQPSQGLTASPADPTRTFAWLPGAPGVRVLSLGPAPEPPKPATSKIILVNKLGQVFVKMAGEGEPVPPPVKQPPLPPTISPTAPTSWTLPPGPLLGVLPVVGVVRPAPPPPPPPLTLVLSSGPASPPRQAIRVKRVSTFSGRSPPAPPPYKAPRLDEDGEASEDTPQVPGLGSGGFSRVRMKTPTVRGVLDLDRPGEPAGEESPGPLQERSPLLPLPEDGPPQVPDGPPDLLLESQWHHYSGEASSSEEEPPSPDDKENQAPKRTGPHLRFEISSEDGFSVEAESLEGAWRTLIEKVQEARGHARLRHLSFSGMSGARLLGIHHDAVIFLAEQLPGAQRCQHYKFRYHQQGEGQEEPPLNPHGAARAEVYLRKCTFDMFNFLASQHRVLPEGATCDEEEDEVQLRSTRRATSLELPMAMRFRHLKKTSKEAVGVYRSAIHGRGLFCKRNIDAGEMVIEYSGIVIRSVLTDKREKFYDGKGIGCYMFRMDDFDVVDATMHGNAARFINHSCEPNCFSRVIHVEGQKHIVIFALRRILRGEELTYDYKFPIEDASNKLPCNCGAKRCRRFLN

SEQ ID NO: 26221 - protein, 383 aa, Homo sapiens
MAQVDSQDRPGSNWDLPTQETHTPAQASATPASLAAAVLAKARNSRKVQNQAGRREGGEAEARPYRCLRGGRAFQKPSKPLSPAETRGGAAKRYACELCGKAYSHRGTLQQHRRLHTGERPYQCSFCDKAYTWSSDHRKHIRTHTGEKPYPCPDCGKAFVRSSDLRKHQRNMHSNNKPFPCSECGLTFNKPLSLLRHQRTHLGAKPFRCPACDREFAVASRMVEHQRVHSGERPFPCPTCGKCFTKSSNLSEHQTLHTGQRPFKCADCGVAFAQPSRLVRHQRIHTGERPFPCTQCGQAFARSSTLKRHQQIHSGEKGFLCAECGRAFRIASELAQHIRMHNGERPYQCEDCGQAFTRSNHLQRHRAKHGTCKKEPIPSSSDE

SEQ ID NO: 26222 - protein, 716 aa, Homo sapiens
MSQWYELQQLDSKFLEQVHQLYDDSFPMEIRQYLAQWLEKQDWEHAANDVSFATIRFHDLLSQLDDQYSRFSLENNFLLQHNIRKSKRNLQDNFQEDPIQMSMIIYSCLKEERKILENAQRFNQAQSGNIQSTVMLDKQKELDSKVRNVKDKVMCIEHEIKSLEDLQDEYDFKCKTLQNREHETNGVAKSDQKQEQLLLKKMYLMLDNKRKEVVHKIIELLNVTELTQNALINDELVEWKRRQQSACIGGPPNACLDQLQNWFTIVAESLQQVRQQLKKLEELEQKYTYEHDPITKNKQVLWDRTFSLFQQLIQSSFVVERQPCMPTHPQRPLVLKTGVQFTVKLRLLVKLQELNYNLKVKVLFDKDVNERNTVKGFRKFNILGTHTKVMNMEESTNGSLAAEFRHLQLKEQKNAGTRTNEGPLIVTEELHSLSFETQLCQPGLVIDLETTSLPVVVISNVSQLPSGWASILWYNMLVAEPRNLSFFLTPPCARWAQLSEVLSWQFSSVTKRGLNVDQLNMLGEKLLGPNASPDGLIPWTRFCKENINDKNFPFWLWIESILELIKKHLLPLWNDGCIMGFISKERERALLKDQQPGTFLLRFSESSREGAITFTWVERSQNGGEPDFHAVEPYTKKELSAVTFPDIIRNYKVMAAENIPENPLKYLYPNIDKDHAFGKYYSRPKEAPEPMELDGPKGTGYIKTELISVSEVTVLG

SEQ ID NO: 26223 - protein, 1137 aa, Homo sapiens
MPPLRPIRKSRREPSFKRSQRRKSQPLPKALRCLPQEDPSTSHQSLWLLAEFSCSDHSTKQAGDTDDPPRITQNPVINGNVALSDGHNTAEEDMEDDTSWRSEATFQFTVERFSRLSESVLSPPCFVRNLPWKIMVMPRFYPDRPHQKSVGFFLQCNAESDSTSWSCHAQAVLKIINYRDDEKSFSRRISHLFFHKENDWGFSNFMAWSEVTDPEKGFIDDDKVTFEVFVQADAPHGVAWDSKKHTGYVGLKNQGATCYMNSLLQTLFFTNQLRKAVYMMPTEGDDSSKSVPLALQRVFYELQHSDKPVGTKKLTKSFGWETLDSFMQHDVQELCRVLLDNVENKMKGTCVEGTIPKLFRGKMVSYIQCKEVDYRSDRREDYYDIQLSIKGKKNIFESFVDYVAVEQLDGDNKYDAGEHGLQEAEKGVKFLTLPPVLHLQLMRFMYDPQTDQNIKINDRFEFPEQLPLDEFLQKTDPKDPANYILHAVLVHSGDNHGGHYVVYLNPKGDGKWCKFDDDVVSRCTKEEAIEHNYGGHDDDLSVRHCTNAYMLVYIRESKLSEVLQAVTDHDIPQQLVERLQEEKRIEAQKRKERQEAHLYMQVQIVAEDQFCGHQGNDMYDEEKVKYTVFKVLKNSSLAEFVQSLSQTMGFPQDQIRLWPMQARSNGTKRPAMLDNEADGNKTMIELSDNENPWTIFLETVDPELAASGATLPKFDKDHDVMLFLKMYDPKTRSLNYCGHIYTPISCKIRDLLPVMCDRAGFIQDTSLILYEEVKPNLTERIQDYDVSLDKALDELMDGDIIVFQKDDPENDNSELPTAKEYFRDLYHRVDVIFCDKTIPNDPGFVVTLSNRMNYFQVAKTVAQRLNTDPMLLQFFKSQGYRDGPGNPLRHNYEGTLRDLLQFFKPRQPKKLYYQQLKMKITDFENRRSFKCIWLNSQFREEEITLYPDKHGCVRDLLEECKKAVELGEKASGKLRLLEIVSYKIIGVHQEDELLECLSPATSRTFRIEEIPLDQVDIDKENEMLVTVAHFHKEVFGTFGIPFLLRIHQGEHFREVMKRIQSLLDIQEKEFEKFKFAIVMMGRHQYINEDEYEVNLKDFEPQPGNMSHPRPWLGLDHFNKAPKRSRYTYLEKAIKIHN

SEQ ID NO: 26224 - protein, 1174 aa, Homo sapiens
MHNAKPRPQLLHHDAQGCTFCTELIGGLVVMPCTTILRIWTPFPALLFGPHCQFTPDLSSCSSTFVAETEETMFQLPVNNLGSLRKARKTVKKILSDIGLEYCKEHIEDFKQFEPNDFYLKNTTWEDVGLWDPSLTKNQDYRTKPFCCSACPFSSKFFSAYKSHFRNVHSEDFENRILLNCPYCTFNADKKTLETHIKIFHAPNASAPSSSLSTFKDKNKNDGLKPKQADSVEQAVYYCKKCTYRDPLYEIVRKHIYREHFQHVAAPYIAKAGEKSLNGAVPLGSNAREESSIHCKRCLFMPKSYEALVQHVIEDHERIGYQVTAMIGHTNVVVPRSKPLMLIAPKPQDKKSMGLPPRIGSLASGNVRSLPSQQMVNRLSIPKPNLNSTGVNMMSSVHLQQNNYGVKSVGQGYSVGQSMRLGLGGNAPVSIPQQSQSVKQLLPSGNGRSYGLGSEQRSQAPARYSLQSANASSLSSGQLKSPSLSQSQASRVLGQSSSKPAAAATGPPPGNTSSTQKWKICTICNELFPENVYSVHFEKEHKAEKVPAVANYIMKIHNFTSKCLYCNRYLPTDTLLNHMLIHGLSCPYCRSTFNDVEKMAAHMRMVHIDEEMGPKTDSTLSFDLTLQQGSHTNIHLLVTTYNLRDAPAESVAYHAQNNPPVPPKPQPKVQEKADIPVKSSPQAAVPYKKDVGKTLCPLCFSILKGPISDALAHHLRERHQVIQTVHPVEKKLTYKCIHCLGVYTSNMTASTITLHLVHCRGVGKTQNGQDKTNAPSRLNQSPSLAPVKRTYEQMEFPLLKKRKLDDDSDSPSFFEEKPEEPVVLALDPKGHEDDSYEARKSFLTKYFNKQPYPTRREIEKLAASLWLWKSDIASHFSNKRKKCVRDCEKYKPGVLLGFNMKELNKVKHEMDFDAEWLFENHDEKDSRVNASKTADKKLNLGKEDDSSSDSFENLEEESNESGSPFDPVFEVEPKISNDNPEEHVLKVIPEDASESEEKLDQKEDGSKYETIHLTEEPTKLMHNASDSEVDQDDVVEWKDGASPSESGPGSQQVSDFEDNTCEMKPGTWSDESSQSEDARSSKPAAKKKATMQGDREQLKWKNSSYGKVEGFWSKDQSQWKNASENDERLSNPQIEWQNSTIDSEDGEQFDNMTDGVAEPMHGSLAGVKLSSQQA

SEQ ID NO: 26225 - protein, 5226 aa, Homo sapiens
MNCPVLSLGSGFLFQVIEMLIFAYFASISLTESRGLFPRLENVGAFKKVSIVPTQAVCGLPDRSTFCHSSAAAESIQFCTQRFCIQDCPYRSSHPTYTALFSAGLSSCITPDKNDLHPNAHSNSASFIFGNHKSCFSSPPSPKLMASFTLAVWLKPEQQGVMCVIEKTVDGQIVFKLTISEKETMFYYRTVNGLQPPIKVMTLGRILVKKWIHLSVQVHQTKISFFINGVEKDHTPFNARTLSGSITDFASGTVQIGQSLNGLEQFVGRMQDFRLYQVALTNREILEVFSGDLLRLHAQSHCRCPGSHPRVHPLAQRYCIPNDAGDTADNRVSRLNPEAHPLSFVNDNDVGTSWVSNVFTNITQLNQGVTISVDLENGQYQVFYIIIQFFSPQPTEIRIQRKKENSLDWEDWQYFARNCGAFGMKNNGDLEKPDSVNCLQLSNFTPYSRGNVTFSILTPGPNYRPGYNNFYNTPSLQEFVKATQIRFHFHGQYYTTETAVNLRHRYYAVDEITISGRCQCHGHADNCDTTSQPYRCLCSQESFTEGLHCDRCLPLYNDKPFRQGDQVYAFNCKPCQCNSHSKSCHYNISVDPFPFEHFRGGGGVCDDCEHNTTGRNCELCKDYFFRQVGADPSAIDVCKPCDCDTVGTRNGSILCDQIGGQCNCKRHVSGRQCNQCQNGFYNLQELDPDGCSPCNCNTSGTVDGDITCHQNSGQCKCKANVIGLRCDHCNFGFKFLRSFNDVGCEPCQCNLHGSVNKFCNPHSGQCECKKEAKGLQCDTCRENFYGLDVTNCKACDCDTAGSLPGTVCNAKTGQCICKPNVEGRQCNKCLEGNFYLRQNNSFLCLPCNCDKTGTINGSLLCNKSTGQCPCKLGVTGLRCNQCEPHRYNLTIDNFQHCQMCECDSLGTLPGTICDPISGQCLCVPNRQGRRCNQCQPGFYISPGNATGCLPCSCHTTGAVNHICNSLTGQCVCQDASIAGQRCDQCKDHYFGFDPQTGRCQPCNCHLSGALNETCHLVTGQCFCKQFVTGSKCDACVPSASHLDVNNLLGCSKTPFQQPPPRGQVQSSSAINLSWSPPDSPNAHWLTYSLLRDGFEIYTTEDQYPYSIQYFLDTDLLPYTKYSYYIETTNVHGSTRSVAVTYKTKPGVPEGNLTLSYIIPIGSDSVTLTWTTLSNQSGPIEKYILSCAPLAGGQPCVSYEGHETSATIWNLVPFAKYDFSVQACTSGGCLHSLPITVTTAQAPPQRLSPPKMQKISSTELHVEWSPPAELNGIIIRYELYMRRLRSTKETTSEESRVFQSSGWLSPHSFVESANENALKPPQTMTTITGLEPYTKYEFRVLAVNMAGSVSSAWVSERTGESAPVFMIPPSVFPLSSYSLNISWEKPADNVTRGKVVGYDINMLSEQSPQQSIPMAFSQLLHTAKSQELSYTVEGLKPYRIYEFTITLCNSVGCVTSASGAGQTLAAAPAQLRPPLVKGINSTTIHLRWFPPEELNGPSPIYQLERRESSLPALMTTMMKGIRFIGNGYCKFPSSTHPVNTDFTGIKASFRTKVPEGLIVFAASPGNQEEYFALQLKKGRLYFLFDPQGSPVEVTTTNDHGKQYSDGKWHEIIAIRHQAFGQITLDGIYTGSSAILNGSTVIGDNTGVFLGGLPRSYTILRKDPEIIQKGFVGCLKDVHFMKNYNPSAIWEPLDWQSSEEQINVYNSWEGCPASLNEGAQFLGAGFLELHPYMFHGGMNFEISFKFRTDQLNGLLLFVYNKDGPDFLAMELKSGILTFRLNTSLAFTQVDLLLGLSYCNGKWNKVIIKKEGSFISASVNGLMKHASESGDQPLVVNSPVYVGGIPQELLNSYQHLCLEQGFGGCMKDVKFTRGAVVNLASVSSGAVRVNLDGCLSTDSAVNCRGNDSILVYQGKEQSVYEGGLQPFTEYLYRVIASHEGGSVYSDWSRGRTTGAAPQSVPTPSRVRSLNGYSIEVTWDEPVVRGVIEKYILKAYSEDSTRPPRMPSASAEFVNTSNLTGILTGLLPFKNYAVTLTACTLAGCTESSHALNISTPQEAPQEVQPPVAKSLPSSLLLSWNPPKKANGIITQYCLYMDGRLIYSGSEENYIVTDLAVFTPHQFLLSACTHVGCTNSSWVLLYTAQLPPEHVDSPVLTVLDSRTIHIQWKQPRKISGILERYVLYMSNHTHDFTIWSVIYNSTELFQDHMLQYVLPGNKYLIKLGACTGGGCTVSEASEALTDEDIPEGVPAPKAHSYSPDSFNVSWTEPEYPNGVITSYGLYLDGILIHNSSELSYRAYGFAPWSLHSFRVQACTAKGCALGPLVENRTLEAPPEGTVNVFVKTQGSRKAHVRWEAPFRPNGLLTHSVLFTGIFYVDPVGNNYTLLNVTKVMYSGEETNLWVLIDGLVPFTNYTVQVNISNSQGSLITDPITIAMPPGAPDGVLPPRLSSATPTSLQVVWSTPARNNAPGSPRYQLQMRSGDSTHGFLELFSNPSASLSYEVSDLQPYTEYMFRLVASNGFGSAHSSWIPFMTAEDKPGPVVPPILLDVKSRMMLVTWQHPRKSNGVITHYNIYLHGRLYLRTPGNVTNCTVMHLHPYTAYKFQVEACTSKGCSLSPESQTVWTLPGAPEGIPSPELFSDTPTSVIISWQPPTHPNGLVENFTIERRVKGKEEVTTLVTLPRSHSMRFIDKTSALSPWTKYEYRVLMSTLHGGTNSSAWVEVTTRPSRPAGVQPPVVTVLEPDAVQVTWKPPLIQNGDILSYEIHMPDPHITLTNVTSAVLSQKVTHLIPFTNYSVTIVACSGGNGYLGGCTESLPTYVTTHPTVPQNVGPLSVIPLSESYVVISWQPPSKPNGPNLRYELLRRKIQQPLASNPPEDLNRWHNIYSGTQWLYEDKGLSRFTTYEYMLFVHNSVGFTPSREVTVTTLAGLPERGANLTASVLNHTAIDVRWAKPTVQDLQGEVEYYTLFWSSATSNDSLKILPDVNSHVIGHLKPNTEYWIFISVFNGVHSINSAGLHATTCDGEPQGMLPPEVVIINSTAVRVIWTSPSNPNGVVTEYSIYVNNKLYKTGMNVPGSFILRDLSPFTIYDIQVEVCTIYACVKSNGTQITTVEDTPSDIPTPTIRGITSRSLQIDWVSPRKPNGIILGYDLLWKTWYPCAKTQKLVQDQSDELCKAVRCQKPESICGHICYSSEAKVCCNGVLYNPKPGHRCCEEKYIPFVLNSTGVCCGGRIQEAQPNHQCCSGYYARILPGEVCCPDEQHNRVSVGIGDSCCGRMPYSTSGNQICCAGRLHDGHGQKCCGRQIVSNDLECCGGEEGVVYNRLPGMFCCGQDYVNMSDTICCSASSGESKAHIKKNDPVPVKCCETELIPKSQKCCNGVGYNPLKYVCSDKISTGMMMKETKECRILCPASMEATEHCGRCDFNFTSHICTVIRGSHNSTGKASIEEMCSSAEETIHTGSVNTYSYTDVNLKPYMTYEYRISAWNSYGRGLSKAVRARTKEDVPQGVSPPTWTKIDNLEDTIVLNWRKPIQSNGPIIYYILLRNGIERFRGTSLSFSDKEGIQPFQEYSYQLKACTVAGCATSSKVVAATTQGVPESILPPSITALSAVALHLSWSVPEKSNGVIKEYQIRQVGKGLIHTDTTDRRQHTVTGLQPYTNYSFTLTACTSAGCTSSEPFLGQTLQAAPEGVWVTPRHIIINSTTVELYWSLPEKPNGLVSQYQLSRNGNLLFLGGSEEQNFTDKNLEPNSRYTYKLEVKTGGGSSASDDYIVQTPMSTPEEIYPPYNITVIGPYSIFVAWIPPGILIPEIPVEYNVLLNDGSVTPLAFSVGHHQSTLLENLTPFTQYEIRIQACQNGSCGVSSRMFVKTPEAAPMDLNSPVLKALGSACIEIKWMPPEKPNGIIINYFIYRRPAGIEEESVLFVWSEGALEFMDEGDTLRPFTLYEYRVRACNSKGSVESLWSLTQTLEAPPQDFPAPWAQATSAHSVLLNWTKPESPNGIISHYRVVYQERPDDPTFNSPTVHAFTVKGTSHQAHLYGLEPFTTYRIGVVAANHAGEILSPWTLIQTLESSPSGLRNFIVEQKENGRALLLQWSEPMRTNGVIKTYNIFSDGFLEYSGLNRQFLFRRLDPFTLYTLTLEACTRAGCAHSAPQPLWTDEAPPDSQLAPTVHSVKSTSVELSWSEPVNPNGKIIRYEVIRRCFEGKAWGNQTIQADEKIVFTEYNTERNTFMYNDTGLQPWTQCEYKIYTWNSAGHTCSSWNVVRTLQAPPEGLSPPVISYVSMNPQKLLISWIPPEQSNGIIQSYRLQRNEMLYPFSFDPVTFNYTDEELLPFSTYSYALQACTSGGCSTSKPTSITTLEAAPSEVSPPDLWAVSATQMNVCWSPPTVQNGKITKYLVRYDNKESLAGQGLCLLVSHLQPYSQYNFSLVACTNGGCTASVSKSAWTMEALPENMDSPTLQVTGSESIEITWKPPRNPNGQIRSYELRRDGTIVYTGLETRYRDFTLTPGVEYSYTVTASNSQGGILSPLVKDRTSPSAPSGMEPPKLQARGPQEILVNWDPPVRTNGDIINYTLFIRELFERETKIIHINTTHNSFGMQSYIVNQLKPFHRYEIRIQACTTLGCASSDWTFIQTPEIAPLMQPPPHLEVQMAPGGFQPTVSLLWTGPLQPNGKVLYYELYRRQIATQPRKSNPVLIYNGSSTSFIDSELLPFTEYEYQVWAVNSAGKAPSSWTWCRTGPAPPEGLRAPTFHVISSTQAVVNISAPGKPNGIVSLYRLFSSSAHGAETVLSEGMATQQTLHGLQAFTNYSIGVEACTCFNCCSKGPTAELRTHPAPPSGLSSPQIGTLASRTASFRWSPPMFPNGVIHSYELQFHVACPPDSALPCTPSQIETKYTGLGQKASLGGLQPYTTYKLRVVAHNEVGSTASEWISFTTQKELPQYRAPFSVDSNLSVVCVNWSDTFLLNGQLKEYVLTDGGRRVYSGLDTTLYIPRTADKTFFFQVICTTDEGSVKTPLIQYDTSTGLGLVLTTPGKKKGSRSKSTEFYSELWFIVLMAMLGLILLAIFLSLILQRKIHKEPYIRERPPLVPLQKRMSPLNVYPPGENHMFDSVADISDVSSNVTLKSYTMHFEGLADTKIPRSGTPVSIRSNRSACVLRIPSQNQTSLTYSQGSLHRSVSQLMDIQDKKVLMDNSLWEAIMGHNSGLYVDEEDLMNAIKDFSSVTKERTTFTDTHL

SEQ ID NO: 26226 - protein, 893 aa, Homo sapiens
MESTLSASNMQDPSSSPLEKCLGSANGNGDLDSEGSSLEETGFNWGEYLEETGASAAPHTSFKHVEISIQSNFQPGMKLEVANKNNPDTYWVATIITTCGQLLLLRYCGYGEDRRADFWCDVVIADLHPVGWCTQNNKVLMPPDAIKEKYTDWTEFLIRDLTGSRTAPANLLEGPLRGKGPIDLITVGSLIELQDSQNPFQYWIVSVIENVGGRLRLRYVGLEDTESYDQWLFYLDYRLRPVGWCQENKYRMDPPSEIYPLKMASEWKCTLEKSLIDAAKFPLPMEVFKDHADLRSHFFTVGMKLETVNMCEPFYISPASVTKVFNNHFFQVTIDDLRPEPSKLSMLCHADSLGILPVQWCLKNGVSLTPPKGYSGQDFDWADYHKQHGAQEAPPFCFRNTSFSRGFTKNMKLEAVNPRNPGELCVASVVSVKGRLMWLHLEGLQTPVPEVIVDVESMDIFPVGWCEANSYPLTAPHKTVSQKKRKIAVVQPEKQLPPTVPVKKIPHDLCLFPHLDTTGTVNGKYCCPQLFINHRCFSGPYLNKGRIAELPQSVGPGKCVLVLKEVLSMIINAAYKPGRVLRELQLVEDPHWNFQEETLKAKYRGKTYRAVVKIVRTSDQVANFCRRVCAKLECCPNLFSPVLISENCPENCSIHTKTKYTYYYGKRKKISKPPIGESNPDSGHPKPARRRKRRKSIFVQKKRRSSAVDFTAGSGEESEEEDADAMDDDTASEETGSELRDDQTDTSSAEVPSARPRRAVTLRSGSEPVRRPPPERTRRGRGAPAASSAEEGEKCPPTKPEGTEDTKQEEEERLVLESNPLEWTVTDVVRFIKLTDCAPLAKIFQEQDIDGQALLLLTLPTVQECMELKLGPAIKLCHQIERVKVAFYAQYAN

SEQ ID NO: 26227 - protein, 1066 aa, Homo sapiens
MAASTAQCRVTKAESKAAAGPRAGGARERAPAGAPPPSPPSPGPAAPPAPPPPPPPPPPPPPPPPPPPPPRDGPKAEPEPGPGPASAPAPGLGSEENAMVAMDLGSPSLPKKSLPVPGALEQVASRLSSKVAAEVPHGSKQELQDLKAQSLTTCEVCGACFETRKGLSSHARSHLRQLGVAESESSGAPIDLLYELVKQKGLPDAHLGLPPGLAKKSSSLKEVVAGAPRPGLLSLAKPLDAPAVNKAIKSPPGFSAKGLGHPPSSPLLKKTPLALAGSPTPKNPEDKSPQLSLSPRPASPKAQWPQSEDEGPLNLTLDSDGGRELDCQLCGAWFETRKGLSSHARAHLRHLGVSDPDAKGSPIDVLHGLIRRDGVQIRLPPRRGALAHPGRPPPTSAALSLLPPPPPAKKAKLKAAGMASPWGKQDLSAAAAAGIFWASDVEPSPLNLSSGPEPARDIRCEFCGEFFENRKGLSSHARSHLRQMGVTEWYVNGSPIDTLREILKRRTQSRPGGPPNPPGPSPKALAKMMGGAGPGSSLEARSPSDLHISPLAKKLPPPPGSPLGHSPTASPPPTARKMFPGLAAPSLPKKLKPEQIRVEIKREMLPGALHGELHPSEGPWGAPREDMTPLNLSSRAEPVRDIRCEFCGEFFENRKGLSSHARSHLRQMGVTEWSVNGSPIDTLREILKKKSKPCLIKKEPPAGDLAPALAEDGPPTVAPGPVQSPLPLSPLAGRPGKPGAGPAQVPRELSLTPITGAKPSATGYLGSVAAKRPLQEDRLLPAEVKAKTYIQTELPFKAKTLHEKTSHSSTEACCELCGLYFENRKALASHARAHLRQFGVTEWCVNGSPIETLSEWIKHRPQKVGAYRSYIQGGRPFTKKFRSAGHGRDSDKRPSLGLAPGGLAVVGRSAGGEPGPEAGRAADGGERPLAASPPGTVKAEEHQRQNINKFERRQARPPDASAARGGEDTNDLQQKLEEVRQPPPRVRPVPSLVPRPPQTSLVKFVGNIYTLKCRFCEVEFQGPLSIQEEWVRHLQRHILEMNFSKADPPPEESQAPQAQTAAAEAP

SEQ ID NO: 26228 - protein, 789 aa, Homo sapiens
MSSGQDGGPRSPGRDPELQVEAAEVTTKEYDFGLGAPVSEAENYQNTLQLEQEVRNQDRFISTLKLQIEDLKQTNHGLEEYVRKLLDSKEVVSSQVDDLTSHNEHLCKELIKIDQLAEQLEKEKNFVVDSANKELEEAKIDLICQQNNIIVLEDTIKRLKSIILDTEKAQNKSPSRLDSFVKTLEADKDHYKSEAQHLRKMMRSRSKSPRRPSPTARGANCDVELLKTTTRDREELKCMLEKYERHLAEIQGNVKVLKSERDKIFLLYEQAQEEITRLRREMMKSCKSPKSTTAHAILRRVETERDVAFTDLRRMTTERDSLRERLKIAQETAFNEKAHLEQRIEELECTVHNLDDERMEQMSNMTLMKETISTVEKEMKSLARKAMDTESELGRQKAENNSLRQCTEALIVCEQDVSRMRRQLDETNDELAQIARERDILAHDNDNLQEQFAKAKQENQALSKKLNDTHNELNDIKQKVQDTNLEVNKLKNILKSEESENRQMMEQLRKANEDAENWENKARQSEADNNTLKLELITAEAEGNRLKEKVDSLNREVEQHLNAERSYKSQISTLHKSVVKMEEELQKVQFEKVSALADLSSTRELCIKLDSSKELLNRQLVAKDQEIEMRENELDSAHSEIELLRSQMANERISMQNLEALLVANRDKEYQSQIALQEKESEIQLLKEHLCLAENKMAIQSRDVAQFRNVVTQLEADLDITKRQLGTERFERERAVQELRRQNYSSNAYHMSSTMKPNTKCHSPERAHHRSPDRGLDRSLEENLCYRDF

SEQ ID NO: 26229 - protein, 392 aa, Homo sapiens
MTPQPAGPPDGGWGWVVAAAAFAINGLSYGLLRSLGLAFPDLAEHFDRSAQDTAWISALALAVQQAASPVGSALSTRWGARPVVMVGGVLASLGFVFSAFASDLLHLYLGLGLLAGFGWALVFAPALGTLSRYFSRRRVLAVGLALTGNGASSLLLAPALQLLLDTFGWRGALLLLGAITLHLTPCGALLLPLVLPGDPPAPPRSPLAALGLSLFTRRAFSIFALGTALVGGGYFVPYVHLAPHALDRGLGGYGAALVVAVAAMGDAGARLVCGWLADQGWVPLPRLLAVFGALTGLGLWVVGLVPVVGGEESWGGPLLAAAVAYGLSAGSYAPLVFGVLPGLVGVGGVVQATGLVMMLMSLGGLLGPPLSGKDLSSQICLQLSSAPGVRGF

SEQ ID NO: 26230 - protein, 1460 aa, Homo sapiens
MAEEQQQPPPQQPDAHQQLPPSAPNSGVALPALVPGLPGTEASALQHKIKNSICKTVQSKVDCILQEVEKFTDLEKLYLYLQLPSGLSNGEKSDQNAMSSSRAQQMHAFSWIRNTLEEHPETSLPKQEVYDEYKSYCDNLGYHPLSAADFGKIMKNVFPNMKARRLGTRGKSKYCYSGLRKKAFVHMPTLPNLDFHKTGDGLEGAEPSGQLQNIDEEVISSACRLVCEWAQKVLSQPFDTVLELARFLVKSHYIGTKSMAALTVMAAAPAGMKGITQPSAFIPTAESNSFQPQVKTLPSPIDAKQQLQRKIQKKQQEQKLQSPLPGESAAKKSESATSNGVTNLPNGNPSILSPQPIGIVVAAVPSPIPVQRTRQLVTSPSPMSSSDGKVLPLNVQVVTQHMQSVKQAPKTPQNVPASPGGDRSARHRYPQILPKPANTSALTIRSPTTVLFTSSPIKTAVVPASHMSSLNVVKMTTISLTPSNSNTPLKHSASVSSATGTTEESRSVPQIKNGSVVSLQSPGSRSSSAGGTSAVEVKVEPETSSDEHPVQCQENSDEAKAPQTPSALLGQKSNTDGALQKPSNEGVIEIKATKVCDQRTKCKSRCNEMLPGTSTGNNQSTITLSVASQNLTFTSSSSPPNGDSINKDPKLCTKSPRKRLSSTLQETQVPPVKKPIVEQLSAATIEGQKQGSVKKDQKVPHSGKTEGSTAGAQIPSKVSVNVSSHIGANQPLNSSALVISDSALEQQTTPSSSPDIKVKLEGSVFLLDSDSKSVGSFNPNGWQQITKDSEFISASCEQQQDISVMTIPEHSDINDLEKSVWELEGMPQDTYSQQLHSQIQESSLNQIQAHSSDQLPLQSELKEFEPSVSQTNESYFPFDDELTQDSIVEELVLMEQQMSMNNSHSYGNCLGMTLQSQSVTPGAPMSSHTSSTHFYHPIHSNGTPIHTPTPTPTPTPTPTPTPTPTSEMIAGSQSLSRESPCSRLAQTTPVDSALGSSRHTPIGTPHSNCSSSVPPSPVECRNPFAFTPISSSMAYHDASIVSSSPVKPMQRPMATHPDKTKLEWMNNGYSGVGNSSVSGHGILPSYQELVEDRFRKPHAFAVPGQSYQSQSRHHDTHFGRLTPVSPVQHQGATVNNTNKQEGFAVPAPLDNKGTNSSASSNFRCRSVSPAVHRQRNLSGSTLYPVSNIPRSNVTPFGSPVTPEVHVFTNVHTDACANNIAQRSQSVPLTVMMQTAFPNALQKQANSKKITNVLLSKLDSDNDDAVRGLGMNNLPSNYTARMNLTQILEPSTVFPSANPQNMIDSSTSVYEFQTPSYLTKSNSTGQINFSPGDNQAQSEIGEQQLDFNSTVKDLLSGDSLQTNQQLVGQGASDLTNTASDFSSDIRLSSELSGSINDLNTLDPNLLFDPGRQQGQDDEATLEELKNDPLFQQICSESMNSMTSSGFEWIESKDHPTVEMLG

SEQ ID NO: 26231 - protein, 1655 aa, Homo sapiens
MMKRRQERLGAPCLRIHCRTSNRKSLIVTSSTSPTLPRPHSPLHGHTGNSPLDSPRNFSPNAPAHFSFVPARSHSHRADRTDGRRWSLASLPSSGYGTNTPSSTVSSSCSSQEKLHQLPFQPTADELHFLTKHFSTESVPDEEGRQSPAMRPRSRSLSPGRSPVSFDSEIIMMNHVYKERFPKATAQMEERLAEFISSNTPDSVLPLADGALSFIHHQVIEMARDCLDKSRSGLITSQYFYELQDNLEKLLQDAHERSESSEVAFVMQLVKKLMIIIARPARLLECLEFDPEEFYHLLEAAEGHAKEGQGIKCDIPRYIVSQLGLTRDPLEEMAQLSSCDSPDTPETDDSIEGHGASLPSKKTPSEEDFETIKLISNGAYGAVFLVRHKSTRQRFAMKKINKQNLILRNQIQQAFVERDILTFAENPFVVSMFCSFDTKRHLCMVMEYVEGGDCATLLKNIGALPVDMVRLYFAETVLALEYLHNYGIVHRDLKPDNLLITSMGHIKLTDFGLSKIGLMSLTTNLYEGHIEKDAREFLDKQVCGTPEYIAPEVILRQGYGKPVDWWAMGIILYEFLVGCVPFFGDTPEELFGQVISDEIVWPEGDEALPPDAQDLTSKLLHQNPLERLGTGSAYEVKQHPFFTGLDWTGLLRQKAEFIPQLESEDDTSYFDTRSERYHHMDSEDEEEVSEDGCLEIRQFSSCSPRFNKVYSSMERLSLLEERRTPPPTKRSLSEEKEDHSDGLAGLKGRDRSWVIGSPEILRKRLSVSESSHTESDSSPPMTVRRRCSGLLDAPRFPEGPEEASSTLRRQPQEGIWVLTPPSGEGVSGPVTEHSGEQRPKLDEEAVGRSSGSSPAMETRGRGTSQLAEGATAKAISDLAVRRARHRLLSGDSTEKRTARPVNKVIKSASATALSLLIPSEHHTCSPLASPMSPHSQSSNPSSRDSSPSRDFLPALGSMRPPIIIHRAGKKYGFTLRAIRVYMGDSDVYTVHHMVWHVEDGGPASEAGLRQGDLITHVNGEPVHGLVHTEVVELILKSGNKVAISTTPLENTSIKVGPARKGSYKAKMARRSKRSRGKDGQESRKRSSLFRKITKQASLLHTSRSLSSLNRSLSSGESGPGSPTHSHSLSPRSPTQGYRVTPDAVHSVGGNSSQSSSPSSSVPSSPAGSGHTRPSSLHGLAPKLQRQYRSPRRKSAGSIPLSPLAHTPSPPPPTASPQRSPSPLSGHVAQAFPTKLHLSPPLGRQLSRPKSAEPPRSPLLKRVQSAEKLAAALAASEKKLATSRKHSLDLPHSELKKELPPREVSPLEVVGARSVLSGKGALPGKGVLQPAPSRALGTLRQDRAERRESLQKQEAIREVDSSEDDTEEGPENSQGAQELSLAPHPEVSQSVAPKGAGESGEEDPFPSRDPRSLGPMVPSLLTGITLGPPRMESPSGPHRRLGSPQAIEEAASSSSAGPNLGQSGATDPIPPEGCWKAQHLHTQALTALSPSTSGLTPTSSCSPPSSTSGKLSMWSWKSLIEGPDRASPSRKATMAGGLANLQDLENTTPAQPKNLSPREQGKTQPPSAPRLAHPSYEDPSQGWLWESECAQAVKEDPALSITQVPDASGDRRQDVPCRGCPLTQKSEPSLRRGQEPGGHQKHRDLALVPDELLKQT

SEQ ID NO: 26232 - protein, 454 aa, Homo sapiens
MAAAAECDVVMAATEPELLDDQEAKREAETFKEQGNAYYAKKDYNEAYNYYTKAIDMCPKNASYYGNRAATLMMLGRFREALGDAQQSVRLDDSFVRGHLREGKCHLSLGNAMAACRSFQRALELDHKNAQAQQEFKNANAVMEYEKIAETDFEKRDFRKVVFCMDRALEFAPACHRFKILKAECLAMLGRYPEAQSVASDILRMDSTNADALYVRGLCLYYEDCIEKAVQFFVQALRMAPDHEKACIACRNAKALKAKKEDGNKAFKEGNYKLAYELYTEALGIDPNNIKTNAKLYCNRGTVNSKLRKLDDAIEDCTNAVKLDDTYIKAYLRRAQCYMDTEQYEEAVRDYEKVYQTEKTKEHKQLLKNAQLELKKSKRKDYYKILGVDKNASEDEIKKAYRKRALMHHPGRIGIVEPVLRFRRRRRRSSRKLERPLLSSLIPRKRLAMTVDRT

SEQ ID NO: 26233 - protein, 1446 aa, Homo sapiens
MVSSGCRMRSLWFIIVISFLPNTEGFSRAALPFGLVRRELSCEGYSIDLRCPGSDVIMIESANYGRTDDKICDADPFQMENTDCYLPDAFKIMTQRCNNRTQCIVVTGSDVFPDPCPGTYKYLEVQYECVPYIFVCPGTLKAIVDSPCIYEAEQKAGAWCKDPLQAADKIYFMPWTPYRTDTLIEYASLEDFQNSRQTTTYKLPNRVDGTGFVVYDGAVFFNKERTRNIVKFDLRTRIKSGEAIINYANYHDTSPYRWGGKTDIDLAVDENGLWVIYATEQNNGMIVISQLNPYTLRFEATWETVYDKRAASNAFMICGVLYVVRSVYQDNESETGKNSIDYIYNTRLNRGEYVDVPFPNQYQYIAAVDYNPRDNQLYVWNNNFILRYSLEFGPPDPAQVPTTAVTITSSAELFKTIISTTSTTSQKGPMSTTVAGSQEGSKGTKPPPAVSTTKIPPITNIFPLPERFCEALDSKGIKWPQTQRGMMVERPCPKGTRGTASYLCMISTGTWNPKGPDLSNCTSHWVNQLAQKIRSGENAASLANELAKHTKGPVFAGDVSSSVRLMEQLVDILDAQLQELKPSEKDSAGRSYNKAIVDTVDNLLRPEALESWKHMNSSEQAHTATMLLDTLEEGAFVLADNLLEPTRVSMPTENIVLEVAVLSTEGQIQDFKFPLGIKGAGSSIQLSANTVKQNSRNGLAKLVFIIYRSLGQFLSTENATIKLGADFIGRNSTIAVNSHVISVSINKESSRVYLTDPVLFTLPHIDPDNYFNANCSFWNYSERTMMGYWSTQGCKLVDTNKTRTTCACSHLTNFAILMAHREIAYKDGVHELLLTVITWVGIVISLVCLAICIFTFCFFRGLQSDRNTIHKNLCINLFIAEFIFLIGIDKTKYAIACPIFAGLLHFFFLAAFAWMCLEGVQLYLMLVEVFESEYSRKKYYYVAGYLFPATVVGVSAAIDYKSYGTEKACWLHVDNYFIWSFIGPVTFIILLNIIFLVITLCKMVKHSNTLKPDSSRLENIKSWVLGAFALLCLLGLTWSFGLLFINEETIVMAYLFTIFNAFQGVFIFIFHCALQKKVRKEYGKCFRHSYCCGGLPTESPHSSVKASTTRTSARYSSGTQSRIRRMWNDTVRKQSESSFISGDINSTSTLNQGMTGNYLLTNPLLRPHGTNNPYNTLLAETVVCNAPSAPVFNSPGHSLNNARDTSAMDTLPLNGNFNNSYSLHKGDYNDSVQVVDCGLSLNDTAFEKMIISELVHNNLRGSSKTHNLELTLPVKPVIGGSSSEDDAIVADASSLMHSDNPGLELHHKELEAPLIPQRTHSLLYQPQKKVKSEGTDSYVSQLTAEAEDHLQSPNRDSLYTSMPNLRDSPYPESSPDMEEDLSPSRRSENEDIYYKSMPNLGAGHQLQMCYQISRGNSDGYIIPINKEGCIPEGDVREGQMQLVTSL

SEQ ID NO: 26234 - protein, 1068 aa, Homo sapiens
MGHLPTGIHGARRLLPLLWLFVLFKNATAFHVTVQDDNNIVVSLEASDVISPASVYVVKITGESKNYFFEFEEFNSTLPPPVIFKASYHGLYYIITLVVVNGNVVTKPSRSITVLTKPLPVTSVSIYDYKPSPETGVLFEIHYPEKYNVFTRVNISYWEGKDFRTMLYKDFFKGKTVFNHWLPGMCYSNITFQLVSEATFNKSTLVEYSGVSHEPKQHRTENFTEYLMVDEEAHEFVAELKEPGKYKLSVTTFSSSGSCETRKSQSAKSLSFYISPSGEWIEELTEKPQHVSVHVLSSTTALMSWTSSQENYNSTIVSVVSLTCQKQKESQRLEKQYCTQVNSSKPIIENLVPGAQYQVVIYLRKGPLIGPPSDPVTFAIVPTGIKDLMLYPLGPTAVVLSWTRPYLGVFRKYVVEMFYFNPATMTSEWTTYYEIAATVSLTASVRIANLLPAWYYNFRVTMVTWGDPELSCCDSSTISFITAPVAPEITSVEYFNSLLYISWTYGDDTTDLSHSRMLHWMVVAEGKKKIKKSVTRNVMTAILSLPPGDIYNLSVTACTERGSNTSMLRLVKLEPAPPKSLFAVNKTQTSVTLLWVEEGVADFFEVFCQQVGSSQKTKLQEPVAVSSHVVTISSLLPATAYNCSVTSFSHDSPSVPTFIAVSTMVTEMNPNVVVISVLAILSTLLIGLLLVTLIILRKKHLQMARECGAGTFVNFASLERDGKLPYNWRRSIFAFLTLLPSCLWTDYLLAFYINPWSKNGLKKRKLTNPVQLDDFDAYIKDMAKDSDYKFSLQFEELKLIGLDIPHFAADLPLNRCKNRYTNILPYDFSRVRLVSMNEEEGADYINANYIPGYNSPQEYIATQGPLPETRNDFWKMVLQQKSQIIVMLTQCNEKRRVKCDHYWPFTEEPIAYGDITVEMISEEEQDDWACRHFRINYADEMQDVMHFNYTAWPDHGVPTANAAESILQFVHMVRQQATKSKGPMIIHCSAGVGRTGTFIALDRLLQHIRDHEFVDILGLVSEMRSYRMSMVQTEEQYIFIHQCVQLMWMKKKQQFCISDVIYENVSKS

SEQ ID NO: 26235 - protein, 926 aa, Homo sapiens
MNYVGQLAGQVFVTVKELYKGLNPATLSGCIDIIVIRQPNGNLQCSPFHVRFGKMGVLRSREKVVDIEINGESVDLHMKLGDNGEAFFVQETDNDQEVIPMHLATSPILSEGASRMECQLKRGSVDRMRGLDPSTPAQVIAPSETPSSSSVVKKRRKRRRKSQLDSLKRDDNMNTSEDEDMFPIEMSSDEAMELLESSRTLPNDIPPFQDDIPEENLSLAVIYPQSASYPNSDREWSPTPSSLVDCKRTAPHLAVAAEGGLSSSCPPQSSLFHPSESPSGSRPSTPKSDSELVSKSTERTGQKNPEMLWLWGELPQAAKSSSPHKMKESSPLSSRKICDKSHFQAIHSESSDTFSDQSPTLVGGALLDQNKPQTEMQFVNEEDLETLGAAAPLLPMIEELKPPSASVVQTANKTDSPSRKRDKRSRHLGADGVYLDDLTDMDPEVAALYFPKNGDPSGLAKHASDNGARSANQSPQSVGSSGVDSGVESTSDGLRDLPSIAISLCGGLSDHREITKDAFLEQAVSYQQFVDNPAIIDDPNLVVKIGSKYYNWTTAAPLLLAMQAFQKPLPKATVESIMRDKMPKKGGRWWFSWRGRNTTIKEESKPEQCLAGKAHSTGEQPPQLSLATRVKHESSSSDEERAAAKPSNAGHLPLLPNVSYKKTLRLTSEQLKSLKLKNGPNDVVFSVTTQYQGTCRCEGTIYLWNWDDKVIISDIDGTITRSDTLGHILPTLGKDWTHQGIAKLYHKVSQNGYKFLYCSARAIGMADMTRGYLHWVNERGTVLPQGPLLLSPSSLFSALHREVIEKKPEKFKVQCLTDIKNLFFPNTEPFYAAFGNRPADVYSYKQVGVSLNRIFTVNPKGELVQEHAKTNISSYVRLCEVVDHVFPLLKRSHSSDFPCSDTFSNFTFWREPLPPFENQDIHSASA

SEQ ID NO: 26236 - protein, 345 aa, Homo sapiens
MFCSEKKLREVERIVKANDREYNEKFQYADNRIHTSKYNILTFLPINLFEQFQRVANAYFLCLLILQLIPEISSLTWFTTIVPLVLVITMTAVKDATDDYFRHKSDNQVNNRQSEVLINSKLQNEKWMNVKVGDIIKLENNQFVAADLLLLSSSEPHGLCYVETAELDGETNLKVRHALSVTSELGADISRLAGFDGIVVCEVPNNKLDKFMGILSWKDSKHSLNNEKIILRGCILRNTSWCFGMVIFAGPDTKLMQNSGKTKFKRTSIDRLMNTLVLWIFGFLICLGIILAIGNSIWESQTGDQFRTFLFWNEGEKSSVFSGFLTFWSYIIILNTVVPISLYVR

SEQ ID NO: 26237 - protein, 697 aa, Homo sapiens
MAERKGTAKVDFLKKIEKEIQQKWDTERVFEVNASNLEKQTSKGKYFVTFPYPYMNGRLHLGHTFSLSKCEFAVGYQRLKGKCCLFPFGLHCTGMPIKACADKLKREIELYGCPPDFPDEEEEEEETSVKTEDIIIKDKAKGKKSKAAAKAGSSKYQWGIMKSLGLSDEEIVKFSEAEHWLDYFPPLAIQDLKRMGLKVDWRRSFITTDVNPYYDSFVRWQFLTLRERNKIKFGKRYTIYSPKDGQPCMDHDRQTGEGVGPQEYTLLKLKVLEPYPSKLSGLKGKNIFLVAATLRPETMFGQTNCWVRPDMKYIGFETVNGDIFICTQKAARNMSYQGFTKDNGVVPVVKELMGEEILGASLSAPLTSYKVIYVLPMLTIKEDKGTGVVTSVPSDSPDDIAALRDLKKKQALRAKYGIRDDMVLPFEPVPVIEIPGFGNLSAVTICDELKIQSQNDREKLAEAKEKIYLKGFYEGIMLVDGFKGQKVQDVKKTIQKKMIDAGDALIYMEPEKQVMSRSSDECVVALCDQWYLDYGEENWKKQTSQCLKNLETFCEETRRNFEATLGWLQEHACSRTYGLGTHLPWDEQWLIESLSDSTIYMAFYTVAHLLQGGNLHGQAESPLGIRPQQMTKEVWDYVFFKEAPFPKTQIAKEKLDQLKQEFEFWYPVDLRVSGKDLVPNHLSYYLYNHVAMWPEQR

SEQ ID NO: 26238 - protein, 456 aa, Homo sapiens
MAAAAECDVVMAATEPELLDDQEAKREAETFKEQGNAYYAKKDYNEAYNYYTKAIDMCPKNASYYGNRAATLMMLGRFREALGDAQQSVRLDDSFVRFKNANAVMEYEKIAETDFEKRDFRKVVFCMDRALEFAPACHRFKILKAECLAMLGRYPEAQSVASDILRMDSTNADALYVRGLCLYYEDCIEKAVQFFVQALRMAPDHEKACIACRNAKALKAKKEDGNKAFKEGNYKLAYELYTEALGIDPNNIKTNAKLYCNRGTVNSKLRKLDDAIEDCTNAVKLDDTYIKAYLRRAQCYMDTEQYEEAVRDYEKVYQTEKTKEHKQLLKNAQLELKKSKRKDYYKILGVDKNASEDEIKKAYRKRALMHHPDRHSGASAEVQKEEEKKFKEVGEAFTILSDPKKKTRYDSGQDLDEEGMNMGDFDPNNIFKAFFGGPGGFSFEASGPGNFFFQFG

SEQ ID NO: 26239 - protein, 576 aa, Homo sapiens
MPLGRLAGSARSEEGSEAFLEGMVDWELSRLQRQCKVMEGERRAYSKEVHQRINKQLEEIRRLEEVRGDLQVQISAAQNQVKRLRDSQRLENMDRLLKGRAQVQAEIEELQEQTRALDKQIQEWETRIFTHSKNVRSPGFILDQKVKIRRRIRILENQLDRVTCHFDNQLVRNAALREELDLLRIDRNRYLNVDRKLKKEIHHLHHLVSTLILSSTSAYAVREEAKAKMGLLRERAEKEEAQSEMEAQVLQRQILHLEQLHHFLKLKNNDRQPDPDVLEKREKQAGEVAEGVWKTSQERLVLCYEDALNKLSQLMGESDPDLLVQKYLEIEERNFAEFNFINEQNLELEHVQEEIKEMQEALVSARASKDDQHLLQEQQQKVLQQRMDKVHSEAERLEARFQDVRGQLEKLKADIQLLFTKAHCDSSMIDDLLGVKTSMGDRDMGLFLSLIEKRLVELLTVQAFLHAQSFTSLADAALLVLGQSLEDLPKKMAPLQPPDTLEDPPGFEASDDYPMSREELLSQVEKLVRVGPAGVGPGLSVCRGPVHLPCRWSSRSRRRRSARRTWPPPPRSWTAP

SEQ ID NO: 26240 - protein, 583 aa, Homo sapiens
MPLRKMKIPFLLLFFLWEAESHAASRPNIILVMADDLGIGDPGCYGNKTIRTPNIDRLASGGVKLTQHLAASPLCTPSRAAFMTGRYPVRSGMASWSRTGVFLFTASSGGLPTDEITFAKLLKDQGYSTALIGKWHLGMSCHSKTDFCHHPLHHGFNYFYGISLTNLRDCKPGEGSVFTTGFKRLVFLPLQIVGVTLLTLAALNCLGLLHVPLGVFFSLLFLAALILTLFLGFLHYFRPLNCFMMRNYEIIQQPMSYDNLTQRLTVEAAQFIQRNTETPFLLVLSYLHVHTALFSSKDFAGKSQHGVYGDAVEEMDWSVGQILNLLDELRLANDTLIYFTSDQGAHVEEVSSKGEIHGGSNGIYKGGKANNWEGGIRVPGILRWPRVIQAGQKIDEPTSNMDIFPTVAKLAGAPLPEDRIIDGRDLMPLLEGKSQRSDHEFLFHYCNAYLNAVRWHPQNSTSIWKAFFFTPNFNPVGSNGCFATHVCFCFGSYVTHHDPPLLFDISKDPRERNPLTPASEPRFYEILKVMQEAADRHTQTLPEVPDQFSWNNFLWKPWLQLCCPSTGLSCQCDREKQDKRLSR

SEQ ID NO: 26241 - protein, 1051 aa, Homo sapiens
MLYKDFFKGKTVFNHWLPGMCYSNITFQLVSEATFNKSTLVEYSGVSHEPKQHRTAPYPPQNISVRIVNLNKNNWEEQSGNFPEESFMRSQDTIGKEKLFHFTEETPEIPSGNISSGWPDFNSSDYETTSQPYWWDSASAAPESEDEFVSVLPMEYENNSTLSETEKSTSGSFSFFPVQMILTWLPPKPPTAFDGFHIHIEREENFTEYLMVDEEAHEFVAELKEPGKYKLSVTTFSSSGSCETRKSQSAKSLSFYISPSGEWIEELTEKPQHVSVHVLSSTTALMSWTSSQENYNSTIVSVVSLTCQKQKESQRLEKQYCTQVNSSKPIIENLVPGAQYQVVIYLRKGPLIGPPSDPVTFAIVPTGIKDLMLYPLGPTAVVLSWTRPYLGVFRKYVVEMFYFNPATMTSEWTTYYEIAATVSLTASVRIANLLPAWYYNFRVTMVTWGDPELSCCDSSTISFITAPVAPEITSVEYFNSLLYISWTYGDDTTDLSHSRMLHWMVVAEGKKKIKKSVTRNVMTAILSLPPGDIYNLSVTACTERGSNTSMLRLVKLEPAPPKSLFAVNKTQTSVTLLWVEEGVADFFEVFCQQVGSSQKTKLQEPVAVSSHVVTISSLLPATAYNCSVTSFSHDSPSVPTFIAVSTMVTEMNPNVVVISVLAILSTLLIGLLLVTLIILRKKHLQMARECGAGTFVNFASLERDGKLPYNWRRSIFAFLTLLPSCLWTDYLLAFYINPWSKNGLKKRKLTNPVQLDDFDAYIKDMAKDSDYKFSLQFEELKLIGLDIPHFAADLPLNRCKNRYTNILPYDFSRVRLVSMNEEEGADYINANYIPGYNSPQEYIATQGPLPETRNDFWKMVLQQKSQIIVMLTQCNEKRRVKCDHYWPFTEEPIAYGDITVEMISEEEQDDWACRHFRINYADEMQDVMHFNYTAWPDHGVPTANAAESILQFVHMVRQQATKSKGPMIIHCSAGVGRTGTFIALDRLLQHIRDHEFVDILGLVSEMRSYRMSMVQTEEQYIFIHQCVQLMWMKKKQQFCISDVIYENVSKS

SEQ ID NO: 26242 - protein, 707 aa, Homo sapiens
MPLGRLAGSARSEEGSEAFLEGMVDWELSRLQRQCKVMEGERRAYSKEVHQRINKQLEEIRRLEEVRGDLQVQISAAQNQVKRLRDSQRLENMDRLLKGRAQVQAEIEELQEQTRALDKQIQEWETRIFTHSKNVRSPGFILDQKVKIRRRIRILENQLDRVTCHFDNQLVRNAALREELDLLRIDRNRYLNVDRKLKKEIHHLHHLVSTLILSSTSAYAVREEAKAKMGLLRERAEKEEAQSEMEAQVLQRQILHLEQLHHFLKLKNNDRQPDPDVLEKREKQAGEVAEGVWKTSQERLVLCYEDALNKLSQLMGESDPDLLVQKYLEIEERNFAEFNFINEQNLELEHVQEEIKEMQEALVSARASKDDQHLLQEQQQKVLQQRMDKVHSEAERLEARFQDVRGQLEKLKADIQLLFTKAHCDSSMIDDLLGVKTSMGDRDMGLFLSLIEKRLVELLTVQAFLHAQSFTSLADAALLVLGQSLEDLPKKMAPLQPPDTLEDPPGFEASDDYPMSREELLSQVEKLVELQEQAEAQRQKDLAAAAAKLDGTLSVDLASTQRAGSSTVLVPTRHPHAIPGSILSHKTSRDRGSLGHVTFGGLSSSTGHLPSHITHGDPNTGHVTFGSTSASSGGHVTFRPVSASSYLGSTGYVGSSRGGENTEGGVESGGTASDSSGGLGSSRDHVSSTGPASSTGPGSSTSKDSRG

SEQ ID NO: 26243 - protein, 1130 aa, Homo sapiens
MAERKGTAKVDFLKKIEKEIQQKWDTERVFEVNASNLEKQTSKGKYFVTFPYPYMNGRLHLGHTFSLSKCEFAVGYQRLKGKCCLFPFGLHCTGMPIKSKAAAKAGSSKYQWGIMKSLGLSDEEIVKFSEAEHWLDYFPPLAIQDLKRMGLKVDWRRSFITTDVNPYYDSFVRWQFLTLRERNKIKFGKRYTIYSPKDGQPCMDHDRQTGEGVGPQEYTLLKLKVLEPYPSKLSGLKGKNIFLVAATLRPETMFGQTNCWVRPDMKYIGFETVNGDIFICTQKAARNMSYQGFTKDNGVVPVVKELMGEEILGASLSAPLTSYKVIYVLPMLTIKEDKGTGVVTSVPSDSPDDIAALRDLKKKQALRAKYGIRDDMVLPFEPVPVIEIPGFGNLSAVTICDELKIQSQNDREKLAEAKEKIYLKGFYEGIMLVDGFKGQKVQDVKKTIQKKMIDAGDALIYMEPEKQVMSRSSDECVVALCDQWYLDYGEENWKKQTSQCLKNLETFCEETRRNFEATLGWLQEHACSRTYGLGTHLPWDEQWLIESLSDSTIYMAFYTVAHLLQGGNLHGQAESPLGIRPQQMTKEVWDYVFFKEAPFPKTQIAKEKLDQLKQEFEFWYPVDLRVSGKDLVPNHLSYYLYNHVAMWPEQSDKWPTAVRANGHLLLNSEKMSKSTGNFLTLTQAIDKFSADGMRLALADAGDTVEDANFVEAMADAGILRLYTWVEWVKEMVANWDSLRSGPASTFNDRVFASELNAGIIKTDQNYEKMMFKEALKTGFFEFQAAKDKYRELAVEGMHRELVFRFIEVQTLLLAPFCPHLCEHIWTLLGKPDSIMNASWPVAGPVNEVLIHSSQYLMEVTHDLRLRLKNYMMPAKGKKTDKQPLQKPSHCTIYVAKNYPPWQHTTLSVLRKHFEANNGKLPDNKVIASELGSMPELKKYMKKVMPFVAMIKENLEKMGPRILDLQLEFDEKAVLMENIVYLTNSLELEHIEVKFASEAEDKIREDCCPGKPLNVFRIEPGVSVSLVNPQPSNGHFSTKIEIRQGDNCDSIIRRLMKMNRGIKDLSKVKLMRFDDPLLGPRRVPVLGKEYTEKTPISEHAVFNVDLMSKKIHLTENGIRVDIGDTIIYLVH

SEQ ID NO: 26244 - protein, 1667 aa, Homo sapiens
PGFTGDYCETEIDLCYSDPCGANGRCRSREGGYTCECFEDFTGEHCEVDARSGRCANGVCKNGGTCVNLLIGGFHCVCPPGEYERPYCEVTTRSFPPQSFVTFRGLRQRFHFTISLTFATQERNGLLLYNGRFNEKHDFIALEIVDEQVQLTFSAGETTTTVAPKVPSGVSDGRWHSVQVQYYNKPNIGHLGLPHGPSGEKMAVVTVDDCDTTMAVRFGKDIGNYSCAAQGTQTGSKKSLDLTGPLLLGGVPNLPEDFPVHNRQFVGCMRNLSVDGKNVDMAGFIANNGTREGCAARRNFCDGRRCQNGGTCVNRWNMYLCECPLRFGGKNCEQAMPHPQLFSGESVVSWSDLNIIISVPWYLGLMFRTRKEDSVLMEATSGGPTSFRLQILNNYLQFEVSHGPSDVESVMLSGLRVTDGEWHHLLIELKNVKEDSEMKHLVTMTLDYGMDQNKADIGGMLPGLTVRSVVVGGASEDKVSVRRGFRGCMQGVRMGGTPTNVATLNMNNALKVRVKDGCDVDDPCTSSPCPPNSRCHDAWEDYSCVCDKGYLGINCVDACHLNPCENMGACVRSPGSPQGYVCECGPSHYGPYCENKLDLPCPRGWWGNPVCGPCHCAVSKGFDPDCNKTNGQCQCKENYYKLLAQDTCLPCDCFPHGSHSRTCDMATGQCACKPGVIGRQCNRCDNPFAEVTTLGCEVIYNGCPKAFEAGIWWPQTKFGQPAAVPCPKGSVGNAVRHCSGEKGWLPPELFNCTTISFVDLRAMNEKLSRNETQVDGARALQLVRALRSATQHTGTLFGNDVRTAYQLLGHVLQHESWQQGFDLAATQDADFHEDVIHSGSALLAPATRAAWEQIQRSEGGTAQLLRRLEGYFSNVARNVRRTYLRPFVIVTANMILAVDIFDKFNFTGARVPRFDTIHEEFPRELESSVSFPADFFRPPEEKEGPLLRPAGRRTTPQTTRPGPGTEREAPISRRRRHPDDAGQFAVALVIIYRTLGQLLPERYDPDRRSLRLPHRPIINTPMVSTLVYSEGAPLPRPLERPVLVEFALLEVEERTKPVCVFWNHSLAVGGTGGWSARGCELLSRNRTHVACQCSHTASFAVLMDISRRENGEVLPLKIVTYAAVSLSLAALLVAFVLLSLVRMLRSNLHSIHKHLAVALFLSQLVFVIGINQTENPFLCTVVAILLHYIYMSTFAWTLVESLHVYRMLTEVRNIDTGPMRFYYVVGWGIPAIVTGLAVGLDPQGYGNPDFCWLSLQDTLIWSFAGPIGAVIIINTVTSVLSAKVSCQRKHHYYGKKGIVSLLRTAFLLLLLISATWLLGLLAVNRDALSFHYLFAIFSGLQGPFVLLFHCVLNQEVRKHLKGVLGGRKLHLEDSATTRATLLTRSLNCNTTFGDGPDMLRTDLGESTASLDSIVRDEGIQKLGVSSGLVRGSHGEPDASLMPRSCKDPPGHDSDSDSELSLDEQSSSYASSHSSDSEDDGVGAEEKWDPARGAVHSTPKGDAVANHVPAGWPDQSLAESDSEDPSGKPRLKVETKVSVELHREEQGSHRGEYPPDQESGGAARLASSQPPEQRKGILKNKVTYPPPLTLTEQTLKGRLREKLADCEQSPTSSRTSSLGSGGPDCAITVKSPGREPGRDHLNGVAMNVRTGSAQADGSDSEGSNETSI

SEQ ID NO: 26245 - protein, 443 aa, Homo sapiens
MRRQVMAALVVSGAAEQGGRDGPGRGRAPRGRVANQIPPEILKNPQLQAAIRVLPSNYNFEIPKTIWRIQQAQAKKVALQMPEGLLLFACTIVDILERFTEAEVMVMGDVTYGACCVDDFTARALGADFLVHYGHSCLIPMDTSAQDFRVLYVFVDIRIDTTHLLDSLRLTFPPATALALVSTIQFVSTLQAAAQELKAEYRVSVPQCKPLSPGEILGCTSPRLSKEVEAVVYLGDGRFHLESVMIANPNVPAYRYDPYSKVLSREHYDHQRMQAARQEAIATARSAKSWGLILGTLGRQGSPKILEHLESRLRALGLSFVRLLLSEIFPSKLSLLPEVDVWVQVACPRLSIDWGTAFPKPLLTPYEAAVALRDISWQQPYPMDFYAGSSLGPWTVNHGQDRRPHAPGRPARGKVQEGSARPPSAVACEDCSCRDEKVAPLAP

SEQ ID NO: 26246 - protein, 647 aa, Homo sapiens
MRFTFNERSNPDDDSMGIQIVKDLHRTGCSSYCGQEAEQDRVVLKRVLLAYARWNKTVGYCQGFNILAALILEVMEGNEGDALKIMIYLIDKVLPESYFVNNLRALSVDMAVFRDLLRMKLPELSQHLDTLQRTANKESGGGYEPPLTNVFTMQWFLTLFATCLPNQTVLKIWDSVFFEGSEIILRVSLAIWAKLGEQIECCETADEFYSTMGRLTQEMLENDLLQSHELMQTVYSMAPFPFPQLAELREKYTYNITPFPATVKPTSVSGRHSKARDSDEENDPDDEDAVVNAVGCLGPFSGFLAPELQKYQKQIKEPNEEQSLRSNNIAELSPGAINSCRSEYHAAFNSMMMERMTTDINALKRQYSRIKKKQQQQVHQVYIRADKGPVTSILPSQVNSSPVINHLLLGKKMKMTNRAAKNAVIHIPGHTGGKISPVPYEDLKTKLNSPWRTHIRVHKKNMPRTKSHPGCGDTVGLIDEQNEASKTNGLGAAEAFPSGCTATAGREGSSPEGSTRRTIEGQSPEPVFGDADVDVSAVQAKLGALELNQRDAAAETELRVHPPCQRHCPEPPSAPEENKATSKAPQGSNSKTPIFSPFPSVKPLRKSATARNLGLYGPTERTPTVHFPQMSRSFSKPGGGNSGTKKR

SEQ ID NO: 26247 - protein, 1149 aa, Homo sapiens
MAERKGTAKVDFLKKIEKEIQQKWDTERVFEVNASNLEKQTSKGKYFVTFPYPYMNGRLHLGHTFSLSKCEACADKLKREIELYGCPPDFPDEEEEEEETSVKTEDIIIKDKAKGKKSKAAAKAGSSKYQWGIMKSLGLSDEEIVKFSEAEHWLDYFPPLAIQDLKRMGLKVDWRRSFITTDVNPYYDSFVRWQFLTLRERNKIKFGKRYTIYSPKDGQPCMDHDRQTGEGVGPQEYTLLKLKVLEPYPSKLSGLKGKNIFLVAATLRPETMFGQTNCWVRPDMKYIGFETVNGDIFICTQKAARNMSYQGFTKDNGVVPVVKELMGEEILGASLSAPLTSYKVIYVLPMLTIKEDKGTGVVTSVPSDSPDDIAALRDLKKKQALRAKYGIRDDMVLPFEPVPVIEIPGFGNLSAVTICDELKIQSQNDREKLAEAKEKIYLKGFYEGIMLVDGFKGQKVQDVKKTIQKKMIDAGDALIYMEPEKQVMSRSSDECVVALCDQWYLDYGEENWKKQTSQCLKNLETFCEETRRNFEATLGWLQEHACSRTYGLGTHLPWDEQWLIESLSDSTIYMAFYTVAHLLQGGNLHGQAESPLGIRPQQMTKEVWDYVFFKEAPFPKTQIAKEKLDQLKQEFEFWYPVDLRVSGKDLVPNHLSYYLYNHVAMWPEQSDKWPTAVRANGHLLLNSEKMSKSTGNFLTLTQAIDKFSADGMRLALADAGDTVEDANFVEAMADAGILRLYTWVEWVKEMVANWDSLRSGPASTFNDRVFASELNAGIIKTDQNYEKMMFKEALKTGFFEFQAAKDKYRELAVEGMHRELVFRFIEVQTLLLAPFCPHLCEHIWTLLGKPDSIMNASWPVAGPVNEVLIHSSQYLMEVTHDLRLRLKNYMMPAKGKKTDKQPLQKPSHCTIYVAKNYPPWQHTTLSVLRKHFEANNGKLPDNKVIASELGSMPELKKYMKKVMPFVAMIKENLEKMGPRILDLQLEFDEKAVLMENIVYLTNSLELEHIEVKFASEAEDKIREDCCPGKPLNVFRIEPGVSVSLVNPQPSNGHFSTKIEIRQGDNCDSIIRRLMKMNRGIKDLSKVKLMRFDDPLLGPRRVPVLGKEYTEKTPISEHAVFNVDLMSKKIHLTENGIRVDIGDTIIYLVH

SEQ ID NO: 26248 - protein, 284 aa, Homo sapiens
RYSLGDARRPLHETAVLVEDVVHTQLINLLQQAAEVSQLRGARVITPEDLLFLMRKDKKKLRRLLKYMFIRDYKSKIVKGIDEDDLLEDKLSGSNNANKRQKIAQDFLNSIDQTGELLAMFEDDEIDEVKQERMERAERQTRIMDSAQYAEFCESRQLSFSKKASKFRDWLDCSSMEIKPNVVAMEILAYLAYETVAQLVDLALLVRQDMVTKAGDPFSHAISATFIQYHNSAESTAACGVEAHSDAIQPCHIREAIRRYSHRIGPLSPFTNAYRRNGMAFLAC

SEQ ID NO: 26249 - protein, 236 aa, Homo sapiens
MLKKISVGVAGDLNTVTMKLGCVLMAWALYLSLGVLWVAQMLLELFPAPILRAVPSAEPQAGSPMTLSCQTKLPLQRSAARLLFSFYKDGRIVQSRGLSSEFQIPTASEDHSGSYWCEAATEDNQVWKQSPQLEIRVQGASSSAAPPTLNPAPQKSAAPGTAPEEAPGPLPPPPTPSSEDPGFSSPLGMPDPHLYHQMGLLLKHMQDVRVLLGHLLMELRELSGHRKPGTTKATAE

SEQ ID NO: 26250 - protein, 919 aa, Homo sapiens
MSYGEIEGKFLGPREEVTSEPRCKKLKSTTESYVFHNHSNADFHRIQEKTGNDWVPVTIIDVRGHSYLQENKIKTTDLHRPLHDEMPGNRPDVIESIDSQVLQEARPPLVSADDEIYSTSKAFIGPIYKPPEKKKRNEGRNEAHVLNGINDRGGQKEKQKFNSEKSEIDNELFQFYKEIEELEKEKDGFENSCKESEPSQEQFVPFYEGHNNGLLKPDEEKKDLSNKAMPSHCDYQQNLGNEPDKYPCNGQVIPTFCDTSFTSFRPEWQSVYPFIVPYGPPLPSLNYHLNIQRFSGPPNPPSNIFQAQDDSQIQNGYYVNNCHVNWNCMTFDQNNEYTDCSENRSSVHPSGNGCSMQDRYVSNGFCEVRERCWKDHCMDKHNGTDRFVNQQFQEEKLNKLQKLLILLRGLPGSGKTTLSRILLGQNRDGIVFSTDDYFHHQDGYRYNVNQLGDAHDWNQNRAKQAIDQGRSPVIIDNTNIQAWEMKPYVEVAIGKGYRVEFHEPETWWKFDPEELEKRNKHGVSRKKIAQMLDRYEYQMSISIVMNSVEPSHKSTQRPPPPQGRQRERVLKKTGHRLSKTKQKRNRKRNKKQNSQNRIMEENSLEFLSDLTPGDQDPSQSEEEDIEKTRRESEYPFIDGLQNEVGDFVTGYKEKRWKNKDPKDSFQNVMSIVELDNTPKNYLSKEGDNLFVSLLLRPNEISVTCPILTQNLSCVTTDDCSGMKVEKHIRNRHTIALDTQDLSAETSCLFMKKREIVDKNLSHEPILCHQHGIRMSDKVLREEQVYTTKINHWAFFTTNLSDEDLQLGSDRQPYFGSWPAGPHKFICEQRPKKDRACKLAGPDSRGQWIQMIFTSVAASEPGNNPEILTDKLLIGNEDFSPPPETMDSFIETNLFRSCLPQPDIPKNALESTKNKKRRKK

SEQ ID NO: 26251 - protein, 195 aa, Homo sapiens
MEEICSYEEVKEVFENKEKTMEFWKGYPNAVYSVRDPSQSSDAMYVVVPLLGVALLIVIALFIIWRCQLQKATRHHPSYAQNRYLASRAGHTLPRVMVYRGTVHSQGEPSGHREAANSPQVVLGPSRGGRTTVRLESTLYLPELSLSRLSSTTPPPSYEEVTAPQESSSEEASVSYSDPPPKYEEIVAANPGADK

SEQ ID NO: 26252 - protein, 879 aa, Homo sapiens
MLRRRAQEEDSTVLIDVSPPEAEKRGSYGSTAHASEPGGQQAAACRAGSPAKPRIADFVLVWEEDLKLDRQQDSAARDRTDMHRTWRETFLDNLRAAGLCVDQQDVQDGNTTVHYALLSASWAVLCYYAEDLRLKLPLQELPNQASNWSAGLLAWLGIPNVLLEVVPDVPPEYYSCRFRVNKLPRFLGSDNQDTFFTSTKRHQILFEILAKTPYGHEKKNLLGIHQLLAEGVLSAAFPLHDGPFKTPPEGPQAPRLNQRQVLFQHWARWGKWNKYQPLDHVRRYFGEKVALYFAWLGFYTGWLLPAAVVGTLVFLVGCFLVFSDIPTQELCGSKDSFEMCPLCLDCPFWLLSSACALAQAGRLFDHGGTVFFSLFMALWAVLLLEYWKRKSATLAYRWDCSDYEDTEERPRPQFAASAPMTAPNPITGEDEPYFPERSRARRMLAGSVVIVVMVAVVVMCLVSIILYRAIMAIVVSRSGNTLLAAWASRIASLTGSVVNLVFILILSKIYVSLAHVLTRWEMHRTQTKFEDAFTLKVFIFQFVNFYSSPVYIAFFKGRFVGYPGNYHTLFGVRNEECAAGGCLIELAQELLVIMVGKQVINNMQEVLIPKLKGWWQKFRLRSKKRKAGASAGASQGPWEDDYELVPCEGLFDEYLEMVLQFGFVTIFVAACPLAPLFALLNNWVEIRLDARKFVCEYRRPVAERAQDIGIWFHILAGLTHLAVISNAFLLAFSSDFLPRAYYRWTRAHDLRGFLNFTLARAPSSFAAAHNRTCRYRAFRDDDGHYSQTYWNLLAIRLAFVIVFEHVVFSVGRLLDLLVPDIPESVEIKVKREYYLAKQALAENEVLFGTNGTKDEQPEGSELSSHWTPFTVPKASQLQQ

SEQ ID NO: 26253 - protein, 850 aa, Homo sapiens
MAERKGTAKVDFLKKIEKEIQQKWDTERVFEVNASNLEKQTSKGKYFVTFPYPYMNGRLHLGHTFSLSKCEFAVGYQRLKGKCCLFPFGLHCTGMPIKACADKLKREIELYGCPPDFPDEEEEEEETSVKTEDIIIKDKAKGKKSKAAAKAGSSKYQWGIMKSLGLSDEEIVKFSEAEHWLDYFPPLAIQDLKRMGLKVDWRRSFITTDVNPYYDSFVRWQFLTLRERNKIKFGKRYTIYSPKDGQPCMDHDRQTGEGVGPQEYTLLKLKVLEPYPSKLSGLKGKNIFLVAATLRPETMFGQTNCWVRPDMKYIGFETVNGDIFICTQKAARNMSYQGFTKDNGVVPVVKELMGEEILGASLSAPLTSYKVIYVLPMLTIKEDKGTGVVTSVPSDSPDDIAALRDLKKKQALRAKYGIRDDMVLPFEPVPVIEIPGFGNLSAVTICDELKIQSQNDREKLAEAKEKIYLKGFYEGIMLVDGFKGQKVQDVKKTIQKKMIDAGDALIYMEPEKQVMSRSSDECVVALCDQWYLDYGEENWKKQTSQCLKNLETFCEETRRNFEATLGWLQEHACSRTYGLGTHLPWDEQWLIESLSDSTIYMAFYTVAHLLQGGNLHGQAESPLGIRPQQMTKEVWDYVFFKEAPFPKTQIAKEKLDQLKQEFEFWYPVDLRVSGKDLVPNHLSYYLYNHVAMWPEQSDKWPTAVRANGHLLLNSEKMSKSTGNFLTLTQAIDKFSADGMRLALADAGDTVEDANFVEAMADAGILRLYTWVEWVKEMVANWDSLRSGPASTFNDRVFARPQKISTVNWLWKGCTENLCSGLLKFRHFSSLHSVHICVSTSGHSWESLTQL

SEQ ID NO: 26254 - protein, 764 aa, Homo sapiens
MADLDSPPKLSGVQQPSEGVGGGRCSEISAELIRSLTELQELEAVYERLCGEEKVVERELDALLEQQNTIESKMVTLHRMGPNLQLIEGDAKQLAGMITFTCNLAENVSSKVRQLDLAKNRLYQAIQRADDILDLKFCMDGVQTALRSEDYEQAAAHTHRYLCLDKSVIELSRQGKEGSMIDANLKLLQEAEQRLKAIVAEKFAIATKEGDLPQVERFFKIFPLLGLHEEGLRKFSEYLCKQVASKAEENLLMVLGTDMSDRRAAVIFADTLTLLFEGIARIVETHQPIVETYYGPGRLYTLIKYLQVECDRQVEKVVDKFIKQRDYHQQFRHVQNNLMRNSTTEKIEPRELDPILTEVTLMNARSELYLRFLKKRISSDFEVGDSMASEEVKQEHQKCLDKLLNNCLLSCTMQELIGLYVTMEEYFMRETVNKAVALDTYEKGQLTSSMVDDVFYIVKKCIGRALSSSSIDCLCAMINLATTELESDFRDVLCNKLRMGFPATTFQDIQRGVTSAVNIMHSSLQQGKFDTKGIESTDEAKMSFLSDCTKLFSQGIGGEQAQAKFDSCLSDLAAVSNKFRDLLQEGLTELNSTAIKPQVQPWINSFFSVSHNIEEEEFNDYEANDPWVQQFILNLEQQMAEFKASLSPVIYDSLTGLMTSLVAVELEKVVLKSTFNRLGGLQFDKELRSLIAYLTTVTTWTIRDKFARLSQMATILNLERVTEILDYWGPNSGPLTWRLTPAEVRQVLALRIDFRSEDIKRLRL

SEQ ID NO: 26255 - protein, 592 aa, Homo sapiens
MRRWEGGDPGVSNQKTPTTILLTPERKFHSFGYAARDFYHDLDPNEAKQWLYLEKFKMKLHTTGDLTMDTDLTAANGKKVKALEIFAYALQYFKEQALKELSDQAGSEFENSDVRWVITVPAIWKQPAKQFMRQAAYQAGLASPENSEQLIIALEPEAASIYCRKLRLHQMIELSSKAAVNGYSGSDTVGAGFTQAKEHIRRNRQSRTFLVENVIGEIWSELEEGDKYVVVDSGGGTVDLTVHQIRLPEGHLKELYKATGGPYGSLGVDYEFEKLLYKIFGEDFIEQFKIKRPAAWVDLMIAFESRKRAAAPDRTNPLNITLPFSFIDYYKKFRGHSVEHALRKSNVDFVKWSSQGMLRMSPDAMNALFKPTIDSIIEHLRDLFQKPEVSTVKFLFLVGGFAEAPLLQQAVQAAFGDQCRIIIPQDVGLTILKGAVLFGLDPAVIKVRRSPLTYGVGVLNRYVEGKHPPEKLLVKDGTRWCTDVFDKFISADQSVALGELVKRSYTPAKPSQLVIVINIYSSEHDNVSFITDPGVKKCGTLRLDLTGTSGTAVPARREIQTLMQFGDTEIKATAIDIATSKSVKVGIDFLNY

SEQ ID NO: 26256 - protein, 543 aa, Homo sapiens
MMKLRHKNKKPGEGSKGHKKISWPYPQPAKQNGKKATSKVPSAPHFVHPNDHANREAELKKKWEEVLQELNMFPQLDDEATRKAYYKEFRKVVEYSDVILEVLDARDPLGCRCFQMEEAVLRAQGNKKLVLVLNKIDLVPKEVVEKWLDYLRNELPTVAFKASTQHQVKNLNRCSVPVDQASESLLKSKACFGAENLMRVLGNYCRLGEVRTHIRVGVVGLPNVGKSSLINSLKRSRACSVGAVPGITKFMQEVYLDKFIRLLDAPGIVPGPNSEVGTILRNCVHVQKLADPVTPVETILQRCNLEEISNYYGVSGFQTTEHFLTAVAHRLGKKKKGGLYSQEQAAKAVLADWVSGKISFYIPPPATHTLPTHLSAEIVKEMTEVFDIEDTEQANEDTMECLATGESDELLGDTDPLEMEIKLLHSPMTKIADAIENKTTVYKIGDLTGYCTNPNRHQMGWAKRNVDHRPKSNSMVDVCSVDRRSVLQRIMETDPLQQGQALASALKNKKKMQKRADKIASKLSDSMMSALDLSGNADDGVGD

SEQ ID NO: 26257 - protein, 252 aa, Homo sapiens
MAAAAKPNNLSLVVHGPGDLRLENYPIPEPGPNEVLLRMHSVGICGSDVHYWEYGRIGNFIVKKPMVLGHEASGTVEKVGSSVKHLKPGDRVAIEPGAPRENDEFCKMGRYNLSPSIFFCATPPDDGNLCRFYKHNAAFCYKLPDNVTFEEGALIEPLSVGIHACRRGGVTLGHKVLVCGAGPIGMVTLLVAKAMGAAQVVVTDLSATRLSKAKEIGADLVLQISKESPQEIARKVEGHSLWWEPRACGAGL

SEQ ID NO: 26258 - protein, 1573 aa, Homo sapiens
MAFSKGFRIYHKLDPPPFSLIVETRHKEECLMFESGAVAVLSSAEKEAIKGTYSKVLDAYGLLGVLRLNLGDTMLHYLVLVTGCMSVGKIQESEVFRVTSTEFISLRIDSSDEDRISEVRKVLNSGNFYFAWSASGISLDLSLNAHRSMQEQTTDNRFFWNQSLHLHLKHYGVNCDDWLLRLMCGGVEIRTIYAAHKQAKACLISRLSCERAGTRFNVRGTNDDGHVANFVETEQVVYLDDSVSSFIQIRGSVPLFWEQPGLQVGSHRVRMSRGFEANAPAFDRHFRTLKNLYGKQIIVNLLGSKEGEHMLSKAFQSHLKASEHAADIQMVNFDYHQMVKGGKAEKLHSVLKPQVQKFLDYGFFYFNGSEVQRCQSGTVRTNCLDCLDRTNSVQAFLGLEMLAKQLEALGLAEKPQLVTRFQEVFRSMWSVNGDSISKIYAGTGALEGKAKLKDGARSVTRTIQNNFFDSSKQEAIDVLLLGNTLNSDLADKARALLTTGSLRVSEQTLQSASSKVLKSMCENFYKYSKPKKIRVCVGTWNVNGGKQFRSIAFKNQTLTDWLLDAPKLAGIQEFQDKRSKPTDIFAIGFEEMVELNAGNIVSASTTNQKLWAVELQKTISRDNKYVLLASEQLVGVCLFVFIRPQHAPFIRDVAVDTVKTGMGGATGNKGAVAIRMLFHTTSLCFVCSHFAAGQSQVKERNEDFIEIARKLSFPMGRMLFSHDYVFWCGDFNYRIDLPNEEVKELIRQQNWDSLIAGDQLINQKNAGQVFRGFLEGKVTFAPTYKYDLFSDDYDTSEKCRTPAWTDRVLWRRRKWPFDRSAEDLDLLNASFQDESKILYTWTPGTLLHYGRAELKTSDHRPVVALIDIDIFEVEAEERQNIYKEVIAVQGPPDGTVLVSIKSSLPENNFFDDALIDELLQQFASFGEVILIRFVEDKMWVTFLEGSSALNVLSLNGKELLNRTITIALKSPDWIKNLEEEMSLEKISIALPSSTSSTLLGEDAEVAADFDMEGDVDDYSAEVEELLPQHLQPSSSSGLGTSPSSSPRTSPCQSPTISEGPVPSLPIRPSRAPSRTPGPPSAQSSPIDAQPATPLPQKDPAQPLEPKRPPPPRPVAPPTRPAPPQRPPPPSGARSPAPTRKEFGGIGAPPSPGVARREMEAPKSPGTTRKDNIGRSQPSPQAGLAGPGPAGYSTARPTIPPRAGVISAPQSHARASAGRLTPESQSKTSETSKGSTFLPEPLKPQAAFPPQSSLPPPAQRLQEPLVPVAAPMPQSGPQPNLETPPQPPPRSRSSHSLPSEASSQPQVKTNGISDGKRESPLKIDPFEDLSFNLLAVSKAQLSVQTSPVPTPDPKRLIQLPSATQSNVLSSVSCMPTMPPIPARSQSQENMRSSPNPFITGLTRTNPFSDRTAAPGNPFRAKSEESEATSWFSKEEPVTISPFPSLQPLGHNKSRASSSLDGFKDSFDLQGQSTLKISNPKGWVTFEEEEDFGVKGKSKSACSDLLGNQPSSFSGSNLTLNDDWNKGTNVSFCVLPSRRPPPPPVPLLPPGTSPPVDPFTTLASKASPTLDFTER

SEQ ID NO: 26259 - protein, 490 aa, Homo sapiens
MSYGEIEEFCLVRIVMALCSALMTIFTIKMGTAKQAIDQGRSPVIIDNTNIQAWEMKPYVEVAIGKGYRVEFHEPETWWKFDPEELEKRNKHGVSRKKIAQMLDRYEYQMSISIVMNSVEPSHKSTQRPPPPQGRQRERVLKKTGHRLSKTKQKRNRKRNKKQNSQNRIMEENSLEFLSDLTPGDQDPSQSEEEDIEKTRRESEYPFIDGLQNEVGDFVTGYKEKRWKNKDPKDSFQNVMSIVELDNTPKNYLSKEGDNLFVSLLLRPNEISVTCPILTQNLSCVTTDDCSGMKVEKHIRNRHTIALDTQDLSAETSCLFMKKREIVDKNLSHEPILCHQHGIRMSDKVLREEQVYTTKINHWAFFTTNLSDEDLQLGSDRQPYFGSWPAGPHKFICEQRPKKDRACKLAGPDSRGQWIQMIFTSVAASEPGNNPEILTDKLLIGNEDFSPPPETMDSFIETNLFRSCLPQPDIPKNALESTKNKKRRKK

SEQ ID NO: 26260 - protein, 1164 aa, Homo sapiens
MAERKGTAKVDFLKKIEKEIQQKWDTERVFEVNASNLEKQTSKGKYFVTFPYPYMNGRLHLGHTFSLSKCEFAVGYQRLKGKCCLFPFGLHCTGMPIKACADKLKREIELYGCPPDFPDEEEEEEETSVKTEDIIIKDKAKGKKSKAAAKAGSSKYQWGIMKSLGLSDEEIVKFSEAEHWLDYFPPLAIQDLKRMGLKVDWRRSFITTDVNPYYDSFVRWQFLTLRERNKIKFGKRYTIYSPKDGQPCMDHDRQTGEGVGPQEYTLLKLKVLEPYPSKLSGLKGKNIFLVAATLRPETMFGQTNCWVRPDMKYIGFETVNGDIFICTQKAARNMSYQGFTKDNGVVPVVKELMGEEILGASLSAPLTSYKVIYVLPMLTIKEDKGTGVVTSVPSDSPDDIAALRDLKKKQALRAKYGIRDDMVLPFEPVPVIEIPGFGNLSAVTICDELKIQSQNDREKLAEAKEKIYLKGFYEGIMLVDGFKGQKVQDGDALIYMEPEKQVMSRSSDECVVALCDQWYLDYGEENWKKQTSQCLKNLETFCEETRRNFEATLGWLQEHACSRTYGLGTHLPWDEQWLIESLSDSTIYMAFYTVAHLLQGGNLHGQAESPLGIRPQQMTKEVWDYVFFKEAPFPKTQIAKEKLDQLKQEFEFWYPVDLRVSGKDLVPNHLSYYLYNHVAMWPEQSDKWPTAVRANGHLLLNSEKMSKSTGNFLTLTQAIDKFSADGMRLALADAGDTVEDANFVEAMADAGILRLYTWVEWVKEMVANWDSLRSGPASTFNDRVFASELNAGIIKTDQNYEKMMFKEALKTGFFEFQAAKDKYRELAVEGMHRELVFRFIEVQTLLLAPFCPHLCEHIWTLLGKPDSIMNASWPVAGPVNEVLIHSSQYLMEVTHDLRLRLKNYMMPAKGKKTDKQPLQKPSHCTIYVAKNYPPWQHTTLSVLRKHFEANNGKLPDNKVIASELGSMPELKKYMKKVMPFVAMIKENLEKMGPRILDLQLEFDEKAVLMENIVYLTNSLELEHIEVKFASEAEDKIREDCCPGKPLNVFRIEPGVSVSLVNPQPSNGHFSTKIEIRQGDNCDSIIRRLMKMNRGIKDLSKVKLMRFDDPLLGPRRVPVLGKEYTEKTPISEHAVFNVDLMSKKIHLTENGIRVDIGDTIIYLVH

SEQ ID NO: 26261 - protein, 679 aa, Homo sapiens
MFQCVFSSSVLQPHSTSCLFKHLFYHSATPASQKQPEPIYSKKTEIQRQTVRAPFAKLFIFSALQVARQLLLQQQQQQQVSGLKSPKRNDKQPALQVPVSVAMMTPQVITPQQMQQILQQQVLSPQQLQVLLQQQQALMLQQQQLQEFYKKQQEQLQLQLLQQQHAGKQPKEQQQVATQQLAFQQQLLQMQQLQQQHLLSLQRQGLLTIQPGQPALPLQPLAQGMIPTELQQLWKEVTSAHTAEETTGNNHSSLDLTTTCVSSSAPSKTSLIMNPHASTNGQLSVHTPKRESLSHEEHPHSHPLYGHGVCKWPGCEAVCEDFQSFLKHLNSEHALDDRSTAQCRVQMQVVQQLELQLAKDKERLQAMMTHLHVKSTEPKAAPQPLNLVSSVTLSKSASEASPQSLPHTPTTPTAPLTPVTQGPSVITTTSMHTVGPIRRRYSDKYNVPISSADIAQNQEFYKNAEVRPPFTYASLIRQAILESPEKQLTLNEIYNWFTRMFAYFRRNAATWKNAVRHNLSLHKCFVRVENVKGAVWTVDEVEFQKRRPQKISGNPSLIKNMQSSHAYCTPLNAALQASMAENSIPLYTTASMGNPTLGNLASAIREELNGAMEHTNSNESDSSPGRSPMQAVHPVHVKEEPLDPEEAEGPLSLVTTANHSPDFDHDRDYEDEPVNEDME

SEQ ID NO: 26262 - protein, 1470 aa, Homo sapiens
MVSSGCRMRSLWFIIVISFLPNTEGFSRAALPFGLVRRELSCEGYSIDLRCPGSDVIMIESANYGRTDDKICDADPFQMENTDCYLPDAFKIMTQRCNNRTQCIVVTGSDVFPDPCPGTYKYLEVQYECVPYIFVCPGTLKAIVDSPCIYEAEQKAGAWCKDPLQAADKIYFMPWTPYRTDTLIEYASLEDFQNSRQTTTYKLPNRVDGTGFVVYDGAVFFNKERTRNIVKFDLRTRIKSGEAIINYANYHDTSPYRWGGKTDIDLAVDENGLWVIYATEQNNGMIVISQLNPYTLRFEATWETVYDKRAASNAFMICGVLYVVRSVYQDNESETGKNSIDYIYNTRLNRGEYVDVPFPNQYQYIAAVDYNPRDNQLYVWNNNFILRYSLEFGPPDPAQVPTTAVTITSSAELFKTIISTTSTTSQKGPMSTTVAGSQEGSKGTKPPPAVSTTKIPPITNIFPLPERFCEALDSKGIKWPQTQRGMMVERPCPKGTRGTASYLCMISTGTWNPKGPDLSNCTSHWVNQLAQKIRSGENAASLANELAKHTKGPVFAGDVSSSVRLMEQLVDILDAQLQELKPSEKDSAGRSYNKAIVDTVDNLLRPEALESWKHMNSSEQAHTATMLLDTLEEGAFVLADNLLEPTRVSMPTENIVLEVAVLSTEGQIQDFKFPLGIKGAGSSIQLSANTVKQNSRNGLAKLVFIIYRSLGQFLSTENATIKLGADFIGRNSTIAVNSHVISVSINKESSRVYLTDPVLFTLPHIDPDNYFNANCSFWNYSERTMMGYWSTQGCKLVDTNKTRTTCACSHLTNFAILMAHREIAYKDGVHELLLTVITWVGIVISLVCLAICIFTFCFFRGLQSDRNTIHKNLCINLFIAEFIFLIGIDKTKYAIACPIFAGLLHFFFLAAFAWMCLEGVQLYLMLVEVFESEYSRKKYYYVAGYLFPATVVGVSAAIDYKSYGTEKACWLHVDNYFIWSFIGPVTFIILLNIIFLVITLCKMVKHSNTLKPDSSRLENINNYRVCDGYYNTDLPGYEDNKPFIKSWVLGAFALLCLLGLTWSFGLLFINEETIVMAYLFTIFNAFQGVFIFIFHCALQKKVRKEYGKCFRHSYCCGGLPTESPHSSVKASTTRTSARYSSGTQSRIRRMWNDTVRKQSESSFISGDINSTSTLNQGMTGNYLLTNPLLRPHGTNNPYNTLLAETVVCNAPSAPVFNSPGHSLNNARDTSAMDTLPLNGNFNNSYSLHKGDYNDSVQVVDCGLSLNDTAFEKMIISELVHNNLRGSSKTHNLELTLPVKPVIGGSSSEDDAIVADASSLMHSDNPGLELHHKELEAPLIPQRTHSLLYQPQKKVKSEGTDSYVSQLTAEAEDHLQSPNRDSLYTSMPNLRDSPYPESSPDMEEDLSPSRRSENEDIYYKSMPNLGAGHQLQMCYQISRGNSDGYIIPINKEGCIPEGDVREGQMQLVTSL

SEQ ID NO: 26263 - protein, 310 aa, Homo sapiens
MRPARHWETRFGARDFGGFQDCFFRDRLMDTARIAVVGAGVVGLSTAVCISKLVPRCSVTIISDKFTPDTTSDVAAGMLIPHTYPDTPIHTQKQWFRETFNHLFAIANSAEAGDAGVHLVSGIKGSGGWTLTRRIEDLWELHPSFDIVVNCSGLGSRQLAGDSKIFPVRGQVLQVQAPWVEHFIRDGSGLTYIYPGTSHVTLGGTRQKGDWNLSPDAENSREILSRCCALEPSLHGACNIREKVGLRPYRPGVRLQTELLARDGQRLPVVHHYGHGSGGISVHWGTALEAARLVSECVHALRTPIPKSNL

SEQ ID NO: 26264 - protein, 376 aa, Homo sapiens
MLKKISVGVAGDLNTVTMKLGCVLMAWALYLSLGVLWVAQMLLAASFETLQCEGPVCTEESSCHTEDDLTDAREAGFQVKAYTFSEPFHLIVSYDWLILQGPAKPVFEGDLLVLRCQAWQDWPLTQVTFYRDGSALGPPGPNREFSITVVQKADSGHYHCSGIFQSPGPGIPETASVVAITVQELFPAPILRAVPSAEPQAGSPMTLSCQTKLPLQRSAARLLFSFYKDGRIVQSRGLSSEFQIPTASEDHSGSYWCEAATEDNQVWKQSPQLEIRVQGASSSAAPPTLNPAPQKSAAPGTAPEEAPGPLPPPPTPSSEDPGFSSPLGMPDPHLYHQMGLLLKHMQDVRVLLGHLLMELRELSGHRKPGTTKATAE

SEQ ID NO: 26265 - protein, 497 aa, Homo sapiens
MAAAAECDVVMAATEPELLDDQEAKREAETFKEQGNAYYAKKDYNEAYNYYTKAIDMCPKNASYYGNRAATLMMLGRFREALGDAQQSVRLDDSFVRGHLREGKCHLSLGNAMAACRSFQRALELDHKNAQAQQEFKNANAVMEYEKIAETDFEKRDFRKVVFCMDRALEFAPACHRFKILKAECLAMLGRYPEAQSVASDILRMDSTNADALYVRGLCLYYEDCIEKAVQFFVQALRMAPDHEKACIACRNAKALKAKKEDGNKAFKEGNYKLAYELYTEALGIDPNNIKTNAKLYCNRGTVNSKLRKLDDAIEDCTNAVKLDDTYIKAYLRRAQCYMDTEQYEEAVRDYEKVYQTEKTKEHKQLLKNAQLELKKSKRKDYYKILGVDKNASEDEIKKAYRKRALMHHPGRVDRHSGASAEVQKEEEKKFKEVGEAFTILSDPKKKTRYDSGQDLDEEGMNMGDFDPNNIFKAFFGGPGGFSFEASGPGNFFFQFG

SEQ ID NO: 26266 - protein, 1418 aa, Homo sapiens
MVSSGCRMRSLWFIIVISFLPNTEGFSRAALPFGLVRRELSCEGYSIDLRCPGSDVIMIESANYGRTDDKICDADPFQMENTDCYLPDAFKIMTQRCNNRTQCIVVTGSDVFPDPCPGTYKYLEVQYECVPYIFVCPGTLKAIVDSPCIYEAEQKAGAWCKDPLQAADKIYFMPWTPYRTDTLIEYASLEDFQNSRQTTTYKLPNRVDGTGFVVYDGAVFFNKERTRNIVKFDLRTRIKSGEAIINYANYHDTSPYRWGGKTDIDLAVDENGLWVIYATEQNNGMIVISQLNPYTLRFEATWETVYDKRAASNAFMICGVLYVVRSVYQDNESETGKNSIDYIYNTRLNRGEYVDVPFPNQYQYIAAVDYNPRDNQLYVWNNNFILRYSLEFGPPDPAQVPTTAVTITSSAELFKTIISTTSTTSQKGPMSTTVAGSQEGSKGTKPPPAVSTTKIPPITNIFPLPERFCEALDSKGIKWPQTQRGMMVERPCPKGTRGTASYLCMISTGTWNPKGPDLSNCTSHWVNQLAQKIRSGENAASLANELAKHTKGPVFAGDVSSSVRLMEQLVDILDAQLQELKPSEKDSAGRSYNKAIVDTVDNLLRPEALESWKHMNSSEQAHTATMLLDTLEEGAFVLADNLLEPTRVSMPTENIVLEVAVLSTEGQIQDFKFPLGIKGAGSSIQLSANTVKQNSRNGLAKLVFIIYRSLGQFLSTENATIKLGADFIGRNSTIAVNSHVISVSINKESSRVYLTDPVLFTLPHIDPDNYFNANCSFWNYSERTMMGYWSTQGCKLVDTNKTRTTCACSHLTNFAILMAHREIAYKDGVHELLLTVITWVGIVISLVCLAICIFTFCFFRGLQSDRNTIHKNLCINLFIAEFIFLIGIDKTKYAIACPIFAGLLHFFFLAAFAWMCLEGVQLYLMLVEVFESEYSRKKYYYVAGYLFPATVVGVSAAIDYKSYGTEKACWLHVDNYFIWSFIGPVTFIILLNIIFLVITLCKMVKHSNTLKPDSSRLENINNYRVCDGYYNTDLPGSWVLGAFALLCLLGLTWSFGLLFINEETIVMAYLFTIFNAFQGVFIFIFHCALQKKVRKEYGKCFRHSYCCGGLPTESPHSSVKASTTRTSARYSSGTQSRIRRMWNDTVRKQSESSFISGDINSTSTLNQGHSLNNARDTSAMDTLPLNGNFNNSYSLHKGDYNDSVQVVDCGLSLNDTAFEKMIISELVHNNLRGSSKTHNLELTLPVKPVIGGSSSEDDAIVADASSLMHSDNPGLELHHKELEAPLIPQRTHSLLYQPQKKVKSEGTDSYVSQLTAEAEDHLQSPNRDSLYTSMPNLRDSPYPESSPDMEEDLSPSRRSENEDIYYKSMPNLGAGHQLQMCYQISRGNSDGYIIPINKEGCIPEGDVREGQMQLVTSL

SEQ ID NO: 26267 - protein, 227 aa, Homo sapiens
MADKEAGGSDGPRETAPTSAYSSPARSLGDTGITPLSPSHIVNDTDSNVSEQQSFLVVVAVDFGTTSSGYAYSFTKEPECIHVMRRWEGGDPGVSNQKTPTTILLTPERKFHSFGYAARDFYHDLDPNEAKQWLYLEKFKMKLHTTGDLTMDTDLTAANGKKVKALEIFAYALQYFKEQALKELSDQAGSEFENSDVRWVITVPAIWKQPAKQFMRQAAYQADPMDL

SEQ ID NO: 26268 - protein, 318 aa, Homo sapiens
MGARGALLLALLLARAGLGKPGELGALQAGPGAARRPGGGGREEACGHREIHALVAGGVESARGRWPWQASLRLRRRHRCGGSLLSRRWVLSAAHCFQKHYYPSEWTVQLGELTSRPTPWNLRAYSSRYKVQDIIVNPDALGVLRNDIALLRLASSVTYNAYIQPICIESSTFNFVHRPDCWVTGWGLISPSGTPLPPPYNLREAQVTILNNTRCNYLFEQPSSRSMIWDSMFCAGAEDGSVDTCKGDSGGPLVCDKDGLWYQVGIVSWGMDCGQPNRPGVYTNISVYFHWIRRVMSHSTPRPNPSQLLLLLALLWAP

SEQ ID NO: 26269 - protein, 691 aa, Homo sapiens
MESVGVYGFCGCKAKNKMKCDSRWEIAASETAPTSAYSSPARSLGDTGITPLSPSHIVNDTDSNVSEQQSFLVVVAVDFGTTSSGYAYSFTKEPECIHVMRRWEGGDPGVSNQKTPTTILLTPERKFHSFGYAARDFYHDLDPNEAKQWLYLEKFKMKLHTTGDLTMDTDLTAANGKKVKALEIFAYALQYFKEQALKELSDQAGSEFENSDVRWVITVPAIWKQPAKQFMRQAAYQAGLASPENSEQLIIALEPEAASIYCRKLRLHQMIELSSKAAVNGYSGSDTVGAGFTQAKEHIRRNRQSRTFLVENVIGEIWSELEEGDKYVVVDSGGGTVDLTVHQIRLPEGHLKELYKATGGPYGSLGVDYEFEKLLYKIFGEDFIEQFKIKRPAAWVDLMIAFESRKRAAAPDRTNPLNITLPFSFIDYYKKFRGHSVEHALRKSNVDFVKWSSQGMLRMSPDAMNALFKPTIDSIIEHLRDLFQKPEVSTVKFLFLVGGFAEAPLLQQAVQAAFGDQCRIIIPQDVGLTILKGAVLFGLDPAVIKVRRSPLTYGVGVLNRYVEGKHPPEKLLVKDGTRWCTDVFDKFISADQSVALGELVKRSYTPAKPSQLVIVINIYSSEHDNVSFITDPGVKKCGTLRLDLTGTSGTAVPARREIQTLMQFGDTEIKATAIDIATSKSVKVGIDFLNY

SEQ ID NO: 26270 - protein, 4981 aa, Homo sapiens
MDLAPDRATGRPWLPLHTLSVSQLLRVFWLLSLLPGQAWVHGAEPRQVFQVLEEQPPGTLVGTIQTRPGFTYRLSESHALFAINSSTGALYTTSTIDRESLPSDVINLVVLSSAPTYPTEVRVLVRDLNDNAPVFPDPSIVVTFKEDSSSGRQVILDTATDSDIGSNGVDHRSYRIIRGNEAGRFRLDITLNPSGEGAFLHLVSKGGLDREVTPQYQLLVEVEDKGEPKRRGYLQVNVTVQDINDNPPVFGSSHYQAGVPEDAVVGSSVLQVAAADADEGTNADIRYRLQDEGTPFQMDPETGLITVREPLDFEARRQYSLTVQAMDRGVPSLTGRAEALIQLLDVNDNDPVVKFRYFPATSRYASVDENAQVGTVVALLTVTDADSPAANGNISVQILGGNEQRHFEVQSSKVPNLSLIKVASALDRERIPSYNLTVSVSDNYGAPPGAAVQARSSVASLVIFVNDINDHPPVFSQQVYRVNLSEEAPPGSYVSGISATDGDSGLNANLRYSIVSGNGLGWFHISEHSGLVTTGSSGGLDRELASQIVLNISARDQGVHPKVSYAQLVVTLLDVNDEKPVFSQPEGYDVSVVENAPTGTELLMLRATDGDLGDNGTVRFSLQEAETDRRSFRLDPVSGRLSTISSLDREEQAFYSLLVLATDLGSPPQSSMARINVSLLDINDNSPVFYPVQYFAHIKENEPGGSYITTVSATDPDLGTNGTVKYSISAGDRSRFQVNAQSGVISTRMALDREEKTAYQLQIVATDGGNLQSPNQAIVTITVLDTQDNPPVFSQVAYSFVVFENVALGYHVGSVSASTMDLNSNISYLITTGDQKGMFAINQVTGQLTTANVIDREEQSFYQLKVVASGGTVTGDTMVNITVKDLNDNSPHFLQAIESVNVVENWQAGHSIFQAKAVDPDEGVNGMVLYSLKQNPKNLFAINEKNGTISLLGPLDVHAGSYQIEILASDMGVPQLSSSVILTVYVHDVNDNSPVFDQLSYEVTLSESEPVNSRFFKVQASDKDSGANGEIAYTIAEGNTGDAFGIFPDGQLYIKSELDRELQDRYVLMVVASDRAVEPLSATVNVTVILEDVNDNRPLFNSTNYTFYFEEEQRAGSFVGKVSAVDKDFGPNGEVRYSFEMVQPDFELHAISGEITNTHQFDRESLMRRRGTAVFSFTVIATDQGIPQPLKDQATVHVYMKDINDNAPKFLKDFYQATISESAANLTQVLRVSASDVDEGNNGLIHYSIIKGNEERQFAIDSTSGQVTLIGKLDYEATPAYSLVIQAVDSGTIPLNSTCTLNIDILDENDNTPSFPKSTLFVDVLENMRIGELVSSVTATDSDSGDNADLYYSITGTNNHGTFSISPNTGSIFLAKKLDFETQSLYKLNITAKDQGRPPRSSTMSVVIHVRDFNDNPPSFPPGDIFKSIVENIPIGTSVISVTAHDPDADINGQLSYTIIQQMPRGNHFTIDEVKGTIYTNAEIDREFANLFELTVKANDQAVPIETRRYALKNVTILVTDLNDNVPMFISQNALAADPSAVIGSVLTTIMAADPDEGANGEIEYEIINGDTDTFIVDRYSGDLRVASALVPSQLIYNLIVSATDLGPERRKSTTELTIILQGLDGPVFTQPKYITILKEGEPIGTNVISIEAASPRGSEAPVEYYIVSVRCEEKTVGRLFTIGRHTGIIQTAAILDREQGACLYLVDVYAIEKSTAFPRTQRAEVEITLQDINDNPPVFPTDMLDLTVEENIGDGSKIMQLTAMDADEGANALVTYTIISGADDSFRIDPESGDLIATRRLDRERRSKYSLLVRADDGLQSSDMRINITVSDVNDHTPKFSRPVYSFDIPEDTIPGSLVAAILATDDDSGVNGEITYIVNEDDEDGIFFLNPITGVFNLTRLLDYEVQQYYILTVRAEDGGGQFTTIRVYFNILDVNDNPPIFSLNSYSTSLMENLPVGSTVLVFNVTDADDGINSQLTYSIASGDSLGQFTVDKNGVLKVLKALDRESQSFYNLVVQVHDLPQIPASRFTSTAQVSIILLDVNDNPPTFLSPKLTYIPENTPIDTVVFKAQATDPDSGPNSYIEYTLLNPLGNKFSIGTIDGEVRLTGELDREEVSNYTLTVVATDKGQPSLSSSTEVVVMVLDINDNNPIFAQALYKVEINENTLTGTDIIQVFAADGDEGTNGQVRYGIVNGNTNQEFRIDSVTGAITVAKPLDREKTPTYHLTVQATDRGSTPRTDTSTVSIVLLDINDFVPVFELSPYSVNVPENLGTLPRTILQVVARDDDRGSNSKLSYVLFGGNEDNAFTLSASGELGVTQSLDRETKERFVLMITATDSGSPALTGTGTINVIVDDVNDNVPTFASKAYFTTIPEDAPTGTDVLLVNASDADASKNAVIRIIGGNSQFTINPSTGQIITSALLDRETKDNYTLVVVCSDAGSPEPLSSSTSVLVTVTDVNDNPPRFQHHPYVTHIPSPTLPGSFVFAVTVTDADIGPNSELHYSLSGRNSEKFHIDPLRGAIMAAGPLNGASEVTFSVHVKDGGSFPKTDSTTVTVRFVNKADFPKVRAKEQTFMFPENQPVSSLVTTITGSSLRGEPMSYYIASGNLGNTFQIDQLTGQVSISQPLDFEKIQKYVVWIEARDGGFPPFSSYEKLDITVLDVNDNAPIFKEDPFISEILENLSPRKILTVSAMDKDSGPNGQLDYEIVNGNMENSFSINHATGEIRSVRPLDREKVSHYVLTIKSSDKGSPSQSTSVKVMINILDENDNAPRFSQIFSAHVPENSPLGYTVTRVTTSDEDIGINAISRYSIMDASLPFTINPSTGDIVISRPLNREDTDRYRIRVSAHDSGWTVSTDVTIFVTDINDNAPRFSRTSYYLDCPELTEIGSKVTQVFATDPDEGSNGQVFYFIKSQSEYFRINATTGEIFNKQILKYQNVTGFSNVNINRHSFIVTSSDRGKPSLISETTVTINIVDSNDNAPQFLKSKYFTPVTKNVKVGTKLIRVTAIDDKDFGLNSEVEYFISNDNHLGKFKLDNDTGWISVASSLISDLNQNFFITVTAKDKGNPPLSSQATVHITVTEENYHTPEFSQSHMSATIPESHSIGSIVRTVSARDRDAAMNGLIKYSISSGNEEGIFAINSSTGILTLAKALDYELCQKHEMTISAIDGGWVARTGYCSVTVNVIDVNDNSPVFLSDDYFPTVLENAPSGTTVIHLNATDADSGTNAVIAYTVQSSDSDLFVIDPNTGVITTQGFLDFETKQSYHLTVKAFNVPDEERCSFATVNIQLKGTNEYVPRFVSKLYYFEISEAAPKGTIVGEVFASDRDLGTDGEVHYLIFGNSRKKGFQINKKTGQIYVSGILDREKEERVSLKVLAKNFGSIRGADIDEVTVNVTVLDANDPPIFTLNIYSVQISEGVPIGTHVTFVSAFDSDSIPSWSRFSYFIGSGNENGAFSINPQTGQITVTAELDRETLPIYNLSVLAVDSGTPSATGSASLLVTLEDINDNGPMLTVSEGEVMENKRPGTLVMTLQSTDPDLPPNQGPFTYYLLSTGPATSYFSLSTAGVLSTTREIDREQIADFYLSVVTKDSGVPQMSSTGTVHITVIDQNDNPSQSRTVEIFVNYYGNLFPGGILGSVKPQDPDVLDSFHCSLTSGVTSLFSIPGGTCDLNSQPRSTDGTFDLTVLSNDGVHSTVTSNIRVFFAGFSNATVDNSILLRLGVPTVKDFLTNHYLHFLRIASSQLTGLGTAVQLYSAYEENNRTFLLAAVKRNHNQYVNPSGVATFFESIKEILLRQSGVKVESVDHDSCVHGPCQNGGSCLRRLAVSSVLKSRESLPVIIVANEPLQPFLCKCLPGYAGSWCEIDIDECLPSPCHSGGTCHNLVGGFSCSCPDGFTGRACERDINECLQSPCKNGAICQNFPGSFNCVCKTGYTGKMCESSVNYCECNPCFNGGSCQSGVDSYYCHCPFGVFGKHCELNSYGFEELSYMEFPSLDPNNNYIYVKFATIKSHALLLYNYDNQTGDRAEFLALEIAEERLRFSYNLGSGTYKLTTMKKVSDGHFHTVIARRAGMAASLTVDSCSENQEPGYCTVSNVAVSDDWTLDVQPNRVTVGGIRSLEPILQRRGHVESHDFVGCIMEFAVNGRPLEPSQALAAQGILDQCPRLEGACTRSPCQHGGTCMDYWSWQQCHCKEGLTGKYCEKSVTPDTALSLEGKGRLDYHMSQNEKREYLLRQSLRGAMLEPFGVNSLEVKFRTRSENGVLIHIQESSNYTTVKIKNGKVYFTSDAGIAGKVERNIPEVYVADGHWHTFLIGKNGTATVLSVDRIYNRDIIHPTQDFGGLDVLTISLGGIPPNQAHRDAQTAGFDGCIASMWYGGESLPFSGKHSLASISKTDPSVKIGCRGPNICASNPCWGDLLCINQWYAYRCVPPGDCASHPCQNGGSCEPGLHSGFTCSCPDSHTGRTCEMVVACLGVLCPQGKVCKAGSPAGHVCVLSQGPEEISLPLWAVPAIVGSCATVLALLVLSLILCNQCRGKKAKNPKEEKKPKEKKKKGSENVAFDDPDNIPPYGDDMTVRKQPEGNPKPDIIERENPYLIYDETDIPHNSETIPSAPLASPEQEIEHYDIDNASSIAPSDADIIQHYKQFRSHTPKFSIQRHSPLGFARQSPMPLGASSLTYQPSYGQGLRTSSLSHSACPTPNPLSRHSPAPFSKSSTFYRNSPARELHLPIRDGNTLEMHGDTCQPGIFNYATRLGRRSKSPQAMASHGSRPGSRLKQPIGQIPLESSPPVGLSIEEVERLNTPRPRNPSICSADHGRSSSEEDCRRPLSRTRNPADGIPAPESSSDSDSHESFTCSEMEYDREKPMVYTSRMPKLSQVNESDADDEDNYGARLKPRRYHGRRAEGGPVGTQAAAPGTADNTLPMKLGQQAGTFNWDNLLNWGPGFGHYVDVFKDLASLPEKAAANEEGKAGTTKPVPKDGEAEQYV

SEQ ID NO: 26271 - protein, 1049 aa, Homo sapiens
MNGRLHLGHTFSLSKCESKAAAKAGSSKYQWGIMKSLGLSDEEIVKFSEAEHWLDYFPPLAIQDLKRMGLKVDWRRSFITTDVNPYYDSFVRWQFLTLRERNKIKFGKRYTIYSPKDGQPCMDHDRQTGEGVGPQEYTLLKLKVLEPYPSKLSGLKGKNIFLVAATLRPETMFGQTNCWVRPDMKYIGFETVNGDIFICTQKAARNMSYQGFTKDNGVVPVVKELMGEEILGASLSAPLTSYKVIYVLPMLTIKEDKGTGVVTSVPSDSPDDIAALRDLKKKQALRAKYGIRDDMVLPFEPVPVIEIPGFGNLSAVTICDELKIQSQNDREKLAEAKEKIYLKGFYEGIMLVDGFKGQKVQDVKKTIQKKMIDAGDALIYMEPEKQVMSRSSDECVVALCDQWYLDYGEENWKKQTSQCLKNLETFCEETRRNFEATLGWLQEHACSRTYGLGTHLPWDEQWLIESLSDSTIYMAFYTVAHLLQGGNLHGQAESPLGIRPQQMTKEVWDYVFFKEAPFPKTQIAKEKLDQLKQEFEFWYPVDLRVSGKDLVPNHLSYYLYNHVAMWPEQSDKWPTAVRANGHLLLNSEKMSKSTGNFLTLTQAIDKFSADGMRLALADAGDTVEDANFVEAMADAGILRLYTWVEWVKEMVANWDSLRSGPASTFNDRVFASELNAGIIKTDQNYEKMMFKEALKTGFFEFQAAKDKYRELAVEGMHRELVFRFIEVQTLLLAPFCPHLCEHIWTLLGKPDSIMNASWPVAGPVNEVLIHSSQYLMEVTHDLRLRLKNYMMPAKGKKTDKQPLQKPSHCTIYVAKNYPPWQHTTLSVLRKHFEANNGKLPDNKVIASELGSMPELKKYMKKVMPFVAMIKENLEKMGPRILDLQLEFDEKAVLMENIVYLTNSLELEHIEVKFASEAEDKIREDCCPGKPLNVFRIEPGVSVSLVNPQPSNGHFSTKIEIRQGDNCDSIIRRLMKMNRGIKDLSKVKLMRFDDPLLGPRRVPVLGKEYTEKTPISEHAVFNVDLMSKKIHLTENGIRVDIGDTIIYLVH

SEQ ID NO: 26272 - protein, 1175 aa, Homo sapiens
MAERKGTAKVDFLKKIEKEIQQKWDTERVFEVNASNLEKQTSKGKYFVTFPYPYMNGRLHLGHTFSLSKCEFAVGYQRLKGKCCLFPFGLHCTGMPIKACADKLKREIELYGCPPDFPDEEEEEEETSVKTEDIIIKDKAKGKKSKAAAKAGSSKYQWGIMKSLGLSDEEIVKFSEAEHWLDYFPPLAIQDLKRMGLKVDWRRSFITTDVNPYYDSFVRWQFLTLRERNKIKFGKRYTIYSPKDGQPCMDHDRQTGEGVGPQEYTLLKLKVLEPYPSKLSGLKGKNIFLVAATLRPETMFGQTNCWVRPDMKYIGFETVNGDIFICTQKAARNMSYQGFTKDNGVVPVVKELMGEEILGASLSAPLTSYKVIYVLPMLTIKEDKGTGVVTSVPSDSPDDIAALRDLKKKQALRAKYGIRDDMVLPFEPVPVIEIPGFGNLSAVTICDELKIQSQNDREKLAEAKEKIYLKGFYEGIMLVDGFKGQKVQDVKKTIQKKMIDAGDALIYMEPEKQVMSRSSDECVVALCDQWYLDYGEENWKKQTSQCLKNLETFCEETRRNFEATLGWLQEHACSRTYGLGTHLPWDEQWLIESLSDSTIYMAFYTVAHLLQGGNLHGQAESPLGIRPQQMTKEVWDYVFFKEAPFPKTQIAKEKLDQLKQEFEFWYPVDLRVSGKDLVPNHLSYYLYNHVAMWPEQSDKWPTAVRANGHLLLNSEKMSKSTGNFLTLTQAIDKFSADGMRLALADAGDTVEDANFVEAMADAGILRLYTWVEWVKEMVANWDSLRSGPASTFNDRVFASELNAGIIKTDQNYEKMMFKEALKTGFFEFQAAKDKYRELAVEGMHRELVFRFIEVQTLLLAPFCPHLCEHIWTLLGKPDSIMNASWPVAGPVNEVLIHSSQYLMEVTHDLRLRLKNYMMPAKGKTDKQPLQKPSHCTIYVAKNYPPWQHTTLSVLRKHFEANNGKLPDNKVIASELGSMPELKKYMKKVMPFVAMIKENLEKMGPRILDLQLEFDEKAVLMENIVYLTNSLELEHIEVKFASEAEDKIREDCCPGKPLNVFRIEPGVSVSLVNPQPSNGHFSTKIEIRQGDNCDSIIRRLMKMNRGIKDLSKVKLMRFDDPLLGPRRVPVLGKEYTEKTPISEHAVFNVDLMSKKIHLTENGIRVDIGDTIIYLVH

SEQ ID NO: 26273 - protein, 1024 aa, Homo sapiens
MNGRLHLGHTFSLSKCEFAVGYQRLKGKCCLFPFGLHCTGMPIKACADKLKREIELYGCPPDFPDEEEEEEETSVKTEDIIIKDKAKGKKSKAAAKAGSSKYQWGIMKSLGLSDEEIVKFSEAEHWLDYFPPLAIQDLKRMGLKVDWRRSFITTDVNPYYDSFVRWQFLTLRERNKIKFGKRYTIYSPKDGQPCMDHDRQTGEEILGASLSAPLTSYKVIYVLPMLTIKEDKGTGVVTSVPSDSPDDIAALRDLKKKQALRAKYGIRDDMVLPFEPVPVIEIPGFGNLSAVTICDELKIQSQNDREKLAEAKEKIYLKGFYEGIMLVDGFKGQKVQDVKKTIQKKMIDAGDALIYMEPEKQVMSRSSDECVVALCDQWYLDYGEENWKKQTSQCLKNLETFCEETRRNFEATLGWLQEHACSRTYGLGTHLPWDEQWLIESLSDSTIYMAFYTVAHLLQGGNLHGQAESPLGIRPQQMTKEVWDYVFFKEAPFPKTQIAKEKLDQLKQEFEFWYPVDLRVSGKDLVPNHLSYYLYNHVAMWPEQSDKWPTAVRANGHLLLNSEKMSKSTGNFLTLTQAIDKFSADGMRLALADAGDTVEDANFVEAMADAGILRLYTWVEWVKEMVANWDSLRSGPASTFNDRVFASELNAGIIKTDQNYEKMMFKEALKTGFFEFQAAKDKYRELAVEGMHRELVFRFIEVQTLLLAPFCPHLCEHIWTLLGKPDSIMNASWPVAGPVNEVLIHSSQYLMEVTHDLRLRLKNYMMPAKGKKTDKQPLQKPSHCTIYVAKNYPPWQHTTLSVLRKHFEANNGKLPDNKVIASELGSMPELKKYMKKVMPFVAMIKENLEKMGPRILDLQLEFDEKAVLMENIVYLTNSLELEHIEVKFASEAEDKIREDCCPGKPLNVFRIEPGVSVSLVNPQPSNGHFSTKIEIRQGDNCDSIIRRLMKMNRGIKDLSKVKLMRFDDPLLGPRRVPVLGKEYTEKTPISEHAVFNVDLMSKKIHLTENGIRVDIGDTIIYLVH

SEQ ID NO: 26274 - protein, 622 aa, Homo sapiens
MRRGRVRERVLKKTGHRLSKTKQKRNRKRNKKQNSQNRIMEENSLEFLSDLTPGDQDPSQSEEEDIEKTRRESEYPFIDGLQNEVGDFVTGYKEKRWKNKDPKDSFQNVMSIVELDNTPKNYLSKEGDNLFVSLLLRPNEISVTCPILTQNLSCVTTDDCSGMKVEKHIRNRHTIALDTQDLSAETSCLFMKKREIVDKNLSHEPILCHQHGIRMSDKVLREEQVYTTKINHWAFFTTNLSDEDLQLGSDRQPYFGSWPAGPHKFICEQRPKKDRACKLAGPDSRGQWIQMIFTSVAASEPGNNPEILTDKLLIGNEDFSPPPETMDSFIETNLFRSCLPQPDIPKNALESTKNKKRRKKRIFNLVPNFDLLGQSRIGVKEREKCDLLTKNHGLKITLGEEKDRISERNSEEENKQKLMTFDHHPLWFYLDIIKATPLNIDGQRYSHCLSFNRLRCSASLYKNYIPSFVLHNLSSIWKPSFTNKKLFLTFESQTRVGNKLNDAGFISPEILHSHPDTSCSLGVTSDFHFLNERFDRKLKRWEEPKELPAEDSQDLTSTDYRSLELPLSQGFAFQLVKLFGSPGVPMESLLPDDYVVPLDWKTLKMIYLQWKMSVEKRQKKIG

SEQ ID NO: 26275 - protein, 1163 aa, Homo sapiens
MVSSGCRMRSLWFIIVISFLPNTEGFSRAALPFGLVRRELSCEGYSIDLRCPGSDVIMIESANYGRTDDKICDADPFQMENTDCYLPDAFKIMTQRCNNRTQCIVVTGSDVFPDPCPGTYKYLEVQYECVPYIFVCPGTLKAIVDSPCIYEAEQKAGAWCKDPLQAADKIYFMPWTPYRTDTLIEYASLEDFQNSRQTTTYKLPNRVDGTGFVVYDGAVFFNKERTRNIVKFDLRTRIKSGEAIINYANYHDTSPYRWGGKTDIDLAVDENGLWVIYATEQNNGMIVISQLNPYTLRFEATWETVYDKRAASNAFMICGVLYVVRSVYQDNESETGKNSIDYIYNTRLNRGEYVDVPFPNQYQYIAAVDYNPRDNQLYVWNNNFILRYSLEFGPPDPAQVPTTAVTITSSAELFKTIISTTSTTSQKGPMSTTVAGSQEGSKGTKPPPAVSTTKIPPITNIFPLPERFCEALDSKGIKWPQTQRGMMVERPCPKGTRGTASYLCMISTGTWNPKGPDLSNCTSHWVNQLAQKIRSGENAASLANELAKHTKGPVFAGDVSSSVRLMEQLVDILDAQLQELKPSEKDSAGRSYNKAIVDTVDNLLRPEALESWKHMNSSEQAHTATMLLDTLEEGAFVLADNLLEPTRVSMPTENIVLEVAVLSTEGQIQDFKFPLGIKGAGSSIQLSANTVKQNSRNGLAKLVFIIYRSLGQFLSTENATIKLGADFIGRNSTIAVNSHVISVSINKESSRVYLTDPVLFTLPHIDPDNYFNANCSFWNYSERTMMGYWSTQGCKLVDTNKTRTTCACSHLTNFAILMAHREIAYKDGVHELLLTVITWVGIVISLVCLAICIFTFCFFRGLQSDRNTIHKNLCINLFIAEFIFLIGIDKTKYAIACPIFAGLLHFFFLAAFAWMCLEGVQLYLMLVEVFESEYSRKKYYYVAGYLFPATVVGVSAAIDYKSYGTEKACWLHVDNYFIWSFIGPVTFIILLNIIFLVITLCKMVKHSNTLKPDSSRLENIKSWVLGAFALLCLLGLTWSFGLLFINEETIVMAYLFTIFNAFQGVFIFIFHCALQKKVRKEYGKCFRHSYCCGGLPTESPHSSVKASTTRTSARYSSGTQSRIRRMWNDTVRKQSESSFISGDINSTSTLNQGGINLNILLQD

SEQ ID NO: 26276 - protein, 1112 aa, Homo sapiens
MAERKGTAKVDFLKKIEKEIQQKWDTERVFEVNASNLEKQTSKGKYFVTFPYPYMNGRLHLGHTFSLSKCEFAVGYQRLKGKCCLFPFGLHCTGMPIKACADKLKREIELYGCPPDFPDEEEEEEETSVKTEDIIIKDKAKGKKSKAAAKAGSSKYQWGIMKSLGLSDEEIVKFSEAEHWLDYFPPLAIQDLKRMGLKVDWRRSFITTDVNPYYDSFVRWQFLTLRERNKIKFGKRYTIYSPKDGQPCMDHDRQTGEGVGPQEYTLLKLKVLEPYPSKLSGLKGKNIFLVAATLRPETMFGQTNCWVRPDMKYIGFETVNGDIFICTQKAARNMSYQGFTKDNGVVPVVKELMGEEILGASLSAPLTSYKVIYVLPMLTIKEDKGTGVVTSVPSDSPDDIAALRDLKKKQALRAKYGIRDDMVLPFEPVPVIEIPGFGNLSAVTICDELKIQSQNDREKLAEAKEKIYLKGFYEGIMLVDGFKGQKVQDVKKTIQKKMIDAGDALIYMEPEKQVMSRSSDECVVALCDQWYLDYGEENWKKQTSQCLKNLETFCEETRRNFEATLGWLQEHACSRTYGLGTHLPWDEQWLIESLSDSTIYMAFYTVAHLLQGGNLHGQAESPLGIRPQQMTKEVWDYVFFKEAPFPKTQIAKEKLDQLKQEFEFWYPVDLRVSGKDLVPNHLSYYLYNHVAMWPEQSDKWPTAVRANGHLLLNSEKMSKSTGNFLTLTQAIDKFSADGMRLALADAGDTVEDANFVEAMADAGILRLYTWVEWVKEMVANWDSLRSGPASTFNDRVFASELNAGIIKTDQNYEKMMFKEALKTGFFEFQAAKDKYRELAVEGMHRELVFRFIEVQTLLLAPFCPHLCEHIWTLLGKPDSIMNASWPVAGPVNEVLIHSSQYLMEVTHDLRLRLKNYMMPAKGKKTDKQPLQKPSHCTIYVAKNYPPWQHTTLSVLRKHFEANNGKLPDNKVIASELGSMPELKKYMKKVMPFVAMIKENLEKMGPRILDLQLEFDEKAVLMENIVYLTNSLELEHIEVKFASEAEDKIREDCCPGKPLNVFRIEPGVSVSLVNPQPSNGHFSTKIEIRQGDNCDSIIRRLMKMNRGIKGIRD

SEQ ID NO: 26277 - protein, 624 aa, Homo sapiens
MGSCARLLLLWGCTVVAAGLSGVAGVSSRCEKACNPRMGNLALGRKLWADTTCGQNATELYCFYSENTDLTCRQPKCDKCNAAYPHLAHLPSAMADSSFRFPRTWWQSAEDVHREKIQLDLEAEFYFTHLIVMFKSPRPAAMVLDRSQDFGKTWKPYKYFATNCSATFGLEDDVVKKGAICTSKYSSPFPCTGGEVIFKALSPPYDTENPYSAKVQEQLKITNLRVQLLKRQSCPCQRNDLNEEPQHFTHYAIYDFIVKGSCFCNGHADQCIPVHGFRPVKAPGTFHMVHGKCMCKHNTAGSHCQHCAPLYNDRPWEAADGKTGAPNECRTCKCNGHADTCHFDVNVWEASGNRSGGVCDDCQHNTEGQYCQRCKPGFYRDLRRPFSAPDACKPCSCHPVGSAVLPANSVTFCDPSNGDCPCKPGVAGRRCDRCMVGYWGFGDYGCRPCDCAGSCDPITGDCISSHTDIDWYHEVPDFRPVHNKSEPAWEWEDAQGFSALLHSGKCECKEQTLGNAKAFCGMKYSYVLKIKILSAHDKGTHVEVNVKIKKVLKSTKLKIFRGKRTLYPESWTDRGCTCPILNPVQQPRPKKADKKTETLHANLLPWLLWKRNNPIGYPCIFIHS

SEQ ID NO: 26278 - protein, 1207 aa, Homo sapiens
MVSSGCRMRSLWFIIVISFLPNTEGFSRAALPFGLVRRELSCEGYSIDLRCPGSDVIMIESANYGRTDDKICDADPFQMENTDCYLPDAFKIMTQRCNNRTQCIVVTGSDVFPDPCPGTYKYLEVQYECVPYIFVCPGTLKAIVDSPCIYEAEQKAGAWCKDPLQAADKIYFMPWTPYRTDTLIEYASLEDFQNSRQTTTYKLPNRVDGTGFVVYDGAVFFNKERTRNIVKFDLRTRIKSGEAIINYANYHDTSPYRWGGKTDIDLAVDENGLWVIYATEQNNGMIVISQLNPYTLRFEATWETVYDKRAASNAFMICGVLYVVRSVYQDNESETGKNSIDYIYNTRLNRGEYVDVPFPNQYQYIAAVDYNPRDNQLYVWNNNFILRYSLEFGPPDPAQVPTTAVTITSSAELFKTIISTTSTTSQKGPMSTTVAGSQEGSKGTKPPPAVSTTKIPPITNIFPLPERFCEALDSKGIKWPQTQRGMMVERPCPKGTRGTASYLCMISTGTWNPKGPDLSNCTSHWVNQLAQKIRSGENAASLANELAKHTKGPVFAGDVSSSVRLMEQLVDILDAQLQELKPSEKDSAGRSYNKAIVDTVDNLLRPEALESWKHMNSSEQAHTATMLLDTLEEGAFVLADNLLEPTRVSMPTENIVLEVAVLSTEGQIQDFKFPLGIKGAGSSIQLSANTVKQNSRNGLAKLVFIIYRSLGQFLSTENATIKLGADFIGRNSTIAVNSHVISVSINKESSRVYLTDPVLFTLPHIDPDNYFNANCSFWNYSERTMMGYWSTQGCKLVDTNKTRTTCACSHLTNFAILMAHREIAYKDGVHELLLTVITWVGIVISLVCLAICIFTFCFFRGLQSDRNTIHKNLCINLFIAEFIFLIGIDKTKYAIACPIFAGLLHFFFLAAFAWMCLEGVQLYLMLVEVFESEYSRKKYYYVAGYLFPATVVGVSAAIDYKSYGTEKACWLHVDNYFIWSFIGPVTFIILLNIIFLVITLCKMVKHSNTLKPDSSRLENIKSWVLGAFALLCLLGLTWSFGLLFINEETIVMAYLFTIFNAFQGVFIFIFHCALQKKVRKEYGKCFRHSYCCGGLPTESPHSSVKASTTRTSARYSSGTQSRIRRMWNDTVRKQSESSFISGDINSTSTLNQGMTGNYLLTNPLLRPHGTNNPYNTLLAETVVCNAPSAPVFNSPATLRPDSLSRQT

SEQ ID NO: 26279 - protein, 646 aa, Homo sapiens
MADKEAGGSDGPRETAPTSAYSSPARSLGDTGITPLSPSHIVNDTDSNVSEQQSFLVVVAVDFGTTSSGYAYSFTKEPECIHVMRRWEGGDPGVSNQKTPTTILLTPERKFHSFGYAARDFYHDLDPNEAKQWLYLEKFKMKLHTTGDLTMDTDLTAANGKKVKALEIFAYALQYFKEQALKELSDQAGSEFENSDVRWVITVPAIWKQPAKQFMRQAAYQAGLASPENSEQLIIALEPEAASIYCRKLRLHQMIELSSKAAVNGYSGSDTVGAGFTQGDKYVVVDSGGGTVDLTVHQIRLPEGHLKELYKATGGPYGSLGVDYEFEKLLYKIFGEDFIEQFKIKRPAAWVDLMIAFESRKRAAAPDRTNPLNITLPFSFIDYYKKFRGHSVEHALRKSNVDFVKWSSQGMLRMSPDAMNALFKPTIDSIIEHLRDLFQKPEVSTVKFLFLVGGFAEAPLLQQAVQAAFGDQCRIIIPQDVGLTILKGAVLFGLDPAVIKVRRSPLTYGVGVLNRYVEGKHPPEKLLVKDGTRWCTDVFDKFISADQSVALGELVKRSYTPAKPSQLVIVINIYSSEHDNVSFITDPGVKKCGTLRLDLTGTSGTAVPARREIQTLMQFGDTEIKATAIDIATSKSVKVGIDFLNY

SEQ ID NO: 26280 - protein, 334 aa, Homo sapiens
MGARGALLLALLLARAGLGKPGELGALQAGPGAARRPGGGGREGHFLCPAESQEEELLSEACGHREIHALVAGGVESARGRWPWQASLRLRRRHRCGGSLLSRRWVLSAAHCFQKHYYPSEWTVQLGELTSRPTPWNLRAYSSRYKVQDIIVNPDALGVLRNDIALLRLASSVTYNAYIQPICIESSTFNFVHRPDCWVTGWGLISPSGTPLPPPYNLREAQVTILNNTRCNYLFEQPSSRSMIWDSMFCAGAEDGSVDTCKGDSGGPLVCDKDGLWYQVGIVSWGMDCGQPNRPGVYTNISVYFHWIRRVMSHSTPRPNPSQLLLLLALLWAP

SEQ ID NO: 26281 - protein, 516 aa, Homo sapiens
MREKQQAAREQERQKRRTIESYCQDVLRRQEEFEHKEEVLQELNMFPQLDDEATRKAYYKEFRKVVEYSDVILEVLDARDPLGCRCFQMEEAVLRAQGNKKLVLVLNKIDLVPKEVVEKWLDYLRNELPTVAFKASTQHQVKNLNRCSVPVDQASESLLKSKACFGAENLMRVLGNYCRLGEVRTHIRVGVVGLPNVGKSSLINSLKRSRACSVGAVPGITKFMQEVYLDKFIRLLDAPGIVPGPNSEVGTILRNCVHVQKLADPVTPVETILQRCNLEEISNYYGVSGFQTTEHFLTAVAHRLGKKKKGGLYSQEQAAKAVLADWVSGKISFYIPPPATHTLPTHLSAEIVKEMTEVFDIEDTEQANEDTMECLATGESDELLGDTDPLEMEIKLLHSPMTKIADAIENKTTVYKIGDLTGYCTNPNRHQMGWAKRNVDHRPKSNSMVDVCSVDRRSVLQRIMETDPLQQGQALASALKNKKKMQKRADKIASKLSDSMMSALDLSGNADDGVGD

SEQ ID NO: 26282 - protein, 705 aa, Homo sapiens
MSVLTSPRGKVEVVHCRRTESQDVYCIKSLIRKFTCKLFGKLNIIYLLEKANLAVTLCNDKEEIMAQATFLDYPNWNVAKQDDWVSVFRELDSDIPCTPLNTLFMHLFVAVDEYSVGCCKEILRTVYKAVPELHFIFLIVPSYMSLGSTLITVFDQVGNIPCLTYEEDFAVHICHRHSHYPQLHVRKARVEDHDDLMPIFMRYDTILKETYGEYFLAELIEAQDEENHAVVCEVEGTAVGFMSVCSRVNMQLLHECFDLGPFHGLCFPHPDDVLESPQDLSVRRSQDAELRSSSQGSQKIVEELQEPVSPDTMENIQGNIAREAASEEALTAVQSGNVSEPEDIEKLSDISTGYAQYHHVSSRSLASLVLPEEPVHFRPIYRGASAAFCIQLFCIDEKYEARSLDFMNFVFSLFSDKNFCVISLPHLTPEFFLIQNFVKMVPFNTCTLEQDLYVFHRAGLLKSINIRFATLLDTPGVENLVSTLMLNKSILEDLDRYNKARKDPDIEYIRSHYNIEDFIYFSHHQREEHGHMHHFALNPIFRHYTKFFLKEILRLGFKSCLYYRVYPKSREGKMSYALNHTNRKLTLEPKITVNAKIIVVGASSVGISFLETLVFCSHMKFNNLTLISTHGLPGKKLLDTEQRKFLASDHCFNDKDYALMSLCSWVNVVVGRMTGIDRAAKHVVLSTDEIVPYDHLILCTGQQYQ

SEQ ID NO: 26283 - protein, 1870 aa, Homo sapiens
ENSILKDEKKTLEDMLKIHTPVSQEERLIFLDSIKSKSKDSVWEKEIEILIEENEDLKQQCIQLNEEIEKQRNTFSFAEKNFEVNYQELQEEYACLLKVKDDLEDSKNKQELEYKSKLKALNEELHLQRINPTTVKMKSSVFDEDKTFVAETLEMGEVVEKDTTELMEKLEVTKREKLELSQRLSDLSEQLKQKHGEISFLNEEVKSLKQEKEQVSLRCRELEIIINHNRAENVQSCDTQVSSLLDGVVTMTSRGAEGSVSKVNKSFGEESKIMVEDKVSFENMTVGEESKQEQLILDHLPSVTKESSLRATQPSENDKLQKELNVLKSEQNDLRLQMEAQRICLSLVYSTHVDQVREYMENEKDKALCSLKEELIFAQEEKIKELQKIHQLELQTMKTQETGDEGKPLHLLIGKLQKAVSEECSYFLQTLCSVLGEYYTPALKCEVNAEDKENSGDYISENEDPELQDYRYEVQDFQENMHTLLNKVTEEYNKLLVLQTRLSKIWGQQTDGMKLEFGEENLPKEETEFLSIHSQMTNLEDIDVNHKSKLSSLQDLEKTKLEEQVQELESLISSLQQQLKETEQNYEAEIHCLQKRLQAVSESTVPPSLPVDSVVITESDAQRTMYPGSCVKKNIDGTIEFSGEFGVKEETNIVKLLEKQYQEQLEEEVAKVIVSMSIAFAQQTELSRISGGKENTASSKQAHAVCQQEQHYFNEMKLSQDQIGFQTFETVDVKFKEEFKPLSKELGEHGKEILLSNSDPHDIPESKDCVLTISEEMFSKDKTFIVRQSIHDEISVSSMDASRQLMLNEEQLEDMRQELVRQYQEHQQATELLRQAHMRQMERQREDQEQLQEEIKRLNRQLAQRSSIDNENLVSERERVLLEELEALKQLSLAGREKLCCELRNSSTQTQNGNENQGEVEEQTFKEKELDRKPEDVPPEILSNESLHGGIWPLRFWLPHWIISMERSQYGTQTRKTVYALQKANNRLLKILLEVVKTTAAVEETIGRHVLGILDRSSKSQSSASLIWRSEAEASVKSCVHEEHTRVTDESIPSYSGSDMPRNDINMWSKVTEEGTELSQRLVRSGFAGTEIDPENEELMLNISSRLQAAVEKLLEAISETSSQLEHAKVTQTELMRESFRQKQEATESLKCQEELRERLHEESRAREQLAVELSKAEGVIDGYADEKTLFERQIQEKTDIIDRLEQELLCASNRLQELEAEQQQIQEERELLSRQKEAMKAEAGPVEQQLLQETEKLMKEKLEVQCQAEKVRDDLQKQVKALEIDVEEQVSRFIELEQEKNTELMDLRQQNQALEKQLEKMRKFLDEQAIDREHERDVFQQEIQKLEQQLKVVPRFQPISEHQTREVEQLANHLKEKTDKCSELLLSKEQLQRDIQERNEEIEKLEFRVRELEQALLVEDRKHFGAVEAKPELSLEVQLQAERDAIDRKEKEITNLEEQLEQFREELENKNEEVQQLHMQLEIQKKESTTRLQELEQENKLFKDDMEKLGLAIKESDAMSTQDQHVLFGKFAQIIQEKEVEIDQLNEQVTKLQQQLKITTDNKVIEEKNELIRDLETQIECLMSDQECVKRNREEEIEQLNEVIEKLQQELANIGQKTSMNAHSLSEEADSLKHQLDVVIAEKLALEQQVETANEEMTFMKNVLKETNFKMNQLTQELFSLKRERESVEKIQSIPENSVNVAIDHLSKDKPELEVVLTEDALKSLENQTYFKSFEENGKGSIINLETRLLQLESTVSAKDLELTQCYKQIKDMQEQGQFETEMLQKKIVNLQKIVEEKVAAALVSQIQLEAVQEYAKFCQDNQTISSEPERTNIQNLNQLREDELGSDISALTLRISELESQVVEMHTS

SEQ ID NO: 26284 - protein, 1311 aa, Homo sapiens
MAFSKGFRIYHKLDPPPFSLIVETRHKEECLMFESGAVAVLSSAEKEAIKGTYSKVLDAYGLLGVLRLNLGDTMLHYLVLVTGCMSVGKIQESEVFRVTSTEFISLRIDSSDEDRISEVRKVLNSGNFYFAWSASGISLDLSLNAHRSMQEQTTDNRFFWNQSLHLHLKHYGVNCDDWLLRLMCGGVEIRTIYAAHKQAKACLISRLSCERAGTRFNVRGTNDDGHVANFVETEQVVYLDDSVSSFIQIRGSVPLFWEQPGLQVGSHRVRMSRGFEANAPAFDRHFRTLKNLYGKQIIVNLLGSKEGEHMLSKAFQSHLKASEHAADIQMVNFDYHQMVKGGKAEKLHSVLKPQVQKFLDYGFFYFNGSEVQRCQSGTVRTNCLDCLDRTNSVQAFLGLEMLAKQLEALGLAEKPQLVTRFQEVFRSMWSVNGDSISKIYAGTGALEGKAKLKDGARSVTRTIQNNFFDSSKQEAIDVLLLGNTLNSDLADKARALLTTGSLRVSEQTLQSASSKVLKSMCENFYKYSKPKKIRVCVGTWNVNGGKQFRSIAFKNQTLTDWLLDAPKLAGIQEFQDKRSKPTDIFAIGFEEMVELNAGNIVSASTTNQKLWAVELQKTISRDNKYVLLASEQLVGVCLFVFIRPQHAPFIRDVAVDTVKTGMGGATGNKGAVAIRMLFHTTSLCFVCSHFAAGQSQVKERNEDFIEIARKLSFPMGRMLFSHDYVFWCGDFNYRIDLPNEEVKELIRQQNWDSLIAGDQLINQKNAGQVFRGFLEGKVTFAPTYKYDLFSDDYDTSEKCRTPAWTDRVLWRRRKWPFDRSAEDLDLLNASFQDESKILYTWTPGTLLHYGRAELKTSDHRPVVALIDIDIFEVEAEERQNIYKEVIAVQGPPDGTVLVSIKSSLPENNFFDDALIDELLQQFASFGEVILIRFVEDKMWVTFLEGSSALNVLSLNGKELLNRTITIALKSPDWIKNLEEEMSLEKISIALPSSTSSTLLGEDAEVAADFDMEGDVDDYSAEVEELLPQHLQPSSSSGLGTSPSSSPRTSPCQSPTISEGPVPSLPIRPSRAPSRTPGPPSAQSSPIDAQPATPLPQKDPAQPLEPKRPPPPRPVAPPTRPAPPQRPPPPSGARSPAPTRKEFGGIGAPPSPGVARREMEAPKSPGTTRKDNIGRSQPSPQAGLAGPGPAGYSTARPTIPPRAGVISAPQSHARASAGRLTPESQSKTSETSKGSTFLPEPLKPQAAFPPQSSLPPPAQRLQEPLVPVAAPMPQSGPQPNLETPPQPPPRSRSSHSLPSEASSQPQQEQPSG

SEQ ID NO: 26285 - protein, 354 aa, Homo sapiens
KKDYNEAYNYYTKAIDMCPKNASYYGNRAATLMMLGRFREALGDAQQSVRLDDSFVRGHLREGKCHLSLGNAMAACRSFQRALELDHKNAQAQQEFKNANAVMEYEKIAETDFEKRDFRKVVFCMDRALEFAPACHRFKILKAECLAMLGRYPEAQSVASDILRMDSTNADALYVRGLCLYYEDCIEKAVQFFVQALRMAPDHEKACIACRNAKALKAKKEDGNKAFKEGNYKLAYELYTEALGIDPNNIKTNAKLYCNRGTVNSKLRKLDDAIEDCTNAVKLDDTYIKAYLRRAQCYMDTEQYEEAVRDYEKVYQTEKTKDFDPNNIFKAFFGGPGGFSFEASGPGNFFFQFG

SEQ ID NO: 26286 - protein, 466 aa, Homo sapiens
KREAETFKEQGNAYYAKKDYNEAYNYYTKAIDMCPKNASYYGNRAATLMMLGRFREALGDAQQSVRLDDSFVRGHLREGKCHLSLGNAMAACRSFQRALELDHKNAQAQQEFKNANAVMEYEKIAETDFEKRDFRKVVFCMDRALEFAPACHRFKILKAECLAMLGRYPEAQSVASDILRMDSTNADALYVRGLCLYYEDCIEKAVQFFVQALRMAPDHEKACIACRNAKALKAKKEDGNKAFKEGNYKLAYELYTEALGIDPNNIKTNAKLYCNRGTVNSKLRKLDDAIEDCTNAVKLDDTYIKAYLRRAQCYMDTEQYEEAVRDYEKVYQTEKTKEHKQLLKNAQLELKKSKRKDYYKILGVDKNASEDEIKKAYRKRALMHHPDRHSGASAEVQKEEEKKFKEVGEAFTILSDPKKKTRYDSGQDLDEEGMNMGDFDPNNIFKAFFGGPGGFSFEANYQPLFS

SEQ ID NO: 26287 - protein, 1121 aa, Homo sapiens
MNGRLHLGHTFSLSKCEFAVGYQRLKGKCCLFPFGLHCTGMPIKACADKLKREIELYGCPPDFPDEEEEEEETSVKTEDIIIKDKAKGKKSKAAAKAGSSKYQWGIMKSLGLSDEEIVKFSEAEHWLDYFPPLAIQDLKRMGLKVDWRRSFITTDVNPYYDSFVRWQFLTLRERNKIKFGKRYTIYSPKDGQPCMDHDRQTGEGVGPQEYTLLKLKVLEPYPSKLSGLKGKNIFLVAATLRPETMFGQTNCWVRPDMKYIGFETVNGDIFICTQKAARNMSYQGFTKDNGVVPVVKELMGEEILGASLSAPLTSYKVIYVLPMLTIKEDKGTGVVTSVPSDSPDDIAALRDLKKKQALRAKYGIRDDMVLPFEPVPVIEIPGFGNLSAVTICDELKIQSQNDREKLAEAKEKIYLKGFYEGIMLVDGFKGQKVQDVKKTIQKKMIDAGDALIYMEPEKQVMSRSSDECVVALCDQWYLDYGEENWKKQTSQCLKNLETFCEETRRNFEATLGWLQEHACSRTYGLGTHLPWDEQWLIESLSDSTIYMAFYTVAHLLQGGNLHGQAESPLGIRPQQMTKEVWDYVFFKEAPFPKTQIAKEKLDQLKQEFEFWYPVDLRVSGKDLVPNHLSYYLYNHVAMWPEQSDKWPTAVRANGHLLLNSEKMSKSTGNFLTLTQAIDKFSADGMRLALADAGDTVEDANFVEAMADAGILRLYTWVEWVKEMVANWDSLRSGPASTFNDRVFASELNAGIIKTDQNYEKMMFKEALKTGFFEFQAAKDKYRELAVEGMHRELVFRFIEVQTLLLAPFCPHLCEHIWTLLGKPDSIMNASWPVAGPVNEVLIHSSQYLMEVTHDLRLRLKNYMMPAKGKTDKQPLQKPSHCTIYVAKNYPPWQHTTLSVLRKHFEANNGKLPDNKVIASELGSMPELKKYMKKVMPFVAMIKENLEKMGPRILDLQLEFDEKAVLMENIVYLTNSLELEHIEVKFASEAEDKIREDCCPGKPLNVFRIEPGVSVSLVNPQPSNGHFSTKIEIRQGDNCDSIIRRLMKMNRGIKDLSKVKLMRFDDPLLGPRRVPVLGKEYTEKTPISEHAVFNVDLMSKKIHLTENGIRVDIGDTIIYLVH

SEQ ID NO: 26288 - protein, 497 aa, Homo sapiens
CVNRWNMYLCECPLRFGGKNCEQAMPHPQLFSGESVVSWSDLNIIISVPWYLGLMFRTRKEDSVLMEATSGGPTSFRLQILNNYLQFEVSHGPSDVESVMLSGLRVTDGEWHHLLIELKNVKEDSEMKHLVTMTLDYGMDQNKADIGGMLPGLTVRSVVVGGASEDKVSVRRGFRGCMQGVRMGGTPTNVATLNMNNALKVRVKDGCDVDDPCTSSPCPPNSRCHDAWEDYSCVCDKGYLGINCVDACHLNPCENMGACVRSPGSPQGYVCECGPSHYGPYCENKLDLPCPRGWWGNPVCGPCHCAVSKGFDPDCNKTNGQCQCKENYYKLLAQDTCLPCDCFPHGSHSRTCDMATGQCACKPGVIGRQCNRCDNPFAEVTTLGCEVIYNGCPKAFEAGIWWPQTKFGQPAAVPCPKGSVGKVLGRNPIAFSLPGNTQSRQRAQQKHEQCSACGDARQSGPASPCSAAQAGAPGQVASLFIASGYLCEMGTLTVSTL

SEQ ID NO: 26289 - protein, 1904 aa, Homo sapiens
MKRKERIARRLEGIENDTQPILLQSCTGLVTHRLLEEDTPRYMRASDPASPHIGRSNEEEETSDSSLEKQTRSKYCTETSGVHGDSPYGSGTMDTHSLESKAERIARYKAERRRQLAEKYGLTLDPEADSEYLSRYTKSRKEPDAVEKRGGKSDKQEESSRDASSLYPGTETMGLRTCAGESKDYALHVGDGSSDPEVLLNIENQRRGQELSATRQAHDLSPAAESSSTFSFSGRDSSFTEVPRSPKHAHSSSLQQAASRSPSFGDPQLSPEARPSTGKPKHEWFLQKDSEGDTPSLINWPSSKSRVERSAEGPGLPTGVERERGSRKPRRYFSPGESRKTSERFRTQPITSAERKESDRCTSHSETPTVDDEEKVDERAKLSVAAKRLLFREMEKSFDEQNVPKRRSRNTAVEQRLRRLQDRSLTQPITTEEVVIAATEPIPASCSGGTHPVMARLPSPTVARSAVQPARLQASAHQKALAKDQTNEGKELAEQGEPDSSTLSLAEKLALFNKLSQPVSKAISTRNRIDTRQRRMNARYQTQPVTLGEVEQVQSGKLIPFSPAVNTSVSTVASTVAPMYAGDLRTKPPLDHNASATDYKFSSSIENSDSPVRSILKSQAWQPLVEGSENKGMLREYGETESKRALTGRDSGMEKYGSFEEAEASYPILNRAREGDSHKESKYAVPRRGSLERANPPITHLGDEPKEFSMAKMNAQGNLDLRDRLPFEEKVEVENVMKRKFSLRAAEFGEPTSEQTGTAAGKTIAQTTAPVSWKPQDSSEQPQEKLCKNPCAMFAAGEIKTPTGEGLLDSPSKTMSIKERLALLKKSGEEDWRNRLSRRQEGGKAPASSLHTQEAGRSLIKKRVTESRESQMTIEERKQLITVREEAWKTRGRGAANDSTQFTVAGRMVKKGLASPTAITPVASPICGKTRGTTPVSKPLEDIEARPDMQLESDLKLDRLETFLRRLNNKVGGMHETVLTVTGKSVKEVMKPDDDETFAKFYRSVDYNMPRSPVEMDEDFDVIFDPYAPKLTSSVAEHKRAVRPKRRVQASKNPLKMLAAREDLLQEYTEQRLNVAFMESKRMKVEKMSSNSNFSEVTLAGLASKENFSNVSLRSVNLTEQNSNNSAVPYKRLMLLQIKGRRHVQTRLVEPRASALNSGDCFLLLSPHCCFLWVGEFANVIEKAKASELATLIQTKRELGCRATYIQTIEEGINTHTHAAKDFWKLLGGQTSYQSAGDPKEDELYEAAIIETNCIYRLMDDKLVPDDDYWGKIPKCSLLQPKEVLVFDFGSEVYVWHGKEVTLAQRKIAFQLAKHLWNGTFDYENCDINPLDPGECNPLIPRKGQGRPDWAIFGRLTEHNETILFKEKFLDWTELKRSNEKNPGELAQHKEDPRTDVKAYDVTRMVSMPQTTAGTILDGVNVGRGYGLVEGHDRRQFEITSVSVDVWHILEFDYSRLPKQSIGQFHEGDAYVVKWKFMVSTAVGSRQKGEHSVRAAGKEKCVYFFWQGRHSTVSEKGTSALMTVELDEERGAQVQVLQGKEPPCFLQCFQGGMVVHSGRREEEEENVQSEWRLYCVRGEVPVEGNLLEVACHCSSLRSRTSMVVLNVNKALIYLWHGCKAQAHTKEVGRTAANKIKEQCPLEAGLHSSSKVTIHECDEGSEPLGFWDALGRRDRKAYDCMLQDPGSFNFAPRLFILSSSSGDFAATEFVYPARAPSVVSSMPFLQEDLYSAPQPALFLVDNHHEVYLWQGWWPIENKITGSARIRWASDRKSAMETVLQYCKGKNLKKPAPKSYLIHAGLEPLTFTNMFPSWEHREDIAEITEMDTEVSNQITLVEDVLAKLCKTIYPLADLLARPLPEGVDPLKLEIYLTDEDFEFALDMTRDEYNALPAWKQVNLKKAKGLF

SEQ ID NO: 26290 - protein, 481 aa, Homo sapiens
MSIGTCCFPGTNREAETFKEQGNAYYAKKDYNEAYNYYTKAIDMCPKNASYYGNRAATLMMLGRFREALGDAQQSVRLDDSFVRGHLREGKCHLSLGNAMAACRSFQRALELDHKNAQAQQEFKNANAVMEYEKIAETDFEKRDFRKVVFCMDRALEFAPACHRFKILKAECLAMLGRYPEAQSVASDILRMDSTNADALYVRGLCLYYEDCIEKAVQFFVQALRMAPDHEKACIACRNAKALKAKKEDGNKAFKEGNYKLAYELYTEALGIDPNNIKTNAKLYCNRGTVNSKLRKLDDAIEDCTNAVKLDDTYIKAYLRRAQCYMDTEQYEEAVRDYEKVYQTEKTKEHKQLLKNAQLELKKSKRKDYYKILGVDKNASEDEIKKAYRKRALMHHPDRHSGASAEVQKEEEKKFKEVGEAFTILSDPKKKTRYDSGQDLDEEGMNMGDFDPNNIFKAFFGGPGGFSFEASGPGNFFFQFG

SEQ ID NO: 26291 - protein, 1186 aa, Homo sapiens
MVSSGCRMRSLWFIIVISFLPNTEGFSRAALPFGLVRRELSCEGYSIDLRCPGSDVIMIESANYGRTDDKICDADPFQMENTDCYLPDAFKIMTQRCNNRTQCIVVTGSDVFPDPCPGTYKYLEVQYECVPYIFVCPGTLKAIVDSPCIYEAEQKAGAWCKDPLQAADKIYFMPWTPYRTDTLIEYASLEDFQNSRQTTTYKLPNRVDGTGFVVYDGAVFFNKERTRNIVKFDLRTRIKSGEAIINYANYHDTSPYRWGGKTDIDLAVDENGLWVIYATEQNNGMIVISQLNPYTLRFEATWETVYDKRAASNAFMICGVLYVVRSVYQDNESETGKNSIDYIYNTRLNRGEYVDVPFPNQYQYIAAVDYNPRDNQLYVWNNNFILRYSLEFGPPDPAQVPTTAVTITSSAELFKTIISTTSTTSQKGPMSTTVAGSQEGSKGTKPPPAVSTTKIPPITNIFPLPERFCEALDSKGIKWPQTQRGMMVERPCPKGTRGTASYLCMISTGTWNPKGPDLSNCTSHWVNQLAQKIRSGENAASLANELAKHTKGPVFAGDVSSSVRLMEQLVDILDAQLQELKPSEKDSAGRSYNKLQKREKTCRAYLKAIVDTVDNLLRPEALESWKHMNSSEQAHTATMLLDTLEEGAFVLADNLLEPTRVSMPTENIVLEVAVLSTEGQIQDFKFPLGIKGAGSSIQLSANTVKQNSRNGLAKLVFIIYRSLGQFLSTENATIKLGADFIGRNSTIAVNSHVISVSINKESSRVYLTDPVLFTLPHIDPDNYFNANCSFWNYSERTMMGYWSTQGCKLVDTNKTRTTCACSHLTNFAILMAHREIAYKDGVHELLLTVITWVGIVISLVCLAICIFTFCFFRGLQSDRNTIHKNLCINLFIAEFIFLIGIDKTKYAIACPIFAGLLHFFFLAAFAWMCLEGVQLYLMLVEVFESEYSRKKYYYVAGYLFPATVVGVSAAIDYKSYGTEKACWLHVDNYFIWSFIGPVTFIILLNIIFLVITLCKMVKHSNTLKPDSSRLENIKSWVLGAFALLCLLGLTWSFGLLFINEETIVMAYLFTIFNAFQGVFIFIFHCALQKKVRKEYGKCFRHSYCCGGLPTESPHSSVKASTTRTSARYSSGTQSRIRRMWNDTVRKQSESSFISGDINSTSTLNQGLTSHGLRAHLQDLYHLEDIH

SEQ ID NO: 26292 - protein, 530 aa, Homo sapiens
NGNENQGEVEEQTFKEKELDRKPEDVPPEILSNERYALQKANNRLLKILLEVVKTTAAVEETIGRHVLGILDRSSKSQSSASLIWRSEAEASVKSCVHEEHTRVTDESIPSYSGSDMPRNDINMWSKVTEEGTELSQRLVRSGFAGTEIDPENEELMLNISSRLQAAVEKLLEAISETSSQLEHAKVTQTELMRESFRQKQEATESLKCQEELRERLHEESRAREQLAVELSKAEGVIDGYADEKTLFERQIQEKTDIIDRLEQELLCASNRLQELEAEQQQIQEERELLSRQKEAMKAEAGPVEQRLVDAAVDAAPGAELLQETEKLMKEKLEVQCQAEKVRDDLQKQVKALEIDVEEQVSRFIELEQEKNTELMDLRQQNQALEKQLEKMRKFLDEQAIDREHERDVFQQEIQKLEQQLKVVPRFQPISEHQTREVEQLANHLKEKTDKCSELLLSKEQLQRDIQERNEEIEKLEFRVRELEQALLVSADTFQKVEDRKHFGAVEAKPELSLEVQLQAERDAIDRKEK

SEQ ID NO: 26293 - protein, 1296 aa, Homo sapiens
MVSSGCRMRSLWFIIVISFLPNTEGFSRAALPFGLVRRELSCEGYSIDLRCPGSDVIMIESANYGRTDDKICDADPFQMENTDCYLPDAFKIMTQRCNNRTQCIVVTGSDVFPDPCPGTYKYLEVQYECVPYIFVCPGTLKAIVDSPCIYEAEQKAGAWCKDPLQAADKIYFMPWTPYRTDTLIEYASLEDFQNSRQTTTYKLPNRVDGTGFVVYDGAVFFNKERTRNIVKFDLRTRIKSGEAIINYANYHDTSPYRWGGKTDIDLAVDENGLWVIYATEQNNGMIVISQLNPYTLRFEATWETVYDKRAASNAFMICGVLYVVRSVYQDNESETGKNSIDYIYNTRLNRGEYVDVPFPNQYQYIAAVDYNPRDNQLYVWNNNFILRYSLEFGPPDPAQVPTTAVTITSSAELFKTIISTTSTTSQKGPMSTTVAGSQEGSKGTKPPPAVSTTKIPPITNIFPLPERFCEALDSKGIKWPQTQRGMMVERPCPKGTRGTASYLCMISTGTWNPKGPDLSNCTSHWVNQLAQKIRSGENAASLANELAKHTKGPVFAGDVSSSVRLMEQLVDILDAQLQELKPSEKDSAGRSYNKLQKREKTCRAYLKAIVDTVDNLLRPEALESWKHMNSSEQAHTATMLLDTLEEGAFVLADNLLEPTRVSMPTENIVLEVAVLSTEGQIQDFKFPLGIKGAGSSIQLSANTVKQNSRNGLAKLVFIIYRSLGQFLSTENATIKLGADFIGRNSTIAVNSHVISVSINKESSRVYLTDPVLFTLPHIDPDNYFNANCSFWNYSERTMMGYWSTQGCKLVDTNKTRTTCACSHLTNFAILMAHREIAYKDGVHELLLTVITWVGIVISLVCLAICIFTFCFFRGLQSDRNTIHKNLCINLFIAEFIFLIGIDKTKYAIACPIFAGLLHFFFLAAFAWMCLEGVQLYLMLVEVFESEYSRKKYYYVAGYLFPATVVGVSAAIDYKSYGTEKACWLHVDNYFIWSFIGPVTFIILLNIIFLVITLCKMVKHSNTLKPDSSRLENINNYRVCDGYYNTDLPGYEDNKPFIKSWVLGAFALLCLLGLTWSFGLLFINEETIVMAYLFTIFNAFQGVFIFIFHCALQKKVRKEYGKCFRHSYCCGGLPTESPHSSVKASTTRTSARYSSGTQSRIRRMWNDTVRKQSESSFISGDINSTSTLNQGMTGNYLLTNPLLRPHGTNNPYNTLLAETVVCNAPSAPVFNSPGVLYLQIKLPFFAAKQSYDLCPVSKIFKLSYIYCYILNFSVKKNYGIVYARLLKLHYIIVKAQS

SEQ ID NO: 26294 - protein, 64 aa, Homo sapiens
VPPEKKISRSPKGDRLPEDSGSTTMWVPTKIPPLSPQLLTPGSGPDFEQISLEIEQSCAWIPPQ

SEQ ID NO: 26295 - protein, 96 aa, Homo sapiens
VPPEKKISRSPKGDRLPEDSGSTTMWVPTKIPPLSPQLLTPGSVDTGFHHVGQAGLELVTSGDAPALASQSAGITGPDFEQISLEIEQSCAWIPPQ

SEQ ID NO: 26296 - protein, 149 aa, Homo sapiens
VPPEKKISRSPKGDRLPEDSGSTTMWVPTKIPPLSPQLLTPGSESHSVSQAGVLWHRVGSLQPPSPGFKQFSCLSLQSSWDYRCPPPHPANFFIFLVDTGFHHVGQAGLELVTSGDAPALASQSAGITGPDFEQISLEIEQSCAWIPPQ

SEQ ID NO: 26297 - protein, 49 aa, Homo sapiens
VPPEKKISRSPKGDRLPEDSGSTTMWVPTKIPPLSPQLLTPGSGTVGNY

SEQ ID NO: 26298 - protein, 72 aa, Homo sapiens
VQSGKCESSVLGYSATCLPDMGRWRVSSVESWPFASTGGKLAIATAGTGTQAAPRPFLIRPPDSWALALALM

SEQ ID NO: 26299 - protein, 35 aa, Homo sapiens
MRQSSKDIFVHSRNTERKDSGRWRRIKQGSCYEKP

SEQ ID NO: 26300 - protein, 86 aa, Homo sapiens
LRDLEASRGERAASVEELGSAPAGLANPKLGLEPGSQILDPELHLCQEPRGERMAVSVAMSKLCILQTLCFPKIGTQKRTDHFLQL

SEQ ID NO: 26301 - protein, 140 aa, Homo sapiens
LVTFRDVAIDFSKGEWECLGPAQRDLYRDVMLENYSNFVSPDMLSRYETKELTLKNGTFEKESLKWKIIESVRSSCLEESFLGNDWKCKGLFERQQETTEEYFRHVTVPFEKISEFIQPTYFLLNQIIHTGKKLYEQKKK

SEQ ID NO: 26302 - protein, 164 aa, Homo sapiens [sequence omitted]

SEQ ID NO: 26303 - protein, 78 aa, Homo sapiens [sequence omitted]

SEQ ID NO: 26304 - protein, 300 aa, Homo sapiens
LHLAPSREAATAGPGGGTMGASVSRGRAARVPAPEPEPEEALDLSQLPPELLLVVLSHVPPRTLLGRCRQVCRGWRALVDGQALWLLILARDHGATGRALLHLARSCQSPARNARPCPLGRFCARRPIGRNLIRNPCGQGLRKWMVQHGGDGWVVEENRTTVPGAPSQTCFVTSFSWCCKKQVLDLEEEGLWPELLDSGRIEICVSDWWGARHDSGCMYRLLVQLLDANQTVLDKFSAVPDPIPQWNNNACLHVTHVFSNIKMGVRFVSFEHRGQDTQFWAGHYGARVTNSSVIVRVRLS

SEQ ID NO: 26305 - protein, 75 aa, Homo sapiens
LEEWLLSVSIYSAQPCALGFIWYLCPFLQSPKLKFRGRIAFHRILSDPMGARVCAGRRRQQESHAGGDTATRDLR

SEQ ID NO: 26306 - protein, 147 aa, Homo sapiens
LRADTAGRYPALLWPCGILRVPRRTLLTSCRPKPQPHPSFCASTVTVPRSSVHQIRPQDLHLLPDPQASLSFLPANCSGRKEVQRLGKWASPCNSELLHSGGPHPIPGPCREKRWVCVRGAGWVGLPARTLACSLIQTKDCRTLGCG

SEQ ID NO: 26307 - protein, 133 aa, Homo sapiens
LKEELGGHIGKRTLVAGKWHAQRPEVRVRGDGTLEEQDESQQVRAQWRVGTNWGPDLRVCAPAELMFLETSALTGENVEEAFLKCARTILNKIDSGELDPERMGSGIQYGDASLRQLRQPRSAQAVAPQPCGC

SEQ ID NO: 26308 - protein, 35 aa, Homo sapiens
LANVCPPEPLTIPQELPKPETRVICPQLPIWPCCC

SEQ ID NO: 26309 - protein, 71 aa, Homo sapiens
LTDTGATTDTLQGWFSPVQGRCAHCRTCSILRPTPLTKGQRTPGPIVLLVMDLLTLCSKFSFFSWLFFERG

SEQ ID NO: 26310 - protein, 67 aa, Homo sapiens
LVSVSLAISLSLKISAPVSMSLSLCAPRIFRAPTPVPRGPRLGAGPPTSAETQSVERSPPSPHPQPL

SEQ ID NO: 26311 - protein, 142 aa, Homo sapiens
LQPQTQPRAIPKPIPKPNSTPSPSLITSPAPSSASSPTPCLSPIPTLPPISPQLQSITPFKPSSTKLLSSPGHIPILPQPPAPTPIIPLSSPLTPIYPPSLSLTIQPSPSHFPTLVLHRPEANFTHVPIPNLVPIPDSKSNP

SEQ ID NO: 26312 - protein, 299 aa, Homo sapiens
LFYREVSVYCPGWSQIAGLKQFCLGFPKCWNYRREPWCLAMDLLFVKIPPLVPPVWKAPQWQVRGPWGQGTHAQFWALRVPGWRTLMYLEAELSLLSPCWPGNHETDNMNQIYGFEGEVKAKYTAQMYELFSEVFEWLPLAQCINGKVLIMHGGLFSEDGVTLDDIRKIERNRQPPDSGPMCDLLWSDPQPQNGRSISKRGVSCQFGPDVTKAFLEENNLDYIIRSHEVKAEGYEVAHGGRCVTVFSAPNYCDQMGNKASYIHLQGSDLRPQFHQFTAVPHPNVKPMAYANTLLQLGMM

SEQ ID NO: 26313 - protein, 95 aa, Homo sapiens
LHRFRESTCDHWHSFGGWEILAEAAPALVPRAKRWGEDGESGRGGNLGRGRSLGVGRDGPACKILYMRCCRYRNEFSVHVWLIFFVHDFCMFPFQ

SEQ ID NO: 26314 - protein, 62 aa, Homo sapiens
MPTLRVPVLSVWLLRWWRVLGAGRVLPDSLSLSPPPPTGCQTKPERGWGSQPPSVLCPQAPV

SEQ ID NO: 26315 - protein, 74 aa, Homo sapiens
MCLPRNPHHPTLLLSRGFIISLCIPHVFPSCPLEFGGTSRLRHPSQGEAKRGIRMGGFLIVATFATVHDSINIG

SEQ ID NO: 26316 - protein, 576 aa, Homo sapiens
VNKQPLLLTQSLFRWSSIRTRVTPRSSRRVWAAYTEGKKKPSFLGKCRKPASGRSLRSPQGGALAAQRARFPAGEPRNGGAGGGDSEDPRLGFPAWIRSAWGFDPHPGAAPRRSWAARAFGLRHRQRHLEAGASGRLCLTCLLEGNTGKPGLAVTLVTNMSQDSVTFADVAVNFTKEEWTLLDPAQRNLYRDVMLENSRNLAFIDWATPCKTKDATPQPDILPKRTFPEANRVCLTSISSQHSTLREDWRCPKTEEPHRQGVNNVKPPAVAPEKDESPVSICEDHEMRNHSKPTCRLVPSQGDSIRQCILTRDSSIFKYNPVLNDSQKTHENNEDDGVLGWNIQWVPCGRKTELKSSTWTGSQNTVHHIRDEIDTGANRHQRNPFGKAFREDGSLRAHNTHGREKMYDFTQCENTSRNNSIHAMQMQLYTAETNKKDCQTGATSANAPNSGSHKSHCTGEKTHKCPECGRAFFYQSFLMRHMKIHTGEKPYECGKCGKAFRYSLHLNKHLRKHVVQKKPYECEECGKVIRESSKYTHIRSHTGEKPYKCKTCGKDFAKSSGLKKHLKTHKDEKPCE

SEQ ID NO: 26317 - protein, 151 aa, Homo sapiens
LGRKAVELAGPRLEQRPAPPGSGGTASRRGFGPSTITQPENEGAGALEPTGLFFKPDKGFLTSPDGAGGGGFTPLPRPTSTPGAVAPTSLCSSPAPAAPPGKPVFNLSSIGTQNCETRSPNCDPRPWPRHTETPDPDCDIRLLKWSSDSRL

SEQ ID NO: 26318 - protein, 100 aa, Homo sapiens
LGPPGPPGATERPSASGQSVTARRIVLATRISLPDPFLPESYREHGLGRAREAPDVLALPSWTLRLFLRSMLSAVIARLVSRPTHHREVRIVVERRVAPM

SEQ ID NO: 26319 - protein, 105 aa, Homo sapiens [sequence omitted]

SEQ ID NO: 26320 - protein, 320 aa, Homo sapiens
LGAPGKRSRVPPPGSPPPRQAPRSCRAPPIPLGLDTRKAGIAAYKHADGKKIDGRRVLVDVERGRTVKGWRPRRLGGGLGGTRRGGADVNIRHSGRDDTSRYDERPGPSPLPHRDRDRDRERERRERSRERDKERERRRSRSRDRRRRSRSRDKEERRRSRERSKDKDRDRKRRSSRSRERARRERERKEELRGGGGDMAEPSEAGDAPPDDGPPGELGPDGPDGPEEKGRDRDRERRRSHRSERERRRDRDRDRDRDREHKRGERGSERGRDEARGGGGGQDNGLEGLGNDSRDMYMESEGGDGYLAPENGYLMEAAPE

SEQ ID NO: 26321 - protein, 178 aa, Homo sapiens
VVRRRAWLGRRRPGFTGKKKARDAGSEVEPRAGTADLCPAHVMGSCPQVHSEQWQLSTSQIPVQQMHLFDVHNYPDYVSSGGGFGPADDHGYGVSYIFMGDGMITFHISSKKSSTKTDSHRLGQHIEDALLDVASLFQAGQHFKRRFRGSGKENSRHRCGFLSRQTGASKASMTSTDF

SEQ ID NO: 26322 - protein, 43 aa, Homo sapiens
MPVARSWVCHKTYVTPRRPFEKSRLDQELKLIGEYGFRNKREV

SEQ ID NO: 26323 - protein, 325 aa, Homo sapiens
MSPPLLLLPLLLLLPLLNVEPAGATLIRIPLRQVHPGRRTLNLLRGWGKPAELPKLGAPSPGDKPASVPLSKFLDAQYFGEIGLGTPPQNFTVAFDTGSSNLWVPSRRCHFFSVPCWFHHRFNPNASSSFKPSGTKFAIQYGTGRVDGILSEDKLTIGGIKGASVIFGEALWESSLVFTVSRPDGILGLGFPILSVEGVRPPLDVLVEQGLLDKPVFSFYFNRDPEVADGGELVLGGSDPAHYIPPLTFVPVTVPAYWQIHMERVKVGSRLTLCAQGCAAILDTGTPVIVGPTEEIRALHAAIGGIPLLAGEVRSQSLVGVSWGR

SEQ ID NO: 26324 - protein, 32 aa, Homo sapiens
LSCSTGIQELGTGKGSKLVVWEDGNQLLHSSE

SEQ ID NO: 26325 - protein, 492 aa, Homo sapiens
LVACELFFWMGNQSSVPQDSPLGCILRNWDKFDPQALKRKRLVFLCNTVWPKYELEGQEAWPVGGSLNVNTILQLDVYCRQQRKWSEVPYVQTFMILRENPDFCKGCKIDPALLAILSRPLQRPQPGGFNDFLVNPPQPPLPETKEKEQAPPAPSSLYRTLSLHGSASTYTRPSGPRSGICLLPVVSRPVGPVQVQVPFSMQDLSQVKEGLGKFSENPGKFLEGFRKLTLTFELTWKDVAILLGQTLSLEERQTIWEAARQCGDELHLADANYPVGATAVPLQDPNWDYDTPAGICARNHMLLCLIEGMKRSQVKPVNYNKLATIDQGPHENPTAFLERLQETLIKHTNLDPGSPEGQLVLKDHFLTQAAPDIRRKLRMLALGTRAPMSEILKFASSVFYNRDQDERDRAERKEKQKEERQAQLLAALQVHQPPPGCPKDTFPGNCYQCGKPGHWKANCPYGPRGEKPCTACPLCRKLRYWKENCPESQKGP

SEQ ID NO: 26326 - protein, 527 aa, Homo sapiens
VEMPGPCSEGFVQGRDVGELQEPGLPGELPPKENNSTGKVFQAVMLERHEIHDIQDFYFREMQQNIHDFECQCHNDERNYREIPAIKIKNITGRRDQGDGRNAGNKPVENQLELSFWLHLAELQGFQIERKIYECNQIEKSVTRGSSVSLLQTNLPCVNTSISNIYRNDFMHPSLLTQDQKAYIREKPYKCSDCGKAFNQRSNLTTHQRIHTGQKPHKCDICGKGFRRIANLASHHRIHTGEKPYRCNECGKTFNQTFNLTTHQRIHTGQKPYKCDRCGKGFRQIGNLASHHRIHTGEKPYRCNECGKTFNRMFHLTRHQRIHTGQKPYKCDICGKGFRQIANLASHHRIHTGEKPYKCSDCGKTFNYRSHLTRHQRIHTGQKPYKCDTCGKDFSQNSYLENHQRIHTREKSYRCNECGKTFNKMTNLTTHQRIHTGQKTYKCDICGKGFRQIGNLASHHRIHTGEKPYRCNECGKTFNRMFHLTRHQRIHTGQKPYKCDICGKSFSQNSYLENHQRIHTGEKTYKL

SEQ ID NO: 26327 - protein, 58 aa, Homo sapiens [sequence omitted]

SEQ ID NO: 26328 - protein, 138 aa, Homo sapiens
VRKHYFSKRSFLPCSLLQPLAQPLRPLPVNDAMEGVLGSPCVPCIGASQPPGPLLWGSRHPHATNRRQGRPLSPVHLLGRTRGCGTEEVQVIPGDRDRAGRRQDPLGKHGEGRSPGNGPAAHHPLRARGGLEVGSQHL

SEQ ID NO: 26329 - protein, 274 aa, Homo sapiens
LWRAPLGTKRRRTPLSVDCTTQPTHLPTLQAPSGPPSLAALASLTARGPLPGQDPFLSIRGWDTSRRREGAWLSCMSVPHPHPPPPSPEKAASLEYDYETIRNIDCYSTDFCVRVRDGMRYWNMTVQWWLAQYIYKSAPARSYVLRSAWTMLLSAYWHGLHPGYYLSFLTIPLCLAAEGRLESALRGRLSPGGQKAWDWVHWFLKMRAYDYMCMGFVLLSLADTLRYWASIYFCIHFLALAALGLGLALGGGSPSRRKAASQPTSLAPEKLREE

SEQ ID NO: 26330 - protein, 372 aa, Homo sapiens
LPNRSGTMAPKLITVLCLGFCLNQKICPHAGAQDKFSLSAWPSPVVPLGGRVTLSCHSHLRFVIWTIFQTTGTRSHELHTGLSNNITISPVTPEHAGTYRCVGIYKHASKWSAESNSLKIIVTGLFTKPSISAHPSSLVHAGARVSLRCHSELAFDEFILYKEGHIQHSQQLDQGMEAGIHYVEAVFSMGPVTPAHAGAYRCCGCFSHSRYEWSAPSDPLDIVITGKYKKPSLSTQVDPMMRLGEKLTLFCSSEISFDQYHLFRHGVAHGQWLSGGQRHREAFQANFSVGRATPVPGGTYRCYGSFNDSPYKPPVTRCNFTPQETLRVLLCHSQNPPLNLTPPWQTQSPRKANGRMKRSLQQKRHRRSYMPS

SEQ ID NO: 26331 - protein, 352 aa, Homo sapiens
MAPKLITVLCLGFCLNQKICPHAGAQDKFSLSAWPSPVVPLGGRVTLSCHSHLRFVIWTIFQTTGTRSHELHTGLSNNITISPVTPEHAGTYRCVGIYKHASKWSAESNSLKIIVTGLFTKPSISAHPSSLVHAGARVSLRCHSELAFDEFILYKEGHIQHSQQLDQGMEAGIHYVEAVFSMGPVTPAHAGAYRCCGCFSHSRYEWSAPSDPLDIVITGKYKKPSLSTQVDPMMRLGEKLTLFCSSEISFDQYHLFRHGVAHGQWLSGGQRHREAFQANFSVGRATPVPGGTYRCYGSFNDSPYKPPVTRCNFTPQETLRVLLCHSQNPPLNLTHLALKDSPATCICSLDSQ

SEQ ID NO: 26332 - protein, 225 aa, Homo sapiens
LSLLSGLFTKPSISAHPSSLVHAGARVSLRCHSELAFDEFILYKEGHIQHSQQLDQGMEAGIHYVEAVFSMGPVTPAHAGAYRCCGCFSHSRYEWSAPSDPLDIVITGKYKKPSLSTQVDPMMRLGEKLTLFCSSEISFDQYHLFRHGVAHGQWLSGGQRHREAFQANFSVGRATPVPGGTYRCYGSFNDSPYKPPVTRCNFTPQETLRVLLCHSQNPPLNLVSK

SEQ ID NO: 26333 - protein, 97 aa, Homo sapiens [sequence omitted]

SEQ ID NO: 26334 - protein, 53 aa, Homo sapiens
LLGVPHSPLSLLCSAFHHPVFLRLLVSVCPSPLLCVSHLCLLLSLFPALSLCL

SEQ ID NO: 26335 - protein, 88 aa, Homo sapiens
LYGAVGVPKPRPFPLPSPKMARAWLLQPPGLGKERERGRRAGMRKGSQEGGRKGEYGGGRELRRKSRGPPGGSDAAPAAQNVGAQREV

SEQ ID NO: 26336 - protein, 46 aa, Homo sapiens
LGEGGGRAGWGLLPTPAPPLSPSEDDGQRSDSRRHTTAGSNWNGSN

SEQ ID NO: 26337 - protein, 37 aa, Homo sapiens
LRPPESTGVQRGCGKSHPEREVKKAWAALVLLCPGRR

SEQ ID NO: 26338 - protein, 7 aa, Homo sapiens
LSGSEMN

SEQ ID NO: 26339 - protein, 75 aa, Homo sapiens
LRGARTTFPNGPCTPWGLFHAVLRLRSRRAGSETDCVGVETGWMRLTPAGRRDEEGRTAEGPGVSAIKSFEVTVA

SEQ ID NO: 26340 - protein, 31 aa, Homo sapiens
MRLTPAGRRDEEGRTAEGPGVSAIKSFELSH

SEQ ID NO: 26341 - protein, 29 aa, Homo sapiens
MRLTPAGRRDEEGRTAEGPGVSAIKSFEF

SEQ ID NO: 26342 - protein, 22 aa, Homo sapiens
MANDRRRAQTGPCYDLSWSGSD

SEQ ID NO: 26343 - protein, 29 aa, Homo sapiens
LHLKDTCTTLDTVQDDATSSWMLICHVDF

SEQ ID NO: 26344 - protein, 43 aa, Homo sapiens
LGVLPLLLLVLNLVYSLLIKCTTLDTVQDDATSSWMLICHVDF

SEQ ID NO: 26345 - protein, 7 aa, Homo sapiens
LCKPRQP

SEQ ID NO: 26346 - protein, 64 aa, Homo sapiens
MGAWVTSDAPSDRTSTPMLLSAPFTQPKQRRPSGGKGATAKRIGDSPRILGRRSGRAWDAGRRQ

SEQ ID NO: 26347 - protein, 66 aa, Homo sapiens
LSWSPEVNFYFLADRTSTPMLLSAPFTQPKQRRPSGGKGATAKRIGDSPRILGRRSGRAWDAGRRQ

SEQ ID NO: 26348 - protein, 67 aa, Homo sapiens
VMRRHSRRYLKTGKNAATNRRRKRQKCVFHLEHPEGAQPYQHLDFDPVTLILDLWPPELLENKFALF

SEQ ID NO: 26349 - protein, 198 aa, Homo sapiens
LWKMSRPLGQSRRRPPDPIARWQRSRRLQAEGPAGVPLGEPVFPQGLLQAQPALGVVLAQESLGTAWVTERDSVSKKKKKAWVTMSLFQEWFLHFCSTVEGAAPSTTFPTRGCPSWTALPATLGVETESGSVAQAGVRWRDLGSLQPPPPGFTPFSCLSLPGSWDYRRPPPRPANFFVFLVETGFHRVSQNGLGLLTP

SEQ ID NO: 26350 - protein, 232 aa, Homo sapiens
LKFLFYQGLPHSKSPYRSPHVMLAIRLPSLSTKKETRIWNSGTQFFKSRQLLEATVATRNQHSQDPIRDAAVHAAVTSPWTPLCWQFLRFSLFSMTGIVLKSNGQACCRISLSWGFSDDLIGIMEFGEEDHRSKVLFLLHPAKEPSVNDSSLNHPPHLAVVASARFLHRKVTPLSRFPDSLEQSHYAWASLKQRELRSLPLRTWSLQLYLESSAREICLLNIYPLVHITINS

SEQ ID NO: 26351 - protein, 238 aa, Homo sapiens
LGSRPAHPAGIGCERGRTKPTPRARAHQWKRPLVLIDVPPSANGDEGKLQRVAPASADKSRPAGLGLHSEPSPVPSAASSAGGSGGLSFRAASSLPVSPSLAVSMKAFSPVRSVRKNSLSDHSLGISRSKTPVDDPMSLLYNMNDCYSKLKELVPSIPQNKKVSKMEILQHVIDYILDLQIALDSHPTIVSLHHQRPGQNQASRTPLTTLNTDISILSLQASEFPSELMSNDSKALCG

SEQ ID NO: 26352 - protein, 80 aa, Homo sapiens
LLFVSEIDILPPEVASSQSVMKTDSQAEMDSSLWTLPFPSRSMSYITKEIALHWFMFAVTVVHCIDVHTNLNVMSLYISV

SEQ ID NO: 26353 - protein, 13 aa, Homo sapiens
MLPCNFSFFCLFV

SEQ ID NO: 26354 - protein, 169 aa, Homo sapiens
MGWSQDLFRALWRSLSREVKEHVGTDQFGNKYYYILQNKNWRGQTIQEKRIVEAANKKEVDYETGDIPTEWEAWIRRTRKTPPTMEEILKNEKHREEIKIKSQDFYEKEKLLSKETSEELLPPPVQTQIKGRASAPYFGKEKPSVAPSSTGKTFQPGSWMPRDGKSHNE

SEQ ID NO: 26355 - protein, 402 aa, Homo sapiens
VPGAESGTMKRQNVRTLALIVCTFTYLLVGAAVFDALESEPELIERQRLELRQQELRARYNLSQGGYEELERVVLRLKPHKAGVQWRFAGSFYFAITVITTIGYGHAAPSTDGGKVFCMFYALLGIPLTLVMFQSLGERINTLVRYLLHRAKKGLGMRRADVSMANMVLIGFFSCISTLCIGAAAFSHYEHWTFFQAYYYCFITLTTIGFGDYVALQKDQALQTQPQYVAFSFVYILTGLTVIGAFLNLVVLRFMTMNAEDEKRDAEHRALLTRNGQAGGGGGGGSAHTTDTASSTAAAGGGGFRNVYAEVLHFQSMCSCLWYKSREKLQYSIPMIIPRDLSTSDTCVEQSHSSPGGGGRYSDTPSRRCLCSGAPRSAISSVSTGLHSLSTFRGLMKRRSSV

SEQ ID NO: 26356 - protein, 116 aa, Homo sapiens
LGPKIKSQEKIMERKIHWNSWRASLSLESLFCYSLLLLLPFPTPSQAREICVKFTRGVDFNWQAQALLALQEAAEAFLVHLFEDAYLLTLHAGRVTLFPKDVQLARRIRGLEEGLG

SEQ ID NO: 26357 - protein, 219 aa, Homo sapiens
LAGGYLAHSLAIMTDAAHLLADVGSMMGSLFSLWLSTRPATRTMTFGWHRSGKAPAWPSDSPILPEGTRQGPKQVSDSLSPPPPAETLGALASVVSLWMVTGILLYLAFVRLLHSDYHIEGGAMLLTASIAVCANLLYVPVWSRHLVGPRARGLPPGWESWLSPPHQTHRHAHTALHGLPCVCLRRVWDRDLKFSQQISVKGLPWASHSDEGFHQHDCI

SEQ ID NO: 26358 - protein, 32 aa, Homo sapiens
LPKELPLKANYRLLLPCTKLRNLFGCPFLPGV

SEQ ID NO: 26359 - protein, 193 aa, Homo sapiens
MRGSKSLVCKRAGPPDGHIRRNDPQRGSPTGWEIRPAGRSATQPRQGQTDDKTETQKMNQLGSVHRASVWKSQNPDPDPNCSVPALTPNQPVPLSLVLFHPAFLSKNCCSPENRLAHFCRFPVLCVLIALVRAPGPCPRTYVLHSFPPASCLCVALGLTAYDLPNRIIRRGVWLMWHHAGLERPLVIGISSRK

SEQ ID NO: 26360 - protein, 82 aa, Homo sapiens
LWLHSRGSSEVWTPIGLQAALGRHRAGALISSCKTHRLLGLLASLSANSPLPGQLNGGSCWHRKERRSRLRLRKLLEPAPSR

SEQ ID NO: 26361 - protein, 39 aa, Homo sapiens
MEPFFLSFFFFKFCIFHPTAVCRENIMQMPLIFYPMFTS

SEQ ID NO: 26362 - protein, 59 aa, Homo sapiens
LCKGKGRNVLYLRHCTYPGRLEIQKQHGIASPLKTMRGFRMSPIGVADQMDISLKNQYI

SEQ ID NO: 26363 - protein, 81 aa, Homo sapiens
LPWKLHPIYLNLRHPSDDPFGFSDFTAKILSSPKYLSFRLNKPVLQTASSMHFPMMLAALKILSDLELYLYGNNRVFLKYN

SEQ ID NO: 26364 - protein, 61 aa, Homo sapiens
LKERIQTIWASSPKYLSFRLNKPVLQTASSMHFPMMLAALKILSDLELYLYGNNRVFLKYN

SEQ ID NO: 26365 - protein, 64 aa, Homo sapiens
MHPPRHNHPFSKIGSPKYLSFRLNKPVLQTASSMHFPMMLAALKILSDLELYLYGNNRVFLKYN

SEQ ID NO: 26366 - protein, 45 aa, Homo sapiens
VPPFILRCLGHTLDEAHSSNVRRSLCSRFFFVTMKSLPCSQLKMK

SEQ ID NO: 26367 - protein, 75 aa, Homo sapiens
VRRKGRRFRDVGGHPSPSRPCWGHGSGGGDMGPRQTASPTEHLDSNSVPGGAPTPPFSVSSCLFFFIFITKFHSF

SEQ ID NO: 26368 - protein, 42 aa, Homo sapiens
LLSTLPSCTDQCFRQNHIHGTLLQLTTQSLETTKKEVYIVRR

SEQ ID NO: 26369 - protein, 136 aa, Homo sapiens
MTADKEKKRSSSERRKEKSRDAARCRRSKETEVFYELAHELPLPHSVSSHLDKASIMRLAISFLRTHKLLSSAVTFTVNPAVRGGQGQDQGRTWAPRGCGEHGLGEPRTAFADFSICCHLAIRPILHTRLSPQEAF

SEQ ID NO: 26370 - protein, 623 aa, Homo sapiens
VGASPRLKRIQDITCQRVLSGVGSPRVWETRSWQGRASGGGKEGPWSRGRGPRCAARSTAGLATLGSALAPPSALSSAPLRPPPFPPFLLLLLPPRPLPDFARSDPRGCPPLRTPLAARARSAARPHRFTMLKALFLTMLTLALVKSQDTEETITYTQCTDGYEWDPVRQQCKDIDECDIVPDACKGGMKCVNHYGGYLCLPKTAQIIVNNEQPQQETQPAEGTSGATTGVVAASSMATSGVLPGGGFVASAAAVAGPEMQTGRNNFVIRRNPADPQRIPSNPSHRIQCAAGYEQSEHNVCQDIDECTAGTHNCRADQVCINLRGSFACQCPPGYQKRGEQCVDIDECTIPPYCHQRCVNTPGSFYCQCSPGFQLAANNYTCVDINECDASNQCAQQCYNILGSFICQCNQGYELSSDRLNCEDIDECRTSSYLCQYQCVNEPGKFSCMCPQGYQVVRSRTCQDINECETTNECREDEMCWNYHGGFRCYPRNPCQDPYILTPENRCVCPVSNAMCRELPQSIVYKYMSIRSDRSVPSDIFQIQATTIYANTINTFRIKSGNENGEFYLRQTSPVSAMLVLVKSLSGPREHIVDLEMLTVSSIGTFRTSSVLRLTIIVGPFSF

SEQ ID NO: 26371 - protein, 65 aa, Homo sapiens
LRTPLAARARSAARPHRFTMLKALFLTMLTLALVKSQDTEETITYTQCTDGYEWDPVRQQCKEDS

SEQ ID NO: 26372 - protein, 52 aa, Homo sapiens
LRTPLAARARSAARPHRFTMLKALFLTMLTLALVKSQDTEETITYTVRGDGI

SEQ ID NO: 26373 - protein, 240 aa, Homo sapiens [sequence omitted]

SEQ ID NO: 26374 - protein, 64 aa, Homo sapiens
MAVCLYLLRCNILLLLLLLLLGSRCNFPSASLLLCLGTAKAWDRPRAASLCLPSSPRSIFPPLN

SEQ ID NO: 26375 - protein, 63 aa, Homo sapiens
VLAPVGLRVEAGGVWVPSSSDRWMDLSSKRKEETRWQISLKPKIACEAIIRRNKNRHKNRGKE

SEQ ID NO: 26376 - protein, 30 aa, Homo sapiens
LLSPSTLSPLVPLCPMHSHLSQPPVLPVWC

SEQ ID NO: 26377 - protein, 166 aa, Homo sapiens
VRDWAYATTGARCLSLSVCGSVLVVLPSSFGICSALVCPRPPQAPMIKSSSLTRACPPHPRQQGGEWGNKITTKSLGVSHSPSPGTLSETLQSPRNSLREAGRRPAIWTKLRYADADRAALRGEDPGGASSAGSSSQKTDDPERVAGTDCQAFGGRRGQSFAGSES

SEQ ID NO: 26378 - protein, 43 aa, Homo sapiens
MAFTLTSPWAYDVTRSHHAQRPGPSRQNRGLSVEPLARPHDGG

SEQ ID NO: 26379 - protein, 33 aa, Homo sapiens
MLRNKTFNKISEDSSKSAIVSLSFLNVNIILTC

SEQ ID NO: 26380 - protein, 182 aa, Homo sapiens
LPTLSPSLAAQATGPSSQCPLGPGSLGPKHHQKGVSRERSNITPSPTPGTCPRAATYGSLLPQPASPHCDPPPWAPVPGSQHHGQALPWTEKEFFSCSACTWPEEGVEAGLAGAVLLGKMAPHLEGGGLLQGVQGQRRKGPGDWASMWRMGPACSKPRPAPSLCSNGQSCSRLCSTICFKLK

SEQ ID NO: 26381 - protein, 26 aa, Homo sapiens
MSYISLIVFKTKERAESRTTICSPPM

SEQ ID NO: 26382 - protein, 7 aa, Homo sapiens
MLIQRAS

SEQ ID NO: 26383 - protein, 100 aa, Homo sapiens
LDAGNHFLFGLMPKVTEDPATISCSPWKPLDSSVMSPVIQQPWPSFDGLNIWSSLNSLYIGNLPASIHIPTSVCIPRYKMVQSVYLLSHSTKIFQGPGFL

SEQ ID NO: 26384 - protein, 12 aa, Homo sapiens
VQKEGVGKIVFF

SEQ ID NO: 26385 - protein, 36 aa, Homo sapiens
LVFIEQFVYWKLASLHPHSNLRLHPSNNWEMKQEAL

SEQ ID NO: 26386 - protein, 13 aa, Homo sapiens
VLQNNWEMKQEAL

SEQ ID NO: 26387 - protein, 7 aa, Homo sapiens
MFLVEDT

SEQ ID NO: 26388 - protein, 52 aa, Homo sapiens
MTDTENHDSAPSSTSTCCPPITAGMQLKDSLGPGSNRPLWTLRPLHLRVVCL

SEQ ID NO: 26389 - protein, 36 aa, Homo sapiens
MKSLGALWMCRRVGLPFYRPFAELRGQSRRQSRKQP

SEQ ID NO: 26390 - protein, 14 aa, Homo sapiens
MLPLICHHPVSMIG

SEQ ID NO: 26391 - protein, 18 aa, Homo sapiens
MRAGLLCVPGSLDPQPGA

SEQ ID NO: 26392 - protein, 290 aa, Homo sapiens
LPPLPWWWVVYLIHIGCSKTKSESALITFYLYVITLMMLMGAAGLAGIRIYRTDEKSLDESKNPPRKLDSDLLVGTASGSWLISWGSILAILCAEDHPHYTWYNLPYSIVVIMEKYIQNLFIFESIHREPKKLSEDIQTLRMVTVCNGNTMPLASSCLKSGVVAGDVAPWGRDMPPAANGNVCLRESCDKEEKQEESSWGGNPSPVHLPRFLQGNAKRKVLRNIAAFLFLCNTLLWIPPAFGCRPEYDNGLEEIVFGFEPWIIVVNLAMPFSIFYGMHAAASLFEVYCKI

SEQ ID NO: 26393 - protein, 330 aa, Homo sapiens
LVPVLRRPLPLTSRPASPNSAQEDRLPPPALMVVSGRRLLTALLQAQKWPFQPSRDMRLVQFWAPHLVGPHLGLETGNGRGIINLNAFDPTLPKTMTQFLEQGEATLSVARRALAAQLPVLPRSEVTFLAPVTWPDKVVCVGMNYVDHCKEQNVPVPKEPIIFSKFASSIVGPYDEVVLPPQSQEVDWEVELAVVIGKKGKHIKATDAMAHVAGFTVAHDVSARDWLTRCNGKQWLLGKTFDTFCPLGPALVTKDSVADPHNLKICCRVNGEVVQSSNTNQMVFKTEDLIAWVSQFVTFYPGDVILTGTPPPPPRCRCIQETSCLSQEGG

SEQ ID NO: 26394 - protein, 35 aa, Homo sapiens
MSVSQMLHKKKCKWCFIGITKCLELAGFPIGGKGV

SEQ ID NO: 26395 - protein, 39 aa, Homo sapiens
MTSFNILFRILMNCCKTVIYFSPDLVLRVFFRRAQIKMK

SEQ ID NO: 26396 - protein, 296 aa, Homo sapiens
LQSLQCGLHDTEAGKASTGFLLQVWPTVTGGAVYCWPVGPGPSKDVEQASLCRPPRGPSSWVAAHLGSQGCLGSEHPGMAHLGHPPQGWPHTTFVVSHRGHARWARLHLLPGVGGLPWSNPLVVGGNSGLLRQNNLPPTELLLGACTQSAWPQQLQEHSLDFHAEQSLGSSGASQRTAFPPPAPYSHHIWGLPLMWMVRLCLPMLCDSLLPFFSLNISGSGSEIQFLSEAQDDPQKRKPDIKKAKLMLGWEPVVPLEEGLNKAIHYFRKELEYQANNQYIPKPKPARIKKGRTRHS

SEQ ID NO: 26397 - protein, 22 aa, Homo sapiens
LPMEPPPGAATAVVINTIVSIF

SEQ ID NO: 26398 - protein, 62 aa, Homo sapiens [sequence omitted]

SEQ ID NO: 26399 - protein, 10 aa, Homo sapiens
LDFALQQGFA

SEQ ID NO: 26400 - protein, 30 aa, Homo sapiens
MLHSYFPIDKPICPQSQGVRQRPLPWGFLG

SEQ ID NO: 26401 - protein, 31 aa, Homo sapiens
MQFSLTSFGETDKPGLDLMPLEPSKMLYNSR

SEQ ID NO: 26402 - protein, 22 aa, Homo sapiens
LLLIKPRELQQLTFPGQGTARI

SEQ ID NO: 26403 - protein, 60 aa, Homo sapiens
LSNSNMAGQKADPGRIAHVFGYTGEGIVPAPQHIFIQVLDEPEDVYKWKKRSHWSRRWGG

SEQ ID NO: 26404 - protein, 152 aa, Homo sapiens
LKMENNPSHNPVSPSPFPTRISAPLNMSQSHFRENWLMLKKSLEGKLCPSSCGSLKCRASRSPSVGTGPSLPIECFLYMKTWSSLQMTVASEEDKRREKTQNAGLPLFFASTVGTVTLPSFHHLQLHTHTHTLVPQSLFGTCLTAHLETRWS

SEQ ID NO: 26405 - protein, 98 aa, Homo sapiens [sequence omitted]

SEQ ID NO: 26406 - protein, 31 aa, Homo sapiens
MTSLHNGWLVLKWARLEVPCTFEGPRTQDLR

SEQ ID NO: 26407 - protein, 34 aa, Homo sapiens
MEPRFCPYGSRDLFFFPLYHNTHQDWSATYDLIA

SEQ ID NO: 26408 - protein, 21 aa, Homo sapiens
LPGVPQWETEQSISQMKKQTQ

SEQ ID NO: 26409 - protein, 59 aa, Homo sapiens
LSNSNMAGQKADPGRIAHVFGYTGEGIVPAPQHIFIQDVYHVMAKGASSIMASQGSWSR

SEQ ID NO: 26410 - protein, 22 aa, Homo sapiens
MHTHPRINWTNGSRKRKNRKES

SEQ ID NO: 26411 - protein, 7 aa, Homo sapiens
MKRKTEI

SEQ ID NO: 26412 - protein, 64 aa, Homo sapiens
VEPPASPCPGGWKCKRKVSARSFFSESSLLGLQMAACSWHSLFSTHAQSYGGPSNHLLQPLKTS

SEQ ID NO: 26413 - protein, 35 aa, Homo sapiens
MLIQRASWQRLKGAPQVPGPAWCGSATRETSAANG

SEQ ID NO: 26414 - protein, 8 aa, Homo sapiens
LTFQTSGA

SEQ ID NO: 26415 - protein, 15 aa, Homo sapiens
MRMKAEVCAFFFFPS

SEQ ID NO: 26416 - protein, 87 aa, Homo sapiens
LSYEALPMALETICRPSGRKSSKMQAFRIWDVNQKTFYLRNNQLVAGYLQGPNVNLEGEWLPGKPMYVGITSLCPSVCSSMACLHKP

SEQ ID NO: 26417 - protein, 105 aa, Homo sapiens
LPCCSHRMEICRGLRSHLITLLLFLFHSETICRPSGRKSSKMQAFRIWDVNQKTFYLRNNQLVAGYLQGPNVNLEGEWLPGKPMYVGITSLCPSVCSSMACLHKP

SEQ ID NO: 26418 - protein, 284 aa, Homo sapiens
LSSEQLASCASSHRRGREEGDRTDSVSPGTNDLLCPSTAKEMSSWIARINLAAATHSAPPFPAAVGSQRRFVRPILPVGPAQSSLVRPPGRGGVRRNWECAPGAPGLTRGGWRRAAHLAWEPRRPGGRRARARKAAEGTPGTAPLTARCSQEEQHRSHENCLDAAADDLLDLQRNLPERRGRGRELEEHRLRKEYLEYEKTRYETYVQLLVARLHCPSDALDLWEEQLGREAGGTREPKLSLKKSHSSPSLHQDEAPTTAKVKRNISERRTYRKIIPKRNRNQL

SEQ ID NO: 26419 - protein, 409 aa, Homo sapiens
LHQRPYWLSPEAADWKGGKGQQQDAAAVQQPALGEAPCGHQGVPGLGHTAGVLCGRDSGVGGRAMAHQRAGALLPDLPQAVLKRMVVVWSTGKESLRVLAFLVLSRVCRHKKDTFLGPILKQMYIMYVRNCKFTSPGALPFISSMQRTLTELLALEPGVAYQHAFLYIRQLAIHLHNAMTTRKKETSVYNWQYMHCLFLWCRVLSTVGPSEALQPLVYSLAQVIIGCIKLIPTARFYPLRMHCIRALTLLSGSSGAFIPVLPFILEMFQQVDFSRKPGRMSSKPINFSVILKLSNVNLQEKAYQDGLVEQLYDLTLEYLHSQAHCIGFPELALPVVLQLKLFLRERKVANYCRQVQQLLGKVQENSEHICSRRQRVSFGVSAGSGSLAEADPGRGDPPDLVLQPLAQAA

SEQ ID NO: 26420 - protein, 189 aa, Homo sapiens
LPHSPTLGLRGPGKPLQEGTRSSSGFWSGVPAAAEASGGNTTKKGRQLGPSKGVATRAQQPRSVTAQSSAPAFPSLCQGLMAKPALGAFFPVPIWLLCCTKLGSQPAKSRLGLASPLAGLEVGRVGCGASSLCVGPGRWLKSPLQERIKVSRVVRKPESGSPDSSLWGAFFMFSQLFQDWAVEFHVSGA

SEQ ID NO: 26421 - protein, 58 aa, Homo sapiens [sequence omitted]

SEQ ID NO: 26422 - protein, 105 aa, Homo sapiens
MQTVTQGPLTLSLPGTLSPHAPHLLSPVLEALQKTWKFWPEMVRRKSMKKPRSVGEKKVEAKKQLPEQTVQKPRQECREAGPLFLQSRRETRDPETRATYLCGEG

SEQ ID NO: 26423 - protein, 86 aa, Homo sapiens
LSIFILRHTTAYKYMFNKFWPEMVRRKSMKKPRSVGEKKVEAKKQLPEQTVQKPRQECREAGPLFLQSRRETRDPETRATYLCGEG

SEQ ID NO: 26424 - protein, 83 aa, Homo sapiens
LGWIAKDTFGYLNEQFWPEMVRRKSMKKPRSVGEKKVEAKKQLPEQTVQKPRQECREAGPLFLQSRRETRDPETRATYLCGEG

SEQ ID NO: 26425 - protein, 59 aa, Homo sapiens
LKFLPTDTPSHFRLTSPLKMRKLEKEDGGRAHQKGIKREKRGGKKTYLRSLVCSFGQKW

SEQ ID NO: 26426 - protein, 112 aa, Homo sapiens
MAKTESCSVTQAGVQWHDPVSLQPLPPGFKRFSCVSLPSSWDYRREPLCPPPPLLVNLRFSSCLLLSICLDDKPSADELCFWTDHGRSQLTCPSLGVSQGCTDEETETENPE

SEQ ID NO: 26427 - protein, 119 aa, Homo sapiens
MHNFPHNCDALSFDIKNAVCRSNIPLNTQLSEMVSHRKDWRRVNLRFSSCLLLSICLDDKPSADELCFWTDHGRSQLTCPSLGVSQGQGLIMLPRLVSNSWPQVISLSQPPKVLGLKLH

SEQ ID NO: 26428 - protein, 108 aa, Homo sapiens
MVSHRKDWRRVNLRFSSCLLLSICLDDKPSADELCFWTDHGRSQLTCPSLGVSQGRSLTLSSRLECSGTISAHCKLCLPGSRHSPASVSQTCKVLMIVSKLYRIEKLH

SEQ ID NO: 26429 - protein, 116 aa, Homo sapiens
LQPLPPGFKRFSCLSLLRRWDYRHPWKCNATSQWDFPVQRFFSNNIIVDTHHSYSDTKQIRAIFLFEFKMGCKAVETTRNINNPFGPGTANECTVEWWFKKSGKGDESLEDEECSG

SEQ ID NO: 26430 - protein, 103 aa, Homo sapiens
LDKTTNKCKGYGFVDFDSPAAAQKAVSALKASGVQAQMAKQQEQDPTNLYISNLPLSMDEQELENMLKPFGQVISTRILRDSSGTSRGVGFARFFFFFVRNKT

SEQ ID NO: 26431 - protein, 736 aa, Homo sapiens
LNHLSPVQGTEASLCAPSVYEGKIFTQKSKVPVLDEGLTSVETYTSAIRANDNKSMADVLGDGGNSSLTISEGPIVSERRLNQEVALNLKEDHEVEVGVLKESVDLPEEKLPISDSPPDTQEIHVIEQEKLEAQDSGEEARNLSFNELYPSGTLKLQYNFDTIDQQFCDLADNKDTAECDIAEVDGELFVAPSNFTLILEGEEGEVEPGDFASSDVLPKAANTATEEKLVCSGKNDNHGQVANLPSAVTSDQKSQKVETLPYVPEPIKVAIAENLLDVIKDTRSKEITSDTMEQSIHETIPLVSQNIMCPTKLVKSAFKTAQETSTMTMNVSQVDDVVSSKTRTRGQRIQNVNVKSAQQEASADVATPKMPGQSVKKKTRKAKEISEASENIYSDVRGLSQNQQIPQNSVTPRRGRRKKEVNQDILENTSSVEQELQITTGRESKRLKSSQLLEPAVEETTKKEVKVSSVTKRTPRTIKRSVENQESVEIINDLKVSTVTSPSRMIRKLRSAHLDASENTGNKQEDKSSDKQLPIKHIRRVRGREVSPSDVRENSNLESSQLTLQAEFDMSAIPRKRGRPRKINPSEDVGSKAVKEERSPKKKEAPSIKRRSTRNTPAKSENVDVGKPALGKSILVPNEELSMVMSSKKKLTKKTESQSQKRSLHSVSEERTDEMTHKETNEQEERLLATASFTKSSRSTRTQSSKAILLPDLSEPNNEPLFSPAAEVPRKQKLKK

SEQ ID NO: 26432 - protein, 825 aa, Homo sapiens [sequence omitted]

SEQ ID NO: 26433 - protein, 629 aa, Homo sapiens
LGARRAQRPPPPPFPASAGAASSLRPARPPLLPPLLAGFGGDGGGGGGRGGRAPAERCRRRGKGSFKWKVVRRPARPPALLRSIMAEPSGSPVHVQLPQQAAPVTAAAAAAPAAATAAPAPAAPAAPAPAPAPAAQAVGWPICRDAYELQEVIGSGATAVVQAALCKPRQERVAIKRINLEKCQTSMDELLKEIQAMSQCSHPNVVTYYTSFVVKDELWLVMKLLSGGSMLDIIKYIVNRGEHKNGVLEEAIIATILKEVLEGLDYLHRNGQIHRDLKAGNILLGEDGSVQIADFGVSAFLATGGDVTRNKVRKTFVGTPCWMAPEVMEQVRGYDFKADMWSFGITAIELATGAAPYHKYPPMKVLMLTLQNDPPTLETGVEDKEMMKKYGKSFRKLLSLCLQKDPSKRPTAAELLKCKFFQKAKNREYLIEKLLTRTPDIAQRAKKVRRVPGSSGHLHKTEDGDWEWSDDEMDEKSEEGKAAFSQEKSRRVKEENPEIAVSASTIPEQIQSLSVHDSQGPPNANEDYREASSCAVNLVLRLRNSRKELNDIRFEFTPGRDTADGVSQELFSAGLVDGHDVVIVAANLQKIVDDPKALKTLTFKLASGCDGSEIPDEVKLIGFAQLSVS

SEQ ID NO: 26434 - protein, 24 aa, Homo sapiens
LRDKSETQSRKRKKKESFVTSNYF

SEQ ID NO: 26435 - protein, 70 aa, Homo sapiens [sequence omitted]

SEQ ID NO: 26436 - protein, 123 aa, Homo sapiens
LKELKRQSSLGVFHLLVAVDGINALWGRTALKREDKCPIAPEELALVHNLRKMMKNDWHGGAIVLTLNQTGSLFKPRKAYLLQELLVKEGFDALDPFIPILVSNYNPKEFESRIQYCLENNWL

SEQ ID NO: 26437 - protein, 19 aa, Homo sapiens
MERLCMKKRTVMPLPRQFQ

SEQ ID NO: 26438 - protein, 38 aa, Homo sapiens
LGGKDHKSQKSRKCPASHRKQVTEPRALFINCSTSFIT

SEQ ID NO: 26439 - protein, 9 aa, Homo sapiens
LQHVSMPGR

SEQ ID NO: 26440 - protein, 14 aa, Homo sapiens
LQHVSMPGRENKSK

SEQ ID NO: 26441 - protein, 38 aa, Homo sapiens
MTEGGRFGPSPHPTREEGVGESCGCLEREPLIPHFLGA

SEQ ID NO: 26442 - protein, 87 aa, Homo sapiens
LKARRQNMYLIALSDLLTSDQDYSPGLSSATSPFFLASSVGSQHFNSWLDPEFFLVAGKALTVCISFPTPTSRFAAGHSGCLTAILP

SEQ ID NO: 26443 - protein, 17 aa, Homo sapiens
MKGYFFVIQTHTHTHPL

SEQ ID NO: 26444 - protein, 56 aa, Homo sapiens
MKRTFLRPITDSLLDFRGKFQLILRKRSKQACDCPLNTEGINKLLAPPGQAEEHFY

SEQ ID NO: 26445 - protein, 38 aa, Homo sapiens
MCGTNFVHSVSCWTWPENGPLYCLCTFQLAKFLKEGPK

SEQ ID NO: 26446 - protein, 13 aa, Homo sapiens
LSPASQFLKEGPK

SEQ ID NO: 26447 - protein, 26 aa, Homo sapiens
VSSDLGTLHLPLLLQMIGYSSDLALP

SEQ ID NO: 26448 - protein, 26 aa, Homo sapiens
LERDLGTLHLPLLLQMIGYSSDLALP

SEQ ID NO: 26449 - protein, 28 aa, Homo sapiens
MTRTPDLGTLHLPLLLQMIGYSSDLALP

SEQ ID NO: 26450 - protein, 34 aa, Homo sapiens
LPGQGRGERAERLLSDRSGDPSPASTTANDWIFV

SEQ ID NO: 26451 - protein, 13 aa, Homo sapiens
LECFLHTGKRAAL

SEQ ID NO: 26452 - protein, 37 aa, Homo sapiens
LLSDRVFLKYTGKNGGKNTGVFPPHWKERRWGRIWYL

SEQ ID NO: 26453 - protein, 85 aa, Homo sapiens
LSPAPAGELRSQDSGRQHRAWAQGPPSPPHVGSQHCCPPALPPALGLPRAPRVLPTRLHPHPPLSHSDLAFPAPCHTSCVPECHP

SEQ ID NO: 26454 - protein, 32 aa, Homo sapiens
VTLHSPPPATPPACPSVTLKYRSTPREGRIHL

SEQ ID NO: 26455 - protein, 45 aa, Homo sapiens
LLGADVIPLLNLEQMFGFFLSSPFPRTHGTTSYAGVLKIHRKERR

SEQ ID NO: 26456 - protein, 29 aa, Homo sapiens
LQSHGPGVGAAELGCQAEHVAADPAAAAA

SEQ ID NO: 26457 - protein, 22 aa, Homo sapiens
MLTYLQGELCDWHPHHAVTDTK

SEQ ID NO: 26458 - protein, 91 aa, Homo sapiens
LLLRMGLTLPSPRLECGGTIMAHCSLELLSSSHPPTSAFRVAGTAGVSHHAWLICLFKFFIETESQLYCPGWKRTSFPPSDNLFQTSQLKN

SEQ ID NO: 26459 - protein, 113 aa, Homo sapiens
LQPALALLKTSSSHQSLASPYPESPAQGLTLPSPRLECGGTIMAHCSLELLSSSHPPTSAFRVAGTAGVSHHAWLICLFKFFIETESQLYCPGWKRTSFPPSDNLFQTSQLKN

SEQ ID NO: 26460 - protein, 33 aa, Homo sapiens
LLKTSSSHQSLASPYPESPAQFNISSENLPVRK

SEQ ID NO: 26461 - protein, 83 aa, Homo sapiens
MGPRFLADARGRGRVPGSRFSQAPIPAHARGPRPTHEAPTPIVEAPPGKEVRLPLQAAPRGMGNRQEMTRTASLRLCSRPSLC

SEQ ID NO: 26462 - protein, 41 aa, Homo sapiens
VWGRKTLPPRLQRSAVSGGVRGRRLPGKPGKGLLAVLLERL

SEQ ID NO: 26463 - protein, 27 aa, Homo sapiens
LTSPMCPCGHTVLLSEAVGFSLRDKKK

SEQ ID NO: 26464 - protein, 28 aa, Homo sapiens
MSRLGIILRHHLASPASHFKALLLGNLT

SEQ ID NO: 26465 - protein, 23 aa, Homo sapiens
MVITGSGLPLKGILMLTTSPRRA

SEQ ID NO: 26466 - protein, 34 aa, Homo sapiens
LPETPYRYSSELVITGSGLPLKGILMLTTSPRRA

SEQ ID NO: 26467 - protein, 52 aa, Homo sapiens
LGSIGGIIPSCHVQRCIVRSFALVVGAHSTVITGSGLPLKGILMLTTSPRRA

SEQ ID NO: 26468 - protein, 64 aa, Homo sapiens
LLLLTLLKWVTRMELRCCLQEKLTTGFYFSNLIGGYAGTVSRLSIFNPVSKNFFTTITFRFLPL

SEQ ID NO: 26469 - protein, 74 aa, Homo sapiens
LDFVFPSMSLTLDILHDKWVTRMELRCCLQEKLTTGFYFSNLIGGYAGTVSRLSIFNPVSKNFFTTITFRFLPL

SEQ ID NO: 26470 - protein, 13 aa, Homo sapiens
MSIVLSVFNSNVF

SEQ ID NO: 26471 - protein, 71 aa, Homo sapiens
LSFAKVSDHGTKSWQWVTRMELRCCLQEKLTTGFYFSNLIGGYAGTVSRLSIFNPVSKNFFTTITFRFLPL

SEQ ID NO: 26472 - protein, 93 aa, Homo sapiens
LQKFLTMEPSHGRYWTTNVHNMKPKCGTHSSIIFLFQWVTRMELRCCLQEKLTTGFYFSNLIGGYAGTVSRLSIFNPVSKNFFTTITFRFLPL

SEQ ID NO: 26473 - protein, 44 aa, Homo sapiens
MELRCCLQEKLTTGFYFSNLIGGYAGSLKWHTIVDLSNLVGKYF

SEQ ID NO: 26474 - protein, 45 aa, Homo sapiens
MELRCCLQEKLTTGFYFSNLIGGYAAGSPGPPALQARTRNLYSAP

SEQ ID NO: 26475 - protein, 23 aa, Homo sapiens
VTLSLDIERISSSPGWLGLSEIF

SEQ ID NO: 26476 - protein, 19 aa, Homo sapiens
LVYLKYFKIMKRESALLVK

SEQ ID NO: 26477 - protein, 127 aa, Homo sapiens [sequence omitted]

SEQ ID NO: 26478 - protein, 75 aa, Homo sapiens
MFIILWLKGHLLNGVFGVTGSSDFKGLLMPNWFSAETRKWYSTFSLRPFTTRDVPRTLESMVYQAALGTSRLSRM

SEQ ID NO: 26479 - protein, 29 aa, Homo sapiens
LTLTERTWMSSYSSGPSGLLGLPITLTLM

SEQ ID NO: 26480 - protein, 46 aa, Homo sapiens
MARLLISWPSLVHLHIGNGFPLIGMVSLMTPPCLTKIPSWYLSSSS

SEQ ID NO: 26481 - protein, 74 aa, Homo sapiens
MPRRSSSGSIVCSLTMTGLLSLGALLPALFTAITWKVDVIFGPCHFRSRTTFNWHKYPNTESCSNNKCSSKLGI

SEQ ID NO: 26482 - protein, 62 aa, Homo sapiens
LKIRNNELSDSEGGSCGIFYPGLVSYFLMLHDIASDFKSTIIMRLAPCQRSRFLGSISDMRI

SEQ ID NO: 26483 - protein, 32 aa, Homo sapiens
LSSAKKTTSAPGASRISCGGLMISTGISGKKM

SEQ ID NO: 26484 - protein, 24 aa, Homo sapiens
MKIRGNSERSGQWMKSEYVSIDDP

SEQ ID NO: 26485 - protein, 68 aa, Homo sapiens
VSPHCVFFSFYPKNGAVSTLAFLSPGWERGWCAEWFAFFSLELVSLFFFFFFFSFFRLSAVRAGLPGP

SEQ ID NO: 26486 - protein, 40 aa, Homo sapiens
LTSRRERHTEREMIISCVESSGKDPEGSPTSPAARATDPP

SEQ ID NO: 26487 - protein, 24 aa, Homo sapiens
LTSRRERHTEREMIISCVESSGKP

SEQ ID NO: 26488 - protein, 73 aa, Homo sapiens
VGRLHPGSDGTRMASCNPEPDPGPRQSIRARGQGPRGRTKFARGVHSLGAPGLASYSATSQAPLPRVYQQLQK

SEQ ID NO: 26489 - protein, 219 aa, Homo sapiens
LCGWEDTSLCARVQPSRARKSGQLEKVVTVSRGILLPESPITERAKTTLPHTGRSPCRGGSPGRCWGRSEHRPFFTPDSLELGLGMPTWGTEATGCSEAGGFLLGSEGSRPQQSQERLGDTHCVLHLTQNCPRPAEEARARSLVAGQTFTLLFSIIFYAHIFVKCMAAIHQQLILQEVPPRRIGLSFANLASQVMRFIILLPTYPPHQWVPGAAPTWQN

SEQ ID NO: 26490 - protein, 58 aa, Homo sapiens
LSIGLSLPPTPWSLVSGCQLGARRRRAAPKLEGFCLGQRDHDLSRARRGWVTPTAYCT

SEQ ID NO: 26491 - protein, 46 aa, Homo sapiens
LGKGEEVGLEQASKVRKLYWDSSRKWGGKGAREGVWRDEICVRTCV

SEQ ID NO: 26492 - protein, 119 aa, Homo sapiens
VSRDCATALQPGDRARLHQKKKKKVPTAHHYRSREDNYAENRVSGGQQECSWSFGPLRDGGSAEDTGEVLYTEDLWLGAGVVHGSADFFSLFSTNVCVIFVLQTVPFGFSAYFIIFVQF

SEQ ID NO: 26493 - protein, 156 aa, Homo sapiens
LPQLRGPRAGRAHWSSRERGLSRGRGAGGMALVPYEETTEFGLQKFHKPLATFSFANHTIQIRQDWRHLGVAAVVWDAAIVLSTYLEMGAVELRGRSAVELGAGTGLVGIVAALLENTGQMQTEGYSKRKQITTLQKLQGHQRQGNKLSQTEGDYN

SEQ ID NO: 26494 - protein, 119 aa, Homo sapiens
LPQLRGPRAGRAHWSSRERGLSRGRGAGGMALVPYEETTEFGLQKFHKPLATFSFANHTIQIRQDWRHLGVAAVVWDAAIVLSTYLEMGAVELRGRSAVELGAGTGLVGIVAALLGGGI

SEQ ID NO: 26495 - protein, 243 aa, Homo sapiens
LSHCYHYRSSRWRRGGLSRGRGAGGMALVPYEETTEFGLQKFHKPLATFSFANHTIQIRQDWRHLGVAAVVWDAAIVLSTYLEMGAVELRGRSAVELGAGTGLVGIVAALLGAHVTITDRKVALEFLKSNVQANLPPHIQTKTVVKELTWGQNLGSFSPGEFDLILGADIIYLEETFTDLLQTLEHLCSNHSVILLACRIRYERDNNFLAMLERQFTVRKVHYDPEKDVHIYEAQKRNQKEDL

SEQ ID NO: 26496 - protein, 247 aa, Homo sapiens
LPQLRGPRAGRAHWSSRERGLSRGRGAGGMALVPYEETTEFGLQKFHKPLATFSFANHTIQIRQDWRHLGVAAVVWDAAIVLSTYLEMGAVELRGRSAVELGAGTGLVGIVAALLGAHVTITDRKVALEFLKSNVQANLPPHIQTKTVVKELTWGQNLGSFSPGEFDLILGADIIYLEETFTDLLQTLEHLCSNHSVILLACRIRYERDNNFLAMLERQFTVRKVHYDPEKDVHIYEAQKRNQKEDL

SEQ ID NO: 26497 - protein, 269 aa, Homo sapiens
LSPSSANAPPLKNRHNAQATKSEAESGGAHDRKGREAHSAPGLSRGRGAGGMALVPYEETTEFGLQKFHKPLATFSFANHTIQIRQDWRHLGVAAVVWDAAIVLSTYLEMGAVELRGRSAVELGAGTGLVGIVAALLGAHVTITDRKVALEFLKSNVQANLPPHIQTKTVVKELTWGQNLGSFSPGEFDLILGADIIYLEETFTDLLQTLEHLCSNHSVILLACRIRYERDNNFLAMLERQFTVRKVHYDPEKDVHIYEAQKRNQKEDL

SEQ ID NO: 26498 - protein, 131 aa, Homo sapiens
LPQLRGPRAGRAHWSSRERGLSRGRGAGGMALVPYEETTEFGLQKFHKPLATFSFANHTIQIRQDWRHLGVAAVVWDAAIVLSTYLEMGAVELRGRSAVELGAGTGLVGIVAALLAAAFQNSTGSMGRGGG

SEQ ID NO: 26499 - protein, 70 aa, Homo sapiens
LTFTRKSEESSYSFFMDLQNDMIPDDNFSIPEGEEDLAKAIQMAQEQATDTEILHLSWYLVHGRCSPIIC

SEQ ID NO: 26500 - protein, 170 aa, Homo sapiens
LPSLHLCLSSGKRAVVGYEDGTIRIWDLKQGSPIHVLKGIRGGGSVSLGLCREGLRTWGRTQRGGRTKPELPPCSMLGTEGHQGPLTCVAANQDGSLILTGSVDCQAKLVSATTGKVSGPGARLGPPLSRLLSFLPGSSLSPLPTVFLSIKHPDSVSSSDPLWLSGGGCF

SEQ ID NO: 26501 - protein, 185 aa, Homo sapiens
VGWGDGPPCCPFLPVQWMEWHPRAPVLLAGTADGNTWMWKVPNGDCKTFQGPNCPATCGRVLPDGKRAVVGYEDGTIRIWDLKQGSPIHVLKGTEGHQGPLTCVAANQDGSLILTGSVDCQAKLVSATTGKVSGPGARLGPPLSRLLSFLPGSSLSPLPTVFLSIKHPDSVSSSDPLWLSGGGCF

SEQ ID NO: 26502 - protein, 350 aa, Homo sapiens
LRRMESESESGAAADTPPLETLSFHGDEEIIEVVELDPGPPDPDDLAQEMEDVDFEEEEEEEGNEEGWVLEPQEGVVGSMEGPDDSEVTFALHSASVFCVSLDPKTNTLAVTGGEDDKAFVWRLSDGELLFECAGHKDSVTCAGFSHDSTLVATGDMSGLLKVWQVDTKEEVWSFEAGDLEWMEWHPRAPVLLAGTADGNTWMWKVPNGDCKTFQGPNCPATCGRVLPDGKRAVVGYEDGTIRIWDLKQGSPIHVLKGTEGHQGPLTCVAANQDGSLILTGSVDCQAKLVSATTGKVSGPGARLGPPLSRLLSFLPGSSLSPLPTVFLSIKHPDSVSSSDPLWLSGGGCF

SEQ ID NO: 26503 - protein, 171 aa, Homo sapiens
MAVFGQAFYQKTNQAAFNICANSSLHDYAKIFPMNNATVAVDIYQGGVILGCLFGPAALYIWAIGLLAAGQSSTMTGTYAGQFVMEVGQGAGPGGQGVQGQQAHYWGLELRALWVLFSFLSFLPFFLFLFLLLLLRRSLALVAQAGVQWRDLGSLQPPPPRFKLLLLQPPQ

SEQ ID NO: 26504 - protein, 250 aa, Homo sapiens [sequence omitted]

SEQ ID NO: 26505 - protein, 276 aa, Homo sapiens
MVLGTREVGDSTPLPSPSLYPFTGNEFVQHNTWQLSRVYPSGLRTDSSNYNPQELWNAGCQMVAMNMQTAGLEMDICDGHFRQNGGCGYVLKPDFLRDIQSSFHPEKPISPFKAQTLLIQVISGQQLPKVDKTKEGSIVDPLVKVQIFGVRLDTARQETNYVENNGFNPYWGQTLCFRVLVPELAMLRFVVMDYDWKSRNDFIGQYTLPWTCMQQGEPAPLAPGQYPSSGCLPNAVLLPLPGYRHIHLLSKDGISLRPASIFVYICIQEGLEGDES

SEQ ID NO: 26506 - protein, 62 aa, Homo sapiens
MDSVAFEDVAVNFTPDEWALLDPSQKNLYREVMQETLRNLASIEVLWKRDSLKVKVISMEKF

SEQ ID NO: 26507 - protein, 82 aa, Homo sapiens
MRNMIPQDNENPPQQGEANQNDSVAFEDVAVNFTPDEWALLDPSQKNLYREVMQETLRNLASIEVLWKRDSLKVKVISMEKF

SEQ ID NO: 26508 - protein, 144 aa, Homo sapiens
VPGSPEARTESDQACGTMDTVDIANNSTLGKPKRKRRKKRGHGWSRMRMRRQENSQQNDNSKADGQVVSSEKKANVNLKDLSKIRGRKRGKPGTRFTQSDRAAQKRVRSRGKKENRNELSITKHLISCAVHCTFSNKPISLIVL

SEQ ID NO: 26509 - protein, 447 aa, Homo sapiens
MPDRACAVGSVARALSRSRRYVCARDADASRRRRRPFNYGLSIEEKNENDENSLSSSSDSSEDKDEKISEECDIEEKTEVKEEPELQTKREMEERTVTLEIPEVLKRQLEDDCYYINRRKRLVQLPCHTNIITILESYVKHFAISAAFSANERPRHHHAMPHASMNVPYIPAEKNIDLCKEMVDGLRITFDYTLPLVLLYPYEQAQYKKVTASKVFLAIKESATNTNRSQEKLSPSLRLLNPSRPQSTESQSTSGEPATPKRRKAEPQAVQSLRRSSPHTANCDRLSKSSTSPQPKRWQQDMSTSVPKLFLHLEKKTPVHSRSSSPTLTPSQEGSPVFAGFEGRRTNEINEVLSWKLVPDNYPPGDQPPPPSYIYGAQHLLRLFVKLPEILGKMSFTEKNLKALLKHFDLFVRFLAEYHDDFFPESAYVAASEVHYSTRNPQAVNKC

SEQ ID NO: 26510 - protein, 61 aa, Homo sapiens [sequence omitted]

SEQ ID NO: 26511 - protein, 115 aa, Homo sapiens
MCLPSLLGTGRAGTATLEGRSEELSGPVGHLGASTRVYRLGPRLLHGHMGPGCMCGRVGGCLWCLKSARHGGWCEFLWWEGERTSLLGGHLRSDSKKSSGSFPQERVRGDTRLWL

SEQ ID NO: 26512 - protein, 386 aa, Homo sapiens
LGRAVSGPRALGGSAARSVGACSRAVWRQQPTQFINPETPGYVGFANLPNQVHRKSVKKGFEFTLMVVGESGLGKSTLINSLFLTDLYPERVIPGAAEKIERTVQIEASTVEIEERGVKLRLTVVDTPGYGDAINCRDCFKTIISYIDEQFERYLHDESGLNRRHIIDNRVHCCFYFISPFGHGLKPLDVAFMKAIHNKVNIVPVIAKADTLTLKERERLKKRILDEIEEHNIKIYHLPDAESDEDEDFKEQTRLLKASIPFSVVGSNQLIEAKGKKVRGRLYPWGVVEVENPEHNDFLKLRTMLITHMQDLQEVTQDLHYENFRSERLKRGGRKVENEDMNKDQILLEKEAELRRMQEMIARMQAQMQMQMQGGDGDGGALGHHV

SEQ ID NO: 26513 - protein, 83 aa, Homo sapiens
MHLCKFELFSFLQLNWELEDTWLQKKQNQTHHGHHSVPGQWEGSQGQVCQGGPAHPSSVPVNTYQVPWALLGTTWRASQSKPP

SEQ ID NO: 26514 - protein, 588 aa, Homo sapiens
LGGAVNAQARRRPAHSGSAALGLRRALRVGARDVIVGAQPAAPCPSPPGPEYRPPTKEEPEVSVPAAMLPRRPLAWPAWLLRGAPGAAGSWGRPVGPLARRGCCSAPGTPEVPLTRERYPVRRLPFSTVSKQDLAAFERIVPGGVVTDPEALQAPNVDWLRTLRGCSKVLLRPRTSEEVSHILRHCHERNLAVNPQGGNTGMVGGSVPVFDEIILSTARMNRVLSFHSVSGILVCQAGCVLEELSRYVEERDFIMPLDLGAKGSCHIGGNVATNAGGLRFLRYGSLHGTVLGLEVVLADGTVLDCLTSLRKDNTGYDLKQLFIGSEGTLGIITTVSILCPPKPRAVNVAFLGCPGFAEVLQTFSTCKGMLGEILSAFEFMDAVCMQLVGRHLHLASPVQESPFYVLIETSGSNAGHDAEKLGHFLEHALGSGLVTDGTMATDQRKVKMLWALRERITEALSRDGYVYKYDLSLPVERLYDIVTDLRARLGPHAKHVVGYGHLGDGNLHLNVTAEAFSPSLLAALEPHVYEWTAGQQGSVSAEHGVGFRKRDVLGYSKPPGALQLMQQLKALLDPKGILNPYKTLPSQA

SEQ ID NO: 26515 - protein, 290 aa, Homo sapiens
LGLRRALRVGARDVIVGAQPAAPCPSPPGPEYRPPTKEEPEVSVPAAMLPRRPLAWPAWLLRGAPGAAGSWGRPVGPLARRGCCSAPGTPEVPLTRERYPVRRLPFSTVSKQDLAAFERIVPGGVVTDPEALQAPNVDWLRTLRGCSKVLLRPRTSEEVSHILRHCHERNLAVNPQGGNTGMVGGSVPVFDEIILSTARMNRVLSFHSVSGGLRPGGAEPVCGGTGLHHAAGLRSQGQLPHRGKRGNQRWRPAVSSIWLTAWDCPGPGSGAGRRHCPGLPDLPEEGQHGL

SEQ ID NO: 26516 - protein, 367 aa, Homo sapiens
LGLRRALRVGARDVIVGAQPAAPCPSPPGPEYRPPTKEEPEVSVPAAMLPRRPLAWPAWLLRGAPGAAGSWGRPVGPLARRGCCSAPGTPEVPLTRERYPVRRLPFSTVSKQDLAAFERIVPGGVVTDPEALQAPNVDWLRTLRGCSKVLLRPRTSEEVSHILRHCHERNLAVNPQGGNTGMVGGSVPVFDEIILSTARMNRVLSFHSVSGILVCQAGCVLEELSRYVEERDFIMPLDLGAKGSCHIGGNVATNAGGLRFLRYGSLHGTVLGLEVVLADGTVLDCLTSLRKDNTGYDLKQLFIGSEGTLGIITTVSILCPPKPRAVNVAFLDAVGPEGKDHRGAEPGWLRVQVRPLPPCGAALRHRD

SEQ ID NO: 26517 - protein, 440 aa, Homo sapiens
LGLRRALRVGARDVIVGCSKVLLRPRTSEEVSHILRHCHERNLAVNPQGGNTGMVGGSVPVFDEIILSTARMNRVLSFHSVSGILVCQAGCVLEELSRYVEERDFIMPLDLGAKGSCHIGGNVATNAGGLRFLRYGSLHGTVLGLEVVLADGTVLDCLTSLRKDNTGYDLKQLFIGSEGTLGIITTVSILCPPKPRAVNVAFLGCPGFAEVLQTFSTCKGMLGEILSAFEFMDAVCMQLVGRHLHLASPVQESPFYVLIETSGSNAGHDAEKLGHFLEHALGSGLVTDGTMATDQRKVKMLWALRERITEALSRDGYVYKYDLSLPVERLYDIVTDLRARLGPHAKHVVGYGHLGDGNLHLNVTAEAFSPSLLAALEPHVYEWTAGQQGSVSAEHGVGFRKRDVLGYSKPPGALQLMQQLKALLDPKGILNPYKTLPSQA

SEQ ID NO: 26518 - protein, 113 aa, Homo sapiens
MVLVSLVLVGSVQLSRAPVSPGSCSPAAGATSDEALLSHFLGIPAHSEQDAQSPPPDPPTPPPPPTPQPSTRLQPHPDMVLGSQALRCSCVTQCRCLPPASAPVRPSLWKILL

SEQ ID NO: 26519 - protein, 87 aa, Homo sapiens
LDQRASVCPAASSELVVHSQAGVDSDARKGTASHCQAEAAQSLEKDLFALFPPGGARPTHPPSQTKVVAVRRAANADKDEKHMEKNG

SEQ ID NO: 26520 - protein, 26 aa, Homo sapiens
MLTRMKSTWKKMDEEGKLCQMENDQI

SEQ ID NO: 26521 - protein, 81 aa, Homo sapiens [sequence omitted]

SEQ ID NO: 26522 - protein, 212 aa, Homo sapiens
LVEASSSGVSVLSLCEKGDAMIMEETGKIFKKEKEMKKRIAFPTSISVNNCGCHFSPLKRGQDYILKEGDLVKIDLGVHVDGFIANVTHTFVVDVAQGTQVTGRKGDVIKAAQLCVEAALCLVKPGNQNIQVREAWSKVALSFNCMPIEGMLSHQLKQHVIDGEKNIIQNPTDQQKKDHEKAEFEVHEVYAADVLVSSGEGKAKDAGQRTTI

SEQ ID NO: 26523 - protein, 140 aa, Homo sapiens
LEKEVTVQLTKMPYTFLTNKPTNLHSVIQAQLPVAPREAMRDKSLRATEVDLPEPQFVNEPVSHLINTILGAAPGHRRVTPKPWLTLTAPWVCGRPGALGSVCQCNRLVFFQWGGAGSGWDRAASSQRLWGRLEATAPHP

SEQ ID NO: 26524 - protein, 25 aa, Homo sapiens
MKIFFNKAASFGESMCDDWELIPEG

SEQ ID NO: 26525 - protein, 631 aa, Homo sapiens
MSEAASQGLRAAARSVWAGTDRRGCRHRRPVPLCSGTALSQCPRFPRRLHAARLGNMLGVLVLGALALAGLGFPAPAEPQPGGSQCVEHDCFALYPGPATFLNASQICDGLRGHLMTVRSSVAADVISLLLNGDGGVGRRRLWIGLQLPPGCGDPKRLGPLRGFQWVTGDNNTSYSRWARLDLNGAPLCGPLCVAVSAAEATVPSEPIWEEQQCEVKADGFLCEFHFPATCRPLAVEPGAAAAAVSITYGTPFAARGADFQALPVGSSAAVAPLGLQLMCTAPPGAVQGHWAREAPGAWDCSVENGGCEHACNAIPGAPRCQCPAGAALQADGRSCTASATQSCNDLCEHFCVPNPDQPGSYSCMCETGYRLAADQHRCEDVDDCILEPSPCPQRCVNTQGGFECHCYPNYDLVDGECVEPVDPCFRANCEYQCQPLNQTSYLCVCAEGFAPIPHEPHRCQMFCNQTACPADCDPNTQASCECPEGYILDDGFICTDIDECENGGFCSGVCHNLPGTFECICGPDSALARHIGTDCDSGKVDGGDSGSGEPPPSPTPGSTLTPPAVGLVHSGLLIGISIASLCLVVALLALLCHLRKKQGAARAKMEYKCAAPSKEVVLQHVRTERTPQRL

SEQ ID NO: 26526 - protein, 218 aa, Homo sapiens [sequence omitted]

SEQ ID NO: 26527 - protein, 211 aa, Homo sapiens [sequence omitted]

SEQ ID NO: 26528 - protein, 41 aa, Homo sapiens
VIMLQVLSGPLAKGVVSEGHRYLGICQAGVFSVSAVHSSPL

SEQ ID NO: 26529 - protein, 579 aa, Homo sapiens
LETVHVWIREHFHYGTGYKHTPGRLQESQTEEKAFPSAATAAAAAFESPLLSWFFLPNQRHLRCCRCSLWCHSAAGQRMRLPKLLTFLLWYLAWLDLEFICTVLGAPDLGQRPQGTRPGLAKAEAKERPPLARNVFRPGGHSYGGGATNANARAKGGTGQTGGLTQPKKDEPKKLPPRPGGPEPKPGHPPQTRQATARTVTPKGQLPGGKAPPKAGSVPSSFLLKKAREPGPPREPKEPFRPPPITPHEYMLSLYRTLSDADRKGGNSSVKLEAGLANTITSFIDKGQDDRGPVVRKQRYVFDISALEKDGLLGAELRILRKKPSDTAKPAAPGGGRAAQLKLSSCPSGRQPAALLDVRSVPGLDGSGWEVFDIWKLFRNFKNSAQLCLELEAWERGRAVDLRGLGFDRAARQVHEKALFLVFGRTKKRDLFFNEIKARSGQDDKTVYEYLFSQRRKRRAPLATRQGKRPSKNLKARCSRKALHVNFKDMGWDDWIIAPLEYEAFHCEGLCEFPLRSHLEPTNHAVIQTLMNSMDPESTPPTCCVPTRLSPISILFIDSANNVVYKQYEDMVVESCGCR

SEQ ID NO: 26530 - protein, 925 aa, Homo sapiens
LFRWPHYGAPLAGECLSVQVVNCSRVFSLRPLGTLVISLQQLQNAGHLVLREALVDENLQVSPIQVELDLKYQPPEGATGAWSEEDFGAPIQDSFELIIPNVGFQELEPGEAQLERRAVALGRRLARSLGQQDDEENELELELEQDLDDEPDVELSGVMFSPLKSRARALAHGDPFQVSRAQDFQVGVTVLEAQKLVGVNINPYVAVQVGGQRRVTATQRGTSCPFYNEYFLFEFHDTRLRLQDLLLEITAFHSQTLPFMATRIGTFRMDLGIILDQPDGQFYQRWVPLHDPRDTRAGTKGFIKVTLSVRARGDLPPPMLPPAPGHCSDIEKNLLLPRGVPAERPWARLRVRLYRAEGLPALRLGLLGSLVRALHDQRVLVEPYVRVSFLGQEGETSVSAEAAAPEWNEQLSFVELFPPLTRSLRLQLRDDAPLVDAALATHVPDLRRISHPGRAAGFNPTFGPAWVPLYGSPPGAGLRDSLQGLNEGVGQGIWFRGRLLLAVSMQVLEGRAEPEPPQAQQGSTLSRLTRKKKKKARRDQTPKAVPQHLDASPGAEGPEIPRAMEVEVEELLPLPENVLAPCEDFLLFGVLFEATMIDPTVASQPISFEISIGRAGRLEEQLGRGSRAGEGTEGAAVEAQPLLGARPEEEKEEEELGTHAQRPEPMDGSGPYFCLPLCHCKPCMHVWSCWEDHTWRLQSSNCVRKVAERLDQGLQEVERLQRKPGPGACAQLKQALEVLVAGSRQFCHGAERRTMTRPNALDRCRGKLLVHSLNLLAKQGLRLLRGLRRRNVQKKVALAKKLLAKLRFLAEEPQPPLPDVLVWMLSGQRRVAWARIPAQDVLFSVVEEERGRDCGKIQSLMLTAPGAAPGEVCAKLELFLRLGLGKQAKACTSELPPDLLPEPSAGLPSSLHRDGPGADAEPSVG

SEQ ID NO: 26531 - protein, 265 aa, Homo sapiens
LDRVVKPKMKRVKRFLEKREPKLNENIKNAMLIKGGNANATVTQVLKDVCALKKPYGVLYKKKNVTRPFEDQTSLELLSKKSDCSLFMFGSYNKKRPNNLVIGHMYDYHVLDMIELGIENFVSLKDIKNSKCPEGTKPMLIFAGDDFNVTEDYRRLKSLLTDFFRGPTVSNICLAGLEYVLHFTALNGKIYFRRYKLLLKKSGCRTPRIELEEIGPSLNLVLRRTHLASDDLYTLSMKMPKALKPKKKKNISNDTFGTTYGRIHM

SEQ ID NO: 26532 - protein, 40 aa, Homo sapiens
MYADVSIYVHIYILIAIDVCISWLYYKNTLIQWKYTLLIF

SEQ ID NO: 26533 - protein, 59 aa, Homo sapiens
VFKSVQRPVAVAHACNPSTLGGRGRRITRSRDQDHLGQHGETPSLLKIQKLAGRGGAHL

SEQ ID NO: 26534 - protein, 22 aa, Homo sapiens
MSVHFVLLICVYSVHKGQTSPN

SEQ ID NO: 26535 - protein, 62 aa, Homo sapiens
LGRFTGRLWKACVYNMKKLLSTPPQPFNRKHLSHLALLDGKRLPTYDKIELESYTSCKFSFV

SEQ ID NO: 26536 - protein, 108 aa, Homo sapiens [sequence omitted]

SEQ ID NO: 26537 - protein, 49 aa, Homo sapiens
LGGPGTGRALCPADNGGLCCGCPLAVPAHWLCPDLEAAANLSFPPHLGD

SEQ ID NO: 26538 - protein, 54 aa, Homo sapiens
MKRHQSCSLLPAQSTPDPLFNLHKIRGPDMGDFSCLRGPWTGKASLASLCPCLE

SEQ ID NO: 26539 - protein, 82 aa, Homo sapiens [sequence omitted]

SEQ ID NO: 26540 - protein, 51 aa, Homo sapiens
LGPQVSALDPRTVQGSPKTMELVIWDLGLLIFLTVNLLVVFVGTRGAENGE

SEQ ID NO: 26541 - protein, 54 aa, Homo sapiens
LSCGACKVSALDPRTVQGSPKTMELVIWDLGLLIFLTVNLLVVFVGTRGAENGE

SEQ ID NO: 26542 - protein, 22 aa, Homo sapiens
LSSWDHRVMCCSWGLDDVGEAR

SEQ ID NO: 26543 - protein, 19 aa, Homo sapiens
VLVRVMCCSWGLDDVGEAR

SEQ ID NO: 26544 - protein, 38 aa, Homo sapiens
MCVRGVLWESMDPEVPGLSADLCPVCPVAPGDVSSRRG

SEQ ID NO: 26545 - protein, 67 aa, Homo sapiens
MCVRGVLWESMDPEVPGTSREPSSQMPAKGHLTCFESQFPDTENKGLSADLCPVCPVAPGDVSSRRG

SEQ ID NO: 26546 - protein, 8 aa, Homo sapiens
MKRISSLP

SEQ ID NO: 26547 - protein, 33 aa, Homo sapiens
MCVRGVLWESMDPEVPGKWGPAQSSRAQVLCRL

SEQ ID NO: 26548 - protein, 7 aa, Homo sapiens
VRMPLGV

SEQ ID NO: 26549 - protein, 67 aa, Homo sapiens
LRPRGRRPERSGPVLGAVSRPLCRSEPPRIRVSSGKTLAGLVGCAAPRTASHQPAPSLSCSTLICTP

SEQ ID NO: 26550 - protein, 24 aa, Homo sapiens
LDRSFFLCCWMRVSEYALDLILER

SEQ ID NO: 26551 - protein, 47 aa, Homo sapiens
MAPFRRLYLEDVAGLLGFIPSEPGLAFLGCKLRAGSRSAEPRFSHLP

SEQ ID NO: 26552 - protein, 105 aa, Homo sapiens
LPSLLPVPKMHNDNDADGYLVRNFPTGTVIRRGHSWILSSEDVRMDRNVSVIQRGHKHPCYFLVTRKRPALGLLGFIPSEPGLAFLGCKLRAGSRSAEPRFSHLP

SEQ ID NO: 26553 - protein, 66 aa, Homo sapiens
LRGADRGGREMTAPKAFAGLSRPQRKGNPSSGLVRAASGYRMDFGRGSHHWTSKEATCRHLQPSIS

SEQ ID NO: 26554 - protein, 41 aa, Homo sapiens
MNRDFIPGVRREPVLKKMKTPGRERQLACGPWWFYVADLRE

SEQ ID NO: 26555 - protein, 177 aa, Homo sapiens
LEGSGFFSCVSVFFSFDLSNFSISAISDLSDMVTEEKRSEARENERSLVCVVATTELSNFIYFFETEFHSCRAGWTAMARSQLTATSASRVQAFVKMVGHHVAFLEADVLQAERDHGAFPQALRRWLGSAGLPSFRNKSPAPVPVTYELPTLYRTEDYFPVDAGEAQHHPRTCPRPL

SEQ ID NO: 26556 - protein, 126 aa, Homo sapiens [sequence omitted]

SEQ ID NO: 26557 - protein, 87 aa, Homo sapiens [sequence omitted]

SEQ ID NO: 26558 - protein, 18 aa, Homo sapiens
VRPPLAPVPGVLDPGSWG

SEQ ID NO: 26559 - protein, 82 aa, Homo sapiens
LGSLTQALGASLSSEEHKVPGGSGKRNWRKGEEAPKMDHPLPGFAGDCPPSVLQQLGDHGPLNPQALSPEPKEDDQERRELA

SEQ ID NO: 26560 - protein, 47 aa, Homo sapiens
MPGVSVISRDLVCSEKKKAFKNYCYCVCNSLDREGKAGIWEVKVASG

SEQ ID NO: 26561 - protein, 100 aa, Homo sapiens [sequence omitted]

SEQ ID NO: 26562 - protein, 70 aa, Homo sapiens
MAPCCELGALSPCLEEGAIPPACLLSGKILLQFGRCNLREKLRGPPASLGVPLQILAGPGDDLGPIHFLG

SEQ ID NO: 26563 - protein, 22 aa, Homo sapiens
VSPGIDLVVSGASSEVDSVWRA

SEQ ID NO: 26564 - protein, 11 aa, Homo sapiens
LRGMKGSMPCK

SEQ ID NO: 26565 - protein, 382 aa, Homo sapiens
LLLSEAGPQEDDCSRPGVVHNSCVARSEIQKVLGSLQEHLMNDPDVQAQVQVLSAALRAAQLDCVNEAESKPTAGLKEVSISHPSSASDNQIALAASSSQDELFVARILQSPDPGGPRNGTSDHLETDQRQDPTPLEENKSKLQDVIPQPLLDQYVSMTDPARAQTVDTDIAKHCAYSLPGVALTLGRQNWHCLKDTYETLASDVQWKVRRALAFSIHELAVILGDQLTAADLVPIFNGFLKDLDEVRIGVLRHLYDFLKLLHEDKRRDYLYQLQEFVVTDNSRNWRFRYELAEQLILILELYSPNDVYDYLMHIALKLCADQVSEVRWISFKLVVAILQKFYSNSESALGLNFINELIIRFRHCSKWVGRQAFAFICQILK

SEQ ID NO: 26566 - protein, 294 aa, Homo sapiens
LLLSEAGPQEDDCSRPGVVHNSCVARSEIQKVLGSLQEHLMNDPDVQAQVQVLSAALRAAQLDCVNEAESKPTAGLKEVSISHPSSASDNQIALAASSSQDELFVARILQSPDPGGPRNGTSDHLETDQRQDPTPLEENKSKLQDVIPQPLLDQYVSMTDPARAQTVDTDIAKHCAYSLPGVALTLGRQNWHCLKDTYETLASDVQWKVRRALAFSIHELAVILGDQLTAADLVPIFNGFLKDLDEVRIGVLRHLYDFLKLLHEDKRRDYLYQLQEFVVTDNSRNWRFRYELAE

SEQ ID NO: 26567 - protein, 415 aa, Homo sapiens
MAEIPLYFVDLQDDLDDYGFEDYGTDCDNMRVTAFLDIPGQDNLPPLTRLEKYAFSENTFNRQIIARGLLDIFRDFGNNEEDFLTVMEIVVRLSEDAEPTVRTELMEQIPPIAIFLQENRSNFPVVLSEYLIPIVVRYLTDPNNQIICKMASMLSKSTVERLLLPRFCELCGDRKLFQVRKVCAANFGDICHAVGQEATEKFLIPKFFELCSDAVWGMRKACAECFTAVSHSSSPGVRRTQLFPLFIRLVSDPCRWVHQAAFQSLGPFTSTFANPSRAGLYLREDGALSIWPLTQDLDSGFASGSPAPSSGGNTSPASLTRSAKPVRSEPELPVEGTSAKTSDCPHSSSSSDGPAESPVESCVSAGAEWTRVSPETSACSKLSDMNDLPISSYPGSDSWACPGNTEDVFSHFLYW

SEQ ID NO: 26568 - protein, 246 aa, Homo sapiens
MEIVVRLSEDAEPTVRTELMEQIPPIAIFLQENRSNFPVVLSEYLIPIVVRYLTDPNNQIICKMASMLSKSTVERLLLPRFCELCGDRKLFQVRKVCAANFGDICHAVGQEATEKFLIPKFFELCSDAVWGMRKACAECFTAVSHSSSPGVRRTQLFPLFIRLVSDPCRWVHQAAFQSLGPFTSTFANPSRAGLYLREDGALSIWPLTQDLDSGFASGSPAPSSGGNTSPARYALARVTTRTLDVP

SEQ ID NO: 26569 - protein, 127 aa, Homo sapiens
VHSRRAAAPLTAPEVRETLGMGSWSRKRWWPEVNCSENLSPSASFAKLWPQGHMTGAPPSLGRSPHGNEGLTVNPPLILLHLQSNEKRFQSAKDTLSPLPDPCDPRSSCLVTVSPNEPHLNQAPFSP

SEQ ID NO: 26570 - protein, 148 aa, Homo sapiens
MWNFFRRELTSNGFPENFSLDVPANTYNALKSRLCDPNADHTSCPSPCSLHAAGALPGTGRQRWRVELAHLADRKLSLRDVSRLRQGGERRSGIAVKVVRGGAGFAARLQGSVTLVQQGWFFPRLGGCQAWWRMGAVVWCGELLTCTS

SEQ ID NO: 26571 - protein, 123 aa, Homo sapiens
LKVPTLRPPLFKSAATPLRSVMSLLPSTHSGDSSSPRPRQESFIPTCSQDLLGNRPAWQLQELREVKGLCPPIPASLARRVLGTRRPWGKWEPQTARQLFYVWGLQEHCLPGGGGGEAGEDST

SEQ ID NO: 26572 - protein, 95 aa, Homo sapiens
VRKGTQPPCLPPAQLRPNHLPPERMSASAWTPWRQGPPCASEASTCQKIIFTPSLEKMALRLCTQRKEGEPQVSRRTMRLTEPAGRWRVSRALDI

SEQ ID NO: 26573 - protein, 22 aa, Homo sapiens
LCKEDTRMRCLHTQRAAADAGR

SEQ ID NO: 26574 - protein, 65 aa, Homo sapiens
LGSRLTLLRVPGLHEARAKVPFARALPSACCPLCSCSPWLPRDRCVGWRTRERLSPPQWTPRCRP

SEQ ID NO: 26575 - protein, 156 aa, Homo sapiens [sequence omitted]

SEQ ID NO: 26576 - protein, 131 aa, Homo sapiens
LKSPLHLQGARTGRESPGPPHPPHHPPPSACLGQPASWPQDLPGAGSGWTWRRNGKGRSPHSCSSWASGDRNTSQGGQEGLPWDQCKEVLLSLGSLRTRKETLWRLPFDLWTPPVITLDGVCGVQVYFLFK

SEQ ID NO: 26577 - protein, 106 aa, Homo sapiens
VPGLGGKVQGPPTLPTTLRHQPAWASLPPGLRISLGQEVGGLGGGTARAGPHTLAPPGHLGTGTPLRVAKRGFLGTSARKFCCPWEVSEPGRKPCGGCPLTFGRHL

SEQ ID NO: 26578 - protein, 191 aa, Homo sapiens
LHHRIRQAPNPYSSEIKAFDTRLQRGELFSREDLVWYKKVLWEARKFELDRHEVILCTCSCAASASLKILDVRQILVDEAGMATEPETLIPLVQFPQAEKVVLLGDHKQLRPVVKNERLQNLGLDRSLFERYHEDAHMLDTQYRMHEGICAFPSVAFYKSKLKTWQGLRRPPSVLGHAGKESCPLTFGRHL

SEQ ID NO: 26579 - protein, 109 aa, Homo sapiens
MPKIVLNGVTVDFPFQPYKCQQEYMTKVLECLQQKVNGILESPTGTGKTLCLLCTTLAWREHLRDGISARKIAERAQGELFPDRALSSWGNAAAAAGDPIDSWLSAGPS

SEQ ID NO: 26580 - protein, 1400 aa, Homo sapiens
MPKIVLNGVTVDFPFQPYKCQQEYMTKVLECLQQKVNGILESPTGTGKTLCLLCTTLAWREHLRDGISARKIAERAQGELFPDRALSSWGNAAAAAGDPIACYTDIPKIIYASRTHSQLTQVINELRNTSYRPKVCVLGSREQLCIHPEVKKQESNHLQIHLCRKKVASRSCHFYNNVEEKSLEQELASPILDIEDLVKSGSKHRVCPYYLSRNLKQQADIIFMPYNYLLDAKSRRAHNIDLKGTVVIFDEAHNVEKMCEESASFDLTPHDLASGLDVIDQVLEEQTKAAQQGEPHPEFSADSPSPGLNMELEDIAKLKMILLRLEGAIDAVELPGDDSGVTKPGSYIFELFAEAQITFQTKGCILDSLDQIIQHLAGRAGVFTNTAGLQKLADIIQIVFSVDPSEGSPGSPAGLGALQSYKVHIHPDAGHRRTAQRSDAWSTTAARKRGKVLSYWCFSPGHSMHELVRQGVRSLILTSGTLAPVSSFALEMQIPFPVCLENPHIIDKHQIWVGVVPRGPDGAQLSSAFDRRFSEECLSSLGKALGNIARVVPYGLLIFFPSYPVMEKSLEFWRARDLARKMEALKPLFVEPRSKGSFSETISAYYARVAAPGSTGATFLAVCRGKASEGLDFSDTNGRGVIVTGLPYPPRMDPRVVLKMQFLDEMKGQGGAGGQFLSGQEWYRQQASRAVNQAIGRVIRHRQDYGAVFLCDHRFAFADARAQLPSWVRPHVRVYDNFGHVIRDVAQFFRVAERTMPAPAPRATAPSVRGEDAVSEAKSPGPFFSTRKAKSLDLHVPSLKQRSSGSPAAGDPESSLCVEYEQEPVPARQRPRGLLAALEHSEQRAGSPGEEQAHSCSTLSLLSEKRPAEEPRGGRKKIRLVSHPEEPVAGAQTDRAKLFMVAVKQELSQANFATFTQALQDYKGSDDFAALAACLGPLFAEDPKKHNLLQGFYQFVRPHHKQQFEEVCIQLTGRGCGYRPEHSIPRRQRAQPVLDPTGRTAPDPKLTVSTAAAQQLDPQEHLNQGRPHLSPRPPPTGDPGSQPQWGSGVPRAGKQGQHAVSAYLADARRALGSAGCSQLLAALTAYKQDDDLDKVLAVLAALTTAKPEDFPLLHRFSMFVRPHHKQRFSQTCTDLTGRPYPGMEPPGPQEERLAVPPVLTHRAPQPGPSRSEKTGKTQSKISSFLRQRPAGTVGAGGEDAGPSQSSGPPHGPAASEWGEPHGRDIAGQQATGAPGGPLSAGCVCQGCGAEDVVPFQCPACDFQRCQACWQRHLQASRMCPACHTASRKQSVMQVFWPEPHKDHEGAGGARPVAAVPGVGAACPAAGAGCTRSGRNTHLPLAGRRDRGAAGVRPVPPRHLCAAAVPPRQPHDVWPVSTAPLHAVLELPRALPLLQRPLRGA

SEQ ID NO: 26581 - protein, 419 aa, Homo sapiens
LLCHPCGTSTTVEARELGPICCLPSLGKRRLLQRTDRRVPYRVDLQGSGMEPLFPAPFWEVIYGSHLQGNLSLLSPNHSLLPPHLLLNASHGAFLPLGLKVTIVGLYLAVCVGGLLGNCLVMYVILRHTKMKTATNIYIFNLALADTLVLLTLPFQGTDILLGFWPFGNALCKTVIAIDYYNMFTSTFTLTAMSVDRYVAICHPIRALDVRTSSKAQAVNVAIWALASVVGVPVAIMGSAQVEDEEIECLVEIPTPQDYWGPVFAICIFLFSFIVPVLVISVCYSLMIRRLRGVRLLSGSREKDRNLRRITRLVLVVVAVFVGCWTPVQVFVLAQGLGVQPSSETAVAILRFCTALGYVNSCLNPILYAFLDENFKACFRKFCCASALRRDVQVSDRVRSIAKDVALACKTSETVPRPA

SEQ ID NO: 26582 - protein, 77 aa, Homo sapiens
LNKMDLRTLSGLGTKSWYFTAATASQTSCGKQEGDSLLGCHYYGDTAGLNKICFKRQQERQKVSGSTAARAGRHQKS

SEQ ID NO: 26583 - protein, 80 aa, Homo sapiens
LSRGEPMDLRTLSGLGTKSWYFTAATASQTSCGKQEGDSLLGCHYYGDTAGLNKICFKRQQERQKVSGSTAARAGRHQKS

SEQ ID NO: 26584 - protein, 75 aa, Homo sapiens
LMDLRTLSGLGTKSWYFTAATASQTSCGKQEGDSLLGCHYYGDTAGLNKICFKRQQERQKVSGSTAARAGRHQKS

SEQ ID NO: 26585 - protein, 104 aa, Homo sapiens
MEIILELQQSAQLHNREAGTQIDRQISQLVEGASGWQLWAFGCWTTIGKTEMEQGQKIAHFYSTQLLLFHDLQEFYWDNYPNKLQAFYPNGALSEMKRILNVKI

SEQ ID NO: 26586 - protein, 33 aa, Homo sapiens
MEQGQKIAHFYSTQLLLFHGALSEMKRILNVKI

SEQ ID NO: 26587 - protein, 28 aa, Homo sapiens
LQREKLKMDMKSEESDHRRKPFQVSDDL

SEQ ID NO: 26588 - protein, 53 aa, Homo sapiens
LQREKLKMDMKSEESDHRRKPFQMTRAPQRQQPQGAAMAPDLSHGCRKLNGGG

SEQ ID NO: 26589 - protein, 26 aa, Homo sapiens
LECSGTVSGHFNLRLLGSSESPASAS

SEQ ID NO: 26590 - protein, 31 aa, Homo sapiens
LMTRAPQRQQPQGAAMAPDLSHGCRKLNGGG

SEQ ID NO: 26591 - protein, 34 aa, Homo sapiens
LIDVPKVEGARRLARGVRSPGPTSAAPQSHEEGK

SEQ ID NO: 26592 - protein, 25 aa, Homo sapiens
LREVKKLSSRRVIDTIAPCHTTRWY

SEQ ID NO: 26593 - protein, 80 aa, Homo sapiens [sequence omitted]

SEQ ID NO: 26594 - protein, 76 aa, Homo sapiens [sequence omitted]

SEQ ID NO: 26595 - protein, 106 aa, Homo sapiens
MKQLILGRIPMNIKNVIKPSVYRVPSEDMKQLILERIPMNIKNVVKPSVYTIPLEDMRELILERIPINVKNVVNTFSCFSYLQIHERTHTREKPYDVKNVVKPSDI

SEQ ID NO: 26596 - protein, 69 aa, Homo sapiens
LVQGIESHSKDGNASGTKLLEALDCILPQTCPTDKPLVVLVLFLLAKWRLVFSNLVCWSPLLRSVLQLK

SEQ ID NO: 26597 - protein, 132 aa, Homo sapiens
LPSRCKPFPRAPAGRRGACEPGLPAGQGTTYRECGVPRRHHGPGLHPDERAAAAPRPRGLVVLGFPCNQSGHQENAKNEEILNSLKYVQPGGGFEPSFMLLEKCEVNGAGAHPLSAFLRDAGQPPGTTPLSS

SEQ ID NO: 26598 - protein, 24 aa, Homo sapiens
MVSPKKSYAGILSHSASQRDIVWS

SEQ ID NO: 26599 - protein, 14 aa, Homo sapiens
LFGFWKVLPHVKFM

SEQ ID NO: 26600 - protein, 231 aa, Homo sapiens
LVESFWKAKQHTKEELKSLQAKDEEKNENEKAKAACSAAAMEEDSEASSSSTGDSSQGDNNLQKLGPDDVSVDTDSIRRVYTRLLSNEKIEIAFLNALVYLSPNVECDLMYHKVYSQDPNYLNLFIIVMENRNLHSPEYLEMALPLFCKAMSKLPLAAQGKLIRLWSKYNADQIRRMMETVQQLITYKVISNEFNSQNLVNDDDAIVAASKCLKMIYYANGSGRGSGHKSQ

SEQ ID NO: 26601 - protein, 37 aa, Homo sapiens
MLWKLHFFFPQGVGAGPYCFISTSSRRNLQPLGKESH

SEQ ID NO: 26602 - protein, 295 aa, Homo sapiens
MSNRVVCREASHAGSWYTASGPQLNAQLEGWLSQVQSTKRPARAIIAPHAGYTYCGSCAAHAYKQVDPSITRRIFILGPSHHVPLSRCALSSVDIYRTPLYDLRIDQKIYGELWKTGMFERMSLQTDEDERSIEMHLPYTAKAMESHKDEFTIIPLLVGALSQKNRNSELFSKYLADPSNLFVVSSDFCHWGQRFRHSYYDESQGEICRSIEHLDKMGMSIIEQLDPVSFSNYLKKYHNTICGRHPIGVLLNAITELQKNGMNMSFSFLNYAQSSQCRNWQDSSVSYAAGALTVH

SEQ ID NO: 26603 - protein, 72 aa, Homo sapiens
LALAGILPLHVAGVGHPNREAEGEVNVLLGIQADSEEQDIYHLLTDTDMTLLNQHMSVADGLSQAKLEDLGL

SEQ ID NO: 26604 - protein, 66 aa, Homo sapiens
LHLLLKATAALLTSTLSPPYSLRRKSRRARMLCKSSMSSWWKRGLRPSACSCCTAAWPRATSRAEN

SEQ ID NO: 26605 - protein, 24 aa, Homo sapiens
LFSETWRLQGIKCEWERKKEKHRS

SEQ ID NO: 26606 - protein, 26 aa, Homo sapiens
LSAFLFSSRRLARILDKTVTPNLDTP

SEQ ID NO: 26607 - protein, 71 aa, Homo sapiens
LHNFVMDQLALWLSGIWRQEGQVDRGLSPLLHSPDAVFPIHVCLHWSWAARIHQNPVSFPLLIQTPGQDPR

SEQ ID NO: 26608 - protein, 173 aa, Homo sapiens
LGTEMQYCKEEGPPASTNTIFSCMKGTVVVKFVRHSKHAEWRGSELSYLNLLRSKAAITWDPVALPLQRPQEDRMERDWSPNQGALRSNQRVGRGQSWGGLSGGLWDNLWPYGFGLEIRRAYHFRCNHFWTCFCRQSLMLKTQRMGNSRGLSFKIDFCDPLIVRYCKVTLRVS

SEQ ID NO: 26609 - protein, 20 aa, Homo sapiens
VRVCYLKSQKKFLLMPSPLS

SEQ ID NO: 26610 - protein, 83 aa, Homo sapiens
MATTFPDPFPDPLPRPAAPSCCVSGGTPHESFTCLLPRPNPSLLSQMPSHQTSAPPLHPHGPSQGTHHPLWLGPVGSSCSPPA

SEQ ID NO: 26611 - protein, 64 aa, Homo sapiens
LRGGHRKTFCAKCRLAVSGMGLRWRVRRGRQTSCTSIVPICGIQRRKAHGFPTRGGVLGFPIGL

SEQ ID NO: 26612 - protein, 108 aa, Homo sapiens
LLALSMRRRRPGCPASRHGSVHHRPPRCLCPSLPFKGKRYLFIFLPWTLEISGENSALATKCSGSRMLPSFLPFHMEFIQSTKASHGTDIRGARSPGSGKHKPVLRGP

SEQ ID NO: 26613 - protein, 20 aa, Homo sapiens
MHCLYRGMSLSHMKERLQCG

SEQ ID NO: 26614 - protein, 71 aa, Homo sapiens
LRVRGLDTVRQASGTTGASRPGHKVRVAGPSVLRRVTSWDPISLAIAEHPDRGPSPRLNSTHAATVEKSGK

SEQ ID NO: 26615 - protein, 90 aa, Homo sapiens
LEDPRPHPAWSVVAHVATPLGMAVGLRDGQASGTTGASRPGHKVRVAGPSVLRRVTSWDPISLAIAEHPDRGPSPRLNSTHAATVEKSGK

SEQ ID NO: 26616 - protein, 127 aa, Homo sapiens
VPGGGCNTPGKSETMGRTSCTPGKENRGRPVINVLLCLSFQKQARLSASGRPRVASGEHGTRPLCRQASGTTGASRPGHKVRVAGPSVLRRVTSWDPISLAIAEHPDRGPSPRLNSTHAATVEKSGK

SEQ ID NO: 26617 - protein, 45 aa, Homo sapiens
MFQPRGCWQNCPQTHPRSHGQEVGPKLPGQVTPLREPPHNTQGAA

SEQ ID NO: 26618 - protein, 26 aa, Homo sapiens
VMPHGGEATRGRGHAGERLQGGEAAG

SEQ ID NO: 26619 - protein, 66 aa, Homo sapiens
VPGGGCNTPGKSETMGRTSCTPGKENRGRPVINVLLCLSFQKQARLSASGRPRVASGEHGTRPLCR

SEQ ID NO: 26620 - protein, 73 aa, Homo sapiens
LQRPALGSGTRGTGSLARPIVTGIHAMQTSTSKGNKVRRAEGSTALRTHGARLAQRPNAAILGRVTRALPGPT

SEQ ID NO: 26621 - protein, 264 aa, Homo sapiens
LFFGGGIGGTILYAKWASHFRERVEKTIPYSDKLFEVVLGSAPYNVPLPKKSTQSGPLKISSVSEVTKEFKQPASQLQKQKGDTPASATAGDTVLVPGVQHEESLKTDHPAIDEGKPTPALSEEASSSSIRERPCEEIAACLAQEEKQEQVKTESLAKSFEDALRQTANVTLQAIAAQNTVVQAVNAHSNILKAAMDNSEIEGKKKSAKWHTVQGALKEHRKAVDEAANALLKAKEEVEKMKSVTENAKKEEVAGAKPHINFTT

SEQ ID NO: 26622 - protein, 40 aa, Homo sapiens
LALVHRQGLAQPKLAFFSLLILKKFPHFSFGNGVVASDFF

SEQ ID NO: 26623 - protein, 109 aa, Homo sapiens
LPMSQNKHMYSGSFSFSNTLPQKQVVCPRHKEGKLAIFPTSKFCKIIDLLKRFLFIIPTLCKWKGHCVPCVSSLQRLCPLACFVTISLGEEWVHPAPRPVVARGLPCEF

SEQ ID NO: 26624 - protein, 36 aa, Homo sapiens
LDTFYECNSAEKHVAEMQSSVFSVCKSVYTPHVTTA

SEQ ID NO: 26625 - protein, 83 aa, Homo sapiens
LAALKTLEINGANPVCSSLPQRLGPGLDMRAPWCHRGLCLTRNNANLSFLRIVMCSTFYQRPPFYVHVSFAPSVFFSEPYPCC

SEQ ID NO: 26626 - protein, 9 aa, Homo sapiens
MSCKQSPRQ

SEQ ID NO: 26627 - protein, 46 aa, Homo sapiens
LLEYWCFWIETLIHILVRLEVAQEFSFVKTQKTISFRFVNFILYYM

SEQ ID NO: 26628 - protein, 37 aa, Homo sapiens
MFLRRQLHKNQHTSNSQQIIRQLMKILTQTLIVDYAF

SEQ ID NO: 26629 - protein, 21 aa, Homo sapiens
MAQCFSEDNYIRISILQIHSK

SEQ ID NO: 26630 - protein, 7 aa, Homo sapiens
MILQETR

SEQ ID NO: 26631 - protein, 10 aa, Homo sapiens
MGLKELPKPP

SEQ ID NO: 26632 - protein, 358 aa, Homo sapiens
LYEKDTEELKIMEEQYRTQTEVKKQSKLTLKSLEVELKTVRSNSNQTSHTHEKERDLWQENHLMRDEIARLRLEIDTIKHQNRETENKYFKDIEIIKENNEDLEKTLKLNEETLTKTITWYSKELNVLMDENTMLNFELEKEKQSTPRLETEMESYRCRLAAALCDHDQCQSLKRDLQLAFQSTVNEWCHLQENTNSHIQILSQQLSKAESTSSGLETELRYEREALKEKTLGIEHMQGVLSRTQCPLKDIEHMYQNDQPILEKYVRKQQSIEDGLFQLQSQNLLYQQQCNDAHKKADNQEKTIINIQVKCEDTVEKLQAECRKLEENNKGLMKECTLLKERQCQYEKEKEKGEVVVR

SEQ ID NO: 26633 - protein, 47 aa, Homo sapiens
MEKFPENTCLGGETRERDWVTACSVITPCSVRELYAVEPQGLVRPRP

SEQ ID NO: 26634 - protein, 304 aa, Homo sapiens
VENQAHCDFVKLRNMLIRTHMHDLKDVTCDVHYENYRAHCIQQMTSKLTQDSRMESPIPILPLPTPDAETEKLIRMKDEEVCGAAGAAEAGVRDAPPRCCSPAGLSPPAAEAHAGDAAEDEAADAGPVTLAADTPSVSGTPSHPWTPDRTVPDPETRGHSPQLTLIYSQHHPLPGHCVCFRGAWTVAPAQLALSDLGGSGAKLGGTSEIRLPCPSPAPGRSQHPNRRPCSGRQAKLGRRGFPGSWVCSLPQCCRTDLGALLCLLPRVTQRVLRPHFLSRRAESSLIPRRLAGRVGLNQMGALQT

SEQ ID NO: 26635 - protein, 266 aa, Homo sapiens
LSPSGRGAGAEPGPATASPAAGQRPPSPGPMPAELRQEQSPGSQASLATMPEAPDVLEETVTVEEDPGTPTSHVSIVTSEDGTTRRTETKVTKTVKTVTTRTVRQVPVGPDGLPLLDGGPPLGPFADGALDRHFLLRGGGPVATLSRAYLSSGGGFPEGPEPRDSPSYGSLSRGLGMRPPRAGPLGPGPGDGCFTLPGHREAFPVGPEPGPPGGRSLPERFQAEPYGLEDDTRSLAADDEGGPELEPDYGTATRRRPECGRGLHTR

SEQ ID NO: 26636 - protein, 128 aa, Homo sapiens
VQKAKFFCVVQAELNHCNSMGALEMHEQVEQLKQSIHRVHLYSRGEDQPLPVLGPGRGSEPSAARPRASWATFPRERALTAHLDTKKTRKKPRQKKPEPNLLWDRLTSPCLPPTLLPPLPLPPPWSPW

SEQ ID NO: 26637 - protein, 97 aa, Homo sapiens
MAWTPLLLQLLTLCSGSWAQSALTQEASVSGTVGQKVTLSCTGNSNNVGSYAVGWYQQISHGAPKTVMFGNSLPSGIPDRFSGSKSGTTASLTISGL

SEQ ID NO: 26638 - protein, 85 aa, Homo sapiens
LIQPPSVSGSPGQSVTISCTGTSSDVGSYDYVSWYQQHPGTVPKPMIYNVNTQPSGVPDRFSGSKSGNTASMTISGLQAEDEADY

SEQ ID NO: 26639 - protein, 40 aa, Homo sapiens
MPLWERSPGVTAMDPGRAWARDRDQSQSRERTEPMDWGVL

SEQ ID NO: 26640 - protein, 38 aa, Homo sapiens
LLARGTRAPSSREPMLQVGPEVPLNLKANETQDRPSGL

SEQ ID NO: 26641 - protein, 162 aa, Homo sapiens
LRSWALVPGSAGPCCCWVWPWSPMACCAQWLHRKAGTQTLEPQLEAADPACGACGAGQPKANPTVTLFPPSSEELQANKATLVCLISDFYPGAVTVAWKADGSPVKAGVETTKPSKQSNNKYAASSYLSLTPEQWKSHRSYSCQVTHEGSTVEKTVAPTECS

SEQ ID NO: 26642 - protein, 403 aa, Homo sapiens
VWLGLTPLLALSASRAAGLLSAWSQCPLWQEGEVPHPVLLVWARCCQTMGCRQSSEEKEAARRSRRIDRHLRSESQRQRREIKLLLLGTSNSGKSTIVKQMKIIHSGGFNLEACKEYKPLIIYNAIDSLTRIIRALAALRIDFHNPDRAYDAVQLFALTGPAESKGEITPELLGVMRRLWADPGAQACFSRSSEYHLEDNAAYYLNDLERIAAADYIPTVEDILRSRDMTTGIVENKFTFKELTFKMVDVGGQRSERKKWIHCFEGVTAIIFCVELSGYDLKLYEDNQTSRMAESLRLFDSICNNNWFINTSLILFLNKKDLLAEKIRRIPLTICFPEYKGQNTYEEAAVYIQRQFEDLNRNKETKEIYSHFTCATDTSNIQFVFDAVTDVIIQNNLKYIGLC

SEQ ID NO: 26643 - protein, 85 aa, Homo sapiens
LVSLGKAQIQKGWAPESCTSSLRYPCAENSVHGGERGQAGVAERQWHSHHHSSDLLPPGIPQTSPPAGSLDLQGPGQPPPTWRES

SEQ ID NO: 26644 - protein, 269 aa, Homo sapiens
LPPHALPNHNRSLSYNNVLNPGSPGGHACLAHPAVGVAGYHSPYLHPGATGDPPWPLPHSFSPVLGPRPQEPSPVLYDILSRTIMASIQERKDREERECLLRSQADSLFGDSGVYDAPSSYSLQQASVLSEGFRGPTLCYSSTDDLVARPGFGGACNPVLQTSLSSLSSSVSRALRTSSSSLQADQNPFRDPAQLAQPLPLCYLRISSWMSSIWSSTPQMSFLRFWGPEEPFRVSRSLLLAGQKRSWQPRPPPWIPSPLPPAPGTGWGS

SEQ ID NO: 26645 - protein, 25 aa, Homo sapiens
LLFFFNFLIFWDRASLCHPGWRTVG

SEQ ID NO: 26646 - protein, 62 aa, Homo sapiens
LNYIYIRNKSSILAQRHFILFIESISLFSSKTFHIISAPFYLYSLLFKEMAVLPVLNTIKLK

SEQ ID NO: 26647 - protein, 55 aa, Homo sapiens
VWLALLSSRMGLWGLCGEGRSWEPGLPVCRLDAARWLHLGRISRTPGLDFSLDLG

SEQ ID NO: 26648 - protein, 46 aa, Homo sapiens
VTLDSGHSDLAVRLRWFSSPLGDSLKISSSSHLLGWSLPWIGTLPG

SEQ ID NO: 26649 - protein, 30 aa, Homo sapiens
MLRPARNASLALCSHGRHCLSQPPPEPASR

SEQ ID NO: 26650 - protein, 96 aa, Homo sapiens
LLTRAPPFSFGPSGRLGSLRFPTGISHFTKKVGFLLLANSTSRAQSYVSMTHLPGTSTWGCQAATPAAVLTGPGRGTDPPLENDTSNIRMCQLDLC

SEQ ID NO: 26651 - protein, 60 aa, Homo sapiens
LACPVEATSSMCRPWMRSCSSSSPCSSCTATTSPSCSSPTRPGPGTWLCGRTRAPSWPSC

SEQ ID NO: 26652 - protein, 219 aa, Homo sapiens [sequence omitted]

SEQ ID NO: 26653 - protein, 86 aa, Homo sapiens
LNILESSPHSRILPTFFFLETESCSVAQARVQWCNLSSLQPLPPGFKRFFCLSLPSGWDYRRLLPCLANFCIFSRDGVSPYWPGWS

SEQ ID NO: 26654 - protein, 56 aa, Homo sapiens
MDVQTLCFPHAPQLRTQPCLPGVCSMALQPSSVGHAGGARKRSHRPAMLGRLLGSD

SEQ ID NO: 26655 - protein, 75 aa, Homo sapiens
MVFAVLPPWGPWSDNIVSLVRLSRCLIRTANGASPTPPRVRPPFHQRVSSQRPPASCPAAQEEKEGLNSIAIFFP

SEQ ID NO: 26656 - protein, 144 aa, Homo sapiens
MEEEEDDDLELFGGYDSFRSYNSSVGSESSSYLEESSEAENEDREAGELPTSPLHLLSPGTPRSLDGSGSEPGKTTDQKSQSPAQGCLVCQNWSLPPLSRDRTAGRWDTNRTRRSGLGLRLGEVPEGSQLQGCSRQLFQARPTL

SEQ ID NO: 26657 - protein, 20 aa, Homo sapiens
LKGFRPGVKPSRPPHCHCPA

SEQ ID NO: 26658 - protein, 444 aa, Homo sapiens
LTEAVRQSVSPASTVSSLSRYTLIATQVPLYDQWEDVMKGMKVEVLNSDAVLPSRVYWIASVIQTAGYRVLLRYEGFENDASHDFWCNLGTVDVHPIGWCAINSKILVPPRTIHAKFTDWKGYLMKRLVGSRTLPVDFHIKMVESMKYPFRQGMRLEVVDKSQVSRTRMAVVDTVIGGRLRLLYEDGDSDDDFWCHMWSPLIHPVGWSRRVGHGIKMSERRSDMAHHPTFRKIYCDAVPYLFKKVRAVYTEGGWFEEGMKLEAIDPLNLGNICVATVCKVLLDGYLMICVDGGPSTDGLDWFCYHASSHAIFPATFCQKNDIELTPPKGYEAQTFNWENYLEKTKSKAAPSRLFNMDCPNHGFKVGMKLEAVDLMEPRLICVATVKRVVHRLLSIHFDGWDSEYDQWVDCESPDIYPVGWCELTGYQLQPPVAAGVGSRGPKRL

SEQ ID NO: 26659 - protein, 54 aa, Homo sapiens
VGGRPHQAAPSPLRPCPSSPHHRPGVRTQAHVLQPPEAPLKPGLPFPHPHGSPG

SEQ ID NO: 26660 - protein, 223 aa, Homo sapiens
LASEEDSFCLQCAPILHRAGEPVLPPVHLWPCPVCRVEGEAGAGWESRSKFFHPKPVPGFQVAYVVFQKPSGVSAALALKGPLLVSTESHPVKSGIHKWISDYADSVPDPEALRVEVDTFMEAYDQKIAEEEAKAKEEEGVPDEEGWVKVTRRGRRPVLPRTEAASLRVLERERRKRSQKELLNYAWQHRESKMEHLAQLRKKFEEDKQRIELLRAQRKFRPY

SEQ ID NO: 26661 - protein, 25 aa, Homo sapiens
LPWPDLGRPQTLTFSCVGRLLLRKQ

SEQ ID NO: 26662 - protein, 308 aa, Homo sapiens
MTDGECVVNPTRKEMSSSTLNVVVAGAPKSQTVMLEASAENILQQDFCHAIKVGVKYTQQIIQGIQQLVKEIGVTKRTPQKLFTPSQEIVKHAHKLTMERLYAVFTDYEHDKISRDEAVNKIRLDTEEQLKEIFPEVDLYEIIESFNTVAKKVFRSIILNEYKRCDGRDLTLLRNISCEVDMFKTLHGSELFQRGQTQLLCAVTFDSLESSIKLDRVITTINGIKDKNFMLHYEFPPYATNEIVKVTGINRRELGPDALAEKALYPVIPKDFPFAIRVTSEVLESNGSSSMASACGGSLALMDSGLPI

SEQ ID NO: 26663 - protein, 59 aa, Homo sapiens
LNLEYARENFYQARWKTPRIGLSHGGIGTMVRVQWMEKASSLKMVMETSTAQGNTNQVP

SEQ ID NO: 26664 - protein, 24 aa, Homo sapiens
LFLKRRIIFFFSRERYSVYILEPS

SEQ ID NO: 26665 - protein, 1248 aa, Homo sapiens
VPRGSYRRGDRPGLAWTMVLLWEPAGAWLALGLALALGPSVAAAAPRQDCTGVECPPLENCIEEALEPGACCATCVQQGCACEGYQYYDCLQGGFVRGRVPAGQSYFVDFGSTECSCPPGGGKISCQFMLCPELPPNCIEAVVVADSCPQCGQVGCVHAGHKYAAGHTVHLPPCRACHCPDAGGELICYQLPGCHGNFSDAEEGDPERHYEDPYSYDQEVAEVEAATALGGEVQAGAVQAGAGGPPAALGGGSQPLSTIQAPPWPAVLPRPTAAAALGPPAPVQAKARRVTEDSEEEEEEEEEREEMAVTEQLAAGGHRGLDGLPTTAPAGPSLPIQEERAEAGARAEAGARPEENLILDAQATSRSTGPEGVTHAPSLGKAALVPTQAVPGSPRDPVKPSPHNILSTSLPDAAWIPPTREVPRKPQVLPHSHVEEDTDPNSVHSIPRSSPEGSTKDLIETCCAAGQQWAIDNDECLEIPESGTEDNVCRTAQRHCCVSYLQEKSCMAGVLGAKEGETCGAEDNDSCGISLYKQCCDCCGLGLRVRAEGQSCESNPNLGYPCNHVMLSCCEGEEPLIVPEVRRPPEPAAAPRRVSEAEMAGREALSLGTEAELPNSLPGDDQDECLLLPGELCQHLCINTVGSYHCACFPGFSLQDDGRTCRPEGHPPQPEAPQEPALKSEFSQVASNTIPLPLPQPNTCKDNGPCKQVCSTVGGSAICSCFPGYAIMADGVSCEDQDECLMGAHDCSRRQFCVNTLGSFYCVNHTVLCADGYILNAHRKCVDINECVTDLHTCSRGEHCVNTLGSFHCYKALTCEPGYALKDGECEDVDECAMGTHTCQPGFLCQNTKGSFYCQARQRCMDGFLQDPEGNCVDINECTSLSEPCRPGFSCINTVGSYTCQRNPLICARGYHASDDGTKCVDVNECETGVHRCGEGQVCHNLPGSYRCDCKAGFQRDAFGRGCIDVNECWASPGRLCQHTCENTLGSYRCSCASGFLLAADGKRCEDVNECEAQRCSQECANIYGSYQCYCRQGYQLAEDGHTCTDIDECAQGAGILCTFRCLNVPGSYQCACPEQGYTMTANGRSCKDVDECALGTHNCSEAETCHNIQGSFRCLRFECPPNYVQVSKTKCERTTCHDFLECQNSPARITHYQLNFQTGLLVPAHIFRIGPAPAFTGDTIALNIIKGNEEGYFGTRRLNAYTGVVYLQRAVLEPRDFALDVEMKLWRQGSVTTFLAKMHIFFTTFAL

SEQ ID NO: 26666 - protein, 1201 aa, Homo sapiens
VPRGSYRRGDRPGLAWTMVLLWEPAGAWLALGLALALGPSVAAAAPRQDCTGVECPPLENCIEEALEPGACCATCVQQGCACEGYQYYDCLQGGFVRGRVPAGQSYFVDFGSTECSCPPGGGKISCQFMLCPELPPNCIEAVVVADSCPQCGQVGCVHAGHKYAAGHTVHLPPCRACHCPDAGGELICYQLPGCHGNFSDAEEGDPERHYEDPYSYDQEVAEVEAATALGGEVQAGAVQAGAGGPPAALGGGSQPLSTIQAPPWPAVLPRPTAAAALGPPAPVQAKARRVTEDSEEEEEEEEEREEMAVTEQLAAGGHRGLDGLPTTAPAGPSLPIQEERAEAGARAEAGARPEENLILDAQATSRSTGPEGVTHAPSLGKAALVPTQAVPGSPRDPVKPSPHNILSTSLPDAAWIPPTREVPRKPQVLPHSHVEEDTDPNSVHSIPRSSPEGSTKDLIETCCAAGQQWAIDNDECLEIPESGTEDNVCRTAQRHCCVSYLQEKSCMAGVLGAKEGETCGAEDNDSCGISLYKQCCDCCGLGLRVRAEGQSCESNPNLGYPCNHVMLSCCEGEEPLIVPEVRRPPEPAAAPRRVSEAEMAGREALSLGTEAELPNSLPGDDQDECLLLPGELCQHLCINTVGSYHCACFPGFSLQDDGRTCRPEGHPPQPEAPQEPALKSEFSQVASNTIPLPLPQPNTCKDNGPCKQVCSTVGGSAICSCFPGYAIMADGVSCEDINECVTDLHTCSRGEHCVNTLGSFHCYKALTCEPGYALKDGECEDVDECAMGTHTCQPGFLCQNTKGSFYCQARQRCMDGFLQDPEGNCVDINECTSLSEPCRPGFSCINTVGSYTCQRNPLICARGYHASDDGTKCVDVNECETGVHRCGEGQVCHNLPGSYRCDCKAGFQRDAFGRGCIDVNECWASPGRLCQHTCENTLGSYRCSCASGFLLAADGKRCEDVNECEAQRCSQECANIYGSYQCYCRQGYQLAEDGHTCTDIDECAQGAGILCTFRCLNVPGSYQCACPEQGYTMTANGRSCKDVDECALGTHNCSEAETCHNIQGSFRCLRFECPPNYVQVSKTKCERTTCHDFLECQNSPARITHYQLNFQTGLLVPAHIFRIGPAPAFTGDTIALNIIKGNEEGYFGTRRLNAYTGVVYLQRAVLEPRDFALDVEMKLWRQGSVTTFLAKMHIFFTTFAL

SEQ ID NO: 26667 - protein, 385 aa, Homo sapiens
METWKIFWGIILLEAGFGFKSQRIVCREASLGDVVFLVDTNINPQHARSVRNFLYILVNSFNVSSETIRVGLAKYSDVPHSEFLLSTYHRKGDVLRHIRQFQFKPGGKKMGLALKFILDHHFQEASGSRASQEVPQIAVVISSGPVEDHVHGPAKALRKAGILLYAIGVRDAVWAELREIASSPQENFTSFVPNFSGLSNLAQKLRQELCDTLAKAAPHVDHVSPACREAALADIVFLVDSSTSIGPQNFQKVKNFLYSVILGLDISSDRVRVGLAQYNDNIYPAFQLNQHPLKSMILEQIQNLPYRTGGTNTGSALEFIRTNYLTEESGSRAKDRVPQIVILVTDGESNDEVQEVADRLKEDGVVVLCGRGQCPGCPRVAKNNQ

SEQ ID NO: 26668 - protein, 758 aa, Homo sapiens
LRPASYSPRLPAPSPSAPLYPQSARPSAAPFGTEVSRCPARRRSRVTAASSAPQRRPPGVRRPRRSGSASRASPGSPRSSLSARPARSLRFVSRAQSAEPSGARWAVAWATPNAARALTRVRWPAHSRTMTAEGPSPPARWHRRLPGLWAAALLLLGLPRLSVRADGKFFVLESQNGSQGLQLEAARLSCKSRGAHLASADELRRVVQDCSFAVCTTGWLADGTLGTTVCSKGSGEQQIMRAVDVRIESNPVPGGTYSALCIKDEEKPCGDPPSFPHTILQGRTGLEMGDELLYVCAPGHIMGHRETAFTLLCNSCGEWYGLVQACGKDEAEAHIDYEDNFPDDRSVSFRELMEDSRTEADEDRGQGDSSEEAPKQDRLVSISVGRENIARDKVFVPTTGLPGAGSSVPADSPGSRLLQKHLFWFPAEAFHKPGLEKEVDDDTKKQFSAGDNHSGVKLVPGEPETKVIYGNTDGPSGPFVGKNDSKAGDPVVSSSDESWLDGYPVTEGAWRKTEAEEEEDGDRGDGSVGLDENVLVTPDQPILVEVKKPKSSTLTPSEGMTHSSVLPSQMLDVEALALRPVNASETEGIGDGDLTKYQSTLPWRFITEESPMATLSYELTSSTLEILTVNTVKQTPNHIPSTIMATTQPPVETTVPEIQDSFPYLLSEDFFGQEGPGPGASEELHPTLESCVGDGCPGLSRGPVIATIVTVLCLLLLLAGVGMVWGYRKCQHKSSVYKLNVGQRQARHYHQQIEMEKV

SEQ ID NO: 26669 - protein, 32 aa, Homo sapiens
LGSLSISRTSDPMPFFYFSVSLLPGKPFCGKQ

SEQ ID NO: 26670 - protein, 365 aa, Homo sapiens
MAPKLITVLCLGFCLNQKICPHAGAQDKFSLSAWPSPVVPLGGRVTLSCHSHLRFVIWTIFQTTGTRSHELHTGLSNNITISPVTPEHAGTYRCVGIYKHASKWSAESNSLKIIVTGLFTKPSISAHPSSLVHAGARVSLRCHSELAFDEFILYKEGHIQHSQQLDQGMEAGIHYVEAVFSMGPVTPAHAGAYRCCGCFSHSRYEWSAPSDPLDIVITGKYKKPSLSTQVDPMMRLGEKLTLFCSSEISFDQYHLFRHGVAHGQWLSGGQRHREAFQANFSVGRATPVPGGTYRCYGSFNDSPYKPPVTRCNFTPQETLRVLLCHSQNPPLNLTPPWQTQSPRKANGRMKRSLQQKRHRRSYMPS

SEQ ID NO: 26671 - protein, 89 aa, Homo sapiens
MGLAEGNRRAARRRRRQVARSRAGAGPGHGRLGAAVRVVAALLRAEGPGLPAAVAEGLCRCLQEEHLTVLSGATKARGGRCRGPAATTG

SEQ ID NO: 26672 - protein, 121 aa, Homo sapiens
LRAWVSSMWPGLTCYPPHWVRTQRLLSGPWVPGSGVSGQALAVAPDGKLLFSGGHWDGSLRVTALPRGKLLSQLSCHLDVVTCLALDTCGIYLISGSRDTTCMVWRLLHQVCLVGSSVGPP

SEQ ID NO: 26673 - protein, 29 aa, Homo sapiens
LSRLSDAGAERPGRKGVQPVVCKALVGTC

SEQ ID NO: 26674 - protein, 48 aa, Homo sapiens
LGHWSHHVHPVSGQMDKQACSQMGWGHVSVAFLCDPSPMQAFRQSTFL

SEQ ID NO: 26675 - protein, 111 aa, Homo sapiens
LRGKEVGEWKWKDAAPPDLPRGLMHVHECAHGQTCACPSTAGRMRLSTLAPPSKSTSTPWYVVEHQGRLSSLPSIFRDCREEGSTHSTVPLSTALFHWAHLLLKTAPCLGL

SEQ ID NO: 26676 - protein, 83 aa, Homo sapiens
MGPEKPRDGAETVQYARMPGEGQFTPRVHPYYGGSRRSPSHPSLATRCYWGQARMGAEGEGSRGMEVEGCSPPRPAERPHACA

SEQ ID NO: 26677 - protein, 39 aa, Homo sapiens
LIIVSRGVRRVRKPLPGSLWKPHLQSHPSDVLKIVTSCN

SEQ ID NO: 26678 - protein, 57 aa, Homo sapiens
VTATPEMRHQRVPLHETPVTIRSLKCGGGVSFLSEDQKPFKNNSFLSFYSNQHFLFY

SEQ ID NO: 26679 - protein, 126 aa, Homo sapiens
LGMAGSAMSSKFFLVALAIFFSFAQVVIEANSWWSLGMNNPVQMSEVYIIGAQPLCSQLAGLSQGQKKLCHLYQDHMQYIGEGAKTGIKECQYQFRHRRWNCSTVDNTSVFGRVMQIGRKTFKIFF

SEQ ID NO: 26680 - protein, 52 aa, Homo sapiens [sequence omitted]

SEQ ID NO: 26681 - protein, 18 aa, Homo sapiens
LRRADREVRRSRRSWLTQ

SEQ ID NO: 26682 - protein, 42 aa, Homo sapiens
LQPRGRGGFINQNSTGVNFPGEVFAENGKNQRVAVVLFNQMV

SEQ ID NO: 26683 - protein, 53 aa, Homo sapiens
LNPSRLELPPPSLQACHALHPILPLKGREGRMCLGTLRPTNDSALMEQPSVWG

SEQ ID NO: 26684 - protein, 91 aa, Homo sapiens
LNPSRLELPPPSLQACHALHPILPLKGREGRMCLGTLRPTNDSALMEQPSVWGKVLEVHSFRKPLTSLYHALSEKLRIRKEQDPQETLMSG

SEQ ID NO: 26685 - protein, 71 aa, Homo sapiens
LDLLLSLQTLRAQSPSSFMKQGVPSETQVFIETCFVLGNVPDVGDKMETSEMKMQRQQGKPYMFMDSHAKV

SEQ ID NO: 26686 - protein, 17 aa, Homo sapiens
LCWAMCQMLGIKWRLQK

SEQ ID NO: 26687 - protein, 534 aa, Homo sapiens
LQPSPAPSPTPRHPCTTCSGSPGGLWDLLCAPRGRQAPNPCLEDGLSRLHHQQEEEEKKLFRDTPFCGCFAAAASAAADPSPRVRTPQRWGRWVRRAPGGGHQRSPALSCPAHQHLLAPSFLPQPFREGTMIWKRSAVLRFYSVCGLLLQAAASKNKVKGSQGQFPLTQNVTVVEGGTAILTCRVDQNDNTSLQWSNPAQQTLYFDDKKALRDNRIELVRASWHELSISVSDVSLSDEGQYTCSLFTMPVKTSKAYLTVLGVPEKPQISGFSSPVMEGDLMQLTCKTSGSKPAADIRWFKNDKEIKDVKYLKEEDANRKTFTVSSTLDFRVDRSDDGVAVICRVDHESLNATPQVAMQVLEIHYTPSVKIIPSTPFPQEGQPLILTCESKGKPLPEPVLWTKDGGELPDPDRMVVSGRELNILFLNKTDNGTYRCEATNTIGQSSAEYVLIVHDPNALAGQNGPDHALIGGIVAVVVFVTLCSIFLLGRYLARHKGTYLTNEAKGAEDAPDADTAIINAEGSQVNAEEKKEYFI

SEQ ID NO: 26688 - protein, 186 aa, Homo sapiens
LILMGKQNIPLDGQEAEEIPEGLFTLDNFQALLECQINSGEEVLRKRFETTAVNTLFSSKTQQRQMVEICESCIREETLREERESHFFSIITDDVVDIAGEEHLTVLVGFVDESHSLREEFIGFLPYEADAEILAVKFHTMITEKWGLNMKHCRGQAYIVSSGFSSKMKVVASRLLEKYPQAIYTL

SEQ ID NO: 26689 - protein, 159 aa, Homo sapiens [sequence omitted]

SEQ ID NO: 26690 - protein, 181 aa, Homo sapiens [sequence omitted]

SEQ ID NO: 26691 - protein, 282 aa, Homo sapiens
LQINPASTINPDHLSYYCFIGRFIAMALFHGKLIDTGFSLPFYKHMLSKKLTIKDLESIDTEFYNSLIWIRDNNIEECGLELYFSVDMESWGKVTSHDLKLGVSNILVTEENKDEYIGLMTEWHFSRGVQEQTKAFLDGFNGVVPHQWLQYFNEKELEVTLCGTQQVDLADWQRNTVYQHYTRNSKQIIRFWQFVKETDNEVRMLLLQFVTGTCRLSLGGFAELMGSNGPQKFCIEKVGKDTWLPRSHTCFNLLDLPPYKSYEQLKEKLLFAIEETEGCGQE

SEQ ID NO: 26692 - protein, 176 aa, Homo sapiens
LSSGPVLIYPCQCFVIIMSWRISPATPCCRELTFHLCIFCLETAYCRVGLGICYDMRFAELAQIYAQRGCQLLVYPGAFNLTTGPAHWELLQRSRAVDNQVYVATASPARDDKASYVAWGHSTVVNPWGEVLAKAGTEEAIVYSDIDLKKLAEIRQQIPVFRQKRSDLYAVEMKKP

SEQ ID NO: 26693 - protein, 60 aa, Homo sapiens
LKDKRLVVLDEELEGISPDELKDELPERQPRFIVYSYKYQHNGWESSISSVLYFLQSCWM

SEQ ID NO: 26694 - protein, 362 aa, Homo sapiens
MTQELSFQKFIEQSDLLGELKYDFNEKDEFRHTETQRPFVFNYYENVLEKNSKRYQALGHLLEQYIYELLEKVCKLEKVYIPPEADKEEPRSFFFMSEKALTNHHSALLILLQDHGVFRAGQWSQQAIIHHGLQHGSQIPCIQMALQAHYDVIVLNPNDNFVEPKVEKEWKGLLTQNIESSSLKMVQGGSFFSLQHPPKCIPKRCSNTPEEHTAYIWDYFISKTEGKDIAFIVHGYGGLVFMDLLVRRRWEVMSKVYAVALIDSEHHVGHQLGSDVQLLAWIKHHCREWVTSPKPLDKPAATVFKKEFPMVSAGTEKYILAPSSSLQSIFKYFKKALKARTTINFSRMPIVTRSSTKRKQSA

SEQ ID NO: 26695 - protein, 47 aa, Homo sapiens
VKKTQSISKQAMSARRAFRTTCLLGGKKITSRFSLFKYFPRSLLNFR

SEQ ID NO: 26696 - protein, 205 aa, Homo sapiens
MTMDDDSSTTDASQLGTCADYIGGSHYVIQPHDDTEESMSDQEDTNGSKVSFREQDMYLPITNVARIMKNAIPQTGKIAKDVKECVQECVSELISFITSEASERCHQEKQKTINGEDILFAMSTLGLDSYVEPLKLYLQKFREAMKGEKGVGGAVTATDGLSEELTEEAFTNQLPAGLITTDGQQQNVMVYTTDFWCSTNSVYMI

SEQ ID NO: 26697 - protein, 50 aa, Homo sapiens
LFVSLFVSLPDLPAGLLFFPFSSLAVLYLMVWGVQIAGCGLVSALHFRSR

SEQ ID NO: 26698 - protein, 61 aa, Homo sapiens
LFRVELWVIIGLFFALNMTALHCTTEMYLLVLGESVLRMGKKKANYGSRSITKMQSYFHHA

SEQ ID NO: 26699 - protein, 340 aa, Homo sapiens
LYLSSTVSPGIISLSTRSLRRYGELANTPFGLFLPPCFCVPWECCCAYASGLFLELQWTGICDSTMGLSNILFVMAFLLSGAAPLKIQAYFNETADLPCQFANSQNQSLSELVVFWQDQENLVLNEVYLGKEKFDSVHSKYMGRTSFDSDSWTLRLHNLQIKDKGLYQCIIHHKKPTGMIRIHQMNSELSVLANFSQPEIVPISNITENVYINLTCSSIHGYPEPKKMSVLLRTKNSTIEYDGVMQKSQDNVTELYDVSISLSVSFPDVTSNMTIFCILETDKTRLLSSPFSIGTNTMEREESEQTKKREKIHIPERSDEAQRVFKSSKTSSCDKSDTCF

SEQ ID NO: 26700 - protein, 1322 aa, Homo sapiens
LCPPPPLRTGVPRCPAAAQGPGPPPTCDPSLVPLLGRPPSPWRPPARLPGEEEGDDEAEGGMSGSKSVSPPGYAAQKTAAPAPRGGPEHRSAWGEADSRANGYPHAPGGSARGSTKKPGGAVTPQQQQRLASRWRSDDDDDPPLSGDDPLAGGFGFSFRSKSAWQERGGDDCGRGSRRQRRGAASGGSTRAPPAGGGGGSAAAAASAGGTEVRPRSVEVGLEERRGKGRAADELEAGAVEGGEGSGDGGSSADSGSGAGPGAVLSLGACCLALLQIFRSKKFPSDKLERLYQRYFFRLNQSSLTMLMAVLVLVCLVMLAFHAARPPLQLPYLAVLAAAVGVILIMAVLCNRAAFHQDHMGLACYALIAVVLAVQVVGLLLPQPRSASEGIWWTVFFIYTIYTLLPVRMRAAVLSGVLLSALHLAIALRTNAQDQFLLKQLVSNVLIFSCTNIVGVCTHYPAEVSQRQAFQETRECIQARLHSQRENQQQERLLLSVLPRHVAMEMKADINAKQEDMMFHKIYIQKHDNVSILFADIEGFTSLASQCTAQELVMTLNELFARFDKLAAENHCLRIKILGDCYYCVSGLPEARADHAHCCVEMGMDMIEAISLVREVTGVNVNMRVGIHSGRVHCGVLGLRKWQFDVWSNDVTLANHMEAGGKAGRIHITKATLNYLNGDYEVEPGCGGERNAYLKEHSIETFLILRCTQKRKEEKAMIAKMNRQRTNSIGHNPPHWGAERPFYNHLGGNQVSKEMKRMGFEDPKDKNAQESANPEDEVDEFLGRAIDARSIDRLRSEHVRKFLLTFREPDLEKKYSKQVDDRFGAYVACASLVFLFICFVQITIVPHSIFMLSFYLTCSLLLTLVVFVSVIYSCVKLFPSPLQTLSRKIVRSKMNSTLVGVFTITLVFLAAFVNMFTCNSRDLLGCLAQEHNISASQVNACHVAESAVNYSLGDEQGFCGSPWPNCNFPEYFTYSVLLSLLACSVFLQISCIGKLVLMLAIELIYVLIVEVPGVTLFDNADLLVTANAIDFFNNGTSQCPEHATKVALKVVTPIIISVFVLALYLHAQQVESTARLDFLWKLQATEEKEEMEELQAYNRRLLHNILPKDVAAHFLARERRNDELYYQSCECVAVMFASIANFSEFYVELEANNEGVECLRLLNEIIADFDEIISEDRFRQLEKIKTIGSTYMAASGLNDSTYDKVGKTHIKALADFAMKLMDQMKYINEHSFNNFQMKIGLNIGPVVAGVIGARKPQYDIWGNTVNVASRMDSTGVPDRIQVTTDMYQVLAANTYQLECRGVVKVKGKGEMMTYFLNGGPPLS

SEQ ID NO: 26701 - protein, 470 aa, Homo sapiens
MTPSLSVCSATNTRRCPSLWAPAAVPADGAVLYSLICAAPAACRHCAWHRGCNRTQTDACLPWPGSCSAGGVRGQHAVEERTADGVHRQAVVLYGAIREAPQRREHRPAGNEVWSGQQEGQSRGQWGTGLVCTGQKGKAGGRVKPQGVGGSGEALAGSCFLQQSMLWAYPGPCHLGSQCPYLPWRDRPHQPSVPCSCAISNVKKVSLELGGKSPLIIFADCDLNKAVQMGMSSVFFNKGENCIAAGRLFVEDSIHDEFVRRVVEEVRKMKVGNPLDRDTDHGPQNHHAHLVKLMEYCQHGVKEGATLVCGGNQVPRPGFFFEPTVFTDVEDHMFIAKEESFGPVMIISRFADGDLDAVLSRANATEFGLASGVFTRDINKALYVSDKLQAGTVFVNTYNKTDVAAPFGGFKQSGFGKDLGNLLLPVGLLSFIHSTNICSKPLRARSYLRCRDVALNMMAVRVRFLLGGNL

SEQ ID NO: 26702 - protein, 38 aa, Homo sapiens
VLFLPTRDHGAVAPYGAMIPRPGPGPAYGPELPWECQC

SEQ ID NO: 26703 - protein, 94 aa, Homo sapiens
VGRKGPVSSSVGPLLFRTSLREAFTKAVPSSWKKTASEMTRRTGRRRAQNAPGAAPLALADCCWWGAGVQAPVSMQIRDQKIGISTNQREASAL

SEQ ID NO: 26704 - protein, 2740 aa, Homo sapiens
LKQSQQTAGASLDTHIKTCEELKAPGKSQAKGTGQRRLKRPSQGTRRSLRESTCSCAARTRACGADQGFRRALYPTAPRAPERRAFTALRSSVQPLLESWGRFPGSGVSPDPGKAGTKVKIFTNKMKILLIIFVLIIWTETLADQSPGPGPVYADVVFLVDSSDHLGPKSFPFVKTFINKMINSLPIEANKYRVALAQYSDEFHSEFHLSTFKGRSPMLNHLKKNFQFIGGSLQIGKALQEAHRTYFSAPINGRDRKQFPPILVVLASAESEDEVEEASKALQKDGVKIISVGVQKASEENLKAMATSHFHFNLRTIRDLSTFSQNMTQIIKDVTKYKEGAVDADMQVHFPISCQKDSLADLVFLVDESLGTGGNLRHLQTFLENITSSMDVKENCMRLGLMSYSNSAKTISFLKSSTTQSEFQQQIKNLSIQVGKSNTGAAIDQMRRDGFSESYGSRRAQGVPQIAVLVTHRPSDDEVHDAALNLRLEDVNVFALSIQGANNTQLEEIVSYPPEQTISTLKSYADLETYSTKFLKKLQNEIWSQISTYAEQRNLDKTGCVDTKEADIHFLIDGSSSIQEKQFEQIKRFMLEVTEMFSIGPDKVRVGVVQYSDDTEVEFYITDYSNDIDLRKAIFNIKQLTGGTYTGKALDYILQIIKNGMKDRMSKVPCYLIVLTDGMSTDRVVEPAKRLRAEQITVHAVGIGAANKIELQEIAGKEERVSFGQNFDALKSIKNEVVREICAEKGCEDMKADIMFLVDSSWSIGNENFRKMKIFMKNLLTKIQIGADKTQIGVVQFSDKTKEEFQLNRYFTQQEISDAIDRMSLINEGTLTGKALNFVGQYFTHSKGARLGAKKFLILITDGVAQDDVRDPARILRGKDVTIFSVGVYNANRSQLEEISGDSSLVFHVENFDHLKALERKLIFRVCALHDCKRITLLDVVFVLDHSGSIKKQYQDHMINLTIHLVKKADVGRDRVQFGALKYSDQPNILFYLNTYSNRSAIIENLRKRRDTGGNTYTAKALKHANALFTEEHGSRIKQNVKQMLIVITDGESHDHDQLNDTALELRNKGITIFAVGVGKANQKELEGMAGNKNNTIYVDNFDKLKDVFTLVQERMCTEAPEVCHLQEADVIFLCDGSDRVSNSDFVTMTTFLSDLIDNFDIQSQRMKIGMAQFGSNYQSIIELKNSLTKTQWKTQIQNVSKSGGFPRIDFALKKVSNMFNLHAGGRRNAGVPQTLVVITSGDPRYDVADAVKTLKDLGICVLVLGIGDVYKEHLLPITGNSEKIITFQDFDKLKNVDVKKRIIREICQSCGKTNCFMDIVVGFDISTHVQGQPLFQGHPQLESYLPGILEDISSIKGVSCGAGTEAQVSLAFKVNSDQGFPAKFQIYQKAVFDSLLQVNVSGPTHLNAQFLRSLWDTFKDKSASRGQVLLIFSDGLQSESNIMLENQSDRLREAGLDALLVVSLNTTAHHEFSSFEFGKRFDYRTHLTIGMRELGKKLSQYLGNIAERTCCCTFCKCPGIPGPHGTRGLQAMKGSQGLKGSRGHRGEDGNPGVRGDTGPQGDKGIAGCPGAWGQKGLKGFSGPKGGHGDDGIDGLDGEEGCHGFPGIKGEKGDPGSQGSPGSRGAPGQYGEKGFPGDPGNPGQNNNIKGQKGSKGEQGRQGRSGQKGVQGSPSSRGSRGREGQRGLRGVSGEPGNPGPTGTLGAEGLQGPQGSQGNPGRKGEKGSQGQKGPQGSPGLMGAKGSTGRPGLLGKKGEPGLPGDLGPVGQTGQRGRQGDSGIPGYGQMGRKGVKGPRGFPGDAGQKGDIGNPGIPGGPGPKGFRGLALTVGLKGEEGSRGLPGPPGQRGIKGMAGQPVYSQCDLIRFLREHSPCWKEKCPAYPTELVFALDNSYDVTEESFNKTRDIITSIVNDLNIRENNCPVGARVAMVSYNSGTSYLIRWSDYNRKKQLLQQLSQIKYQDTTEPRDVGNAMRFVTRNVFKRTYAGANVRRVAVFFSNGQTASRSSIITATMEFSALDISPTVFAFDERVFLEAFGFDNTGTFQVIPVPPNGENQTLERLRRCALCYDKCFPNACIREAFLPEDSYMDVVFLIDNSRNIAKDEFKAVKALVSSVIDNFNIASDPLISDSGDRIALLSYSPWESSRRKMGTVKTEFDFITYDNQLLMKNHIQTSFQQLNGEATIGRALLWTTENLFPETPYLRKHKVIFVVSAGENYERKEFVKMMALRAKCQGYVIFVISLGSTRKDDMEELASYPLDQHLIQLGRIHKPDLNYIAKFLKPFLYSVRRGFNQYPPPMLEDACRLINLGGENIQNDGFQFVTELQEDFLGGNGFIGQELNSGRESPFVKTEDNGSDYLVYLPSQMFEPQKLMINYEKDQKSAEIASLTSGHENYGRKEEPDHTYEPGDVSLQEYYMDVAFLIDASQRVGSDEFKEVKAFITSVLDYFHIAPTPLTSTLGDRVAVLSYSPPGYMPNTEECPVYLEFDLVTYNSIHQMKHHLQDSQQLNGDVFIGHALQWTIDNVFVGTPNLRKNKVIFVISAGETNSLDKDVLRNVSLRAKCQGYSIFVFSFGPKHNDKELEELASHPLDHHLVQLGRTHKPDWNYIIKFVKPFVHLIRRAINKYPTEDMKATCVNMTSPNPENGGTENTVLLLPGIYEIKTENGDLFDEFDSQAQHLLVLGNNHSSGSETATDLMQKLYLLFSTEKLAMKDKEKAHLEEISALVVDKQQEKEDKEMEATDI

SEQ ID NO: 26705 - protein, 2736 aa, Homo sapiens
LKQSQQTAGASLDTHIKTCEELKAPGKSQAKGTGQRRLKRPSQGTRRSLRESTCSCAARTRACGADQGFRRALYPTAPRAPERRAFTALRSSVQPLLESWGRFPGSGVSPDPGKAGTKVKIFTNKMKILLIIFVLIIWTETLADQSPGPGPVYADVVFLVDSSDHLGPKSFPFVKTFINKMINSLPIEANKYRVALAQYSDEFHSEFHLSTFKGRSPMLNHLKKNFQFIGGSLQIGKALQEAHRTYFSAPINGRDRKQFPPILVVLASAESEDEVEEASKALQKDGVKIISVGVQKASEENLKAMATSHFHFNLRTIRDLSTFSQNMTQIIKDVTKYKEGAVDADMQVHFPISCQKDSLADLVFLVDESLGTGGNLRHLQTFLENITSSMDVKENCMRLGLMSYSNSAKTISFLKSSTTQSEFQQQIKNLSIQVGKSNTGAAIDQMRRDGFSESYGSRRAQGVPQIAVLVTHRPSDDEVHDAALNLRLEDVNVFALSIQGANNTQLEEIVSYPPEQTISTLKSYADLETYSTKFLKKLQNEIWSQISTYAEQRNLDKTGCVDTKEADIHFLIDGSSSIQEKQFEQIKRFMLEVTEMFSIGPDKVRVGVVQYSDDTEVEFYITDYSNDIDLRKAIFNIKQLTGGTYTGKALDYILQIIKNGMKDRMSKVPCYLIVLTDGMSTDRVVEPAKRLRAEQITVHAVGIGAANKIELQEIAGKEERVSFGQNFDALKSIKNEVVREICAEKGCEDMKADIMFLVDSSWSIGNENFRKMKIFMKNLLTKIQIGADKTQIGVVQFSDKTKEEFQLNRYFTQQEISDAIDRMSLINEGTLTGKALNFVGQYFTHSKGARLGAKKFLILITDGVAQDDVRDPARILRGKDVTIFSVGVYNANRSQLEEISGDSSLVFHVENFDHLKALERKLIFRVCALHDCKRITLLDVVFVLDHSGSIKKQYQDHMINLTIHLVKKADVGRDRVQFGALKYSDQPNILFYLNTYSNRSAIIENLRKRRDTGGNTYTAKALKHANALFTEEHGSRIKQNVKQMLIVITDGESHDHDQLNDTALELRNKGITIFAVGVGKANQKELEGMAGNKNNTIYVDNFDKLKDVFTLVQERMCTEAPEVCHLQEADVIFLCDGSDRVSNSDFVTMTTFLSDLIDNFDIQSQRMKIGMAQFGSNYQSIIELKNSLTKTQWKTQIQNVSKSGGFPRIDFALKKVSNMFNLHAGGRRNAGVPQTLVVITSGDPRYDVADAVKTLKDLGICVLVLGIGDVYKEHLLPITGNSEKIITFQDFDKLKNVDVKKRIIREICQSCGKTNCFMDIVVGFDISTHVQGQPLFQGHPQLESYLPGILEDISSIKGVSCGAGTEAQVSLAFKVNSDQGFPAKFQIYQKAVFDSLLQVNVSGPTHLNAQFLRSLWDTFKDKSASRGQVLLIFSDGLQSESNIMLENQSDRLREAGLDALLVVSLNTTAHHEFSSFEFGKRFDYRTHLTIGMRELGKKLSQYLGNIAERTCCCTFCKCPGIPGPHGTRGLQAMKGSQGLKGSRGHRGEDGNPGVRGDTGPQGDKGIAGCPGAWGQKGLKGFSGPKGGHGDDGIDGLDGEEGCHGFPGIKGEKGDPGSQGSPGSRGAPGQYGEKGFPGDPGNPGQNNNIKGQKGSKGEQGRQGRSGQKGVQGSPSSRGSRGREGQRGLRGVSGEPGNPGPTGTLGAEGLQGPQGSQGNPGRKGEKGSQGQKGPQGSPGLMGAKGSTGRPGLLGKKGEPGLPGDLGPVGQTGQRGRQGDSGIPGYGQMGRKGVKGPRGFPGDAGQKGDIGNPGIPGGPGPKGFRGLALTVGLKGEEGSRGLPGPPGQRGIKGMAGQPVYSQCDLIRFLREHSLFKNAYPTELVFALDNSYDVTEESFNKTRDIITSIVNDLNIRENNCPVGARVAMVSYNSGTSYLIRWSDYNRKKQLLQQLSQIKYQDTTEPRDVGNAMRFVTRNVFKRTYAGANVRRVAVFFSNGQTASRSSIITATMEFSALDISPTVFAFDERVFLEAFGFDNTGTFQVIPVPPNGENQTLERLRRCALCYDKCFPNACIREAFLPEDSYMDVVFLIDNSRNIAKDEFKAVKALVSSVIDNFNIASDPLISDSGDRIALLSYSPWESSRRKMGTVKTEFDFITYDNQLLMKNHIQTSFQQLNGEATIGRALLWTTENLFPETPYLRKHKVIFVVSAGENYERKEFVKMMALRAKCQGYVIFVISLGSTRKDDMEELASYPLDQHLIQLGRIHKPDLNYIAKFLKPFLYSVRRGFNQYPPPMLEDACRLINLGGENIQNDGFQFVTELQEDFLGGNGFIGQELNSGRESPFVKTEDNGSDYLVYLPSQMFEPQKLMINYEKDQKSAEIASLTSGHENYGRKEEPDHTYEPGDVSLQEYYMDVAFLIDASQRVGSDEFKEVKAFITSVLDYFHIAPTPLTSTLGDRVAVLSYSPPGYMPNTEECPVYLEFDLVTYNSIHQMKHHLQDSQQLNGDVFIGHALQWTIDNVFVGTPNLRKNKVIFVISAGETNSLDKDVLRNVSLRAKCQGYSIFVFSFGPKHNDKELEELASHPLDHHLVQLGRTHKPDWNYIIKFVKPFVHLIRRAINKYPTEDMKATCVNMTSPNPENGGTENTVLLLPGIYEIKTENGDLFDEFDSQAQHLLVLGNNHSSGSETATDLMQKLYLLFSTEKLAMKDKEKAHLEEISALVVDKQQEKEDKEMEATDI

SEQ ID NO: 26706 - protein, 84 aa, Homo sapiens
LKMWQRPEPGERLNPFGQGEGERGKGLVLLFKQEEDYKPPSTICQALEFEPPSSGVTQMQRKPGLLLTFLRGGKSINGDPHMYK

SEQ ID NO: 26707 - protein, 119 aa, Homo sapiens
MHTHTHARPHRPTRTHSCPRPRSAPGSPVRARARKDTEKPPAESAAAPWDAALSRRCCLGLVSACGPSAGDGPGLSTTAPPGIRSGCDGRNVNGHQNGYCRAGLDGQSCVRVGRSQWLR

SEQ ID NO: 26708 - protein, 76 aa, Homo sapiens
LASIEIDSLYEGINFYTSITHARFEEKNADLFHGTLDPIEKALRDAKLEKSQIHDIVLIGGSTHIPDSETSPRPLQ

SEQ ID NO: 26709 - protein, 34 aa, Homo sapiens
LGMQILENRLYFAEGSGCHEHVSSKRGFHYPGNV

SEQ ID NO: 26710 - protein, 61 aa, Homo sapiens
LRHENHLNPRGRVCSEPRLHHCTPAWRAEQDSVSKKRKKFYYPYFFFNIIILKVKTEKRLR

SEQ ID NO: 26711 - protein, 417 aa, Homo sapiens
LEQNPQQPTDSALRLPLPLTSTLPLPSLSSSWRGGGLGPTAIRPNGGGGVWPCSVHRVHCWRCLALSSTADCRGRSAAGLGLPPGAQGRARSPRHPFSCALFVSTTGSSSGHHGPQLTAASSPSVFPGLHEEPPQASPSRPLNGLLRLGLPGDMYARPEPFPPGPAARSDALAAAAALHGYGGMNLTVNLAAPHGPGAFFRYMRQPIKQELICKWLAADGTATPSLCSKTFSTMHELVTHVTVEHVGGPEQANHICFWEECPRQGKPFKAKYKLVNHIRVHTGEKPFPCPFPGCGKVFARSENLKIHKRTHTGEKPFRCEFEGCERRFANSSDRKKHSHVHTSDKPYTCKVRGCDKCYTHPSSLRKHMKVHGRSPPPSSGYDSATPSALVSPSSDCGHKSQVASSAAVAARTADLSE

SEQ ID NO: 26712 - protein, 19 aa, Homo sapiens
LALTFLYATNPGGSFFLGG

SEQ ID NO: 26713 - protein, 58 aa, Homo sapiens
VCLVRVKDEVISHIVYIVKQHTQKFLSHKTSTYCMLTRRKDNIFRKSTAHCCLYTLYI

SEQ ID NO: 26714 - protein, 72 aa, Homo sapiens
VSADICGKKIYFVYLLYQRGVWGRMVVFFFFISCEKNVTDLHIFVCTMVCVCMCVVCVCFKFSLLFLFFGWQ

SEQ ID NO: 26715 - protein, 128 aa, Homo sapiens
VGRARGGQSQPRGAAAGRCAEQGPQLRSSAIRAPRTLRPWRRRALGRSRYWDLKSEGRERGPEGDLEEGSGSHVRLALQVHFHSSLRPLPWGVMFCYRDPRYQIAPGLIWGLGICHSAVQTLIFFSSF

SEQ ID NO: 26716 - protein, 165 aa, Homo sapiens
LANHPFFNPDNPKVNQAIQSFCLAKIEEMLENAKWEHLGNSCQPEKSLIPLRVDYSGGFEPFNVLRFSQKFVHRVANPKDIIHFFRHREQKEKTGEEINFGKLTAKPSSEGTTLRVEDLVKQYFQTEEKNVPLSLLTERGMGEAVQEFVDKEEKDAIEELMKCQL

SEQ ID NO: 26717 - protein, 257 aa, Homo sapiens
LLAEREDSGDAEAHAFKSPSKEKEKDTLEDKFKSNNLEREQEHLDRIVKESGGKLTRRLVNSQCEFERRKPDGTTTLGLLHPVDPIVGEPGYCPVRLGMTTGRLQSGVNTLQGFKEDKRNKVTPVLYLNYGPYGSYAPHYDSTFANISKDDSDLIYSTYGEDSDLPSVFSIHEFLATCQDYPYVMADSLLDVLTKGGHSRTLQEMEMSLPEDEGHTKTLDTAKKNGDYRSRAPRAFGVQYSRQAHSAESSNKFWRSS

SEQ ID NO: 26718 - protein, 168 aa, Homo sapiens
LKMKAILRHLTQQKKMEITEVEPPGRLESNTQDRLIALKAVTNFGVPVEVFDSEEAEIFQKKFGETTRLLRELQEAQNERLSTRPPPNMICLLGPSYREMHLAEQVTNNLKELAQQVTPGDIVSMYGVRKAMGISIPSPVMENNFVDLTEDTEKPKKTDVAECGPGGS

SEQ ID NO: 26719 - protein, 198 aa, Homo sapiens
LLVEDAEGPTPLVSGLLAASGLLFTHLVVLTPKAQRLREGKPGWVHPHGVEQRNKALDWLRGRGSAVGGKKDPSPPGTQGVVYFADSGNTYSWELFEEMRWTRGVSVWPVGLVGGLRVKGPQVQDSRVVGFHTAWEPNGPFPVDMAGFAVALPLLLAKPNAQFDSTAPRSHLESSLLSHLVDPKDLEPRAANCTRVLV

SEQ ID NO: 26720 - protein, 138 aa, Homo sapiens [sequence omitted]

SEQ ID NO: 26721 - protein, 38 aa, Homo sapiens
LRKLLSMCEKEKKKRKVKKRKKEKGQAPEWISQGATRQ

SEQ ID NO: 26722 - protein, 49 aa, Homo sapiens
MYVTSDTEVGYLLNQDAQQFEPLKFGAAWVCGESRLVIFPHGCDSSSLF

SEQ ID NO: 26723 - protein, 26 aa, Homo sapiens
LLQPLLPSLDCKVFLFGKVMESSQLH

SEQ ID NO: 26724 - protein, 34 aa, Homo sapiens
LQWSTGIDIPLPLLPSLDCKVFLFGKVMESSQLH

SEQ ID NO: 26725 - protein, 54 aa, Homo sapiens
LFSIWKKESLTGFFGKVAIHGMNEMFSFYSRDCSGKARLGLGGWCKAMWVKAGG

SEQ ID NO: 26726 - protein, 16 aa, Homo sapiens
MKCSLSIPGIAVAKLG

SEQ ID NO: 26727 - protein, 11 aa, Homo sapiens
LSQGIAVAKLG

SEQ ID NO: 26728 - protein, 16 aa, Homo sapiens
LELQPLTKGIAVAKLG

SEQ ID NO: 26729 - protein, 11 aa, Homo sapiens
LLQGIAVAKLG

SEQ ID NO: 26730 - protein, 13 aa, Homo sapiens
MDISNLEIMFHSR

SEQ ID NO: 26731 - protein, 46 aa, Homo sapiens
LYFEERRICMHFEKPNLTLSGFPRTKTSHNLREKGEPSGGRKVDWK

SEQ ID NO: 26732 - protein, 17 aa, Homo sapiens
VQIQLRNNVSFKIRLVA

SEQ ID NO: 26733 - protein, 9 aa, Homo sapiens
LSTLWLCFP

SEQ ID NO: 26734 - protein, 8 aa, Homo sapiens
MLCQPLGL

SEQ ID NO: 26735 - protein, 31 aa, Homo sapiens
MSWHHSLSDSPTWLPTSKCQEPHYLIERTVF

SEQ ID NO: 26736 - protein, 8 aa, Homo sapiens
MSRTTLSN

SEQ ID NO: 26737 - protein, 39 aa, Homo sapiens
LDRLARSSQTMSLTLPFSGYFEHKRRKEMIPELYLVFKN

SEQ ID NO: 26738 - protein, 52 aa, Homo sapiens
MQIHPPLTNALFFVRAHTHTHTHTHTHTHRHTQNQHPNGRGGPSKTSRTWIM

SEQ ID NO: 26739 - protein, 52 aa, Homo sapiens
MAWTLQVASKIDFDPLTLSHGGIASTLSKDLARNDSFPLSVIGDSINSLESK

SEQ ID NO: 26740 - protein, 232 aa, Homo sapiens [sequence omitted]

SEQ ID NO: 26741 - protein, 550 aa, Homo sapiens
LRRRGRCKGRREAASGGSLFPQKLLNAETSQSGIRDAESTMDGFYDQQVPFMVPGKSRSEECRGRPVIDRKRKFLDTDLAHDSEELFQDLSQLQEAWLAEAQVPDDEQFVPDFQSDNLVLHAPPPTKIKRELHSPSSELSSCSHEQALGANYGEKCLYNYCAYDRKPPSGFKPLTPPTTPLSPTHQNPLFPPPQATLPTSGHAPAAGPVQGVGPAPAPHSLPEPGPQQQTFAVPRPPHQPLQMPKMMPENQYPSEQRFQRQLSEPCHPFPPQPGVPGDNRPSYHRQMSEPIVPAAPPPPQGFKQEYHDPLYEHGVPGMPGPPAHGFQSPMGIKQEPRDYCVDSEVPNCQSSYMRGGYFSSSHEGFSYEKDPRLYFDDTCVVPERLEGKVKQEPTMYREGPPYQRRGSLQLWQFLVTLLDDPANAHFIAWTGRGMEFKLIEPEEVARRWGIQKNRPAMNYDKLSRSLRYYYEKGIMQKVAGERYVYKFVCDPDALFSMAFPDNQRPFLKAESECHLSEEDTLPLTHFEDSPAYLLDMDRCSSLPYAEGFAY

SEQ ID NO: 26742 - protein, 126 aa, Homo sapiens
LRRRGRCKGRREAASGGSLFPQKLLNAETSQSGIRDAESTMDGFYDQQVPFMVPGKSRSEECRGRPVIDRKRKFLDTDLAHDSEELFQDLSQLQEAWLAEAQVPDDEQFVPDFQSDNRKMSCFPLS

SEQ ID NO: 26743 - protein, 37 aa, Homo sapiens
MQCSLLLNRRSQRALCFFLWEYLNLVSMLITDQKYRF

SEQ ID NO: 26744 - protein, 43 aa, Homo sapiens
LHKAKFIFGLYFLIMVPHHHPRFPMVLIRNKSFNKSFFFLSCT

SEQ ID NO: 26745 - protein, 26 aa, Homo sapiens
LGFLEVVMQEVSRKGRTPGFEQNFGL

SEQ ID NO: 26746 - protein, 430 aa, Homo sapiens
LRLQTCSSPSPSRPARLSVSSLPPYWTAPVHFRAPDIWYRLGPGTRSRWPRRGSWAASLVPRGPSPAALVTSPCPPDPLRSPACEPCRPDFAPRPALLLRSGPRSAPAVTGKPALKGQPGPWPGMAEVSIDQSKLPGVKEVCRDFAVLEDHTLAHSLQEQEIEHHLASNVQRNRLVQHDLQVAKQLQEEDLKAQAQLQKRYKDLEQQDCEIAQEIQEKLAIEAERRRIQEKKDEDIARLLQEKELQEEKKRKKHFPEFPATRAYADSYYYEDGGMKPRVMKEAVSTPSRMAHRDQEWYDAEIARKLQEEELLATQVDMRAAQVAQDEEIARLLMAEEKKAYKKAKEREKSSLDKRKQDPEWKPKTAKAANSKSKESDEPHHSKNERPARPPPPIMTDGEDADYTHFTNQQSSTRHFSKSESSHKGFHYKH

SEQ ID NO: 26747 - protein, 606 aa, Homo sapiens
LRLQTCSSPSPSRPARLSVSSLPPYWTAPVHFRAPDIWYRLGPGTRSRWPRRGSWAASLVPRGPSPAALVTSPCPPDPLRSPACEPCRPDFAPRPALLLRSGPRSAPAVTGKPALKGQPGPWPGMAEVSIDQSKLPGVKEVCRDFAVLEDHTLAHSLQEQEIEHHLASNVQRNRLVQHDLQVAKQLQEEDLKAQAQLQKRYKDLEQQDCEIAQEIQEKLAIEAERRRIQEKKDEDIARLLQEKELQEEKKRKKHFPEFPATRAYADSYYYEDGDQPGSRRARELGSGFSRPCRLQRDGKTVKHKKEKPEHPLENLEEPEQHCSSKRSLSSSSSGKGRDNPHINNEQHERKRSTQERPRRPLLPTISGEVFLSTECDDWETKINHQTRNWEKQSRHQDRLSPKSSQKAGLHCKEVVYGRDHGQGEHRKRRHRPRTPPFSESEEQLHLHDAGMKPRVMKEAVSTPSRMAHRDQEWYDAEIARKLQEEELLATQVDMRAAQVAQDEEIARLLMAEEKKAYKKAKEREKSSLDKRKQDPEWKPKTAKAANSKSKESDEPHHSKNERPARPPPPIMTDGEDADYTHFTNQQSSTRHFSKSESSHKGFHYKH

SEQ ID NO: 26748 - protein, 29 aa, Homo sapiens
LKCLTINREKKGENRTKQRHLLEMGGLLM

SEQ ID NO: 26749 - protein, 379 aa, Homo sapiens
LRRHESCHTGIKVVSQPKKTPTTVFPLISTMAGDSSRTSLVSTIAGILSTVTTSSSGTNPSSSASTTALPVTQSVKKPSKPVKKNQACEMCGKAFRDVYHLSRHKLSHSDEKPFECPICNQRFKRKDRMTYRVRSHEGGITKPYTCSVCGKGFSRPDPLSCHVKHVHSTERPFKCQTCTAAFAAKDRLRTHMVRHEDKVSCNICGKLLSAAYITSHLKTHGQSQSINCNTCKQGISKTSMSEETSNQKQQQQQQQQQQHVTSWPGKQVATLRLWEEAVKARKKEAANLCQTSTAATTPVTLTTPFNITSSVSSGAMSNPVTLAAAMSMRSSVNVSRAVNITSPMNIGHPVTITSPLSMTSPLTLTTQINLPTPSLPQRI

SEQ ID NO: 26750 - protein, 78 aa, Homo sapiens
LCWGCQLLFWCPGDEEGIWREDCHPLANVSKKQLSMGEKRGDPSSRNTWPVFHLFIGVDRTSQPFPTSPHHDGWEPGL

SEQ ID NO: 26751 - protein, 25 aa, Homo sapiens
MSCWCSESFRFGRISDVWIRDVLPI

SEQ ID NO: 26752 - protein, 51 aa, Homo sapiens
VMTESAFCTARGQHITHKKQLCSCDGGLSTRKEWTVGARSSLNKSESHYAA

SEQ ID NO: 26753 - protein, 26 aa, Homo sapiens
MYNSSCMCQCHNCLYTLLHSGEEGVH

SEQ ID NO: 26754 - protein, 19 aa, Homo sapiens
LQVECVHYLLRIIPQKSWE

SEQ ID NO: 26755 - protein, 35 aa, Homo sapiens
LQHFYLCLMPAATWLVLLLLLWLSLGVKTGWSAVA

SEQ ID NO: 26756 - protein, 161 aa, Homo sapiens
VTDPGVLDSIWPPAAFKQVFSGKRLEAEFPPHHSQSTFRKTSPAPGGPAGEGPLQSLTCLIGEKDLRLLEKLGDGSFGVVRRGEWDAPSGKTVSSLCPASAAEAWDPGLVVALLPPTRVWMGLGMRHSVAHPRVRAQDFWGFIYLFIFEMESRSVAQAGVQ

SEQ ID NO: 26757 - protein, 126 aa, Homo sapiens
LSVTAAPAGRAAAGERLGGLRWEHTFGQRHQVTRTPRGGPLPASPRPSPPTPSPAAPAGRGPASPFCSRRPPGAQTWKPRSSRGRPVRPLLSNQRAVWARPGAAQRSDCRGQGRSLLWGSRRCLES

SEQ ID NO: 26758 - protein, 113 aa, Homo sapiens
LGCPEKPTSPLRGPGRPPTPLTMLGPQPDLPCVPRSVLRSGCRAVAWRKPGRCHQSFGEGEALSGKPSGSHEGGNTCGALVGGGAALQRSKKKFQKNEQQPPRPGIGAGDKGS

SEQ ID NO: 26759 - protein, 137 aa, Homo sapiens
LIPGMELGASSSVPRAPGVQPKAPILLVGVFSITLKTRANLLLHTPQIQKVPGNVDEVLKETTGLVSHVHTEKKTSHFYFYFLRQSFALVAQAGVQWCNFSSLQSLPPGFKQFSCLSLPSSWNCRHPSPRPANFMYF

SEQ ID NO: 26760 - protein, 109 aa, Homo sapiens
LQKAEDFWLKAILMKTPHPAWQPGYKSWAPPLCLPPAPFLLVGADPAHTDTASAPEPFPGDPGSTPGGRHLGHLPYFSGAYPPSVTCQTWTAFSCPVLELAPGCLEDPG

SEQ ID NO: 26761 - protein, 111 aa, Homo sapiens
VGPRCRQVSLRLMRPLPLLQGHPDLQSIQSLCPAHASLPAGTPGRLQGPTRGQLCPAGDPEEPGGCLRAGCLAEKAWALPLVPRRSAGAMGIGAGDGGGQEWGHSAPLLLR

SEQ ID NO: 26762 - protein, 37 aa, Homo sapiens
LGSGSVTSKAMRVVRPCLVSRPPITDRAGTAGPNALR

SEQ ID NO: 26763 - protein, 99 aa, Homo sapiens
VLQKLFLYPSRSTTKRNVLNIIIYIVGKFNWKGTIKAILKQAPDNEITIKKLRKKVLAQYYTVTDEHHRSEEELLVIFNKKISKNPTFKLLKDKVKLVK

SEQ ID NO: 26764 - protein, 62 aa, Homo sapiens
VSFASRHDSEASPAMCNCVFTALGPVPPSLNGVTASNSQDRRLNRMTKWRRRLSSQRSQPND

SEQ ID NO: 26765 - protein, 274 aa, Homo sapiens
LPSDSPRIPPAGAETPGRGSCRNYLPSSSPPPPEPSSFPSPPTSRGGPGSRDTMSDSEEESQDRQLKIVVLGDGASGKTSLTTCFAQETFGKQYKQTIGLDFFLRRITLPGNLNVTLQIWDIGGQTIGGKMLDKYIYGAQGVLLVYDITNYQSFENLEDWYTVVKKVSEESETQPLVALVGNKIDLEHMRTIKPEKHLRFCQENGFSSHFVSAKTGDSVFLCFQKVAAEILGIKLNKAEIEQSQRVVKADIVNYNQEPMSRTVNPPRSSMCAVQ

SEQ ID NO: 26766 - protein, 273 aa, Homo sapiens
LPSDSPRIPPAGAETPGRGSCRNYLPSSSPPPPEPSSFPSPPTSRGGPGSRDTMSDSEEESQDRQLKIVVLGDGASGKTSLTTCFAQETFGKQYKQTIGLDFFLRRITLPGNLNVTLQIWDIGGQTIGGKMLDKYIYGAQGVLLVYDITNYQSFENLEDWYTVVKKVSEESETQPLVALVGNKIDLEHMRTIKPEKHLRFCQENGFSSHFVSAKTGDSVFLCFQKVAAEILGIKLNKAEIEQSQRIVRAEIVKYPEEENQHTTSTQSRICSVQ

SEQ ID NO: 26767 - protein, 257 aa, Homo sapiens
LPSDSPRIPPAGAETPGRGSCRNYLPSSSPPPPEPSSFPSPPTSRGGPGSRDTMSDSEEESQDRQLKIVVLGDGASGKTSLTTCFAQETFGKQYKQTIGLDFFLRRITLPGNLNVTLQIWDIGGQTIGGKMLDKYIYGAQGVLLVYDITNYQSFENLEDWYTVVKKVSEESETQPLVALVGNKIDLEHMRTIKPEKHLRFCQENGFSSHFVSAKTGDSVFLCFQKVAAEILGIKLNKAEIEQSQGHFIIFISSTNRE

SEQ ID NO: 26768 - protein, 148 aa, Homo sapiens
LPSDSPRIPPAGAETPGRGSCRNYLPSSSPPPPEPSSFPSPPTSRGGPGSRDTMSDSEEESQDRQLKIVVLGDGASGKTSLTTCFAQETFGKQYKQTIGLDFFLRRITLPGNLNVTLQIWDIGGQTIGGKMLDKYIYGAQLIWSICEQ

SEQ ID NO: 26769 - protein, 157 aa, Homo sapiens
MQDNTYPEILRSNLGSVVLQLKKLGIDDLVHFDFMDPPAPETLMRALELLNYLAALNDDGDLTELGSMMAEFPLDPQLAKMVIASCDYNCSNEVLSITAMLSGNRGKGTKKSPALQSLGGLHFCFCFLIFSMIVDFIDGFKELILFSKYLVNSFVMT

SEQ ID NO: 26770 - protein, 10 aa, Homo sapiens
LCMGDHSSVT

SEQ ID NO: 26771 - protein, 147 aa, Homo sapiens
LMGDTCTRGCRFCSVKTARNPPPLDASEPYNTAKAIAEWGLDYVVLTSVDRDDMPDGGAEHIAKTVSYLKERLECSGLMIIAHCSLKLLGSSNPSASASQVAGTTGTLPRLANVFTFFFRDGILLCSPGWSQTPDLNQYSCLALPKC

SEQ ID NO: 26772 - protein, 53 aa, Homo sapiens
LDLRVGLGGRITPRPQPRGPGVNRALRAGNPGFSQIPPDPPLLGKRRLPSGGC

SEQ ID NO: 26773 - protein, 119 aa, Homo sapiens
LATVPETLDPAEYNISLETQRVQAERLAIRARLKREYLLQYNDPNRQGLIENPALIRWAYARTTNVYPNFRPTPKNSLMGALCGFGPLIFIYYIIKTERDRKEKLMQEGKLDRTVHLSY

SEQ ID NO: 26774 - protein, 33 aa, Homo sapiens
MRRGGCGPGHLPSGFPNPARSDPRGRMETPAAL

SEQ ID NO: 26775 - protein, 51 aa, Homo sapiens
LSSRSSSLTSAEVQLPQFLAQVDNYRHKPLKLECPVAGISIDLSQLSLQLQ

SEQ ID NO: 26776 - protein, 42 aa, Homo sapiens
LSSRSSSLTSAEVQLPQFLAQVDNYRHKPLKLECPVAGKEMD

SEQ ID NO: 26777 - protein, 12 aa, Homo sapiens
VTMLVATGQCSR

SEQ ID NO: 26778 - protein, 35 aa, Homo sapiens
LNRYLGAIARSPDLLHRSPLGGTGEVMRNVDYTPL

SEQ ID NO: 26779 - protein, 10 aa, Homo sapiens
MRLYVVKLID

SEQ ID NO: 26780 - protein, 33 aa, Homo sapiens
LKMLSLFQSEISPRPMNKTGSCPEYTPKLQAPA

SEQ ID NO: 26781 - protein, 109 aa, Homo sapiens
LHAISSKNQIWRSYIGMGYCNCSVPQTILRNLLENSGWITQYTPYQPEVSQGRLESLLNYQTMVCDITGLDMASASLLDEGLRLQRRCSCATDTRGGNFLLTPIATHRQ

SEQ ID NO: 26782 - protein, 88 aa, Homo sapiens
LQLCYRHKRRKFFVDPHCHPQTIAVVQTRAKYTGVLIELKLPCEMDFSGKDVSGVLFQYPDTEGKVEDFTELVERAHQSGSLACCVCY

SEQ ID NO: 26783 - protein, 157 aa, Homo sapiens [sequence omitted]

SEQ ID NO: 26784 - protein, 86 aa, Homo sapiens
MNGLTTGRPALLQMLKKVLPRKKKGNLMETCVYQMERRAMGILTTSVRKKVECGDGENTEVQKKRRQEATHGSSFSHKSRNATDYK

SEQ ID NO: 26785 - protein, 8 aa, Homo sapiens
MEHLKQNI

SEQ ID NO: 26786 - protein, 69 aa, Homo sapiens [sequence omitted]

SEQ ID NO: 26787 - protein, 52 aa, Homo sapiens
VVSQKPRRRGCCMKKEMMVSLWLHLSKCPVQLFSVPSKIWYRDGHCFLGEAC

SEQ ID NO: 26788 - protein, 19 aa, Homo sapiens
MDAKMEDRWIEEKTESDTG

SEQ ID NO: 26789 - protein, 94 aa, Homo sapiens
LRDDCYPGLSSLPWYLFPSLAGLTPNLASLWTFLLFFFDSEKCIFWGLDAAFFGEMASWGWLRLRRYGRCHVVQTIQTVFCGSLCFGYFLCHQL

SEQ ID NO: 26790 - protein, 61 aa, Homo sapiens [sequence omitted]

SEQ ID NO: 26791 - protein, 97 aa, Homo sapiens [sequence omitted]

SEQ ID NO: 26792 - protein, 70 aa, Homo sapiens
MSRLSLLGGQGGSHPRVGRTGARRRSPRRRRGRSTTPLGGNRGREHARPPYVSKDCREISAQETSCGFAR

SEQ ID NO: 26793 - protein, 30 aa, Homo sapiens
MLPSWGADISLWNSGKTTGTFFGADRFAST

SEQ ID NO: 26794 - protein, 118 aa, Homo sapiens
VAWFGALYPGGAYVRKSWGVCKPGSGASGPMPGRAFEGYCHAAFLEPAGWCPGGLYLCPPLSSLSQALQEAGGPTPPIAPLGYAATSMPRRSRAAVLSKASENQGRPAPPLTRSSAEH

SEQ ID NO: 26795 - protein, 32 aa, Homo sapiens
LAIGPLETCGKSWKFFKVHLAPSSMHMSYQSM

SEQ ID NO: 26796 - protein, 17 aa, Homo sapiens
MPRRNGLFFSILITHNM

SEQ ID NO: 26797 - protein, 106 aa, Homo sapiens
LALPQPDKKGLSTSLGILADIFVSMSKNDYEKFKNNPQINLVIIITLSGITCKIVNRVLGGWLVAVFLRRLGGRELSAAPPRQMGGILGRSLVGSYLALLSQRLAL

SEQ ID NO: 26798 - protein, 448 aa, Homo sapiens [sequence omitted]

SEQ ID NO: 26799 - protein, 70 aa, Homo sapiens
LGPQFSSSGSKEETAFQAVIPKQIERKTCDPKVKFVKNIDLFNQLHFLFCLKQKNKKTSIRVFTGRRLVA

SEQ ID NO: 26800 - protein, 189 aa, Homo sapiens
MRARSMDRAAVARVGAVVSASVCALVAGVVLAQYIFTLKRKTGRKTKIIEMMPEFQKSSVRIKNLTRVEEMICGLIKGGAAKLQIITDFDMTLSRFSYKGKRCPTCHNSIDNCQLITDECRKKLLQLKKKYYAIEVDPVLTVEEKYPYMVEWYTKSHGLLVQQALPKAKLKEIVAESDVMLKERYEEFL

SEQ ID NO: 26801 - protein, 793 aa, Homo sapiens
VAQSESKRRKAEEILKSQTPKGGDKKESSKSLVRQGSFTIEKPSPNIPIELIPHINKQTSSTPSSLALTSASRIRERSESLDPDSSMDTTLILKDTEAVMAFLEAKLREDNKTDEGPDTPSYKRDNSISPESDVDTASTISLVTGETERKSTQKRKSFTSLYKDRCSTGSPSKDVTKSSSSGAREKMEKKTKSRSTDVGSRADGHKFVQSSGRIRQPSVDLTDDDQTSSVPHSAISDIMSSDQETYSCKPHGRTPLTSADEHVHSKLEGSKVTKSKTSPVVSGSSSKSTTLPRPRPTRTSLLRRARRGEASDSELADADKASVASEVSTTSSTSKPPTGRRNISRIDLLAQPRRTRLGSLSARSDSEATISRSSASSRTAEAIIRSGARLVPSDKFSPRIRANSISRLSDSKVKSMTSAHGSASVNSRWRRFPTGYASTSEDEFGSDHNSPKHTRLCTSPALKTTRLQSAGSAMPTSSSFKHRIKEQEDYIRDWTAHREEIARISQDLALIAREINDVAGEIDSVTSSGTAPSTTVSTAATTPGSAIDTREEVGDLHGEMHKLVDRVFDESLNFQKIPPLVHSKTPEGNNGRSGDPRPQAAEPPDHLTITRRRTWSRDEVMGDNLLLSSVFQFSKKIRQSIDKTAGKIRILFKDKDRNWDDIESKLRAESEVPIVKTSSMEISSILQELKRVEKQLQAINAMIDPDGTLEALNNMGFPSAMLPSPPKQKSSPVNNHHSPGQTPTLGQPEARALHPAAVSAAAEFENAESEADFSIHFNRVNPDGEEEDVTVHK

SEQ ID NO: 26802 - protein, 567 aa, Homo sapiens
VPPCASARCVRAGESRGPPGSPPAAARTHAAPSERAAPSPAPRPNPSAAGCLLFPGEIMKRGRLPSSSEDSDDNGSLSTTWSQNSRSQHRRSSCSRHEDRKPSEVFRTDLITAMKLHDSYQLNPDEYYVLADPWRQEWEKGVQVPVSPGTIPQPVARVVSEEKSLMFIRPKKYIVSSGSEPPELGYVDIRTLADSVCRYDLNDMDAAWLELTNEEFKEMGMPELDEYTMERVLEEFEQRCYDNMNHAIETEEGLGIEYDEDVVCDVCQSPDGEDGNEMVFCDKCNICVHQACYGILKVPEGSWLCRTCALGVQPKCLLCPKKGGAMKPTRSGTKWVHVSCALWIPEVSIGSPEKMEPITKVSHIPSSRWALVCSLCNEKFGASIQCSVKNCRTAFHVTCAFDRGLEMKTILAENDEVKFKSYCPKHSSHRKPEESLGKGAAQENGAPECSPRNPLEPFASLEQNREEAHRVSVRKQKLQQLEDEFYTFVNLLDVARALRLPEEVVDFLYQYWKLKRKVNFNKPLITPKKDEEDNLAKREQDVLFRRLQLFTHLRQDLERVMIDTDTL

SEQ ID NO: 26803 - protein, 900 aa, Homo sapiens
VPPCASARCVRAGESRGPPGSPPAAARTHAAPSERAAPSPAPRPNPSAAGCLLFPGEIMKRGRLPSSSEDSDDNGSLSTTWSQNSRSQHRRSSCSRHEDRKPSEVFRTDLITAMKLHDSYQLNPDEYYVLADPWRQEWEKGVQVPVSPGTIPQPVARVVSEEKSLMFIRPKKYIVSSGSEPPELGYVDIRTLADSVCRYDLNDMDAAWLELTNEEFKEMGMPELDEYTMERVLEEFEQRCYDNMNHAIETEEGLGIEYDEDVVCDVCQSPDGEDGNEMVFCDKCNICVHQACYGILKVPEGSWLCRTCALGVQPKCLLCPKKGGAMKPTRSGTKWVHVSCALWIPEVSIGSPEKMEPITKVSHIPSSRWALVCSLCNEKFGASIQCSVKNCRTAFHVTCAFDRGLEMKTILAENDEVKFKSYCPKHSSHRKPEESLGKGAAQENGAPECSPRNPLEPFASLEQNREEAHRVSVRKQKLQQLEDEFYTFVNLLDVARALRLPEEVVDFLYQYWKLKRKVNFNKPLITPKKDEEDNLAKREQDVLFRRLQLFTHLRQDLERVRNLTYMVTRREKIKRSVCKVQEQIFNLYTKLLEQERVSGVPSSCSSSSLENMLLFNSPSVGPDAPKIEDLKWHSAFFRKQMGTSLVHSLKKPHKRDPLQNSPGSEGKTLLKQPDLCGRREGMVVPESFLGLEKTFAEARLISAQQKNGVVMPDHGKRRDNRFHCDLIKGDLKDKSFKQSHKPLRSTDVSQRHLDNTRAATSPGVGQSAPGTRKEIVPKCNGSLIKVNYNQTAVKVPTTPASPVKNWGGFRIPKKGERQQQGEAHDGACHQHSDYPYLGLGRVPAKERAKSKLKSDNENDGYVPDVEMSDSESEASEKKCIHTSSTISRRTDIIRRSILAS

SEQ ID NO: 26804 - protein, 97 aa, Homo sapiens
LPVAQRSLSPQAEGQAQAEGKASEGTYALDSESPVEKLEALSASLARAVVPITEEEAEVDEFPANGELAVQEEDHRKELEAQEKHKKLFEGLKFFVN

SEQ ID NO: 26805 - protein, 12 aa, Homo sapiens
LFTICRKKSAAV

SEQ ID NO: 26806 - protein, 46 aa, Homo sapiens
LRGQDCRAFKPVQLPGFDPKSLIIVIAHRDCVKNSGGLLLKRMRVL

SEQ ID NO: 26807 - protein, 180 aa, Homo sapiens [sequence omitted]

SEQ ID NO: 26808 - protein, 478 aa, Homo sapiens
LQRKTAKEGRGGKGKKKGYIVDALLFLEMQKIMHISVLLSPVLWGLIFGVSSNSIQIGGLFPRGADQEYSAFRVGMVQFSTSEFRLTPHIDNLEVANSFAVTNAFCSQFSRGVYAIFGFYDKKSVNTITSFCGTLHVSFITPSFPTDGTHPFVIQMRPDLKGALLSLIEYYQWDKFAYLYDSDRGLSTLQAVLDSAAEKKWQVTAINVGNINNDKKDEMYRSLFQDLELKKERRVILDCERDKVNDIVDQVITIGKHVKGYHYIIANLGFTDGDLLKIQFGGANVSGFQIVDYDDSLVSKFIERWSTLEEKEYPGAHTTTIKYTSALTYDAVQVMTEAFRNLRKQRIEISRRGNAGDCLANPAVPWGQGVEIERALKQVQVEGLSGNIKFDQNGKRINYTINIMELKTNGPRKIGYWSEVDKMVVTLTELPSGNDTSGLENKTVVVTTILVICYICHVLLCIFLWLISAGVAIYILGE

SEQ ID NO: 26809 - protein, 911 aa, Homo sapiens
LQRKTAKEGRGGKGKKKGYIVDALLFLEMQKIMHISVLLSPVLWGLIFGVSSNSIQIGGLFPRGADQEYSAFRVGMVQFSTSEFRLTPHIDNLEVANSFAVTNAFCSQFSRGVYAIFGFYDKKSVNTITSFCGTLHVSFITPSFPTDGTHPFVIQMRPDLKGALLSLIEYYQWDKFAYLYDSDRGLSTLQAVLDSAAEKKWQVTAINVGNINNDKKDEMYRSLFQDLELKKERRVILDCERDKVNDIVDQVITIGKHVKGYHYIIANLGFTDGDLLKIQFGGANVSGFQIVDYDDSLVSKFIERWSTLEEKEYPGAHTTTIKYTSALTYDAVQVMTEAFRNLRKQRIEISRRGNAGDCLANPAVPWGQGVEIERALKQVQVEGLSGNIKFDQNGKRINYTINIMELKTNGPRKIGYWSEVDKMVVTLTELPSGNDTSGLENKTVVVTTILESPYVMMKKNHEMLEGNERYEGYCVDLAAEIAKHCGFKYKLTIVGDGKYGARDADTKIWNGMVGELVYGKADIAIAPLTITLVREEVIDFSKPFMSLGISIMIKKPQKSKPGVFSFLDPLAYEIWMCIVFAYIGVSVVLFLVSRFSPYEWHTEEFEDGRETQSSESTNEFGIFNSLWFSLGAFMQQGCDISPRSLSGRIVGGVWWFFTLIIISSYTANLAAFLTVERMVSPIESAEDLSKQTEIAYGTLDSGSTKEFFRRSKIAVFDKMWTYMRSAEPSVFVRTTAEGVARVRKSKGKYAYLLESTMNEYIEQRKPCDTMKVGGNLDSKGYGIATPKGSSLRTPVNLAVLKLSEQGVLDKLKNKWWYDKGECGAKDSGSKEKTSALSLSNVAGVFYILVGGLGLAMLVALIEFCYKSRAEAKRMKVAKNAQNINPSSSQNSQNFATYKEGYNVYGIESVKI

SEQ ID NO: 26810 - protein, 911 aa, Homo sapiens
LQRKTAKEGRGGKGKKKGYIVDALLFLEMQKIMHISVLLSPVLWGLIFGVSSNSIQIGGLFPRGADQEYSAFRVGMVQFSTSEFRLTPHIDNLEVANSFAVTNAFCSQFSRGVYAIFGFYDKKSVNTITSFCGTLHVSFITPSFPTDGTHPFVIQMRPDLKGALLSLIEYYQWDKFAYLYDSDRGLSTLQAVLDSAAEKKWQVTAINVGNINNDKKDEMYRSLFQDLELKKERRVILDCERDKVNDIVDQVITIGKHVKGYHYIIANLGFTDGDLLKIQFGGANVSGFQIVDYDDSLVSKFIERWSTLEEKEYPGAHTTTIKYTSALTYDAVQVMTEAFRNLRKQRIEISRRGNAGDCLANPAVPWGQGVEIERALKQVQVEGLSGNIKFDQNGKRINYTINIMELKTNGPRKIGYWSEVDKMVVTLTELPSGNDTSGLENKTVVVTTILESPYVMMKKNHEMLEGNERYEGYCVDLAAEIAKHCGFKYKLTIVGDGKYGARDADTKIWNGMVGELVYGKADIAIAPLTITLVREEVIDFSKPFMSLGISIMIKKPQKSKPGVFSFLDPLAYEIWMCIVFAYIGVSVVLFLVSRFSPYEWHTEEFEDGRETQSSESTNEFGIFNSLWFSLGAFMQQGCDISPRSLSGRIVGGVWWFFTLIIISSYTANLAAFLTVERMVSPIESAEDLSKQTEIAYGTLDSGSTKEFFRRSKIAVFDKMWTYMRSAEPSVFVRTTAEGVARVRKSKGKYAYLLESTMNEYIEQRKPCDTMKVGGNLDSKGYGIATPKGSSLRNAVNLAVLKLNEQGLLDKLKNKWWYDKGECGSGGGDSKEKTSALSLSNVAGVFYILVGGLGLAMLVALIEFCYKSRAEAKRMKVAKNAQNINPSSSQNSQNFATYKEGYNVYGIESVKI

SEQ ID NO: 26811 - protein, 43 aa, Homo sapiens
LAESALDPTWERRMWSQKLRTIWPYNTCSTLSGVSLPMGIYEN

SEQ ID NO: 26812 - protein, 88 aa, Homo sapiens
MGLLLPFFLSPLHVKYCEEIALALFRLCCLKCTVQQSSSSHCCCLPHHTVSFQIPRSSQQDDSLWLHFSMPGRIFFNLPFRFQSSPST

SEQ ID NO: 26813 - protein, 193 aa, Homo sapiens
LTKDIHLLGTFDLTGIPPAPRGVPQIEVTFEIDVNGILRVTAEDKGTGNKNKITITNDQNHLTPEEIKRMVNDAEKFAEEDTKLKECIDTTNELESYGYSLKNQIGDKEKLGGKLSSEDKETMEKAVEEKIEWLESHQAADIEDFEANKKELEEIVQPLISKLYGSASPLPATKRIRQKKMSCRHRSATAVIL

SEQ ID NO: 26814 - protein, 1203 aa, Homo sapiens
LAPTPFLGLPFQFRCADVQTGFIFSELRRRLWAQAAAARARPRSPGSSGDAARESELWWQLSPRGAARRAAAAGSSAARRTTWQAASASAARAEFACALPASECRVPYLPSAHPWAPSQLLPATGGNRQCLPSLLSRRHPHVSGHLSTPVPPRSLRVGRRAPVPLAPHISADRGCLTSGSRPLLFLRGRRMGLGTLSPRMLVWLVASGIVFYGELWVCAGLDYDYTFDGNEEDKTETIDYKDPCKAAVFWGDIALDDEDLNIFQIDRTIDLTQNPFGNLGHTTGGLGDHAMSKKRGALYQLIDRIRRIGFGLEQNNTVKGKVPLQFSGQNEKNRVPRAATSRTERIWPGGVIPYVIGGNFTGSQRAMFKQAMRHWEKHTCVTFIERSDEESYIVFTYRPCGCCSYVGRRGNGPQAISIGKNCDKFGIVVHELGHVIGFWHEHTRPDRDNHVTIIRENIQPGQEYNFLKMEPGEVNSLGERYDFDSIMHYARNTFSRGMFLDTILPSRDDNGIRPAIGQRTRLSKGDIAQARKLYRCPACGETLQESNGNLSSPGFPNGYPSYTHCIWRVSVTPGEKIVLNFTTMDLYKSSLCWYDYIEVRDGYWRKSPLLGRFCGDKLPEVLTSTDSRMWIEFRSSSNWVGKGFAAVYEAICGGEIRKNEGQIQSPNYPDDYRPMKECVWKITVSESYHVGLTFQSFEIERHDNCAYDYLEVRDGTSENSPLIGRFCGYDKPEDIRSTSNTLWMKFVSDGTVNKAGFAANFFKEEDECAKPDRGGCEQRCLNTLGSYQCACEPGYELGPDRRSCEAACGGLLTKLNGTITTPGWPKEYPPNKNCVWQVVAPTQYRISVKFEFFELEGNEVCKYDYVEIWSGLSSESKLHGKFCGAEVPEVITSQFNNMRIEFKSDNTVSKKGFKAHFFSDKDECSKDNGGCQHECVNTMGSYMCQCRNGFVLHDNKHDCKEAECEQKIHSPSGLITSPNWPDKYPSRKECTWEISATPGHRIKLAFSEFEIEQHQECAYDHLEVFDGETEKSPILGRLCGNKIPDPLVATGNKMFVRFVSDASVQRKGFQATHSTECGGRLKAESKPRDLYSHAQFGDNNYPGQVDCEWLLVSERGSRLELSFQTFEVEEEADCGYDYVELFDGLDSTAVGLGRFCGSGPPEEIYSIGDSVLIHFHTDDTINKKGFHIRYKSIRYPDTTHTKK

SEQ ID NO: 26815 - protein, 294 aa, Homo sapiens
LRRRLWAQAAAARARPRSPGSSGDAARESELWWQLSPRGAARRAAAAGSSAARRTTWQAASASAARAEFACALPASECRVPYLPSAHPWAPSQLLPATGGNRQCLPSLLSRRHPHVSGHLSTPVPPRSLRVGRRAPVPLAPHISADRGCLTSGSRPLLFLRGRRMGLGTLSPRMLVWLVASGIVFYGELWVCAGLDYDYTFDGNEEDKTETIDYKDPCKAAVFWGDIALDDEDLNIFQIDRTIDLTQNPFGNLGHTTGGLGDHAMSKKRGALYQLIDRIRRIGFGISMFKVADA

SEQ ID NO: 26816 - protein, 1200 aa, Homo sapiens
LRRRLWAQAAAARARPRSPGSSGDAARESELWWQLSPRGAARRAAAAGSSAARRTTWQAASASAARAEFACALPASECRVPYLPSAHPWAPSQLLPATGGNRQCLPSLLSRRHPHVSGHLSTPVPPRSLRVGRRAPVPLAPHISADRGCLTSGSRPLLFLRGRRMGLGTLSPRMLVWLVASGIVFYGELWVCAGLDYDYTFDGNEEDKTETIDYKDPCKAAVFWGDIALDDEDLNIFQIDRTIDLTQNPFGNLGHTTGGLGDHAMSKKRGALYQLIDRIRRIGFGLEQNNTVKGKVPLQFSGQNEKNRVPRAATSRTERIWPGGVIPYVIGGNFTGSQRAMFKQAMRHWEKHTCVTFIERSDEESYIVFTYRPCGCCSYVGRRGNGPQAISIGKNCDKFGIVVHELGHVIGFWHEHTRPDRDNHVTIIRENIQPGQEYNFLKMEPGEVNSLGERYDFDSIMHYARNTFSRGMFLDTILPSRDDNGIRPAIGQRTRLSKGDIAQARKLYRCPACGETLQESNGNLSSPGFPNGYPSYTHCIWRVSVTPGEKIVLNFTTMDLYKSSLCWYDYIEVRDGYWRKSPLLGRFCGDKLPEVLTSTDSRMWIEFRSSSNWVGKGFAAVYEAICGGEIRKNEGQIQSPNYPDDYRPMKECVWKITVSESYHVGLTFQSFEQEHQENPGIASKARESLILIWKPIERHDNCAYDYLEVRDGTSENSPLIGRFCGYDKPEDIRSTSNTLWMKFVSDGTVNKAGFAANFFKEEDECAKPDRGGCEQRCLNTLGSYQCACEPGYELGPDRRSCEAACGGLLTKLNGTITTPGWPKEYPPNKNCVWQVVAPTQYRISVKFEFFELEGNEVCKYDYVEIWSGLSSESKLHGKFCGAEVPEVITSQFNNMRIEFKSDNTVSKKGFKAHFFSDKDECSKDNGGCQHECVNTMGSYMCQCRNGFVLHDNKHDCKEAECEQKIHSPSGLITSPNWPDKYPSRKECTWEISATPGHRIKLAFSEFEIEQHQECAYDHLEVFDGETEKSPILGRLCGNKIPDPLVATGNKMFVRFVSDASVQRKGFQATHSTECGGRLKAESKPRDLYSHAQFGDNNYPGQVDCEWLLVSERGSRLELSFQTFEVEEEADCGYDYVELFDGLDSTAVGLGRFCGSGPPEEIYSIGDSVLIHFHTDDTINKKGFHIRYKSIRYPDTTHTKK

SEQ ID NO: 26817 - protein, 187 aa, Homo sapiens
LDSADICSLLSTRFPGLPAAACRGACRQRARVRHFVDLHPNRSSARIPSPWIPVEPAGKLAPEGVELEFRWPTPSESCRLVLSTQQKFVASQFLVLRRGEERNLTLNTRSSQGAISFNFSSLLPFAMKRKQKRFLQMTLLFTVALIFLPNVGLWSLYKDKHLVKSAEPGEQQVSATQRKITQGLVRQ

SEQ ID NO: 26818 - protein, 98 aa, Homo sapiens
VRGARHPLGPRCASTTCGAAVPTPCRDPAAPAPSTRGQTKQVAGRCRRRGPGGSLTLILLSGLGSSGRGVREDQRTTSPRKLPTTSKLRGEFVTERPR

SEQ ID NO: 26819 - protein, 294 aa, Homo sapiens
VCKGCHKGQKVKYFIHYSGWNKNWDEWVPESRVLKYVDTNLQKQRELQKANQEQYAEGKMRWAAPGKKTSGLQQKNIEVKTKKNKQKTPGNGDGGSTSETPQPPRKKRAQVDPTVENEETFMNRVEVKVKIPEELKPWLVDDWDLITRQKQLFYLPAEKNVDSILEDYANYKKSHGNTDNKEYAVNEVVAGIKEYFNLMLGTQLLNKFERPQYAEILADCPDAPMSQVYGVPHLLRLSVQIGAMLAYTPLNEKSLALLLNYLHDFLKYLAKNSATLFSASDYEVALPEYHRKAV

SEQ ID NO: 26820 - protein, 131 aa, Homo sapiens [sequence omitted]

SEQ ID NO: 26821 - protein, 29 aa, Homo sapiens
LKPESETSDKGVITVSPFNMPSVSIRITL

SEQ ID NO: 26822 - protein, 237 aa, Homo sapiens
MRGQGRRKGHRGSPARPSGAVLRVLRGCSTCGIPRAGSLLWRGKEGASGSEPSSAAHRSLPAQLAAPGGGARPGSRGVTWSSGRCNPGRLWGHVREVSYPCVSAGPLGHWELNEVVMSQVFSKIRTRHQTEEAGAPESTQGRVGEEGGRGCSAGAGRPQPRGTRRRAKTCHPAREGREGPREGAPFQPGETRVLAASLSSRQRAPVLTPAPFPRSMLLTKWPGEECRSPRGQALPKH

SEQ ID NO: 26823 - protein, 505 aa, Homo sapiens
LLDLRSPERRPALSAWTYFLGSSWTLKLPSVCACSRKQRKPPFFLIHSAGRYLSRSIQSSLQLGTPTRMSKRLSPQLQHNITEDAYCETHLEPTRLFCDVDQITLCSKCFQSQEHKHHMVCGIQEAAENYRKLFQEILNTSREKLEAAKSILTDEQERMAMIQEEEQNFKKMIESEYSMRLRLLNEECEQNLQRQQECISDLNLRETLLNQAIKLATELEEMFQEMLQRLGRVGRENMEKLKESEARASEQVRSLLKLIVELEKKCGEGTLALLKNAKYSLERSKSLLLEHLEPAHITDLSLCHIRGLSSMFRVLQRHLTLDPETAHPCLALSEDLRTMRLRHGQQDGAGNPERLDFSAMVLAAESFTSGRHYWEVDVEKATRWQVGIYHGSADAKGSTARASGEKVLLTGSVMGTEWTLWVFPPLKRLFLEKKLDTVGVFLDCEHGQISFYNVTEMSLIYNFSHCAFQGALRPVFSLCIPNGDTSPDSLTILQHGPSCDATVSP

SEQ ID NO: 26824 - protein, 289 aa, Homo sapiens
LLDLRSPERRPALSAWTYFLGSSWTLKLPSVCACSRKQRKPPFFLIHSAGRYLSRSIQSSLQLGTPTRMSKRLSPQLQHNITEDAYCETHLEPTRLFCDVDQITLCSKCFQSQEHKHHMVCGIQEAAENYRKLFQEILNTSREKLEAAKSILTDEQERMAMIQEEEQNFKKMIESEYSMRLRLLNEECEQNLQRQQECISDLNLRETLLNQAIKLATELEEMFQEMLQRLGRVGRENMEKLKESEARASEQVRSLLKLIVELEKKCGEGTLALLKVRCWEKENKIHSSI

SEQ ID NO: 26825 - protein, 200 aa, Homo sapiens
VHADKHTERGPRGPHQGSTDKHTERGPRGRRQGSTDKHTERGPRGPRQGSTDKHTERGPRGRRQGSTDKHTERGPCGRRQGSADKHTGEGSAWASSGKYRQAHREGAAWAPSGKCGQAHGEGAAWAPSGKCRWKPQRGPCTLSRGLRQSNKLPAPRAEQAAGWGPRPHPAEQRGRATVDSFSSQPKVAQQSRSWVLAQEK

SEQ ID NO: 26826 - protein, 33 aa, Homo sapiens
VRLRMLGRCSVSAAWLLLNGMTAFTAPCACLSI

SEQ ID NO: 26827 - protein, 52 aa, Homo sapiens
LKSVILPPVQRVRWPSADESLRASVRGASVVEAALVSDRSHSLRLRIPRSYT

SEQ ID NO: 26828 - protein, 40 aa, Homo sapiens
LGWRTVTYTLPKAEVALLYHSILFRFLQKNKKITFLNKHE

SEQ ID NO: 26829 - protein, 333 aa, Homo sapiens
LKYDVGGGERFDSLTDLEEHYKKNSMVETLGTVLQLKHPLNTTHINAAEIKSRVRELSKLAETTDKLKQGFWEKFETLQQQECKLLYSRKEGQRQENKNKNRYKNILPFDHTRVVLHDGDPDEPVSDYISANTIMPEFETRCNNSKPKTCYIATQGCQQNTVNDFWQMKFQENSRVIVMTTKEVDRGKSKCVKYWPDEYALKEYGVMRVRNVKESAAHDYTLRELELSKIGPGNMERPVGQYHFRTWPDHGVPSDPGVVLDFLEEVYHKQGSITDAGPVVVHCSAGIGLTGTFIVIDILTDIVREKGVDCNIDVPKTIQMMRSQRSGMVQTEA

SEQ ID NO: 26830 - protein, 916 aa, Homo sapiens
LGDSGPFSHSELEQGLLDSPSTMSPEKSQEESPEEDTERTERKPMVKDAFKDISIYFTKEEWAEMGDWEKTRYRNVKRNYNALITIGLRATRPAFMCHRRQAIKLQVDDTEDSDEEWTPRQQVKPPWMALRVEQRKHQKGMPKASFSNESSLKELSRTANLLNASGSEQAQKPVSPSGEASTSGQHSRLKLELRKKETERKMYSLRERKGHAYKEVSEPQDDDYLYCEMCQNFFIDSCAAHGPPTFVKDSAVDKGHPNRSALSLPPGLRIGPSGIPQAGLGVWNEASDLPLGLHFGPYEGRITEDEEAANNGYSWLITKGRNCYEYVDGKDKSWANWMRYVNCARDDEEQNLVAFQYHRQIFYRTCRVIRPGCELLVWYGDEYGQELGIKWGSKWKKELMAGREPKPEIHPCPSCCLAFSSQKFLSQHVERNHSSQNFPGPSARKLLQPENPCPGDQNQEQQYPDPHSRNDKTKGQEIKERSKLLNKRTWQREISRAFSSPPKGQMGSCRVGKRIMEEESRTGQKVNPGNTGKLFVGVGISRIAKVKYGECGQGFSVKSDVITHQRTHTGEKLYVCRECGRGFSWKSHLLIHQRIHTGEKPYVCRECGRGFSWQSVLLTHQRTHTGEKPYVCRECGRGFSRQSVLLTHQRRHTGEKPYVCRECGRGFSRQSVLLTHQRRHTGEKPYVCRECGRGFSWQSVLLTHQRTHTGEKPYVCRECGRGFSWQSVLLTHQRTHTGEKPYVCRECGRGFSNKSHLLRHQRTHTGEKPYVCRECGRGFRDKSHLLRHQRTHTGEKPYVCRECGRGFRDKSNLLSHQRTHTGEKPYVCRECGRGFSNKSHLLRHQRTHTGEKPYVCRECGRGFRNKSHLLRHQRTHTGEKPYVCRECGRGFSDRSSLCYHQRTHTGEKPYVCREDE

SEQ ID NO: 26831 - protein, 133 aa, Homo sapiens
LALEMAELTAQISQLELARQKKESEAMEWQQKAQMVQEDLEKTRAELKTAMSTSHVAEPAENEQDEQDENGAEASADLRADAMAKDRSEEECTTEAEKNERVQKHLKALTSELASARDESKKTANDMIHAENM

SEQ ID NO: 26832 - protein, 399 aa, Homo sapiens
LKLQIMRTYHYIPLFIWTYMFHTVDTILLQEKPNSYLSSKKIAGLTKDDGKMLRRTKRGWMWNQFFLLEEYTGTDTQYVGKLHTDQDKGDGNLKYILTGDGAGSLFVIDENTGDIHAAKKLDREEKSLYILRAKAIDRKTGRQVEPESEFIIKIHDINDNEPKFTKDLYTASVPEMSGVGTSVIQVTATDADDANYGNSAKVVYSILQGQPYFSVDPESGIIKTALPDMSRENREQYQVVIQAKDMGGQMGGLSGTTTVNITLTDVNNNPPRFPQSTYQFNSPESVPLGTHLGRIKANDPDVGENAEMEYSIAEGDGADMFDVITDKDTQEGIITVKQVSFHCLHLFIECFIIYVCFSVKGKKAWDLFSPIFYMLSILQINENSCDITSSKLNVFIIDT

SEQ ID NO: 26833 - protein, 63 aa, Homo sapiens
LQFQPRQQERQSRRPRRRRRRRQEQPGRVAGSPRAQEGEQRYPLRAKQRTLRKEGGMRLDTVQ

SEQ ID NO: 26834 - protein, 1005 aa, Homo sapiens [sequence omitted]

SEQ ID NO: 26835 - protein, 282 aa, Homo sapiens [sequence omitted]

SEQ ID NO: 26836 - protein, 258 aa, Homo sapiens [sequence omitted]

SEQ ID NO: 26837 - protein, 46 aa, Homo sapiens
MLFLKPCRLEQDNLNKLWEKSLQQLIYKQLLCFVDVWNTQKVHCNT

SEQ ID NO: 26838 - protein, 21 aa, Homo sapiens
MVEGEEEEQAYHMAKKGARER

SEQ ID NO: 26839 - protein, 25 aa, Homo sapiens
MCLESLLLRRLRQEDHLELGRQRLL

SEQ ID NO: 26840 - protein, 15 aa, Homo sapiens
LGMVACVWNPCYSGG

SEQ ID NO: 26841 - protein, 108 aa, Homo sapiens [sequence omitted]

SEQ ID NO: 26842 - protein, 58 aa, Homo sapiens
LLLAFSGAARSQPETLLFFSGFGAVPDALGCRMSDLRITEAFLYMDYLGKKMLLSFQV

SEQ ID NO: 26843 - protein, 126 aa, Homo sapiens [sequence omitted]

SEQ ID NO: 26844 - protein, 192 aa, Homo sapiens
MGFGDLKSPAGLQVLNDYLVDKSYIEGYVPSQADVAIFEAVSGPQPAGLCHALRWYNHVKSYEKEKASLPGVKKALGKYGPANVEDATGSGGTDSKDDDDIDLFGSDDEEESEEAKRLREESLAQYESKLAKNPALVAKSSILLNVKPWDKETDLAKLEECVRSIQADGLVWGSSKLVPVGYRIKKPNTVCS

SEQ ID NO: 26845 - protein, 503 aa, Homo sapiens
VGRRDEPSRAKRSWATVHARRVLAAPPLLRALSAPDTSTACREQAGGRCGGLAHLVEEQLWGFFFFHCRIQAFQRETVEMHNLQTLPPKPPKPTTVANNGMNNNMSLQDAEWYWGDISREEVNEKLRDTADGTFLVRDASTKMHGDYTLTLRKGGNNKLIKIFHRDGKYGFSDPLTFSSVVELINHYRNESLAQYNPKLDVKLLYPVSKYQQDQVVKEDNIEAVGKKLHEYNTQFQEKSREYDRLYEEYTRTSQEIQMKRTAIEAFNETIKIFEEQCQTQERYSKEYIEKFKREGNEKEIQRIMHNYDKLKSRISEIIDSRRRLEEDLKKQAAEYREIDKRMNSIKPDLIQLRKTRDQYLMWLTQKGVRQKKLNEWLGNENTEDQYSLVEDDEDLPHHDEKTWNVGSSNRNKAENLLRGKRDGTFLVRESSKQGCYACSVVVDGEVKHCVINKTATGYGFAEPYNLYSSLKELVLHYQHTSLVQHNDSLNVTLAYPVYAQQRR

SEQ ID NO: 26846 - protein, 155 aa, Homo sapiens
LCSTPAGWASERKGGKNKNIKKKERGTKKRKPESFSCIAAERFLARRRKKKSEVTSRPKQARAWRPVLKLASDGKARLAVCCRRWSRDLALSPGRPPAPVPGIRSPRMSESFFLGLFGHSWPVATERTFFPARVSPPAGDSGLLSRDAGTPVAYF

SEQ ID NO: 26847 - protein, 310 aa, Homo sapiens [sequence omitted]

SEQ ID NO: 26848 - protein, 121 aa, Homo sapiens
LKEATATSGWPRGALARLFLRPRGPRSPIIQFRRVTGAAVASQGAGSLSPALLPLAPSPRPRRAGLRGQGPSGEGVLLCRPGWSAVARSRLTATSASRVKAILLPQPPELLGLQVPATTLS

SEQ ID NO: 26849 - protein, 82 aa, Homo sapiens
LKEATATSGWPRGALARLFLRPRGPRSPIIQFRRVTGAAVASQGAGSLSPALLPLAPSPRPRRAGLRGQGPSGEGRDGVSPC

SEQ ID NO: 26850 - protein, 142 aa, Homo sapiens
VGEKGLRREGIGLSLTLDHIFARKNVSSPTSSNKEVVMRNDQNNGDMKPFQNFTTIPITQALNYNLSKEGHLEKEPWNAFSHHGPVNVSINGIPCILFWAKRIMIKFKNQTWLDLTDEPFGQKVTVDPDNSNCSEESARKKK

SEQ ID NO: 26851 - protein, 77 aa, Homo sapiens
MRTYVVSLAPAGANPLTEPPLTRNTEWRRSRDGWSSSSAGCCSCAARDCNSGTNLKLSRGKNEMLHENGQMSSPAIL

SEQ ID NO: 26852 - protein, 2086 aa, Homo sapiens
LLSISSVIHCQIFYLSIVKTLFFSGRMSDLSVIGHPIDSESKEDEPCSEETDPVHDLMAEILPEFPDIIEIDLYHSEENEEEEEECANATDVTTTPSVQYINGKHLVTTVPKDPEAAEARRGQFESVAPSQNFSDSSESDTHPFVIAKTELSTAVQPNESTETTESLEVTWKPETYPETSEHFSGGEPDVFPTVPFHEEFESGTAKKGAESVTERDTEVGHQAHEHTEPVSLFPEESSGEIAIDQESQKIAFARATEVTFGEEVEKSTSVTYTPTIVPSSASAYVSEEEAVTLIGNPWPDDLLSTKESWVEATPRQVVELSGSSSIPITEGSGEAEEDEDTMFTMVTDLSQRNTTDTLITLDTSRIITESFFEVPATTIYPVSEQPSAKVVPTKFVSETDTSEWISSTTVEEKKRKEEEGTTGTASTFEVYSSTQRSDQLILPFELESPNVATSSDSGTRKSFMSLTTPTQSEREMTDSTPVFTETNTLENLGAQTTEHSSIHQPGVQEGLTTLPRSPASVFMEQGSGEAAADPETTTVSSFSLNVEYAIQAEKEVAGTLSPHVETTFSTEPTGLVLSTVMDRVVAENITQTSREIVISERLGEPNYGAEIRGFSTGFPLEEDFSGDFREYSTVSHPIAKEETVMMEGSGDAAFRDTQTSPSTVPTSVHISHISDSEGPSSTMVSTSAFPWEEFTSSAEGSGEQLVTVSSSVVPVLPSAVQKFSGTASSIIDEGLGEVGTVNEIDRRSTILPTAEVEGTKAPVEKEEVKVSGTVSTNFPQTIEPAKLWSRQEVNPVRQEIESETTSEEQIQEEKSFESPQNSPATEQTIFDSQTFTETELKTTDYSVLTTKKTYSDDKEMKEEDTSLVNMSTPDPDANGLESYTTLPEATEKSHFFLATALVTESIPAEHVVTDSPIKKEESTKHFPKGMRPTIQESDTELLFSGLGSGEEVLPTLPTESVNFTEVEQINNTLYPHTSQVESTSSDKIEDFNRMENVAKEVGPLVSQTDIFEGSGSVTSTTLIEILSDTGAEGPTVAPLPFSTDIGHPQNQTVRWAEEIQTSRPQTITEQDSNKNSSTAEINETTTSSTDFLARAYGFEMAKEFVTSAPKPSDLYYEPSGEGSGEVDIVDSFHTSATTQATRQESSTTFVSDGSLEKHPEVPSAKAVTADGFPTVSVMLPLHSEQNKSSPDPTSTLSNTVSYERSTDGSFQDRFREFEDSTLKPNRKKPTENIIIDLDKEDKDLILTITESTILEILPELTSDKNTIIDIDHTKPVYEDILGMQTDIDTEVPSEPHDSNDESNDDSTQVQEIYEAAVNLSLTEETFEGSADVLASYTQATHDESMTYEDRSQLDHMGFHFTTGIPAPSTETELDVLLPTATSLPIPRKSATVIPEIEGIKAEAKALDDMFESSTLSDGQAIADQSEIIPTLGQFERTQEEYEDKKHAGPSFQPEFSSGAEEALVDHTPYLSIATTHLMDQSVTEVPDVMEGSNPPYYTDTTLAVSTFAKLSSQTPSSPLTIYSGSEASGHTEIPQPSALPGIDVGSSVMSPQDSFKEIHVNIEATFKPSSEEYLHITEPPSLSPDTKLEPSEDDGKPELLEEMEASPTELIAVEGTEILQDFQNKTDGQVSGEAIKMFPTIKTPEAGTVITTADEIELEGATQWPHSTSASATYGVEAGVVPWLSPQTSERPTLSSSPEINPETQAALIRGQDSTIAASEQQVAARILDSNDQATVNPVEFNTEVATPPFSLLETSNETDFLIGINEESVEGTAIYLPGPDRCKMNPCLNGGTCYPTETSYVCTCVPGYSGDQCELDFDECHSNPCRNGATCVDGFNTFRCLCLPSYVGALCEQDTETCDYGWHKFQGQCYKYFAHRRTWDAAERECRLQGAHLTSILSHEEQMFVNRVGHDYQWIGLNDKMFEHDFRWTDGSTLQYENWRPNQPDSFFSAGEDCVVIIWHENGQWNDVPCNYHLTYTCKKGTVACGQPPVVENAKTFGKMKPRYEINSLIRYHCKDGFIQRHLPTIRCLGNGRWAIPKITCMNPSAYQRTYSMKYFKNSSSAKDNSINTSKHDHRWSRRWQESRR

SEQ ID NO: 26853 - protein, 70 aa, Homo sapiens
LAWTTLMVKLKVHLNLLCYRILFRGQEKMLHSLHEDNSAASKSNNICFLAAEFCIIFLKTVSTWVDVNEY

SEQ ID NO: 26854 - protein, 62 aa, Homo sapiens [sequence omitted]

SEQ ID NO: 26855 - protein, 48 aa, Homo sapiens
LGGTSLSKFEDCAWKLLYMYLGCMSICTKLDFQKSLYWKVNNLYLLRT

SEQ ID NO: 26856 - protein, 9 aa, Homo sapiens
MIKGGMREN

SEQ ID NO: 26857 - protein, 18 aa, Homo sapiens
MKDYSRETVKTRKVRNTY

SEQ ID NO: 26858 - protein, 21 aa, Homo sapiens
LESGKRKTEACVGSELLSLVI

SEQ ID NO: 26859 - protein, 22 aa, Homo sapiens
VRKKQFTMQIEACEGTDAAAHS

SEQ ID NO: 26860 - protein, 16 aa, Homo sapiens
LRWKLPLALYISIERG

SEQ ID NO: 26861 - protein, 9 aa, Homo sapiens
MCNQAATAW

SEQ ID NO: 26862 - protein, 14 aa, Homo sapiens
LEKGIFMRLQRSIK

SEQ ID NO: 26863 - protein, 81 aa, Homo sapiens
VCDRERERERERERERNELAERSRRQEGKSGTTAGRGNLMLLGHHLPGPRSSRRLGSCPAGFGGQHCLAQGDQMRLQRSIK

SEQ ID NO: 26864 - protein, 50 aa, Homo sapiens
LFFSEPGSRRSSAAHRTGAETTVLEGYSVYFSLLGGFGGCFRGSPTGPFN

SEQ ID NO: 26865 - protein, 33 aa, Homo sapiens
MCTTGTKPIRRCQKIRIFVLMLHLPAVPQCSTS

SEQ ID NO: 26866 - protein, 28 aa, Homo sapiens
LGQTENGLPADMPRSKPGSVSEEEGRPI

SEQ ID NO: 26867 - protein, 43 aa, Homo sapiens
LLSHVLYMLLMKLLKGLNVTDVFGRMRLSVPVQLCPNAVLISQ

SEQ ID NO: 26868 - protein, 124 aa, Homo sapiens
LAPFLTRSSPSWNSYGTLAPETTNSSLKFSNSNNGISDLAFLYFSHVNKIGSASTMGYMLSYRVSLCRPGWSAVARDLGSLQAPPPGFTPFSCLSLLSSWDYRRPPPHPGIQLAVCYHMCYTCC

SEQ ID NO: 26869 - protein, 133 aa, Homo sapiens
MPRPPETMCQARIALDSSPSWNSYGTLAPETTNSSLKFSNSNNGISDLAFLYFSHVNKIGSASTMGYMLSYRVSLCRPGWSAVARDLGSLQAPPPGFTPFSCLSLLSSWDYRRPPPHPGIQLAVCYHMCYTCC

SEQ ID NO: 26870 - protein, 36 aa, Homo sapiens
MPRPPETMCQARIALDRCNLRTAFILFSLILSHYVF

SEQ ID NO: 26871 - protein, 58 aa, Homo sapiens
LSTCFKSPCTFSLWKDKHWRTISLPSAEMETNQDIKNAAVDSSYARFSRGSFQDGVPH

SEQ ID NO: 26872 - protein, 80 aa, Homo sapiens
MRARLWPKIFRQMFPSFAISLFFPPLLLLVSRQPSWKSLGWVGNEDGRFHSRYSPLRSNLMQREFSGLCATLHGILSLDF

SEQ ID NO: 26873 - protein, 40 aa, Homo sapiens
MTSITSIFFTNVRLWAFVYTLLTNFLEVQYISQQLLNAES

SEQ ID NO: 26874 - protein, 36 aa, Homo sapiens
LMMESRYVTRLECSGATSAQRNIRLPGSSDSPTSAS

SEQ ID NO: 26875 - protein, 7 aa, Homo sapiens
MMNLFSP

SEQ ID NO: 26876 - protein, 10 aa, Homo sapiens
MKLKRKGVDK

SEQ ID NO: 26877 - protein, 75 aa, Homo sapiens
LGRAGTTGAPAPHSNHPGEKERKSQGGGRSAGREAEKKYSPSRLMPTLRHFLRRQYWHWLRWCWSMGQFLLARHV

SEQ ID NO: 26878 - protein, 22 aa, Homo sapiens
LKELHSRRRQNKFPRISWAPFT

SEQ ID NO: 26879 - protein, 47 aa, Homo sapiens
LPSGDRKAVMRLMIDSNLLSKGRRRPEQYIRRIQQSILRHERASGQN

SEQ ID NO: 26880 - protein, 84 aa, Homo sapiens
LPSGDRKAVMRLMIDSNLLSYTGALDFPINRGRPRVIANPGVVKRNCSSEEKLHLYKKGRRRPEQYIRRIQQSILRHERASGQN

SEQ ID NO: 26881 - protein, 46 aa, Homo sapiens
LGRYPRTAAGIRWQLCEAQKGRRRPEQYIRRIQQSILRHERASGQN

SEQ ID NO: 26882 - protein, 77 aa, Homo sapiens
LSIDSKSSLLRRMLPRAPFPSPSTPFRDLLFPRAQQKWATASLTLAGVTKKGRRRPEQYIRRIQQSILRHERASGQN

SEQ ID NO: 26883 - protein, 13 aa, Homo sapiens
LAAVRGSERKEET

SEQ ID NO: 26884 - protein, 19 aa, Homo sapiens
MGDRKSYSRRRYKERKEET

SEQ ID NO: 26885 - protein, 53 aa, Homo sapiens
LVKQARGGVGNLNVTRGPEQIGWAGKVPANCRRNSLAAVRGSDYLNFPQISTD

SEQ ID NO: 26886 - protein, 148 aa, Homo sapiens
LPSLGINAKETFKYMKALINKKELLSEFYEPSALMMEEEGAIIAGLLVGLNVTDANFCVKGEDLDSQAGVTDFSMYLKDGNSSKVSEGDSQITAILDQKNFVEEPNRHLNATVNNLQAKVDALEKSNTKLTEELAVANNRIITLQEEM

SEQ ID NO: 26887 - protein, 38 aa, Homo sapiens
VVVQILLALCYGFLRVFSWFCLASSGKCPKRLEHCIKS

SEQ ID NO: 26888 - protein, 186 aa, Homo sapiens
LVHHVKEQYFRSAAMTLNKRFTSHQKATEEHSTRQKSPEIHRRIDISPSTLRKHTHLAGDERVFKEENQKGDKKKLRCDSADLQHDIDHRRKEISKERGNSKGPRESSGSRKQEKTPKDYKEYKSYKDDSKHKNREQDHSRSSSSSPSPSSPSSREEKESKKEREEEFKTHHEMKEYSGFAGVSQP

SEQ ID NO: 26889 - protein, 36 aa, Homo sapiens
LVRACCGFCSGSSGMAPGCGRVVSHAGAPGGGTRPP

SEQ ID NO: 26890 - protein, 22 aa, Homo sapiens
MPGSSPDKPGFIFVSEKALPYN

SEQ ID NO: 26891 - protein, 25 aa, Homo sapiens
LFPRAVLVGSDHLPYRMSLVRILKI

SEQ ID NO: 26892 - protein, 12 aa, Homo sapiens
LRSTDIITCWSL

SEQ ID NO: 26893 - protein, 33 aa, Homo sapiens
LYSDTFFLRRKGLIRLPKGGWGGGIMLSSDYSG

SEQ ID NO: 26894 - protein, 225 aa, Homo sapiens
LRAAPLPAGPGEHLASPPPTLPASRPVSPPSPRATGGGGGRSGPSRGSPGLARWDVANQQGPKNRAVPEPELDPGPQPEPKPEPESAAGEPGAHEPQTQRCPGGEKWAGERAARCSPLRPGMEGPTTHGIAGPSAWPGTSAVASRQEGIFPKRNRFVRSFVRSFGQQCRRKAADVGPRPGSLRPGPRRPAAALGGAPSPRQPALAGTGRAFSSQERNPNSLRNVQ

SEQ ID NO: 26895 - protein, 154 aa, Homo sapiens
VISCFLLFFNLGRGEGEEGQVLQAPPPPRLGPAAAARLGLRTRALLAAGAERTAAVVPRAERSSLPRPSPSASRRRRRWRLGRLGEPSEDISTWTPDHVPALSSEAHQASLLWAAGPGPGLWTLGSWQAPSAVGSGPRPHHVEPRRWLPGCRRQ

SEQ ID NO: 26896 - protein, 587 aa, Homo sapiens
MMETPLPKAPEKRQVTAIIFLLLLWEAGSATIKYSVLEERDSGSFVANLAKDLGLGVGELAARGARILSKGNKQYLQLERKSGNLLLKEKLDREELCGDIDPCILHFQMLLKNPVQFIQGELQLQDVNDHAPEFLENEILLKISEGSHPGTSFPLKIAQDLDVGSNTVQNYSISTNSYFHLFTRNHSDGKKYPELVLDQALDREEQPQLRLTLTALDGGSPPRTGTSQVLIVIVDINDNVPEFAQRRYEVQVPENTPIGSLVITVSARDLDAGTHGELSYSFFQYSNQIIQAFEINSITGEIRFKKALDFEEIQSYHMEVEASDGGGLSGKCTVAIEVMDINDNAPELTMSLLISDILENSPETVVAVFGISDPDSGNNGKMMCSIQDHLPFLLKPTLENFYTLLTEGALDRESRAEYNITITVTDLGTPRLKTEYNITLRVSDVNDNAPAFTQTSYTLFVRENNSPALHIGSVSATDRDSGTNAQVTYSLLPPQNPHLPLASLVSINTDNGHLFALRSLDYEALQEFEFRVGASDRGSPALSSEALVRVLVCWTPTTTRPSCCTRCRTAPRPAPSWCPGRPSRATW

SEQ ID NO: 26897 - protein, 465 aa, Homo sapiens
VLEKPLGQEQQSSHLLVLEAMDMGDPVPTGTAAIQIEVTDANDNAPVFSQDVYKVSLRENVPPGTSVLKVTATDQDEGVNAEITYSFKSLRDDIGNMFVLDHQNGEIKSKDLIDFEFRSSYTMRVEAKDGGGMTSECKIILEILDENDNAPDVVFTSVSSSVTEDAEPWTVITLFKTHDKDSRENGEVTCLINERVPFRIESSANNDYKLVTDGTLDWERIPEYNVTITATDKGKPPLSSSTSLTLRIGEVNDNAPVFHQVSYVVHVAENNLPGASIPQVSASDLDLGLNGQVSYSIVTTDLELRALSSYVSVSAQSGVVVAQRAFDHEQLCAFELTMQAHDQGSPALSANMSRRMLVGDLNDNVPRVLYPALGPDGSALFDIVPRAAESGYLVTKVVAVDADSGHNAWLSYHVLQAIEPGLFSLGLHTGTCWLLCVTEDSRRSLRRYASPSLRRQPAGGTARLQ

SEQ ID NO: 26898 - protein, 141 aa, Homo sapiens [sequence omitted]

SEQ ID NO: 26899 - protein, 63 aa, Homo sapiens
MGNPGQSSGASQPHTSSLQPFVSAGEGPGSQAGRPTGYPTLCSGRGWRPYIQLRAPPPIPCVL

SEQ ID NO: 26900 - protein, 97 aa, Homo sapiens
LSRQGRAQAAKPAGPLVIRPCALAVGGDLTSSSERLLPSPVSSRPPQTLPFSLPVKQVLYPRYTIKWTKQIAESLFVAHKGTSKMTKRSGRRQRESM

SEQ ID NO: 26901 - protein, 34 aa, Homo sapiens
LDLTLLPRLECSDTIMTHCSLKLLGSSNPPTSAF

SEQ ID NO: 26902 - protein, 265 aa, Homo sapiens
MQQRFPSSDPHTLPPSRFFKGAIFPTMWPFMGKRGVQPSYEAREAGGLSLLSRANLMFATFPISHGWGPCVQVSEDPEALDEFLAGRLDCSCLDGRGARLRPTGQPLAHSLPLSLQIPFLGAGIKIHEKRVSDNLRPFHDRMEECFKNLKMKVEKEYGVREMPDFDDRRVGRPRSMLRSYRQMSIISLASMNSDCSTPSKPTSESFDLELASPKTPRVEQEEPISPGSTLPEVKLRRSKKRTKRSSVVFADEKAAAESDLKRVSG

SEQ ID NO: 26903 - protein, 84 aa, Homo sapiens
MPLGLCSHDLIGRPSVMELDPGASCLWHWLEASKPLHFCVYSPESHHGARPWPPTLLLNTGIFFFTNGISWFPLPPLSHKTIGN

SEQ ID NO: 26904 - protein, 122 aa, Homo sapiens
VGQKSRPPREPQTESLGSESPSHSWRGSQGKESREEVGSPLQPQKSRRINRGPPGVIERKPALSCTTCSSNLLSCCKSLWGLRFLQRHMGGPSEELSGEPLSEEPQKRPPQKAVRTLPSEAV

SEQ ID NO: 26905 - protein, 23 aa, Homo sapiens
LIPLHLILSGIGRSVHNELEKRR

SEQ ID NO: 26906 - protein, 321 aa, Homo sapiens
MSAAGLLAPAPPGLERPRGGRRAGERQGRRAQLPGRESDEDTEDASETDLAKHDEEDYGEVKEQMYQDKLASLERQLQQLQEGTLQEYQKRMKKLGQQYKERIRNAELFLQLETEQVGRNYMKEKKAAVKEFEDKKVELKENLIAELAEEKKMIENEMLTMELNGDSMQVRPIMTRKLRRRPNDPVPIPDKRRKPAPAQLNYLLTDEQIMEDLRTLNKLKSPKRPASPSSPEHLPATPAESPAQRFEARIEDGKLHYDKRWYHKSQAIYLESKDNQKLSCVISSVGANEIWVRKTSDSTKMRIYLGQLQRGLFVIHRRSAA

SEQ ID NO: 26907 - protein, 196 aa, Homo sapiens [sequence omitted]

SEQ ID NO: 26908 - protein, 8 aa, Homo sapiens
VVPQRVKV

SEQ ID NO: 26909 - protein, 30 aa, Homo sapiens
LCQKGRLTTRTTGPTSSPSILSTLQRALAG

SEQ ID NO: 26910 - protein, 22 aa, Homo sapiens
MERPVDRSHKLFHDNSCVRRGG

SEQ ID NO: 26911 - protein, 87 aa, Homo sapiens
LPRWLCSHQGGSSFYLVTYSPLVPLSSLDLRRLLRISPSGLRSISRSFLEEQEEALCSHHIPVARSWLQGSSGNRMREAMRPPQTLQ

SEQ ID NO: 26912 - protein, 34 aa, Homo sapiens
MEAQGCHDGSVVIREGAPFILLPTPLLCPFLPLI

SEQ ID NO: 26913 - protein, 14 aa, Homo sapiens
LKETCCYCFSCCSA

SEQ ID NO: 26914 - protein, 39 aa, Homo sapiens
LRLPSNLKDPATSTQMVATSAQVEVEFGSRGTLFPVASC

SEQ ID NO: 26915 - protein, 55 aa, Homo sapiens
LSKELFAPAGARRGGGQEAAARTGHLITSPALVCFCESPLCSTPTRRLSLPAPSL

SEQ ID NO: 26916 - protein, 27 aa, Homo sapiens
MVCRGPRGPGVGWAGGQARPRRPLQLG

SEQ ID NO: 26917 - protein, 60 aa, Homo sapiens
VGWGTGAPAPPAPAGLVLHIPASPSSRPHSQAPSQLPRAGRAALISKMLLKAHGHDCTPH

SEQ ID NO: 26918 - protein, 41 aa, Homo sapiens
LVIGLGRTPLSQWNLEHTLEPSSSSPDLCQTAILQPPEPST

SEQ ID NO: 26919 - protein, 36 aa, Homo sapiens
VAQSKDCMCSLLCCILSSLTTVPSTQRALPVYLLSK

SEQ ID NO: 26920 - protein, 18 aa, Homo sapiens
MNKPNTFQPSPADVSPPI

SEQ ID NO: 26921 - protein, 55 aa, Homo sapiens
LLMFLLRSSSSFPALLLPLQISPPSASDWIKGNHFSKGSLALSFQAILQPPEPST

SEQ ID NO: 26922 - protein, 9 aa, Homo sapiens
MGGLFEPAV

SEQ ID NO: 26923 - protein, 416 aa, Homo sapiens
LHPGVCSAVSAGAWSHLPWASASWCVQCCTCWCLESHLPWASVSWCVQCCICWCLESHLPWASASWCVQCCICGCLESHLPWASASWCVQCCICWCLESSALGFCILVCAVLYLLVPGVICPGLPHPRVCSAVPAGAWRVICPGLLRSGVCSAVSAGAWRVICPGLPRPGVCNAVSAGVWSHLPWASASWCVQCCICWCLESHLRWASASWCVQCCICWCLESHLPWASAFWCVQCCICWCLESHLPWASPSWCVQCCICWCLESRLPSASVSWTRHFKESIKFIHECRLRGESCLVHCLAGVSRSVTLVIAYIMTVTDFGWEDALHTVRAGRSCANPNVGFQRQLQEFEKHEVHQYRQWLKEEYGESPLQDAEEAKNILGKYKEQGRTEPQPGARRWSSFPALAPLTYDNYTTET

SEQ ID NO: 26924 - protein, 21 aa, Homo sapiens
LSENRRVSRPTENPARLLGMN

SEQ ID NO: 26925 - protein, 119 aa, Homo sapiens
LSPPAGRRMYPTAPELLVPQPRPQGSPASLLLGTPVLAAVYGASCLPLGRHPCTPASFPWPFLAPVLLLYIDLFTQKRARPLFSATSPVSEIQPPRLHRKIDILEIMKSDIFAYERKKG

SEQ ID NO: 26926 - protein, 39 aa, Homo sapiens
MEASPIALKLRCGKHSAASKSGLVDPNYIIFHQNHSCKE

SEQ ID NO: 26927 - protein, 36 aa, Homo sapiens
MLGVSFQGSETPFPALRNSVKKSLLGDLQYLFFCSS

SEQ ID NO: 26928 - protein, 56 aa, Homo sapiens
LGLCEGKRQSVPHRLEAATLETSEYPQVTPRRGWCACQLFWALSEAGETIVEAVLG

SEQ ID NO: 26929 - protein, 79 aa, Homo sapiens [sequence omitted]

SEQ ID NO: 26930 - protein, 42 aa, Homo sapiens
VSHHAWSYIPFHSCRVPSGDYRCVNTQHVPVGDFLDGEDFQV

SEQ ID NO: 26931 - protein, 56 aa, Homo sapiens
VQDSKIYFLPFPAELPETSKIYWWSHSIILICGDLDLDLKVSEKIFSSDLRVNFTS

SEQ ID NO: 26932 - protein, 15 aa, Homo sapiens
MCAFFSVTKSSLGYY

SEQ ID NO: 26933 - protein, 16 aa, Homo sapiens
MGRREPARFDAFSIRQ

SEQ ID NO: 26934 - protein, 73 aa, Homo sapiens
LSCSCRLPPGLRRGAPDPGIVRLRPAKEGPAGGAPAGVSCLAAGRGDLEDRVKLQKTWGGMAREDAKDWGRGS

SEQ ID NO: 26935 - protein, 60 aa, Homo sapiens
LLLPSPAWASPWCTRSRNRASAPCERRTCWRSSGRGLLPRSWARGLGGQGEAAEDLGWDG

SEQ ID NO: 26936 - protein, 126 aa, Homo sapiens
VHPAQAVPRDLVWGDNPWRDVVAFYLRVELKMDKQAQIKFWEFTFLKLGSRSWPVLNKSNRVDICGNVRFTRSQDKMLFDNGLEERVKEWFRANSRKNNLIHTWRRTQELNQMGLWCLGRKLTKRQ

SEQ ID NO: 26937 - protein, 51 aa, Homo sapiens
LMYLPEKAELEKGGARERVKRKRCRMPGDCLPLAVHSHSREDGIIYNPAHG

SEQ ID NO: 26938 - protein, 19 aa, Homo sapiens
MGRLDFFRRLQRRTVSPCF

SEQ ID NO: 26939 - protein, 37 aa, Homo sapiens
MLHCLIFQSPSYKELYYWYNHHGEEVGMWGRDDRNRE

SEQ ID NO: 26940 - protein, 39 aa, Homo sapiens
MHSVQAPRKRTNGRGHMCKQDGSLESLRLNHECSALSSL

SEQ ID NO: 26941 - protein, 173 aa, Homo sapiens
LPLKARGGGGTCGGGRQVVSGHRLGFGRRTRHLCLGNAHKKINRTPHHFERGQIHREVSLGECRTSCRLGVLGTRALIRSNHRAGIINTVLYTPFPSAVMILLGSSVSSRLRVKMWVMGKLVMTPLFFLMAPLGHSCPPPVYTVVDCRETLYLSLSFSTDFALFSMLTTKCNQ

SEQ ID NO: 26942 - protein, 175 aa, Homo sapiens
MGPRARPALLLLMLLQTAVLQGRLLRSHSLHYLFMGASEQDLGLSLFEALGYVDDQLFVFYDHESRRVEPRTPWVSSRISSQMWLQLSQSLKGWDHMFTVDFWTIMENHNHSKGMWRGGLTFLRLSELFIFSCILKETAGSLRSCGSREEGRNLLPEIIWSLGMVEIGTYSFGCS

SEQ ID NO: 26943 - protein, 208 aa, Homo sapiens
LLWVLMEPAAALHFSRPASLLLLLSLCALVSAQVTVVGPTDPILAMVGENTTLRCCLSPEENAEDMEVRWFQSQFSPAVFVYKGGRERTEEQKEEYRGRTTFVSKDSRGSVALIIHNVTAEDNGIYQCYFQEGRSCNEAILHLVVAGALLHFALLLWHCVTLGKASLLNSSPLQTSTILFPGSPFRRDTLPMKRRFQGKILPPAQGPP

SEQ ID NO: 26944 - protein, 134 aa, Homo sapiens
LALAVPVSSSQYSGPSCSIHGARGSILGLVASLSSRTHCVSSTSPTERKRGSARPGRDMVVWKYLKEWKPGSKEGAETLPTLLPAPQPGSCAPAGQAPSYSPQTPFPSRPRTHLPRSGSGPGPPRAAEAGFGAP

SEQ ID NO: 26945 - protein, 221 aa, Homo sapiens
MVLMAPRTLLLLLSGALALTLTQTWARSHSMRYFYTTMSRPGRGEPRFISVGYVDDTQFVRFDSDDASPREEPRAPWMEREGPEYWDRNTQICKAQAQTERENLRIALRYYNQSEGGSHTMQVMYGCDVGPDGRFLRGYEQHAYDGKDYIALNEDLRSWTAADMAAQITKRKWEAARRAEQLRAYLEGEFVEWLRRYLENGKETLQRADPPQDTYDPPPHL

SEQ ID NO: 26946 - protein, 169 aa, Homo sapiens
MGRGRDLRPGPGSLTALALVVVAERDPQVLSFSLCLGLADLCVPVPILWPLPLHPRRPRLLSRTRVVAVEPHELRIVHVADGDEAGLPAAGPGHGGVEIPHGVGAWERGGAETGPTLLPARIPGSCAPAGRAPRSSRPFPCRPCTHAPRSGSGSGPGPLRAAGGGFGAP

SEQ ID NO: 26947 - protein, 96 aa, Homo sapiens
LRVVHVAHGDEAGLPAAGPGHGCEEIPHGVGAWGRAVAETCPTLVPARLPRSCAPARRAPCFSPQRRFPSRPRTHPPRSGSGPGPPRVAGGGFGAP

SEQ ID NO: 26948 - protein, 367 aa, Homo sapiens
LTEWTWGPCAATTTRARPVSDPGRGRRSGPLIPHGRARSPTVSGSEIHPEAAGPRDPCPGRGPGAFTRFHFQFRPKIPPGWSGLGGARGTGLTAGSGPGSHTIQIMYGCDVGSDGRFLRGYRQDAYDGKDYIALNEDLRSWTAADMAAQITKRKWEAAHEAEQLRAYLDGTCVEWLRRYLENGKETLQRTDPPKTHMTHHPISDHEATLRCWALGFYPAEITLTWQRDGEDQTQDTELVETRPAGDGTFQKWAAVVVPSGEEQRYTCHVQHEGLPKPLTLRWELSSQPTIPIVGIIAGLVLLGAVITGAVVAAVMWRRKSSEKEGVTLRLQAVTVPRALMCPSQLVKCETAALCGTERQELFLPFPL

SEQ ID NO: 26949 - protein, 280 aa, Homo sapiens
VRVDSDAVSLRMKTRARWVEQEGPEYWDLQTLGAKAQAQTDRVNLRTLLRYYNQSEAGYHILQGMFGCDLGPDGRLLRGYEQYAYDGKDYIALNEDLRSWTAADTAAQITQRKYEAANVAEQRRAYLEGTCMEWLRRHLENGKETLQRADPPQDTRDPPPSLNMRHNEVLGSGLLPCGDHIDLAAGWGGPDPGHGARGDQAHRGWNLPEVGGCGSAFWRGTEIHMPCAAQGAAQAPHPEMGALSPAHHPHCGYHCWPGSPWSCGHWSCGHCCDVEEEELR

SEQ ID NO: 26950 - protein, 53 aa, Homo sapiens
VSALSGCLHNQFLLACADFEGKVVKTSVVFHQLGTAMPMSVEEGPECQGPVVS

SEQ ID NO: 26951 - protein, 59 aa, Homo sapiens
LLNLTGSFCSPVLPSHCGLQIPGNPSPCDLMVCSVLHPRDQKEPGVKNWLTWPPLGNSG

SEQ ID NO: 26952 - protein, 67 aa, Homo sapiens [sequence omitted]

SEQ ID NO: 26953 - protein, 874 aa, Homo sapiens
LESQPHRGSPPPEAEIAPGAATVAVTATAMPKAPKQQPPEPEWIGDGESTSPSDKVVKKGKKDKKIKKTFFEELAVEDKQAGEEEKVLKEKEQQQQQQQQQQKKKRDTRKGRRKKDVDDDGEEKELMERLKKLSVPTSDEEDEVPAPKPRGGKKTKGGNVFAALIQDQSEEEEEEEKHPPKPAKPEKNRINKAVSEEQQPALKGKKGKEEKSKGKAKPQNKFAALDNEEEDKEEEIIKEKEPPKQGKEKAKKAEQGSEEEGEGEEEEEEGGESKADDPYAHLSKKEKKKLKKQMEYERQVASLKAANAAENDFSVSQAEMSSRQAMLENASDIKLEKFSISAHGKELFVNADLYIVAGRRYGLVGPNGKGKTTLLKHIANRALSIPPNIDVLLCEQEVVADETPAVQAVLRADTKRLKLLEEERRLQGQLEQGDDTAAERLEKVYEELRATGAAAAEAKARRILAGLGFDPEMQNRPTQKFSGGWRMRVSLARALFMEPTLLMLDEPTNHLDLNAVIWLNNYLQGWRKTLLIVSHDQGFLDDVCTDIIHLDAQRLHYYRGNYMTFKKMYQQKQKELLKQYEKQEKKLKELKAGGKSTKQAEKQTKEALTRKQQKCRRKNQDEESQEAPELLKRPKEYTVRFTFPDPPPLSPPVLGLHGVTFGYQGQKPLFKNLDFGIDMDSRICIVGPNGVGKSTLLLLLTGKLTPTHGEMRKNHRLKIGFFNQQYAEQLRMEETPTEYLQRGFNLPYQDARKCLGRFGLESHAHTIQICKLSGGQKARVVFAELACREPDVLILDEPTNNLDIESIDALGEAINEYKGAVIVVSHDARLITETNCQLWVVEEQSVSQIDGDFEDYKREVLEALGEVMVSRPRE

SEQ ID NO: 26954 - protein, 836 aa, Homo sapiens
LESQPHRGSPPPEAEIAPGAATVAVTATAMPKAPKQQPPEPEWIGDGESTSPSDKVVKKGKKDKKIKKTFFEELAVEDKQAGEEEKVLKEKEQQQQQQQQQQKKKRDTRKGRRKKDVDDDGEEKELMERLKKLSVPTSDEEDEVPAPKPRGGKKTKGGNVFAALIQDQSEEEEEEEKHPPKPAKPEKNRINKAVSEEQQPALKGKKGKEEKSKGKAKPQNKFAALDNEEEDKEEEIIKEKEPPKQGKEKAKKAEQMEYERQVASLKAANAAENDFSVSQAEMSSRQAMLENASDIKLEKFSISAHGKELFVNADLYIVAGRRYGLVGPNGKGKTTLLKHIANRALSIPPNIDVLLCEQEVVADETPAVQAVLRADTKRLKLLEEERRLQGQLEQGDDTAAERLEKVYEELRATGAAAAEAKARRILAGLGFDPEMQNRPTQKFSGGWRMRVSLARALFMEPTLLMLDEPTNHLDLNAVIWLNNYLQGWRKTLLIVSHDQGFLDDVCTDIIHLDAQRLHYYRGNYMTFKKMYQQKQKELLKQYEKQEKKLKELKAGGKSTKQAEKQTKEALTRKQQKCRRKNQDEESQEAPELLKRPKEYTVRFTFPDPPPLSPPVLGLHGVTFGYQGQKPLFKNLDFGIDMDSRICIVGPNGVGKSTLLLLLTGKLTPTHGEMRKNHRLKIGFFNQQYAEQLRMEETPTEYLQRGFNLPYQDARKCLGRFGLESHAHTIQICKLSGGQKARVVFAELACREPDVLILDEPTNNLDIESIDALGEAINEYKGAVIVVSHDARLITETNCQLWVVEEQSVSQIDGDFEDYKREVLEALGEVMVSRPRE

SEQ ID NO: 26955 - protein, 138 aa, Homo sapiens
LLGSTLHFPSVHRSQLIMQAEAEAASVRMRGEAEAFAIGARARAEAEQMAKKAEAFQLYQEAAQLDMLLEKLPQVAEEISGPLTSANKITLVSSGSGTMGAAKVTGEVLDILTRLPESVERLTGVSISQVNHKPLRTA

SEQ ID NO: 26956 - protein, 128 aa, Homo sapiens
MFFTCGPNEAMVVSGFCRSPPVMVAGGRVFVLPCIQQIQRISLNTLTLNVKSEKVYTRHGVPISVTGIAQVKLSEPFPHSPLPHHPLSQTLRHLLATVFSTLACREVPLLVSSFPGTPRHLPPPPFFP

SEQ ID NO: 26957 - protein, 71 aa, Homo sapiens
LDSRQSEEVSVSKRHMDATDKIKFPWLKEKRTIEFGEAAGYVCHRRYKDMEPHEKMGEAAKKVHWVQVRSR

SEQ ID NO: 26958 - protein, 75 aa, Homo sapiens
MASRRLCSQPSMQRPSGFEMQQKPSPPDRGLHASGQSTAPPSPSPRRRSLSGWTQPELTHKQTKKVTLKELSVGL

SEQ ID NO: 26959 - protein, 49 aa, Homo sapiens
MQRPSGFEMQQKPSPPDRGLHASGQSTAWEELVCSQAVLHPVLTLALVI

SEQ ID NO: 26960 - protein, 701 aa, Homo sapiens
LNWSVFVSPLVQGNIDGWRQNLEPSNNVEMFPPSGSTGLIPPSHFQARPLSTLPRMAPTWLSDIPLVQPPGHQDVSERRLDTQRPQVTMWERDVSSDRQEPGRRGRSWGLEGSQALSQQAEVIVRQLQELRRLEEEVRLLRETSLQQKMRLEAQAMELEALARAEKAGRAEAEGLRAALAGAEVVRKNLEEGSQRELEEVQRLHQEQLSSLTQAHEEALSSLTSKAEGLEKSLSSLETRRAGEAKELAEAQREAELLRKQLSKTQEDLEAQVTLVENLRKYVGEQVPSEVHSQTWELERQKLLETMQHLQEDRDSLHATAELLQVRVQSLTHILALQEEELTRKVQPSDSLEPEFTRKCQSLLNRWREKVFALMVQLKAQELEHSDSVKQLKGQVASLQEKVTSQSQEQAILQRSLQDKAAEVEVERMGAKGLQLELSRAQEARRRWQQQTASAEEQLRLVVNAVSSSQIWLETTMAKVEGAAAQLPSLNNRLSYAVRKVHTIRGLIARKLALAQLRQESCPLPPPVTDVSLELQQLREERNRLDAELQLSARLIQQEVGRAREQGEAERQQLSKVAQQLEQELQQTQESLASLGLQLEVARQGQQESTEEAASLRQELTQQQELYGQGVEREMGASLGGWGGNCESKLLLICPVCTFTPALQEKVAEVETRLREQLSDTERRLNEARREHAKAGEPCQGG

SEQ ID NO: 26961 - protein, 419 aa, Homo sapiens
VTVYNPIQKRPDFKQQQDCFRSILGPANIKKATGETERLSESLKLRYEEVEIWKKLEEKDRQGEAQWLQQKRQETGREDGSTLAKGSLEIVLDSKDKTQKSNGEKNEKCETKEKGAITAKELYTMMMDKNISLIIMDAQRMQDYQDSCILHSLSVPEEAISPGVTASWIEAHLPDDSIDTWKKRGNVEYMVLLDWFSSAKDLQIRTTLWHLKDALFKWESKTVLCNGPWALVLEGGCKNWFLCYSQYTTNAKVTPPPQHQNEELSISLDFTYPSLEESIPSKPAAQMPPPHIEVDENIELISDQISDNDQNERTGPLNISIPVEPVAASKSDVSPIIQPVPSIKNVPQIDHTKKLAVKLPEEHIIKSESTNHEQQSPQNEKVIPDCSAKPVVSSPTLMLTDEEKAHIHAETALLMEKNK

SEQ ID NO: 26962 - protein, 269 aa, Homo sapiens
LPWKRSSRHRGKVKSFPKDDPSKPVHLTAFLGYKAGMTHIVREVDRPGSKVNKKEVVEAVTIVERPPVGIVGCVETPQGFRTCKTVFAEHISDECKRHFYKNWHKSKKKAFTKYCKKWQDEDGKKQLEKDFSSMKKYCQVICVIAHTQMQLLPLCQKKAHLMEIQVNGGTVAEKLDWAGERLKHQVPVNQVFGQDEMIDVIRVTKGKGYKRVTSRWHTKKLPRKTHQGLCKVACIGAWHPARVGFSVVRGGQKGYHHRTEINKKIYRIG

SEQ ID NO: 26963 - protein, 13 aa, Homo sapiens
VVGVGVWRSSPTP

SEQ ID NO: 26964 - protein, 164 aa, Homo sapiens
MPGPCVCTYKVKVLNLAPRKHPHLGIACNSRYFVHLCFYFRSWDSYIHQNSTVSRPSPPESLGDTVLWRRVRLEEALTPGLLILPTQSEAEKKCRTLHFLLGPDREARATMDVKFRQGNTSIAKSPHHILKLTQWLKENPHQKTEFLAQVRSPKLPVRLRGTCR

SEQ ID NO: 26965 - protein, 23 aa, Homo sapiens
MEESEIGGSPDSRSPDPSYTKRS

SEQ ID NO: 26966 - protein, 69 aa, Homo sapiens
VSPRFLVLKSSPAHRDSDSPQTPRLRVMESRTLLLLFSGAVALIQTWADYNYNQGRNDLIFTLQLWKRQ

SEQ ID NO: 26967 - protein, 132 aa, Homo sapiens
MLLRMSEHRNEALGNYLEMRLKSSFLRGLGSWKSNPLRLGGWTILLTLTMGQGEPGGPQGDPWVPHELLLPSLCDSSHASSWGSGSITCAWRGGDSSSHPLVSGHILSNSPVAAVMCSSMGTHLSPFKGTLL

SEQ ID NO: 26968 - protein, 31 aa, Homo sapiens
MSLIFKMHHVLKDGTLPPAECFLQAGVELCL

SEQ ID NO: 26969 - protein, 25 aa, Homo sapiens
LHGEQCQACGSGISTAPREWCWLRV

SEQ ID NO: 26970 - protein, 41 aa, Homo sapiens
VFSGDVNMGFRLNSQETFPSHDGCCWACPMYDFMSYTDANS

SEQ ID NO: 26971 - protein, 14 aa, Homo sapiens
LGPTGNGCNEGSGA

SEQ ID NO: 26972 - protein, 48 aa, Homo sapiens
LTQTGKRHDELSPGGLKADDGAEAVGDEGGGSGVAFTWALSMEVRTGR

SEQ ID NO: 26973 - protein, 13 aa, Homo sapiens
LSHRRSDKNLFMT

SEQ ID NO: 26974 - protein, 8 aa, Homo sapiens
MVLIRFVS

SEQ ID NO: 26975 - protein, 24 aa, Homo sapiens
LFHRDRVLLCCPGWSSTPGLKQSP

SEQ ID NO: 26976 - protein, 48 aa, Homo sapiens
VEIINLCHLRSPTCRGCPGTLGENKNKAPRILVSGTEHGHGGMVVALL

SEQ ID NO: 26977 - protein, 256 aa, Homo sapiens
VRLSCPISLGCPCFVLWTTAQQCPALCLGLGPSCTCCLDPRPAWAWALVLPMTPPERLFLPRVCGTTLHLLLLGLLLVLLPGAQGLPGVGLTPSAAQTARQHPKMHLAHSTLKPAAHLIGDPSKQNSLLWRANTDRAFLQDGFSLSNNSLLVPTSGIYFVYSQVVFSGKAYSPKATSSPLYLAHEVQLFSSQYPFHVPLLSSQKMVYPGLQEPWLHSMYHGAAFQLTQGDQLSTHTDGIPHLVLSPSTVFFGAFAL

SEQ ID NO: 26978 - protein, 102 aa, Homo sapiens
LEGRGGRLQGRGSLLLAVAGATSLVTLLLAVPITVLAVLALVPQDQGGLVSGCNRPWWRVVSCGCLAPSGCACGLLPPLAQLARLSLVGMSCLFADSLSMFL

SEQ ID NO: 26979 - protein, 38 aa, Homo sapiens
LTSPPAASVLSPQGGKHLMLEVPGSCGPWQVMCESRVS

SEQ ID NO: 26980 - protein, 32 aa, Homo sapiens
LTSPPAASVLSPQGGKHLMLEVPGSCGPWQVM

SEQ ID NO: 26981 - protein, 189 aa, Homo sapiens
LVGNPFLSPLLKTLQSALIPSALSPHPEKYMEFDLNGNGDIGEKRVICGGRVVCRPKKTEVSPTCSIPHDLGGGPPTTVGGRRMGMRKWERRERVSPPSPHPHPLPPDIMSLKRMLEKLGVPKTHLELKKLIGEVSSGSGETFSYPDFLRMMLGKRSAILKMILMYEEKAREKEKPTGPPAKKAISELP

SEQ ID NO: 26982 - protein, 123 aa, Homo sapiens
LVGNPFLSPLLKTLQSALIPSALSPHPEKYMEFDLNGNGDIDIMSLKRMLEKLGVPKTHLELKKLIGEVSSGSGETFSYPDFLRMMLGKRSAILKMILMYEEKAREKEKPTGPPAKKAISELP

SEQ ID NO: 26983 - protein, 186 aa, Homo sapiens
VPGFPTAPTRVVIARPTPPQARPSHPGGPPVSGTLQGAGLGTNASLAQMVSGLVGQLLMQPVLVAQGTPGMAPPPAPATASASAGTTNTATTAGPAPGGPAQPPPTPQPSMADLQFSQLLGNLLGPAGPGAGGSGVASPTITVAMPGVPAFLQGMTDFLQVSGWLAIHLIFLSPGPARQWYLLAII

SEQ ID NO: 26984 - protein, 34 aa, Homo sapiens
LGISEDILVLTLWRPRLCCVFAGQSGHFVEIIAL

SEQ ID NO: 26985 - protein, 419 aa, Homo sapiens
VTHLFLFGKRKLRNGIAEDLKGQADFFFLLVSEAVVATGSPRAWLTCLILPLPGIIFSVLPKAMSRPLLITFTPATDPSDLWKDGQQQPQPEKPESTLDGAAARAFYEALIGDESSAPDSQRSQTEPARERKRKKRRIMKAPAAEAVAEGASGRHGQGRSLEAEDKMTHRILRAAQEGDLPELRRLLEPHEAGGAGGNINARDAFWWTPLMCAARAGQGAAVSYLLGRGAAWVGVCELSGRDAAQLAEEAGFPEVARMVRESHGETRSPENRSPTPSLQYCENCDTHFQDSNHRTSTAHLLSLSQGPQPPNLPLGVPISSPGFKLLLRGGWEPGMGLGPRGEGRANPIPTVLKRDQEGLGYRSAPQPRVTHFPAWDTRAVAGRERPPRVATLSWREERRREEKDRAWERDLRTYMNLEF

SEQ ID NO: 26986 - protein, 420 aa, Homo sapiens
VTHLFLFGKRKLRNGIAEDLKGQADFFFLLQVSEAVVATGSPRAWLTCLILPLPGIIFSVLPKAMSRPLLITFTPATDPSDLWKDGQQQPQPEKPESTLDGAAARAFYEALIGDESSAPDSQRSQTEPARERKRKKRRIMKAPAAEAVAEGASGRHGQGRSLEAEDKMTHRILRAAQEGDLPELRRLLEPHEAGGAGGNINARDAFWWTPLMCAARAGQGAAVSYLLGRGAAWVGVCELSGRDAAQLAEEAGFPEVARMVRESHGETRSPENRSPTPSLQYCENCDTHFQDSNHRTSTAHLLSLSQGPQPPNLPLGVPISSPGFKLLLRGGWEPGMGLGPRGEGRANPIPTVLKRDQEGLGYRSAPQPRVTHFPAWDTRAVAGRERPPRVATLSWREERRREEKDRAWERDLRTYMNLEF

SEQ ID NO: 26987 - protein, 148 aa, Homo sapiens
LRCSGRRRSLEVATSLPHPSPGPRPAADVKMSSSEEVSWISWFCGLRGNEFFCEVSSLQPPYLPASHIFPPDVPSHIPLLHCSLTCYLKTSYQQRVPPINPDEPVLKWQNWGPSPESATVQQYNVGLVNLCLFLFFETGSHSVTEAGG

SEQ ID NO: 26988 - protein, 143 aa, Homo sapiens
LDTWFSSGLFPLSILGWPNQVCSWGRGLAGQGTGGWVLAPLHTLVCPQSEDLSVFYPGTLLETGHDILFFWVARMVMLGLKLTGRLPFREVRRQPRPSHRPQPPLLPSCAAAQTPRGWGMGLAVGRPDPGAGVGLKSSLGPAQ

SEQ ID NO: 26989 - protein, 709 aa, Homo sapiens
LRSCCDSPLPFSRVTPVVPRLPRANLCGCRHRRVEFPASGRTELFSRIQCSVSSPQSQSGADREQGTGMAKAAAIGIDLGTTYSCVGVFQHGKVEIIANDQGNRTTPSYVAFTDTERLIGDAAKNQVALNPQNTVFDAKRLIGRKFGDPVVQSDMKHWPFQVINDGDKPKVQVSYKGETKAFYPEEISSMVLTKMKEIAEAYLGYPVTNAVITVPAYFNDSQRQATKDAGVIAGLNVLRIINEPTAAAIAYGLDRTGKGERNVLIFDLGGGTFDVSILTIDDGIFEVKATAGDTHLGGEDFDNRLVNHFVEEFKRKHKKDISQNKRAVRRLRTACERAKRTLSSSTQASLEIDSLFEGIDFYTSITRARFEELCSDLFRSTLEPVEKALRDAKLDKAQIHDLVLVGGSTRIPKVQKLLQDFFNGRDLNKSINPDEAVAYGAAVQAAILMGDKSENVQDLLLLDVAPLSLGLETAGGVMTALIKRNSTIPTKQTQIFTTYSDNQPGVLIQVYEGERAMTKDNNLLGRFELSGIPPAPRGVPQIEVTFDIDANGILNVTATDKSTGKANKITITNDKGRLSKEEIERMVQEAEKYKAEDEVQRERVSAKNALESYAFNMKSAVEDEGLKGKISEADKKKVLDKCQEVISWLDANTLAEKDEFEHKRKELEQVCNPIISGLYQGAGGPGPGGFGAQGPKGGSGSGPTIEEVD

SEQ ID NO: 26990 - protein, 544 aa, Homo sapiens
LRSCCDSPLPFSRVTPVVPRLPRANLCGCRHRRVEFPASGRTELFSRIQCSVSSPQSQSGADREQGTGMAKAAAIGIDLGTTYSCVGVFQHGKGERNVLIFDLGGGTFDVSILTIDDGIFEVKATAGDTHLGGEDFDNRLVNHFVEEFKRKHKKDISQNKRAVRRLRTACERAKRTLSSSTQASLEIDSLFEGIDFYTSITRARFEELCSDLFRSTLEPVEKALRDAKLDKAQIHDLVLVGGSTRIPKVQKLLQDFFNGRDLNKSINPDEAVAYGAAVQAAILMGDKSENVQDLLLLDVAPLSLGLETAGGVMTALIKRNSTIPTKQTQIFTTYSDNQPGVLIQVYEGERAMTKDNNLLGRFELSGIPPAPRGVPQIEVTFDIDANGILNVTATDKSTGKANKITITNDKGRLSKEEIERMVQEAEKYKAEDEVQRERVSAKNALESYAFNMKSAVEDEGLKGKISEADKKKVLDKCQEVISWLDANTLAEKDEFEHKRKELEQVCNPIISGLYQGAGGPGPGGFGAQGPKGGSGSGPTIEEVD

SEQ ID NO: 26991 - protein, 183 aa, Homo sapiens
LAQNLALEGLRGHLLSDKGNGEMTVVGAAEVTQSIRPEEELLPAQDIKALFVSEEEKKLTRKEVYIKNGDKKGSCERDAQYAPGYDKVKDISEVVTPRFLCTGGVSPYADPNTCRGDSGGPLIVHKRSRFIQVGVISWGVVDVCKNQKRQKQVPAHARDFHINLFQVLPWLKEKLQDEDLGFL

SEQ ID NO: 26992 - protein, 711 aa, Homo sapiens
LVGGWGGKMAELMLLSEIADPTRFFTDNLLSPEDWGLQNSTLYSGLDEVAEEQTQLFRCPEQDVPFDGSSLDVGMDVSPSEPPWELLPIFPDLQVKSEPSSPCSSSSLSSESSRLSTEPSSEALGVGEVLHVKTESLAPPLCLLGDDPTSSFETVQINVIPTSDDSSDVQTKIEPVSPCSSVNSEASLLSADSSSQAFIGEEVLEVKTESLSPSGCLLWDVPAPSLGAVQISMGPSLDGSSGKALPTRKPPLQPKPVVLTTVPMPSRAVPPSTTVLLQSLVQPPPVSPVVLIQGAIRVQPEGPAPSLPRPERKSIVPAPMPGNSCPPEVDAKLLKRQQRMIKNRESACQSRRKKKEYLQGLEARLQAVLADNQQLRRENAALRRRLEALLAENSELKLGSGNRKVVCIMVFLLFIAFNFGPVSISEPPSAPISPRMNKGEPQPRRHLLGFSEQEPVQGVEPLQGSSQGPKEPQPSPTDQPSFSNLTAFPGGAKELLLRDLDQLFLSSDCRHFNRTESLRLADELSGWVQRHQRGRRKIPQRAQERQKSQPRKKSPPVKAVPIQPPGPPERDSVGQLQLYRHPDRSQPAFLDAIDRREDTFYVVSFRRDHLLLPAISHNKTSRPKMSLVMPAMAPNETLSGRGAPGDYEEMMQIECEVMDTRVIHIKTSTVPPSLRKQPSPTPGNATGGPLPVSAASQAHQASHQPLYLNHP

SEQ ID NO: 26993 - protein, 708 aa, Homo sapiens
LVGGWGGKMAELMLLSEIADPTRFFTDNLLSPEDWDSTLYSGLDEVAEEQTQLFRCPEQDVPFDGSSLDVGMDVSPSEPPWELLPIFPDLQVKSEPSSPCSSSSLSSESSRLSTEPSSEALGVGEVLHVKTESLAPPLCLLGDDPTSSFETVQINVIPTSDDSSDVQTKIEPVSPCSSVNSEASLLSADSSSQAFIGEEVLEVKTESLSPSGCLLWDVPAPSLGAVQISMGPSLDGSSGKALPTRKPPLQPKPVVLTTVPMPSRAVPPSTTVLLQSLVQPPPVSPVVLIQGAIRVQPEGPAPSLPRPERKSIVPAPMPGNSCPPEVDAKLLKRQQRMIKNRESACQSRRKKKEYLQGLEARLQAVLADNQQLRRENAALRRRLEALLAENSELKLGSGNRKVVCIMVFLLFIAFNFGPVSISEPPSAPISPRMNKGEPQPRRHLLGFSEQEPVQGVEPLQGSSQGPKEPQPSPTDQPSFSNLTAFPGGAKELLLRDLDQLFLSSDCRHFNRTESLRLADELSGWVQRHQRGRRKIPQRAQERQKSQPRKKSPPVKAVPIQPPGPPERDSVGQLQLYRHPDRSQPAFLDAIDRREDTFYVVSFRRDHLLLPAISHNKTSRPKMSLVMPAMAPNETLSGRGAPGDYEEMMQIECEVMDTRVIHIKTSTVPPSLRKQPSPTPGNATGGPLPVSAASQAHQASHQPLYLNHP

SEQ ID NO: 26994 - protein, 80 aa, Homo sapiens
MNNAEFFNTREQQPRPLEECRLPPGLGVWLRSRTRSLHSPRGGQGADQGKSAPGQRLTTLHSEVRVVPLSPETQRVLEAP

SEQ ID NO: 26995 - protein, 23 aa, Homo sapiens
LFFLLLLLFLLLLVVVVVVVLNF

SEQ ID NO: 26996 - protein, 26 aa, Homo sapiens
LLCMCIWMGTMWLESRWQSTEGGLYW

SEQ ID NO: 26997 - protein, 32 aa, Homo sapiens
LTSVKAVIFSIFQPYSHPKCGYASSIAPYSNI

SEQ ID NO: 26998 - protein, 28 aa, Homo sapiens
LMAAPHLQLLCSPLPKPYGLPCICIHPV

SEQ ID NO: 26999 - protein, 86 aa, Homo sapiens
LLMPAQNSQLPVSACPPEIKVLQWLSRSHQVISFHPHPKALAVTLLPALTQSLCLCMASCVYSGPKGFLFLFFPQTAQEKHMKNIT

SEQ ID NO: 27000 - protein, 66 aa, Homo sapiens
MNLNPRLRLQVISFHPHPKALAVTLLPALTQSLCLCMASCVYSGPKGFLFLFFPQTAQEKHMKNIT

SEQ ID NO: 27001 - protein, 145 aa, Homo sapiens
LTTTAFPFVSVMSWKKALRIPGDLRVATVTLMLAMLSSLLAEGRDSPVEPTVTISPSRTEALNHHNLLVCSVTDFYPGQIKVRWFRNDQEETAGVVSTPLIRNGDWTFQILVMLEMTPQRGDVYTCHVEHPSLQSPITVEWRLLH

SEQ ID NO: 27002 - protein, 235 aa, Homo sapiens
LTTTAFPFVSVMSWKKALRIPGDLRVATVTLMLAMLSSLLAEGRDSPEDFVFQFKGMCYFTNGTERVRLVTRYIYNREEYARFDSDVGVYRAVTPQGRPDAEYWNSQKEVLEGTRAELDTVCRHNYEVAFRGILQRRVEPTVTISPSRTEALNHHNLLVCSVTDFYPGQIKVRWFRNDQEETAGVVSTPLIRNGDWTFQILVMLEMTPQRGDVYTCHVEHPSLQSPITVEWRLLH

SEQ ID NO: 27003 - protein, 280 aa, Homo sapiens
LTTTAFPFVSVMSWKKALRIPGDLRVATVTLMLAMLSSLLAEGRDSPEDFVFQFKGMCYFTNGTERVRLVTRYIYNREEYARFDSDVGVYRAVTPQGRPDAEYWNSQKEVLEGTRAELDTVCRHNYEVAFRGILQRRVEPTVTISPSRTEALNHHNLLVCSVTDFYPGQIKVRWFRNDQEETAGVVSTPLIRNGDWTFQILVMLEMTPQRGDVYTCHVEHPSLQSPITVEWRAQSESAQSKMLSGVGGFVLGLIFLGLGLIIRQRSQKGPQGPPPAGLLH

SEQ ID NO: 27004 - protein, 294 aa, Homo sapiens
LPILPCPNSIPGVHQIHQVRAVLTTTAFPFVSVMSWKKALRIPGDLRVATVTLMLAMLSSLLAEGRDSPEDFVFQFKGMCYFTNGTERVRLVTRYIYNREEYARFDSDVGVYRAVTPQGRPDAEYWNSQKEVLEGTRAELDTVCRHNYEVAFRGILQRRVEPTVTISPSRTEALNHHNLLVCSVTDFYPGQIKVRWFRNDQEETAGVVSTPLIRNGDWTFQILVMLEMTPQRGDVYTCHVEHPSLQSPITVEWRAQSESAQSKMLSGVGGFVLGLIFLGLGLIIRQRSQKGLLH

SEQ ID NO: 27005 - protein, 68 aa, Homo sapiens
LILGGARTDSGALCSEIMHLPPICPSPFYVYIINPHCQGHCPETPLRPYSFQPQIIYFSVVQPYSYKS

SEQ ID NO: 27006 - protein, 297 aa, Homo sapiens
LTEFYELILKRLTILLSHFFPFSRMGSGWVPWVVALLVNLTRLDSSMTQGTDSPEDFVIQAKADCYFTNGTEKVQFVVRFIFNLEEYVRFDSDVGMFVALTKLGQPDAEQWNSRLDLLERSRQAVDGVCRHNYRLGAPFTVGRKVQPEVTVYPERTPLLHQHNLLHCSVTGFYPGDIKIKWFLNGQEERAGVMSTGPIRNGDWTFQTVVMLEMTPELGHVYTCLVDHSSLLSPVSVEWRAQSEYSWRKMLSGIAAFLLGLIFLLVGIVIQLRAQKGYVRTQMSGNEVSRAVLLPQSC

SEQ ID NO: 27007 - protein, 43 aa, Homo sapiens
LCVLLQVTKYLNRRGLRRDLNSSCPTNSISAFLLTSCENYSSG

SEQ ID NO: 27008 - protein, 231 aa, Homo sapiens [sequence omitted]

SEQ ID NO: 27009 - protein, 198 aa, Homo sapiens
MIGSGLAGSGGAGGPSSTVTWCALFSNHVAATQASLLLSFVWMPALLPVASRLLLLPRVLLTMASGSPPTQPSPASDSGSGYVPGSVSAAFVTCPNEKVAKEIARAVVEKRLAACVNLIPQITSIYEWKGKIEEDSEVLMMIKTQSSLVPALTDFVRSVHPYEVAEVIALPVEQGNFPYLQWVRQVTESVSDSITVLP

SEQ ID NO: 27010 - protein, 56 aa, Homo sapiens
VPFPRTSADAVVDWSSLPWLLLHQEVGKPRHDRVGIGWLWRRRWSFFYCHMVRAVF

SEQ ID NO: 27011 - protein, 63 aa, Homo sapiens
LRKHRRGGIGSHCHHRHRLTCSSEDPGLTSACRTSSWPLGLGLPPPRPAERALPWLWRSTPGR

SEQ ID NO: 27012 - protein, 80 aa, Homo sapiens
MACVVLRLRTASVGLWVSDEVPRLQEVEGPTGEVGRAGVLIQGCLSPEPRFILPPWGGGWPQGRGEALQCGVEPHRGALG

SEQ ID NO: 27013 - protein, 168 aa, Homo sapiens [sequence omitted]

SEQ ID NO: 27014 - protein, 636 aa, Homo sapiens
MWKSWKLRTDVRVREGAGGSPCASSQPGSRGPCFLPGLSSQEVSRRRQFLREHAAPFSAFLTDSFGRQHSYLRISLTEKCNLRCQYCMPEEGVPLTPKANLLTTEEILTLARLFVKEGIDKIRLTGGEPLIRPDVVDIVAQLQRLEGLRTIGVTTNGINLARLLPQLQKAGLSAINISLDTLVPAKFEFIVRRKGFHKVMEGIHKAIELGYNPVKVNCVVMRGLNEDELLDFAALTEGLPLDVRFIEYMPFDGNKWNFKKMVSYKEMLDTVRQQWPELEKVPEEESSTAKAFKIPGFQGQISFITSMSEHFCGTCNRLRITADGNLKVCLFGNSEVSLRDHLRAGASEQELLRIIGAAVGRKKRQHAGMFSISQMKNRPMILIELFLMFPNSPPANPSIFSWDPLHVQGLRPRMSFSSQVATLWKGCRVPQTPPLAQQRLGSGSFQRHYTSRADSDANSKCLSPGSWASAAPSGPQLTSEQLTHVDSEGRAAMVDVGRKPDTERVAVASAVVLLGPVAFKLVQQNQLKKGDALVVAQLAGVQAAKVTSQLIPLCHHVALSHIQVQLELDSTRHAVKIQASCRARGPTGVEMEALTSAAVAALTLYDMCKAVSRDIVLEEIKLISKTGGQRGDFHRA

SEQ ID NO: 27015 - protein, 410 aa, Homo sapiens
VGPSHQADFSTRGTIPASPTLQSPNMWKSWKLRTDVRVREGAGGSPCASSQPGSRGPCFLPGLSSQEVSRRRQFLREHAAPFSAFLTDSFGRQHSYLRISLTEKCNLRCQYCMPEEGVPLTPKANLLTTEEILTLARLFVKEGIDKIRLTGGEPLIRPDVVDIVAQLQRLEGLRTIGVTTNGINLARLLPQLQKAGLSAINISLDTLVPAKFEFIVRRKGFHKVMEGIHKAIELGYNPVKVNCVVMRGLNEDELLDFAALTEGLPLDVRFIEYMPFDGNKWNFKKMVSYKEMLDTVRQQWPELEKVPEEESSTAKAFKIPGFQGQISFITSMSEHFCGTCNRLRITADGNLKVCLFGNSEVSLRDHLRAGASEQELLRIIGAAVGRKKRQHAGMFSISQMKNRPMILIGG

SEQ ID NO: 27016 - protein, 71 aa, Homo sapiens
VSAIGVRGLCFRGNLVTINFQLKETKSSMTAPGLLKMSRICINIQQESIIVCPSSRAAKNGGIITSSKATL

SEQ ID NO: 27017 - protein, 7 aa, Homo sapiens
LKVIPDS

SEQ ID NO: 27018 - protein, 18 aa, Homo sapiens
VGRRREAADLKKMVIPDS

SEQ ID NO: 27019 - protein, 12 aa, Homo sapiens
MGTWGEDVRRQI

SEQ ID NO: 27020 - protein, 171 aa, Homo sapiens
VYRALDVLQMEEEDVLKFLAAGIHLGGTNLDFQMKQYIYKKKCDGVYIINLKRTWEKLLLAACAIVAIENPADVRVISSRNTGQRAILKFAAATGATPIAGRFTPGIFTNQIQATFQEPQHLFFTDSRADHCLSQRHLMLTYIPLLHVIQILRCAMWTLPSHARRELTQWV

SEQ ID NO: 27021 - protein, 369 aa, Homo sapiens [sequence omitted]

SEQ ID NO: 27022 - protein, 42 aa, Homo sapiens
LQCCSARKFEDLQKSIHGLHKHCIKRHSRPVWARGGHERKIP

SEQ ID NO: 27023 - protein, 68 aa, Homo sapiens
LNLFCLAYKVALKPHFPLNIVSVVQEYGRLNTMLEPILLPSLVMPPLRPPRFYSFFNFQLLLGAFPDH

SEQ ID NO: 27024 - protein, 37 aa, Homo sapiens
MWTAVLQCQVITLIMYLLGSGAVSSTLLLTCTTLFST

SEQ ID NO: 27025 - protein, 226 aa, Homo sapiens
LGPVAYRPLLAEAVQTFPPAVPAPRQHLSTLLFSPPPPAGPGSAGCGREDAGPGAVSPSAVRRAAKRLEGGERHTKNAVGGGGERGRQLLPAPAGATAGRACSEAAQTMRPGSSPRAPECGAPALPRPQLDRLPARPAPSRGRGAPSLRWPAKEVGPRPQIPATCEPGKVCGASAGRRDAARPSRPRSSRVTFSTRRQPGPQRGRWGLRGGPESVRGLPHLGLREH

SEQ ID NO: 27026 - protein, 238 aa, Homo sapiens
LGPVAYRPLLAEAVQTFPPAVPAPRQHLSTLLFSPPPPAGPGSAGCGREDAGPGAVSPSAVRRAAKRLEGGERHTKNAVGGGGERGRQLLPAPAGATAGRACSEAAQTMRPGSSPRAPECGAPALPRPQLDRLPARPAPSRGRGAPSLRWPAKEVGPRPQIPATCEPGKVCGASAGRRDAARPSRPRSSRVTFSTRRQPGPQRGRWGLRGGPESVRGLPHLGLRISGTPLGIFSSWSL

SEQ ID NO: 27027 - protein, 381 aa, Homo sapiens
LNVISSLLKCFSRKLPESLFTNDKYADFIEANRKEEPLDRLKTLKRLIHDLPEHHYETLKFLSAHLKTVAENSEKNKMEPGNLAIVFGPTLVRTSEDNMTHMVTHMPDQYKIVETLIQHHDWFFTEEGAEEPLTTVQEESTVDSQPVPNIDHLLTNIGRTGVSPGDVSDSATSDSTKSKGSWGSGKDQYSRELLVSSIFAAASRKRKKPKEKAQPSSSEDELDNVFFKKENVEQCHNDTKEESKKESETLGRKQKIIIAKENSTRKDPSTTKDEKISLGKESTPSEEPSSPHNSEHNKSPTLSCRFAILKDSPRSLLAQKSSHLEETGSDSGTLLSTSSQASLARFSMKKSTSPETKQRVFGQRQHHHLRLFHHIVCCILD

SEQ ID NO: 27028 - protein, 179 aa, Homo sapiens
LLAAHDARREVHIKRMEERKALSTSPPGDSLASVPFIDEPTSPSIDHDIAHIPASAVISASTSQVPCIATVPPSLTTSVPLICRQLSHDHESVGPHSLNAQPNSKTERSKSYDEGLDDYREDVKLSFKHVSSLKGIKVADSQKSSEDSGSRKDSSSEAFSDAAKEGWLHFRSLVTDNGK

SEQ ID NO: 27029 - protein, 32 aa, Homo sapiens
MDMKPTDIEGWPGAVAHACNPSTLGGQGGWIT

SEQ ID NO: 27030 - protein, 13 aa, Homo sapiens
LSWKFQSCNDFFS

SEQ ID NO: 27031 - protein, 51 aa, Homo sapiens
VQFGLMKGKGFVWKNALECDISARMLKYRFPAGTMALSSVAQWSSSEDAKG

SEQ ID NO: 27032 - protein, 9 aa, Homo sapiens
VKIMNVECD

SEQ ID NO: 27033 - protein, 11 aa, Homo sapiens
LSVNSVLSVDE

SEQ ID NO: 27034 - protein, 14 aa, Homo sapiens
LTLLTVNSVLSVDE

SEQ ID NO: 27035 - protein, 69 aa, Homo sapiens
VQFGLMKGKGFVWKNALECDISARMLKYRFPAGTMALSSVAQWSSSEDAKIHEKTSRTSGRIFNGKSLG

SEQ ID NO: 27036 - protein, 39 aa, Homo sapiens
VVGTMALSSVAQWSSSEDAKIHEKTSRTSGRIFNGKSLG

SEQ ID NO: 27037 - protein, 37 aa, Homo sapiens
LECDISARMLKYRFPAGTMALSSVAQWSSSEDAKVRA

SEQ ID NO: 27038 - protein, 50 aa, Homo sapiens
VQFGLMKGKGFVWKNALECDISARMLKYRFPAGTMALSSVAQWSSSEDAK

SEQ ID NO: 27039 - protein, 38 aa, Homo sapiens
LLASGMCLSGGGKTTLIGAEGTMALSSVAQWSSSEDAK

SEQ ID NO: 27040 - protein, 20 aa, Homo sapiens
VVGTMALSSVAQWSSSEDAK

SEQ ID NO: 27041 - protein, 47 aa, Homo sapiens [sequence omitted]

SEQ ID NO: 27042 - protein, 21 aa, Homo sapiens
LLASGMCLSGGGKTTLIGAEG

SEQ ID NO: 27043 - protein, 28 aa, Homo sapiens
VTATGSEFWREEPLIGHGRRTCWPPACA

SEQ ID NO: 27044 - protein, 93 aa, Homo sapiens
LPKTLKKKQRSFAELKIKHLRKKFAQKVLVKARRKLICEKLKHFHKKYTQMDRMEIRMARMARKAGNLYIPAESKLAFVIRIRSSNGVHTKVF

SEQ ID NO: 27045 - protein, 28 aa, Homo sapiens
VVCMERFSLKSVCGLHLQDSTSTDSKKT

SEQ ID NO: 27046 - protein, 65 aa, Homo sapiens
LPGGGCEPGRRGEEEAEKDAKFSGELSASESEGSRNEENLQELPRTVTCLIPCSHPCSMNKVDTH

SEQ ID NO: 27047 - protein, 60 aa, Homo sapiens
VPFREARRSPSWGSWSMAGCRSQPYPMGRRLRPSENSSTAHEGRQCWGTGRPLRSCWPGC

SEQ ID NO: 27048 - protein, 118 aa, Homo sapiens
LLYSSERVEASSWPLSISNVLVLPLLRTVCELWLPSHSPYEGVTSICSSYQSKRIGFIQNRQFSDFRKCAWSTRFIEGKNPVWNIKISIGCSYQPQSKLHFQAVFLGEVMEGRKKKNR

SEQ ID NO: 27049 - protein, 76 aa, Homo sapiens [sequence omitted]

SEQ ID NO: 27050 - protein, 52 aa, Homo sapiens
LALNPASISVLIIAWMFRAAIQCEFSKQEFMDGMTELGCDSIEKLKAQIPKM

SEQ ID NO: 27051 - protein, 56 aa, Homo sapiens
LILILTLLLLPLPTSNSPVFAFFSPLQNISRILSLHFKIYPESNHLSPPTATSLVL

SEQ ID NO: 27052 - protein, 438 aa, Homo sapiens
VLVMFKTLPEKAAFKALKRTLQLIAPLHDIVAYLVSFAKLGNCPACFEFPRSPNPLRGDWGGTEGIGSELQELQNMIDSLQSPQDPIRVAQALLLRREVIFLQFDAAVRHLIRRTFLAAGNVPAYQSVTDGMCHGLPALSNSLRKSIFASQLSLPQPLDPRSLQAFELFPWRAFLEDGGPFPVMSNSPDTLEYNMQLCLCGLSDRDRKVAHGELVGVQLLLEDVLSSYHVTMEAPQRQQATLGKNTQPDWSKVPGFRSQFRSSPKTSELLEGLCDAVMSFALLRSFLILWKQLEVLKEHWGRLKLQGQDINSVSLHKRFSELYETDVLYPSMKAIARQMGKEDEFEGFIVNNQSVLPPSGASEVEIKTHQLQKLLENCEIQMIQEVLRKVNREMTLVLSEKCKEECSLPTDLWKHQVMKENFSVSRPQIVEKFIQRLM

SEQ ID NO: 27053 - protein, 99 aa, Homo sapiens
VFGAVLAAMQDWQELRCSHLPRRPPFHIQQRRRGQPLRRFFTRLRPGHAQVHVHFSGYQVATYLKWCESYSFGTVVDFQIGKSKGPKRQLTGDHALGFS

SEQ ID NO: 27054 - protein, 46 aa, Homo sapiens
MQDWQELRCSHLPRRPPFHIQQRRRGQPLRRFFTRCILVVTRLPRI

SEQ ID NO: 27055 - protein, 106 aa, Homo sapiens
MKKGIAFPTSISVNNCVCHFSPLESGQDYILKEGDLVKIDLGVYVDGFIANVAHTFVVDVAQGTQVTGRKADVIKAAHLCAEAALRLVKPGNQNTQVTEAWNKVAQ

SEQ ID NO: 27056 - protein, 75 aa, Homo sapiens [sequence omitted]

SEQ ID NO: 27057 - protein, 20 aa, Homo sapiens
LHQLYILDLSLEQRRATLGY

SEQ ID NO: 27058 - protein, 19 aa, Homo sapiens
MELQQTAQELYITSSFCLS

SEQ ID NO: 27059 - protein, 76 aa, Homo sapiens
MKVKFNQSTKAKNIFTGPQKMNSNLLPLNAFSTVWKMCKGNGTAFSISNPSKCCQNKRIPTKSPREIYLSVWYGND

SEQ ID NO: 27060 - protein, 31 aa, Homo sapiens
VQLMSKGEYTYPRRDIKQPGSLLQERNPSES

SEQ ID NO: 27061 - protein, 100 aa, Homo sapiens
LTEKAKDFFQAENKSRLDASSLFIVAGKLRPPRTRNNKARKTESEPRGLLATGRGGSSMETGERARLILILVLQLLLRIRRNRQQRCRRVLSHRSLFPRM

SEQ ID NO: 27062 - protein, 219 aa, Homo sapiens
LTEKAKDFFQAENKSRLDGCDLRGGKLNFKTTPMDADSDVALDILITNVVCVFRTRCHLNLRKIALEGANVIYKRDVGKVLMKLRKPRITATIWSSGKIICTGATSEEEAKFGARRLARSLQKLGFQVIFTDFKVVNVLAVCNMPFEIRLPEFTKNNRPHASYEPELHPAVCYRIKSLRATLQIFSTGSITVTGPNVKAVATAVEQIYPFVFESRKEIL

SEQ ID NO: 27063 - protein, 51 aa, Homo sapiens
LYQELPPEIKERSPPLSPEEKTKIEKSPAPQKVNVFEHTYYICTLIFTLSG

SEQ ID NO: 27064 - protein, 64 aa, Homo sapiens
MVQFEIFETIRTDHFLATFYIGILEFLGEDMKVILRPCRWARKDVRPWFLFKSNQNSLASVGFI

SEQ ID NO: 27065 - protein, 185 aa, Homo sapiens
LSGMTSYAKRVSYPPRKELEELEEEAEEEQRILQQSVVKTYEDMTLEELEDHEGEFNEEDECAIEMYRQQRLAEWKATKLKNKSGKVLEISGKDYVQEVTKAGEGLWVILHLYKQGIPLCALINQHLSGLARKFPDVKFIKAISTTCIPNYTDRNLPTIFVYLEGDIKAQFIGPLSVWRHEPDKR

SEQ ID NO: 27066 - protein, 68 aa, Homo sapiens
LRFFSPQKIKRIDNLLKYFYNLMRKSLKFSIQIKQFKYFKKKGKVDSDTEGKKKLIQFYGKGNPCNFT

SEQ ID NO: 27067 - protein, 12 aa, Homo sapiens
MLFLPFFTAHRM

SEQ ID NO: 27068 - protein, 19 aa, Homo sapiens
LAGFGGGRVTAATPERRLS

SEQ ID NO: 27069 - protein, 31 aa, Homo sapiens
MRLTALFFLVNFMKSPFHSTGTCLKELCRWC

SEQ ID NO: 27070 - protein, 90 aa, Homo sapiens
LGQNPPQDFGSRALPPTGGEGKMWGLLPPAGLADVCFCFHAAQQCSRWSLWKHRLRQGLLCRSATTVMDRVIEAHTSPLSQEEPAKLGHL

SEQ ID NO: 27071 - protein, 163 aa, Homo sapiens
LGGGSGGAGGMGGITAVVVNQRLLSLLNLEVDPNIQAVQEQEKEKEQIRTLNNKFASFIGKVRFLEQQNNMLETKWSLLQQQKMAWSNMGNMFKSYINNPRGQPDTLVQEKLKLEAELGNMQGLVEDFKNKYKDEINKCTEMENEFILIRKDMDDAYVNKVEL

SEQ ID NO: 27072 - protein, 108 aa, Homo sapiens
LRRAPSAGAPGSRFVAEGSTRDAPPVAAVASFGVRDLLRGWKAARRRGALHSPGGKPARTRVRTHGAAGGRGGSGPRGRRASREAILLHLPVILKANRSQTRAQRLSK

SEQ ID NO: 27073 - protein, 192 aa, Homo sapiens
LADLLKMELSAAAGRRRQAPWREFTGRHRTERSQERGSTPRKERSMGSRQPRKREREPRDCTPTCTNAASVSRSGARRAPGCAGRCITMKNCARAWRELSERACCFQAVPPSNMKQSWLIFLDTTLCSAWLLASSCPRLYAPLISFHCMCFNTVLLFPRLFGPTLSAKIQFNTDLSLRAIAWKCTKDTTTYC

SEQ ID NO: 27074 - protein, 173 aa, Homo sapiens
VTRVGPLLILEPSLGLRSGAPRWREAAGSLGGQAPSAVRSSRAACRAQFLKAGAACGPRACRDLLPEMRAYWPDVIHSFPNRSRFWKHEWEKHGTCAAQVDALNSQKKYFGRSLELYRELDLNRWVRPSPGCTSQWGSLLSPKPDSWIQGSGCRPHCPPAASACALFGYWDHS

SEQ ID NO: 27075 - protein, 105 aa, Homo sapiens [sequence omitted]

SEQ ID NO: 27076 - protein, 128 aa, Homo sapiens
MSLCSACTSPASHQLLLNCQGQTVAKSHSSADAGVSLVSGRWCAWWPEHCSESMFPSQHPVLSSNLADSSGQGRSPAGAHPALCPFHKSPWFPHFPQILPREWSWCGPERPAGCSLGLKAEAALVGKK

SEQ ID NO: 27077 - protein, 159 aa, Homo sapiens
LGVLAASEGLDGCFPRLPCPAWSYGCAQLEFRATWGRARGAGARRGLGRGVGASPAGDAELRRKRCRHLSNRRPLLKIKPRPVAMATTTTAAARGRRKLVQPRDSRLLGRLGARRTRRGTGTPLPGPATFSAGSPEDTRRRGPPQAFLGGLGVETAGLT

SEQ ID NO: 27078 - protein, 216 aa, Homo sapiens
LSSVPASSARDPGTCSQHSLAGALSGVLSPSVPKLPVGHGNPAHVHPVRQASRGPNLWMERRCLHIWGLSQTCLLPRHCRKGAGSCLVSGGWWQETGWGGPGHVLSGDPGSGCLQALAGGATNLADLRLWETGCPRPSACGWLRLLSPSPVLCSKGPLFLSCSGGPFVVKHVPPLLTELSTYCGWARPTLCPCTHGFYHLIRLQLSLSRVCSLSGL

SEQ ID NO: 27079 - protein, 40 aa, Homo sapiens
LAVPEDPFGLDSPRGLGGPRSALMGRPSVPEAASENSNGQ

SEQ ID NO: 27080 - protein, 178 aa, Homo sapiens
LSPSPQDVVRRSLEPTWPSPGPAGAILCHLRQRPEISWPWQGQRTRQPGAGPCLTCAALLLWGFVGCGGGAPIGGRAGGWRDLGPRAPWPRVWGGSWAGREDGMRSPAPMMPMSSGGADQGHPPPPCAALMFLWEPVSGIWGMGVGAVNPCPASCPAPSARPSRPPGANGFVDCLPAS

SEQ ID NO: 27081 - protein, 98 aa, Homo sapiens
LAASPCVGNFKSRVSGSSCPEAEDGGGRLEGRGEEGAGGQELGEQEGRGQENRRTGVREGRGEGEQKRDEGEQEGRRWDRRAGVREQGGRGERAGEQG

SEQ ID NO: 27082 - protein, 418 aa, Homo sapiens
VRRMRELLCSEQGGPADALRSAALPPVPHRSFGWGFRSSPAHTPCGWGAWGRCNGRAWGQDRWEGRGWPASVPGGLTIGVEVTSGPAAHRAQGYHEGPALSSGVSECLGESRPGEDGGTGPALQECIVGTLPPPRPRREGRSLPQSGRCTHLGAPHPCPPERALPLSLGAWPGPPGGPSVSAPKDIRSVRPISLVRPVLPATLSHGIPWPVACRECFSGGVPTPWLICPRLAGDIRSTANLSRSQGRGTHLAFVSSPQALRTQAFQVLLQPLACVLKATVQAPGPPGLLDGTADDATTVDTLLASKSSCAGLLCRTLAHLEELQPLPQRPSPWPQASLLGATVTVLRLCDGSAAPASSVGGHLCGTLAGCVRVQRAALDFLGTLSQGTGPQELVTQALAVLLECLESPGSSPTVRWWG

SEQ ID NO: 27083 - protein, 74 aa, Homo sapiens
VPFNEMPAESGGFGPHLERRLARRVEWLGWPRQGKDPGFFFPRWGRDKGRTCPSGQQYQNLGRTGFNAELRETV

SEQ ID NO: 27084 - protein, 182 aa, Homo sapiens
LQHRSVAVLGWPAGWAAARARPAMQGGNSGVRKREEEGDGAGAVAAPPAIDFPAEGPDPEYDESDVPAEIQVLKEPLQQPTFPFAVANQLLLVSLLEHLSHVHEPNPLRSRQVFKLLCQTFIKMGLLSSFTCSDEFSSLRLHHNRAITHLMRSAKERVRQVSPKKYTLGMTKIYFNFKIIIF

SEQ ID NO: 27085 - protein, 161 aa, Homo sapiens
VGVGPSEPGAGYNLVVRHFLSPSEMRSIRVGVTRFSRCRPSPLSLIRKGNSLTPSTSRVRQCLALLRLAHGAHPLTCAHCLALPSEMNPVPQMEMQKSPVFCVAQADCCRPELFLFGHLASSPGIFLIDPGPGKEMNEDATLCPEHISHSMIKDLWLGQLL

SEQ ID NO: 27086 - protein, 16 aa, Homo sapiens
MCDTSSWDANFCAKKN

SEQ ID NO: 27087 - protein, 41 aa, Homo sapiens
LKRKKSRIRKKSITIKKEGSQVNEMWSTHTKENKKWKNANH

SEQ ID NO: 27088 - protein, 61 aa, Homo sapiens
LSSPMEIYLHLPYPYGLSLILLARSLTVLCGYTVLPMTTKESIRNIFFFIINFQDLLSSST

SEQ ID NO: 27089 - protein, 495 aa, Homo sapiens
LYCTPLKKTLPLIYQYKKDPLRGGGHFCVMATSLLGEEPRLGSTPLAMLAATCNKIGSPSPSPSSLSDSSSSFGKGFHPWKRSSSSSSASCNVVGSSLSSFGVSGASRNGGSSSAAAAAAAAAAAAAALVSDSFSCGGSPGSSAFSLTSSGGSSAHSQDGSHQPVFISKVHTSVDGLQGIYPRVGMAHPYESWFKPSHPGLGAAGEVGSAGASSWWDVGAGWIDVQNPNSAAALPGSLHPAAGGLQTSLHSPLGGYNSDYSGLSHSAFSSGASSHLLSPAGQHLMDGFKPVLPGSYPDSAPSPLAGAGGSMLSAGPSAPLGGSPRSSARRYSGRATCDCPNCQEAERLGPAGASLRRKGLHSCHIPGCGKVYGKTSHLKAHLRWHTGERPFVCNWLFCGKRFTRSDELQRHLRTHTGEKRFACPVCNKRFMRSDHLSKHVKTHSGGGGGGGSAGSGSGGKKGSDTDSEHSAAGSPPCHSPELLQPPEPGHRNGLE

SEQ ID NO: 27090 - protein, 537 aa, Homo sapiens
LYCTPLKKTLPLIYQYKKDPLRGGGHFCVMATSLLGEEPRLGSTPLAMLAATCNKIGSPSPSPSSLSDSSSSFGKGFHPWKRSSSSSSASCNVVGSSLSSFGVSGASRNGGSSSAAAAAAAAAAAAAALVSDSFSCGGSPGSSAFSLTSSSAAAAAAAAAAAASSSPFANDYSVFQAPGVSGGSGGGGGGGGGGSSAHSQDGSHQPVFISKVHTSVDGLQGIYPRVGMAHPYESWFKPSHPGLGAAGEVGSAGASSWWDVGAGWIDVQNPNSAAALPGSLHPAAGGLQTSLHSPLGGYNSDYSGLSHSAFSSGASSHLLSPAGQHLMDGFKPVLPGSYPDSAPSPLAGAGGSMLSAGPSAPLGGSPRSSARRYSGRATCDCPNCQEAERLGPAGASLRRKGLHSCHIPGCGKVYGKTSHLKAHLRWHTGERPFVCNWLFCGKRFTRSDELQRHLRTHTGEKRFACPVCNKRFMRSDHLSKHVKTHSGGGGGGGSAGSGSGGKKGSDTDSEHSAAGSPPCHSPELLQPPEPGHRNGLE

SEQ ID NO: 27091 - protein, 58 aa, Homo sapiens
LIKIFSPWFESFFSLLLFVIVALRLSVTINFDRLSNQVGYVSCEVVRWFFLFWFGLVF

SEQ ID NO: 27092 - protein, 52 aa, Homo sapiens
VTAREARPRPLAPLVPATPAPGLPPSPRERWDSPRRSWKPGIPFRVPFVLHY

SEQ ID NO: 27093 - protein, 24 aa, Homo sapiens
LDYLITLPYCGGRIVKKNAFETVS

SEQ ID NO: 27094 - protein, 14 aa, Homo sapiens
LPASAVMDHRFSGI

SEQ ID NO: 27095 - protein, 51 aa, Homo sapiens
LARGRIASRSCAALAAAGTPCSALSLGPETSHSPHTPPPQLRFSGGRGEGR

SEQ ID NO: 27096 - protein, 51 aa, Homo sapiens
MSVGRIASRSCAALAAAGTPCSALSLGPETSHSPHTPPPQLRFSGGRGEGR

SEQ ID NO: 27097 - protein, 12 aa, Homo sapiens
LLRAELGARNQP

SEQ ID NO: 27098 - protein, 8 aa, Homo sapiens
LKTLNMPP

SEQ ID NO: 27099 - protein, 76 aa, Homo sapiens
VPVVSFYHSRGVLLKASERASGGSKAVQPGRKVRNIVGKKRHQNHRIERKIIEEMYLPVRVKLAFRGRRGLAFFDI

SEQ ID NO: 27100 - protein, 33 aa, Homo sapiens
LACAGTDTVVLVTRAKIGGKLAWKKQATKGTHR

SEQ ID NO: 27101 - protein, 145 aa, Homo sapiens
MMSPDERRKKTRCLRRPKGRGCQEPWRANSSQPPWCKVPRGEEFWSSAYLERCLNSEPGIVSNSRRSGNRLFRCPGALQTNKQQKQMVTEPAVSFLGVGDDGERGKNRPLAGPWLGEVLRSAGTLRALCVYRPIPAPTTPSLRPR

SEQ ID NO: 27102 - protein, 30 aa, Homo sapiens
MPKERQNGLRNCKSVIQVFLNSELGLATIS

SEQ ID NO: 27103 - protein, 45 aa, Homo sapiens
LTRTSFNRPRLPGTVEGQLLPTALVQSPTRRRVLEQRLPRKMFKF

SEQ ID NO: 27104 - protein, 92 aa, Homo sapiens
LQTNKQQKQMVTEPAVSFLGVGDDGERGKNRPLAGPWLGEVLRSAGTLRALCVYRPIPAPTTPSLRPSLPQRESEHYQLSAHPSHFITKARM

SEQ ID NO: 27105 - protein, 137 aa, Homo sapiens
LQTNKQQKQMVTEPAVSFLGVGDDGERGKNRPLAGPWLGEVLRSAGTLRALCVYRPIPAPTTPSLRPREGHVSMPYRDLKPESLAKFGKKRSPLRAQEPSYSLELFHSRPSLTRVQLKLNIHTHTLTHKLCEPSESK
